United States Patent Application Publication US 2008/0034453 A1 - sequence listing, part 8

SEQ ID NO: 64478 - DNA, 280 bp, Zea mays
atttgccccagatcaatccgtagagcagcttgggttaagttgagtgcttgtcttggatgctcctccaaacggaccagctggacaagcgggtctgcaagcgaccaaacgagatccctatggccggcttatcctgggcgatataattacctctgtgaatgctacaaaggtgacaaactgaagcgacttgtatcggatactggaccagtgcaaagttggagacacggtgaccgtggaggtcttgcgtggcgaccataaagagaagatccctgtggtcctggaa

SEQ ID NO: 64479 - DNA, 287 bp, Zea mays
cctcttactaggaaatcaagaaagctattaaggctgcttctgagggcccactcaagggtattatgggctacgtggaggaggatctggtttccaccgacttcaccggccacagcaggtcgagcatcttcgacgccaaggccgggattgccctgaacgaccacttcatcaatctcgtctcttggtacgacaacgagtggggctacagcaaccgcgtcgtcgacctgatccgccacatgttcaagacccagtagggagagatatttctgcctccctatcgtgggtcgtcc

SEQ ID NO: 64480 - DNA, 287 bp, Zea mays
catggcgccgccgcagccgaagtcgggcctcttcgtgggcatcaacaagggccatgtcgtcaccaacgcgagtgcttctgcgcccgtcccaccgcaaggggaaagcaacgaagagggtgtccatggtcaggggcctgatcagagaggttgctggctttgctccttatgagaagcgtatcaccgagcttctgaaggttggcaaggacaagcgcgctctgaagcttgccaagagaaagcttggaactcacaagagggcaaagaagaagagagaggagatgatgggcgtc

SEQ ID NO: 64481 - DNA, 289 bp, Zea mays
aatcgagcctcactcgatccatcgcctcgccgcagcacacacgaggccggcggcgccatggccatgaagctggacatgtccgcgctcgagaccaacttcgccaacctgaccgcctccgccggcgacgacacgtacttctccgccgaggcccccgacgtgccgtccatggtgctccccatctgcgacgacttcgacggcttccaggcggccaccaaggatatggtgaagaataagaaggggacgaccacgcttgccttcatcttcgacaagggcgtcatcgtcgccgctg

SEQ ID NO: 64482 - DNA, 287 bp, Zea mays
gcagggttatggatgaaaatgttgtaattcgagcttctgatcttgatattgcttctgttcttggaatgggctttcctaaatacattggtggtcttgtcttctgggctgacactgttggagcaccttacatacattctaagctaagcaagtgggctgaaatttatggccccttcttcaaaccatcatcatatttggaacagcgagctaagagtggtgtaccattgagcgcaccaggagcttcgcagcaaggttcggcgaggtcacgcatgtgaggtgctgtccagcat

SEQ ID NO: 64483 - DNA, 290 bp, Zea mays
gtcaaaggtgtatctggtaaatacttcgctgattgcaatgaagcaacaccgactgctgtcgcgagagactcagagctggcgaagaggctatggtcgttcagcgaagaacttgtcaagatctatgctgatatgtcacagacgacacaggcagcgatgaagaggaaaccacggttacgaaagacgttttccacgacaagtagcgtaatatatgttgctgcgttttctacgttttgtacctgtcctctgggcccgaatggccagtgactgtaatagcacctaagtgcccgaga

SEQ ID NO: 64484 - DNA, 288 bp, Zea mays
ctcttctgggatgagctcgactccattgctactcagagaggaagcagtgttggtgacgcgggcggtgctgctgacagggtgttgaaccagctgcttactgagatggatggcatgaatgccaagaagacggttttcattatcggtgcgacaacagaccagatatcattgaccctgccttgctgaggccaggacgcctcgatcagcttatctacattcctctgcccgatgagcagtccaggcttcagatcttcaaagcctgcctcaggaagtctcctgtggctaaggacg

SEQ ID NO: 64485 - DNA, 287 bp, Zea mays
atcgtgaagtctattgtggatgtctgattgaagcttggagaggggaagtatgtgcttgtgaaggacccagtgaaaccacaggtccggctttatgaagtgccaaatgatgcattcgagaatgactacgttgaggaaccactccctgaggagagcatgtgcgtcccttctccgaggatgttgatgccagcgcgaaggaaatggatgctgccgcagaagcggaggctactggaacaactgcaggcgctgagaagagtggtgatgtcgctgctgtgtgaaggcggtggcta

SEQ ID NO: 64486 - DNA, 288 bp, Zea mays
cttcgtcaagaccctcactggaaagactatcaccctcgaggtggagtcttctgacactcttgacaacgtcaaggccaagatccaggacaaggagggcatccccccggaccagcagcggctcatcttcgctggcaagcagctcgaggatggcgcaccctagccgactacaacatccagaaggagagcactctccacctggtgctccgcctccgtggtggtcagtaagccatggttcattcaagctgctgctgtacctgggcatctgcgtcgtctggtgccctctcgtgt

SEQ ID NO: 64487 - DNA, 275 bp, Zea mays
cagcaagcagttccaggacctgacggcggacgttatcgcccacaccggtttcggaagcagctacaaggagggcaaagaggtgttccatacgcagaagcagctactggcgctcgccatggcgactctcctcaacgtgcagctgccaggatcaagtatctccctaccaagaacaacaggctaaagtgggcgctagaaaagaagatgaagacaacgttcatggcgatcatacagttgcgggtggcatccaatggaaggagtagtggatacggaaacga

SEQ ID NO: 64488 - DNA, 283 bp, Zea mays
aacaagtctcaggagggatcccagttctgtagaggatttggtggcattggtggcatgttgcgctaccagctggatatccgttcttttgatgagctttctgatgatgacgatgtgtatgaagactctgactagcaatcagccaatctcagccagggctggcccatggaaggacgcaacagctcgacctcgccatacctacgcaggagcacacgaaaagcaactatccaaggattaatgggcatgggccagcgtcatcctcttcaagaggagcttaagactaaga

SEQ ID NO: 64489 - DNA, 271 bp, Zea mays
actaattggtgccacagacgcacagagatctgaaccaggaaccatcaggggtgatcttgccattgttgttggaagagacatcattcatggaagtgatggcccagagacagcgaaggatgagatcgctttatggtttgaacccaaggactggtctcttacaccagcaatgcggagaagtggatcaatttaaaagaattaacgagagagtcaatctgttttttttccttcttttgatctcggttttcacataattgccgacagacctaggcac

SEQ ID NO: 64490 - DNA, 285 bp, Zea mays
  unsure (1)..(285): unsure at all n locations
atggcgcacaggaatatgtggtggaggacctccctgggggttacacgccgccgaagatggatccagagcatgagcagcggttgaaggtgttgcagctcatgtagcttgcactttcgcaggtgatggacatgaagtatcgcatctttttgttgcattgcatgtatgtactttttcatgctgtgagcgttattagttggggtaaacatgtattctagtgacggaagtccatgtgcttataatgtacaaatatagaaccacggttaccagtcncaggtggggaatcac

SEQ ID NO: 64491 - DNA, 281 bp, Zea mays
  unsure (1)..(281): unsure at all n locations
gtgaagaacaggcaggtcaaagccaagcaggttactttccacagtacngaaaattccagtactatgaaatttctgccacgagcaactacaactttgagaaacctttcctgtaccttgcaaggaagctggctggtgatccgaaccttcacttgttgaagctgttgctcttaagcctccggaagttaccatcgacatggctatgcagcagcagcatgaagctgagcttgctgcagcagctgcacaacctcttcctgatgacgatgatgatctgatgagtagaa

SEQ ID NO: 64492 - DNA, 286 bp, Zea mays
ttttgagaccaccatccgacctgatgaaggatcttacatgggaggcactttcgttttcacctttcaagtgtccccatcttatcctcatgatcctcagaaggtcaaatgcaagaccaaggtgtaccatccaaatattgatctggaagcaatgtatgtctgaacattctgcgcgaagattggaagcctgtttacaacatcaacactgttatttatggcctgaatcttctttttacgcaaccaaacgacgaggatcctctgaaccacgaagctgcagttgtccttcgtg

SEQ ID NO: 64493 - DNA, 283 bp, Zea mays
gaagcctgcgaagatcggagagtggggtggatacgtcggcgatcgtcgggatctgagggctactccggaccggctgaccgaggtgaaggtcacggcggacaacagcagctgcatccgctccatctccttcatctacatcggagcgatggcaagccgtacgaggaggggccatggggtttcggccatgctggcacggagtacaagattgatctgtgcaggttcgacgagagcttgacggagatctccgggaccacgggcccagcctacaacattgacaatctgg

SEQ ID NO: 64494 - DNA, 280 bp, Zea mays
  unsure (1)..(280): unsure at all n locations
caacaccagaggggagaagaagatgtgcgtggtcggagccatcgacaactacacagcgacgccgtcatggagccggttgttgctggcgatgtccaaaggggggaaggtagggccgaaccggtgcagcgcctgcaggaagagggtggacttacggagacnaatgccggtgtgggaacttgtactgcgcactccaccgctactccgacaagcacgactgcaagttcgactaccggactgctgccagggcggccattgccaaggctaatccggtggtgaaggc

SEQ ID NO: 64495 - DNA, 282 bp, Zea mays
cgcgaagagcggcgtcggcgtggcgtcgatggtagtgatgcggccggagctcgtcatgaagtccatcgtgcccgtggtcatggctggtgtgctcggtatctacgggctcatcatcgccgtcatcatcagcactgggatcaacccaaggccaagccctactacctttttgatggctacgctcacctttcgtccgggcttgcctgtggccttgctgggcttgcagctggcatggccatcggcattgttggtgatgctggagtcagggcgaatgcacaacagccg

SEQ ID NO: 64496 - DNA, 320 bp, Zea mays
gtcgcgcgttagctcagcactcagttcgactcgagagcgtatcagcgagcgagagcagcacacactgcacgcagtcagctaggagaggcagcagcggcggcgatggcggcctccatgatctcctcgtcagctctggcggtggcgcctcagggcctgccgcccctcggccgccgcgcctcctcttcgccgtcgtctgctccaagaagaagatcaagaccgacaagccctacgggattgggggtggcctgaccgtcgacgtcgacgccaacgggagaaagggcaagggcaagggcgtgtaccagttcgtcgacaagtacggc

SEQ ID NO: 64497 - DNA, 281 bp, Zea mays
gcgaggagatgatgaaggaggtgtgcaagaagagcagggaggggtctctcaagtgggcttgacggctatagccgtaggttgccgtgagctggaatatatagctgcctatgtgtctgatataaccaatggggccttggaatctacgggacattctgcaaaaaactatacgacttccggcttgttctacttgatagagaagagaggataacagacttgccactggacaatggtgtccgagctttgttgaggggctgcaccaagcttcggaggtttgctctgta

SEQ ID NO: 64498 - DNA, 91 bp, Zea mays
ctcgagctgctcaagcatcacgagagagttctgtatgtcgatatcgatatccaccatggcgatggagtggaggaggctttccacacaacat

SEQ ID NO: 64499 - DNA, 272 bp, Zea mays
ggctggtgaggtgaaagaaggtgactctgccatcgttgatgtggattcagattgcaaggtgatagtcctgaatggtggtagcggtgttgctgagccactggaacctgctctcagtacctaaccgaggtcaaaatcatcatggtccgaagtatggccatatttacaagtcagctgggtttctcgtgatggtaaaaactagactgacattacttggccgcccattagttgctttatctttcgtttattttcttttttgttggaagtgaggcagt

SEQ ID NO: 64500 - DNA, 278 bp, Zea mays
gatcctcaaagatctcaagaaagagttctgctgcaatggtacagtggtccaggacccagaacttggacaggtcattcagctccagggtgatcagaggaagaacgtctcgaatttcctcgtccaggccggcattgtgaagaagagcacatcaagattcatggtttctgagcaaccgccgggtccatagcaaaccaaccctgcatgcagggccagcttattatatataatatctgaggtggagcatatctatctggctgtgtactgcaagcaggcctagt

SEQ ID NO: 64501 - DNA, 277 bp, Zea mays
gaaggaaataagaagtttctggcaattgataaggcaataggtgaaaatgggtttaaggttgttactttgctacgcttgagtcccctgttacctttctcccttgggaactatctatatggccttacttcagtgaagttcttccgtatgtcttgggcagttggttgggaatgcttccaggttcatgggcttacgtcactgccggtgcattcgtccgagctttaatccaagatgagtcggaaattggtttgggaggaaacgaacagctatggacactggg

SEQ ID NO: 64502 - DNA, 299 bp, Zea mays
gggagttagtgactgggaatgtcccctttgcaaacatgagcgcagtgcaagctgcatttgctgtggttaacaagggcgtgcgaccagctcataccccacgactgcctccctgctcttgcggaggtcatgaccatgtgctgcgacacaaaccctgatgtccgtcccccattcgctgatattgtgatgatgctggaacaggaggatgtcgacgttctgaccactgtccgtaaggctcgcttccgctgttgcatcgcccaaccgatatcgctggactgccggactgagtcgtccgcaatcca

SEQ ID NO: 64503 - DNA, 278 bp, Zea mays
agaaggcgggagtgcttgatgagtaagacgggcttctggggtcgatttgcttctgagttgtgtattttatatcgtcgcaatttcgtggttgtcgtttggttattctgtgaagcagccaagccaggctattgttatgaaaatttgtcgtctgtaagcatgtgaacttccgatgttgccacatgctggatcagtctgaataagtatgtatgcagctctaggtggtcagctgcgtctaccacaatgagcatgggaagagtggagagatatctgtgaaccca

SEQ ID NO: 64504 - DNA, 279 bp, Zea mays
caggacaagatcaggcccctgtggaggcactactttcagaacacacagggacttatttttgttgtagacagcaacgacagggaacgtgttgttgaggctagagatgagctccacacgatgctgaatgaggatgagctgcgtgacgctgtgctgcttgtatttgcaaacaaacaagatcttcccaatgctatgaatgctgctgaaattactgacaagcttggtctgcattccctgcgacacggcactggtacatccagagcacttgtgctacatctggtg

SEQ ID NO: 64505 - DNA, 276 bp, Zea mays
tagatcattgcaattgttggtcttctacgagggcaccccgttccgtgtcaatctgatgaacaacggccacgtcgctggcttctttggccgctctggagattgcctggacgcgatcgggctctacgtgaaccccaactaataactaaaacgatggatcggatcatctgcatgcatgcatatgcagtatgctgcttgcctgcctgtaacgaatatgagtgcatacaataacgcccctgctgctcccatatgcatcagcagtgtgtaccactatatatg

SEQ ID NO: 64506 - DNA, 293 bp, Zea mays
tccatcccaggcctttgaatacatcaaatacaatggtggccttgacactgaggaatcttacgcttaccaaggtgtcaatggaatctgcgagtctaagaatgagaatgttggagtcaaggttttggactcggttaacatcaccctgggtgctgaggatgaactgaaggatgctgttggtctggttcgcccagttagtgttggcttcgaggtgatcactggattcaggctgtacaagagcggagtttacactagcgaccattgtagatctacaccgatggatgtgaaccacgctg

SEQ ID NO: 64507 - DNA, 292 bp, Zea mays
gagaggatctcgcggtggatcgacgacgaggaggagcgcaccaagcgccagggcgagatgggcgtgcggtacgttatcctcgacatgggtgccatcggtagcatcgacacgagcgggacgagcatgctggacgagctcaacaagtccttggacaggaggggaatgcagatcgtgctggcgaagccgggcagcgagatcatgaagaagctggacagctccaaggtgctggagcagatcggccacgagtgggtgttcccgacggtgggcgaggcggtggcgtcgtgcgactacg

SEQ ID NO: 64508 - DNA, 243 bp, Zea mays
ataggcatattattgtgtgtagattaaatgtgtatgaaatccatggaaatggtgaaggatgaaccacgtgcccataaccgtgatgtaggctggcggtgccgtttcttgttcttgatcaccttgacagcaacagggaattctgtgtttcttttgaggacacgtgatgtgcaccatcagtatgaatgtaaccaaagaataagggcctatttagtttatagcttattatgtcatattttgtctaaa

SEQ ID NO: 64509 - DNA, 288 bp, Zea mays
cttcgccggcaggagatttccaccaccaccgccgaaccgcaccgaccctcctcctctctcgcgctatggcccagactgttgtgctcaaggttggcatgtcctgcgagggctgtgttggagctgtcaagcgggtcctcggcaagatggaaggcgtcgagtcctacgacgtagacatcatggaacagaaggtcaccgtgaatggcaatgtgacacctgacgccgtcctgcaaactgtttccaagactggcaagaagacttcgttctgggaggctgacgccgtgacaagtg

SEQ ID NO: 64510 - DNA, 305 bp, Zea mays
gtgttgcagcgtagtaagtcggaattcgctcagagctgtgagctgcgcactttgcctggtctttctccaggacaatgctgctgcgcatggatcatcgcacgttagtacatgaagcgtgtttatgatgagtttgtggagaaggctatggcgctggcattgaagcgcgtcgttggtgatccgttcaggcaaggtgttgaacagggctcgcagattgacgacgagcaattcaacaagatcttgcgctacattaggtatggtgttgccggtggagctacccttgtgacgggtggtgataggttgggtga

SEQ ID NO: 64511 - DNA, 284 bp, Zea mays
  unsure (1)..(284): unsure at all n locations
ttctgatgtcacgaaatcaatttcaaaggccttcggtgttctgatccctgagcagggtatcgctctgagaggactgttcatcattgacaaggagggagtgattcagcactctaccattaataaccttgccattggtcgcagtgtggacgagaccatgaggacccttcaggcattgcagtacgtccaggagaacccagacgaggtctgcccggccggttggaagccaggggagaggtccatgaagcccgaccccnagggaagcaaagagtacttcgcggccgtct

SEQ ID NO: 64512 - DNA, 279 bp, Zea mays
ggtttagataaaaagctcgctcaaaggattcatttcccatctgtgaattggctcatttcctattcgaaatgctccaaggcccttgagtccttttatgagaagtttgatccagatttcattgatattaggattaaagcacgtgaggtgttgcagagggaggacgatctaaatgaaattgtgcagcttgttggtaaagatgcgctggcagaatctgacaagattacactggagtcagcaaagctactgagagaagttatttggcacaaaatgcatttaccc

SEQ ID NO: 64513 - DNA, 291 bp, Zea mays
tcgacttcgctctcaaactcgaggctgcttgcgatatcagaccgtggagtccgggaagatgactaaagatctggcgattgctgtccatggaccttccagcgtcacgagaagtcattacctgaacaccgaggagttcatcgacgcagtcgctactgagctccgatcaagactgggagccaactgagcctacaagaaactttgcatggcgactttgaatgcttcgtcaccgtcaccgatctgctagtcgtcttttctgttatgaagaagtgaatgtgcgtcaccggcgtttcg

SEQ ID NO: 64514 - DNA, 292 bp, Zea mays
gaacatgtgcggtgttgctacgtgtgcatcctaccctattgtcgcatgaggcccttacgaagtgttacatggtctgtttggcatcaataatgcatgttcaacctgagcttggcgatgggttatacagaacggaaactctgtttgtgaatagaaaatcatgaagggaaggagttgaccggacccctgcttgtacgtctccccgactgtgtaggtagattgtcagttggggttccgaagtactctactcatacgtgtgtatgacagtttatttatgaaacaaaatacgcattga

SEQ ID NO: 64515 - DNA, 279 bp, Zea mays
aagcagttgagaatgaaagagagcaagatgatccattgaagctatcagggaaaactagacaacttggcctcattgtgtgcagaggcacggcagtcatgctggtctcaccgactgatgggactgatgagatcgccaaccctttcctcgcggacggagcatagcttgcgcacctcggaacaatatgtccctgtgggaaaagaacccgtttctcgtgtatttgttgtacatgttgctacggttactattgtgctgctgctgagtacttccgttttctttaaa

SEQ ID NO: 64516 - DNA, 295 bp, Zea mays
  unsure (1)..(295): unsure at all n locations
aaacctacgacaccatagatcacctncacgttcccgggtacggcatgtcccagtcggcgctgagcgacngcngtagcgtgcccacgtggctgaagttgacgtctgacgacgtgaaggaacaaatttacaagttggccaagaaaggcctgactccttcccagatatgtgtgattctgagggactcacatggtgtggcacaggtccgttttgtgaccggaaatacaatcttgagaatccttaagtccaaaggcttgcccctgatcttcctgaggatctaaaancattgatcaagaaa

SEQ ID NO: 64517 - DNA, 297 bp, Zea mays
aaaaaaatttagagagagggaatgggacagggaaaggggtatggactttgatttaatgccccctccaggtagcagcaagaaagcaggtacatctatggatgtggatcaaacaattgatccaaatgaaccgacatactgtatatgccaccagatttcatatggtgacatgattgcttgtgacaatgagaattgtggaggaggtgaatggtttcattacacgtgtgtgggtcttacaccagaagtaagattcaaggggaaatggttttgcccaacgtgcaggaatcttcagtgagaggt

SEQ ID NO: 64518 - DNA, 299 bp, Zea mays
aaagaagaaaaggccatcttggtagggtgttccacttgctccaacaatcacggctctcaagagatccatgcgatcctcaaataccctgacataaatatagtctacaaatgcagtgaaaggaacatcagcaaatcataatacagttgtccttggttgtttttagtgtttgtattgtgagtaatagcagacctgccgacgcatgggctctgaatgtggaaaagacgtccaaataaaagaagtgtgccagattttatgtttcgggagttgagagtattttagagaactactggagttgctct

SEQ ID NO: 64519 - DNA, 299 bp, Zea mays
aacagcagctgcatccgctccatctccttcatctacatcggaggcgatggcaaaccgtacgaggaggggccatggggtttcggccatgctggcacggagtacaagattgatctgtgcaggttcgacgagagcttgacggagatctccgggaccacgggcccagcctacaacattgacaatctggtcaagtctctcaaattcgtcaccaacaaacgcgcttacggaccgtacggcagggacgagggcaccccgttccgtgtcaaggtgatgaacaacggccacgtcgctggcttctttgg

SEQ ID NO: 64520 - DNA, 294 bp, Zea mays
ctgaagcagatccacctatattccaccgtgatgttaaggccagcaacattctgttggactccaaattcgttgcaaaggtagccgattttggtctctcgaggcttgctccagtgccagatgtcgaagggacattgccagctcatgtatccactgttgtcaagggcaccccaggctatcttgatccggaatacttcctaactcacaaactgaccgacaagagtgatgtttacagcctgggtgtcgtgttccttgaaatgttaactggtatgaaaccaattgagcatggtaaaaaca

SEQ ID NO: 64521 - DNA, 296 bp, Zea mays
ggatggcgcacagtggctagttgacaacactgacataaagctagtcggaatcgacagtctatcggttgcagcatttgagcacttgatctctgcccatgtggtcttcttcaagaccccggatataatccctgtcgaaggcctgaagctagacaacattgagacgggaatatacatgctgcattgtttacctctcagactggttggagccgagggtgcaccgaccagatgcatcctcatcaagtgatcacccccctgctcttgctggaggtgacattgtatcatgccagctgagctga

SEQ ID NO: 64522 - DNA, 291 bp, Zea mays
cttgcaatcacaacgaacaaaagctctcgatctcaccgacaccgaggaagaagagatcaatggcgtccgagcagggagtcgtgatcgcgtgccacagcaaggctgagttcgacgcccacatgaccaaggcccaggaagccggcaagctggtggtcatcgacttcactgccgcctggtgcggtccatgccgcgccatcgccccactgttcgtcgaacacgccaagaagttcactcaggtcgtcttcctgaaggtggacgtggacgagtgaaggaagtcacgcggcctacgag

SEQ ID NO: 64523 - DNA, 294 bp, Zea mays
attggattcttgttggcgatgtaccatgggagatgttcgctgactcttgccgcaggctcaggatcatgaatggatcagatgcacttggacttgctccaagggcagctgataagtccaagaatcgcaactagaatggttgcttcttacagtccagagcaagagggagatatccagtgactgtagggatctttgtggaagccggaaaacgtctaacagtttcaagaagaattctgccttatggtctgtaccacatgtttttgctgctacgcaagtaaagaactccacgtctgtcaa

SEQ ID NO: 64524 - DNA, 129 bp, Zea mays; identical to SEQ ID NO: 61054

SEQ ID NO: 64525 - DNA, 276 bp, Zea mays
aagcagttgagaatgaaagagagcaagatgatccattgaagctatcagggaaaactagacaacttggcctcattgtgtgcagaggcacggcagtcatgctggtctcaccgactgatgggactgatgagatcgccaaccctttcctcgcggacggagcatagcttgcgcccctcggaacaatatgtccctgtgggaaaagaacccgtttctcgtgtatttgttgtacatgttgctacggttactattgtgctgctgctgagtacttccgttttcttt

SEQ ID NO: 64526 - DNA, 269 bp, Zea mays
gagtaatcaaagttcatgaaaaagataatggagacatcaaatttctgactaaaggagataataatgaagttgatgatagaggcttgtacaaagaaggccagaactggctggaaaagaaggacgtggtgggaagagcaagagggtttataccatatgttggtatggtcaccataataatgaatgactatccaaaattcaagtatgctcttttggctgtaatgggtgcatatgtgttactgaaacgtgaatcctaaaatgagaagcagttc

SEQ ID NO: 64527 - DNA, 280 bp, Zea mays
ttgagatccccagggcagctctggtggctgatgagatagcggacaggctgaattcttctccttcggaacgaacgacctgacgcagatgacctttgggtacagcagggatgatgtgggaaagttcattcccgtctatcttgctcagggcattctccaacatgaccccttcgaggtcctggaccagaggggagtgggcgagctggtgaagcttgctacagagagggagcgcaaagctaggcctaacttgaaggtgggcatttgtggagaacacggtggagag

SEQ ID NO: 64528 - DNA, 276 bp, Zea mays
ctggtagctaccaagaacaaagctgttatccaagctgagttggcagttgagggcttaacatggcatgtcacatgtgttagcatgggcaacccccactgtgtcacatttggggcaaacgagttaaagaccttgcagatcgacgatttaaaactcagcgaaattgggcctaaatttgagcatcatgaaatgtttcctgctcgcacaaacacagagtttgtacaggttttgtctcgctcacacctcaaaatgcgagtctgggaacgtggtgctggagca

SEQ ID NO: 64529 - DNA, 284 bp, Zea mays
ggtccgagtagcaagcttcataaatattgtacgacgttgctgcatttgtaaattagttggatgaggagttgtctttcttggttgatgagagagcagtgctaaaacattttgattggccagagagcaaaacagatgcaataagagaagcagcttttgagtatcaggatctgataaagttacagaacagggtttcatcctttactgatgatccacaacttgcatgtgaagaggctctcaagaagatgtattctttgcttgaaaaagtggagcagagtgtctatgca

SEQ ID NO: 64530 - DNA, 277 bp, Zea mays
agctatcaggaagagaaggatggaagaactaatggcaaaacacggtggcggtggggcaaatcaacaaaatgcaagccaacaaaaagctcaggaagacgcgaaacaggaagctgaggaacgccgacagatgatgcttgctcagatattatcttctgaagccagagaaaggatctcccgcatagctttggtcaaacctgacaaagcaagaggggtggaggatgttctgctgagagctgctcaaactggtggaatatctgaaaaggtgtccgaagaaaga

SEQ ID NO: 64531 - DNA, 283 bp, Zea mays
agaaggcgggagtgcttgatgagtaagacgggcttctggggtcgatttgcttctgagttgtttattttatatcgtcgcaatttcgtggttgtcgtttggttattctgtgaagcagccaagccaggctattgttatgaaaatttgtcgtctgtaagcatgtgaacttccgatgttgccacatgctggatcagtctgaataagtaagtatgcagctctaggtggtcagctgcgtctaccacaatgagcatgaacgtatggagaaatatctgtgaacccattttgt

SEQ ID NO: 64532 - DNA, 285 bp, Zea mays
gatggcacgaacgtggaagatgccttccagtgtattgtaaagaatgctctgaagaatgaaccggaggaagaattgtatgtgccagataccgtggatgtggtaggtggcaaccgggcccagagatcatctggctgctgttaagacatgaggcatccacgaggcgtggtgatcatcatcggctatgcagtgatcaaacaatacctccttaacattgctgggcctccatggttatctacgtgtccgtattccatatgttacctttccagtctcctgctatgtaccttt

SEQ ID NO: 64533 - DNA, 286 bp, Zea mays
cgcacagcaaggctagcaaccccttcgttaacttccagaaggaatccatgggcatcttctggcaggaggacatcatccccttcttccagaacgtgaccattcccaaggattgcgacaccgtccagaagtgctacatctacctctctggacaggtgaaggagaagcttggcaagatcgacccctactttgctaagctcggtgacgccatggtcacctggatcgaggcctgggatgagctgaacccggctggccccgctgccgggaaagacaaggccaagtagatggg

SEQ ID NO: 64534 - DNA, 289 bp, Zea mays
  unsure (1)..(289): unsure at all n locations
tttggcactttgatctatactaattccagaccatatgcngttccaagggttaagataagcttagcatgtgtgtttgcattcatggcgattggatggcccttgatcattctcaaatcaggactagctggatggtttaagttctggttcatgccatggatggtttatcattattggatgagcacttttacaatggtacatcacacagctcctcatataccattcgagtcatctgaagaatggcatgctgcacaagctcaattaagcggcacagttcattgtaactatcctc

SEQ ID NO: 64535 - DNA, 279 bp, Zea mays
cccgcggcaacggcaccggcggcgagtccatctacggcgagaagttccccgacgagaagttcgtgcgtcagcacaccgcccccggtgtgctctccatggccagcgccgggcccaacaccaacggctcccagttcttcatctgcaccgtcgcgaccccttggctcgacggcaagcacgtcgtcttcggccaggtcgtcgagggcatgctcgtcgtcaaggccatcgagaaggtgggcaccgcaacggctccacctccaaggtggtcaaggtcgctgactg

SEQ ID NO: 64536 - DNA, 291 bp, Zea mays
gcaacatgaaattcgctctgaatggttgtgtaatcattggcacccttgatggagctaatgttgaaataagagaggaggttggagaagataattttttccttttcggtgccaaagccgatgaagttgctgggctgaggaaggacagagaaaatggcctgttcaaactcagacccacgttttgaagaagccaagcagtttataaggagtggcgcttttggcatctatgactatgaacctctcttggattcccttgaagggaattctggatttgggcgtggtgattatttcctt

SEQ ID NO: 64537 - DNA, 265 bp, Zea mays
gccgggaaagagcttacgcttctgaggttatgggcgacccgttcgtgcccgggcgccatcggttcagctcaaaggcctcagctacgcttactccgacgagaacctcgacgacaagagcgagtttctgctcatctccaaacccgtgctcaagaaggtgcccgtgctcatccaccacggcaagcccgtctgtgagtcccatctcatcgtgcagtacgtcgacgaggctttccccgccgccgcacctaatttccttccagacaacata

SEQ ID NO: 64538 - DNA, 288 bp, Zea mays
cacgagggggacccgtccacggcgccctcgctcacgctcaccggcaggaagaaggaggccgacaagctgcagacctccgacggctgggacaagttcaccgggggattcttcttcggcggcatctccggcgtgctctgggcctactttctcctgctacgtgctcgagctcgcctacttcttcatgtagaaatcatcaaagatgcgtatatatatagctccgggcgatcctcctctctagctgcatggtatgtaggtggtgtggtccttgtctcatttcactccagcggt

SEQ ID NO: 64539 - DNA, 98 bp, Zea mays
aattgacagagatgcaagcccgggccatttttgaagctgctatagcaatgaccaactagggtgttcaagtgttcccagagataatggatcctcttgtt

SEQ ID NO: 64540 - DNA, 288 bp, Zea mays
ccagcgtaccctcctgcccgtccaccgagacgtcaagcggatgaatactcgggtgatgagagggaggagtcagagtacgaaacggattgtgaggatatcgaacattcaccgcctcgtggaagaagggaggacgagctggatgaggaggaagaatatgaggaagatgttgaagaagaagaagaagcgcctctgtcggatgaagaaatggaggcaccgaaacgtaagagagaatcagggggtggtgggcaaaggcgcgaggagctggtgtctgaggaggaggacgaggac

SEQ ID NO: 64541 - DNA, 294 bp, Zea mays
caacaaacgtacttacggaccgtacggcagggacgatggcaccccgttccgtgtcaaggtgatgaacaacggccacgtcgctggcttctttggccgctctggagattgcctggacgcgatcgggctctacgtgaaccccaactaataactaaaacgatggatcggatcatctgcatgcatgcatatgcagtatgctgcttgcctgcctgtaacgaatatgaatgcataaaataacgcccctgctgctcccatatgcatcagcagtgtgtaccactatatatgttatatactgta

SEQ ID NO: 64542 - DNA, 287 bp, Zea mays
cccctccacatgaaattggtgctacctttgaggacattggagctttagaaagtgtcacagatactctgaaggagttggtgatgcttcctttgcaaagacccgaacttttcaaccgaggacaacttatgaagccatgtaaaggcttttactttatggaccacctggtacggggaagacaatgctggctaaggctgtggcaactgaggctggtgctaatttcataaacatatcgatgtcaagcatctcttcaaagtggcttggtgaaggagataaatctgtgaaagctg

SEQ ID NO: 64543 - DNA, 245 bp, Zea mays
attctatccatcctgctggccaacgacacgagcagctccacaatcctcttactgaacaaggctggtcctgagatcactgaacttttaacgcaatgctctatcggcattgctggaactggactggctattctcctgtcagttatgtgcaagatgtctatgaccgcatgaggactccttttgcttctgcccgactgcttagcaccagcgtcggattcggactcttctggctatcctgggcagtcaac

SEQ ID NO: 64544 - DNA, 282 bp, Zea mays
gtgatgaacaacggccacgtcgctggctacaacattgacaatctggtcaagtctctcaaatttgtcaccatcaaacgttcttacggaccgtacggcagggacgagggcaccccgttccgtgtcaaggtgatgaacaacggccactcgctggcttctttggccgctctggagattgcctggacgcgatcgggctctacgtgaaccccaactaataactaaaacgatggatcggatcatctgcatgcatgcatatgcagtatgctgcttgcctgcctgtaacga

SEQ ID NO: 64545 - DNA, 283 bp, Zea mays
tttttcgacaaggatggcaacggtttcatcgagcccgaggagcttcaggaagccctgatggaggacgggggagctgataccatggacgtggtcaatgacatattgcaagaagttgacacagacaaggatgggaaaattagctacgacgaatttgtagcgatgatgaaaactggcacggactggaggaaggcatcgcggcactattcgagagggcgcttcaatagccttagcataaagctgataaaagacgggtctgtacagctgggtagcgagtgaggttgca

SEQ ID NO: 64546 - DNA, 287 bp, Zea mays
gtgcccaccaaaagtatactaccattctggcggacttcggctgaacccgaacctgtacgagagcgggaaagtgtgcctgagccttctgaacacctggtggggcaaggggtgcgagaagtggggcaagtcgagctccagcatgctgcaggttctggtctccatccagggcctcgtgctgaatgacaggccatacttcaatgagccaggatccaagaactcggctgaaacgacaggtggtgagaggtgttccctggcttacaatcagacggccttcgtcagatcatgca

SEQ ID NO: 64547 - DNA, 286 bp, Zea mays
  unsure (1)..(286): unsure at all n locations
tgatcaaaggatgggacgagggagttctgtccatgcangagcgtgatcttgctcgtatccagtgcacgcctgattatgcttatggagccggcgggttcccagcctggggaattcaaccaaactcagtgcttgtgttcgagattgaagtcctcagtgcccagtaattcgcatctgtcagctatggaaacgttggccatgcttctcaagtaatgaaataattccgttgtcacctcatgctacatacagcagactggtgttacgagttaaatcctgtgaaactttagca

SEQ ID NO: 64548 - DNA, 283 bp, Zea mays
gcggccttgcgtggctgatcttgggagtcccccgagcgacacctgctgtacaaggaggagctggagaagatgaaggagatggcgccggacaacttccggctggacttcgcggagagccgggagcagacgaacgcggcgggggagaagatgtacatccagacgcgcatggcggagtacagggaggagctgtgggagctgctgaagaaggacaacacctacgtctacatgtgcgggctcaagggcatggagaagggcatcgacgacatcatgctcaaccttgcag

SEQ ID NO: 64549 - DNA, 254 bp, Zea mays
cttcgccgttgtctaccagatcatcccatggcgtcggagaagaaccagtcgaacccgatgcgggagatgaaggtccagaagctcgtgctcaacatctccgtcggcgatagcggtgatcgcctcacccgcgccgccaaggtactggagcagctgagtggccagtcaccggtattctccaaggcaaggtacactgtgaggtcgtttgggatccggcgcaatgataagatcgcatgctatgtgacggtgcggggtga

SEQ ID NO: 64550 - DNA, 283 bp, Zea mays
caacaacgtcaagagtgagctcaagaggatatcagcacacaaagccaggcaggctacccgggaggagctcctggagtctggagtggctgatactctcgcggtgtctactgatcagaggggaagattgatgatgacgactgaaagactgaagcagtccactgacagaattaaagagagccgaagaactatgttggagacagaagaacttggtgtctcgattcttcgagaccttcaccaacagaggcagtcacgactacatgctcatactgctttgcacggagtt

SEQ ID NO: 64551 - DNA, 282 bp, Zea mays
ctggactttgataagtttaaagatgtcgtagagaagttcagagtgaaggctctgccgacgttcctcctgatcaaggagggcgaggagcagcgcagggtcgtcggtgccaaggtcgaggagctcaacatggcattatcagatatcggataatctaggcagctatagcgctcacattctaacttcatcaaattattctaataaattaataagctggaaataagtcttaaaaatacaaatggctaattaatgcattttcgatttacaaagattgaaattcaagaa

SEQ ID NO: 64552 - DNA, 274 bp, Zea mays
aagcagttgagaatgaaagagagcaagatgatccattgaagctatcagggaaaactagacaacttggcctcattgtgtgcagaggcacggcagtcatgctggtctcaccgactgatgggactgatgagatcgccaccctttcctcgcggacggagcatagcttgcgcccctcggaacaatatgtccctgtgggaaaagaacccgtttctcgtgtatttgttgtacatgttgctacggttactattgtgctgctgctgagtactccgtttccatt

SEQ ID NO: 64553 - DNA, 227 bp, Zea mays
ctcctcctgtacataagcctgaaaaaaaatgggttcagttgtttatggaactctgccaaatttgcttttgcatgccatgtaaaaatccagctagctcttgccaagcttcccctgcgcagttcaacaggactgcgattgatattcggtgtaatggaagtatttatcggaacaatcagcaatgttatgctaaaaaaacaaaaaaaaaaaaaaagcaacaaatacaaaga

SEQ ID NO: 64554 - DNA, 182 bp, Zea mays
ctcctcctgtacataagcctgaaaaaaaatgggttcagttgtttatggaactctgccaaatttgcttttgcatgccatgtaaaaatccagctagctcttgccaagcttcccctgcgcagttcaacaggactgcgattgatattcggtgtaatggaagtatttatcggaacaatcagcaatgt

SEQ ID NO: 64555 - DNA, 98 bp, Zea mays
catcctgctggtgctggactactacaattctcagcactagttgtaataaagccagtgcgcttttcatgtataattctgtattgtggctcgcgaaaata

SEQ ID NO: 64556 - DNA, 288 bp, Zea mays
aggccagtaggcgattacaagggtggaagaaacatctagccttaacattccaggctgaagcctaacccctctaatggatagcagcagtggtagccaggacaagaaattcagagacaatgatcgccctgaagcaaaagaagctaatagcaccgcacagcatcttgttgacttcacggaagcagaggaagatcttgactccagaatgcacaggcttgtggggaacaggtgggagattatagcaggaagaatcccaggaaggacagcagaagaggtagagatgttctggtc

SEQ ID NO: 64557 - DNA, 281 bp, Zea mays
tcgcctgatgaccttcgtagaccatttggaaaatttggccccgttaaagacatatatctgccaaaggattactacactcgggaacctagaggatttgggttcatccaatactttgatcctgaggatgcttctgatgcaaagtactatatggatgggaagatgctgcttggaagggaaattgctgttgtttttgcagaggaaaacaggaagaagccttctgacatgagggccagggaaaaaataagtggcagaggccgttcttatgatgggaggttgcgctc

SEQ ID NO: 64558 - DNA, 280 bp, Zea mays
ctccagtacgaacagaattgattcgatctttgcatggagaagttgacttgagcatagggcaaagctcgatgacaacgctagactactcgacttcgctctcgaactcgaggctgcttgcgttgagaccgtggagtccggggcgatgagtagagatctggcgattcttgtccatggagctatgagcgtcacgagaagccattacctgaacaccgaggagttcatcgacgcagtcggtactgagctccgatcaagactgggagctaactgggcctacaagaaa

SEQ ID NO: 64559 - DNA, 282 bp, Zea mays
gtcgtccagctggtcgacaccttccctggccagtccatcgacttcttcggcgcgctgcgtgcccgggtctacgacgacgaggtccgacggtgggtgagcgagaccggcgtcgagaacatcgccaggaagctcgtcaactccaaggagggcccgcccgcgttcgagcagcccaagatagcgatcgagaagctcttggagtacggacacatgctggtggcggacaggagaacgtcaagcgtgtgcagcttgctgacaagtacctcaacgaggctgctcttggtg

SEQ ID NO: 64560 - DNA, 279 bp, Zea mays
tctatatggtccatggaacttaggaacagattttgaacttatccatacgccaggccataccccatttgagaatcgagtcaaacatttttctagggctcagtgtgcttgtacttcaaaccgctaaaggtgctgttcactggagaccatgttgcaaactcataagaatcagacgatctgaacctctttctgatgtacagcaagcagtcagtgagccttcagctggaaagcatcaggaagctactggagctagagttcgagtggcttttacctggacatggc

SEQ ID NO: 64561 - DNA, 279 bp, Zea mays
ctacttcctcggagctgccggcagatgcccccacaatgtctgcccagatactcacaactgggtcatggccaacgcaaacctgcaatacctgcaatctcccccctgaaattgtttctgtctcagagaagtttcggtcttattaccttggcacacataatggcaggaggctaacatggcaaacaaacatggggacggctgacatcaaagtaacatttggaaatggaagcaagcatgaactgaacgtatcaacataccagatgtgtgttctcatgctgttta

SEQ ID NO: 64562 - DNA, 276 bp, Zea mays
tgataagataatttctgctgctgctttggttgagaatgaaaggtctagaagactcagcacctccattcttaatcaagttattagagaagctatagcattcaaatcaccaccaagaacaagaggtggcaaaagaggtcgtgtctattatacaacacaggctgccgtcggtccaccaacattcgttctatttgtaaatgatgcgaactcttccctgacacgtaccgccgttacatggaaaagaaactccggtcagacgccggttttccaggcacccct

SEQ ID NO: 64563 - DNA, 274 bp, Zea mays
ttcagttctccactcttgtatgcctcaacggtgatgtcacatccaccgaagaactcgccgtcgatgtagagctgcgggaaggtgggccagctggagtactccttgagaaagcaatgtgctcatagagacaagacattagaaccaggagtgcacgacatacagttaatcagaatgttatagtatttgctgtacaattcatgcaatgttgagctggagataccgaagttgtaggcaatccatgaccaaatgctcagtgcacttggtttggaataca

SEQ ID NO: 64564 - DNA, 274 bp, Zea mays
gtatcactggacttacccctggacttcatggcttccacctccacgagtttggtgatactaccaatgggtgcatatcgacaggaccacattttaatccaaacaatctgacgcacggtgcaccagaagacgaatccgtcatgcgggtgacctgggaaacattgttgcaaatgctgagggcatagccgaggcaaccattgttgatacccagattcctttgactggcccaaattcagttgttgggagagcatttgtgcgtcatgagcttgaagatgat

SEQ ID NO: 64565 - DNA, 277 bp, Zea mays
ctggacaaggtggagctcctctactccaagttcgtgtcgctggtgcgctccgaacccattatccagacgctgctccccatgtcgcccaagggcgagatctgcgacgtcaacggcgtctgcgtggacgccaccgaggacgagctcttccgcctcaccaccaaggaggggaagctcaccgtggtccgcgagaaggtgaagatcgagacgcaggccttctcccccgtggtgcagttcgagcaggaccccgtgcagatcctggaggcgtgctcccgctcta

SEQ ID NO: 64566 - DNA, 272 bp, Zea mays
atataatatctgctgctgctttggttgagaatgaatggtctagaagactcagcacctccattcttaatcaagttattagagaagctatagcattcaaatcaccaccaagaacaagaggtggcaaaagaggtcgtgtctattatacaacacaggctgccgtcggtccaccaacattcgttctatttgtaaatgatgcgaactcttccctgacacgtaccgccgttacatggaaaagaaactccggtcagacgccggttttccaggcaccccta

SEQ ID NO: 64567 - DNA, 273 bp, Zea mays
gtatcactggacttacccctggacttcatggcttccacctccacgagtttggtgatactaccaatgggtgcatatcgacaggaccacattttaatccaaacaatctgacgcacggtgcaccagaagacgaagtccgtcatgcgggtgacctgggaaacattgttgcaaatgctgagggcatagccgaggcaaccattgttgatacccagattcctttgactggcccaaattcagttgttgggagagcatttgtggttcatgagcttgaagatg

SEQ ID NO: 64568 - DNA, 275 bp, Zea mays
atcgggtacaaagttggaacaatgattgagatccccagggcagctctggtggctgatgatatagcggacaggctgaattcttctccttcggaacgaacgacctgacgcagatgacctttgggtacagcagggatgatgtggggaagttcattcccgtctatcttgctcagggcatcctccaacatgaccccttcgaggtcctggaccagaggggagtgggcgacctgtgaagttgctacagagaggggccgcaaagctaggcctaacttgaaggt

SEQ ID NO: 64569 - DNA, 243 bp, Zea mays
aaggcatcatgtatatgaaaaaccaggtggccccaaatcgattgacctgaaggaggtcggcccccggttcgagttgcggctgtaccagatcaaactaggaaccgtggaacaaaaggaagcgcagagcgagtttgtgctgcggccctacatcaatactgccaagaagcataagacgcttggagcgtgagcgacactgcagtacagaacttaatttttttttgggtcttcatcgattatgctgta

SEQ ID NO: 64570 - DNA, 288 bp, Zea mays
gaacggggtcgatgaaggactgatgatccctatgctgaatgatagtggaatgtcaacaagtgagcgtattctccttcgcgaggatgctgaatgctgtatctgtctatcatcatatgaagatggagctgagtgatctgctctcccctgcaatcatcacttccactggccttgtattaccaaatggctgcgcatgaatgcgacgtgtccactctgcaagtataacatgtctcaaaggcagtgacagtgcatgaccaacttattctgacataacttccgtacacagcttcc

SEQ ID NO: 64571 - DNA, 289 bp, Zea mays
atcgaggcacaccatagaaggacctgatgacatgccagcacatatcaaatcatcaatgtttggttgttccctgatgattcctatcaccaatggacgtctcaacatgggaaccttacagggtatttggctctgtgaacatcgagattaagctactcctcgacagattgtgatcacgctcagtgggatctagcctaaggtgataaatgttaagagctggaaatgcaatgcagcgactccgacatgtttaaatcagatgcactgaaacagaaactggctttggcccaattgt

SEQ ID NO: 64572 - DNA, 295 bp, Zea mays
cgttgcttcattgggaacctgtcctggtccacgctgatgaaagcctcaaggatgcgttcagcaaattcagccaacctcactgaggcaaaggtacgttcttgacaaattttcaggccgttctcgtggtttcggctttgtaacttttgatgagaagcaagccatggaggatgctattgagggaatgtatggactggactttcacgggaggaacatcactgttgataaagctcagccacaaggacctggtagagaccgtaatggtgaccgtgattatgaccgcgagcgtggatctcgt

SEQ ID NO: 64573 - DNA, 275 bp, Zea mays
  unsure (1)..(275): unsure at all n locations
agcttcatggagacaggacacaacaggaaacggagcatgcccttagttccttcaagagcggacaactcccatccttgtggcgctngatgttgctgcttgngttcttgacataccacatgttgcccatgtgattaattttgacctccctaattctatagatgactatgctcatcggattggatggactggacgtccctctcaatctggtcttgngactgcatcttcaactgccgcaacactacgttgcaaggccgttgagtgatccatgaaagagg

SEQ ID NO: 64574 - DNA, 298 bp, Zea mays
ggccaaggaagtccttacaaggttccaaaataaatcgtcagtccagcttagaatgccgaaccttcactttctgcctgtcaacttggggagcaaagaagctccgctggtgaagtttgctgatgatgtgtacctgccgacggatgaaccacacgggacgattgaagcaaccttaataagccgtaccatgtcaaagctgtaacaccaatgtagtactcaggctggtattagactcctgcttcgtctccacagcatccccaggcttaaaatggacagtaagctgtaagggaaagataactgt

SEQ ID NO: 64575 - DNA, 298 bp, Zea mays
atcttttatgcaggtagcatcttcaaagctgcagggctcaagaacagtaacctggacacatgtatacttggagtgattgcggttcttgccactgctgttacaaccaagatcttggacagggctggacggagaatcctccttattatttcttcttttgggatgaccctaagccttcttgtggttgctgttgtattttacatcaaggacaatatttcacatgactctgacttgggtaacaccttaagtatagtgtccttggttggtgtcttggcttatgtcactgcctactctttggtat

SEQ ID NO: 64576 - DNA, 297 bp, Zea mays
cgcgtgcaacaggcccatgttcccggaggccaagcccgcctcggcggcggcggcggcgagcaggagtgtggtcggggtggacagggactacctgtcctacgacgagccaaagacgtaagcagcagctagcaactagcataggataacccagcttttagcaccatctgttcttggtgattcgtcgaggcagcaaactaactgtggccatggtgaatccactggactgcagggtgttcccgggcgaggcgtgcgatgaccttggcggcgagttctgcgaggcgccgtaccaggacggcg

SEQ ID NO: 64577 - DNA, 302 bp, Zea mays
ccactgctgatattctcaggtgccagtgctgtatttggtgcatatgcacttccaaggtttgttcagctcacagtgacgtcttactacgcggcatcaactggctcgcagtatgctgtttcacagatcacacggcagatcgaaagagctcattttccagaatcagcccaggaatctgagtgagttggttggcattcagtctgttctattgggggtgcaatgtacatggtatagaaggacgtttagtgctgcttttgccgtgttgcagtacagtattagttttactgtgtgtcagacagcacgca

SEQ ID NO: 64578 - DNA, 265 bp, Zea mays
ggagaagcgcgagggcgccgaccgtctcctcaagttgcagaacgaacgcggcggccgtgcactcttccaggatgtgcagaagccatctcaagatgagtggggtggtaaccctggaggccatggaagctgccttggcgctgggtaataccctgagccaggccctcttggatctggacgctctgggctctggcgcacagaccctcagctctgtgacttgttggagagccacttcctggataaggaggtgaagctcatccagaagatg

SEQ ID NO: 64579 - DNA, 299 bp, Zea mays
ggcaagatcaatgatgaagacaaacagaagattcttgacaagtgcaacgaaatcatcagctggctggataagaaccagactgcggagaaggaagaatttgagcatcagcagaaagaactggagaaggtctgcaaccctatcatcaccaagctgtaccagagtgctggtggcatgcctggaggaatgcctggtggcttccctggtggaggagctcctccatctggtggtgcttcttcaggccccaccattgaagaggtcgattaagtcaaagtagagggtatagcattgttccacaggga

SEQ ID NO: 64580 - DNA, 293 bp, Zea mays
ctggaacttccaaaagagtttgacgctagatctgcatggtcccgttgcagcacaattgggaacatacttgatcaaggtcactgtggctcttgttgggcttttggtgctgtggagtgcctccaggaccgtttttgcattcacctcaacatgagcattttactttcagtcaatgacctactggcatgctgcggttttatgtgcggcgatgggtgtgatggaggctatcctatagaggcatggcgctactttgttcagaatggtgttgttacggatgagtgtgatccatacttcga

SEQ ID NO: 64581 - DNA, 263 bp, Zea mays
tgaagacgcatgcatgtcgtcgccaggaacaaagatcgagaaataatacaagaccagcacgcatgcatgggcatactctatatatatatatgtatagcccgtgcccgtgcccgcctttgtaccaatacaagccaaaccaagtggatgtgtattattattattattgcgctatcacatacatgtacccctgcctgctacctgaagatggatgtgtatcgagttatcaaattaaggcacagcagcagaaactatatgtattgcat

SEQ ID NO: 64582 - DNA, 179 bp, Zea mays
cgcaaacccttgtttcctggaagagaccatgtccatcagctacgtcttctaatggagctcattggcacgccaaatgagggtgatcttgattttgtaaatgaaaatgcaagaagatatatccgccaacttcctcgtcaccctagacagttcttacctgtaaaatttccacacaacatacg

SEQ ID NO: 64583 - DNA, 298 bp, Zea mays
gcggagatcaccagcagcgcgttcgagccggcttccatgatggtcaagtgcgacccacggcacggcaagtacatggcttgctgcctgatgtaccgcggcgacgtggtgcccaaggacgtgaacgccgcggtggccaccatcaagacgaagcgcaccatccagttcgtggactggtgcccgacggggttcaagtgcggcatcaactaccaggcgccgacagtggtgccgggtgccgacctcgccaaggtgcagcgcgcggtgtacatgatctccaactccaccagcgtcgtcgaggtgt

SEQ ID NO: 64584 - DNA, 288 bp, Zea mays
gatgaacgctggatgcctacgatgctgcgagcaagatcaaggtgatcaaggagatccggtcattcactgacctggggctgaaggaggcaaggagctggtggagaaggcgcctgcggtgatcaagggaggcctatccaaggaggaggctcaggcgattgtcgagcgaatgaaggcagttggcgccaaggtcattattgactgattagaacaagccttttcagtggtgaggtcctgcaaatttatgcttcgtatcggatcaactgttaaagtgcaagatggatgagtggc

SEQ ID NO: 64585 - DNA, 292 bp, Zea mays
ctcccggccttgggcttcttcctcgccgcgcggcgcgtctcggccttgggcttcttccccgccggggccgagaagcgcgtcccggcgggtcagtcgtccggcaaggcaggcggcgacaagaagggtaagaagaaggctaagaagtcggtggagacctacaaactctacatcttcaaggtgctgaagcaggtccaccccgacatcgggcatctcttccaaggccatgtccatcatgaactccttcatcaacgacatcttcgagaagctcgccggctaggctggcaagcttgcg

SEQ ID NO: 64586 - DNA, 125 bp, Zea mays
gttatctgccaattatgtatggactatggacatgtgttgcgctgttcaacttactactacaaataagtaatcgataatgttcccttccagaaaaaaaaaacaaaaagaaagaacaaaaaaaaaga

SEQ ID NO: 64587 - DNA, 293 bp, Zea mays
ggctagctggagcatgggctcttcttttccccttaagaaaacaacgaaagcccttcccaagattcaaattgacgacgactctgatctgattgatgaagacagtctcttgactgaggaggacctgaagaaacaacaacttccagttgttggggactgtgaggtgggggcagcaaagaaagcatgcaagaactgtacttgtggcagggctgaggccgaggagaaggttgggaagctggagctcactgcggagcaatcaataaccctcagtcagcttgtggcagttgtgggttggg

SEQ ID NO: 64588 - DNA, 290 bp, Zea mays
atttcttctctctctgctcctccgcctccgcctgatccatccaagacagggatcgccatgtcggactcggaggagcaccacttcgaatcgaagtccgacgctggggcgtccaagacctacccgcagcaggctggcaccgtccgtaagaacggcttcatcgtcatcaagaaccgtccctgcaaggttgtggaggtttctacctccaagactggtaagcatggccacgccaaatgccactttgtcgccatagacatattcaatgggaaaaagcttgaagatattgttccttc

SEQ ID NO: 64589 - DNA, 281 bp, Zea mays
gttgcagatggtctttcaaatctgctgaagtgccgtctatcaaccaccatccgctgcctttctcacccaagtgcacacgtgcgcgcactcagcatgtctgtcctccgcgacatcctgagcaacggatccgtgaaccccaacaagacaatccaaggggaacagcagcggaacggcatccagagcccgtcctaccactgcctccccgcaggatcatcaactggcaagcggacgtcgagaggtgctagaggtgggaagcccacagccgccgcgccactgggctg

SEQ ID NO: 64590 - DNA, 287 bp, Zea mays
gtgcggacgacaaggacaaggccaaggcaggattgccgcagctgccatcgaacgcgaagaacaagctcgtctctgtgccgctggaagaccttccgagcaagctgaagggcatggtgcgcaacgcgaagaaagccgaggcggagatcgccgctctgaagatatcctacctcaagaagatcggaaagggctccaacgtcatcatcatggactcgtacagcgacgtcgccaagactgtggcgaagacgctggacagcgtggggttcaagaactgctgggtcatggccggc

SEQ ID NO: 64591 - DNA, 287 bp, Zea mays
gcgagatgtcgagtacagcatagcggacgtggagagcacgctctacgacaagtacggcaaggacaacccggtggttagcgacccagagtccatacacaagcaagggtggcagcttgggatgaggtattactggatagagcaggacatcaggctcaacgtcacaaggtttgctcccacgctgcagaaggtgcttcagatgatcagggaatagaggaaaatgagatcaatggatcatatgttacattacatttattattcatgcttagagatgaataggattaatcttg

SEQ ID NO: 64592 - DNA, 123 bp, Zea mays
gaaagatattgagcttaaaacagcaagatctggtggagctggagggcagaatgttaacaaggtggagacggctgttgatcttattcacaagccgacaggaatacggatattctgtacggaaga

SEQ ID NO: 64593 - DNA, 166 bp, Zea mays
ggagatatctcatacccgaagttcactgccgaaagcaagtccatcctcgaatctttgaggaggagagcgcgcatgatgacagacggtttcaacagctgccgaaatgtggtgtgcaatttcacagaaggagctatgtactctttcccccaaatacagctgccagcaa

SEQ ID NO: 64594 - DNA, 264 bp, Zea mays
agaacatgtgcggtgttgctacgtgtgcatcctaccctattgtcgcatgaggcccttacgaagtgttacatggtctgtttggaatcaataatgcatgtttaacctgagcttggcgatgggttatacagaacggaaactctgtttgtgaatagaaaatcatcaagggaaggagttgaccggacccctgcttgtacgtctccccgactgtgtaggtagattgtcagttggggtccgaagtactctactcatacatgtgtcatgaca

SEQ ID NO: 64595 - DNA, 293 bp, Zea mays
tcggttgatcaggtcaaggataggacagcggttcatgacacgttcagctatggttcgcatgtgatgcaatatggcgcactggagttgaatgttcagcgtttgttttcgtacattggcacagaccctgctaacgatggcaacacgtttatagaagataactcactgccatcgttctcaaaagccgttaatcagcgcgacgctgaccttgtctacttctggcagaagtaccgcaaattggctgatagctcgcctgcgaaaagcgaggctcggaaggaactgcttgaagtgatggc

SEQ ID NO: 64596 - DNA, 295 bp, Zea mays
attgaatctgttgtcgggaaagaaaacctgggctcagatgtcatgtgctcggcctgtcagatggctgtcgtgtggatatagaaccagctccgcgaaaacaagaccaaggagctcatactgcagtacgctaaccagctgtgtgagcgtctgccgagccccaacggagagtcaacagtcagctgccaggagatctccaagatgcccagccttgcgttcaccatcgcaaacaagacctttcaccctaacacccgagcagtacattgtgaatctggagcaaggaggccaaaccgtctgc

SEQ ID NO: 64597 - DNA, 291 bp, Zea mays
tgttgctgcaatcttgacttctattcagtccctgctgtgtgatccaaacccgaactcccctgcaaactcagaagccgcaagactgttcagtgagaacaagcgggagtacaaccgcaaagtccgcgagattgtggagcagagctggacagccgactagtgcaggaggatgctcatcgtgcccgaaagggcacaataaggaaccatgaaaaaacatccttgtgtttgtggttcgccagacctgtcgaaacattgaagaactctagttctagtctgtcgtggccagggttttgg

SEQ ID NO: 64598 - DNA, 108 bp, Zea mays
aaggaaatgacaaagctctctggcatctctgaaatcatccccgagatggagatctgcgatttggacttcgaaccctatggctactccatgagtgcgatccatggctct

SEQ ID NO: 64599 - DNA, 286 bp, Zea mays
ggtgaatccttcctgctcattcacctcggaagaggttaaatacctcacttctcgcatacagaatggtgggacagaagtagtcgaggctaaagctggagcaggatcagcaactctttcaatggcttatgcagctgccaaatttgcagatgcttgcctgagaggattgcgtggtgatgctgggataatagagtgctcttatgtggcttctcaggtcacagaggtgcctttctttgcatccaaagtgcggatagggcgatgtggcattgaggagatcctaccacttgga

SEQ ID NO: 64600 - DNA, 286 bp, Zea mays
ctgacacaatcgataatgtcaaagccaagatccaggacaaggagggcattccaccggaccagcagcgccggatgctgtgctggcaagcagctggaggatggccgtaccctcgccgactacaacatccagaaggagagcaccctccacctggtgctccgcttgcgaggtggtatgcagatctttgtgaagaccttgactggcaagaccataaccctggaggttgagagctccgacaccatcgacaacgtgaaggcgaagatccaggacaaagagggcatccccccag

SEQ ID NO: 64601 - DNA, 265 bp, Zea mays
gcagagtccggagctgcggcggcgtaagtcatagctggacaagctttgaggaagtgtcttccgctatgtgacagagtattggttgaaaggagtgccgctgaaactgtgaccaaaggtggcattatgcttccagaaaagtctcaaggaaaagtattgcatgcaacggtcgtggctgtgggatcaggcgggaaaggaaagggtggagagattcagcctgtcagtgtgaaagttggagataaagttcttcgcccagaatatggaggca

SEQ ID NO: 64602 - DNA, 285 bp, Zea mays
ggctagctggagcatgggctcttcttttccccttaagaaaacaacgaaagcccttcccaagattcagattgacgacgactctgatctgattgatgaagacagtctcttgactgaggaggacctgaagaaacaacaacttccagttgttggggactgtgaggtgggggcagcaaagaaagcatgcaagaactgtacttgtggcagggctgaggccgaggagaaggttgggaagctggagctcactgcggagcaaatcaataaccctcagtcagcttgtggcagttg

SEQ ID NO: 64603 - DNA, 280 bp, Zea mays
atcgtgaactgaaactccgtgtgctgcgtatttatctgtccaggcttgatgaaagaaaaaggagaaaagagttcatattggaaaggaatttattgtttcctaatcccttggagaaggatcttacaaatgaagacagggaagtttaccatcggtataaggtcttcatgcgttttctttccaaggaggaacatgaagcccttgttaggagtgtcattgaagagcgaaaaattcggaggagaattcaagaactccaggaatgtcgttctgctggatgccgcac

SEQ ID NO: 64604 - DNA, 282 bp, Zea mays
catttttatgtgttgacacttgacagatccaagatgacctgaacagttacttcgccaatccaagcgagatcggaggcagcaacggttacatgccagatatagcttcctcggctcaagaggacgacgatttcgtcaacggggctcaggtcgccggcaagatgggcagcactgactcgctgcagcgggtggcgagcctggagcacctccagaagaggatgtgcggaggcccggcttcatcggggtcgacctcctaggttcctactccatcggatatgataaagg

SEQ ID NO: 64605 - DNA, 282 bp, Zea mays
gttcgggttctccaaaagataccagaagggagagatgtagaagataacgatgactttgtattcaatgaagagtttagtgctcccctctatcgcataaaggtaaatgcaattcaaatgaaggagacggtagaagaaaacacgagcaccactgagagagtgttccaggatcggcagtatcatgttgatgcggccatagtccgaataatgaagacgcggaaggtcctgagccacacccttctaataaccgagctttaccagcagcttaagttccctgttaagcca

SEQ ID NO: 64606 - DNA, 187 bp, Zea mays
gttgcagatggtctttcaaatctgctgaagtgccgtctatcaaccaccatccgctgcctttctcacccaagtgcacacgtgcgcgcactcagcatgtctgtcctccgcgacatcctgagcaacggatccgtgaaccccaacaagacaatccaaggggaacagcatcgtaacggcatccagaccccgt

SEQ ID NO: 64607 - DNA, 282 bp, Zea mays
ctgttttttattctattacttctgtagctgttcctatggtggaatccatggctgctttggtcctgatggaccagctcatggcgcatattgcccagtgtgagatgtttccgctgaaccttgccctacaagagcccattggctctgctagcagtgcatctgaactgtcaccaaacctatcataatgactgtcgtggaacatgtcccagctttccttctatcgaaattctggtctttgctaagcagtttgcaattcggaacccccataaaccctcgactattgta

SEQ ID NO: 64608 - DNA, 219 bp, Zea mays
gcagcagctcatcacctgaaggagagcagcccggaggagggggagcaagcagcagccgtcggtggaagatgtcgtacctgctgccgcatctgcactcggggtgggcggttgaccaggcaatcctcgccgaggaggagcgcctcgtcatcatccgtttcggccatgactgtgacgagacctgcatgcagatggattaagtgctagcagcagtagctgaga

SEQ ID NO: 64609 - DNA, 202 bp, Zea mays
ctcgggagtgaacatggtacctggattaccgacaatgaaggtagacgttaccgcgtgccaccaaacttcccggttcgtttccatccttccgatgtcattgagtttggttccgataagaaggctatgttccgggtgaaggtgctgaacacgctcccatacgaatcagcaagaagtgggaagcagcaggggctgcagcaagagc

SEQ ID NO: 64610 - DNA, 228 bp, Zea mays
gagagattggagggaggcccctgcacaaggcaagagcaaccgcggcgcgcggcagagagacgacgggcagacgcagacgggcgaacaagatgagggagatcatcagcatccacatcggccaggccgggatccaggatcggcaacgcctgctgggagctctactgcctcgagcacggcatcgagcacgatggcaccatgacacgatgattcctcggttggcgtcgcaca

SEQ ID NO: 64611 - DNA, 284 bp, Zea mays
ctcacattgagtaaatggaatgcttgctggatcagcaactgtcttctttgcatacataggctttgatacagtcgctagtacagctgaagaggtaaagaatccacagagagatttgccattgggaattggagttgcattggctatttgttgtgcgttgtatatggctgtttctgttgttattgttgggctggtgccatatttcgccatggatccagatactcctatttcatctgcctttgcaaggcatggaatgctcaactgaatgtacgttgtgacaagtggtg

SEQ ID NO: 64612 - DNA, 285 bp, Zea mays
tcaagaggaagtacaagaaggatatcactggcaaccccagggctctcaggaggctgaggaccgcttgtgataaggcgaagaggactctgtcttccactgcccagaccacgattgagattgactcgctgtatgagggcatcgacttctactccaccatcacccgtgccaggtttgaggagctcaacatggacctgttcaggaagtgcatggagcctgttgagaagtgcctgagggatgccaagatggacaagagcaccgtccatgacgttgtacttgttggtggct

SEQ ID NO: 64613 - DNA, 284 bp, Zea mays
agaaggaagaaggtcatgtcgtcggcggcgcagtgcagcagaaagcggcggcagcggagcaggaggaggtggagcacgggccattccccatcgagcagctccaggcttctggaatagctgcattggatgtgaagaagctgaaagattctggtctccacactgtggaggctgtggcttacactccaaggaaagatcttctgcagatcaaagggataagtgaagctaaagctgacaagataattgaagcagcatccaagatagttccactgggatttacaagtgcc

SEQ ID NO: 64614 - DNA, 281 bp, Zea mays
acgagcgcaacaccatccacccaccagttcgaagcggaggcgaccggcaacctgcggcggagatgtcaggcaggggcaagggcggcaaggggctcgggaagggcggcgcgaagcgtcaccggaaggtgctgcgcgacaacatccaggggatcacgaagccggcgatccggaggctggcgaggaggggtggcgtgaagcgcatctccgggctgatctacgaggagacccgcggcgtgctcaagatctttctcgagaatgtcatccgcgacgctgtgacctac

SEQ ID NO: 64615 - DNA, 288 bp, Zea mays
tctccccgtcaaggccttttgagagtccgtgagtttactttagcggaaattgagcactttgtggacccagaggacaaatcccatccaaagtttggtgatgtttctgatctagagttctggatgtttccgagagaggatcaaatggcaggaaggtcagccacaagacttaaactcggaaattctatatctgaggtattatctcctgatatttctctgttatatatttttgacaatatgatatctgagctcttcttttgctacagttgataccattctataaacttgtaa

SEQ ID NO: 64616 - DNA, 285 bp, Zea mays
gagagattggagggaggcccctgcccaaggcaagagaaaccgcggcgcgcggagagggaggaagggcagacgcagacgggcgaacaagatgagggagatcatcagcatccacatcggccaggccgggatccaggtcggcaacgcctgctgggagctctactgcctcgagcacggcatcgagcacgatggcaccatgcccagtgattcctcggttggcgtcgcacatgatgccttcaacacgttcttcagcgagactggttccggcaagcatgtgcccagggccat

SEQ ID NO: 64617 - DNA, 278 bp, Zea mays
gagccagagcccgatcccgatccagcgaggcggcgaccctccctcctccccttgcttcgctcgtccagccctgaccacccgcatccccgtcagtcatggcagcggcagcaggcggaggcgcggtgcgtgcgctgtcccagaaggagcaggacatacagatgatgctcgccgccgacgtccaccttggcaccaagaactgcgatttccagatggagcgctatgcctttaagcgccgcaccgacggcatctagatcatcaaccttggcaagacatgggag

SEQ ID NO: 64618 - DNA, 279 bp, Zea mays
gaggcatgccacatatctatcaacaagacaccaatttatggggataatggctcaatatcccctggtggtgtgcggatcggaacacctgcaatgactactagaggttgcctagaagaggacttcgagtcgattgcagacttcctcataaggtctactcagattgctagcaatgttctgaaagaacatggcaaagtgcaaaaggagtttctaagaggcctaatgaacaataaggatgttatggaactccgaaatcaggttgaggcatttgcgtcacagttt

SEQ ID NO: 64619 - DNA, 271 bp, Zea mays
gagtttgctcccaaggttatccgtatagattgagcaactcatagcaagaggaacgatcttccgcactccgaatttatttctaaccctaaccccaagtgtagtgcgtgttcaaagtttataattttcagattttgtctattcacccccctaggcgactttcaaaactccatgttttatattatatgtgtataaatatataaaccgtaggggagggttggggaccaaggcccctgcctgcccccttggttccgccctgctcgtgtgttacgac

SEQ ID NO: 64620 - DNA, 276 bp, Zea mays
ctcccggccttgggcttcttccacgccggggggcgcttctcggccttgggcttcttccccgccggggccgagaagcgcctcccggcggccaagccgtccggcaaagaaggcggcgacaagaagggtaagaagaaggcgaagaagtcggtggagacctacaagataagatcatcttcaaggtgctgaagcaggtccaccccgacatcggcatctcttccaaggccatgtccatcatgaactccttcatcaacgacatcttcgagaagctcgccggcg

SEQ ID NO: 64621 - DNA, 275 bp, Zea mays
gtctcacaggcgacatttttagatccgtaacatgcgattgcggtgaccatgatgctatggcaattgagatgattgacaacgccggacgaggtgtaatagtttatctccttggacacgaaggacgtcgtatcggtctgggccacaagcttcgtgcttataacttgcaggatgataggcgtgatactgtctaagctagtgatgaacttggtcttcctgtcgactcatgagaatatgggattggcgcacagatactactcgacctgtgagtccgttcg

SEQ ID NO: 64622 - DNA, 281 bp, Zea mays
atgaagtcaagaatttctggcatccctaagcttgaggatgctaatgaagctggtgggatggactctcacaagtgcaccttgattctgactgagggtgactctgcaaaagctcttgctatgtcgggcatagctgttgtagggagagattactatggtgtatttcctctcaggggaaaactattgaatgtcagagaggcaaaccacaagcagataatggacaacgctgagattcagtacatgaagcaaatccttggtttgcagcatggtaagcagtatgatag

SEQ ID NO: 64623 - DNA, 258 bp, Zea mays
ggcagagtgacgacaaaaggtgatgtcttcagctttggagtcatcttgatggaactgaatacagggcgcaaggcacttgatgaacttcggccagaggatagcatgcatctagttacatggttccggagaatgcagctgaacaaggaaacattccgcaaagcagtcgaccctgtaattgaccttgatgatgagacatatgctagcgttagtactgtctcagagcttgctggtcactgctgcgatagggtagcacaccag

SEQ ID NO: 64624 - DNA, 269 bp, Zea mays
cttcatgctttcgtcctacgctccagtcatttctgctgagaaggcctaccacgagcagctgtccgtggccgaaatcaccaacagcgccttcgagccatcctccatgatggccaagtgcgacccccgccatggcaagtacatggcatgctgcctcatgtaccgtggtgatgtggttcccaaggacgtgaacgctgctgtggccacaatcaagaccaagcgcaccatccagttcgtggactggtgcccgactggcttcaagtgcggaatca

SEQ ID NO: 64625 - DNA, 268 bp, Zea mays
aatattttacagagaatgagatacgaaacataactgatgggtataagtctgttctgggaagaggggcatttggtgaggtctacaaaggaacgctagaagaccaatcctcagttgcagtaaagagatatatacatgggacccacaaagaggtgtttgccaaggaagtcatagtgcactctcaaataaaccacaagaatgttgtcagactcttgggctggtgcacagaagaaaatgctctaatgattgtcatggagtttatctccaatgg

SEQ ID NO: 64626 - DNA, 267 bp, Zea mays
ggacgagtgaccacaaaagctgatgtcttcagctttggtgtcatcttgatggaactgattacagggcgcaaggcacttgatgagactcggccagaggatagcatgcatctagttacatggttccggagaatgcagctgaacaaggaaacattccgcaaagcaatcgaccctgttattgaccttgatgaggagacatatgctagcgttagtactgtctcagagcttgctggtcactgctgcgctagggaagcacaccagaggcctgac

SEQ ID NO: 64627 - DNA, 273 bp, Zea mays
tgtctcacaggcgacatttttagatccgcaagatgcgattgcggtgaccagcttgcaatggcaattgagatgattgagaaggccggaagaggcgtaatagtttatctccgtggacacgaaggacgacgtatcggtctgggccacaagcttcgtgcttataacttgcaggatgatgggcgtgatactgtggaagctaatgaagaacttggtcttcctgtggactcacgagaatatgggattggcgcacagatactacgggacctaggagtccgt

SEQ ID NO: 64628 - DNA, 270 bp, Zea mays
cttcccgtcgaaagacgagagaggaaaagggacaagggcaaggcaagagagaggcgtcgtcgtttgatctgctgccggagtgcgaagaggaagaggaagaggagcgccggagttgtaaagatgttcctggtggactggttctatggggtgctggcatcgcttgggctgtggcagaaggaggctaagatcctcttccttggcctcgacaacgccggcaagaccaccctcctccacatgctgaaggacgagcggctcgtacagcaccagccg

SEQ ID NO: 64629 - DNA, 271 bp, Zea mays; identical to SEQ ID NO: 35110

SEQ ID NO: 64630 - DNA, 269 bp, Zea mays
gccgaggagggacgcaatggagcagtacgagaaggtggagaagatcggggagggcacgtacggggtggtgtacaaggcgctggacaaggccaccaacgagacgatcgcgctcaagaagatccgcctcgagcaggaggacgagggcgtcccgtccaccgccatccgcgagatctctctcctcaaggagatgaaccacggcaacatcgtcaggttacatgatgttgtccacagcgagaagcggatatacctcgtcttcgagtacctggatc

SEQ ID NO: 64631 - DNA, 266 bp, Zea mays
agctttcataacttcacgaagacaagttagaattgaagactatgtccatgagtactactcagttgaacgtttcaaagctacttattagtttgatattaacccgatggttgataaggctcagtggcccgtggttgatcctgggtttgtgatggttcctccgaagttagagaggcctgcgggtaggccgagagtacgtcgaatcagaagtagtggtgaggctgggaaaagaggcccttaccaatgcaagagatgctttcagtttggtc

SEQ ID NO: 64632 - DNA, 269 bp, Zea mays
gccaatgttcgaccccgcgtggtgccacctgcagcttgtttatgagctcctgctgaaatttatcggatcctcgtccttggacgcgaaggtagggaagaagcactttgatcactcattcatcgtgaagctccttaatcttcttgactccgaggatccaagagaaagggattgcttgaaaactattctgcacagggtatatgggaagttcatggtacaccgtcctttcatccgcaaagcagtgagcaacatattctaccagtttgtctttg

SEQ ID NO: 64633 - DNA, 281 bp, Zea mays
gcaagaagtgctccgtggaagcaccgtgacacccttgctcgcccgcatctctctaaccgccggcgccggcgccggcgccggccagtcgttcacatggctgcgatgccaccggccttcacgggcaacctgaagaaagcacttgcaggtctgagaagaatcaatttagatgggcttcgatggcgcgtatttgatgctaagggtcaggtgctgggacgattggcttcccaaatagccgttgtgcttcaaggcaaggataaacgacctatgcgccacatgtggaa

SEQ ID NO: 64634 - DNA, 280 bp, Zea mays
cctgctgctggagctcgtcacgggccagcgcgcgctccagctcggcaaggcctccggcgccctgcacagccagaagggcgtcatgctggactgggtgaggaaggtgcatcaagagaagatgcttgacctgctggtggaccatgacctgggcccacactacgacaggatcgatgtggcacgagattgtgcaggtggagctcctctgcacgcagttccagccgtcgcaccgccccaagatgtccgaggtggtccggatactggacggcgacggcctagccga

SEQ ID NO: 64635 - DNA, 278 bp, Zea mays
gtgggacacacgagtacacgaccacgagagactggtcggtctgcgactgtctctgaccgctgaccgcactgtcctctgcttctgtctttctctctctcccctgtcctccttccagatttcctccattcgcggtttgcctctctgccttcctgcctgcttccctccctccgtcagatccccgctcgggatgccatggtggaccagctcaccgacgctcagatcggcgagttcatggaggtcttcagcctcttcgacaaggtaggcgacggctgcatcac

SEQ ID NO: 64636 - DNA, 279 bp, Zea mays
aagccgctgaaatgaacaaacggtccttcaagtacgcttgggtgcttgacaagctcaaggctgagcgtgagagaggtatcaccattgatattgctctgtggaagtttgagaccaccaagtactactgcactgtcattgatgcccctggacatcgcgacttcatcaagaacatgatcacgggtacctctcaggctgactgtgctgttcttatcattgactccaccactggtggttttgaggccggtatctctaaggatggccagacccgtgagcatgctc

SEQ ID NO: 64637 - DNA, 273 bp, Zea mays
acttgatggtactgagagggcacaagaatgctattcttgaccttcagtggactactgatgggacccagatcatctctgcaagtcctgacaagactgtgagggtctgggacgttgagactggtaaacaagttaagaagatggctgagcactcatcattcgtcaactcatgctgcccagcacggaagtggccagctcttgtggttagcggttcagatgatggtacagcaaactgtgggacttgcgtcagagaggtgcaatacaaactcttcccga

SEQ ID NO: 64638 - DNA, 252 bp, Zea mays
cacgaagtttacaacccaagaataagggtggaatcccttctggtgtcacgcatttctaaggcaagtgctcatcagagatctggtcgtgctggacgaacacaacccgggaagtgatgtaggctatacacggagaagagttttaatgaggatttgcaaccacagacatacccagaaattcttcggtcgaacctggcaaatacagttcttaccttgaagaaacttggaattgatgatttagtgcattttgacttt

SEQ ID NO: 64639 - DNA, 277 bp, Zea mays
ccatcgggaggatcaaacaccgcaatcttgttccgctccttggctactgcaagtgtggcgaggagcggctgttggtttatgattacatgaggtttggcagcttggaagacgtgttgcatgaccgaaaaaagatcgggatcaagctaaattgggcagcaaggaaaaagatcgccattggggctgcaaggggattggcatacctccaccacaactgtataccgcacatcatacaccgagacatgaagtcaagcaatgtgcttatcgatgagcagttaga

SEQ ID NO: 64640 - DNA, 268 bp, Zea mays
gttcacctgatggagattcaggtcaatggtggtaccattgctgacaaggtggactacggctataaattttttgagaaagaggtccctgttgatgctgtcttccagaaggatgagatgattgacatcattggtgtgaccaaaggtaaaggttatgagggtgtggtcactcgttggggtgtcacccgccttccccgcaaaacccacaggggtcttccgcaagttgcttgtatcggtgcatggcatccggctagggtctcgtatacggttg

SEQ ID NO: 64641 - DNA, 279 bp, Zea mays
gagattgtgaaggaagtctcatcctacctcaagaaagttgggtacaaccctgataaggttgcctttgttcccatttctggttttgagggcgacaacatgattgagaggtccaccaaccttgactggtacaaaggcccaaccctgcttgaggctcttgaccagatcaccgagcccaagaggccttcagacaagcccctgcgtctgcccctccaggaagtgtacaagattggtggtattcgaactgtaccggttggtcgtgtggagactggtgtcatcagc

SEQ ID NO: 64642 - DNA, 269 bp, Zea mays
ggcacctcgaagtcaccggtccgcgcacccagctcacgatatgtatccataagctgcgtgcgcgtccgttcggcctccgcatgcatcgcggcctcggcccccttcgcgcggctctccagggcggtgagccgctcttgcagatgttcggcgagctccttggcaagattgccctccgcccgcgccagcttggcctccgcctgcgcacctgctccttggcgacggcctcgttggcttccctcctctccgccgccagttggcgccggaggtca

SEQ ID NO: 64643 - DNA, 270 bp, Zea mays
cttcgctcatttcttcttaggaggctcaagtctgatgtagaaaagggtctacctccgaagaaggacaccatacttaaagttggaatgtctcagatgcaaaagcagtactatcgcgctctgcttcagaaggatttggaggttattaatgccggtggtgaacgcaagcgattgcttaacattgccatgcagctgcgcaagtgctgcaaccatccatatatgttccaaggagctgaacctggcccaccctacacaactggtgaacatctagtt

SEQ ID NO: 64644 - DNA, 270 bp, Zea mays
accgctactttggcggcctgaaatctggtggtaatgcttatgtgattggagatccagcaagacctggacagaagtggcacgtcttctacgccactgagtacccagagcaaccaatggttaaccttgagatgtgcatgactggtctggacaagaagaaagcttctgtcttttccaagactaatgctgatgggaacacagcatgtgccaaggaaatgacaaagctctctggcatctctgaaatcatccccgagatggagatctgcgattttg

SEQ ID NO: 64645 - DNA, 266 bp, Zea mays
  unsure (1)..(266): unsure at all n locations
acncagcgcgctcgttcctcagatgggaggcggaaatgaagagaaggctcgggtggttcagaccatactgttcgttgctggcataaacaccctgttccagacgttattcgggacgcgccttccggtcgtgatgggcggctcgtacgtcttcgtcgggccgatcatctcgatcgtcttggctggacggtacagcagtgaagcagaccctcacgaggtaccttctgctgaactgctctgtttccttcaatagcgatagaacatactgg

SEQ ID NO: 64646 - DNA, 266 bp, Zea mays
atgaaccaaggcagaggatcctgcagcaaaaagatttatcatttcctttgctgctgaccgtgttgtcagcctggatgggattgattttgtcaggtgtgaagttgttggacagagtttcatgctccatcagatccggtagatgattggtcttgctgtagctgtgatgaggaactgtgcacctgaatcaatttatgatgtcgcctttcgcaaggatgtcaatcttaatgtgcctactgcacctgaggtcggactgtacctagatgaat

SEQ ID NO: 64647 - DNA, 156 bp, Zea mays
atccaggtcgagctgatctctatgttcctaagagggccccctttgatctctttgacaccaagaagaagcaaaacaacatcaagctctatgtgcgcagggtgttcatcatggacaactgcgaagagctgatccctgagtggctgagcttcgttaagg

SEQ ID NO: 64648 - DNA, 259 bp, Zea mays
gtctcacaggcgatatttttagatccgcaagatgcgactgcggtgacgaacttgctatggccattgagatgattgaaaaggccggaagaggcgtaatactttatctccgtggacacgaaggaccgggtatcggtctgggtcacaaacttgcgtgcttataacttgcaggatgatgggcgtgatactgttgaagctagtgaagaacttggtcttcctgtggactcacgagaatatgggattcgcgcacagatactactgg

SEQ ID NO: 64649 - DNA, 265 bp, Zea mays
gtgaccctccctcagccgcgtcgcgtcgcatcctacgatccaaagctctctctgctcgcagccatggcgaagaactacccgaccgtgagcgccgagtacagcgaggctgtggagaaggccaggcgcaagctccgagccctcatcgccgagaagagctgcgccccgctcatgctccgcctcgcgtggcactccgcggggacgttcgacgtgtcgtcgaggaccggcggtccattcggcacgatgaagcatcagtcggaattggctc

SEQ ID NO: 64650 - DNA, 269 bp, Zea mays
cacaaggttactggacgaagagatagagccaggcctttgacattcaggatggaatcaagtggtgcctggggttactcaggagcaaattctggtaatcctcgcattactgcaacttttgaggccccttgttatgcattgaacaaaatagagatagacacaaagttacccatttttggcgaccagaaatgggtcatatggatttgctctttcaacattccaatggccccagggaagactcgttctattgtctgtagcgctcgaaacttttt

SEQ ID NO: 64651 - DNA, 269 bp, Zea mays
agttctggaacgggtgtattcccttgtgcagcaaatccttagccaacagactggccttttcttcaacaggcacattgaccagatcatactatgcagcatatatggagttgccaagatctctcaactggaactttcattcaaggtgattattttcggctacaggaaacaacctcagtgcaagctacaagttttccgaagcgtgtatgttcattggcccccaagaagccgtaacgggctcacaggagaagaccacgttgacatcatcactt

SEQ ID NO: 64652 - DNA, 265 bp, Zea mays
gtggaccccatactgaaaattgggcttctgaacatctccgagatccgatttagagtgtcaatggcaatgtccccaagccaaaggccaaggggagtatttgggttctggtcgtcgttgatgactgcattgggaaacatggagcatatgccggtccgtatagctcaaagataccgggaggaattgtgcatgcggcaaagtgcacttatgaactctgctatatctaacattcaaaaggatcttcttagccaacctcttcagctacttt

SEQ ID NO: 64653 - DNA, 261 bp, Zea mays
gccgaggagggacgcaatggagcagtacgagaaggtggagaagatcggggagggcacgtacggggtggtgtacaaggcgctggacaaggccaccaacgagacgatcgcgctcaagaagatccgcctcgagcaggaggacgagggcgtcccgtccaccgccatccgcgagatctctctcctcaaggagatgaaccacggcaacatcgtcaggttacatgatgttgtccacagcgagaagcggatatacctcgtcttcgagta

SEQ ID NO: 64654 - DNA, 134 bp, Zea mays
gatcctgctggtgctggactactacaattctcagcactagttgtaataaagccagtgcgcttttcatgtataattctgtattgtggctcgcgaaaataaaatttggcaacggtttatgcacttaaaaaaaaaga

SEQ ID NO: 64655 - DNA, 272 bp, Zea mays
ggccaatcgtgatggacattgcccggaaaaacaacgtcaaacggataatgagatgctgccaaattatgggcagaagtgaccaggacgacttgactgctgctcagattttctacccttgcatgcaatgtgctgatatatttttcttgaaggctgacatatgccagttggggatggaccaaaggaaggtcaatgtgctagctagggagtactgtgatgacatcaaaagatagaacaaaccaattattctttcacatcatatgctccctggtttt

SEQ ID NO: 64656 - DNA, 234 bp, Zea mays
gatcacattccctggcgcactgcatgaagcgcctgatactgccactggagctatcatcttgattctccagcagaaggagcatcccaagttcaagagccagggcgatgacctcttctacgagcacacactgaccttgactgaatctctgtgtggcttccagtttgttctgactcacttggataacaggcagctgctgatcaaatcgaaccctggcgaagtctgtgaagcctgatt

SEQ ID NO: 64657 - DNA, 268 bp, Zea mays
caggtttctcagttgctgatggcctttctaatctgctaaagtgccgtctttcaaccaccatccgctgcctttctcagccaagcgcgcacgtgcgcggctcagcatgtccgtcctccgtgacatcctgaaccacggatccgtgagccccaacaagatcagccgaggggtactgcagcggaatggcatccagagcccatcgtatcggtgcgtggccgcaggcatgctcaactggcaagcggacgtggagaagtgcatagactgcgaagcc

SEQ ID NO: 64658 - DNA, 269 bp, Zea mays
atttgaaacgctttgctgttcactacgatggttatggccgcccaaatggcactgcagaggtggtgtttacacggaggagcgatgcaattgctgcactgaagcgttataataatgttctacttgatggaaaagctatgaagatagaagtcatcggaaatgacttaggattgcctatgacacctcgtataaatgttgttggggcttctaatggcagagctacaagaacagttgttatgacgcctgagtttagtcaacgtggcagaggttca

SEQ ID NO: 64659 - DNA, 266 bp, Zea mays
gtctcgtgcacatgtgattgttatgggtgccaccaaccgtccaaacagtatcgatcctgctcttagaaggtttggtaggtttgatcgcgagattgatattggtgttccagatgaagttggccgccttgaggttcttcggattcacacgaaaaacatgaagctggctgaagatgttgacttggagctcattgcgaaggatacccatgggtatgttggtgctgatcttgctgccctttgtactgaagctgctcttcaatgcattcgtg

SEQ ID NO: 64660 - DNA, 270 bp, Zea mays
gatcagattccctggcgaagtgcgtgaagcgcctgatactgccactggagatatcatctttgttctccagcagaaggagcatcccaagttcaagagacagggcgatgacctcttctacgagcacacactgaccttgactgaatctctgtgtggcttccagtttgttctgactcacttggataacaggcagctgctgatcaaatcgcaccctggcgaagttgtgaagcctgattctttcaaggcaatcaacgatgaaggcatgcccatgta

SEQ ID NO: 64661 - DNA, 266 bp, Zea mays
cgtgaggtaaatgtgtacatggcgaagtcgccgagcaggcagagaggtacgaggaaatggttgagttcatggagaaggtagcgaaaactgttgactcggaggagctcactgtggaggagcgcaacctcctgtctgttgcatacaagaacgtcattggagcccgccgtgcctcatggcgcatcatctcctccatcgagcagaaggaggagggtcgaggcaatgaggaccgtgtaacactcatcaaggactaccgtggcaagattgaa

SEQ ID NO: 64662 - DNA, 266 bp, Zea mays
ctgctggtgtgcttcggttggttttccatgatgcagggacttttgaaattggggacggatcaggtggcatgaatggctctataatttttgaagttgacaggcctgaaaacattggcctaaatagatccataaagatactaagaaaagcaaaagaaggaatcgacaacgttcagaaagtgtcgtgggcggatctgattgccgtggctggcgctgaggcagttgcgctctgtggcgggcctgagattccagtaaggctaggaagagta

SEQ ID NO: 64663 - DNA, 261 bp, Zea mays
tagggggaagagcttcaagattggttcactgcagatgttcatggagaacaatggaagcactgaagatatgggtcctcgaccttttcctgtcaaggaggttcacaaaatagcagtactagatattaggttagctaatgctgatcgtcatgctgggaatattctagtgtgcaaggagggagaaggtggcaactacaagctgattccaattgatcatggttattgcttgccagagaagtttgaagatgttacatttgagtggct

SEQ ID NO: 64664 - DNA, 270 bp, Zea mays
gagattgtgaaggaagtctcatcctacctcaagaaagttgggtacaaccctgataagattgcctttgttcccatttctggttttgagggcgacaacatgattgagaggtccaccaaccttgactggtacaaaggcccaaccctgcttgaggctcttgaccagatcaccggcccaagaggccttcagacaagcccctgcgtctgcccctccaggatgtgtacaagattggtggtattggaactgtaccggttggtcgtgtggagactggtg

SEQ ID NO: 64665 - DNA, 268 bp, Zea mays
gatcacattccctggcgaagctgatgaagcgcctgatactgccactggagatatcatctttgttctccagcagaaggagcatcccaagttcaagagaaagggcgatgacctcttctacgagcacacactgaccttgactgaatctctgtgtggcttccagtttgttctgactcacttggataacaggcagctgctgatcaaatcgaaccctggcgaagttgtgaagcctgattctttcaaggcaatcaacgatgaaggcatgcccatg

SEQ ID NO: 64666 - DNA, 269 bp, Zea mays
gtttgtcctaccaccaccgctcaccgcggtttggctttctcccctcttctgcaccacttctcgctccggattccggattccctctgctctttccctaacgaaggtcgccatggcggggagaggtaaggcgatcggctcaggcgccgccaagaaggccacgtccaggagctccaaggctggcctccagttccccgtgggaaggatcgccaggttcctcaaggccggcaagtatgccgagagagtcggcgccggcgcccctgtctacctcg

SEQ ID NO: 64667 - DNA, 264 bp, Zea mays
aagcctctgagctcgccaccaccgctcccgacgcccctcgcctctactctgttctgctcagcactcctctgaaaccgggcgatgcaaccactctagaagtgctatacatgctcactcactctttagagcccttccccgctgagattagccagtcagagtcccagttggtttactaccgtgacagtgcggtgcttctctcgccctaccatgtcctggagcaggttacctacatcaaaatgccaagcaataggatcgaatccttca

SEQ ID NO: 64668 - DNA, 261 bp, Zea mays
agcttcgatccggactagctgcccctgccttaaatacaagtatgttgcttagttggatcatcttgatacaagtactgtgtgttgaagggcgggcctggtgcagcggtagagcctaccgtttgtaactggaaggtcccgggttcgagccccagcctctgcatattatgcgggtaaggcttggcgtttaaagatacccttccccagataccgcacagtgcgggaagcctacggcactgggtacgcccttagttagcacaaggg

SEQ ID NO: 64669 - DNA, 261 bp, Zea mays
ggacgagtgaccacaaaagctgatgtcttcagctttggtgtcatcttgatggaactgattacagggcgcaaggcacttgatgagactcggccagaggatagcatgcatctagttacatggttccggagaatgcagctgaacaaggaaacattccgcaaagcaatcgaccctgttattgaccttgatgaggagacatatgctagcgttagtactgtctcagagcttgctggtcactgctgcgctagggaagcacaccagagg

SEQ ID NO: 64670 - DNA, 256 bp, Zea mays
gtctcacaggcgacatttttagatccgcaagatgcgattgcggtgaccagcttgctatggcgattgagatgattgagaacgccggaccaggcgtaatagtttatctccgtggacacgaaggacggggtatcggtctgggccacaaacttcgtgcttataactatcaggatgatgggcgtgatactgtcgaagctaatgaagaacttgatcattctgtcgactcacgataatctcggattgccgcacagatactacg

SEQ ID NO: 64671 - DNA, 261 bp, Zea mays
tggaacttccgtactcgtcgagtgagatcattagaaggctggagctgcttgacgaagaggatgtggttggctgcggggtcttcggcacggtgtacagaatggtgatggacgatggcacgtcgttcgccgtcaagaggattgatctcagccgccaaagccgcgacaggaccatggagaaggagctcgagttcctgggcagcatcaggcacataaatcttgtcactttgcgaggctactgccggctgctccctgcagcaaagc

SEQ ID NO: 64672 - DNA, 264 bp, Zea mays
gaccagcacgaacagcattgcttcgatctttgcatggacaagaggacttgcccacagggcaaagctcgacgacaacgctagactactcgacttcgctctcaaactcgaggctgcttgcgttgagaccgtggagtccgggaagatgactaaagatctggcgattcttgtccatggatcctccaacgtcacgagaagccattacctgaacaccgaggagttcatcgacgcagtcgctactgagctccgatcaagactgggagccaa

SEQ ID NO: 64673 - DNA, 263 bp, Zea mays
ctcggaggtgtaggagttggtgaacacccatgatctgtagatgtcgcagttggaagggtccaggaagatttatgcacagggagatgattatcacgagtacttcaagcgctcatttgaggaagacatcgctgcgcaagtgcctcaaggagtggaatggggtacaactattgattgggggaaatcaggcagaggagggcatgttgacggaccaagtggcgaggcaaaattttctaatgattttgaagttcattatattggcagta

SEQ ID NO: 64674 - DNA, 264 bp, Zea mays
agttattggtaaggagattgagaagtctacctccagcatcttcccacttcaaaacgtcttcatccgcaaggtgaagatactcaaggcccccaagttcgatcttgggaagctcatggaggttcatggcgactacaaagaggatgttggtgtgaagcttgagaggcctgtcgagggagatgaggctgtgcaggaggttgctgctgccgagtagtgtgtttgctacttctatatctaggctgagtctggacatgaggttgcttatga

SEQ ID NO: 64675 - DNA, 259 bp, Zea mays
gtttatggagctgtcagaattacatgatggctttattgttcaggattctcttaccatcaaagcccaagttcaagtcattagggagaagatagaccgtccatttcgttgccttgatggtcagtaccgaagggaactaattagggtgtatctatcaaatgtggaacaaatttatcggtgttttattgatgaaaaagaaggacgttcagcaggctgattgaggataaactcgggtggtccagtttcagtggattctggctag

SEQ ID NO: 64676 - DNA, 257 bp, Zea mays
ggacgagtgaccacaaaagctgctggcttcagctttggtgtcatcttgatggaactgattacagggcgcaaggcacttgatgagactcggccagaggatagcatgcatctagttacatggttccggagaatgcagctgaacaaggaaacattccgcaaagcaatcgaccctgttattgaccttgatgaggagacatatgctagcgttagtgactgtctcagagcttgctggtcactgctgcgctagggcagcacacc

SEQ ID NO: 64677 - DNA, 259 bp, Zea mays
cagggaggaggtgagccaccggaagcggagacgtgagcactcgaccaaccccgtcgatccggctgcggcgcggcgtgctagatcgctaccgaccatggtggtggaggagatcgccgagggggtgaagaacctaaccgtcaccggagatgcggcggcttcaggcggagaggggcagaggaggggcggcggcggcagcagcaaccgcatccaggtgtccaacaccaagaaacccctcttcttctacgtcaacctcgccaag

SEQ ID NO: 64678 - DNA, 249 bp, Zea mays
cttcgcccatttcttcttaggaggctcaagtctgatgtagaaaagggtctacctccgaagaaggaaaccatacttaaagttggaatgtctcagatgcaaaagcagtactatcgcgctctgcttcagaaggatttggaggtgattaatgccggtggtgaacgcaagcgattgcttaacattgccatgcagctgcgcaagtgctgcaacaatccatatttgttccaaggagctgaacctggcccaccctac

SEQ ID NO: 64679 - DNA, 261 bp, Zea mays
ttgaagcaagaaaactagaaaaggctcctcccgaccgcaacgcccctcatctccctcgaccccgacatccccgacccgatggcgcccaaggcggagaagaagccagcggagaagaagccggcggccgaggagaaggcggagaagacgaccgcagggaagaagcccaaggccgagaagcggctgcccgcgtccaagtcctccggcaaggagggcggcgagaagaaggggaagaagaaggccaagaagagcgtggagacctac

SEQ ID NO: 64680 - DNA, 234 bp, Zea mays
ctaagcatgacgctcagctctgcgtgcttgccgatgactgcgatcagcctgattatgtcaagctggtgaaggctctctgcgctgagcacaatgtccacctggttactgtgcctagcgccaacactcttggagagtgggctgggctttgcaagatcgactctgcggacaaagcgaggaatgttgtacgctgctcctgtgttactgtcaaggactacggacgagaatctgcaggcc

SEQ ID NO: 64681 - DNA, 257 bp, Zea mays
caaaaatgcaacttggtgtccaagttcttgtaactgatccaagggaacttgagaagattcgtcagagagaatctgacataacaaaggagcgaattgagaaaattctcaaggctggagctaatgttgtgttgaccaccaagggaattgacgatatgtccttgaagtactttgttgaggctggtgcgattgcagtaaggcgtgtgcgcaaggaagatttgcgacatgttgccaaagccactggtgcaactatggtgtct

SEQ ID NO: 64682 - DNA, 262 bp, Zea mays
tgttaaatataggatggtgcccttaaagctattggtatcgacaactcaacaatcaaacatattccaaggtttaacaccacttctgaactctcaggggacgctttaatctgttacaacttgaggacgtcaaacatcctactgacagagagctaccgagccaaagtgtgctgttctgaactgtcaaaaagtggtaatatcgtgctattaaagggaacagggggctacattgatccagagtacttggagacctcagagctcactg

SEQ ID NO: 64683 - DNA, 154 bp, Zea mays
gatcctgctggtgctggactactacaattctcagcactagttgtaataaagccagtgcgcttttcatgtataattctgtattgtggctcgcgaaaataaaatttggcaacggtttatgaacttaaaaaaaaaaaaaaaaaaaagggggggccgc

SEQ ID NO: 64684 - DNA, 255 bp, Zea mays
gctgaaacatatgtttccttacaaatgtacaagcaagctgccttttgttatgaggagctaatattatcccaaccaactattccactctatcatatagcctatgctgaggttctgtacactatgggtggcttggaaaatcttcagacagctaagaagtactatgcatcaacaatccagttgactggaggcaagaatacaagagccctctttggtgtatgtctgtgtacttcggcaatcaatcagttgaccaaagga

SEQ ID NO: 64685 - DNA, 58 bp, Zea mays
gcagcagcagcaggtgtattgtgcgggtatgtaatggtattgcaactatattgggtgt

SEQ ID NO: 64686 - DNA, 284 bp, Zea mays
acagcatgttttgaggagagacttggaagcatgggaagtagtggcagttggagcattgtctggaggacttgcggcaatagtgaccactccctttgacgtgatgaagactaggatgatgactgcccctccaggcacaccagtgtctatgcagatgataatcttgtccatccttggaaacgagggtccacttgggctctttaagggcgcgatcccccgcttcttctggattgctcctcttggagcaatgaactttgcaggctatgagcttgccaagaaggcaatga

SEQ ID NO: 64687 - DNA, 284 bp, Zea mays
ggaaaccctagccgccatatctcacgatccactcgagcaccaagccgagggaaggtgaggagcgatggcgcgcggcgtggtgtcggcgaagggcggcgcggtcgcgggcaagaagaaggggtcggtttccttcacgatcgactgcaccaagccagtggaggacaagatcatggaggtcgcctcgctcgagaagttcctgcaggagcgcatcaaggtcgccggcggcaaggctggcaacctcggcgactccgtcaccatctctcgcgagaagaccaaggtcaccg

SEQ ID NO: 64688 - DNA, 294 bp, Zea mays
ttctcctcgttcggatccattggatgctcgacaagcttggcggacttttgctcccaagccatcttctggacctcacaagtccagggagtgccttcctctgatcctcatcatcaggaacaggctcaagtatgctctgaactaccgtgaggtcatttctatcctgatgcaacgccatgtacttgttgatggcaaggtcaggactgacaagacctaccctgctgggttcatggatgtcatttccatccctaagacaatggagaactacaggctgctttatgacaccaagggccgctt

SEQ ID NO: 64689 - DNA, 281 bp, Zea mays
aattcggctcgaggcatatgatttgctgctgcaacaagatggatgcaagcactcccaaatactccaaggcacgttatgaagagattgtgaaggaagtctcatcctacctcaagagagttgggtacaaccctgataagattgcgtttgttcccatttctggttttgagggcgacaacatgattgagatgtccaccaaccttgactggtacaaaggcccaaccctgcttgaggctcttgaccagatcaccgagcccaagaggccttcggacaagcccctgcgt

SEQ ID NO: 64690 - DNA, 277 bp, Zea mays
gacaagttatagcttgctgcccgtaaggtcaggcgtgccacaaggacttattttgtgatatcactggtctctgatgatttctctcactctagtagcacctacgttggcaaactgaagccaaacttcctcggcacaaagttcacaatcttcgacagccagcctcctcctgacgctgtagtgctaccaaacaataagacaagcaaaaggcagtccaagcaagtatcaccgagactgccgctaggcaatgtacaatgttgctacagtcacgtacgagctc

SEQ ID NO: 64691 - DNA, 284 bp, Zea mays
gctcgtcggcgtggtggtgagaacaaaggccataccaccaggatgtgccatgttaccatccaaaagcaaaaggaaatagccgaagctgcagcacaacaggctcagccgaagcaggtcatgcacactgcttcgtatcattcgccttacatcccagaatatgtaggcaatcaccctgcagtttctgttgcttcggcgagtcaacctcaagcttcctggcaacagcctcctcctccaccaccgctgcaacaaggccagcagccagaatggagccaatatgctccaca

SEQ ID NO: 64692 - DNA, 279 bp, Zea mays
aaggtggacatgagcctggctgacgtgaggttccagtagaggatcctgtggtctaagatgctgcataccatgctgtgaaatcgatccaagagaggtccaactccctgtttccctacgaacttctcgagatccttcgtgcccatgcacaggttgcggaagactttgctagatttgacattctgatgagactgaagataggcagcaaggacgagaagatcatagcagaggtccataagagcctggaaggggcctttgtgctaaaccagcatcagccggcgg

SEQ ID NO: 64693 - DNA, 276 bp, Zea mays
gatcacattccctggcgaactgaatgaagcgcctgatactgcgactggagatatcatcgttgttctccatcagaaggagcatctcaagttcaagatcaagggcgatgacctcttctacgagcacacactgagcttgactgaatctctgagtggcttccagtttgttctgactcacttggataacaggcagctgctgatcaaatcgaaccctggcgaagttgtgaagcctgattctgtcaacgcaatcaacgatgaacgcatgcccatgtatcagag

SEQ ID NO: 64694 - DNA, 274 bp, Zea mays
gatgagctgcagcggcgcgaggacaatatggtggagatccgcgagagccgccgtgatgagagcctcctcacgaggcgccgagaggggctccaagcccaggtccctgcccctccctccggggtcgagaagaagcttgaaagcctctcagctatggttagtggggtttattcgtatgatagtaaccttcagcttgaggccaccacacagttccgcagattgctctctatagagatgagtctccccatcgaagaacttatcaaaacaggtgtagttc

SEQ ID NO: 64695 - DNA, 274 bp, Zea mays
aaccacaccactctactgacgcccgacgagcagtgtaacattttccttcagccatgggtaaggagaagactcacatcaacattgtggtcattggccatgtcgactctggcaagtcgaccaccactggccacctgatctacaagcttggaggtattgacaagcgagtgattgagaggttcgagaaagaggctgccgagatgaacaagcggtcattcaagtatgcgtgggtgcttgacaagctcaaggctgagcgtgagagaggtattacaattga

SEQ ID NO: 64696 - DNA, 276 bp, Zea mays
ctcgcattaagcaagagaaagaacggttgagatctacaaaagttccaggaggtgaatttgctgctgaagttactgcagtatccaaccaacctgtaaaggattcatctacacttgaagccatattaaagaagccacacgtacaatataaactccttgacgagcatggatgcggaaatgagaatttatctcgaattgagaaggaatgtgtagagattgatatcaagtatgaaggtttcatcgcacgacaacaatgtcaattacatcagatcgtaaacc

SEQ ID NO: 64697 - DNA, 273 bp, Zea mays
ggagggcatccctccagaccagcagcggctcatctttgctgggaagcagcttgaggacgggcgcacgcttgccgactacaacatccagaaggagagcaccctccacttggtgctgcgcctcaggggaggcatgcagatcttcgtgaagaccctgaccggcaagactatcaccctcgaggtggagtcttcagacaccatcgacaacgtcaaggccaagatccaggacaaggagggcattcccccagaccagcagcggctcatctttgctggaaa

SEQ ID NO: 64698 - DNA, 271 bp, Zea mays
atgttttcgtactggttctctgccatgaccatgaagagtgttggaagtgtcgccctaaagatggtggaggaggttcgcaggcagttcaacaccattcttgggttgatggagggaacaggcaagcccgactatgcaacctatgtgaagatttgcactgatgcttccatcaatgagatgattcctcggggtgctctggtcatgctgactccctcattgttggaacctctttggcatcgagactctctctggcgttcttgctggtgccctgatt

SEQ ID NO: 64699 - DNA, 268 bp, Zea mays
ctgaaataaaaattgtatcatactgcatacaatgtcagtagacaatcaatccttaaagggataaatccatccccagtgtgggataagttggtatttaacagtataagagctaggcttggtggacgagtgatacttatgagttcaggtgcttctccactgtcatcagatgtcatggaattcctgatgatatgctttggtggtgaatttcttgaatgctatggaatgacggagacatcctgtatcatatctgcaatggatagtggtgaca

SEQ ID NO: 64700 - DNA, 267 bp, Zea mays
cattagaatatgagaaaagtgaaatcaatgcaggatttttttactcaaacgcagaacaaagagagaaaatggttgctgcagagagacgccaagttgatgaacgtgtcaaacagattattgaattgaaaaataaggtttgtgctggaggcgataaaaactttgtggtgatcaatcagaagggcattgaccctccatctctggacctccttgctagagcggggattattgctcttcgaagagcaaagaggagaaatatggagaggcttg

SEQ ID NO: 64701 - DNA, 266 bp, Zea mays
tgatggccttgttaagggtcttcgtgaggctgccaaagcaattgagaagcatgctgctcagctttgcgtgcttgcggaggactgtgaccagcctgattatgtcaagctggtgaaggctctttgctctgagcacaacgttcacctggttactgtgcctagcgctaaaactcttggtgaatggtctgggctttgcaagattgattctgagggcaaggcgaggaaggttgtgggttgctcctgtgttgtcgtcaaggactatggcgaag

SEQ ID NO: 64702 - DNA, 270 bp, Zea mays
ctctatttgtttataggaaaaattgagtctgtatatgcatagtcagatgctgccataacatcaggtgtgtaagcatctgactatgcatactcagactctatttgtttataggaaaaattggatatggaactgcaagtgaggctttggcctgcaagctaccattagtgtttgttcgcagagattcactcctacgaagagccatttttgcgaaatttgcttgagcactaccaaaacagcattgagatggtcagaagtgatcctcttgctgga

SEQ ID NO: 64703 - DNA, 270 bp, Zea mays
cccaagccgcgccgcaatagctcgccccctcgttcgccgcctctcctgctcctaccgcagctctccctcaggtttagtgttcgcaatggcggccttcaacaagcttggtggccttctaaggcacagtgctctggtgagcggtatcactggtggctcttctcctgcagtgttcaatgctgcacggctcatgtctaccaagctatttattggtggtcttgactggggtgttgatgacgtgaaactaagagaagcatttagcagctttggaga

SEQ ID NO: 64704 - DNA, 268 bp, Zea mays
  unsure (1)..(268): unsure at all n locations
ccactgcattctcgaattacgattcccaatccagcaaaccctaccagccttttgcaaactcagagagggacccgatggcacccaaggcggagaagaagccggcggcgaagaagcccgcagaggaggagcccgcggccccggcggagaaggcccccgctgggaagaagccgaagggnacgaagcggctcccggcgggaaaatccgccggcaaggaaggcggtgttgacaagaaggggcggaagaaggccaagaagagcgtggagacgta

SEQ ID NO: 64705 - DNA, 279 bp, Zea mays
gggggagggcatccgctgcatcatccgcatggagaactagatttcgctgtctagtttgtgatctggcctgggcttggggttaataaaagaggcaatgctagcctgccctttcgatgaggaggtacatacacgctggcgatggaccgcgttgtgtgtcgcgttcagtttggcttttgccaagcagtagggtagcttcccgtgtcggtaattatatggtatgaaccatcaccttttggctctacatggtatgaacgtaagatacaaattccaactacctct

SEQ ID NO: 64706 - DNA, 289 bp, Zea mays
aggcgaagaagtcggtggagacctacaagatctacatcttcaaggtgctgaagcaggtccaccccgacatcggcatctcttccaaggccatgtccatcatgaactccttcatcaacgacatcttcgagaagctcgccggcgaggctgcaagcttgcgcgctacaacaagaagcccaccatcacctctcgggagattcaaacctctgtccgccttgtccttcccggcgagctcgccaagcacgcggtctccgagggcaccaaggccgtcactaagttcacatcatcttag

SEQ ID NO: 64707 - DNA, 283 bp, Zea mays
aaattcagtgcactggagtgagccatgatggcaacattctcatcactggtggtgatgatggagttgttgcagtgtggagatttgtgaaggatggcatccgccgtctcctgagaatggagaaggctttgtgtgctcacacgggcaagtaacttgcgtctctgtcagccaaccttactcattaattgtctcaggctctgatgactgttctgttatcttgtgggacctgacaagcctagtctttgtgaagcagctaccaaggttcccggcatcagtatccgcgcta

SEQ ID NO: 64708 - DNA, 208 bp, Zea mays
cacagcttctcaagatccgcgctgatatagagatgactcgcttccagtttgatggagtgctccatattaagcaagctatgaagagagctgaagctgcgggcaatgataactgtcctgtgaagattaagctagttgcaccaccactttagttttgaccacacagacccttgacaaggatcaaggcatttcagttctcactactgcagtc

SEQ ID NO: 64709 - DNA, 282 bp, Zea mays
aagcaccttcccaaaaaaatcccccattttcttcgaggcgaggagagcgtgaaagacagggcaccggcagcgacgatgtcggggcgcggcaagggcggcaaaggtctgggcaagggcggagaaagcgccaccgtaaggtgctccggacaacatccagggcatcaccaagcccgcgatccgtaggctggctcggaggggctccgtgaagcgcatttcggggcttatctacgaggagacccgcggcgtcctcaagatctacctcgagaacgtcatccgcgacgc

SEQ ID NO: 64710 - DNA, 283 bp, Zea mays
agatgaagggtgactatcacaggtatcttgcggaatttaagactggtcctgagaggaaggaatctgctgagagcacgatgatggcctacaaggctgctcaggacattgcgctggctgagctggcacctacccatccgataaggctgggcttgctcttaacttctcagtgttctattatgagattctgaactccccagtacaagcttgcaaccttgcaaagcaggcgtttgatgaagctatctcccagttagacacccttggggaggagtcatacaaagatagc

SEQ ID NO: 64711 - DNA, 282 bp, Zea mays
taatgacaagattggacttgaaaaagaggcccaactaaagtccagaccagcaaagagtgggaagactatagaacttgatgatgtcacattccaccagtgtgtcaacttaacaagatttaactcagaaaagacagtcagtttcgagcacctgacggtgaatttgagttgatgaagtatcgaatcacagagggtgtaaaccttccattccgtgttctgccgcccatcaaggaattgggccgaacacgcatggagatcaacgtgaaagtcaagagtgttttcgga

SEQ ID NO: 64712 - DNA, 285 bp, Zea mays
tggttcttgcttctgcttactcgcatgagttgccacgatatggtctcgaagttggtctgaccaactatgcagctgcctactgcactggccttctgttggctcgccgtgtgctcaagacccgtggtttagataaggaatatgagggaatgttgaggccactggtgaggacttctctgttgagccagctgatgagaggaggcctttccgtgctctcttggatgttggccttattaggactacaactgggatacgtgtctttggtgccctcaagggagctttggatgg

SEQ ID NO: 64713 - DNA, 278 bp, Zea mays
ggcagcggcgcgggcgaggagcagaccagcacccagcagccctcgtcggggggcggcagccgcagcttcaccagccgccgcctttccccgtctcctctgcctctgcctctccccctaacccccttccatttctccaccccacccgctcccgcttccgcttcctcgccacttagttcgttccgcacccgcagccgcggctgcgttcgcattgggggcacgcaatggagcagtacgagaaggtggagaagatcggggagggcacgtacggggtggtgtac

SEQ ID NO: 64714 - DNA, 279 bp, Zea mays
attgtgtggatcaccctgaagaggttagcaagctggccaaagtgaaggcgcaggtttcagaagtcaagggtgttatgatggaaaacattgaaaaggttctggatcgtggagagaagattgagctgcttgtcgacaagaccgagaacttcgctcacaggcacaagatttcagacagcagggtccaaatgtcaggagaaagatgtggttacagaacatgcccatcaagctcatcgtcctgggaataatcatcgcactcattctgatcattatcctctctgt

SEQ ID NO: 64715 - DNA, 277 bp, Zea mays
ctcgagcgattcagctctatctgatatttacacatttggtccaacgtttagggctgacaattcaaacacttcaaggcatctggctgaattttggatgattgaacctgagcttgcctttgcggatctgaacgatgacatggttgtgcaactgcatatctccagtatgtagtaaagtatattctggagaactgcaaagaggatatggatttcttcaatacttggattgaaaaaggcatcatagatcggttaaatgatgtagtagagaagacttcgttca

SEQ ID NO: 64716 - DNA, 277 bp, Zea mays
ggagggacagaatgacatatactatatcactggtgagagcaagaaggcagtggagaactcccccttccttgagaagctgaagaagaggggctatgaggttctgtacatggttgatgccattgacgagtatgctgttggtcactcaaggagtttgagggcaagaagcttgtctctgccaccaaggagggtctgaagcttgatgagactgaggacgagaagaagaggaaggaggagctgaaggagaagtttgaggggctgtgcaaggtcatcaaggagg

SEQ ID NO: 64717 - DNA, 270 bp, Zea mays
tgaagcagatgtgttggtggtatggattgaagcgagatgtggctacacgtgtggctatgtgcgaggtgtgtcagaaatgttaaggccgaacaccaaagaccagctggactattatacccattaaagatacccgactggtagtgaaagagattagtatggactttattactggattgcctcgaacctcaaaaggataggattctatatgggttattgtggatagactgaccaaagtggctcatttgatttcggtcaagactacttataaag

SEQ ID NO: 64718 - DNA, 274 bp, Zea mays
caggaaaaagaaggattactatgcagttctcggagtagagagaagatgcactgtggaggaaattaggaaggcctacaggaggttatcactgaaggttcatcctgacaagaacaaggttcctggggcagaagatgctttcaagtggtaagcaaggctttcaagtgcctaagcaatgatcagtcgcggaggacttatgatcagacaggcaccattgaggaccatgaattcaatgagcaacatcccaatgtcatgatgcggggagctgctaggcgga

SEQ ID NO: 64719 - DNA, 250 bp, Zea mays
gattagcgggagcgccctgcccaagcagagagaaaccgcggcgcgagaagagggaggaagggcagacgggcgagcaggatgatagagatcatcagcatccacatcggccaggccgggatccaggtcggcaacgccagctggagctctactgcctcgagcacggcatcgagcccgatggcaccatgcccagtgataccacggttggcgtcgcacatgatgccttcaacacgtatcttcagcgagaccggtt

SEQ ID NO: 64720 - DNA, 280 bp, Zea mays
gaagcatttcccatctgtgaattggctcatttcctatacgaaatactccaaggcccttgagtccttttatgagaagtttgatccagatttcattgatattaggacaaaagcacgtgaggtgttgcagagggaggacgatctaatgaaattgtgcagcttgttggtaaagatgcgctgtgcagaatctgacaagattacactggagacagcaaagctactgagagaagattatttggcacaaaatgcatttaccccatatgataagttctgcccattctac

SEQ ID NO: 64721 - DNA, 273 bp, Zea mays
ggggtatcttgaaatatccgatgttaactgtgaagcactcccagaagctctctcgcgttgttggaacttgcaggcccttcatgtattagcatgctcaaaacttgcagttgtacctgaaagtatcggcaagcttaagaagctagaactctggaactgaatggtgtttctagtatcaagagttcaccagagtctattggtgattgtgataatcttcgaagattatacctagaaggttgtcgtggaatcgaagatataccaaattccttgggaaaa

SEQ ID NO: 64722 - DNA, 247 bp, Zea mays
ggactccctgacccttctcatcggtgacaagccggtcaccgtctttggcatcaggaaccctgacgaaatcccgtggggtgaggctggcgctgagtctgtcgtggagtccaccggcgtcttcactgacgaggacaaggctactcacatctcaagggtagtgccaagaaggttgttatctctaccccaagtaaagatgcacccatcttcgttgttcgtgtcaatgaagaccagtgcacctcgggtgtta

SEQ ID NO: 64723 - DNA, 271 bp, Zea mays
ccgagcctggtgcgctctcccctgcccagtgccgatcgttggagaagatccttccgccgaaaccagggagccaactgtcggacatagagctggaccagtgcgaggagaccacccttcacgatgtcaacattgaagagggatgaggcgcaggcagcagcagaagaagcaggaagctcacgatgaagacgaggaggaggatgctcaaccaagggtgcaatgtgcccagcagtaaaatccgtgttcgttggagctgttctccaaaagtttcagc

SEQ ID NO: 64724 - DNA, 278 bp, Zea mays
agcgagcgagggacccggggcggaagacgagagagaagacgtctctctcctctcggcgtcaccgatccccaacctctcgtctgctgcctgcctgcctgcctgcctgcaaaaaggagtttgtcatggcgtctaagcgcatctcaaggagctgaaggacctgcagaaagacccccccacatcatgcagtgcaggtcctgctggtgaggacatgtttcattggcaagcaacaattatgggaccacctgacagtccctatgctggtggtgttttcttagtga

SEQ ID NO: 64725 - DNA, 274 bp, Zea mays
cactcatcgatctacacacatacatagtttcttctactacacgacgacaaacatggggaagcctgcgaagatcggagagtggggtggatacgccggcgatcgtcgggatctgagggctactccggaccggctgatcgagtgaaggtcacggcggacaacagcagctgcatccgctccatctccttcatctacatcggagccgatggcaaaccgtacgaggaggggccatggggtttcggccatgctggcacggagtacaagattgatctgtgca

SEQ ID NO: 64726 - DNA, 267 bp, Zea mays
ggggcattgcaagttgcggtatggagatggtggagatgatgaagatgctgacctcgaggaattctatgattacagcagcagttatgttgattcagaaggcaagcagttgatgctgttgatgacttgaacaacaacattgagctgggaatcggtgggtctgagctagtaataacaaacaagagcgagaaaggcactcgggtcagaacccttggctctagggaatttatgcgctactatcgccagaaaccacggccttctgttgcacca

SEQ ID NO: 64727 - DNA, 266 bp, Zea mays
ggttcgagaagcagacggcaggcacgctcgacatcctgtgccctccttggatggattggttccatggcggcctgcagttccagattgagcaccatctgttcccccgcctgctcggtgccaccttcggaaggttgcgccggcggtgcgtgacctttgcaagaagcatgggctgacctattccgcagcctccttctgggacgcaaatgtgcttacatggaagacactcagggctgccgcattgcaggccaggagcgccacaggcggcg

SEQ ID NO: 64728 - DNA, 266 bp, Zea mays
ggcaatgtctttgctttgaaaagaatagtgaaaacaaatgaagggctagatcggttctttgatagagaacttgagatattgggaagtgttaaacatcgctatttggtcaatctcgtggttattgcaactctccttcatcaaaacttttgatatatgattatcttcaaggtggaagcctggatgaagtgcttcatgaaaagtctgaacagttggattgggatgcacgtattaacatcatacttggagctgcaaaaggcttgtcttac

SEQ ID NO: 64729 - DNA, 265 bp, Zea mays
gggagagaagggtggcaagaaaaagaccgtcgaccctttctctaagaaggattggtatgacatcaaggcaccgtcggtgttcagtgtgcgcaacatcgggaagactctcgttccaggacacagggtaccaggattgcttctgagggtctgaagcacagagtctgtgaggtttgcctagctgatcttcagggcgacgaggatcaagcttacaggaaaatcaggctccgtgctgaagatgtgcagggcaggaatgtgctcacaaact

SEQ ID NO: 64730 - DNA, 265 bp, Zea mays
gatagagcaaagtacaatagagatgacttccctgttcagtacgatgctgcaaagttctttgacattaaatcgtacagcgaggatgacatccacaagagcgtgaagtacaatcgtgggcaagcacaaccaacggaaacaagaagcttgatgctatataacaagaagctcagtcaaagggatctacatgcgctatattcttgttcttctcagtgaatacaagtgggcagtttgttggtgttgctgaaagactggcgccgttgatttt

SEQ ID NO: 64731 - DNA, 163 bp, Zea mays
ggtctgcagcccccaactacccccagcctcggaaggaaccttccagaagcgcaagactctaaggccgacgccttcccattcttcctcgccgcgggggtctcctgacatcaataaacaatggcgccggctgttgctgtgctcggtagcatcgatggtgtctagg

SEQ ID NO: 64732 - DNA, 263 bp, Zea mays
gtggcaagagggttttcctgttcccccagtgctacgcagagaagcaggctctgggtgaagtgagccaggagctgctggacactcaggtgaacccagctgtgtgggagatcgtggacacatggtgctgaaacggaggatggactatgaggaggcatctgaaacctccgcgtggaaactcctcgccgaggtctctctctccgaggagcgcttcgaggaagtgaaggcgtacatcttcagcgctgctggcctggttcagtatgatg

SEQ ID NO: 64733 - DNA, 266 bp, Zea mays
ctcttcgtcgcgcctccgtagcacgactccgactcggccaaggtgacacccccagctctcctattcccttcgccctcttcggcatcttctccgccgtcatccgcgcaggtgaggcggtggtcctcttcaacgtctgcgacagctacgtgcggcgaccggaccacgcagaccgtgtcatcggcaccctccttggatccctcctccccgatggcaccgtccacgtccgcaactcctacgtggtcccccacatcgagtcggccgaccag

SEQ ID NO: 64734 - DNA, 266 bp, Zea mays
tgaagagaaaagcgagatggaggagaagaagggccagtacgccaagttctggaatgagtttggcaaatcaatcaagctgggtatcatcgaagacgcgactaacagaaacgccttgcgaagcttcttagatttgagagtaccaagtcggatggcaaacttgcctcccttgacgagtacatctcacggatgaagtcagggcagaaagacatcttctacatcacgggaagcagcaaagagcagctggagaagtctccattcctcgagag

SEQ ID NO: 64735 - DNA, 162 bp, Zea mays
gcacaagctttggacgagaagcaccagctcacgtcagctgccacagctagagtgtcttccgttgacaagagcataggcctaagtgagatgatcagtgttggcacttcagtgtaaatgataaagcgaaggaaatggatcagaaataccaagtctctgagaaga

SEQ ID NO: 64736 - DNA, 265 bp, Zea mays
acccattaccaatgccaagaacaagaaaccagagaggatagccgcgaatacaatccgaatcccctccaaaaacccaccataccgtctcccccatctgcaagaacaagatccgagagcatcctagggggcacaaacaggagggggaaaaagaagcccagaaagaccaactgaccaaacaaaaaggtggcatctatgagtcatcgaggcaccgccgatcacagagcatagcccgctcctctggtccatgccaagcgtacagcagccg

SEQ ID NO: 64737 - DNA, 259 bp, Zea mays
aaggaggtgctgggcgacaaggtggagaaggatgtggtctctgagcgcgtggtggactccccctgctgcctggtgacgggcgagtacggctggacggccaacatggaaggatcatgaaggcacaggcgctcagggactcgagcatgtctgggtacatgtcctccaagaagaccatggagatcaacccggagaacgccatcatggaggagctgcgcaacgcgcggaggccgacaagaacgacaagtctgtcaaagacctt

SEQ ID NO: 64738 - DNA, 263 bp, Zea mays
caatcggagcagctttcttttcccagaccttagcggtaaatgatgagactgttaagtttgaaatctgggatactgctgggcaggagaggtatcatagcttggcccccagtattataggggtgcagccgccgccattgttgtctatgacatcacaaatccggcctccttcacccgtgccaagaaatgggttcaagatcttcaagctcaaggaaatccgaatacaatagtggctcttgctggtaacaaggttgatatgctagatg

SEQ ID NO: 64739 - DNA, 260 bp, Zea mays
caaaagatgctaagaggaagtgggaaacgtttgcagagcaggctgaaaatgactgcaaagctggctccagctttactgcagctaagcatagccgcatggaaaccatgatcaggagtgcgcatgcactgttgactccgccgttcagcaatggaagaagtcacatgcagctgttaacgatctcagcagagagcaagttgctgaagttgaagcactcgtcaggactgcaattgagaacaacgagcgacatgaactggaagttg

SEQ ID NO: 64740 - DNA, 263 bp, Zea mays
acgagaaggtgcaggacctgcttctgcttgacgtcactcctctctctctgggtctggagactgccggaggagtgatgaccgtccttatcccgaggaacaccaccatcccaccaagaaggagcaggtgttctccacctactcggacaaccagcctggtgtgttgatccaggtgtacgagggtgagaggacccggacccgcgacaacaacctgcttgggaagttcgagctctccggcatcccaccggctcctcgtggtgtccccc

SEQ ID NO: 64741 - DNA, 263 bp, Zea mays
atggaaaatattccagatttcattgtaggagtgaagaacaggaagaggaagatgtccggttttgggcaccgtgtgtataaaaactatgaccctcgtgctaaagtcataagaaattggcagatgaggtgttctcaattgttggacgggatccacttattgaggtggccattgccctagaaaaggcagcgctgtcagacgaatattttatcaagaggaagctgtatccaaatgtggatttctactctgggctaatttatagggca

SEQ ID NO: 64742 - DNA, 261 bp, Zea mays
gtggcaagagggttttcctgttcccccagtgctacgcagagaagcaggctctgggtgaagtgagccaggagctgctggacactcaggtgaacccagctgtgtgggagtcagtggacacatggtgctgaaacggaggatggactatgaggaggcatctgaaacctccgcgtggaaactcctcgccgaggtctctctctccgaggagcgcttcgaggaagtgaaggcgtacatcttcagcgctgctggcctggttcagtatga

SEQ ID NO: 64743 - DNA, 262 bp, Zea mays
ggaggcgccgacgccgagtcctttctccatcctgcatctgccgctgtttccgacaggatgtttctcacgaggacggagtacgaccgtggggtgaacaccttctctccgaggggcggctgttccaggtcgagtacgccatcgaggccatcaagttgggatccactgcgatcggtttgaagacaaaggatggtgttgtcctcgccgttgagaaacgtgtgacctcaccactgctggaaccaagcagtgtggaaaaaataatgga

SEQ ID NO: 64744 - DNA, 260 bp, Zea mays
gatgattggacagcaaagatatggagtatgaagcaagacaaatgtgtatttgatttcaaggagcataccaaggaaatatacactattcggtggagcccaacaggccaggaacaaacaatcctaatcagcagttgcttttggccagcgcgtcttttgattcaactatcaagctttgggaagtcgagcaaggatgccttctgtacagcttgtctggtcataggcaaccagtgtattctgttgcatttagccccgacggcgaa

SEQ ID NO: 64745 - DNA, 263 bp, Zea mays
catgcactggatctgttagagaagatgttgactttagatccatcacagaggatatcagcaaaagatgcacttgatgcggaatatttctggactgatcccttaccatcgatccaaaaagcttgcccaagtatgaggcatcgcatgaattccagactaagaaaaagcgtcagcaacagaggcaagcagaggaagctgcaaagcgtcaaaaacttaaccatcctccaccacattctcgtttgcctccactccagcagcctggccaa

SEQ ID NO: 64746 - DNA, 262 bp, Zea mays
ctcatcttcacccgcgccaagcagtacgccgaggagtacgatgcccaggagaaggaactggtacagcttaagcgtgaggcccgtttgaagggtggtttctatgtcagcctgaggcaaagctgctatttgtggtccgcatccgtggtatcactgtcatgcaccctaagaccaggaagatattgcagcttctgcgtttgaggcagatcttcaatggagtgttcctgaaagtcaacaaagcaaccattaacatgcttcgcagggt

SEQ ID NO: 64747 - DNA, 262 bp, Zea mays
ggactccaagacccttctcttcggtgacaagccggtcaccgtctttggcatcaggaaccctgaggaaatcccgtggggtgaggctggcgctgaatatgtcgtggagtcaccggcgtcttcactgacaaggacaaggctgctgcacatctcaagggtggtgccaagaaggttgttatctctgccccaagtacagatgcacccatgtttgttgttggtgtcaatgaggacaagtacacctcggatgttaacattgtttccaatg

SEQ ID NO: 64748 - DNA, 261 bp, Zea mays
gaggtggccatacgcaacaagcaaagcatacccccaaatccccaatccccaatccccaatccccaaaccctaggttatctcggcgcggcacgatggcggcggcgggctgaggaaggggaatgcgcgcctcccgccggaggtgaaccgggtgctctacgtgcggaacctgccgttcaacatctcgagcgaggagatgtacgacatcttcggcaagtacggcgcgatccggcagatccgtctgggcaacgccaaggacacgcg

SEQ ID NO: 64749 - DNA, 262 bp, Zea mays
atagctgctgtgccccacatgtgtatcaatgggtacaagaacgtgcttgctgttgctgtggagactgactactcgtacccacacgccgacaagatcaaggaagcttcaaggacccgagcaagtttgctgttgctgctcctgtagctgctgcggactctagtgctgctgctgccaccaaggaggaagagaaggcgccagagcctgccgaggagtcggacgaggaaatgggcttcagcctgttcgacgactaagccgctcttat

SEQ ID NO: 64750 - DNA, 262 bp, Zea mays
cagggacctcacatctggagcatgagaagtttgatgcagcaaaatcgcggctaattgagcgaggagaaaaatttggggagatatctttaaaggctcgcaagacaattgcatgcttagtcaggattttatttatgatgggtgtactatacttgtccatgggtattccagagtagtactggaagttctaaagcttgctgcatccaatcgcaagctcttccgggtactatgcacagagggcaggccagacagaactggtttaagg

SEQ ID NO: 64751 - DNA, 261 bp, Zea mays
actcttgattcactcaaggccgcaggtgtaaacccctatccacataagtttccggttggcatctctgtagtggaatacattgagaagtacaagaccttgaacaatgggagaagcttacagatgcgacagaatgtttagctgggaggatcatgaacaagagaacatcatcatctaagctattcttttatgatctttatggtggcggcatgaaggttcaagtgatggctgatgccaggacctcagagttggatgaagcagaat

SEQ ID NO: 64752 - DNA, 278 bp, Zea mays
gctgaactcagtaagcagttgcaagccacgaaactagaagctactacggtgcgtgtccagcgtgatctgcaggaaaagcttcagatagtggagaaagaaaacaaagacctcaaggtagaattactcgcactgtccaaggacctgaagatacttgcacgggaaagagacctgagcaaccaagcagcagaaacagcaagcaaacttcacctggaaagtgtgaaaaagataacaagagttgaggcagaatgccttaagtgcgtcatttaacgcggcgtacg

SEQ ID NO: 64753 - DNA, 272 bp, Zea mays
cagcagtatcagtagttgaggctgctgctcaagccggactgctacaatgtattgatactgttatgtctgaggttgacagattgttgtcttcggaacagaaggctacagattatcgaacaccagatgatggagctgcaccagatcatcggccaactaatgcttgtataagaattgtagcctatctctctcgtgttcttgaggttgcattcagtgcccttgaaggcctcaacaaacagtcctttttgactgactgggaaatcgcttgcataagg

SEQ ID NO: 64754 - DNA, 269 bp, Zea mays
actaaaaaaggtggtcaggccttgcattcacgttttgaatacgtggagaacgagccatcagctgattcgagaactgggggatctgtatctcgtgtgagtggccatgtagcaccaccaaaatcatcagacttctttcaagagtatgggatgggtaatgggttccagaagaaatctagcaatgcctcaaaaactcaggttgaggaaactgatgaagcaaggaagaaattctctaatgccaaggcgatctcgtcatctcagttttttggtac

SEQ ID NO: 64755 - DNA, 270 bp, Zea mays
agatgaagggtgactatcacaggtatcttgcggaatttaagactggtcctgagaggaaggaatctgctgagagcacgatgatggcctacaaggctgctcaggacattgcgctggctgagctggcacctacccatccgataaggcttgggcttgctcttaacttctcagtgttctattatgagattctgaactccccagacaaagcttgcaaccttgcaaagcaggcgtttgatgaagctatctcccagttagcacccttggggaggagtc

SEQ ID NO: 64756 - DNA, 274 bp, Zea mays
cggagacgaaaggagggagttttgagaagctcaaatggctcctaaagccgctcctgccaagaagggtgatgccaaggcccaggccttgaaggtggccaaggctgtgaagtctggggcaggcaagaagaagaccaagaagattcgcacatctgtaacatttcaccagcccaagaccctgaagaaggccagggacccgtggtacccaagaatcagcactactggaagaaacaagcttgatcagtaccaaattctcaagtaccccctcaccacagaa

SEQ ID NO: 64757 - DNA, 268 bp, Zea mays
atgccattgtctgcaacattggccactttgacaatgaaattgatatgctcggccttgagacctaccctggcgtcaagcgcatcaccatcaagccccagactgaccgctgggtgttccccgagaccaacactggcatcattgtccttgctgagggtcgcctgatgaaccttgggtgtgctactggccatcctagctttgtcatgtcctgctcattcactaaccaggtcattgcccaacttgaactgtgaaggagaagagctctggcaag

SEQ ID NO: 64758 - DNA, 269 bp, Zea mays
gactagttctagatcccgcctcacaccgccgcaaggactcgcgacggacggagcaacggaggaagcaactacgcggcaccatggtgaacgttccgaaaaccaagaagacctactgtaagaacaaggaatgcaggaagcacaccctgcacaaggttacccagtacaagaaaggtaaggatagcctttcagctcaagggaagcgacgttatgaccgcaaacagtctggatatggtggtcagacaaagctgttttccacaagaaggcaaaaa

SEQ ID NO: 64759 - DNA, 110 bp, Zea mays
aaggaggagaacaacgatggctcaaacaaaatttcaggcgacagcttgaaagacctgtacaagtcctttgtttctgagtaccctatcgagtcgatcgaagacccatttgg

SEQ ID NO: 64760 - DNA, 273 bp, Zea mays
aaattatcttctgcaaagggccctgcaaaagggcatgtcatgagaaatgtttggaacctcccttaaacaaaagcgtacttccaacaagtagccatgggtggctttgcaaattctgtttgtgcaaggtgaggattttagaaactattaatgcacatctagggacgagttttacagtgaagtgccactttgaagatatattcaaggaaactactgaactaatagactctgaggatgcactagatgaagattggcttctgagtattcaggtgatga

SEQ ID NO: 64761 - DNA, 277 bp, Zea mays
tgaagagaaaagcgagatggaggagaagaagggccagtacgccaagttctggaatgagtttggcaaatcaatcaagctgggtatcatcgaagacgcgactaacagaaaccgcgcttgcgaagctccttagatttgagagtaccaagtcggatggcaaacttgcctcccttgacgagtacatactcacggatgaagtcagggcagaaagacatcttctacatcacgggaagcagcaaagagcagctggagaagtctccattcctcgagaggctaacca

SEQ ID NO: 64762 - DNA, 272 bp, Zea mays
caagcacactggtatgtccttccgtgttcctactgtggatgtctcggttgtagacctcaccgtcagaatcgagaagggggcctcctatgcggatatcaagaaagctattaaggctgcttccgagggtccactcaaaggtatcatgggttatgcggaggaggatctggtttgctaccgacttccttggtgacagcaggtcgagcatcttcgacgccaaggccgggatcgctctgaacgaccacttcgtcaagctcgtctcgtggtacgacaac

SEQ ID NO: 64763 - DNA, 269 bp, Zea mays
ccccattaccaatgccaagaacaagaaaccagagaggacagccgcgaatacaatccgaatcccctccaaaaacccaccataccgtctcccccatctgcaagaacaagatcaggagagcatcctagggggaagaaacaggagggggcaacagaagcccagacagaccaactgaccaaacaaaaaggtggcatctttgtgtcaccgaggcaccgccgatcacagaccaaagcccgctcctctggtccatccaagcgtacagcagccgagat

SEQ ID NO: 64764 - DNA, 272 bp, Zea mays
caatcggagcagctttcttttcccagaccttagcggtaaatgatgagactgttaagtttgaaatctgggatactgctgggcaggagaggtatcatagcttggcccccatgtattataggggtgcagccgccgccattgttgtctatgacatcacaaatccggcctccttcacccgtgccaagaaatgggttcaagaacttaaagctcaaggaaatccgaatacaatagtggctcttgctggtaacaaggtgatatgctagatgcgaggcacg

SEQ ID NO: 64765 - DNA, 266 bp, Zea mays
tcgattggttgttgttgattgcactgcattgcaggttgagggcaccagcagatacgactgcttcgagcctgggacggtcggccggatggagctcctcgtcctgatggcgctcaactggcggctccgctcggttactcccttcaccttcgtcgacttcttcgcgtgcaaggtcgacccaggagggaggcacaccaggtgcctcattgcccgggccacgcaagtcattctggctgcgatgcatgactcgagttcttggaccactgccc

SEQ ID NO: 64766 - DNA, 279 bp, Zea mays
ctctggtgttgatactcgccaagtttgatgacaagtactttgccagggagaagaagcagaaggtgaagaagaccgagggcgagctttttgagacagaaaaggaggcatccaagtcactgcctgacttcaagaaggatgaccagaaggctgtggattctgctctgatcaaggctatcgaggctgtcccggagctgaaaacctatcttggcgcccggttctctctcagggatggtgacaagccccatgagatggtcttctaagttctagttttggagttcg

SEQ ID NO: 64767 - DNA, 284 bp, Zea mays
cgctcatcacgttccaacagatgtggatatcaaaggaggagtacgatgagtctggcccggcaattgttcacaggaagtgcttctaggtttctgccaagttcgtcaagtgcttttagggttcgccaagttcatcatcgctacctagtcttaagttatgcccccttcatttcctgagatatgtgtggcagatttgcatcgttttggtatttcgtggctccatgtgtgagcatgctgtgtcctataacctggtttatgagatgattgttaaacttgcttggtttgat

SEQ ID NO: 64768 - DNA, 267 bp, Zea mays
ggactccaagacccttctcttcggtgacaagccggtcaccgtctttggcatcaggaaccctgaggaaatcccgtggggtgaggctggcgctgagtatgtcgtggagtccaccggcgtcttcactgacaaggacaaggctgctgcacatctcaagggtggtgccaagaaggttgttatctctgccccaagcaaagatgcacccatgtttgttgttggtgtcaatgaggacaagtacacctcggatgttaacattgtttccaatgctag

SEQ ID NO: 64769 - DNA, 266 bp, Zea mays
ggactccaagacccttctcttcggtgacaagccggtcaccgtctttggcatcaggaaccctgaggaaatcccgtggggtgaggctggcgctgagtatgtcgtggagtccaccggcgtcttcactgacaaggacaaggctgctgcacatctcaagggtggtgccaagaaggttgttatctctgccccaagcaaagatgcacccatgtttgttgttggtgtcaatgaggacaagtacacctcggatgttaacattgtttccaatgcta

SEQ ID NO: 64770 - DNA, 183 bp, Zea mays
acacaaaaatgttttgttttaaaacaaaagtgatgcttcagtgggtgggaagttttcgaaaataaaacttgatggtggatccatcatggccgtgatgggttcaacatcggaaaagatgtacctctgccaggtaccaaactttgggttgaaaataataaagctcagaccgggcggttgacttgc

SEQ ID NO: 64771 - DNA, 262 bp, Zea mays
ggcgacgtggtgcccaaggacgtgaacgccgcggtggccaccatcaagacgaagcgcaccatccagttcgtggactggtgcccgacggggttcaagtgcggcatcaactaccaggcgccgacagtggtgccgggtgccgacctcgccaaggtgcagcgcgcggtgtgcatgatctccaactccaccagcgtcgtcgaggtgttctcccgcatcacagcaagttcgacctcatgtacgccaacgcgcgttcgtgcactggtac

SEQ ID NO: 64772 - DNA, 265 bp, Zea mays
ggggtatcttgaaatatccgatgttaactgtgaagcactcccagaagctctctcgcgttgttggaacttgcaggcccttcatgtattagcatgctcaaaacttgcagttgtacctgaaagtatcggcaagcttaagaagcttagaactctggaactgaatggtgtttctagtatcaagagtttaccagagtctattggtgattgtgataatcttcgaagattatacctagaaggttgtcgtggaatcgaagatataccaaattcc

SEQ ID NO: 64773 - DNA, 274 bp, Zea mays
cttgctgctgtgccccacatgtttatcaatgggtacaagaacgtgcttgctgttgctgtggagactgactactcgtacccacacgccgacaagatcaaacagtacctcaaggacccgagcaagtttgctgttgctgctcctgtagctgctgcggactctagtgctgctgctgcccccaaggaggaagagaaggctaacaagcctgccgaggagtcggacgaggaaatgggcttcagcctgttcgacgactaagccgctcttatcgtccatccgc

SEQ ID NO: 64774 - DNA, 255 bp, Zea mays
actcgtgcgaaggcgacactgccgccttcgctccttccgcgccgcctctcggccgtcgccgccatggtgaagtactcgcaggagtcgggcaaccctaccaagtcggctaaggccatgggcagggatctgagggtccacttcaagaacacaagggagacagccttctcgcttcgcaagttgtctttgaccaaggctaagcgataccttgaggatgtgattgctcacaagcaggcaattcccttccggagatactgt

SEQ ID NO: 64775 - DNA, 264 bp, Zea mays
tgaaggtaaaaggaatatatgccatttccttcatatcttcatccaaagggatatatgccatttccttgcatgggtcaaataaactgtactttgcactcttgctaggaaatggcatatatccctttggatgaagatatgaaggtaaaaggaaaggcagccattgatgttgtttgcaacccactgggcaagtcgggcggcgcacttatccaacagttcatgatcctgacgttcggtcccctggcaattcgactccataccttgggg

SEQ ID NO: 64776 - DNA, 260 bp, Zea mays
aagtacctctcgtgacatatacattgatagtcggtcacattctgggactatgaattccaattggagactctctggtactaacgccctcagcgtcaaccttgctgcatttgagaagcgactgcagaaactcacctttaatgatcttattgtggccaccaatggcttccacaatgatagcctagttgggtctggtggttttggtgatgtctataacgcccagctcaaggatggaaaggttgttgaatcaagaagcttataca

SEQ ID NO: 64777 - DNA, 257 bp, Zea mays
gttcgtgcgaaggcgaccctccctagctcgctccttccgcgccgcctcccggccgtcgccgccatggtgaagtactcgcaggagccgggcaaccctaccaagtcggctaaggccatgggcagggatctgagggtccacttcaagaacacaagggagacagcctttgcgcttcgcaagttgtctttgaccaaggctaagcgataccttgaggatgttattgctcacaagcaggcaattccctccggagatatgtgggg

SEQ ID NO: 64778 - DNA, 271 bp, Zea mays
caaaaaactccaacagagagctccaaaatcactaagaaggtgggagcggtgtgggcaagttaaagtggttgtgaaaatagaaagcgaggaagacatgctagttttacaagggagagcaaagtctttaaatctgccaactcacataaccatagacgctggaagaacacagattgctccaaattcaaggacagtcatggctattctggggccagctgatatggttgatgatgttactggcggtctgaagcttttgtagaaaaccaccttgtca

SEQ ID NO: 64779 - DNA, 264 bp, Zea mays
gcaggcgctggtggactgggtcgacagggtgggcggggcggcgtcgcggccaccgtcttcgacttcacgcccaagggcatcctcaacgccgccgtcgaaggcgagctatggcggctcatcgacccgcagggaagtgcgccgggagtcatcggctggtggcctgccaaggccgtcacctttgtcgacaaccacgacaccggctccacgcaggccatgtggccgttcccctccgacaaggtcatgcagggctacgcctacatcctc

SEQ ID NO: 64780 - DNA, 263 bp, Zea mays
cggattattctgatctgactaaaatgatcagccgctgtgtgaaactccagcgtctttgggtactggactgcatttcagacaagggtttgcaggtggtggcctctagttgcaaggatctacaagaactcagggtgtttccatcagaatttaatgttgctggtgcttttacggtgacagaggagggacttgttgcaatatcatcaggctgcccaaaactgagctctttgctgtatttttgtcaccagatgaccaatgaagcacta

SEQ ID NO: 64781 - DNA, 265 bp, Zea mays
aaggaggtgctgggcgacaaggtggagaaggttgtggtctctgaccgcgtggtggactccccctgctgcctggtgacgggcgagtacggctggacggccaacatggagaggatcatgaaggcacaggcgctcagggactcgagcatgtctgggtacatgtcctccaagaagaccatggagatcaacccggagaacgccatcatggaggagctgcgcaacgcgcggaggccgacaagaacgacaagtctgtcaaggaccttgtcat

SEQ ID NO: 64782 - DNA, 272 bp, Zea mays
cacagcctctcaagatccgtgctgatatagagatgccatgcttccagtttgatggagtgctccatattaagcaagctatgaagaaagctgaagctgcgggcaatgataactgtcctgtgaagattaagctagttgctcctccactttatggtttgaccacacagacccttgacaaggatcaaaacatttcagttctcactactgcagtcaaggcttgtacagcagagattgataagtacaaaggaaagttagtagtgaaggcaccaccaaga

SEQ ID NO: 64783 - DNA, 263 bp, Zea mays
caccgagttcaatagaagacttgacgagtgggtactgcttgagcagcttgatcttgctactgtcgagaccgatgttgatgagaaagtcgaagataaggcaacaagcttaaagatgacacggcaccagaagcgtacaattgatgaaacacatgtggagcaaggacatgaggagcttgatgcagccagcttgcgggaacatgaagaattcacaaaagtgaaaaatattgcaaagattgaacttgggagatatgagatagatacat

SEQ ID NO: 64784 - DNA, 265 bp, Zea mays
taaggcatgtgcccattctcctccttggtaaagacaccattgggatatatcagcagctcccgtgtgtctatgaattgtgttagttgtattaccagtgcgtagtgaacaaaaagggagccagcttatgaggtgttgagatttctgaccaagaggtcgatttgggatttatgggagtctttcaatgaacctcttatagttcggtacctcagtaaccgggaactgggaacatggccacgttcctcgttccaggaacgttcgttccgtt

SEQ ID NO: 64785 - DNA, 265 bp, Zea mays
cgatgaagggtgactatcacaggtatcttgcggaatttaagactggtcctgagaggaaggaatctgctgagagcacgatgatggcctacaaggctgctcaggacattgcgctggctgagctggcacctacccatccgataaggcttgggcttgctcttaacttctcagtgttctattatgagattctgaactccccagacaaagcttgcaaccttgcaaagcaggcgtttgatgaagctatctcccagttagacacccttgggga

SEQ ID NO: 64786 - DNA, 263 bp, Zea mays
tggaatggccgaagcaccatttagggccatggatgagtttgatgtattcatggatgcggtgagccgcaaaataagcttagacaccctagtagattttgctgtcgcacaagggtctcaatggatatttataacccctcatgatatcagcatggtgaaggctggggataggatcaagaagcagcaaatggctgctcctcgcggttgacagtgttgagacccctgacccttgtaaatgaagcctgagagccttgggcatgggagtg

SEQ ID NO: 64787 - DNA, 265 bp, Zea mays
ccagctcagactgcgtgtagagatcacgcaacttctcaaggaggccagtgctttgtcaacgccctcgacgtttgcgcaagccgcaaaactgaagcggttggctggtgctaaagagaaggagctggcaaaaagtaagcgttgaattcctcagacattgcgtgggttcttgctgttcttgtttgggccgattcgggttgctggactcttacttttgtccattttatagtgcaagatgtggacattagagggatacagtctttatatg

SEQ ID NO: 64788 - DNA, 264 bp, Zea mays
ggagatctttgggaatcattcagggaatggagtgcttatggggccggtgttccacttgtgctaaatggcagtgactctgtgattcagtattatgtgccatatctttctgctatccaactatttgcagatccatcaagacctgcttcaagaaacagtgagagcagcattgagaatgacgttgagcggctaagagtctcatcatcactggaaggtaaacatcgactggaaaatggtggcatacgaagtgatgatggtgaaggcgat

SEQ ID NO: 64789 - DNA, 276 bp, Zea mays
tctggaacgggcacatgggtgtttttgaatatgacaagttcgctataggaactgaggctgtggcaaagaagttggcagaacttagccgcaagggtgtgacaactatcatcggaggtggagactctgtcgccgccgttgagaaggtcggagttgctgacgttatgagccacatttccaccggaggtggtgccagcttggaattgttggaaggaaaggagcttccaggagttactgcattggatgaagcagccactgtgactgtatgaagcaagtttt

SEQ ID NO: 64790 - DNA, 269 bp, Zea mays
agaggaatcaccaaaatggacatgacagcagtaacatgttgtgaggagaacaacattcctgtcgtcatctttaacatgttggagcctggtaacatctcaagagcaatttgtggagatcaaataggcaccttagttgaccagtcaggaaggatcacataaaactaggaggatgaatggtagcagagctccaggacatgccgatactctgggtgggacatcactctggggggacatcctgaattctttgctcgtggatcttttccgtatag

SEQ ID NO: 64791 - DNA, 259 bp, Zea mays
ctcgagcgattcagctctatctgatatttacacatttggtccaacgtttagggctgaaaattcaaacacttcaaggcatctggctgaattttggatgattgaacctgagcttgcctttgcggatctgaacgatgacatggcttgtgcaactgcatatctccagtatgtagtaaagtatattctggagaactgcaaagaggatatggatttcttcaatacttggattgaaaaaggcatcatagatcggttaaatgatgta

SEQ ID NO: 64792 - DNA, 263 bp, Zea mays
atggaggtgcaaggactctggcacctcttaaagctctcttccctaatctccacacaaaagaaacaatatctagcaaagaggagctggctccattctctaaatattcttctcgcatggctgcacttgatttcattgtctgtgatgaaagtgatgcttttgtggctaacaacaacggcaacatggctaaaattttggctggacgaaggagatactttgggcacaagagaacgatccgaccaaatgccaaaaggctctatccctta

SEQ ID NO: 64793 - DNA, 263 bp, Zea mays
cgaggaggagttgtgccaagccacaatgggtatctcgcgtgactcgatgcacaagcgccgagccaccggtggaaagcagaaggcctggaggaagaagcgaaagtatgagcttggtcgccagccagccaacaccaagttgtcaagcaataagacggtgaggagggtccgtgttcggggaggtaatgtgaaatggagggctcttcgccttgatactggtaactactcatcgggaagtgaagctgttacccgcaagacccgtatct

SEQ ID NO: 64794 - DNA, 264 bp, Zea mays
caagaacatgatcacgggtacctctcaggctgactgtgctgttcttatcattgactccaccactggtggttttgaggccggtatctctaaggatggccagacccgtgagcatgctctccttgctttcacccttggggtcaagcagatgatttgctgctgcaacaagatggatgcgaccactcccaagtattccaaggcccgttacgatgagattgtgaaggaagtttcatcctacctcaagaaggttggatacaaccctgacaa

SEQ ID NO: 64795 - DNA, 260 bp, Zea mays
ggactccaagacccgtctcttcggtgacaaaccggtcaccgcctttggcatcaggaaccctgaggaaatcccgtggggtgaggctggcgctgagtcatgtcgtggagtccaccggcgtcttcactgacaaggacaaggctgctgcacatctcaagggtggtcccaagaaggctgttatctctacgccaagcaaagatgcacccatgtttgttgtcggtgtcaatgaggactagtacacctcggatgttaacattgtatcc

SEQ ID NO: 64796 - DNA, 260 bp, Zea mays
ggactccaagacccttctcttcggtgacaagccggtcaccgtctttggcatcaggaaccctgaggaaatcccgtggggtgaggctggcgctgagtatgtcgtggagtccaccggcgtcttcactgacaaggacaaggctgctgcacatctcaagggtggtgccaagaaggttgttatctctgccccaagcaaagatgcacccatgtttgttgtcggtgtcaatgaggacaagtacacctcggatgttaacattgtttcca

SEQ ID NO: 64797 - DNA, 260 bp, Zea mays
agagaaggttatcaaggggattagggatgggtgcgaacaatcagattgtgctctcctaggaggggagacagcataaatgcctggtttctatgcagagggtgaatatgatctaagtggctttgctgtgggtgttgtgaagaagaataaagtcattgatggaaaaagcattgttaagggagatgtacttataggtcttccttccagtggtgttcattctaacgggttctctcttgttagaagagtactggagaaaagtcgac

SEQ ID NO: 64798 - DNA, 259 bp, Zea mays
ccgaccgactggtggtggagaacttcaagtcgtacaagggtgagcagacgattgggcctttcgtcgacttcacagccatcatcggccctaacggcgacggcaagtccaacctgatggacgccatcagcttcgtgctgggcgtgcgctcaacgcaccttcgaggcgcgcactcaaggacctcatttacgccctcgacgaccgcgacaaggaggccaagggccgcaagcttccgtccgcctcttctactgccaacccaacc

SEQ ID NO: 64799 - DNA, 260 bp, Zea mays
gggaggagaatgtctacatggccaagctggctgagcaggccgaaaggtatgaagagatggttgagtatatggagaaggtggctaagactgtagatgtggaagagctcactgttgaggagcgtaacctcttgtcggtcgcatacaagaatgtgattggggctcgccgtgcttcatggcgcattgtctcttctattgaacagaaggaggagtcccgtaagaacgaagagcatgtgaaccttatcaaggaataccgtgcgaag

SEQ ID NO: 64800 - DNA, 170 bp, Zea mays
gtgaggaaaaaccttcttcgaaaaccggcagatgcatgcatgcatgctacaataaggttctgatactttaatcgatgctggaaagcccatgcatctcgctgcgttgtcctctctatatatttaagaccttcaaggtgtcaattaaacatagagttttcgtttttcgcttt

SEQ ID NO: 64801 - DNA, 261 bp, Zea mays
ggcatgcagatcttcgtgaagactctgaccggcaagactatcacccttgaggtcgagtcttctgataccattgataatgtcaaggccaagatccaggacaaggagggcatccctccggaccagcagcggctcatttttgccggcaagcagctcgaggacgggcgcacgctggccgactacaacattcagaaggagagcaccctccacttggtgctgcgtctcagaggtggcatgcagatcttcgtgaagacacttactggc

SEQ ID NO: 64802 - DNA, 265 bp, Zea mays
gttcgtgcgaaggcgaccctccctccttcagctccttccgcgccgcctcccggccgtcgccgccatggtgaagtactcgcaggagccgggcaaccctaccaagtcggctaaggccatgggcagggatctgagggtccacttcaagaacacaagggagacagcctttgcgcttcgcaagttgtctttgaccaaggctaagcgataccttgaggatgttattgctcacaagcaggcaattcccttccggagatactgtgggggtgtt

SEQ ID NO: 64803 - DNA, 272 bp, Zea mays
aagagatcagtgaagcccagcccttgccttgaagacggcgctcctttcccccaccagcaccagacactgaagggggtaatgatgaagtatcagttcaagagatcagtgaagcccagcccttgccttgaagacggcgctcctttcccttcaagctccgctttcttctcccgcacctggcgatcttcacgatgttgttgttgcacagcaggtccggactgagtatttcctatttggttatatttttagtgcactataatatcgcaagcgaacta

SEQ ID NO: 64804 - DNA, 285 bp, Zea mays
agatctatactcgttcataagcggtgctactacacgacgacaaacatggggaagcctgcgaagatcggagagtggggtggatacgccggcgatcgtcgggatctgagggctactccggaccggctgatcgaggtgaaggtcacggcggacaacagcagctgcatccgctccatctccttcatctacatcggagccgatggcaaaccgtacgaggaggggccatggggtttcggccatgctggcacggagtacaagattgatctgtgcaggttcgacgagagcttg

SEQ ID NO: 64805 - DNA, 291 bp, Zea mays
cttcaaggagaagaaccacaggaggagggttatcagcatgcagctgttagacgagtatgcttacgtgatggaagtgggaggaatcatatataccatcactgatgtcgaggagctcggagagtggatgcggtcgtgtctagagaaacacccgttattcgaaaccgttcctgaggaagagattaaggctgaccctgttttcaaattactgtctactgccactgaagaaagccagaaggtggcaagaaatggaggacagactttctatgccatcttcaggcggatctccttaca

SEQ ID NO: 64806 - DNA, 281 bp, Zea mays
ctacaccgagaagggcttgtgcacatcaggcaagactaggataggcgctgtagtcaacttctctttcagcgcttcaaaggcctcttcgcatttctgggtccacttgaactcaaccttgttgcctagcaatgctgtcattggcttcgcaatcttcgaaaacccttcaatgaatcgccgataatatccggccattccaatgaagctcttgattcctctagcatctgttggcgctttccagttcaaaatgtctgccactttcttcggatccacagccaatcctt

SEQ ID NO: 64807 - DNA, 283 bp, Zea mays
acagagagagcgtgtggatttgggggagcttcttcactggagagtggagagctccggtagcgaggcgaaggaaggaagagggaggaggggaatcagagaggtctccccgatggcggactggggccccgatgatcgtagcgacggtgctgttcgtggtcctcacgccggggctgctctgcacgctgccgggccggggccgcgtcgcagagttcggcagcatgcacaccagcggcctggccatcctcgtccacgccgtcctctacttcgcgctcatcaccatctt

SEQ ID NO: 64808 - DNA, 279 bp, Zea mays
caatatagaaggcaactcattgaccaagtggtttcgactgcgttgcctgagagcaagagccctgagcaagtgtctgctgctgttaaggctttcatgactgctgacctgcctcatgaactgattgagcttcttgaaaagattgttcttcagaattccgctttcagtggaaatttcaatctgcagaacctgctcatcttgactgctataaaggcagatccatccagagtcatggactatgtcaacagacttgataactttgatgggcctgctgttggagaa

SEQ ID NO: 64809 - DNA, 282 bp, Zea mays
acgcctccctttccccttccctccctccctctccccgcgggccgccagaggcaatttcgccctcgattcgaccccgattcgtccgcccgcgaccgggattccctccgccaagcgcggatctgaacgctgcgctccgtgtcgccgctcgaatccgccatgaagggggccaaatccaagggcgccgccaaggccgatgccaagctggcggtgaagagcaagggggcggagaagcccgccaagggcaggaaagggaaggccggcaaggaccccaacaagcctaag

SEQ ID NO: 64810 - DNA, 284 bp, Zea mays
acagtagattggcttgctagcaacttcaagaaagatgaaggtattgatcttctgaaggataaacaagcccttcagaggcttactgaggcatcagagaaagctaagatggaactgtcaacgctgacacaggcaaatattagcctgccattcattactgctactgctgatgggccaaaacacattgaggcaaccctctcgagagccaaattcgaggaactatgttcagaccttatagacaggcttaaaactcctgttaataatgccttaagagatgccaagttgtc

SEQ ID NO: 64811 - DNA, 283 bp, Zea mays
acattacttttcgacaaaagtgctaatgatgagcatgagagcagtattctgacaaagctcaagcaacagtgcggggggcagtttacttccaaaatggagggcatggttacggaccttactgtcgctagagatcaccaaactaagtttgaagagtttgtagctgggcatccagagttgaatcctggcatagatttggctgttactgttttgacaacgggattctggccaagctacaaaacttttgacataaaccttcctgcggagatggtgaaatgtgtagagg

SEQ ID NO: 64812 - DNA, 284 bp, Zea mays
acaaacctttgggcactcatcatggacgcaggaactggtttctgttctcaggtttatgagctctcaccagttttcctccacaaggactggataatggagcagtgggagaaaagctactacataacagcaattgctggatcatccaacgggagctcatatggttgtcatgtccaaaggaactccttacacccaacaatcatacaaggttagcgagtcgttcccttacaagtggatcaataagaagtggaaagaagggttccatgtgacatccatggccaccgctg

SEQ ID NO: 64813 - DNA, 278 bp, Zea mays
gccgccgctcccttgacattgagcgcccaacctacaccaacctcaacaggcttgtgtcccaggtcatctcatccctgactgcttccctgaggttcgatggtgctctgaacgttgatgtgaacgagttccagaccaacctggtgccctaccctaggatccacttcatgctttcgtcctacgctccagtcatttctgctgagaaggcctaccacgagcagctgtccgtggccgaaatcaccaacagcgccttcgagccatcctccatgatggccaagtgc

SEQ ID NO: 64814 - DNA, 279 bp, Zea mays
ggtagctcaatagatctactgctgtcaggggagttaatgcaaagctgagttgctgcacgttggttttcttcagagatggcttcagctggtgtagccccatctgggtacaaaaacagcagcagcactagcattggtgccgagaagttgcaagatcagatgaacgagctaaagattagagatgatacggaagttgaagcaaccataattaatgggaaagggactgaaactgggcacataattgtcaccactactggtggcaagaatggtcaaccaaaacag

SEQ ID NO: 64815 - DNA, 279 bp, Zea mays
attcggctcgagcgcttttgatcgaatcagaaaattccccaccaaaatctcctccccctgaagtcccgaagctcgcggaaggccgagatgtaccatcccacgagaggcggcgtccgcggcggcagcgatcaattcaaatgggacgatgtgaaggttgacaagcatcgggagaattaccttggtcatagtgttaaggctccggttggtagatggcagaaaggaaaggatctttactggtatactcgggataagaaatccgacacggaagatgctcttaag

SEQ ID NO: 64816 - DNA, 280 bp, Zea mays
ccaacagcctgcttgccgcgcttgcattgaggggagttcggggagcggccggtgcggaaggaaatcgacacggagttcagttcacatggctgctgaatcagagaacggcaactgcaaagcttgggcagcgagagatccttctggagttctctcaccacacagttttaaccgcagagcagtgcaaagcggcgatgtttcgctgaagatcatatactgtggagtctgttatcagccggccgcttggacacggaataagctcaatgattcaaaatatcctttg

SEQ ID NO: 64817 - DNA, 274 bp, Zea mays
atccttcacctttatcattcagaaggtaaaggagttgttattgctccacatgtggagcaataacaatccttcacctgtggctgggcaaagattgggggggacagtgtggaagattacaaaagatggggaggatgttgtgtatgctgaggacttcaaccatcggaaagagaggcatttgaatggcaccgttcttggatctttcgtgcggccagctgttctgataactgatgcttacaatgctttgaacaaccaaggctatagaaaaaagcaggat

SEQ ID NO: 64818 - DNA, 280 bp, Zea mays
  unsure (1)..(280): unsure at all n locations
cggagganaaggcgaaagagtagcagcagcaggcggcgccgagtagcggctccccacctcgagcttgccaccatggctagaggattgaagaagcatttgaagaggctcaatgcgcccaagcattggatgctggacaagcttggcggagctttggctcccaagccatcttctggacctcacaagtctagggagtggctgccactgatcctcatcatcaggaacaggctcaagtatgctcttacataccgtgaggtcatttccatcctgatgcaacgccatg

SEQ ID NO: 64819 - DNA, 282 bp, Zea mays
cggaggccagggcgctagagtagcagcaggcacgcggagccgaggtaccggctgtaccaccgcgagcttgccgccatggctagaggattgaagaagcatttctagaggctcaatgcgctcaagcattgtatgctggacaagcttggcggacttttactcccaagccatcttctggacctcacaagtctagggagtgcctgctactgatcctcatcatcaggaacaggctcaagtctgctcttacatatcgtgaggtcatatccatcctgatgcaacgccatg

SEQ ID NO: 64820 - DNA, 274 bp, Zea mays
gccaaggatttgcatggcatgaaatggatgttacgtcatatctatagaggtcaacctcgaaggcatcttctgacaactggatggagttcatttatcaataagaagaaactagtctcaggggatgcagtcttgtttcttagaggtaatgattgtgagctaagattgggtgtgaggagagcagttcaactgaaaaatgaagctctacttaaagctgtcaactgtactgattcgaagctacttatgctgtctgctgtcgccaattctatggacaaca

SEQ ID NO: 64821 - DNA, 275 bp, Zea mays
gtgactacctgatgatcaagggatgctgtgtgggtccaaagaagagggtggtgaccctccgccagtccctcctgaagcagacttcccggctggcgctggaggagatcaagctcaagttcattgacacatcgtccaaatttgggcacggtcgcttccagactaccgatgagaagcagaggttctttggtaagctcaaggcgtaaggtgctgcggtgcagcgaaagtcccatttgtcaaaatcatcaaactgtgaaacctttgtttgttaccttgct

SEQ ID NO: 64822 - DNA, 279 bp, Zea mays
accaattgaggcacggtacaaggagtcgacagaaaggggttcctctgtagatcaactggtctactgcatcaactgggtcaccaatcttcttaaggtcttccagtttagaagattggtgacccaattgaggcacggtacaaggacctcgacagaaaggggttcctctgtagatcaactggtctactgcatcaacagtttcagagaggctgctttgtccagtgaccaaaagtttggccatatcgacatatctgagaaacagaaggtcatcaatgagtgctc

SEQ ID NO: 64823 - DNA, 280 bp, Zea mays
agtgaccatcttgccactggggataaaggaggatgtgtggttttatttgaaaggacagatgttcgggataatgccagccagagagaactggagagacaagatgttccagttactagacacccagagttccgctacaaaactgaatttcagagtcatgaacctgagtttgactacctcaaaagtttggaaatagaggaaaaggtcaacaggatcaagtggtgccagacagccaacaatgctctctcccttttgtctacaaatgataaaacaataaaatact

SEQ ID NO: 64824 - DNA, 276 bp, Zea mays
cgcggtctgctcgttcgatctgtgcagcagatctgaggtcccgggcgaccgtgaagcagcttcaatcgtcggcatggcgctcgtattgcatagtggggctggaaacaagaatgccttcaaagcacttattgctgcagaatacagtgggatcaaggttgagttgaccaaggattttgagatgggtgtctccaacaagacccctgagtttcttaagatgaacccccttgggaaggttcctgttctggagactcctgatggccctgtttttgagagtaa

SEQ ID NO: 64825 - DNA, 271 bp, Zea mays
atctgctccaagtgcaagggcaagggctcgaagtctggtgcctcaatgaggtgccctggttgccagggctcaggcatgaaagtcactattcgtcagctgggcccttccatgatacagcagatgcagcagccttgcaatgagtgcaaggggactggagagagcatcaatgagaaggaccgctgtccatcatgcaagggtgagaaggtcattcaagagaagaaggttcttgaggttcatgttgagaaggggatgcaacacaaccagaagatca

SEQ ID NO: 64826 - DNA, 182 bp, Zea mays
cgtgaagctgttcaacgccgtggcggtggaggacctgatcgtgcggcgggggcgcgtcggcggcgtggtcaccaactgggcgctcgtgtccatgaaccacgacacgcagtcgtgcatggaccccaacgtgatggaggccaaggtggtggtcagctcctgcggccacgacggggccttcggcg

SEQ ID NO: 64827 - DNA, 278 bp, Zea mays
ctcgagccgctcgagccgcgatagtgtaataactttttattgattcatgtgatcatgcattgatgacatcacttacatttgccctacttcttgcagccacttgtatctggtgcggcattaggcttagaagggcagttgactgtttatcatcataatggaagcccatgctatcggtgcctctttccaactccaccacctgtggcagcctgccagagatgctcagacagtggtgtccttggggttgttccgggagtgattggttgcttacaagctctgga

SEQ ID NO: 64828 - DNA, 276 bp, Zea mays
cattgactccaccactggtggttttgaggctggtatctccaaggatggacagacccgtgagcatgctctccttgctttcacgcttggagtgaagcagatgatttgctgttgcaacaagatggatgccaccacacccaagtactccaaggcccgttatgatgagattgtgaaggaagtctcttcctacctgaagaaggttggatacaaccctgacaagatccacttcgttcccatctctggtttcgatggtgacaacatgattgagaggtccaccaa

SEQ ID NO: 64829 - DNA, 275 bp, Zea mays
cctcaaccaaattcaaagtcacagcggcgaaactctcggcgatgtctggccgcggcaagggcgggaagggtctgggcaagggcggcgccaagcgccaccgcaaggtgctgcgtgacaacatccagggcatcaccaagccggcgatccgcaggttgagcgaggaggggcggcgtcaagcgcatctccgggctcatctacgaggagacccgcggcgtgctcaagatcttcctcgagaacgtcatccgcgacgccgtcacctacaccgagcacgcccg

SEQ ID NO: 64830 - DNA, 274 bp, Zea mays
cagacgccgccgccgcccaaagaaagacgtcaactccaggagacaagatagtgagaactgaagagaaggatgggcttcgagaagcagatcctgagatccggcaccggccccaagccgataaagggccagaaggtcaccgttcactgcaccggctacgggaaggatcgtgatctgtccaagaaattttggagcaccaaggaccctgggcagcagccattcagtttcagcattggtcagggttcagtgatcaaaggatgggacgagggagttatga

SEQ ID NO: 64831 - DNA, 276 bp, Zea mays
ccataccccaaccctctgacgatgccttctacgccgacgctggtccctccgtgcgacgcggtggagccactgctggcggagtcctccgaccgcttctccatgttcccgatccgcttcccgcagatctgggagttctacaagaaggcggtggcgtccttctggacggccgaggaggttgacctctctgccgacgcccggcactgggacgaggcgctgtcccccgacgagcgccacttcatctctcacgtgctcgccttcttcgccgcctccgacgga

SEQ ID NO: 64832 - DNA, 272 bp, Zea mays
cctcagtctgctcgttcgatctgtggagcagatctgaggtcccgggcgaccgtggagcagcttcaatcggcggcatcgcgctcgtattgcatagtggggctggatacaagaatgccttcaaagcacttattgctgcagaatacagtgggatcaaggttgagttgaccaaggattttgagacgggtgtctccaataagacgcctgagtttcttaagatgagctccctttggaaagttcctgttctggagactcctgatggacctgtcattgag

SEQ ID NO: 64833 - DNA, 277 bp, Zea mays
agtcattccctagggatgaccccaagaagccttgccatctcactgccttccttggctacaaggctggcatgactcacattgtccgtgaggttgagaagccaggatccaaactccataagaaggaaacttgtgaggctgttaccatcattgaaacccctcctcttgtcattgttgggctcgtggcatatgtgaagactcctcgtggcctccgcacactcaactctgtttgggcccaacatcttagtgaagaagtgaggagaaggttctacaagaactg

SEQ ID NO: 64834 - DNA, 275 bp, Zea mays
aggcggctctggacgaaggcaaggtggaagagtgcgtcgacgagaggctctgcggcaagtttccgctggaggaggccgttccgatcatgaagctcggtctggtctgcacttcccaggttccgtctaacaggccagacatgggtgaggtggtgaacatactggagctgatcagatgcccccaggacagcccggagactgaactgggttaacctcctctactacctacactggatcccggcctgtttgttggtttcacttttgagatccttctctgc

SEQ ID NO: 64835 - DNA, 275 bp, Zea mays
gcagaacagcatccagttgattcagtaaaagtacataacaatgcatctgttgtgctgaccaaaaaaatatctgatttatctcttgagtggcgatcagatttatcgaaaactgatgtctggtatgccagttttggatcaaacatgtggagaccaagatttctatgctatattcaaggagggaaggctgagggtatgaatataccatgctgcggatcacgtgacacaagctcaccaaagggaaccgtgtggaagactgtacctcacaggttgctttt

SEQ ID NO: 64836 - DNA, 270 bp, Zea mays
gagattttcaaagattcctggacaacgtgcaatacaaaacaagtgggatattacgttacgagcgtgtctttggtgaaggttttgtgagcactagtggaatcgagacaacaaaggaatttgtgggcatgctcgatcttaaaccgggccagaaagtacttgatgtcggatgtggaattggaggcggcgacttttacatggctgctaactatgatgtccatgttcttggtattgatctatcggtgaacatggtttcatttgcaattgaacgtg

SEQ ID NO: 64837 - DNA, 202 bp, Zea mays
gttcgcaagcaagaaagagatcattcttttgacaagacaaaatttaacaatgtctttgtgaaaaatttgtctgagtctaccacaaaggaagatttactcaaaatctttggtgaatatggggatattacaagtgctgttgtgatgattggtatggatggtatatcaaggtgtttgggtttcatcaattttgagaatccagatg

SEQ ID NO: 64838 - DNA, 237 bp, Zea mays
acttctttttgagctgctggtcattgtacccatgagggtgcccattgatgagagccctgtcttcttattgtaccaggattgggcactggggttaatattcttgaaaatatggactagactggttatgttggatcagatggcacctttggttgatgaaagctggaggtcaaagtttgagagagttagagacgatggcttctcccgtttaaggggtctgtgggtcctcaatgaaattat

SEQ ID NO: 64839 - DNA, 184 bp, Zea mays
aagaaaaggagaagaagaagaagaagatcaaggaggtttctcatgagtggcaattggtaaacaagcagaagccaatctggatgaggaagcctgaggagattaccaaagaagagtatggtgctttctacacgagcttgaccaacgactgggaggagcatcttgccgtgaaccacttctctgtgga

SEQ ID NO: 64840 - DNA, 159 bp, Zea mays
ggcacacagagctcatgcttcaaccgaaggagttaccaagtatttgaagcctgctgttgctggcttcctcatgcagaaggaacttgactaccttgttggagctgttgccaacccaaagaagcaatttgccgctattgttggtggatcaagggtctcaag

SEQ ID NO: 64841 - DNA, 191 bp, Zea mays
gtcgggctgacaactactctgatactcttctgcagccatttccatcagatcgatggagatctcgccgttggaaagatgtctcctctggtaagaatcggcactaaagcaggatcgcggatagtgtcgattgggattgtcatgctatacattctcttggctatgtttggaacatggggatctctcccgccatc

SEQ ID NO: 64842 - DNA, 231 bp, Zea mays
ctcgagccgtgtcaaggatgacttcattggacgtgttatatttgatttgaatgaggtcccaaagagagtgccacctgatagcccattggctccacaatggtatcggttggaagaccgcaatgggcacaaggtgaagggggagttgatgctggctgtttggatgggtactcaagctgatgaagcattccctgaagcatggcattctgatgcagcctccgtccctggtgatgg

SEQ ID NO: 64843 - DNA, 184 bp, Zea mays
gaacctgctcctgccccattgaaggaaggaggtcctcctggaaggaaaattgttgtgtccaccaacattgctgaaacatccttaactatagatggcatagtttatgtgatagacccggggttttccaaacagaaagtttacaacccaagaataagggtggaatcccttctggtgtcacccattt

SEQ ID NO: 64844 - DNA, 156 bp, Zea mays
gtgaagaacaggcaggtcaaagccaagcaggttactttccacaggaagaagaatctgcagtactatgaaatttctggcaagagcaactacaactttgagaaaccctttctgtaccttgcaaggaagctggctggtgatccgaacttcactttgttg

SEQ ID NO: 64845 - DNA, 262 bp, Zea mays
gggtatgaagcagaagaaggctcacatgatggagattcaggtcaatggtggtaccattgctgacaaggtggactatggctacaaattctttgagaaagaggtccctgttgatgctgtcttccagaaggatgagatgattgacatcattggtgtgaccaaggggacaggttatgagggtgtggtcactcgttggggtgtcacccggcttccccgcaagacccacaggggtctccgcaaagttgcttgtatcggtgcatagcat

SEQ ID NO: 64846 - DNA, 181 bp, Zea mays
cagcttctcaccaccgctaccttcgatggcacccaaggcggacaagaagccggcggcgaagaagcctgcagaggaggagcccgcgacagagaaggcggagaaggctccggcggggaagaagcccaaggccgagaagcgcctcccggcgggcaagtccgccggataagagggccgcgagggc

SEQ ID NO: 64847 - DNA, 259 bp, Zea mays
caaccataccagcggcgccgaggtgacgaggaggcggagtagagtggccggactacctcgacacctccactgcaaccatgggtatctcacgtgattcgatgcacaagcgccgggccaccggtggaaagcagaagacgtggcgcaagaagcgaaagtatgagcttggccgccagcctgctaacaccaaactgtctagcaataagacagtgaggagggtccgtgtccgtggaggcaacgtgaagtggagggctctccgatt

SEQ ID NO: 64848 - DNA, 245 bp, Zea mays
ccacaatcctccgacgatgcctgccgcaccgacgctgtatgccccctgcggacgcggatggagccgatgctgggcgagtcctcacgaccgcttctcgatgttcccgatccgtttcccgcagatctgggagttctacaagaacgcggtggcctccttctggacggcgagagaggttgacctctctgccgacgcccggcactgggacgaggcgatgtcctccgacgagcggcacttcatctccacgt

SEQ ID NO: 64849 - DNA, 284 bp, Zea mays
aactggaagctgttggactccgtcttaacaaaaggcctccccagatatacttcaagaggaagaagacgggtgggatttctttcaataccactgttcctttgactcatattgatgagaagctgtgctatcagattctgcacgagtacaaaattcacaatgctgaggtgttattccgtgaagatgctactgtggatgctcattgacgttatcgaagggaaccggaagtacataaagtgcgtctacgtatataacaagaccgatgttgttggtatcgatgacgttga

SEQ ID NO: 64850 - DNA, 276 bp, Zea mays
gaagagaaggatgggcttcgagaagcagatcctgagatccggcaccggccccaagccgctacagggccagaaggtcaccgttcactgcaccggctacgggaaggatcgtgatctgtccaagaaattttggagcaccaaggaccctgggcagcagccattcagttctcagcattggtcagggttcagtgatcaaaggaggacgagggagttatgaccatgcaagtgggtgacgttgctcgtatacagtgcacgcctgattatgcttatggagccggc

SEQ ID NO: 64851 - DNA, 292 bp, Zea mays
agtagattggcttgctagcaacttcaagaaagatgaaggtattgatcttctgaaggataaacaagcccttcagaggcttactgaggcatcagagacagctaagatggaactgtcaacgctgacacaggcaaatatgagcctgccattcattactgctactgctgatgggacaaaacacattgaggcaaccctctcgagccaaactcgaggaactatgttcagaccttatagacaggcttaaaactcctgttaataatgccttaagcgatgccaagttgtctgtcagtgatct

SEQ ID NO: 64852 - DNA, 300 bp, Zea mays
gcgactaacagaaaccgccttgcgaacttcttagatttgagagtaccaagtcggatggcaaacttgcctcccttgacgagtacatctcacggatgaagtcagggcagaaagacatcttctacatcacgggaagcagcaaagagcagctggagaagtctccattcctcgagaggctaaccaagaagaactacgaggtccttcttcaccgaccccgtggacgagtacctgatgcagtaccttatggactacgaggacaagaagttccagaacgtgtccaaggagggactgaagctgggcaag

SEQ ID NO: 64853 - DNA, 289 bp, Zea mays
acttccttttgagctgctggtcattgtacccatgagggtgcctattgatgagagccctgtcttcttattgtaccaggattgggcactggggttaatattcttgaaaatatggactagactggttatgttggatcagatggcacctttggttgatgaaagctggaggtcaaagtttgagagagttagagacgatggtctcccgtttaaggggtctgtgggtcctccatgaaattataatgccgattctcaccaaactccttaccgctctctgtgtcccatacgtccttgc

SEQ ID NO: 64854 - DNA, 291 bp, Zea mays
gcaacgccgaggaagccacactcaagggcactgacttagggctttccatgatctacaagcccggtgataaattatctgatgtcgctggaagtccatactatgttgcaccagaggtgcttcagaaatgctatggtccagaagctgatgtgtggagcgcaggagtaattctgtacattttgctttgtggtgtgccccgtttgggcagaaactgaggctggaatcttcaggcagattctgcgaggcaaacttgattttgaatctgaaccctggcctagtaattctgatagtgct

SEQ ID NO: 64855 - DNA, 180 bp, Zea mays
cctcagcatgacatggtgaggtattccttctgtactgcagacggcaaggtcgagctcagcctccattgcctccattatagcggcggcggcaaatggtggtggaacatatataacagttgcattggcttttgtttcagccttagcttctgttacggaagcattccaattaacgcgatggaa

SEQ ID NO: 64856 - DNA, 301 bp, Zea mays
aagaaaaggaaaagaagaagaagaagatcaaggaggtttctcatgagtggcaattggtaaacaagcagaagccaatctggatgaggaagcctgaggagattaccaaagaagagtatgctgctttctacaagagcttgacaaacgattggaaggagcatcttccggtaagcatttgcctttgaaaggccaagtttactcaaaggctgtactcttttgtgccaaagcgggcccccttcgacctctttggacaccaggaagcaggcagaacaacatcaagctctatgtgcgacgtgtcttcatc

SEQ ID NO: 64857 - DNA, 292 bp, Zea mays
gagatccggagctctctcgaacaacattttagtgattgtggtgagatgacaagggtctctatcccgactgatcatgaatctggtgcaataaaaggaatggcttacatagacttcaaggatcaggactctgtgtctaaagcccttgagctcagtggctctgacattggtggtggctatgagctttatgttgatagccaaaccaagaggcgatggccagcgtggtggtggtagatctggtggccgttctggtgggagatttggtgaccgttctggtggccggcgtggtggtggt

SEQ ID NO: 64858 - DNA, 286 bp, Zea mays
gaaaatctcgcgttcacctcctctccagtctctccgcctcccgcttacttctctgactctgtcctctttggttacttacctgtcggcgacggctgcggtgctgcgccgctctcaccttcaccgccgacgagcattcacaagtagtggtctcttactggtggctgcgtacaggtgacgacaaaaccttgacatgagcagcataggcacaggttatgatctgtctgtcaccaccttctctcccgatggccgcgtcttcgaggtcgagtatgccacgaaggctgtcgac

SEQ ID NO: 64859 - DNA, 285 bp, Zea mays
aagcaaccaccgcctccccgatctcgtcgagaggaagcccaatcccgaaaccgtcgccgtattccaatggcgcccaaggccgagaagaagcccgccgccaagaagcctgcggaggaggagccggcggcggagaaggccacggcggggaagaagcccaaggccgagaagcggctccccgcgggcaagtccgagcaaggagggtggcgagaagaaggggaagaagaaggcaaagaagtcggtggagacgtacaagatctacatctttaaggtgctgaagcaggtgca

SEQ ID NO: 64860 - DNA, 291 bp, Zea mays
agagggagcgccctgcccaagcaaagagaaaccgcggcgcgagaagagggaggaagggcagacgggcgagcaggatgagagagatcatcagcatccacatcggccaggccgggatccaggtcggcaacgcctgctgggagctctactgcctcgagcacggcatcgagcccgatggcaccatgcccagtgatctcggttggcgtcgcacatgatgccttcaacacgttcttcagcgagaccggttctggcaagcatgtgccgagggccatcttcgtcgaccttgaaccatgt

SEQ ID NO: 64861 - DNA, 292 bp, Zea mays
gaagagcggcggcgcgggcggacaaggagcaggcggaggaggagctgtgccaagccacaatgggtatctcgcgtgactcgatgcacaagcgccgggccaccggtggaaagcagaaggcctggaggaagaagcgaaagtatgagcttggtcgccaccgcgccaacaccaagttgtcaagcaataagacagtgaggggtccgtgttcgtggaggtatgtgaaatggagggctcttcgccttgatactggtaactactcatggggaagtgaagctgttacccgcaagacccgtat

SEQ ID NO: 64862 - DNA, 286 bp, Zea mays
gcataggctctctgggtttcctgttattgatgatgactggaatttggttggcgttgtgtcagattatgatttattggcactggatacaatatcaggagctggaccggctgaagcagagatatctcctgaggtggatagcacttggaagacatttcatgagatacagaagcttttgagcaacaccaacgggggttattgctgatgttatgaccccagcgcctctcgtggtgcgtgaaacaactaaccttgatgctgctgcaaggtaactccttgtgactaagtcccg

SEQ ID NO: 64863 - DNA, 275 bp, Zea mays
gaaggaatcaacatttgatatgtcgagtactgttggtctatcctctaaaggatgaaatgactcttcctaggacacttctacgtacatcaataagagactaaaattgaagttcaccaaagcatggctgtcttttctcaagttaccactaccacttgatgtgtacaaggaggtccttgcttcaattcatcaaaatgtatcctgcaatgtcaaacccttccatctgatgtgatttcttgactagatcatatgatattggtggtgttacaagtgtgatg

SEQ ID NO: 64864 - DNA, 283 bp, Zea mays
cgaccagtgaggtgcggttggccagccagcggcgagccaaaccgagcgtacgccatggatcgcgagtgggagtccaagcccggcagcggcggtgccgcctccgcccagaatgaggctattgaccggcgggagcgtctccgacgcctggccctcgagaccatcgacctcggcaaggatccctatctcatgcggccacctcggcagctatgagtgcaagctgtgcctgacgctgcacaacaacgaggggcactagctaggccacacgcaacggtagaggcaccag

SEQ ID NO: 64865 - DNA, 289 bp, Zea mays
atccactcgatcatcggcatggacgcggacgtgatcaccattgagaactcgcggtccgacgagaagctgctctccgtgttccgcgagggcgtcaagtacggcgcgggcatcggcgccggtgtctacgacatccactcggccagtgatcccgtcggctgaggagatcgccgaccgctatcgagcaagatgtgcggtgctggacacgcaacatcctctaggtgaaccccgactgcggcctcaagacccgcaagttacacggaggtcaagcacggcctgaccaacatggtct

SEQ ID NO: 64866 - DNA, 287 bp, Zea mays
tctccccgtcaaggccttttgagagtccgtgagtttactttagcggaaattgagcactttgtggacccagaggacaaatcccatccaaagtttggtgatgtttctgatctagagttctggatgtttccgagagaggatcaaatggcaggaaggtcagccacaagacttaaactcggaaattctatacgaggtattatctcctgatatttctctgttatatatttttgacaatatgatatctgagctcttcttttgctactatcgataccattctataaacttgtaat

SEQ ID NO: 64867 - DNA, 281 bp, Zea mays
gacttaggaaaactgacaacaacaggattgctaaagcttgtggagcagttatagtgaacaggcctgaggagctccaagaatctgatgttggaacaagagctggcctgttcgaggttaagaagataggtgatgagttcttttcctttattgttgactgtaaagatcccaaggcatgtactgttctgttagggagcaagcaaggatgtattgaatgaagttgagagaaactgcaggatgccatgtccgttgcaaggaacttttgaaaaatcaaaactcttcct

SEQ ID NO: 64868 - DNA, 284 bp, Zea mays
caacttgacagtccagtgctagaaaacggggataactggagcgtgggacagcgccaacttattgcactgggtagggcgctgctcaagcaggcaaaaattttggtactcgctgaggcgacagcatctgtcgacacagcaacagacaatcttatccgaaagatcatccgcagtgaattcaaggactgcagtctgtaccattgctcagcgtattcccaccgttattgacagtgaccttgttctggtccttagtgatggtaaaatcgcagagttcgacacgcctcaga

SEQ ID NO: 64869 - DNA, 285 bp, Zea mays
gttgatcgaggcaaacaaagtttggagactatatgccttcttcttgcttacaaaatcaagtaccctgagaacttttttcttctgaggggcaatcatgaatgcgcctcaataaacagaatatatggattctatgatgaatgcaagcgtcgatttaatgtgcggctatggaaggtcttcacagaatgttaacactctacctgtggctgctcttatcgatgataaaatattatgtatgcacttcggactctctcctgatctagcacactggatgagataaagacttgc

SEQ ID NO: 64870 - DNA, 283 bp, Zea mays
ggccaaggaagtccttacaaggttcccagatatatcgtcagtccagcttagaatgccgaaccttcactttctgcctgtcaacttggggagcaaagaagctccgctggtgaagtttgctgatgatgtgtacctgccgacggatgaaccacacgggacgattgaagcaaccttaataagccgtccatgtcaaagctgtaaaaaaaatgtagtcgtcaggctggtattagactcctgcttcgtctccccagcatccccaggcttaaaatggacagtaagctgtaag

SEQ ID NO: 64871 - DNA, 272 bp, Zea mays
agctgattctcaccggcgtcgccatcgtgatcgccttggacagcggcagcagaagctctgcctccgcagggtgcttgctggtatcattacaatctggtagttttagttgttgggcttgacttcctactattcagaaacacagtaccgagaagtctttaggtggggtcaaagatggtgtcgcgagttgcaaaagcgccttgccgcgagctacctcaagtgtgggaaacgcaatgtgtggcttgacccagatgcagttagtgagatctccatgg

SEQ ID NO: 64872 - DNA, 282 bp, Zea mays
atttagaagcgcccctcctcctctcccccatccgtacccaatctaatcgacacccggccgagatgggccgcaagttcttcgttggtggcaactggaaatgcaatggaaccgcagatcaggttgagaagattgtcaaaaccctgattgaaggaaatgttccctctacagatgttgttgaggtcgttgtcagtcctccttatgtgttcctcccggtggtcaagagccagctgcgccaagagttccaagttgctgctcagaactgctgggtgaagaagggaggtg

SEQ ID NO: 64873 - DNA, 282 bp, Zea mays
ggtggacactcgcgcacgggtgattgctgccctctggcagtatattaaagcaaagaagcttcagaacccaaatgatccttccttcttcatgtgtgaccctcaattgaagaaggtgtttggggaggacaagctcaagtttgcaatgctgtcacagaggatatctcagcatctgtctgccccgccacccatcaatttggagcacaagattaagctgtcggggaatgaagcgcatagcagtgcttgctatgatgtgctggtggatgttcccttcccgctgcagaa

SEQ ID NO: 64874 - DNA, 256 bp, Zea mays
cgattgatgatctaggtcttgaatctagtaaggatgtggaatcaagcaatgctttgctaagcagggcctggtctcctggctggcgcaatgcagagaacatgcttgaggaatttgtgtcttatggtcttccagaatattcagaacatggtatgaaggttgggggaagtactacgtcattattcagaacatggtatgaaggttgggggaagtactacgtcattattgtcaccgtatctccatttcgaggattagtgta

SEQ ID NO: 64875 - DNA, 285 bp, Zea mays
cctcttcctcgagttctcctcaaccaaattcaaagtcacagcggcgaaactctcggcgatgtctggccgcggcaagggcgggaagggtctgggcaagggcggcgccaagcgccaccgcaaggtgctgcgtgacaacatccagggcatcaccaagccggcgatccgcaggttggcgaggaggggcggcgtcaagcgcatctccgggctcatctacgaggagacccgcggcgtgctcaagatcttcctcgagaacgtcatccgcgacgccgtcacctacaccgagca

SEQ ID NO: 64876 - DNA, 168 bp, Zea mays
attgaaacaatctggggcagaattgggcacttcaatccttttctttggatgcaggaaccgtaatatggactacatatatgaagatgagttgcaaactttccttgaggagggggcgctttctgagctaattgttgcattctctcgggaagggcaaacgaaagaatatgt

SEQ ID NO: 64877 - DNA, 96 bp, Zea mays
aaacaaagcaggagagatgacttagagtctcttggttatgtgctgatgtacttcttaagaggaagccttccttggcaaggcctgaaagctggaacg

SEQ ID NO: 64878 - DNA, 264 bp, Zea mays
gtttagcattggtgctggcataaatgcatatagcaatctaggagtattggctgtggttacatggcaagttctgttcgtctctgtgccaatgattgttttggcaatcaggttgcaaaggtattatttagcctcatctaaggaattgatgatgatcaatggcactaccaaatctgctctcgctaatcacttgggcgagtcgattgcaggggctataacaataagggcttttcaggtcgaagatcgtttctttgagaaaacttggaa

SEQ ID NO: 64879 - DNA, 280 bp, Zea mays
caaatgtgcttgcagctgccgatcttatcctatggaggaacaggaagatctctggcggggtacttgctggtgccacggccatctggctcctattcgaggtcatggagtaccatctcctcaccttggtgtgccactgtctcatcctctcgctggccatcctcttcctgtggtccaatgcctccactttcatcaacaagtccccaccgaacattcctgaggtcaaaatccctgaggatgtggctgttaatgttgccctgtcactgagatatgagatcaacag

SEQ ID NO: 64880 - DNA, 280 bp, Zea mays
actgctttggctctagaatcaaagtgataggcaacacaggaagcaactcaaccagagaagccgtccacgcaacagaacagggatttgctgttggcatgcatgcggatctccacatcaatccttactacgggaagacctcagctgaaggaatgatctctcatttcgaggctgtcctcccgatgggtccgaccatcatctacaacgtgccatccaggagcgcccaggacatcccccctgaagttattctagcgatttctggctacacaaacatggcgggtgt

SEQ ID NO: 64881 - DNA, 238 bp, Zea mays
atgttctttcaatgtgattgcctacaaggataaaccacgtttgcgaacaggtctggacatgctgagaacgacacaagagatagaaaggcgtctagaagacgtctcattgcccttgatcattttgcacggtgaggctgatatggttactgacccggcggttagtaaggctctgtatgagaaagccaagagccaagacaagaagctgtgcctctacaaaggtgcgtatcacgctatcttg

SEQ ID NO: 64882 - DNA, 132 bp, Zea mays
gcactgagaactcgatcgctggctagaacacaggtctctcattcacttccatgcgctccgtggccatcgccgtccccgaccgcagcgcaggactgaggataaatgaagaagttaaggttgctgcttctgctg

SEQ ID NO: 64883 - DNA, 277 bp, Zea mays
ctccgtagtctgtaccccaagcaccggcgcggcggcggcggctaccatggcagtcgggaagaacaagaggatctccaagggaaagaagggtggtaagaaaaagaccgtcgatcccttctctaagaaggactggtatgacatcaaggccccatcggtcttcagtgtgcgcaacattgggaagactctcgtgtccaggacacagggtaccaggattgcctctgatggtctgaagcacagagtctttgaggtttgtctagctgatcttcagggtgacgag

SEQ ID NO: 64884 - DNA, 279 bp, Zea mays
agtctgctcgcatttcctcccaatccatcccgcctccaaacccgaactccaagtcgccccgcatcgatggcgcccaaggccgagaagaagcccgcggcgaagaagccggcggaggaggagcccgctgccgaaaagcggccggcgggaaagaagcccaaggcggagaagcgtgtcccagcaggcaagtccgccggcaaggagggcggcgatggaaagaggggtcggaagaagggcaagaagagcgtggagacctacaagatctacatcttcaaggtgctg

SEQ ID NO: 64885 - DNA, 256 bp, Zea mays
acgatttgctgaatcaaaaaaggagctggacgctctcctgtcagatgattccttggcaaatgttccatttctcatccttggcaacaagattgatatcccgtatgctgcctctgaagaggagctgcggtatcacctaggccttagcaacttcacaaccgggaacggcaaggtcaaccttggcgactccaatgtccggccacttgaggttttcatgtgcagtgatgttcgcaagatgggccacggcgatggtttcaag

SEQ ID NO: 64886 - DNA, 291 bp, Zea mays
actcaaccaaattcgcagtcacagcgggcgtaaactactcggacgatcgtctagagccgcgtgcacaggtgacggagacaagtgtgctgagagcaatcgtgtccgcgtcagagcgccatccgcaaggtgctgcgtgacaacatccaaggcatcaccaagccggcgatccgcaagttcggcgacgaggagcggcgtcaagcgcatctccgggctcatctacgatgagacccgtcgcgtgctcaatatcatactcgagtacgtcatccgcgaagccgtcaccttacaccgagc

SEQ ID NO: 64887 - DNA, 262 bp, Zea mays
aggtttgaagcagaagaaggctcacctgatggagattcaggtcaatggtggtaccattgctgacaaggtggactatggctacaaattctttgagaaagaggtccctgttgatgctgtcttccagaaggatgagatgattgacatcattggtgtgaccaaggggaaaggttatgagggtgtggtcactcgttggggtgtcacccggcttccccgcaagacccacaggggtctccgcaaagttgcttgtatcggtgcatggcat

SEQ ID NO: 64888 - DNA, 270 bp, Zea mays
tagggtttctgattttagccgccgccgctgctcatctcacatccctcgagaagacgcctgctcctcgccgatcgatacgatggccgtcttctccgacctccacaccgccgacggcctcaagtccctcgaggctcacctcgccggcaaaacctatgtgtctggtgactccattactaaggatgacattaaggtcttcgccgcggtgccgtcgaagcctggcgctgagtttcctaatgacgcccgctggtacgagacgtctctgcggctgta

SEQ ID NO: 64889 - DNA, 277 bp, Zea mays
gaaaaggaaggagaatcaaagttgagtggaccaaggaggatcgcactgctgatcgaagaggcaactcaaggaggtctccaaccaatgcaaaaccgaccaaaaccttgttcgtgatcaactttgacccgatcaacacgagaattcgagatctggagaggcactttgataaatatggcagggtcgcgaatgtaaggatcaaaaagaacttcgcctttatacagtttgaggcgcaggaggatgctactagagcattggagggtgctaatgggagccattt

SEQ ID NO: 64890 - DNA, 272 bp, Zea mays
taagcaggttaaaatgtggcccctgcttatcacagcctcctgagagaacagtcaacccatcatccttccaagccgagcacagcaccacgttgatcgtgcgaaatggagggttgactgtgttctcaggaggctgtgataagcaggttaaaatgtggcccctgctctcaggtgctcagcccacggttttctcaggccatgaggcacctattaaagaactcgcttcggtgccactgatgaatcttcttgtcagtgggagctgggacaagactttg

SEQ ID NO: 64891 - DNA, 217 bp, Zea mays
cagattaaaaatctcattgaggcaccggaccaggattttgaaagggaaagctccatgggggggtagcaaagcttgctggtggtgttgccgtccatccaggggggagcccaaccggaactggactaaaaggggaggagttaagaattgaagatgccctaaatgccacccaggctgctgttgaaggaggtattgttgttggtggaggatgcaccttttg

SEQ ID NO: 64892 - DNA, 271 bp, Zea mays
gaaattcgatccagatttcattgatattaggacaaaagcacgtgaggtgttgcagagggaggacgatctgaatgaaattgtgcagcttgttggtaaagatgcgctggcagaatctgacaagattacgctggagacagcaaagcttttgagagaagattatttggcacaaaatgcattcaccccatatgataagttctgcccattctacaaatccgtttggatgatgcgcaacattattcacttcaacacattggcaaatcaggctgtggag

SEQ ID NO: 64893 - DNA, 277 bp, Zea mays
atcttggattaattgaggagtccaaggtttcaaggccattaccttggaggccagcgactaatgttttccgtgttaaagaggatgtatcgacctatattctgggccaacagaccaaagagctatcttaaaaggacattaggttgggatcagtatccccatggacggtggggtgattctcggaacccatcatatggagcacttactgaccaccagttcacaagaccacgaggccgtggtaagaagctccaagaggaatgggctgttccactgaaatctg

SEQ ID NO: 64894 - DNA, 272 bp, Zea mays
aagctgctctcgtccctagaaataaagcagctcctccgcggggcggcgaactactacgcatcgccaaaaccctagccccgatccggtcgaggagcactacttcttggcatggcgggcacccctagccaggcaagcctcctgctccagaagcagctcaaggatcttgcgaagaaccccgtggatgggttctccgcagggcttgtagacgatagcaacgtcttcgagtggcaggtcaccatcatcggcccgcccgacaccctatatgatggagg

SEQ ID NO: 64895 - DNA, 270 bp, Zea mays
gttcctcaaggattgagcagttctatatttacaaagaggccagatattatttttaagtggctcgggccccatggtagtgattgtggtatagtgaatgtgaacatacctactaatggtgctgaaattggtggagcatttggtggagaaaaagcaactggtggtggacgagaagcagggagtgattcctggaagcagtacatgaggagggcgacttgtacaatcaactatgggagcgagctacctctagcccagggaatcaattttggttaa

SEQ ID NO: 64896 - DNA, 271 bp, Zea mays
ccaaagacaatagataatgacattgcgatcatcgacaagtcttttggttttgatacggctgtggaagaggcccagcgtgccattgattcagctcatgtggaagcttgcagtgctgagaatggaataggtttagtaaaactgatgggccgttatagtgggttcattgcgatgtatgctactcttgctagtcgagatgtggactgctgtttgattccagagtctccattttatctggatggagagggtggattgcttcaatatgtagagaaga

SEQ ID NO: 64897 - DNA, 271 bp, Zea mays
gtttctgcatggtctcggtctaatccactgtgatttaaagccagaaaacatattggtaaagagctacagcagatgtgaaataaaagtaattgatcttgggagcagctgctttgagacagatcatctatgttcatatgtgcaatcacgatcttaccgtgcacctgaagttatactgggcttgccttatgacaaaaagatagatgtatggtcacttggttgtatattagcagagctttgcaccggaaatgtacttttccaaaatgattctcct

SEQ ID NO: 64898 - DNA, 268 bp, Zea mays
acatgattgagaggtccaccaaccttgactggtacaagggcccaaccctacttgaggctctggacttgatcaatgagccaaagaggccttcagacaagcccctgcgtctcccccttcaggatgtgtacaagattggtggtattggaactgtccctgttggacgtgttgagactggtgtcattaagcctggtatggttgttacttttgggcctactggtcttactactgaggttaagtccgttgagatgcaccatgaggctctccagga

SEQ ID NO: 64899 - DNA, 266 bp, Zea mays
acatgattgagaggtccaccaaccttgactggtacaagggcccaaccctacttgaggctctggacttgatcaatgagccaaagaggccttcagacaagcccctgcgtctcccccttcaggatgtgtacaagattggtggtattggaactgtccctgttggacgtgttgagactggtgtcattaagcctggtatggttgttacttttgggcctactggtcttactactgaggttaagtccgttgagatgcaccatgaggctctccag

SEQ ID NO: 64900 - DNA, 268 bp, Zea mays
gcagctcaactccattaccaacaccgggccaaccatgggagctttcatctcttgaggtgcagctgcagataaaactggagtcgtcgatatgtccgacgatgaacaagaagaaggcagcggcatggaggcagaagtagccctgggcatcgatccttgctccgatgacaaggagctcaagaagcagctcctcaggaaatacagcgggtgtttgggcaacctgagaaaggagctgtgcaagaagaggaagaaagacaagctccccaaggag

SEQ ID NO: 64901 - DNA, 269 bp, Zea mays
cgaaattactctgcaagatgaggaagacagtcttggtggaggccaaaggcgccagagggtatttcgggtgaccatcaaatttgctgctcgcgctgatctccaccatctggctatgtttcttgctgggaggcagccagatgcccctcaagaggctcttcaagtacttgacatcgtgctacgtgaaatgcctactgccaagtattgtcctgttggtagatcattttattctcccaagttagggagacctcagcaacttggtgaaggtttgg

SEQ ID NO: 64902 - DNA, 268 bp, Zea mays
cgagaagagcggcggcgcgggcggacaaggagcaggcggaggaggagctgtgccaagccacaatgggtatctcacgcgactcgatgcacaagcgccgtgccaccggtggaaagcagaaggcctggaggaagaagcgaaagtatgagcttggtcgccagccggccaacaccaagttgtcaagcaataagacagtgaggagggtccgtgttcgtagaggtaacgtgaagtggagggctcttcgccttgatactggtaactactcatgggg

SEQ ID NO: 64903 - DNA, 274 bp, Zea mays
atcttggattaattgaggagtccaaggtttcaaggccattaccttggaggccagcgactaatgttttccgtgttaaagaggatgttcgacctatattctgggccaacagaactaaagagctatcttaaaaggacattaggttgggatcagtatccccatggacggtggggtgattctcggaacccatcatatggagcactgcctgaccaccagttcacaagaccacgaggccgtggtaagaagctccaagaggaatgggctgttccactgaaat

SEQ ID NO: 64904 - DNA, 269 bp, Zea mays
gacgcgaactaggaggaaattgacatgcttcatgaggtcacgaagcaaatcgaagggcatactatctgtgcgcttggggatgctgcggcatggcctgtgcaggggcttatcaggcacttcaggccagagttggagcggaggatccgcgagcgagctgaaagggagctgttggcggcttctgcataatgtgtcagccatgttgcccctgtactagtttcctgatttcttcctaccgaaataatacaaactgatggagctcctttctgtgt

SEQ ID NO: 64905 - DNA, 272 bp, Zea mays
ccgttatatggtgacatcaaacgtatttgtgaacactgatttgggattgatatcacaatgttgcttaaccaagcatgtctttaagatcagcaaacagtacttggcaaatgtctcactgaaaattaatgttaagatgggaggaagaaacactgtgctcctggacgcaataagttggagcattcctttggtcagtgacatcccaactattatatttggcgcagatgtaacacaccctgaaaccggggaggactcaagtccatcaatcgctgccg

SEQ ID NO: 64906 - DNA, 266 bp, Zea mays
tgcactgctactaacaaagttgttaggatttgctcaaggaaggatagtgatggcgcttgaaggaggttataaccttaggtccatagcgaactcagtttgtgcttgtgcaaaagttctacttgggagacaaattcacattcaacactccagagatgcaaccatttgaatctacatggagagtaatacaagcggtacgcaatgaattgaagacatgctggcctgttctgagtagcaagttgccagaaaatgtatcattgaggattaag

SEQ ID NO: 64907 - DNA, 264 bp, Zea mays
gctttgccatctcttctaaagccacatcagcaggaccactggtttcttcgaattgcaagagggttgttgtgagggcaatgtcgcagagaggtgcccaaggacttcccattgatctcacaggtaaaagagcatttatagctggagttgctgatgataatggttatggttgggcaattgctaaggctcttgctgctgctggtgctgagattcttgttggtacatgggtgcctgcgttgaacatatttgagacaagcttgagacgtg

SEQ ID NO: 64908 - DNA, 264 bp, Zea mays
acgatcaagaatgctgttgtcacggtccctgcctatttcaacgactcgcagaggcaggccacaaaggatgctggggtgattgctggcctcaatgtgctgcgtatcatcaatgagccaaccgctgctgctattgcctatggtcttgacaagaaggcaaccagtgtcggtgagaagaatgtcctcatctttgaccttggaggtggtaccttcgatgtctccctccttacaattgaggaaggtatctttgaagtcaaggccacagct

SEQ ID NO: 64909 - DNA, 262 bp, Zea mays
gcagctcaactccattaccaacaccgggccaaccatgggagctttcatctctgcagctgcagctgcagataaaactggagtcgtcgatatgtccgacgatgaacaagaagaaggcagcggcatggaggcagaagtagccctgggcatcgatccttgctccgatgacaaggagctcaagaagcagctcctcaggaaatacagcgggtgtttgggcaacctgagaaaggagctgtgcaagaagaggaagaaagacaagctcccc

SEQ ID NO: 64910 - DNA, 267 bp, Zea mays
tggatgagaaggatgtgcggggttttattaaaagggaggagttcgaacagatcagtgcctcggtgctggaacgcgtgaaaggaccactggaaaaggccttggctgaagctgggttgactactgaaaatgtgcactttgttgaggttgttggatctggttctcgtgttccggctataatcaagataataactgatttttttgggaaggagccaagacgaaccatgaatgcaagtgagtgtgttgcgcgaggatgtgctcttcagtgtg

SEQ ID NO: 64911 - DNA, 263 bp, Zea mays
cacactcgagaactccatttcgatctcatttgaaatcaacccatcctcgtttcctccgtctagccgcctctcaccctcatggccaagatcaagatcgggatcaatgggtttggcaggatcggaaggctggtggccagggtggccctgcagagcgacgacgtcgagctcgtcgccgtgaacgaccccttcatcagcaccgattacatgacctacatgttcaagtatgacactgtgcacggacagtggaagcaccatgaggtcaa

SEQ ID NO: 64912 - DNA, 260 bp, Zea mays
ctgtgcaggaagatggaggtcccatactgcattgttaaaggaaacgctcgccttggatcgatcgttcacaagaagactgcatcagtcttgtgtactgaccactgtcaagaacgaggacaagcttgagttcagcaagatcttggaggctattaaggcgaacttcaatgacaagtttgatgaagtcaggaagaagtggggaggtggcatcatgggctccaagtcgcaggccaagaccactgccagggaaaagttgctggcca

SEQ ID NO: 64913 - DNA, 260 bp, Zea mays
ttctctctccaaaccttaatacccttgatctctcttacaactcctttacaggacaaatcccatcaggtttgcagaatcttaccaaattgtctgtcttgaatttagcagaaaattccctgtccgggccgattccggatctcaaacttcctagcttaagacagctaaatctgagcaacaatgaactgcatggttcgattcctccctttttccaaatcttctcaaatagttccttcctagggaactctggattgtgtggaccg

SEQ ID NO: 64914 - DNA, 262 bp, Zea mays
atgagtccaaaatgtcagttcttcacttcagcataaagaaacacgactcttacgaagctcctatcaaatctaaggagcctttgattttcaatgttggattccgacaatttacggcaaggccactgttttcatccgacaacatcaactgcaataaacacaagatggagagatttctgcaccatggccgattttcggttgcatctgtatacgctccaatttccttccctccacttcctctaatagttttgaagaacagagatgg

SEQ ID NO: 64915 - DNA, 266 bp, Zea mays
cactccgtagtctgtaccccaagcaccggcgcggcggcggcggctaccatggcagtcgggaagaacaagaggatctccaagggaaagaagggtggtaagaaaaagaccgtcgatcccttctctaagaaggactggtatgacatcaaggccccatcggtcttcagtgtgcgcaacattgggaagactctcgtgtccaggacacagggtaccaggattgcctctgatggtctgaagcacagagtctttgaggtttgtctagctgatct

SEQ ID NO: 64916 - DNA, 271 bp, Zea mays
gtttgttgtgttagggtttcgtctcgtgtataaggcgttcggagctcgcaaatcctttcctctctcgcgttcgaggctaggtagccgtcaccatgagccgctcggggcagcctccggatctcaagaagtacatggacaagaagcttcagattaagatgaatgcaaaccgtgttgttatcggcacacttcgtgggttcgaccagttcatgaatctggtggtggacaacactgtggaggtcaatggaaatgacaaaacagatattggaatggt

SEQ ID NO: 64917 - DNA, 267 bp, Zea mays
gatttcgctctcttcttcccgtcgagacccaaccataccagcggcgccgcaggtcgacgaggaggcggagtagagtggccggactacctcgacacctccactgcaaccatgggtatctcacgtgattcgatgcacaagcgccgggccaccggtggaaagcagaagacgtggcgcaagaagcgaaagtatgagcttggccgccagcctgctaacaccaaactgtctagcaataagacagtgaggagggtccgtgtccgtggaggcaac

SEQ ID NO: 64918 - DNA, 257 bp, Zea mays
caggcgctgagggactccagcatgtctgggtacatgtcctccaagaagacgatggagatcaaccccgagaacgccatcatggaggagctccgcaagcgtgccgaggctgacaagaacgacaagtccgttaaggaccttgtcatgctgctgttcgagacggcgctgctcacttctggctttagcctcgacgatcccaacacctttggcagccgcatccaccgcatgctcaagctgggcctgagcatcgacgaggacga

SEQ ID NO: 64919 - DNA, 261 bp, Zea mays
tagcagcagatcctcgtgcgaacaaagcgctagccccttcgtactgtcgcgatggcccgcacgaagcagacggcgaggaagtccactggcggcaaggcgccaaggaagcagctggccacgaaggcggcgcgcaagtctgccccggcgaccggcggagtgaagaagccccaccgtttccgccccggcaccgtcgcgctccgggagatccgcaagtatcagaagagcacggagctgctgatccgcaagctgccgttccagcgc

SEQ ID NO: 64920 - DNA, 258 bp, Zea mays
catgatggctggggtgttgctgtgctggtgggtgtgccacataaggacgctgagttcaagacccacccgatgaacttcctgaacgaaaggaccctgaaggggaccttctttggcaactataagccacgcactgatctgccaaatgtggtggagctgtacatgaaaaaggagctggaggtggagaagttcatcacgcacagcgtcccgttcgccgagatcaacaaggcgttcgacctgatggccaagggggagggcatc

SEQ ID NO: 64921 - DNA, 263 bp, Zea mays
ggaaagtgttcgtcctcatggcgccgccgcagccgaagtcgggcctcttcgtgggcatcaacaagggccatgtcgtcaccaagcgcgagctgcctctgcgcccgtcccaccgcaaggggaaagcaacgaagagggtgtccatggtcaggggcctgatcagagaggttgctggctttgctccttatgagaagcgtatcaccgagcttctgaaggttggcaaggacaagcgcgctctgaagcttgccaagagaaagcttggaact

SEQ ID NO: 64922 - DNA, 270 bp, Zea mays
ttaggtttttttgattttagccgccgccgctgctcatctcacatccctcgagaagacgcctgctcctcgccgatcgatacgatggccgtcttctccgacctccacaccgccgacggcctcaagtccctcgaggctcacctcgccggcaaaacctatgtgtctggtgactccattactaaggatgacattaaggtcttcgccgcggtgccgtcgaagcctggcgctgagtttcctaatgccgcccgctggtacgagaccgtctctgcggct

SEQ ID NO: 64923 - DNA, 274 bp, Zea mays
ggagcctgttgagaagtgcctgagggatgccaagatggacaagagcaccgtccatgacgttgtacttgttggtggctccactaggatccccagggtgcagcaactgctccaggacttcttcaacggcaaggagctgtgcaagaacatcaaccccgatgaggctgtcgcctatggtgctgctgtccaggctgccatcctgagcggtgagggcaatgagaaggtgcaggacctgcttctgctggacgtcacccctctgtccctgggtctggagact

SEQ ID NO: 64924 - DNA, 274 bp, Zea mays
ctcgtccacccgtcgtcctcctagctcctctactcgccagtcgccatgggcaagattaagatcggaatcaacggcttcggaaggatcggcaggctcgtggccagggtcgccctccagagcgaggatgtcgagctcgtcgccgtcaacgaccccttcatcaccacggactacatgacctacatgttcaagtacgacaccgtccacggccactggaagcacagcgacatcacactcaaggactccaagacccttctcttcggtgacaagccggtca

SEQ ID NO: 64925 - DNA, 268 bp, Zea mays
tctcgacgaatcggctcgaggatgctgaagccaacaaagactgctaagcagctcaacggcacaaaattatctgatcgaggaacaaaaaaggaaccaaagaaacaatctggtggttcaaaatcgaagacaggtgaggctgatactacggttgcaaaattggatattagagtgggccttatcagaaaagcagagaagcatccagatgctgattccctttacgtggaggagattgatgttggagaggacacaccaagaacagtggtcagtg

SEQ ID NO: 64926 - DNA, 263 bp, Zea mays
gagccaaacaggaatttcgtggttgagaagggacgagggactcctctgaaggatataccaagtgtggcacacagaatatcaaggaagaaaccttctgatcttaaatttcttcacagtattctttttgggaggaaaggcaaggctgtcgattttaaaggacatatactccagttctctggatttgtttggcatgaaagtgatgaaaagcacagagtcaaggcaaaagaaaagcttgacaagtgtgtaaaagaaacgctgttgga

SEQ ID NO: 64927 - DNA, 260 bp, Zea mays
gtgatggcacttgctccacaggagaaggaacgaattgttgatatggcggctgctccaggtggtaagactacttacattggcgctcttatgaagaataccggaatcatctatgcaaatgagttcaatgagaaaaggttgcatggacttttgggaaatatccatcgcatgggtgtgacaaataccatagtttgtaactatgatggtaaagagctacccaaagttcttgggatgaattcggttgacagagtattgcttgatgc

SEQ ID NO: 64928 - DNA, 264 bp, Zea mays
ccgacgtaggcgccgccgctaggacttttctgaggaatagagaagttgcagaattcgtgagtggagcattggctggtgcaatgactaaggctgttcttgctcccttagaaactatcaggacaagaatggttgtaggggtaggatcaaaacatatttttggtagctttgtggagattgttgaacataatggctggcaaggactctgggcaggtaatacaataaatatgctccggattatcccaactcaagcaattgagctcggga

SEQ ID NO: 64929 - DNA, 269 bp, Zea mays
aacattgcggtgatcaagtactgggggaagcgggacgaggcgctcatcctccccatcaacgacagcatcagcgtaacgctcgaccctgaccatctctccgccaccaccactgtcgccgtcagcccctcattcccttccgaccgcatgtggctcaatggcaaggagatctcgctattaggaggaaggtttcagagctgcctcagagaaatcagaaagcgtgctcgtgactttgaggacaaggagaagggcgtcaagatcaagaaagagga

SEQ ID NO: 64930 - DNA, 265 bp, Zea mays
gcgcatcgtcccgcgccacgtgctgctggcgatccgcaacgacgaggagctcgggaagctgctgaccggcgtgaccatcgcccacggggcgtgttgcccaacatcaacccggtcctgctgcccaagaagacggcggagaaggcgtccagcggcgggagcaaggaggccaagtcgcccaagaaggccgccaagtcccccaagaaggcataggatttggaggcggatccgatgttgtcatgtgtaggttgtaagcgggcaatgtgat

SEQ ID NO: 64931 - DNA, 265 bp, Zea mays
ccatcccatatccatggctggtctttggtgagaaggtgaaggtgaatgctgtcttcatccgtgattcaaccggagtatcagactccatattgattttgtttggcggtgctgtagcaaaaggaggcatggccgggcacttgaagatgctcgatggctacattgatttcttcatggaccccagcctgtctgaatgctacctgcaacttaaagaagaactcgataaacttatacagcagaagcttgaagacccaaacttcgacatcca

SEQ ID NO: 64932 - DNA, 277 bp, Zea mays
taccaaccttaccgaagagtttggtcccacccttaaactagcacacaactatatcaagaaatcacaggttcttgacgactgccactggtgatctgaatgactggtaccgccacacatctaaaggcgcatggccattctccaccgcggatcatggttggcctatatctgattgcactgctgaaggactaaaggcttcattattgttatcaaagatttctcctgaaattgttggtggaccgatagaagctaatagattttatgatgctgtcagttgtct

SEQ ID NO: 64933 - DNA, 265 bp, Zea mays
acgacatctcgctgaacgactacctcgctgtgaacgcgacgaagcacgcgatgtacctgccgcacaccgcggggcgttactccaagaagcggttccgcaaggcgcagtgcccgatcgtcgagcgcctcacaaactccctcatgatgcacgggcgcaacaacggcaagaaggtcatggctgtccgcatcatcaagcataccctggagatcattcacctgctcaccgatgccaaccccatccaggtcgtcgtcgacgcgatcatcaa

SEQ ID NO: 64934 - DNA, 264 bp, Zea mays
attgatgctgatcacatgatgttccctctagcatttggtgttgttgattctgagagtgatgataactggaattggtttatatcggaattgaggaagatgcttggagttaacacagataagatgccggtcttgactatactttctgagagaaagcggcaagtggttaaagcagttggatctaatttccccactgcttttcatggtttttgcctgagatacgtgagcgagagtttccttgacgagttcaagaatactaaactgctt

SEQ ID NO: 64935 - DNA, 263 bp, Zea mays
caactgggactgttgtcgcatacgcacttgagtacaatgatgagaagggaatatgtttcttcactgactttcttgtcgttggggagaaccaacaaacatttgatcttgaaggggacagtggaagcctcataatcttaacaggacaagacggtgagaagccgcaacctataggaattatatggggtggtacagctaaccggggaaggttgaaacttaaaagtggccagggtccggagaactggacaagtggagttgatcttggc

SEQ ID NO: 64936 - DNA, 261 bp, Zea mays
aggaggtttctcatgagtggcaattggttaacaagcagaagcctatctggatgagaaagcctgaggagattaccaaagaagagtatgctgctttctacaagagcttgaccaacgactgggaggagcatctcgccgttaagcacttctctgttgagggtcagcttgagttcaaggctgtcctacttgtgccgaagagggccccctttgacctcttcgacaccaggaagaaactgaacaacatcaagctctatgtgcgccgtg

SEQ ID NO: 64937 - DNA, 259 bp, Zea mays
attgagaaaacaacaaaaagtgttacacaacttgatttgatgcctgattcgctaagccaggcagatctaacagttctgcaggaattacctgaggatgtgaaggctgatttgtttagtgcacttccactgcatagatcaggagatcctgcatgcagcacttccaatgtatctgaaagtaaatcatgcaatgtggttagagctgaaaatagatcttctaatgatggtggaactgatgatctgaaaaccccaaggtcttttc

SEQ ID NO: 64938 - DNA, 221 bp, Zea mays
cttcgactgcggatacaatgccatcatcggtaggcctggattggcgaagttcatggccattccacattatacgtacatgatattgaagatgccaggaccacaaggaatcataaatgtacgcgctgacttccaaggcgccgcagagtgtttccgagtggtcattcaggcggccctcaccaccaaaccatcagcgacttcttctacgcaggcgaattcaaagc

SEQ ID NO: 64939 - DNA, 234 bp, Zea mays
atggatcaagttgtgtacactggaacacatgataacgatacagttcttggctggtggcaaaatttaccagaggaagaaaagaaaattgtgatcaagtatctaccagaagccgagaatattgacataacatggacactgattacggctgacctctcctccgtcgcgaggacttccgtggtaaccatgcaggacattcttgggcttgacagtccggtaagattgatactccagcta

SEQ ID NO: 64940 - DNA, 271 bp, Zea mays
ccacaagataaataagctgtcctttggggaagagttcccaggtgtagtcaatcctcttgatggagttgagtggatacaggataactccaatggattaacggggatgtaccagtattttgtaaaggttgttccaacaatctacacagatatcagggggcgcaagattcactcaaatcagttttctgtgacagagcacttcagagaggcaattggctatcctaggcctccacctggtgtatatttcttctacgaattttcaccaatcaaggtt

SEQ ID NO: 64941 - DNA, 271 bp, Zea mays
agaaactggagattgcagaggcaaactcgaaaatactgaaagaaaacgctgagatgattaatgagtacttctctattcacgttgatcacgatgggaacttgaccaggcttccagttgtacttgatcagtacacccctgatatggaccgtctcccaaattttgttttgactatggggcacaatgttacctgggatgatgagaaagagtgcttcagaacggcagcagctgctattgggaacttctacgcactccatcctcccatccttccaaa

SEQ ID NO: 64942 - DNA, 265 bp, Zea mays
gatgattttaggagggaaagtttaagttgttttcttacaataaaagactcctggaaagaattagatgaccaagcaaacgagcaagatggtcttctgaaactaagtaaaaccttccacctttgccagaccctgaaaacaagtggagacctttcagattggttgagctcagcgtacagttatctggccatggtggattacccacttccatcagaatttctcatgcctttgccagccaatcctattaaagaagtatgcagaaatatcg

SEQ ID NO: 64943 - DNA, 256 bp, Zea mays
agctgtttcagcaatagtgtcgtacttattggggcctgatagagctgataagattaccatatttgctggagatgtggttcctcacaaaaaacctgacccagcaatctacatattagcagcaactacacttggagttgatccgcaaagctgtgttgttattgaagacagtactatagggctcgcagcggcaaaagctgccggcatgaagtgtatcgtaaccaaaaagcggctacactgcagaagaggacttcgagac

SEQ ID NO: 64944 - DNA, 228 bp, Zea mays
gcgaagagcgcatgcaagagcagctgagtgcagcaactgctgaaatggtgatgctgtcgactgaggagactgagaagaagatgaaacaggcaacccacaaagatggaagcactaatggttcagcaaaagaaatccctaatgacaagcctgccggcaataagcctagtccctatgaagaactgattggagacatcaaggctagcctaggaagtgctccgacccccaacc

SEQ ID NO: 64945 - DNA, 255 bp, Zea mays
gctaaaagccccggcggcggtcatggccaccgcagaccagagccgtattttcatgaaggacgtcaaacgcgtcatcatcaaggtgggcactgcagttgtcacgaggcatgatgggcgagtatccacaggcaattttggtgttctttgtgaacaggtgaaagagataaatgctctaggatacgaggtgatcattgtgtcctcaggtgctgttggtgtggggaagcagaggctcaattacaggaagcttgtcaatag

SEQ ID NO: 64946 - DNA, 257 bp, Zea mays
ggataatggtggtggcattcttgtgcttggtgaaattgtggagccaggattagtgtatactccacttgttccatcacagcctcattacaacttaaatctggaaagcattgctgtcaatggtcaaaagctgcccattgattcctccttgtttacaacatcaaatacacaaggaacaatcgtggattcaggaacaacattggcataccttgcagatggagcctacgatccatttgttagtgcgatactgctgcagtctc

SEQ ID NO: 64947 - DNA, 264 bp, Zea mays
caaagacgggatagtagtttatgatggaaaggggctgttcagtgctgctcgtgtttggtggatgttccgtgtatttggacatgataaagtttgggtgttggatggaggtttgccccaatggcgcgcttctgggtatgatgttgaatcaagtgcctctagtgatgccatcctaaaggccagtgcagctggtgaagcaattgagaaagtttaccagggtcaattggttggtccaaccacatttgaagcaaagttgcagcctcatct

SEQ ID NO: 64948 - DNA, 266 bp, Zea mays
cttctgagatgtttgatctgcacaatgttgtcatatctatacctctgcctgcagttcgggaggctccaagtgtcagacagatagatggagagtggaagttggactcaagaaactctgtgttggaatggtctattctccttattgatcagtcgaatcgcagtggttccatggaatttgttgttcccccagctgatccgtcatcatttttccccatctctgttggattttctgcatcgagtactttcagtgatctgaaggttactgga

SEQ ID NO: 64949 - DNA, 261 bp, Zea mays
agcagaagaagcgaagtcgtcgccggagcaggaggaagagcgagcagcaagatgtcgtggcaggcgtacgtcgatgaccacctgctgtgcgacatcgaaggccagcacctcagcgccgccgccatcgtcggccacgacggcagcgtctgggcacagtccgagaacttccccgagttaaagcctgaggaggttgctgggatgataaaggactttgatgaacctggaactcttgcaccaactggtctttttgttggagctacg

SEQ ID NO: 64950 - DNA, 255 bp, Zea mays
gagtcctgttactatatgcggtgatattcatggacaatttcatgatcttgctgaactcttccgaatcggtggaaagtgtccagatacgaactacttgtttatgggagattatgttgaccgtggttactactctgtcgaaactgtcacacttttggtggctttaaaagttcgatatcctcagaggatcaccattctcagaggatcccatgaaagccggcagattactcaagtgtatgggttctatgacgaatgctt

SEQ ID NO: 64951 - DNA, 254 bp, Zea mays
gaatctgaaatctttattgtcgaaggtgattctgcgggcggtagtgcaaagcaaggacgggatagaagattccaggctattttgcctctacgaggtaaaattctcaacattgaaagaagggatgaagcagccatgtacaaaaatgaagagatccaaaaccttattcttgcacttggattaggagtcgagggtgaggattttaagaaggaggctctccggtatcataagatagttatacttactgacgctgatgt

SEQ ID NO: 64952 - DNA, 258 bp, Zea mays
caaccaccgcctccccgatctcgtcgagaggaagcccaatcccgaaaccgtcgccgtattccaatggcgcccaaggccgagaagaagcccgccgccaagaagcctgcggaggaggagccggcggcggagagggccacggcggggaagaagcccaaggccgagaagcggctccccgcgggcaagtccgcaggcaaggagggtggcgagaagaaggggaagaagaaggcaaagaagtcggtggagacgtacaagatctac

SEQ ID NO: 64953 - DNA, 267 bp, Zea mays
caaagaagggaagaaatggataacaaccccaatggatattgctaaggagatatcaagtggatttgcagctagttgtttgatagctcaagtggacgaaacactctgggatatggggaggccactggaaggtgacaacaaattgcaaatgttcaagtttgataccaatgaaggccgtgacaccttctggcactcaagtgctcatattcttggagaatctcttgagagagcatatggctgcaactgtgtattgggccttgcaccacaaga

SEQ ID NO: 64954 - DNA, 270 bp, Zea mays
taggtttttttgattttagccgccgccgctgctcatctcacatccctcgagaagacgcctgctcctcgccgatcgatacgatggccgtcttctccgacctccacaccgccgacggcctcaagtccctcgaggctcacctcgccggcaaaacctatgtgtctggtgactccattactaaggatgacattaaggtcttcgccgcggtgccgtcgaagcctggcgctgagtttcctaatgccgcccgctggtacgagaccgtctctgcggctg

SEQ ID NO: 64955 - DNA, 155 bp, Zea mays
cgaagaagctgctcaaggagggcgagggctgggagactcccgaggtcggcgacgaggttgaagtgcattacacgggcacgctccttgatgggacaaaattcgactcaagccgtgatcgtggagaacccttcaagttcgatcttggacaatgtcaa

SEQ ID NO: 64956 - DNA, 275 bp, Zea mays
cagtcatgtgccaaatatcaggaatggattttgctcttgagcctgtgctgcctccagtgactgcaaggccagaacatgttgagagagcgttaaaggcacgttatcaagatgcaatgaacatactgaggccacagggaagggaacttgatctgctgatcgtaatactgcctgacaacaatggttctctttatggggatctcaaaaggatctgtgagactgaactcggattggtctcccagtgttgtctgactaaacatgtttttaagatgagcaag

SEQ ID NO: 64957 - DNA, 271 bp, Zea mays
caggtgattctggcacttctccaccaaggcaatctcatgttgactctactaacaggacggtatatgttggtgggcttgaccccaatgttagcgaagatgaactgaggaaagcatttgcaaaatatggtgatcttgcctctgtcaaaattccttttgggaaacaatgtgggtttgttcaatttgtaaacagagttgatgctgaagaagcactgcatgggttgaatggatcaactattgggaagcaggcagttcgactttcctggggccgcag

SEQ ID NO: 64958 - DNA, 272 bp, Zea mays
cttccctttcttgtcgtcgtccctatcactgtcacttgtatatggacatttagcgataaagtgaccggacttaccacacctgtagcaaaccctcttaaagcgggcttcccctttctttgcttgaggatttaccagaagatcttgatgataagagtcatttcctcattatcaagcttggaggggttgattgggagtctacttggtgtagactcttccttcttctcttctgttgctttgaatgcaacgggttgcacctcaggtgtgaaggtggc

SEQ ID NO: 64959 - DNA, 270 bp, Zea mays
gagctgatcctcaccggcgtcgccatcgtaatcgccttggacagcggcaccagaacctctgcctccgcagggtgcttgctggtatcattacaatctggtagttttagtggttgggcttgacttcctactattcagaaacacagtaccgagaagtctttaggtggggtcaaagatggtgtcgctgaagttgcaaaagcgccttgccgcgagctacctcaagtgtgggaaaggcaaggtgtggcttgacccaaatgaagttagtgagatctc

SEQ ID NO: 64960 - DNA, 277 bp, Zea mays
gaaccacttgcatcaagatgtgcaaagtttaggttcaagcctctttcagaagaagtgatgagcagtcgcattatgcatatatgcaatgaagaaggcctcaatcttaatgctcaggcgatgtccacactgagtgtcatttctcaaggtgatcttcgtcgtgctataacctaccttcagagtgcagctcgcttatttggatcttctatctcttccagtgacctgatcagtgtttcaggggttatccctgaagatgttgtcaagtcactgcttgcagcct

SEQ ID NO: 64961 - DNA, 273 bp, Zea mays
acttggtgtctgagggttgcatcaagccattgtgtgaccttcttgtctgccctgatccgagaattgtaacagtttgtctggagggtcttgagaatattcttaaagtagggcagcatgacaagaccatgggtgcaacaggtgacactaacgtcttagctcagatgatcgatgaagcggaaggcctggaaaagatcgagaacctacagagccacgataacaatgaaatctatgaaaaggctgtgaagcttcttgagacatactggatggaggagg

SEQ ID NO: 64962 - DNA, 273 bp, Zea mays
gtagttttgattttgcaacagtagagaatgttgttatctgtggaagtatggagtctgccttagaactgctagcatcaactccatattgcttatcaattgagaaagtgtttgttataggaggcgggcaggtactgagagaatatcttaaaggacctgcatgtgaggctatccatctaactgacattcagtcgagcattgagtgtgacactttcatccctccggttgacttctcagtgttccagccatggtattcatctttcccggtgatagaga

SEQ ID NO: 64963 - DNA, 278 bp, Zea mays
ggtacagattatgattttgaatcttgtgaaccacataaagcccgagaggaacttgaaaatcttcaagctcaacaatccagtcttgagaagagggtcaataagaaagtaatggcaatgtttgagaaggcggaggatgagtacaatgatttgatgtcaaagaaaaacatcatcgagaatgacaaggcaaaaatcaagaaagtgatagaggagttggatgagaagaagaaggaaacattgaaggtcacttggctcaaagtaaacaaggatttcgggtctat

SEQ ID NO: 64964 - DNA, 273 bp, Zea mays
ctatgagagactccgtgaatcagttgacatgcatgacaacattgaccagatatgtcttgcccagaagcttgagaagcatgaattgctggagatgaggaggattgccgcctacatttacaacaaggctggcaggtggaagcaatcgatagctctatcgaagaaagacaacatgtacaaggattgcatggagacatgctcacaatctggtgaccgcgaattgtcagaggacttgcttgtctatttcattgagcagggtacgaaagaatgcttcgc

SEQ ID NO: 64965 - DNA, 273 bp, Zea mays
ccatcccatatccatggctggtctttggtgagaaggtgaaggtgaatgctgtcttcatccgtgattcaaccggagtatcagactccatattgattttgtttggcggtgctgtagcaaaaggaggcatggccgggcacttgaagatgctcgatggctacattgatttcttcatggaccccagcctgtctgaatgcttgctgcaacttaaagaagaactcgataaacttatacagcagaagcttgaagacccaaacttcgacatccacaaggaag

SEQ ID NO: 64966 - DNA, 275 bp, Zea mays
cttgaaactcttggtgttgagacagacaaggctggcaggatccttgttgataagcgcttcatgaccaatgtgaagggagtctatgcaatcggggatgccatccctggtcccatgcttgcccataaagctgaagaggatggtgtcgcatgcgtagaattcattgctggaaaagaaggccatgttgactatggcacagttcctggtgtggtctatacacatccagaagttgcatctgttggcaagactgaggagcaggtgaaggctctaggaattgc

SEQ ID NO: 64967 - DNA, 274 bp, Zea mays
ggcaaagttgaccctccatggtcttgtacagcactatataaaacttagcgaggcagagaagaaccggaaactgaatgatctcttggacgctcttgatttcaaccaagttgtgatattcgtgaagagtgttagcagagctgccgaactgaataagttactttgtgaatgcaacttcccatcaatctgcattcattctggaatgactcaggaagaaaggctaacaagatataagaacttcaaggaaggccacaagagaattcttgtggctacagat

SEQ ID NO: 64968 - DNA, 272 bp, Zea mays
gagaaaaacatcctaagccaatagctgcatcccctcaagattcacgcttgctctctgaaatacaagagcagcagaatttgttgaagacctacgaggtcatggtaaagaagttccagtcccagatccagactagagacactgagataacccatttacagcagcaaactgatgaagctaaacttcggaaatcaaagctagagaagaaactgaaacagaggggcctacttaacagggagtcagaggaatctgacgaagaagagaactacttttcc

SEQ ID NO: 64969 - DNA, 269 bp, Zea mays
cgagaagagcggcggcgcgggcggacaaggagcaggcggaggaggagctgtgccaagccacaatgggtatctcacgcgactcgatgcacaagcgccgtgccaccggtggaaagcagaaggcctggaggaagaagcgaaagtatgagcttggtcgccagccggccaacaccaagttgtcaagcaataagacagtgaggagggtccgtgttcgtggaggtaacgtgaagtggagggctcttcgccttgatactggtaactactcatgggga

SEQ ID NO: 64970 - DNA, 272 bp, Zea mays
caactgggactgttgtcgcatacgcacttgagtacaatgatgagaagggaatatgtttcttcactgactttcttgtcgttggggagaaccaacaaacatttgatcttgaaggggacagtggaagcctcataatcttaacaggacaagacggtgagaagccgcaacctataggaattatatggggtggtacagctaaccggggaaggttgaaacttaaaagtggccagggtccggagaactggacaagtggagttgatcttggccgccttctt

SEQ ID NO: 64971 - DNA, 273 bp, Zea mays
gcgagaacagggctctcaagataatttccggtcttcagaactttgacaggagcagtgttgcatctgttgtcacagctgcagataagatgagactagcagagctactcgaagaggaaggagctgatataatccaaactgagggtgggaaatgttctagcccgacaaaacctggagtgcttggattgattgaaaaggcaacaccaacactcgccgcagcatactccatctctcgggctgttagtattccagtgatgtgctcgtcagggttaagct

SEQ ID NO: 64972 - DNA, 273 bp, Zea mays
tcctgcattcagccctcctgtgtagctccaaccacttgctttggcccccggttcttctccaaatccaagtccaagtctaagtccaagtccaagaaggagaagtcgaagcctgatggtccaaaccaagagaacctcttcccggagctgattgctgagccaactgatgctcgctcgatgtcctttgttggcactcatgagtacttggccccagaaataataaaaggggagggccatggaagtgctgtggattggtggacctttggcatattcttg

SEQ ID NO: 64973 - DNA, 269 bp, Zea mays
accaaccattggtgtggaagttcatccgttggatttcaccactaactgtggtaagatcaggttctactgctgggataccgcagggcaagagaagtttggtggcctcagggatggatactatatccatggccagtgtgcgatcatcatgtttgatgtaacctcaaggcttacttacaagaatgttcctacgtggcatagggacctgtgcagggtctgtgaaaacatccccattgtcctctgcggtaataaggttgatgtgaagaacaggc

SEQ ID NO: 64974 - DNA, 276 bp, Zea mays
cttagatcaatagtcttattggaaccaaggtggagtgggtttatcatatgttacaagcattcaacacgggcaaccttgctttctaccaagaactttgcagggttcacaatgctgctcttactgcacaaccagctttggtgcaggatgagaggaagctgcttgagaaaatcaatattctttgtctgatggagataatctttagtcggccatctgaagatagaactattccattaagtgttattgctgagcagactaagctttcaatcagtgatgtgg

SEQ ID NO: 64975 - DNA, 152 bp, Zea mays
gcactgtgtagggtcaagggggtcacaagccgctggatcttaggtgccttgtgacccccttgaccctccagaggaagcgtgctagaattgctgacaagaagaagaggatcgctaagaacaagtctgacgctgctgagtaccagaagcttctt

SEQ ID NO: 64976 - DNA, 270 bp, Zea mays
tgataagtcaatagacaacaaagctttatatgatacgttctgtgcatttgggaatatcctttcatgtaaaattgcaacagacacctcaggagaatcaaggggatatggttttgttcagtttgagatggatgaatccgctcagtctgccattgataaactcaatggtatgcttatcaatgacaagcaagtgtatgttggaccttttgttcgtaagcaggacatggagaatgtctcgaacaatatcaaattcagtaatgtgtatgtgaagaa

SEQ ID NO: 64977 - DNA, 272 bp, Zea mays
gagaagagcggcggcgcgggcggacaaggagcaggcggaggaggagctgtgccaagccacaatgggtatctcgcgtgactcgatgcacaagcgccgggccaccggtggaaagcagaaggcctggaggaagaagcgaaagtatgagcttggtcgccagccagccaacaccaagttgtcaagcaataagacagtgaggagggtccgtgttcgtggaggtaatgtgaaatggagggctcttcgccttgatactggtaactactcatggggaagtg

SEQ ID NO: 64978 - DNA, 270 bp, Zea mays
agttgatcttgggcctttcaaacatgttgtagatgatggtcttgaactcaggaaagctgcctttgaatgtgtggatactttattggacagttgtcttgatcaagtgaatccatcgtccttcattgtacctttcctcttgtctggtttaggtgaccattacgacgtgaaaatgccttgccatttgattctatcaaagctagcagacaagtgcccttttgtcgtccttgctgtcctggactccatagttgaaccaatcgagaaaactataag

SEQ ID NO: 64979 - DNA, 272 bp, Zea mays
cgagaagagcggcggcgcgggcggacaaggagcaggcggaggaggagctgtgccaagccacaatgggtatctcacgcgactcgatgcacaagcgccgtgccaccggtggaaagcagaaggcctggaggaagaagcgaaagtatgagcttggtcgccagccggccaacaccaagttgtcaagcaataagacagtgaacagggtccgtgttcgtggaggtaacgtgaagtggagggctcttcgccttgatactggtaactactcatggggaagt

SEQ ID NO: 64980 - DNA, 272 bp, Zea mays
atcttgtgctgctgctgttggacaagatatgataaattcactggctgctgatgatgataaggaaaagtatgggcgatatcttcgcagatcttacattgaggataatagaaagacaaaatggtgtcctgcgcctggatgtgaatacgcagtggaattcgtcatgggcagtggcagctatgatgttaattgcaactgttcatatgggttttgttggaattgcaccgaggaagctcatcgtccagtagactgtgccactgtttcgaagtggatcc

SEQ ID NO: 64981 - DNA, 274 bp, Zea mays
aaacaatcaagaggtgccacaagtagaacaacatgttggcatcagcaactcttattcagagccgttggaccttgcaaagtacagttcatctgcagaattggaggtgcttggtctggagaagctaaaaatagagctgcaatctcgcggattaaaatgtggtggaactttacaggagcgtgctgcccgactcttccttctgaagacaactccattggacaagttaccaaagaagctgcttgcaaagactaatgggcggaagtgagaagttgtacca

SEQ ID NO: 64982 - DNA, 270 bp, Zea mays
ttggaacaatgccgccccataagattgagactgggcatcaagatgtggtccatgatattgccatggattactacgggaagcgcctagctacagcctcctctgataacacaataaagatcattgacataagtggaacctcacaccagcagcttgcaaccttgagtggacaccagggcccagtatggcaagtcgcatgggctcatcccaagtttggttcaatgcttgcatcctgcagctacgacggccgggtgatcatctggaaggaaggaa

SEQ ID NO: 64983 - DNA, 270 bp, Zea mays
gactagttctagatcgccagggcgtcggagcgagctcattctcaactcgactcaagagctctgcctcctccatcttcccttctctggcctccggagccacgctgatcagagatggaggcgaatccgaagaacaccttcacgatcaaagtggaggacgggaagcccgggaaggacggccggctggcggtcggaccggtgttccggagcgttctggccaaggatgggttcccgcagcttgagcctgacatgaagacatcatgggacgtgttc

SEQ ID NO: 64984 - DNA, 267 bp, Zea mays
tggagtcaaggtttcggactcggttaccatcaccctgggtgctgaggatgaactgaaggatgctgttggtctggttcgcccagttagtgttgccttcgaggtgatcactggtttcaggctgtacaagagcggagtttacactagcgaccattgtggaactacaccgatggatgtgaaccacgctgttctggctgttggctacggtgtcgaagatggtgtaccctactggctcatcaagaactcatggggcgctgactggggtgatga

SEQ ID NO: 64985 - DNA, 270 bp, Zea mays
ctcgaccgagatcacacacactcgagaactccatttcgatctcatttgaaatcaacccatcctcgtttcctccgtctagcagcctctcaccctcatggccaagatcaagatcgggatcaatgggtttggcaggatcggaaggctggtggccagggtggccctgcagagcgacgacgtcgagctcgtcgccgtgaacgaccccttcatcagcaccgattacatgacctacatgttcaagtatgacactgtgcacggacagtggaagcacca

SEQ ID NO: 64986 - DNA, 270 bp, Zea mays
cctcaagaacctgatcagcttggatctgtatgccaacaagctcacgggaggaatccccaagtcactctccaagctcgactcactcagattcatgcgcttgaacaacaacaagcttacaggatcaattccaagggagtttgccaagctctccaacctgaaagtcatcgatttgtctaacaatgatctctgtggaactatccctgttgatgggcctttctcaacctttcctctccgaagctttgagaacaacagcaggctcaacggtccaga

SEQ ID NO: 64987 - DNA, 266 bp, Zea mays
tggacagtttggtgaacaggccatttgcagttatactaagcaaatacttttgggcctagcttatttgcacgcaaagaatacagtacacagagacatcaaaggcgcaaacatattggtagaccctaatggccgcgtgaagctcgctgactttgggatggcaaaacatatcaatgggcagcagtgccctttctcatttaagggtagcccgtactggatggctcctgaggttataaaaaatgctagcggatgtaaccttgcagttgata

SEQ ID NO: 64988 - DNA, 267 bp, Zea mays
ggaattagtggaacatgtgattttgtcaaggcagacttcatgaagatgccgttcgatgacaacacttttgatgctgtttatgccattgaggcaacatgtcatgcacctgatccagttggttgctacaaggagatatatcgtgtgttgaagcctggccagtgctttgccgtgtacgagtggtgcattacggatcactatgatcctaacaatgcaacccacaaaaggatcaaggatgaaattgagcttggcaatggcctgccagatatc

SEQ ID NO: 64989 - DNA, 268 bp, Zea mays
caaatggcaaaaatttgcctgaagtgccgaccttgatgtttgaattcatagggacagaagcatatgctctggaacaaactctcttggttcaaaaaattgccactgaacaccatggatcagattttgtttttgtcgaggagccagatgctaaagcggaactatggaagatcaggaaggaggcactttgggctggttttgctatgaaacctgatcatgaagctatgataacggatgtttgtgtccctctatccagacttgctgaatgcat

SEQ ID NO: 64990 - DNA, 291 bp, Zea mays
cgcgcttcgcccccgacgagctcacgctctgctacaagacgctcaatgacgcctgcccctactccaagttcgcgcacctcaccgccaaccaggccatcctggaggctacgggcgcggcgaccaagattcacatcgttgacttcgggatcgtgcagggtatccaatgggcggcgctgctgcaggcactcgccactcgcccgggggagaagccatcccgggtacgtatctccggcgtgccttcgccgtacctggggccaaagcctgcggcgtccctcgccgcaaccagtgccc

SEQ ID NO: 64991 - DNA, 282 bp, Zea mays
aagcagaattagctgtaaaagactgtatggaaaagaaatggttaccgaaattatgtttgatctgagagctagtggccaaagttcttcggagtccgaagccggctggtttgatcttttcagcaagcgttactggaaagttgtgagtgtgggggcagcactgtttttgttccagcagcttgcggtataaacgctgttgtatattactctacatcggtgttccgtagtgcaggcattgcatctgatgttgctgctagtgctcttgttggagcagccaatgttttt

SEQ ID NO: 64992 - DNA, 283 bp, Zea mays
tattgatgctgatcacatgatgttccctctagcatttggtgttgttgattctgagagtgatgataactggaattggtttatatcggaattgaggaagatgcttggagttaacacagataagatgccggtcttgactatactttctgagagaaagcggcaagtggttaaagcagttggatcaatttccccactgcttttcatggtttttgcctgagatacgtgagcgagagtttccttgacgagttcaagaatactaaactgcttaaccttttctggagtgctg

SEQ ID NO: 64993 - DNA, 285 bp, Zea mays
tacgactgcatctctggtctcccacgcctataatcccattcccctccttcaaagccctgcggcgatttcgattcttcccttctatctccaggtatacccatcggagcagcactgacaaaaattctccagatatggcaagcaaaaggattcagaaggaactcatggatctccaaaaggacccaccgacatcatgcagtgcagggcctgctggagaggatctattccactggcaggccacaatcatgggtcctagtgacagcccctatgcaggcggggttttcttta

SEQ ID NO: 64994 - DNA, 274 bp, Zea mays
aagcagaattagctgtcaaaagactgtatggaaaagaaatggttaccgaaattatgtttgatctgagagctagtggccaaagttcttcggagtccgaagccggctggtttgatcttttcagcaagcgttactggaaagttgtgagtgtgggggcagcactgtttttgttccagcagcttgctggtataaacgctgttgtatattactctacatcggtgttccgtagtgcaggcattgcatctgatgttgctgctagtgctcttgttggagcagc

SEQ ID NO: 64995 - DNA, 284 bp, Zea mays
cgtgacttcccctcccctctcccctctccactccatcgtcaaggaaggaacacggccctaactaaaccctagctaagggaagggaaacaagaccatggatgcctccaagctccgcgagcttcgcgacttcgtcgaggcgtgcaagaagaatccttcgctcctcgccgaccccaacctctcctacttccgggattacctccagagtttgggtgccaaaattcccgccgccgccccctctttcgaaagtcccaagagatcttccatggacgacattgatgacgacg

SEQ ID NO: 64996 - DNA, 284 bp, Zea mays
catatgaaaagcaagctcgaatgctcgagcaagaaaaaaaccatcttcaagagaagttcttatctgaatgtaagaaatatgatgaggcagaacaaagatacaagtctgcagaaagggatgcgaagaaagctgttgagttggctgatgcagctcgaacagaggctattgcataccagaaagagaggacaaggcacagcagttatctattgaaaaggtagcagttatagagagggttcaaagacaggtagacagactagagcaggaaaaggttaatctattgggcg

SEQ ID NO: 64997 - DNA, 281 bp, Zea mays
gggcaatccctgccgcttctgctgtccggccaggattgcattctccacgcgcaggctccgggaagacgctggcctacctcttgtccatcttctccaccatcgacttcagcaggtcctcggtgcaagcgctggttgtcgtccccacgagggagctcatcatgcaggttaccaaggtcgctagactactcgcagccaaggcgtgcaccgtcatggctttgcttgatggcggtacgctcaagaggcaaaagagctgggtcaaggcagaccccccgcgataattg

SEQ ID NO: 64998 - DNA, 282 bp, Zea mays
gaatctgcacttaatgaacaagctgggaagatgttacttgaaaattatgaggaatatgcacgacatgcaaggttatacactggcatccatgcccttaaacctaagaatacgtccaagaccggagctatatctgagtcaaccacagctctgaatgtcgacaagtcaagtactgcctctagcaagaacacaccatcgatgccaccggcggtatctacctccagtgcatccagagcatttggtacgagtttgcaggatcagaaccccactgtttctgatcctgct

SEQ ID NO: 64999 - DNA, 294 bp, Zea mays
cggtggaccagctgcccatgaacgtgggcacgcgcactacgacccgctcttcccgttcggcttcggactcaccaccaagggcacgaagtgagtgagtgtgaggcgctctgatgggatgtggcctgtgagtgagctgtgtattcgtgggcgggcgtgaggctctttggctttcgaattggttgggggtgacgggcggcgagtcgtgtacgccgcacacattgcgcaggtacgttgggttgggatgtttgcgtctgggtaataacagtgatgcattcttgagatggttgctgttat

SEQ ID NO: 65000 - DNA, 287 bp, Zea mays
atgatgtttcatgcaattgcatgttcagcttttgttggaattgcactgaggaagctcatcgaccagtgaactgtgagactgtttctaagtggatattaaaaaacagtgcagaatctgaaaacatgaactggatactggctaattctaagccctgtccaaagtgcaaacggccaatagagaaaaccagggatgcatgcatatgacatgcacccctccttgtaaattcgaattttgctggttatgtctgggtgcatggtcagatcatggagagagaacaggtggctttt

SEQ ID NO: 65001 - DNA, 284 bp, Zea mays
agaagccaatgatagctgttcagcacaagggggaggagaaacagtttgcagccgaagagatctcctctatggttctcatcaagatgcgtgagatcgctgaagcttaccttggcagcacgatcaagaatgctgttgtcacggtccctgcctatttcaacgactcgcagaggcaggccacaaaggatgctggggtgattgctggcctcaatgtgctgcgtatcatcaatgagccaaccgctgctgctattgcctatggtcttgacaagaaggcaagcagtgtcggt

SEQ ID NO: 65002 - DNA, 281 bp, Zea mays
gcagcagacacctcgccacctccaccctcgaatcgttccccaccatggcgtcgcagggatcctccgtcttcgccgcactcgagcaggccccggaggaccccatcctcggagtgaccgttgcctacaacaaggatcccagccccgtgaaggtcaacctcggggtcggcgcctaccggaccgaggaagggaagcccctagtgctgaacgtggtcaggcgcgccgagcaaatgttgatcaataatccgtcacgtgtcaaggagtacctaccaatcaccggtctg

SEQ ID NO: 65003 - DNA, 286 bp, Zea mays
agagcaacctgaaccgcaccttctccctgctcaaggccaggggcatgatccagtctggggacctcgtgatcgccctctcggacatgctgcagtccatccaggtgatgaacgtaccctgaggtagaagagccttacctttacctccatgccgcacggtcccgtatcggaaggaacacgcgtgttatcggcaccttggaaggacggtttcttccttccctgcgcctaaatcgctgccctttgttttcgctgtatcagatgctgctatgctatgctaggctctagtctg

SEQ ID NO: 65004 - DNA, 281 bp, Zea mays
aacgcaagaaggatccccaccccgaccgacctaccctaatcggcgatggcgacggtggcgatggacatctcgaagcccactccagtggcgtccggcgacgaggccgcggcggcggccaaggggacgcagcggcggagggggcgaggggctgcggcagtactacctgcagcacatccacgacctgcagctccagatccggcagaagacccacaacctcaaccgtctcgaggcccagcgcaatgacctcaactcccgagttagaatgctcagggaagagttgc

SEQ ID NO: 65005 - DNA, 276 bp, Zea mays
acggctcgagaatggtggccgtttcttgttccagctgctgctattgtcctaaaattgggtagaaagtgtatgacaaatactcaagtacatgcagttcgtcctgctgttcctggattgtttccttacatggtcccaaacagtgaatgttccttgctacttctgttgctggaaatatgccgtagttatattctggtgaatactagagtcttgattatgatatgtaggctttgggttatgacctggcagctaggatcaacttttatttttgttagtttg

SEQ ID NO: 65006 - DNA, 267 bp, Zea mays
agcagaatcttaaggaccatggtattactggtgtttttggtcctgtattagaactggttgattgtgaagagaagttctttacagctgttgaggtcactgctgcaaatagcttgttccatgtggttgtcgagaatgatgacatatcaacaaagatcattcaaatattaactagagaaaaaggtggaagggtgacatttataccattgaacagagtgaaagttccagatctcagctgtccgcaaagtcctgattttgttccattgttga

SEQ ID NO: 65007 - DNA, 257 bp, Zea mays
caactgggactgttgtcgcatacgcacttgagtacaatgatgagaagggaatatgtttcttcactgactttcttgtcgttggggagaaccaacaaacatttgatcttgaaggggacagtggaagcctcataatcttaacaggacaagacggtgagaagccgcaacctataggcattatatggggtggtacagctaaccggggaaggttgaaacttaaaagtggccagggtccggagaactggacaagtggagttgat

SEQ ID NO: 65008 - DNA, 257 bp, Zea mays
gagcgtcagagccgatcccgatccagcgaggcggcgaccctccctcctccccttgcttcgctcgtccagccctgaccacccgcatccccgtcagtcatggcagcggcacaggcggaggcgcggtgcgtgcgctgtcccagaaggagcaggacatacagatgatgctcgccgccgacgtccaccttggcaccaagaactgcgatttccagatggagcgctatgcctttaagcgccgcaccgacggcatctacatcatc

SEQ ID NO: 65009 - DNA, 241 bp, Zea mays
gaggcgctgagggactccagcatgtgtgggtacatgtcgtccaagaagacgatggatatcaaccccgcgaacgccatcatggaggagctccgcaagcgtgccgcggctgacaagaacgacaagtccgttaaggacctctgtcatgctgctgttcgagacggcgctgctcacttctggcattagctgcggcgatcccaacacgtttggcagccgcatccaccgcatgctcaagctgggcctg

SEQ ID NO: 65010 - DNA, 243 bp, Zea mays
gcattcaagactcccagtttgatatttgaattcgtcaacaacacagacttcaaagttttgtaccccacattgacggattatgacatccgctactacatatatgagctactcaaggcccttgattactgtcattctcaaggcatcatgcatcgagatgtcaagccccataatgaaatgctagatcatgagcttcgaaaacttcggttgatagactggggcttagctgcattctaccatccaggc

SEQ ID NO: 65011 - DNA, 274 bp, Zea mays
agagccgtggaatgataaaaacactcgtttaatcacatgtgatcctcatgccagcaagcttgtggtaaactcagatactcctcaggaggttgaagccgggaaggaaatcatatttacctatgatgtaggcttcgaggagagtgatatcaagtgggcttctcgctgggacacctattgttaatgatagatgatcaaattcactggttttctattgtgaactctctcatgatcgtactcttcttatctgggatggtggccatgattatgctccgca

SEQ ID NO: 65012 - DNA, 242 bp, Zea mays
agaagctgatttccagtgggtatgattataaagctgttagaagatggacaacaaaaaggaagttagggtacagtctaattgattgtgacaagatatttgttcccatacacaaggaagtccattggtgtttagcagtcatcaacatcagggacaaaaagtttcagtatctagactcacttggtggcatggacatgaaggtcttgaatgtcttggccagtatattgtggatgagtcaaggccaa

SEQ ID NO: 65013 - DNA, 229 bp, Zea mays
gccccaactatccccagtctcggaagagaactatccagaagcgcaagactccaaagccgtcgccttcctatccatcccttcctcgccgcgggggtcgcctgagatcacataaacaatggtgaaggctgttgctgtgcttggtagcagcgatggtgtcaagggcaccatcttcttcacccaagagggagatggccctaccactgtcaccggaagtgtctctggcctcaaa

SEQ ID NO: 65014 - DNA, 287 bp, Zea mays
caggttagtatgggtgtaatgccatatcaggcaaggatggcttatctgagtaccgcaaggatggtgaatatgttctgacttacgaggacaaggatggagattggatgcttgttggcgatgtaccatgggagatgttcgctgactcttgccgcagctcaggatcatgaaaggatcagatgcaattggacttgctccaagggcagctgataagtccaagaatcgcaactagaatggttgcttcttacagtccagagcaagagggagatatcagtgactgtagggatctt

SEQ ID NO: 65015 - DNA, 197 bp, Zea mays
ctcgccgccgccgctgccaccgccgcttgctgccgcagccgccatgggggcgtacaagtacgtgtcggaactatggaggaggaagcagtcggacgtgatgcgcttcgtgcagcgcgtgcgctagctgggagtacaggcagcagccgtccatcgtccgcctcaccaggcccacccgccccgacaaggcccgtcgtctc

SEQ ID NO: 65016 - DNA, 197 bp, Zea mays
gccgcagccaaaccctctccagcagccgtcgtcgccaccgctgcagcgcggaggcgacccccatcgccgccaagatgcagatcttcgtgaagaccctgacggggaaaaccatcacgttggaggtggagtcctcggacaacatcgacaacgtgaaggccaagatacaggacaaggagggcatcccgccggaccagcag

SEQ ID NO: 65017 - DNA, 155 bp, Zea mays
cagaagcagctgggtatggttcacagttggttttgtttccggaagtctttgttggtggctacccacatggatctacctttggactggttgtcggcaatcgcactgccaagggaaaggaagactttcagaagtatcacgcatctgccatagatgtg

SEQ ID NO: 65018 - DNA, 277 bp, Zea mays
ccgtgttgcaagaaggggaattccgctgcgagatccgtgaacggttcagagatggcacagacggtgttcaccccctctttggaagcgatgaagcatgtcaaggcagagaacggagtcattctcaccaagcccttccttgatgtctgcaagcaaatattgcctgtcctcgataaatttggaggtgctatggcaattgtaaagagtgatatcggcggcaatatcacaagactggaaaacaagtatacttcagaaccatcaaagtatgacacttgtacag

SEQ ID NO: 65019 - DNA, 139 bp, Zea mays
cgccgccgctgctcatctcacatccctcgagaagacgcctgctcctcgccgatcgatacgatggccgtcttctccgacctccacaccgccgacggcctcaagtccctcgaggctcacctcgccggcaaaacctatgtgt

SEQ ID NO: 65020 - DNA, 157 bp, Zea mays
ctcgccgtctgccttctgcgcctccatttcggcctctgtcccttgcaagttcaatctcacctccaaccatgggtaaagagaagtcccacatcaacattgtggttattggccatgtcgactctggcaagtcgaccaccacaggacaccttatctacaa

SEQ ID NO: 65021 - DNA, 138 bp, Zea mays
cttcaagatcatgggtggatgtgacaagcaaggcttcccaatgaagcaaggagttttgacttctggtcgtgttcgtcttctgctccataggagcgcatcgtgagccaagacctatctgttatcaacttggtgattgtg

SEQ ID NO: 65022 - DNA, 268 bp, Zea mays
aaggaaggaaatcacagaggagttcttcagttacaggagcctggcgcgaagtctctgggatgattattccgcttatgaacactgggccaagatcgaggttccaaaagacaaggacgaacttgccgaactccaggcccggctgaggaagcgtttccctgtcgatgcatataacaaggcacgtatggagctggaccccaacaaggtgctctcaaacgccaagttggagaagatgttcccagtgttggagcctgctcccagacaaagtaat

SEQ ID NO: 65023 - DNA, 161 bp, Zea mays
ctggagacgacgttcagaaatggcacctcgcaaggggaaggaaaagaaggaagaacaggtcatcagccttggacctcaggtggctgaaggagagaatgtatttggtgtctgccacatctttgcatccttcaatgatacctttgtccatgttactgatcttt

SEQ ID NO: 65024 - DNA, 278 bp, Zea mays
taaaaagatatttttgattgattgtcccggtgttgtatatcaaaacaatgattcagaaactgatatagttctgaagggtgtggtccgggtgacaaatttggcggatgctgctgagcacattggtgaagttcttaggcgtgttaaaaaggagcatctccaaagagcgtacaaaattcaagattggtctgatgataacgattttcttgtccagctgtgcaggaccactggaaaacttctcaagggcggggagcctgatctgaaacagcagccaagatggt

SEQ ID NO: 65025 - DNA, 148 bp, Zea mays
ccgcgcctctacatttcttctctctctgctcctccgcctccgcctccgcctgatccatccaagacagggatcgccatgtcggactcggaggagcaccacttcgaatcgaaggccgacgctggggcgtccaagacctacccgcagcagg

SEQ ID NO: 65026 - DNA, 191 bp, Zea mays
gtgcttgtcccattcagaggttgtgaggattctcctcgccacctgaagattatgggtgacttgggtcagattgtgcccatgaaataccatccgagagatgttgattcaattaaggctgttatggccaagtcaaatgtggttattaacctcataggacgagagtatgaaacaaggaactacagcttcgaaga

SEQ ID NO: 65027 - DNA, 195 bp, Zea mays
caatccttcaagcgcaagctgcctcctcctcgtcgtccggtcgtgagaagggatggcgggccgtggcaaggctatcggcgctggcgccgcgaagaaggcaacgtcgaggagctccaaggccggactccagttccccgtcggcaggattgccaggttcctcaaggcgggcaagtacgcggagccgtcggcgccggc

SEQ ID NO: 65028 - DNA, 147 bp, Zea mays
ccgcctctctcaatctgataccgcagatccgtcgtccggtgagtggaagccgcacgaacccatggcctccggcgagcttgcctgcacctacgccgctctcatcctcagcgacgatggcatcgccatcaccgccgagaagatcgccac

SEQ ID NO: 65029 - DNA, 136 bp, Zea mays
tagtagcgttcctctgaagcgatggcgatcaagcggaccaaggcggagaagaagatcgcgtacgacaagaagctgtgcaacatgctcgatgagtacaccaaggtgctcatcgccctcgccgacaacgtcgtttcca

SEQ ID NO: 65030 - DNA, 265 bp, Zea mays
gtttctcatgttacagcagctacaatcccacctgcgcaaccacaaccatcactacaatctcttgcggctagttcaggacctaaaatttcttgctcatgtgtccctgttgacattgagtggcctcctcgaagaagctcgtcatccaacttcaatgcacccttgtctattagcaaggataatggttctggaaggctgtctagcgatggagttgatgatattgatccttttgctgattggcccccaatacctagaatgttaatagcat

SEQ ID NO: 65031 - DNA, 189 bp, Zea mays
caacgatggctcaaacaaaatttcaggcgacagctgaaagacctgtacaagtcctttgtttctgagtaccctatcgagtcgatcgaagacccatttgatcaggatgactggagcacttatgccaaactcactgatgagattggacagaaagtgcagattgtaggagatgatcttctcgttaccaacccc

SEQ ID NO: 65032 - DNA, 231 bp, Zea mays
gccaatccgaaatctcgagcgctcgcgccggcgaccacagcaaagaggaggccgcagcacgacagcgccccagggttcctactctcgtcgcagcggcagcactggtagcggcagcagtgaggggaagatgtcgtcggtgttcagcggcgatgagaccgcccccttcttcggcttccttggcgccgccgccgcgctcgtcttctcatgcatgggggcggcgtacgggacggc

SEQ ID NO: 65033 - DNA, 118 bp, Zea mays
caatgtggatgtgaacgagttccagaccaacctggttccttacccgaggatccacttcatgctctcctcctacgcaccggtgatctcttctgcgaaggccttccacgagcagctgtct

SEQ ID NO: 65034 - DNA, 108 bp, Zea mays
gcttgtcgggcctgaaggtgaagagcacgagtttgatgctccagacgacgcctacatccttgacgcagccgagactgccggtgtggagttgccatactcgtgccgtgc

SEQ ID NO: 65035 - DNA, 132 bp, Zea mays
ggcttatcatggagtatttttaaagagggacatttgttaagtgggtctgacgatgctcaaatttgcttgtgggacattaaagcaaatagtagaaacaaaagtcttgacgccttgcagatttttaagcatcat

SEQ ID NO: 65036 - DNA, 262 bp, Zea mays
tcgaggtcaagcctggttccactgttaagtgtgagcctggatatggctttgtgctgcacctttcccaggctgctcttggggaatcgaagaagagtgataatgcctagatgtatgtcaaaattgatgatcagaaacttgccattggaaccctctctgttgacaagaacccacacatacaatttgatctggttttcgataaagagtttgagctgtcgcacacatcaaaaactaccagcgtcttcttcatggctacaaggttgag

SEQ ID NO: 65037 - DNA, 264 bp, Zea mays
cccaacttgaaagttgctgcccctggagaattcatcggttcaattgcgatccctctccctgtcggatctgtgctagtcctgaatggcaatggtgctgatgtagcaaaacattgtgtcccagcagtccctaccaaaaggatatccattacattcagaaaaatggacccagcaaagcgtccatttggctttgaagatgacccggaactacttaatcttgctcctctagggacagttgtacaagaaactggcatacatcagatgaag

SEQ ID NO: 65038 - DNA, 135 bp, Zea mays
aacccagcagcgttctaccaacaacccatcattggtggtgccctcttttagatttcttatgagttatagttcaataataaagttttttgtctgatgtttgtggcttcccagaaataagaaagtacatttctaaaa

SEQ ID NO: 65039 - DNA, 113 bp, Zea mays
tgaagaaactatgtgctgtagtatagccgctggctagctagctagttgagtcatttagcggcgatgattgagtaataatgtgtcacgcatcaccatgggtggcagtgtcagtg

SEQ ID NO: 65040 - DNA, 106 bp, Zea mays
gccgccatggggtacctggcgccggagtacaccaccgtgggccgcttctcggagaagagcgacgtgtacgcgttcggggtcatcgtgctccaggtgctcaccggca

SEQ ID NO: 65041 - DNA, 104 bp, Zea mays
gtgaaggcagtctcatcctacctcaagaaagttgggtacaaccctgataagagtgcctttgttcccatttctggttttgagggcgacaacatgattgagaggcc

SEQ ID NO: 65042 - DNA, 166 bp, Zea mays
ggaaacctctcaaaccctagccgcctcctgcaagtttcagagctcaggaatctgcgccatggcgagtgagacggagaccttcgcatttcaggctgagatcaaccagctgctctcactcatcatcaacaccttctactccaacaaggagatcttcctccgcgagctt

SEQ ID NO: 65043 - DNA, 262 bp, Zea mays
cagatatatattccagaaataaattggattcttatggttctttgtgttgctgtcactattgcatttcgtgatactactcttatcggcaatgcctacggtattgcctgcatgactgttatgtttgttactacattcttgatggcattgataatcatctttgtttggcaaaggaacataatatttgccctagtttttctggttttctttggatccattgaagctgtatatctttcgtcatctctcatgaaggttactcagggag

SEQ ID NO: 65044 - DNA, 158 bp, Zea mays
cgttcggagcgcacacacacgcaaccagatctcccccaaatccagccgtcggcacctccgcttcaagatgcagatctttgtgaaaaccctgactggcaagactatcaccctcgaggtggagtcgtctgacaccattgacaacgttaaggccaagatcc

SEQ ID NO: 65045 - DNA, 270 bp, Zea mays
gtcctggataagaccaagtttctggtcccagaccatgttaacatgagcgagttggtcaagatcatccggcgccgcctgcaactcaaccccacgcaggccttcttcctgctggtgaaccagcacagcatggtgagtgtatccacacccatcgctgacatctatgaacaggagaaggatgaagacggattcctctacatggtctatgcctcccaagaaaccttcggcttctgagtcaagaggaggggtggggggtggctgggagttctggtc

SEQ ID NO: 65046 - DNA, 189 bp, Zea mays
ggtaaatcgttgttcttaactctccttaggtgcccaacgttacattagcagagaaagtggatcggtagttaaaacctgctcaatttgcagcttgactacatccttggaaagaacccattgaagatgagctacgttgtgggtttcggaaacaagtacccgaagcgccctcaccacagaggtgcgtcgata

SEQ ID NO: 65047 - DNA, 113 bp, Zea mays
tcttcggcttggtcctccagtccatcctgcagcagcagccgcaatgcgccaggtcgcggggctgttggcggcgagatagcgcagaactgacggcgatgtgcggcctgcagcag

SEQ ID NO: 65048 - DNA, 186 bp, Zea mays
ggtaaatcgttgttcttagctctccttaggtgcccaacgatacattagcagagatagtggatcggtagttaaaacctgctcaatttgcagctttactacatccttggaaagaacccattgaagatgagctacgttgtgggtttcggaaacaagtacccgaagcgccctcaccacagatgttcgtcg

SEQ ID NO: 65049 - DNA, 154 bp, Zea mays
cccagcaggcaagtccgccggcaaggagggcggcgagggaaagaggggccggaagaagggcaagaagagcgtggagacctacaagatctacatcttcaaggtgctgaagcaggtgcacccggacatcggcatctcctctaaggccatgtccatc

SEQ ID NO: 65050 - DNA, 132 bp, Zea mays
attccccaagaccctacattgtttgagggtactatcagaatgaaccttgatcctcttgaggagtgcactgatcaagaaatttgggaggcactagaaaagtgtcagctaggagaggtcattcgttccaaggaa

SEQ ID NO: 65051 - DNA, 165 bp, Zea mays
cacggatcgaaaagctttcggaagtaaacccgatgcttggcttccgtggctgcaggcttggtatatcgtaccctgagctaacagaaatgcaaggccgtgccatctttgaagctgctataacgatgaccaaccagggcgttcaagtctttccagagataatggttc

SEQ ID NO: 65052 - DNA, 129 bp, Zea mays
agagactccgtgaatcagttgacatgcatgacaactttgaccagataggtcttgcccagaagcttgagaagcatgaattgctggagatgaggaggattgccgcctacatttacaagaaggctggcaggt

SEQ ID NO: 65053 - DNA, 127 bp, Zea mays
cgcattcgttccaactcctgagcactttctcctcgtccccgacaagccaatcgaagccgagatacggccatggactccaccggcaccggagcagggggtaaggggaagaagggagcggccgggcgca

SEQ ID NO: 65054 - DNA, 261 bp, Zea mays
ctttgtcaagctactcaactccctcagcgaggatgttcgtgaacaggctgtatgggctttaggtaatgttgctggtgactccccaaagtgccgtgatctggtacttggtcatggtgggctataccctttgctgcagcagcttaatgagcatgctaagctttcgatgcttaggaatgctacatggactctctccaacttctgtcgggggaagccacaaccaaactttgatcaggtcataccagcattgccagcactacagca

SEQ ID NO: 65055 - DNA, 128 bp, Zea mays
cttggcctcactggacatgagcggtacagcatcgatctccctaccaacctcagtgagatccgtcccggccaggatgtgactgttactaccgacaatgggaaatctttcacttgcatcgttcgctttga

SEQ ID NO: 65056 - DNA, 269 bp, Zea mays
cttatgctccttggtctttctgcaagtgctgctaccgcaaccaatttcccacaatgctcacaagctcctatagcttcctttcttcccccatacctctcaccagcggtgtcttcagtatgtgaaaacccaattcttcaaccctacaggatccaacaggcaatcgcagcaggcatcttacctttatcacccttgttcctccaacaaccgtcagccctattacagcagttacctttggtgcatttgttggcacaaaacatcaaggcacaaca

SEQ ID NO: 65057 - DNA, 147 bp, Zea mays
gtctcaccaatatgttagtcaccgtgaatatagattagagattctacaatgtcttgtcaaaatatatcagacattgccaaatccagattatttaagcatttgccagtgtcttatgttcttgggtgagcctgaaagtgttgcgagcat

SEQ ID NO: 65058 - DNA, 261 bp, Zea mays
aaaacagcgcggcggcaggcagctcctcctgcgactgcgagcgcccgtccatggcgtccatctccccttccctccatcacccttgcaattctagaactggcttccttggaaagacacacgggactcgtcctcgtcttttctctgctggaagagttggatttgtcagaacactagtggagtgcaaggaatctagaattggaaagcagcccattgaagtcccaccgaatgttactctcacattagaagagcagtttgtcaaag

SEQ ID NO: 65059 - DNA, 149 bp, Zea mays
gtcccatcccgtgaagctggtgccctacaacgcggagtacctggacgagtcggtgctgtggacggagagccacgacgtgggcaagggcttccgctgcatccgcatggtcaacaacatctacctcaacttcgacgccttccacggcgaca

SEQ ID NO: 65060 - DNA, 263 bp, Zea mays
ctagctgaccgcatcgctgctctccctcctgaggagatcaaacagattgctccagcccttctattcagactgaaccaagagccgccacaggctatctccggccagggtttcagttttggtgctcagggtggtgcgggggtcggtgccggaaaggctgaggaaaagaaagctgagaagacagtcttcgatgtcaagttggagaaattcgatgctgctgcaaagatcaagattatcaaggagatcaggacctttacggattgggg

SEQ ID NO: 65061 - DNA, 183 bp, Zea mays
gctttgagacgatcattggtgaatgatgctaatagttcgaggcattgttttgagtacttaaacaaaaaggagatgattgttgctcacttagatcgtggtattgatgtctccatcaagatgtcttcagattggcctctttgttcctatggcctgaagctaatttcgatccgcaatgcaggggat

SEQ ID NO: 65062 - DNA, 124 bp, Zea mays
ggttacttcgcggagtaggcgctttggcggctcaggccctgagggcccacggaccccgtggcgtggccgctacccgctccatggcttctggaggtggtgtccctactgatgaggagcaggctac

SEQ ID NO: 65063 - DNA, 147 bp, Zea mays
gaagtatatgattgaccgttggggaatagataggtttcgggctgaagttgaaaaatattacgggaagaagtttgaaagtttccgaccattgccagagtggcagtttaacagctaccttggctggcaagaacagggtgatgggaaatt

SEQ ID NO: 65064 - DNA, 105 bp, Zea mays
ctggaggacaccctcatcctgaccatgaagggcatcgccgccggaatgcagaacaccggctaggccaagatcttcggtgtgcaaataacctgtctcccatgagac

SEQ ID NO: 65065 - DNA, 291 bp, Zea mays
atgatcgagaagaagtctgggctgcctaagcttattgagtacaatgtaagatttggtgacccagaatgccaggttctgatgatgcgattagaatctgatttggcacaagttctgttatctgcttgccagggaaagttaggcaatgtttcactaacctggtcacccgaaatggcaatggtggttgtgatggcaagccagggatacccgggcccttataaaaaggggaccgtgataaaaaacgtggacaaggctgagcaggtgtctccggctgtcaagatattccatgctggg

SEQ ID NO: 65066 - DNA, 165 bp, Zea mays
cgggactaatttttagtccctatattttattctattttagttccaaaattgtaaaatatagaaactaaaactttttttatgtcacttagtgggtgtttggtttctagggactaatgtatagtaccatataaattcaagctatacacattatctctattacttatt

SEQ ID NO: 65067 - DNA, 283 bp, Zea mays
tggctgctttggatttggtatccaagagcacatagatcttggcatcaagtatgatccatctactggtatctacggcatggacttctacgtcgtccttgagcgtgctgggtaccgtgtcgcccgtcgccgcaggtgcaagtcccgtgttgggatccagcacagggtcactaaggaggacgccatgaagtggttccaggtcaagtacgagggtgtgatcctcaacaaggcccaagccaacacctcctaagcctaagcgttaccataagatattagaccctcttgg

SEQ ID NO: 65068 - DNA, 283 bp, Zea mays
gactgccaaaggtaatgtgctcgaacctcaagggttaattgaaattaagttcaggtcagaggaactccaagactgtatgggcaggcttgacccagagttgataaatctgaaagcaaaacttcaagatgcaaagcatggaaatggaagtctaccagacatagaatcgcttcagaagagtatagaagcgcgtacaaaacagttgttacctttatatacccagattgcagtacgctttgctgaattgcatgatacttccctgagaatggcagctaaaggcgtgatt

SEQ ID NO: 65069 - DNA, 290 bp, Zea mays
ccaaatcgaccgagcgaattcaccacagcttctcaccaccgctaccttcgatggcacccaaggcggacaagaagccggcggcgaagaagcctgcagaggaggagcccgcgacagagaaggcggagaaggctccggcggggaagaagcccaaggccgagaagcgcctcccggcgggcaagtccgccggtaaggagggcggcgagggcaagaaggggaaaaagaaagcgaagaagtccgtggagacctacaagatctacatcttcaaggtgctgaagcaggtgcaccccgac

SEQ ID NO: 65070 - DNA, 331 bp, Zea mays
actgaagtcgatgctagccaagttcggctcgatccaggatggacagacccgtgagcatgctctccttgctttcacgcttggagtgaagcagatgatttgctgttgcaacaagatggatgccaccacacccaagtactccaaggcccgttatgatgagattgtgaaggaagtctcttcctacctgaagaaggttggatacaaccctgacaagatccacttcgttcccatctctggtttcgaaggtgacaacatgattgagaggtccaccaaccttgactggtacaagggcccaaccctacttgaggctttggacttgatcaatgagccgaag

SEQ ID NO: 65071 - DNA, 293 bp, Zea mays
atccgaaactggattcggaacattgagcaacatgcctctgataatgtcaacaaaattttggtgggcaacaaggccgatatggacgaaagcaagagggccgtacctactgcgaaaggacaagcacttgctgatgagtatgggatcaagttttttgaaacgagtgccaagacaaacctgaacgtggagcaagtgttcttctccatcgcacgtgacatcaagcagaggcttgcagagactgattcaaagccagaggacaaggcaatcaaaattaacaagccagaccagggttccga

SEQ ID NO: 65072 - DNA, 289 bp, Zea mays
cggcgggccaagaacgcttccggactattaccaccgcgtactaccgaggagctatgggcatcttgctggtttatgatgtcaccgatgaatcttcttttaacaacatccgaaactggattcggaacattgaacaacacgcctctgataatgtcaacaagattttggttggcaacaaggccgatatggacgaaagcaagagggctgtacctactgcaaaaggacaagcacttgctgatgagtacgggatcaagttttttgaaacgagtgcgaagacaaacctgaatgtgga

SEQ ID NO: 65073 - DNA, 282 bp, Zea mays
ggaacaccgggcgtgtaggtgtgatcaagaacagggagaagcacaagggcggcttcgataccatccacgtcgaggactccatgggccaccagttcgccacccgcatgggcaacgtgttcaccattggcaagggcaacaagccgtgggtgagcctgcccaagggcaagggtatcaagctcagcatcatcgaggagcagaggaggcgcgactttgctgcccaggctgctgccaaggcataagttctctgaatgtgctgcttggagcttttagctatgtctagtt

SEQ ID NO: 65074 - DNA, 280 bp, Zea mays
tggaaaggtggtcattggaatggatgttgctgcttctgaattcttcggtgagaaagacaagacttatgatcttaatttcaaggaggagaacaacgatggctcaaacaaaatttcaggcgacagcctaaagacctgtacaagtcctttgtttctgagtaccctatcgagtcgatcgaagacccatttgatcaggatgactggagcacttatgccaaactcactgatgagattggacagaaagtgcagattgtaggagatgatcttctcgttaccaacccca

SEQ ID NO: 65075 - DNA, 279 bp, Zea mays
aaaagcgggtgtgccagttactgaggtgaacgtacctgttgttggaggccatgcgggtattactattctgccactcttctcgcaggccactcctgcaagcaattcgttgtcccaagaagacattgaggccctcaccaagaggacacaagatggtgggacagaggtggttgaagcaaaggcgggaaaaggctctgcaacgttgtccatggcatatgctggtgctgtttttgcagatgcatgtttgaagggtctgaatggagttccagacattgtagagtg

SEQ ID NO: 65076 - DNA, 279 bp, Zea mays
ggagaattcctcacttgccccgccgtcgcatcctcttcgaagttcgaatcgaatcgcgccgcgatcacccacctcatggcggacaaggagcctgtcgtggagcggccagaggcgggtgaggaggaggaggacgcctcagccgccgccgccgcgggggaggaggaggacacgggcgcccaggtggctcccatcgtgcggcttgaggaggtagccgtcaccaccggcgacgaggacgaggacgtcctgctcgacatgaaggcgaagctgtaccgattcgac

SEQ ID NO: 65077 - DNA, 282 bp, Zea mays
tgatggagtaaccagggtattctttggatctgattttgtaactgttacaaaatcagaagaaacttcatgggattgcctcaaacctgaggtttttgctgcaataatggacttctactcatctgggcaaccactttttctggactcaaatgctgcagcttctatggacacagcaattcacgaggatgattctgaaatagttgccatgataaaagaattattggagactcgtattcgaccagctgttcaagatgacggcggtgacattgaataccgaggattcga

SEQ ID NO: 65078 - DNA, 286 bp, Zea mays
ggcggcgcggaggtggaggtggactccggcggcgtgctctacttcgtcagcagcgactcctcacaggtgtgcctggccgtggcctccctgaaatccgaggacgagacctccatcatcggcaactaccagcagaagaacctgagggtcgtcttcgacacctcggcgtctcaggttggtttcgcgcaggagacgtgtggttatatttgactttgactcggattgggattgggattgggatgcagcgggcggccatgggctctatatatgtgaatacctttatacttac

SEQ ID NO: 65079 - DNA, 291 bp, Zea mays
ccttattcaatggcttgccaaacccttttacagcggctaggtaccacagcttggtcattgagaaagaaaccttcccacatgatgctttggaggctaccgcatggactgaagatggactcatcatggctgctcgccacaagaagtacaaacacatccagggtgtccagttccacccggagagcatcatcacccctgatggcaagaaaatcatcctcaacttcgtcagattcattgaggagctggagaagcagcgttcctaatctacgggaggtagatgcgacgggtggtttc

SEQ ID NO: 65080 - DNA, 279 bp, Zea mays
  unsure (1)..(279): unsure at all n locations
gcagtgctagaaaacggggataactggagcgtgggacagcgccaacttattgcactgggtagggcgctgctcaagcaggcaaaaattttggtactcgatgaggcgacagcatctgtcgacacagcaacagacaatcttatccaaaagatcatccgcagtgaattcaaggactgcacagtctgtaccattgctcaccgtattcccaccgttattgacagtgaccttgttctggtccttagtgatggtatgagttctttgactanactaaccacgcctcct

SEQ ID NO: 65081 - DNA, 280 bp, Zea mays
gctacacagacgaggatgttgtttccaatgattttgttggtgattcaaggtcaagcatctttgatgccaaggctggtattggactgagctcttccttcatgaagctcgtgtcttggtatgacaacgagtggggctacagcaaccgggttctggatctgatcgctcacatggctcttgtgagcgccaagcactgatgttcgtactcgttcctccagtaccagtagtagcctagataagaggctgcagttttgacggccattttcttttagctgttgtttgg

SEQ ID NO: 65082 - DNA, 280 bp, Zea mays
accccacacagaagcggcggcggcggacaaacgcaggcgaaggcgagggtgtgagggaaggagcaccagccatggtgcacgtcaacttctaccgcaactatggtaagacgttcaagaaaccaaggcgtccttatgagaaggagcgtcttgatgctgaactgaagctggttggtgagtatgggctgaggtgcaagcgtgagctttggagggtccagtatgcactgagcaggatccgtaatgctgcaaggcacttgctcacccttgacgagaagaacccccg

SEQ ID NO: 65083 - DNA, 280 bp, Zea mays
gtcgtgggatcccagccaccgccgctagaagaagagctcggcgattcccaggtcccgcgagaatatgccgaagcagatccatgagattaaggacttcctcctcaccgcgaggaggaaggatgcccgctcagtgaagatcaagaggagtaaggatgttgtcaagttcaaggtgcgctgctccaagtacttgtacacgctctgcgtcttcgatgctgagaaggcaaacaagttgaagcaatctcttcccccaggtttgaccgacgaggaggtctgattggat

SEQ ID NO: 65084 - DNA, 327 bp, Zea mays
cacctagactaaggtagagaggatccgagtccggctcgagatatgcaacaacaacaactaccattcagccagctacctgctgcctacccccagcaatttcttccattcaaccaactagcagcattgaactctcctgcttatttacagcagcaacaactactaccattcagccagctagctggtgtgagccctgctaccttcttgacacaaccacagttgttgccgttctaccagcacgttgcgcctaacgctggcaccctcttacaactgcaacaattgctgccattcaaccaacttgctttgacaaacccagcagtgttctaccaa

SEQ ID NO: 65085 - DNA, 290 bp, Zea mays
gatcgctgctgacctgaaggagcatgtcatcaagcctgtcatccctgagcagtaccttgacgagaagaccatcttccaccttaacccatctggccgctttgtcattggtggacctcacggcgatgctggcctcactggccgcaagatcatcattgacacctacggtggctggggagcccatggtggtggcgctttctccggcaaggacccaaccaaggttgaccgcagcggagcctatgtcgcaaggcaggctgccaagagcatcgtcgccagcggccttgctcgccgcg

SEQ ID NO: 65086 - DNA, 277 bp, Zea mays
agaagaacacactcgagcggaccgcgcgcgcgacctccttgaaccactgccggcgcggcggcatatggcccttaaaggcggtggctgctgctacgtacgctgccgtagagtctcggtcgccgcgatagctctagctagtcgtttatgtgttgtgctttgtgtgtgcatgcttgtgtctgggggcatgcagtgcagtgcagtactatatgctgtatgcgtctctctttgatcggagaggcggatgtacagcatgctcgatatgtctagtttggatgtc

SEQ ID NO: 65087 - DNA, 278 bp, Zea mays
tagctggagatgggacaaccacctctgtggtccttgctcaggggctgatcgctgagggtgttaaggttgtggcagctggtgctaatcctgttcagattactcgtggtatcgagaaaacagcgaaagcactagttgaagaactacggaagttgtctaaggaggtcgaagatagtgagcttgcagatgttgctgctgttagtgcgggcaacaactacgaaattggtaatatgatagcagaggccatgagcaaggtcggtcggaagggtgtggttaccctc

SEQ ID NO: 65088 - DNA, 276 bp, Zea mays
caagattgaaacaccggagcagtttaagcaagctgaagacacggccaacaagcttgatttggatggacttgttgtcattggtggtgatgattcaaacaccaatgcctgcctccttggtgaatactttaggtcaaggaacatgaaaacccgtgttattggttgcccaaagactatcgatggggatctgaaatgtaaggaggttccgacaagctttggatttgatacagcttgcaagatatactctgaaatgattggcaatgttatgactgatgcgag

SEQ ID NO: 65089 - DNA, 274 bp, Zea mays
atttgagcagaccaattcaaggcgattaatgatgaggggatgccaatttaccagaggcctttcatgaaggggaagctgtacatccatttcacggtggagttccctgactcgttggcaccagagcagtgcaaggctctcgagacagtacttccaccaaggccttcatccaagctgacagacatggagatagatgaatgcgaggagacgactatgcatgatgtgaacaacatcgaggaagagatgcgcaggaagcaagctcacgctgcccaggagg

SEQ ID NO: 65090 - DNA, 274 bp, Zea mays
ctcgctttggatcgattggtttcgtaactggtgagggactgagggtctcggagtggattgatttgggattctgttcgaagatttgcggaggggggcaatggcgaccgcggggaaggtgatcaagtgcaaagctgcggtggcatgggaggccggcaagccactgtcgatcgaggaggtggaggtagcgcctccgcaggccatggaggtgcgcgtcaagatcctcttcacctcgctctgccacaccgacgtctacttctgggaggccaaggggcac

SEQ ID NO: 65091 - DNA, 275 bp, Zea mays
gattgttccagatattcgcagttgaccgggtcctcggagcacgatgaagtttgttgctgcctacttgcttgctgtcctcgctgggaacgccagcccctccgctgaggatttgactgccattctggagtcagttggctgtgaagttgacaatgaaaggatggaactcctgctgtcccaactgagcggtaaggacatcaccgagctcattgccgcgggcagggagaagtttgcttcagtcccatgtggtggcggtggtgtcgctgttgcggcacttc

SEQ ID NO: 65092 - DNA, 277 bp, Zea mays
gatgcccaagtgcttggagaagcaccctacaaattcaaaagtgcacttgaggctgtgaaaacactgagagcacagcccaaagccaatgatcagtacttgcccccatttgtgatagttgatgacagtggcaatgctgttgggcctgtattagatggtgatgcagttgtcactatcaacttccgagctgatcgcatggttatgcttgcgaaagcactagagtatgcagattttgacaactttgaccgtgttcgtgtccccaaaatccgatatgctggga

SEQ ID NO: 65093 - DNA, 283 bp, Zea mays
cttgtggaactacagtggagatagcaaacaaggttggagttgctcgatattgtggggaggattgttgaggatctgaaagatgagagcgagccttacagaagaatggtgatggaaacaattgagaaggtagtggccaacttgggtgcttcagatatcgatgctcgtcttgaggagctgcttattgatggtatcttgtatgctttccaagagcagactagtgatgatgcaaatgttatgcttaatggttttggagctgtggttaatgcacttggacaaagagtta

SEQ ID NO: 65094 - DNA, 280 bp, Zea mays
gtggaggacaagcacaaggacaagctcccgcccaacttccgcaagcttctgaacgttcagctcaagaagctcgtcgccggcggcaagctgaccaaggtgaagaactcgtacaagctgtcgtccgccgccaccaagccgaatcccaagcccaaggccgccccgaagaagcccaagactggcgctaagaagcccaaggccgctgccaagcccaaagctaagacccccgccaaggcgaagccgccacaaagcccaagcccgccgcgagccgaaagccgtagtg

SEQ ID NO: 65095 - DNA, 272 bp, Zea mays
ctcttgctaaggcattggctggtcaaaaggatgaggcttacttcgcagcaaatgctgctgctcaggcctcgaggaaatcctcaccccgtgtgaccaatgaagaagtccagaaggctgctgctgctctcaagggctctgaccaccgccgtgggaccaacgttagtgctagattggatgcccagcagaagaagcttaacctccccatccttcccaccactacaatcggttcgttcccacaaaccgttgagctcaggagggtccgccgtgagtac

SEQ ID NO: 65096 - DNA, 278 bp, Zea mays
atatgatatgctgcaaaaagaggtaatttctttgagaaagacatgccatgagaaggatcagattctaaaagataaagatgatgctattgagatgttagcaaagaaagtagacaccttaactaaagcaatggaagtggaagctaaaaaggtcagacgggaggttgcatccatggagaaagaagttgcagcaatgcgtgccagtaaagaacaagaaatcagagccaagcggcttggtacgaaaggctctggtagttcacactgcttcctggaagaaacgc

SEQ ID NO: 65097 - DNA, 280 bp, Zea mays
cttttattcttgatgatcctgcaggaaacagctttattgagaatccgcatgctccgttattagatcctttactatctgtgagattctacgaaagaactcgtgaacaacaagcagcacttggctttcttgctgaaccaccaaaagaacaacctggagaggctgtattgcctgcttcagcagtggaatccaattctgatgggttgcaaagcgtgccccatggctcagttggagctgttgcaggtcgtcgtgctatagctcagggaaaccctgatgaagttgc

SEQ ID NO: 65098 - DNA, 285 bp, Zea mays
tggaaccctagccgccatatctcacgatccactcgagcaccaagccgagggaaggtgaggagcgatggcgcgcggcgtggtgtcggcgaagggcggcgcggtcgcgggcaagaagaaggggtcggtttccttcacgatcgactgcaccaagccagtggaggacaagatcatggaggtcgcctcgctcgagaagttcctgcaggagcgcatcaaggtcgccggcggcaaggctggcaacctcggcgactccgtcaccatctctcgcgagaagaccaaggtcaccgt

SEQ ID NO: 65099 - DNA, 146 bp, Zea mays
cctacactcccggcggcggcgcaggagcagcagcatcgaggatggtgaagttcctcaagcccggcaaggccgtgatcctcctgcagggccggttcgccggcaggaaggcggtgatcgtgtccgtgttcgaggagggcacccgcgac

SEQ ID NO: 65100 - DNA, 280 bp, Zea mays
gcgggattggctccgggggcgcggcgaggagagacatgaggctgagctggatcctgacagtactgtccatttgcctgagtgccctggtcacagccacaggggccgaaggcaagcggaagctgcagattggagtgaagaaacgtgtggatcactgtcccatcaagtctagaaagggagatgtcttacacatgcattacacgggaaagctagaagatgggacggagtttgacagcagcctaccacagaaccagccctttgttttctcccttggcactggcca

SEQ ID NO: 65101 - DNA, 282 bp, Zea mays
cgtccatcagcttgtttgcctatcacaatcgatgttggcacaaataatgagaaactgcttaatgatgagttttacattggactccggcaaaaacgtgcaactggcgaggagtatcatgagcttatggaagagttcatggctgctgttaagcaaatctacggcgagaaagtcctcattcagtttgaggacttcgcgaatcataatgcttttaatttgcttgcaaaatatagcaagagccatcttgttttcaatgatgacatccagggcacagcttcagtggtc

SEQ ID NO: 65102 - DNA, 205 bp, Zea mays
gcgggccactacagggcgcggcgagatggaggtgtcggggacatcggcgcccaccgtgacggttttcatcagcagctccctcaacagcttccgttcggacaagcgatacagtcgtagcctcaccatcgcagagttcaagtgtaaactggaactggtggtgggcagcctgcttcctgcatggaactggagctgtatggagctgacg

SEQ ID NO: 65103 - DNA, 204 bp, Zea mays
cgcgaggggggccgtacccagcggcgcatccactggaatatatgaggccttggagttgagggatggaggatctgattatcttggcaagggtgttcttaaggctgtcagcaacgtaaacaacattattggaccagcgattgttggaaaggaccccactgagcaggttgagattgacaacttcatggtccaacagcttgatggaac

SEQ ID NO: 65104 - DNA, 146 bp, Zea mays
ggatcctttgcttggaaagaaagtttgctatgtgcagtttcctcaaagatttgatgggattgatcgccatgatcgatatgctaccagacatgttgtcttttgcgatatcaacatgaaaggtttggatggtatccagggccccattt

SEQ ID NO: 65105 - DNA, 196 bp, Zea mays
gcaagcttgctgacaactgcaccggcctccagggcttcctggtcttcaatgccgttggtggtggcactggctctggccttggttctctcctccttgagcgcctgtctgtggagtacggcaagaaatccaagctgggcttcactgtgtacccatctccccaggtgtcaacctctgttgtggacgcttacaacagcgt

SEQ ID NO: 65106 - DNA, 204 bp, Zea mays
agtttggctacatcgtcctaacaacttctgctggaattatggaccatgaggaggcccgccgtaagaatgttggtggcaaggttctaggtttcttttattgaaaatgtgtttttttgagccacagatgcgtccaagaactcgtctgatgttttgaggtttgttaagactgggtgtccgagcctttgtggtttgttaagacagcga

SEQ ID NO: 65107 - DNA, 204 bp, Zea mays
tgatgattctgatgaggatgattctgatgattctgatgaaggcgagggattatctcctgacgaaggcgatgatgattcaagtgatgaggatgataccagtgatgatgacgaggaagaaaccccaactcctaaaaagccagaggcaggcaagaagagaggtgctgaaaatgctctgaaaacgcctctttctgataagaaagcaaa

SEQ ID NO: 65108 - DNA, 71 bp, Zea mays
cacacattatcatgtgtggtatgaccaataatatatgcatggtcataataaagttttggttttaatgaatc

SEQ ID NO: 65109 - DNA, 210 bp, Zea mays
gtcgcatcccatcccactaccacccatctcgtcgtccgccgattcgatccggttcttccaacccaggtgatggcgacgaagaggagcgtgggcaccctcggcgaggcggatctgaaggggaagaaggtgttcgtgcgcgccgacctcaacgtcacgctcgacgatgcccagaagatcaccgacgacacccgcatccgcgcctccgtcccc

SEQ ID NO: 65110 - DNA, 206 bp, Zea mays
gatgctttccaaggacaggagcgtgacataattattatgtcatgtgtccgtgcatcaaaccatggtgtgggtttcgttgctgatatacggcgtatgaatgtagctctaactagagctaggagagctttatgggttgttggtaatgctaatgctctcatgcagtctgaggactgggcatcgctaatagcggatgcgaaggccaggaa

SEQ ID NO: 65111 - DNA, 204 bp, Zea mays
cagaagcggcggcggcggacaaacgcaggcgaaggcgagggtgtgagggaaggagcaccagccatggtgcacgtcaacttctaccgcaactatggtaagacgttcaagaaaccaaggcgtccttatgagaaggagcgtcttgatgctgaactgaagctggtcggtgagtatgggctgaggtgcaagcgtgagctttggagggtc

SEQ ID NO: 65112 - DNA, 277 bp, Zea mays
cagggcacaacaactacaacaacttgtgctagcaaaccttgctgcctactctcagcaacagcagtttcttccattcaaccaactagctgcattgaactctgcttcttatttgcaacaacaacaactaccattcagccagctacctgctgcctacccccagcaatttcttccattcaaccaactggcagcattgaactctcctgcttatttacagcagcaacaactactaccattcagccagctagctggtgtgagccctgctaccttcttgatacaa

SEQ ID NO: 65113 - DNA, 205 bp, Zea mays
ccgcaattgcttatggtggtacatacttgccatattcttcctcagctggacaatcgagcaataatcatcaagaacatggatttcctgagcgaccagggcagcctgagtgtcaatattatatgaggactggcgattgcaaatttggaactacgtgtaaatataaccatcctcgagattggagcactcctaagtccaattacatgtt

SEQ ID NO: 65114 - DNA, 202 bp, Zea mays
tgaacgcattgcggagagatttgttgatttgactatggaacataagggggagatgaaggttgtggtcaggacagttatttcactcaccaaggaggaggagaaagaactcaaggaaaccttgcaggatatccttggggaaaacaaaactattttggttgaacagaagattgactacagcatcatgggaggattagtgattgaa

SEQ ID NO: 65115 - DNA, 282 bp, Zea mays; identical to SEQ ID NO: 42757

SEQ ID NO: 65116 - DNA, 214 bp, Zea mays
ctttgttgaagctgttgctcttaagcctccggaagttaccatcgacatggctatgcagcagcagcatgaagctgagcttgctgcagcagctgcacaacctcttcctgatgacgatgatgatctgattgagtagaaaggatcatgagtcttgaacttgagcaggagttgtgccttgcgtgttttaagttgttctagggtgaactcttgagttctc

SEQ ID NO: 65117 - DNA, 284 bp, Zea mays
acaaattagaagatccagcagatgaagaaaatgatatgcttgaccttgcatttgggctcacagagacgtaagtcaagacccttcgaacagaatctcgcctcggctgccaagtgatcgcgaacctgaactcgatggtattcggctggcattacctgtagccacaagaaacttcgcggtagatggctatgtaccgaaaccacactgaagacagttatgtacaccacactgaagacagttatgtacaccacactgaggcagtcatcttggggggcacggattcgtac

SEQ ID NO: 65118 - DNA, 281 bp, Zea mays
aggaaagagaggagataaagcagcagttcagccaaacctgtgattggataaagaatcgcttgggtgacaaggttgcacgtgttgacatatctaatcgtctgaggtcatcgccatgtgttcttgttgcagcgaaatttggttggtcagccaatatggaaaggctaatgagagcacagactatgggtgatacaaccactttggatttcatgcggtcaaggaaggtttttgaaataaatccagaacatgagataatcaaggccttgaatgcggcatgcaggaat

SEQ ID NO: 65119 - DNA, 157 bp, Zea mays
aaagaaataaggcagatagtcggtgataaatttacgcaccaattagcaatggagctcatcaaggaatggtaccttgcttctcaggccacaacaggaagcactggatgggatgacgatgatgcttttgttgcctggaaggacagtcctgaaaactaca

SEQ ID NO: 65120 - DNA, 199 bp, Zea mays
ttatcatccgcgcctctacatttcttctctctctgctcctccgcctccgcctccgcctgatccatccaagacagggatcgccatgtcggactcggaggagcaccacttcgaatcgaaggccgacgctggggcgtccaagacctacccgcagcaggctggcaccgtccgtaagaacggcttcatcgtcatcaagaaccgt

SEQ ID NO: 65121 - DNA, 155 bp, Zea mays
cgagacctcgccgccggggaagcgccgctcgctcaggaggacagctatggcgccggagccggaggatgatattatgaacgagaagaatccccgcccgctcgacgaggacgacatcgcgctcctcaagacctatgggcttgggccgtactctacta

SEQ ID NO: 65122 - DNA, 216 bp, Zea mays
agaataacccttgctgataaaaatgcaccaaatgaagaagtttggaagcagattgaggatatgtgtgggtccacaaaggcagctgctgtccctgtggttcctgactcagaaggcacagattcaaatccattttctcttgatgctcttgccgttttcatgtttcgcgtcctccagcgggtcaatcatcctggaaatctggacaaggcctcacctaat

SEQ ID NO: 65123 - DNA, 199 bp, Zea mays
gaaattgcttagaggaaaccgaagcccagccttgaagaagcttcggaagatcactacttcattttcctcgggagtaggacaagtcttctctccttcatcagccctcacaatagacaaatcccaaaaatatctacctctcatattggcaagatggctttgtttaatggttgattttccaaaaactgcatggcttggccgc

SEQ ID NO: 65124 - DNA, 205 bp, Zea mays
ctgcgctcgttttcgcggctgctggcccccgccaggctgccgagctgctcttcaacacggtcaaagttctatgtccgggagccagtcaatgccaaacctaactgggtgaaagttgggctgaccttgggcacctcgattttcatgtggatttatctcatccaccaacacaacggagatgttttggagtataaaagaagaaatggac

SEQ ID NO: 65125 - DNA, 272 bp, Zea mays
tttgcaatcactcggactcgatttcccaaagaacatcagtgtgattgctgtatgccccaagggaatgggtccatccgtccgcaggctttatgttcagggcaaggaagtcaatggcgctggcatcaactctagctttgctgtgcaccaggatgttgatggaagggcaactgatgttgctttagcatggtcagttgcacttggttcccccttcacgtttgctactactttggaacaggagtacaagagtgatatctttggagagcgaggcatct

SEQ ID NO: 65126 - DNA, 275 bp, Zea mays
tggatacagatctccatcagatcgtacgctcaaatcagccattgactgatgatcattgccagtacttcttgtatcagttgttacgagggctaaaatatgtgcactcagcaaatatattgcaccgcgatctgaagccgagcaatttgttcctaaatgcaaattgtgacctcaagattgcagactttgggcttgcaaggaccacttcagagacagatctcatgacagagtatgtggtcactcgttggtaccgggcacagagctgctgttgaactgtt

SEQ ID NO: 65127 - DNA, 197 bp, Zea mays
cgccggcctacaaccgttttcgtgctcacacacccaaaccttagtcgcgatcaggccccaaggactcgagatgaagtcgagggcacggtccaccgccggcgactccaggctctcggtgaggaagaccaaggctgagaaggacccaaacaagcccaagaggcctccgagcgcgttcttcgtcttcatggaggagttca

SEQ ID NO: 65128 - DNA, 189 bp, Zea mays
cccttcttcacctcttgttgggctgcttcaggacaaaatcaataactggagggagacagctcttatattgacatccatccttttcgctgcagttgtgttctggttcattggcatatttgtccccagcgtcgaccgtttcaacgaagagagcgaatatggccttactgccgctgagagatcaagtatcag

SEQ ID NO: 65129 - DNA, 354 bp, Zea mays
tgacacttcattcatatcactgatttgtctgggagggaaatctggttcggatcaccggtggcatgaaggtgcagactgaccgtggacgagtcgtcaccttacgctgctatgcttactgctcaagatgtcgcacagcgctgcaaggagcttggcattactgcactgcacattaagcttcgtgccaccggaggcaacaagaccaagacccctggacctggtgcccagtctgccctcagggcgcttgctcgttccgggatgaaaatcggacgcattgaggacgttaccccggtccccgagggacagcactcgtcagaagggcggtaggaggggaaggaggctgtaggcgtctcttct

SEQ ID NO: 65130 - DNA, 155 bp, Zea mays
ctgtttcagctacgtagctcaaattcggctcgatgacaccttcattcatatcactgatttgtctgggagggaaactctggttcggatcaccggtggcatgaaagtgaaggctgaccgtgacgagtcgtcaccttacgctgctatgcttgctgctc

SEQ ID NO: 65131 - DNA, 122 bp, Zea mays
cgcaacaccacctcgccgcgatctccgtagcctccgtcgcgtcgagcatcgatcatgtcggcctactgcggaaaataccaagatgaagctgcatcaagaatactgcctacattggcacccct

SEQ ID NO: 65132 - DNA, 241 bp, Zea mays
cattccggtcccaactctgcaggctgcgcgtcgccctccctccacgccggacgcgccccgatccagatccaggggcgtaacatggcatcaaaacgtatcgtcaaggaattaaaggacctgcaaaaggaccctccaacgtcatgcagtgctggtcctgctagtgaggatatgttccactggcaggcaaccatcatgggtcctcctgatagtccatatgctagaggtgtttgcttagtgaaca

SEQ ID NO: 65133 - DNA, 346 bp, Zea mays
  unsure (1)..(346): unsure at all n locations
ctgcgagtcggggtaaggaggctcatgagacaactaaataacatgccgtcttcggttatctcaagccacagcatgcatcttggaatctagcaatgcatctcatgccatctccactggaactctctttgctgttttctacaaacccagaacaagtagatctgaatttgtcgttagtgtaaacaagtacctcgaagctaagaatcacaagatgtctgttggtatgaggtttaagatgagatttgagggtgatgaatcccctgaaagaagattcagtgggacaattattggtatgggatgcatgccagctaactccacatctccatnggctaactctgaatggagatca

SEQ ID NO: 65134 - DNA, 299 bp, Zea mays
tgtgacctccctcagccgcgtcgcgtcgcatcctacgagccaaagctctctctgctcgcagccatggcgaagaactaccccgaccgtgagcgccgagtacagcgaggctgtggagaaggccaggcgcaagctccgagccctcatcgccgagaagagctgcgccccgctcatgctccgcctcgcgtggcactccgcggggacgttcgacgtgtcgtcgaggaccggcggtccattcggcacgatgaagcatcagtcggaattggctcacggcgctaacgcggggctggacatcgcggtgc

SEQ ID NO: 65135 - DNA, 299 bp, Zea mays
ccgcacaacggcacgattctcctcctccggccgcgtagtgctcgggttcggcgatatcggagcgcggcaagggcggcagggggctagaccaggacggcgccaagcgccaccgcaaggtgctgcgcgacaacatccagggcatcacgaagccggcgatccgtaggctggccaagaggggcggcgtcaagcgcatttctgggctcatctacgaggagacccgcggcgtgctcaagatcttcctcgagaacgtcatccgcgacgccgtgcactacaccgagcacgctcgccgcaagaacgtc

SEQ ID NO: 65136 - DNA, 347 bp, Zea mays
atgtgtttgagcacgtctcggatgccacacgcatactgcgggagatcaagctcctccggttgcttcatcacccagacctagtcgagatttaagcacatcatgctccctccttctcggagggagttccaagacatctatgttgtttttgagctcatggagtcggatctccatcaagtgatcagggcgaatgatgaccgtcaccctgaacatcaccagtttttcctgtaccaacttcttcgagctctcaagtacatacatgccgctaatgtatgccatcgtgatctaaagcccaagaatatactggctaactcggactgcaaactgaaaatatgtgactttggacttgc

SEQ ID NO: 65137 - DNA, 344 bp, Zea mays
ggctgctgacatgaacaagcggtccttcaagtacgcatgggtgcgcgacaagctcaaggctgagcgtgagagagggatcaccatgtatatcgctctgtggaagtttgagaccaccaagtactactgcacggtcattgatgcccctggacaccgtgacttcatcaagaacatgatcactggtacctcccaggctgactgtgctgtccttatcattgactccaccactggtggttttgaggctggtatctccaaggatggccagacccgtgaacatgctctccttgcgttcacccttggagtgaagcgatgatttgctgctgcaacaagatggatgcaacactccg

SEQ ID NO: 65138 - DNA, 418 bp, Zea mays
  unsure (1)..(418): unsure at all n locations
ccgtcgcagagctacngcggtacagtacgagctccgngagatgtgcgagctgcgnagcatgganacgcccgtcgatngtcgctagntcatgcgacagcacgacggnactctgcgcactgtgccagcatgcgtcccgccgagcgtgcgagcgcggtgcagtgtgaaccatgtggcggattccaaggccacctcggcggtcaccctccgcacccgcaagtgcatgaccaaccgcctcctggcccgcaagcaattcgtgcttgaggtgatccaccccggccgcgccaacgtctccaaggcggagttgaaggagaggcttgccaaggcgtacgaggtgaaggaccccaacaccatcgttgtcttcaagttccgcacccacttcggaggaggaaagtccactgngttcggcctcatctacgac

SEQ ID NO: 65139 - DNA, 343 bp, Zea mays
gatattgtcctccttatgctccttgctcgttctacatgtgttgctaacgcgacaattttccctcaatgctcacaagctcctatagcttcgcttcttcccccatacctgccatcaattatagcttcaatatgtgaaaacccagctcttcaaccatataggcttcaacaagcaatcgcagcaagcaacatacctttatcgcccttgttgtgtcaacaatcgccagccctatctttggtgcagtcagtggtacaaagcatcagggcacaacagctgcagcaactcgtgctacctctgatcaaccaagtagctctggcaaacctttctccctactctcagcaacaac

SEQ ID NO: 65140 - DNA, 349 bp, Zea mays
tgagtatctgcacagcacaaggacgaacaagccggccctcgtccaccataacatctcagcggataaggtcctgctggactacgcgtacaggcccctcatctccgggtgcggcctgcacaagctcctcgtggacgacctcgtcttctcgacgctcaaagccagcgccgccatggggtacctagcgccggagtacaccaccgtgggccgcttctcggagaagagcgacgtgtacgcgttcggggtcatcgtgctccaggtgctcaccggcaagagcaaggtgacgacgacgcatgcgcactggccggacaaggacgtcgatgagctcgtcgacggcaacctgcagggggat

SEQ ID NO: 65141 - DNA, 339 bp, Zea mays
  unsure (1)..(339): unsure at all n locations
atccgtgttccgtgtccgcgtccagtgtgtccgctactccgctcaccctcagtcctcagttcctcacctagcggtatcgtgcgcgcgggaatacgtacatggcggcttcggaggcggcagcggcggcggcaacaccggtgacgccgacagaggggactgtgatcgcgatccacagcctggaggagtcgagcatccagatcgaggagcgcaacagcgccaagaagctggtggtgattgacttcactgcaacatggtgtcctccgtgccgcgccatngctccaatttttactgatatggccaagaagtcccaaatgttgttttcctgaaagttgatgtgga

SEQ ID NO: 65142 - DNA, 76 bp, Zea mays
tgcgcctactacgccgggtgtgggcagacgagcgccatgtaccagccgctccggcaacagtgctgccagcagcaga

SEQ ID NO: 65143 - DNA, 346 bp, Zea mays
ctctcggctatcatgtctggccgcggcaagggcgggaagggtctgggcaagggcggcgccaagcgccaccgcaacgtgctgcgcgacaacatccagggcatcaccaagccggcgattcgcaggttggcgaggaggggcggcgtcaagcgcatctccgggctcatctacgaggagacccgcggcgtgctcaagatcttcctcgagaacgtcatccgcgacgccgtcacctacaccgagcacgcccgccgcaagactgtcaccgccatggacgttgtctacgcgctcaagcgtcagggccgcaccctctacggtttcggcggctaggtcgccctctctcccggtggcg

SEQ ID NO: 65144 - DNA, 349 bp, Zea mays
ccgtagcacgccgcatccgcagccatgggtatcgacctcgttgccggtgggaggaacaagaagaccaagcgcacagcgccgaagtccgacgatgtgtatctcaagctccttgtcaagctctaccgtttcttggtcaggaggaccaagagcaacttcaatgctgtcattctcaagaggctcttcatgagcaaaaccaatcgcccaccaatctccatgcgccgccttgtcaagttcatggaaggaaaggagaagaacattgctgtgattgttggcacagtcacagatgacaagaggatccaagaggttccagcaatgaaggctactgccctgagggtcaccgagacggcaa

SEQ ID NO: 65145 - DNA, 291 bp, Zea mays
tagcctcatgcgtacgagctcggatgcgctcgaggaatgtaatccagggacaaggagagagtaccacacagaaaaactggtcacttctaaaggagctgaagagctcaggacaggtaaagagaaggtcacctctgttagcacaaccaccacgcgtcgttcatgctctaaaaccgttactaagactgttattggtcctgatggtcacgaagaagttaccaaagaagtggtgacctccgaagatggttctgactatctcgaggcaatagatttaggcacattgtctggcatagg

SEQ ID NO: 65146 - DNA, 99 bp, Zea mays
ccgcgcctctacatttcttctctctctgctcctccgcctccgcctccgcctgatccatccaagacagggatcgccatgtcggacttcggagagcacact

SEQ ID NO: 65147 - DNA, 328 bp, Zea mays
  unsure (1)..(328): unsure at all n locations
gcacaaccgtctgtacatggaagcgcgccccctggaggagggtcttgctgaggcaattgatgatggccgcatgttgccacgtgatgatcctaaggtgcgctcccagatcctctctcaagagtttaggtgggacaaggatcttgccaagaagatttggtgcttcggacctgagaccaccggcccaaacatggttgttgatatgtgcaagggagtgcagtatctcaatgagatcaaggattctgttgtggctggtttccagtgggcatcgaaggagggtgcactngctgaagagaacatgcgcgggatttgcttcgaggtctgtgatgtc

SEQ ID NO: 65148 - DNA, 330 bp, Zea mays
cttccctcctacctctctctctctctccctccgttcgtttcttgactcttctcttctccccatcagccagcagtctctctctctcacacacacacaagcagcgacttgctcacagtagtgctccccggacagaatgaccaaagacgaggagttcaagctggtcaagatccagaaccatgcgctgaaggtgaacatacactgcgacgggtgcaagcacaaggtcaagaagcttcttcagaagatcgaaggcgtgtactcggtggccattgatgtggacaaccacaaggtctcggtgacgggcgatgtggactcggagaccctgatcaggaa

SEQ ID NO: 65149 - DNA, 332 bp, Zea mays
ccgcgatctccgtagcctccgtcgcgtcgagcatcgatcatgtcggcctactgcggaaagtacaaggatgagctcatcaagaatgctgcctacattggcacccctggcaagggtatccttactgctgatgagtccactggcaccattggcaagcgcctttccagcatcaatgtcgagaacgttgaggagaaccgccgtgccctccgtgagctcctattctgctgccctggtgctctccagtacatcagcggtgtgatcctcttcgaggagaccctgtaccagaagaccaaggatggcaagcttttgttgatgtctcaaagaggcagcgtcct

SEQ ID NO: 65150 - DNA, 112 bp, Zea mays
tgcggcgccggcctacaaccgttttcgtgctcacacacccaaaccttagtcgcgatcaggccccaaggactcgagatgaagtcgagggcacggtccaccgccggcgactcca

SEQ ID NO: 65151 - DNA, 132 bp, Zea mays
gcgagtccatctacggcgagaagttccccgacgagaagttcgtgcgcaagacaccgcccccggtgtgctctccatggccaacgccggggccaacaccaacggctcccagttcttcatctgcaccgtcgcgac

SEQ ID NO: 65152 - DNA, 316 bp, Zea mays
atcaagcaagaggactgggacaagttgcatgttcacatagcctcgtagaacaacttccccactgctgctggttatggctcttcggctgctggccttgcctgtttcgttttcacccttggaaagctgatgaatgtgaaagaagattatggagaactttcttcaatagcaatgcagggatctgggagtgcatgccgcagtatatatggtggttttgtgaaatagtgcatgggagaagaagatgatggaagtgacagtattgccgtgcagcttgctgacgataaacactgggatgatcttgtaattattattgcagtgg

SEQ ID NO: 65153 - DNA, 124 bp, Zea mays
ctccgcacaaggcaacagaacattgctgagataactgaaatgattcatgtcgcaagccttctgcatgatgatgttcttgatgatgctgatactaggcgtggtgtcagttcattgaatctcatca

SEQ ID NO: 65154 - DNA, 208 bp, Zea mays
gcttcataagagaattcctgcagaagctggcatcagcataatttgtgcttctcctggaattgtcgacacgaatgttacaagagaccttcctaagattgttgtagctgcataccgttttcttccctacttcatattcgatggtcaagaaggttctaggagtgcactgtttgcggcatgtgacccccaagttccagagtactgtgagatg

SEQ ID NO: 65155 - DNA, 360 bp, Zea mays
  unsure (1)..(360): unsure at all n locations
atcaagaagaggactgggacaagttgcatgttcacatagcctcgtacaacaacttccccactgctgctggtttggcctcttcggctgctggacttgcctgtttcgttttcacccttggaaagctgatgaatgtgaaagaagattatggagaactttcttcaatagcaaggcagggatctgggagtgcatgccgcagtatatatggtggttttgtgaaatggtgcatgggagaaaaagatgatggaagtgacagtattgccgtgcagcttgctgacgaaaaacactggaatgatcttgtaattattattgcagtggtcagttcaaagcagaagganaccagtagcaccagtgggatgcgag

SEQ ID NO: 65156 - DNA, 121 bp, Zea mays
ctgggctggattttggagtgcaatggcttcaaatgtaaccttgcagtccagggatgtgcttagcctagaacttattggtggagaagagggatctctcgacaacattaacctattctcgatc

SEQ ID NO: 65157 - DNA, 123 bp, Zea mays
ttgaatcccacgcaagtcaaacttcttcataattttttccaaacccattcaatccatgtgtattgggaataagcgaacaaggccttaattggtttgcttccttttccatttctacaattcagc

SEQ ID NO: 65158 - DNA, 125 bp, Zea mays
gagaccttctcctggcagtactactactggtatctcaccaacgatggcattgagcacctacgcaactacctgaacctcccgtctgagatcgtgcctgccacgctcaagaagtctgccaagccacc

SEQ ID NO: 65159 - DNA, 362 bp, Zea mays
catcaagacgaaccggattcggctcgacccgatctccgatccctcgtcgatccaagatgcagatcttcgtcaagaccctcactggaaagactatcaccctcgaggtggagtcttctgacaccattgacaacgtcaaggccaagatccaggacaaggagggcattcccccggaccagcagcggctcatcttcgctggcaagcagctcgaggacgggcgcacacttgccgactacaacatccagaaggagagcaccctccaccttgtgctccgcctcaggggaggcatgcagatcttcgtcgaagacctcactggaaagactatcaccctcgaggtggagtcttctgacaccatcgacaacgtc

SEQ ID NO: 65160 - DNA, 122 bp, Zea mays
ctaagatcatggcgaccaatggtgttgtccacctcactgatccagatgaccttggaggcgattccaatatattgacgtggctcagctatgttcctgcaaacattggtggacctcttcctatt

SEQ ID NO: 65161 - DNA, 123 bp, Zea mays
cagcaagcaacatagacagtagaatccattagcaacaatagagcaacaatggcgaccaagatattttccctccttatgctccttgctctttctacatgtgttgctaacgcgacaattttccct

SEQ ID NO: 65162 - DNA, 122 bp, Zea mays
atcgtaactggggacgacatgcagactcagtgtgtcattgacaatcaagcacttccatgccttttgaacctactgaccaccaaccacaaggtaagcatcaagaaagaagcatgctggacaat

SEQ ID NO: 65163 - DNA, 355 bp, Zea mays
ctgctgctcttggcctgctacgacctcacggccacctctgtcctgtcccactagactagctgcagctagcgcctcttcccctcgccgccgccccctatccgagagcgacgagcatggcgcactccctcgccgcctccttctcgccggccgccgcgcgggccaggtgacaaatgtgatttcaagccggagctcggtttccttccagagccacaggatgacttctgtatccatccgttcaagaccaagttctcttcgtttcaagatttgctgttcggctaagaaggagacagtcgacaaggtctgtagtatagtgaaggagcactggctcttcccgatgggactgctatcactggcg

SEQ ID NO: 65164 - DNA, 119 bp, Zea mays
tgatggagtaccagggtattctttggatctgattttgtaactgttacaaaatcagaagaaacttcatgggattgcctcaaacctgaggttgttgctgcaataatggacttctactcatc

SEQ ID NO: 65165 - DNA, 155 bp, Zea mays
cgctcctctccactctccacattccagttccactccgcctccgctgccggtcgccgactccgatactccgacagtccgaccacaaggtcttgtgcgggatccacagaaggatgagtgaagaggataagactgctgcttctgctgagcagccgaag

SEQ ID NO: 65166 - DNA, 119 bp, Zea mays
tgctcgtgtggccgtcgtctctcgttcggaacgccaagcccccctccggcgaaatgagccccaagcgaggtggcaggacgccggtgcaaaacaagaagaagacggataaagtgacgaac

SEQ ID NO: 65167 - DNA, 115 bp, Zea mays
ctgttgacacagaagaaggctccctgatggagattcaggtcaatggtggtaccattgctgacaaagtggactacggctgacaattctttgagaaagaggtccctgttgatgctgt

SEQ ID NO: 65168 - DNA, 97 bp, Zea mays
atcatagagagtgttaacagagggtgtgactgacgtagctccgggcgaccatgtacttcctgtgttcactgagggagtgcaaggagtgtgcccactg

SEQ ID NO: 65169 - DNA, 121 bp, Zea mays
caccatgaggctctccaggaggcccttcacggtgacaatgttggcttcaacgtgaagaatgttgctgtgaaggatctgaagcgtgggtatgtggcctccaactccaaggatgaccctgcca

SEQ ID NO: 65170 - DNA, 348 bp, Zea mays
gtttaggagccgttggtcttgccgctgcagaaggtgcaaggattgctggagcgtcaaggatcattggtgtcgacctgaaccccagcagattcgaagaagctaggaagttcggttgcactgaatttgtgaacccaaaagaccacaacaagccagtgcaggaggtacttgctgagatgaccaacggaggggtcgaccgcagtgtggaatgcactggcaacattaatgctatgatccaagctttcgaatgtgttcatgatggctggggtgttgctgtgctggtgggtgtgccacataaggacgctgagttctagacccacccgatgaacttcctgaacgaaaggacctgaa

SEQ ID NO: 65171 - DNA, 337 bp, Zea mays
ttgagaccaacaagcaacatagaaagtggaatccagtagcaacaatagagcaacaatggcgaccaagatactttccctccttatgctccttgctctttctgcatgtgttgctaacgcgacaattttccctcaatgctcacaagctcctatagcttcccttcttcccccataccttccatcaatgatagcttcagtatgtgaaaacccagctcttcaaccctataggctccaacaagcaatcgcagcaagcaacatacctttatcacccgtgtttcaacaatcggcagccctatctttggtgcagtcttggtacaaaccatcaagcacagcagctgca

SEQ ID NO: 65172 - DNA, 146 bp, Zea mays
agtcgatcgagcgtcgtaatcggaatcggctcagtgattctcggcgagaagaaggtcagataggtcggcatgcttgactgcgtgaccatcctccgctccgagaaagtcaaggactagcttattctccatggcaacgacgtcgagtt

SEQ ID NO: 65173 - DNA, 250 bp, Zea mays
tgactatggcaagaagtccaagctcggtttcaccgtgtacccatccccccaggtgtccacatccgtggttgagccatacaacagtgtcctgtccacccactctctcctcgagcacactgatgttgctgtcctgctcgacaatgaggccatctatgacatctgccgccgctcccttgacattgagcgctcaactacacgaactcacaggcttgtctccaggtcatctcatccctgacgcttcctgaggtcg

SEQ ID NO: 65174 - DNA, 332 bp, Zea mays
  unsure (1)..(332): unsure at all n locations
tgatgtttgatctgcacaacgttgtcatatctatacctctgccagcacttcgggaggctccgagtgttagacagatcgatggagagtggaagttcgactcaagaaactctgtgttggaatggtctattctccttatcgatcagtcgaatcgcagtggttccatggaatttgttgttcccccagctgactcatcatcgnttttccccatctccgttggattttctgcatcgagtactttcagtgatctgaaggttactggaattcttcctctgaaggaaggcaaccctcncaagttttctcagcgggctcgtttgctcactgctaactaccag

SEQ ID NO: 65175 - DNA, 349 bp, Zea mays
agctgcagcgtagtaactcggaatcggtcgatggagcttggcatgctgatatttttgagttccttgatctgagaaagaaccatgggaaggaggaaaatcgtgcaagggatcttttctatgcgctatgggttcctgatttattcatgcaaagagtccagaataatggagaatggtcattattttgccctaatgaagctccagggttggctgattcctggggtgaggagtttgataatctgtacaagaaatatgagagccatggcaaggcaaagctagttgttccggcacagacccttaggtttgacattttgaatgcacagatagagactggtacaccatatatgcttta

SEQ ID NO: 65176 - DNA, 315 bp, Zea mays
gtctctctcacgtcctcccctccaccgccgcagccgccgccgtacctcctcctcccgcgcacagccaccgccaccgccggaaatgaagaccatcctggccacggagacgatggacatccccgagggggtcacggtcacggtggcggccaagctggtgacggtggaggggccgcgcggtaagctcacccgcaacttcaagcacctcaacctcgacttccagctgcaggacggcggtcgcaagctcaaggtcgacgcctggtttggcacccgccgaaccatggccgccatccgcaccgcgatctcccacgtccagaa

SEQ ID NO: 65177 - DNA, 256 bp, Zea mays
gcttcataagagaattcctgcagaagctggcatcagcataatttgtgcttctcctggaattgtcgacacgaatgttacaagagaccttcctaagattgttgtagctgcataccgttttcttccctacttcatattcgatggtcaagaaggttctaggagtgcactgtttgcggcatgtgacccccaagttccagagtactgtgagatgctcaagtcggaagactggccagtctgtgcttgcattaactacgactgt

SEQ ID NO: 65178 - DNA, 258 bp, Zea mays
attgagaccaacaagcaacatcgaaagtggaatccagtagcaacaatagagcaacaatggcgaccaagatattttccctccttatgctccttgctctttctacatgtgttgctaacgcgacaattttccctcaatgctcacaagctcctatagcttcccttcttctcccatacctatccatcaattatagcttcaatatgtgacaacccagctcttcaaccatatacgcttcaacaagccatcgcagcaagcgacata

SEQ ID NO: 65179 - DNA, 162 bp, Zea mays
agctcctatagcttcccttcttcccccataccttccatcaattatagcttcagtatgtgaaaacccagctcttcaaccatataggcttcaacaagcaatcgcagcaagcaacatacctttatcgcccttgttgtttcaacagtcaccagccctatctttggt

SEQ ID NO: 65180 - DNA, 254 bp, Zea mays
tcgtcgccgtcctctctcgttcgcaacgccacgctccccaccgccgaaatggccccgaagcgaggtggcagggcaccggtgccggccaagaagaagacggataaagtgacgaaccctctgttcgagaaaaggccgaagcagttcggcatcggcggcgcgttgcctcccaagaaggacctgcaccgattcgtcaagtggcccaaggtcgtgcgcatccagcgccacgttcgcatcctcaagcagcgctcaaggtg

SEQ ID NO: 65181 - DNA, 307 bp, Zea mays
cgctagccgcactcagcgacggattgcagatctcccagccatgacgttcaagctgaggtacggcggacgcaacatgcacgggcgcggccacgtcaagtgcatacgctgctccaactgcgccaagtgctgtccaaaggataaggctatcaagcggttcttggtcagctaattgttgagcaggctgctgtgcgggacgtgcatgtggcttatgtgcatgatggatatgttcttcccaaattgtacgcacaggttcgtcactgtgtctcatgcgcaatccatgcacacattgttcgtgtccgctctcgtg

SEQ ID NO: 65182 - DNA, 212 bp, Zea mays
tcttaacgccgccgcggagctgctccgcgcccccgacgccggtgattaggagcaggagcaagaggggttcggaatggccaagtctaagaaccacaaggtgcataaccagtcgttcaaggcgcacaataacggcatcatgaagcccaagcgccaccgccagacctccaccaaggggatggacaccaagtttctgatgaacttgaggtactcaa

SEQ ID NO: 65183 - DNA, 182 bp, Zea mays
cagaggggaagagagagagagagacggatagggggagatgagccggagcctggggatcacggtgaagttgctccatgacgcagcgggtcatgtcgtgacggtggagctcaagaccggcgaagtgtaccgggggtccatggtcgagtgcgaggataactggcattagcagctcgagaacatta

SEQ ID NO: 65184 - DNA, 321 bp, Zea mays
tctagttatacatttcaaactcttggccgccgcagcggtctctgttcgccgcgccccgccgcagaaatggcgctgccgaatcagcaggttgtggattaccccagcttcaagctcgtcatcgttggcgacggtggaactggcaaaaccacatttgtgaagaggcatcttactggcgagtttgagaagaaatatgagcccaccattcgtgttgtagttcaccctctggattttagcactaactgtggcagaattcgcgtctattgctcggacactgctgggcaagaaccgttcggtgcgctcagggatggctactacattcat

SEQ ID NO: 65185 - DNA, 156 bp, Zea mays
atcatagagagtgttggagagggtgtgactgacgtagctccgggcgaccatgtccttcctatgttcactggggagtgcaacgagtgtgcccactgcaagtcggcagagagcaacatgtgtgatctactcaagatcaacaccgaccgcggtgtgatg

SEQ ID NO: 65186 - DNA, 284 bp, Zea mays
atcaggggtttcacacatagcttcgtcgatttgaatttgatgtactaatggagtctaagggtggcaaaaagtctagcagtagtcgttctatgatgtatgaagctcccttggctacagcattgaggacgttcgacctgccggaggtgaagagttccatctgtgttatccactggcgagagccatctgtatccatggctctcatctagtagtaggattcttctgacactttgatctgacaatcccggctgtgttctgtatcgacattcccgcttgtcttgatctcc

SEQ ID NO: 65187 - DNA, 330 bp, Zea mays
atggcggcggcaccggcaggcggcggccctcgggcattgtcccagcgggatcaggacatccagatgatgctcgccgccgatgtccacctcggcaccaagaactgtcgattccaggtcgagcgctacgtgtacaagcgccgcactgatggtatctacattattaaccttggaaagacctgggacaagcttcagttggccgccagggtcatcgttgccattgagaatccgcagacattatcgtgcagtctgctaggccctatggccagagggctgtcctcaagtttgcgcagtacactggtgcacatgccattgctggcaggcacactcctg

SEQ ID NO: 65188 - DNA, 329 bp, Zea mays
gggattcgaatggtgtcagcagaggttctggatttgttgctttcaaatctgctgaagatgctaaccgagctcttacggagatgaatggcaaaatggttggaagcaagcccctttatgtagctcttgcgcagcgtaaagaagacagaaaggcaaagctacaggcacaattttcacaaatgcgtcctgttgcaatggcgccttcagtaggtcctcgcatgcccatgtttccacctggtgtccctggagttggtcagcagctgttctatggtcagccaccaccagccttcatcaaccctcaggctggatttgctttccagcaactctgatgc

SEQ ID NO: 65189 - DNA, 214 bp, Zea mays
tgggaagctgctggaacaatgggtgctactgctcaatccaattggaaattcaatgttgttcagacgggagtacaccatgcgcttaatccagaccccttcagaggtgcttttggttctgacggggagaaatacgccagatatgttcaggaaatcatcgaatttggaactacagggagagttggtgggttcatttcggaagccatacagggggttg

SEQ ID NO: 65190 - DNA, 269 bp, Zea mays
cctcagccacctctctccctcgctagagcaaaaaccttgccacgaatcgccgacactccaacccggaagaggcaacgaggtgactccgcgcctcggtcatgggtgacagccaatactccttctcgcttaccacttcagcccgtcgggaaagcttgtgcagatagagcacgcgctcacggctgtcggatccgggcagacctccctagggatcaaagctgccaacggggtagtgattgctcacgagaagaaactgcttctattttggggga

SEQ ID NO: 65191 - DNA, 311 bp, Zea mays
ctcttccatacgaccatattctacctccaaattcccaattgtcaacctctcctcagagttcgagtgaccatgtcggggcgcggaaagggcgggaaggggctgggaaatggcggcgcgaagtctactgcaaggtcatccgcgacaacatccagggcattacgaagccggcgatccggaatctggcgataagcggcggcgtgaagcgatctcggggctcatctacgaggagacccgcggcgtgctcaagatcttcctcgagaacgtcattcgcgacgctgtcacctacacggagtacgcccgccgtaagaccg

SEQ ID NO: 65192 - DNA, 304 bp, Zea mays
atgcggtacgtcgatatcggcatcccagcgcacaacaatgggaggaacagcattggatgtctgttctggcttctgtccaggatagttctgcaaatgacgggcactatcgctcctgggcacaagtgcgaagtcatggtcgatctgttcttctatagagacgcagcggactgcaaggattaggaggatgatgttgccgcggtccctgagtctgccgcaatcactgattaccaacgagctgatcagtgaggtcgtgaccattggacctctgatgtagctgcagcacctgttgctcctactcgtgctg

SEQ ID NO: 65193 - DNA, 269 bp, Zea mays
ctctagccgccctcagcgacggattgcagatctcccagccatgacgttcaagcggaggaacggcggacgcaacaagcacgggcgcggccacgtcaagtacatacgctgctccaactgcgccaagtgctgtccaaaggataaggctatcaagcggttcttggtgaggcacattgttgagcaggctgctatgagggacgtgcaggaggcttgtgtgcatgatggatatgttcttcccatattgtacgcaaagttcatcctgtgtctcatgc

SEQ ID NO: 65194 - DNA, 228 bp, Zea mays
acgagcgtgtggggttcatggtggaaagatcatcaatggggctacaagtgctgcaacagactatcggagatagttactgtactggcttggctggtatatcagctgccgaggcatcagcagatctaatgaatgccaatatggctcgcaaggtagctgcagaagatgatcctgtacagcatgaagagcagcgattagccacttggggtaccgatgtgcctcaggatcttg

SEQ ID NO: 65195 - DNA, 311 bp, Zea mays
cgtgggaatgctgctggaacaatgcggtgctactgctcaatccaattggaaattcaatgttgttcagacgggagtacaccatgcgcttaatccagaccccttcagaggtgcttttggttctgccggggagaaataagccagagatgttcaggaaatcatcgaatttggaactacagggagagttggtgggttcatttcggaagccatacagggggttagtggaatagtggaactggcatcacgatacttggccgtgacatacagtatggtaaggcaagccgatggatctgcatcgccgacgaattcaggca

SEQ ID NO: 65196 - DNA, 170 bp, Zea mays
ctttggaggctcagagattgtggtggcaggaaaatttgactctgctacattggatcagatagagagcgttatcacggcgacttcggctaacacgcagttagtcttggagatcctggctcagatggacgacttgcaggattttctatcgaaagacaagcatgcagatcccg

SEQ ID NO: 65197 - DNA, 260 bp, Zea mays
ccttgacaagaaatttgctgggacactagatcaaggtgctggctgcctcattatctttgaggatcccaagacggaggaaatcttccctgccactctcgaaaccatttcgaatgtcgggaaggttgtggacagcctttacgtgaggtcggccaagatcatggcttgaaagcagctagtcttacctgtttgctctgatttcatttccagtctgtcgatgtcctcagacatttattccttcaatattgacagtttattgtgat

SEQ ID NO: 65198 - DNA, 358 bp, Zea mays
ccggagcctctccttcccggtctcctccgcccgttgccttcgtcgcctccatctccggctgcgtcgccggcgagcccgacaccgcgaatcggatccgccgacaagggcagagggacgagatggggctcacgttcaccaagctgttcagccggctgttcgccaagaaggagatgcggatcctgatggtgggactcgacgccgccggaaagaccaccatcctctacacgctgaagctcggcgagatcgtcaccaccatccccaccatcggattcaatgttgaaactgtggagtacaagaacatcagcttcactgtctgggatgtcgggggccaggacaagatcagggcactgtggaggca

SEQ ID NO: 65199 - DNA, 338 bp, Zea mays
caggcatttgtatgggcggtattcacaaagagtattgtaacacccgttcttggcatcagcggcgtcggtggagccatggcaatttatggtgcagcagatgtagtttgttctttggttgctggacgattgacctccggacttcgctcagcagcatttatagtgtcggttggagctattcttcaggccatagtcctgttctggctgcttcttttttacagtccaatggatggactgcttggcgcagcgataccattagtcataggtgccttgtggggtgttggtgacggtgtcttgaatacacagttaagtgcattacttgggctgctgttcgaagatgt

SEQ ID NO: 65200 - DNA, 358 bp, Zea mays
caacactgaccactatgatcaatgatgaggctgcaatacctgaagtgattgagactgtcaaacagcaagttaaggatgctaaatttcctgatctagaggtcattcgcatgttgtgggatgtgctcatggaggctgttcagtggtctgggaagaaccagcaacagaattctaatgcagcacttcggcaggtgaaagcatgggctgagcttttgaatgctttttgcacgagtggcagactcgaactggaacttatatacaaagtacagacacagtgctatgaggatgctaagctgatgaagctgtttcctgaaatcataagaacactgtatgaccaagatgtcctagctgaagatactgt

SEQ ID NO: 65201 - DNA, 355 bp, Zea mays
agaatttctagtggaagttctcatgcttagtttgctgcatcatcaaaaccttgtcaatttggttggttattgtgctgatggagatcaacgccttctcgtgtatgagtacatgccacttggatcattggaggaccatttgcatgatctccctcctgacaaggagcctttggattggaacactaggatgaacattgctgcgggtgctgctaaagggctggagtacctgcatgactaggcacagccaccagttatttacagggatttcacgtcatcacatattctattgggcgagggcttccatccagagctatcagacttcggtcttgctaagttcgagtctgttcgtgacaagtct

SEQ ID NO: 65202 - DNA, 358 bp, Zea mays
ccaagaaattgatgataaggagaagcacatcagggaactcagtgcatcactttcctcgaaggaagtagactaccaaaagctgaccgctttcacaaatcaaactaaaaagagccttgagcttgcaaattctagagtacaacaactcgaggaagaactaagtacaactaagaacgctctcgtttctaagatatcttctattgattcactcaatactaaacttgaaaccgtgaactctgaaaaggaagaagctgacaaaaaaataaatgagttaatacaagagtatacagacctgaaggttgcttcagagacaagggcaagccatgatgtcaaactactgtcagatagagatgatctgata

SEQ ID NO: 65203 - DNA, 338 bp, Zea mays
ccaatctagaagcacccctctccctctctctctcttcgccgtccgaagctccgcaccccaatctaatcgacacctcaccgagatgggccgcaagttcttcgtcggtggcaactggaaatgcaatggaaccacagatcaggtcgagaagattgtcaaaaccctgaatgaaggacaggttcccccttcagatgttgtggaggtcgttgtcagccctccttatgtcttccttcctgtggtcaagagccagctgcgccaagagttccatgttgctgctcagaactgctgggtgaagaagggaggtgctttcactggtgaagtcagtgctgagatgctcgtca

SEQ ID NO: 65204 - DNA, 338 bp, Zea mays
tggagaggagaggagaggttgggtctgggacacatggctccgatgaagctgtacggggcggtgatgtcgtggaacgtgacgaggtgcgcaacggcgctggaggaggctggctccgactacgagatcgtgcccatcaacttcgccaccgccgagcacaagagccccgagcacctcgtccgcaacccgtttggtcaggttccagctctgcaggatggtgacttgtacctcttcgaatcacgcgcaatctgcaagtacgctgctcgcaaaaacaagccagagctgttgagggaaggacacctcgaggaggcagcaatggtggatgtttggatcgaggtgga

SEQ ID NO: 65205 - DNA, 327 bp, Zea mays
  unsure (1)..(327): unsure at all n locations
atcaacaccgaccgcggtgtgatgattgccgatggcaagtcgcggttttcaatcaatgggaagcctatctaccactttgttgggacttccaccgtcagcgagtacaccgtcatgcatgtgggttgtgttgcaaagatcaaccctcaggctcnccttgataaagtctgcgtccttagctgtggtatttctaccggtcttggtgcatcaattaatgttgcaaaactccgacaggttcgacgtggctgtttcggttaggagcgtagtcttgcgcgcagaagtgcaggatgctgacgtcaagtcattgtgtgactgacccagcaatcgaga

SEQ ID NO: 65206 - DNA, 298 bp, Zea mays
  unsure (1)..(298): unsure at all n locations
cttntgtcaaacttatatgctacaaatgcaagatgggtagctgttgacaaattaagaagtcacatgaagactattaagttaaacaaaagacctgcctgcagctggcttaagttgaagaatgaggtgagcacctttggtataggtgaccggagtcatatgcacgcagaaaagatctatgtgaagttggatgaaatcttgctaaagctcagagaagtaggttacgtcgctgatacctcatctgcactacatgatacggatgaagagcaaaaagagcataacctttggaaccacagcgaga

SEQ ID NO: 65207 - DNA, 348 bp, Zea mays
agccaacttatggccgggtttctcgttttggtctcatggcctacgcttcatcgctggatgttgtgggatgctttggttcgtcggtttttgacactgcaaccatcttatctgttgttgctggccatgacaagatggacgcaaccagcagttcacaggttgttccagagtacgcatcggagttggtctccctagatttactagaatcgaaaccattaaatggtgtgagaattgggattatacaagaaactcttggagacagtgttgccagtggagtcgtatcatcaatcaagggtgctgcttcacacctggagcagttgggatctgtggtggaagaggttcactgcttca

SEQ ID NO: 65208 - DNA, 355 bp, Zea mays
ttttggagatacaggttatttggcatttgaacatataacatgggctccataccagaccaagctgatagacaccgggcttctgacccctgttgagatcgactgggtgaacacgtaccactcagactgccggaagatcttggagcctcatctgaacgagcaggagaagcaatggctgatgaaagctactgagcccgtagctgcacagaggctgagccttttcgtcaacgttgcatgccatcgagcgccaggctcatcttctgcgtggcatacatataagattggctgcacccgctggttacataatagtcgcggcgaaggaacaggatagcttgttctcaacgctgatctgtcgcgc

SEQ ID NO: 65209 - DNA, 344 bp, Zea mays
  unsure (1)..(344): unsure at all n locations
ggacgccggcgtcgtggccgtggcgttcgggctgtacaagctggcggcggcgttcggggtctggtgggtggtgcgcgtgtacgccgtgccgctgctgatcgtgaacgcgtcgctggtgctcatcacctacctgcagcacacccacccgtcgctcncccactacgactcgagcgagtgggactggctgcgcggcgcgctggccaccatggaccgcgactacggcatcctcaaccgcgtgttccacaacatcacggacacgcacgtcgcgcaccacctcttctccaccatgccgcactaccacgccatggcaggcaccaaggcgatcangcccatctcggggacta

SEQ ID NO: 65210 - DNA, 319 bp, Zea mays
  unsure (1)..(319): unsure at all n locations
cancaacagcaagcgaaaatctcccgatcccctctagtctccgcggcgaagatgtcggggcgcggcaagggcgggaagggcctgggcaagggcggacgaaggccaccggaaggtgctccgcgacaacatccgcgggatcacgaagccggcgatccggcggctggcgcgcaggggcggcgtgaagcgcatctccgggctcatctacgaggagacccgcggcgtcctcaagatcttcctggagaacgtgatccgcgacgccgtcaactacaccgagcacgcgcgccgcaagatcgtcacagccatggacgtcgtctacgcg

SEQ ID NO: 65211 - DNA, 228 bp, Zea mays
cgcacccgaccactgccatgtcgcggcgcggcgactggctctacgagaacaacggcgggacctgcgtggccatcgccggcgccgattactgtgtcgtcgcggcggacacccgcctctctgtcggatacagcatcctcacgcgcgaccactctaagatctgcgacctggctgacaaatgtgtactagcatcttctggctttcagggtgatattaaagctctgcacaaga

SEQ ID NO: 65212 - DNA, 316 bp, Zea mays
tatccgaagcatgttacacgaggtgatggaacagcagacagtatccattgcgtagtgtggcataattgcatctttaaacgctaggacatctgtcctggcatgtgccaatcctactgaatcacgttacaatccaaggctctctgtaattgacaacatccacttagcgccaacgctactttcaagattcgacctgatttatcttatcttggacaaggcggatgagcaaactgataggcgcctggcaaagcatattgtttcgttgcattttgagaatccaaacttagaggagctcgaggtcttagacttgcagacacta

SEQ ID NO: 65213 - DNA, 358 bp, Zea mays
  unsure (1)..(358): unsure at all n locations
ggaaaattttcagacacagtatacaccagaagagcatgcccttattatcactgatgtccgtttcaggcctaactctagtcagctggcaacatcttcttttgatagaactattaaattatggaatgctgccgatcctggattctctctgcatacattcactgggcacaacggccaggtcacatcattagattttcatccaaagaaaacagaccttctatgctcttgtgatggcagtggtgaaatccggtactggaatgtgacccagtttgcatgcttgcgtgccataaagggtggtagtgcccaagtccggtttcaacctcatgttggacagttntagccgcagctgctgacaacgtgg

SEQ ID NO: 65214 - DNA, 350 bp, Zea mays
gctgcctacttgcttgctgtcctcgctgggaacgccagcccctccgctgaggatttgactgccattctggagtcagttggctgtgaagttgacaatgaaaggatggaactcctgctgtcccaactgagcggtaaggacatcaccgagctcattgccgcgggcagggagaagtttgcttcagtcccatgtggtggcggtggtgtcgctgttgcggcagcttcacctgctgctggcggagctgctcctacagctgaggcaaagaaagaagagaaggtggaagagaaggaagaaagcgatgatgatatgggcttcagctcttcgactaggctgcacatcatcacatattgttt

SEQ ID NO: 65215 - DNA, 341 bp, Zea mays
gtcagaaacatgacttctgaaacaatggaaatactgagcaacaaagaagtaattcaagtaaaccaagatcctcttggagttcaaggaagaaaaattttaggacaaggaaaatatggatgccgtgaggtgtgggctggtcccttgtctgggaatcgtcttgttgttgctctgtggaaccgttgttcagatactgctaacgttacaatgaaactgccagcagtaggccttgatgggtatgctgcctattctgttagggatctgtggaagcatgaaactctatcggaaaatgtcgtaggaacttttggcgctcaagttgacgtgcatgacaccaagatgtacat

SEQ ID NO: 65216 - DNA, 332 bp, Zea mays
ctccacgcaagcgaagagcgcctccctactccccctcgagatcttctctccctccccgcgccgctatggacgctgttgactcggtggtcgacccgctccgcgagttcgccacggacagcatccgcctcgtcaagcgctgccacaagcccgaccgcaaggcgttcaccaaggtcgccgcgcgcactgcgatcggcttcatcgtcatgggattcgtcggcttctttgtcaagctcatcttcatcctcatcaacaacatcatcgtcggctccggctgatccatgccccccaggagtggtcaatggcgtctccgacttggcggcgcactctggcat

SEQ ID NO: 65217 - DNA, 351 bp, Zea mays
  unsure (1)..(351): unsure at all n locations
cctcgttcctctagccgtctcgcgcagccacagcctccatttctcctccgacggcggtgcggctagctcaaccatggcggactccaaggccacctcggcggtcaccctccgcactcgcaagttcatgaccaaccgcctgctggcccgcaaacaatttgtgcttgaggttatccaccccggccgcgccaacgtctccaaggcggagttgaaggagaggcttgccaagatgtacgaggtgaaggaccccaacaccatcttcgtcttcaagttccgcacccacgtcggtngaggcaagtccactggcttcgggctcatctacgatacactcgagtctgccaagaagtgcgagcc

SEQ ID NO: 65218 - DNA, 240 bp, Zea mays
taaggtctctccaactgatatcgaggaagggatgagggttggtgttgatcgcaacaagtagcagattcaaatccctctcgcatcaaaaattgacgcaagtgttaccatgatgactgtggaggaaaagccagatgtgacgtacaatgatgtcggtggctgcaaggagcagattgagaagatgcgtgaagttgttgaacttcctatgcttcacccagaaaagtttgtcaagcttggtattga

SEQ ID NO: 65219 - DNA, 352 bp, Zea mays
cgtcagacctgctgtctcgacacatgatggcgcagctgtactgaaggctgcaaggatgtagaagggcagggcgcagcagcagggcccaccagctgcaggcacggacctttccatgcaccgtgggagcctcctccacacaggccctgtcctcagagaactcggattctgcagcatgccgtctgaccacaatgaaatagaacggaagaatcttcacacttgggaacacaacagcacactttcacacgacacctgggccagagaggaggtctcaagggagacgatgcgtggagctgagtgaagatgcagtgcagcctaggaaagcccagggcccatcaggcagtgtggagacacc

SEQ ID NO: 65220 - DNA, 346 bp, Zea mays
  unsure (1)..(346): unsure at all n locations
gcgagatcgtgcgcanctccgagatctccacgaagttgtggtaacatggggctcaccttcacgaagctcttcagccggctcttctccaagaaagagatgaggatccttatggttggtctcgatgcagctggtaagaccaccatcctctacaagctcaagctcggagaaatcgtgaccaccatccctacaatcgggtttcatgtggagactgttgaatacaagaacattagcttcactgtctgggatgttggaggtcaggacaagatcaggccattgtggaggcactatgtccagaacnaccaaggccttatctctgctgttgatagcatgacagagatcgtgtgtt

SEQ ID NO: 65221 - DNA, 304 bp, Zea mays
cctcagttcgcatccacgcgcgccgccgccgcctcgccggtcgacgctcaccgcgcaccatggcggaacagactgcgacggctttcctcaagcagccaaaggttttcctcagctcaaagaaatctggcaagggtaagacgcctggcaacggcggcaaccgattctggaagagcagtggccttagcttcaagactcccagggaagccatcgaacggacctacattgacacgacatgcccattcactggaactgtttctcatcagaggcgaattattgctgggacatgccacagtgctaagatgaa

SEQ ID NO: 65222 - DNA, 323 bp, Zea mays
taaggtctctccaactgatatcgaggcagggatgagggtttgtgttgatcgccacaagtaccagattcaaatccctctcccaccaaaaattgacccaagtgttaccatgatgactgtggaggaaaagccagatgtgacgtacaatgatgtcggtggctgcaaggagcagattgagaagatgcgtgaagttgttgaacttcctatgctgcacccagaaaagtttgtcaagcttggtattgaccctccgaaaggtgtcctttgctatggcccacctggtactggcaagacacttcttgcaagagctgtcgcaaaccggactgatg

SEQ ID NO: 65223 - DNA, 320 bp, Zea mays
ccttgaagaggtgacaattacttttattagacattgctatggacaagtgcagttcgtggaggagtttgccaggtgccatgctacaagcctgacaaagttagggcatctttggttcgtggctaactgtgccacactttgcctaaggttagtcgttcacattgaagaactaaccttaggcagacaagttcaggcaagtgtggcaagttaggtagcgaaccatacaggcccgtagtcgtcaactcagcaaccagagggctacaagagatggtcggcggattgtttgatccggatgtcactgtcaaatgcaatgttatctagcg

SEQ ID NO: 65224 - DNA, 273 bp, Zea mays
  unsure (1)..(273): unsure at all n locations
cacagacatagaagggattcggaagagtatagaagcacgtacgacacagttgctgcctttatatacccagatcgcactacggtttgctgaattgcatgatacttccctaagaatggcagctanaggtgtgattaagaaagttgtagactgggaagaatcacgctcgttcttctataaaaggctacggaggaggatcgcagaagatgttcttgcaaaagacataaggcagatagtcggtgatacatgtacgcaccaattagcatggagctcatc

SEQ ID NO: 65225 - DNA, 286 bp, Zea mays
  unsure (1)..(286): unsure at all n locations
ctcccgatctaggagcccggcctcgatgatgttgtgaagcattgcaggggcaggaacctcttcttcagcactgatgttgagcagcacgtcgctgaggctgacatcatcttcgtctcggtgaacacccccaccaagactcgtggggttggagctggcaaggctgccgacctcanctactgngagagcgctgctcgtatgatgcgcgatgtctccaagtctgacaagatcgttgtcgagaagtccaccgtccctgtcacagacgctgaagctattgagcagatcttga

SEQ ID NO: 65226 - DNA, 291 bp, Zea mays
tggccatcaggcgcaagaccactggtacgggaaggatgaggtacatgcgacacgtgcctcgccgtttcaagagcaacttcagagaaggtacctttcttgtgccgttgatgatcctgcaatttgttaatctgaattctcatgttcgtgtcaaacataagtgacttaatttggttggttttcttaacctccacccagggactgaggctgccccaaagaagagtgctgctgctgccaactaagtgtggatgttgccatcaagaaccgcagaagctagacgttggatctttttga

SEQ ID NO: 65227 - DNA, 341 bp, Zea mays
  unsure (1)..(341): unsure at all n locations
actacctggaccgctcgacgcctcacgccacggggcggtggctcggcacgctcgccgccgcggccatctacgcgctgcgggtttacatggtgcagggcttctacatcgtcacctacgggctcgggatctaccttctcaacctcctcatcggtttcctctcccccatggtcgaccccgagctcgacccttccgccgcctccgaggggccggcgctgcccacccgggggtccgacgagttcaagccattcatcaggcgcctccccgagttcaagttctggtatgccatcacaaaagcttttgttatagcttntgtgatgactttcttctcagtgtttgacgtc

SEQ ID NO: 65228 - DNA, 330 bp, Zea mays
ccacatcacaacaagggtcttgctttcacggagaaggagagggatgcacaccacttgcgtgggctgcttcctcctgcagttgttcctcaagaactccaaattaagaagatcatgcacaacctgcggcagtaccaggtccctttgcagcgctatatggccatgatggaccttcaggagaggaacgagaggcttttctacaagcttttaattgataacgtggaggagctgcttcctgtggtttatacaccaactgtaggtgaggcctgccagaagtatgggtccatctttcgacaaccacagggtctgtatgtcagcttgagggacaaaggg

SEQ ID NO: 65229 - DNA, 251 bp, Zea mays
gttccacaaacgcaagccccaatctcgccgtcaccacccccaatccagcaaacgcaaacccgatatcgccgccgccgccgccgccgccgcgatgtctcgccgctatgacagccgcacgacgatcttctcgccggaggggcgtctctaccaggtggagtacgcgatggaagcgatcggcaacgccgggtcagccctcgggatcctagcggccgacggcgtggtcctcgtcggcgagaagaaggtgacctcca

SEQ ID NO: 65230 - DNA, 336 bp, Zea mays
actacctggaccgctcgacgcctcacgccacgtggcggtggctcgtgcacgctcgtcgccgcggtcatctacgcgctgcgggtctacatggtgcagggcttctacatcgtcacctacgggctcgggatctaccttctcaacctcctcatcggtttcctctcctccattgtcgaccccgagctcgattcttccgccgcctccgagtggccggcgtctgccatccgggggtccgacgagttcaagctcatcatcatgcgtctctccgtagtcaagatctggtatgttttcacaaaagcttttgttatagctttgtgatgactttcttctcatgttgag

SEQ ID NO: 65231 - DNA, 342 bp, Zea mays
gcagctattgtggtcgtccctcagccgcgtcgcaccgcatcgcattctacgattcgaagctctctctgctcgcagccatggcgaagaattacccaaccgtgagcgccgagtacagcgaggccgtcgagaaggccaggcgcaagctccgcgccctcatcgccgagaagagctgcgcgcccctcatgctccgcctcgcgtggcactccgcggggacgttcgacgtgtcgtcgaggaccggcggtcccttcggtactatgaagtgcccggcggaactggctcacggcgccaacgcggggctggacatcgcggtgcggctgctcgagcccatcaaggaggagtccc

SEQ ID NO: 65232 - DNA, 350 bp, Zea mays
  unsure (1)..(350): unsure at all n locations
atctaacaatacaagccatcacaacgcaacagcaacaacagttcctaccagcactgagccacctagccatggtgaaccctgccgcctacttgcaagagcagctgcttgcatccaacccacttgctctggcgaacgtagttgcaaaccagcaacaacaacagctacaacagtttctgccaacgctcagtcaactagccatggtgaaccctgccgcctacgtacaacaacaacaactgctttcatctagcccgctcgctgtgggcaatgcacctacatacctgcaacaacaattgttgcaacagattgtaccagctctgactcaactagctgtggcaaaccctnngtgctac

SEQ ID NO: 65233 - DNA, 353 bp, Zea mays
  unsure (1)..(353): unsure at all n locations
gattacaagaaagttccaatattgacagtagatggtgaacagcttgttgattcatcagatataatcaatatactacagagcaggatcaaccccaatgaagaactcactagtgacgaggaagcaaaatggcgaaggtgggttgatgagcaccttgtgcatgtcttatctcctaacatatatcggacaacttcagaagctctagaatcttttgactacattgcaaaacatggtaatttcagttttacagagaggtttgccgtgaagtatgctggtgctgcggccatgtacatggtatctaagacactannnagagaatacaacataactgacgagcgtgcttcattgtatgatgc

SEQ ID NO: 65234 - DNA, 105 bp, Zea mays
tcctcgcctcctctccctagtctccacgacgcaagggagagtgacggaaagcgacgcgtcgcgagctagcgagggccaaggcgaagaggggaagcaccgcaccag

SEQ ID NO: 65235 - DNA, 278 bp, Zea mays
ctggcaaacaaatgctcgattgcttcacgcattgactgctactcggaggctagtacctctgtctttgggcaaaagttgcgcgagaagtcgaggagagactggaattctatgacaagggtgttgcgcctcgtaaaaatcttgatgtgatgaaagctgctattgacagtatggtcaatgacaccttaatggatgatgatggtaaggcagataatgagaaggcggacacatctgccaagaaaagcaagaaaaagaagaccaaaaccgagactgatggtgat

SEQ ID NO: 65236 - DNA, 344 bp, Zea mays
  unsure (1)..(344): unsure at all n locations
ggagaagccgccgcaccagcaatcacagcagcccggagaacgccctggtccaacaagatgcagatcttcgtgaagacgctgacagggaagaccatcaccctcgaggtcgagagcagcgacaccatcgacaatgtcaaggccaagatccaggacaaggaagggatcccgccggaccagcagcggctgatctttgccgggaagcagctggaggatggccgcactcttgcggactataacatccanaaggagtctacgctccacctcgtgcttaggctccgcggtggaatcattgagcgctctctgcaggcgctcgctcgcaagtacaaccaggacaagatgatctg

SEQ ID NO: 65237 - DNA, 350 bp, Zea mays
  unsure (1)..(350): unsure at all n locations
tggaaatgaaagttctttgcaaggttcatcatgctagtctggtagaattgattggctatgcagcaggcaaggatgagcttttcctggtttatgagtactctcaaaatggttcactcaaaaatcatctacatgatcctgaaagaaaggggtgttcatcactttcatggatctttcgggtccaaattgcacttgatgctgccagaggactagaatacattcatgagcacaccaaagatcattatgttcatagagacattaaatcaagtaatatcttgcttgatggttccttcagagcgaagatttcagattttgggcttgcaaaacttgtagtganatccaatgacgcagag

SEQ ID NO: 65238 - DNA, 342 bp, Zea mays
gccggaacgattcctatccggattgcttctctaatttatataaactttgattagctggaacgattccgggtgcaatccgacggaaacgaacaaggccttactgatttttcatccctgctgacggaagcttgatttctccgttggtgatgctatggatgtgatcagatcagccatttgcaagctgattgcagccacggatgagtattgtggcagtgggcaatcccaaaatatagctctcttgttataggttagtttattatgagtagcattcggcttatgtttttctggaccgtccccattatgcattagcttgggctgcttggctgtatgtaataataagca

SEQ ID NO: 65239 - DNA, 298 bp, Zea mays
ctcgagacaacttctttttcgccgggattgacaaagttaggttcaggaagccagtgattgctggcgatacactgatcatgaggatgacactgactaagtatcagaagaggtttggactcgccaagatggaaggaaaagcttatgttggtggtgacctagtttgtgaaggggagttcctcctagtcagcgcaaccgagtagtgcaaagacacttcatgattctctgggaagaatcattggttggaatcagatctggttggatgtttgaaagaaccgagttttgaactaattatacaatc

SEQ ID NO: 65240 - DNA, 331 bp, Zea mays
cgccagtctcggtctcttccgaaggcgtcgcgcgcggttgtttgagaggagaggaggaagatgagggagtgcatctccgtccacatcgggcaggccggcatccaagtcggcaacgcgtgctgggaactttactgcctcgagcacggcatccagcctgatggccaagtgcctggagataagaccgcgggacatcacgatgatgccttcagcaccttcttcagccagactggtgctgggaagcagttccccgtgcaatctcgttgatctagaaccactgtgatcgatgaggtgccactggcacgtaccgcagtcttgcagctgagcagtcatc

SEQ ID NO: 65241 - DNA, 331 bp, Zea mays
gttgagaatgaaaaagagaagcatgctgagcttcttgctcttcctcctcatggagctgaagtttatgttgggggcatatcttctgatgtatcttctgaagatctcaaacaactatttgaatctgttggagaagttgtggaagtgcgaatgcgaggaaagggggataacaggacttatgcttttattaatttcagaactaaagcgatggccttaaaaggcatccaaaatttgagcaataaagacctaaagggaaagaagataaaagtttctccctcccaggctaagaacaggctatctattgggaatgtaccccatgactggacacatgatg

SEQ ID NO: 65242 - DNA, 342 bp, Zea mays
gcgaagaggactctgtcttccactgcccagaccacgattgagattgactcgctgtatgagggcatcgacttctactccaccatcacccgtgccaggtttgaggagctcaacatggacctgttcaggaagtgcatggagcctgttgagaagtgcctgagggatgccaagatggacaagagcaccgtccatgacgttgtacttgttggtggctccactaggatccccagggtgcagcaactgctccaggacttcttcaacggcaaggagctgtgcaagaacatcaaccccgatgaggctgtcgcctatggtgctgctgtccaggctgccatcctgagcggtgag

SEQ ID NO: 65243 - DNA, 341 bp, Zea mays
  unsure (1)..(341): unsure at all n locations
tgganacaagcttgccatgcaggagttcatgatcctcccaactggtgcctcctcgttcaaggaggccatgaagatgggagttgaggtgtaccacaacctgaagagcataatcaagaagaagtacggtcaggatgcgacaaacgttggggatgaaggtggttttgcacctaacattcaggaaaacaaagaaggccttgaactattgaaggcagccatagaaaaggctggctacactggaaaggtggtcattggaatggatgttgctgcttctgaattcttcggtgagatagacaagacttatgatcttaatttcaaggaggagaacaacgatggctcaaaca

SEQ ID NO: 65244 - DNA, 334 bp, Zea mays
acttgcctccgatccccaattcctccttcggatctcgcattcagcgcagcgcaggtgtgaaggaagggggacgcggaggaagatggggctcgcgttcgggaagctcttcagccggctcttcgccaagaaggagatgcggatcctcatggtcggcctcgacgccgccggtaaaaccaccatcctctacaagctcaagctcggcgagatcgtcaccaccatccccaccatcggtttcaatgttgaaactgttgagtacaagaacattagcttcactgtctgggatgtcgggggtcaggacaagatcagacctcttggaggcattacttccagaaca

SEQ ID NO: 65245 - DNA, 321 bp, Zea mays
tagctgctgaggagaacaggcatggtgatcttctcaacaagtacatgtacctcactgggagggtagatatgaggcaaattgagaagacaattcagtatcttattggctctggaatggatcctaggactgagaataatccttatcttggtttcatctacacctccttccaagagcgggcgaccttcatctcgcatgggaacactgctcgtcatgccaaggactttggcgacttaaagctcgcacaaatctgtggcatcatcgcctcagatgagaagcgacatgaaactgcgtacaccaagatcgtggagaagtgtttgagat

SEQ ID NO: 65246 - DNA, 329 bp, Zea mays
tggtactgtaataatggccagttcttctgcagtgtctcgaacactggcacagcttctggagagttcctattgtgtttgttgtggagaataacctgtgggcaattggaatgtcacacattagggctacatcggacccagagatttggaagaaggggccagcatttggaatgcctggggtgcatgttgatggtatggatgtcctgaaggtcagggaggttgctaaggaggcaactgagagggcaaggagaggtgaagggccaaccctagtcgagtgtgaaacatacaggttccggggtcactcccttgcagacccagatgagctcaggaag

SEQ ID NO: 65247 - DNA, 103 bp, Zea mays
agacgccaccgacgtacaccccttcccccaagcctccgacacctaagccgaccccgcctacgtagacttcaagccctaagccaccggctaccaagcctcccac

SEQ ID NO: 65248 - DNA, 213 bp, Zea mays
  unsure (1)..(213): unsure at all n locations
acttgcctccgatcgccaattcctccttcggatctcgcattcagcgaggnaggtgtcaaggaagggggacgcggaggaagatggggctcgcgttcgggaagctcttcagccggctcttcgccaagaaggagatgcggatcctcatggtcggcctcgacgccgccggtaaaaccaccatcctctacaagctcaagctcggcgagatcgtcacca

SEQ ID NO: 65249 - DNA, 289 bp, Zea mays
tggaacatcgtcctcagtggagggacgaccatgttccctggcatcgctgacaggatgagtaaggagattactgccctcgcgccgagcagcatgaagatcaaggtcgtggcgcctcctgagagaaaatacagtgtttggattggtggctcgatccttgcgtcgctcagtacgttccagcagatgtggatatccaaggatgagtacgatgagtctggccctgctatcgtccaccgaaaatgcttctgagctagctatctgccgcgccttcatagcgtgtcaagctgttgag

SEQ ID NO: 65250 - DNA, 350 bp, Zea mays
atcctcagcgagagctcggatcggctcgacacagctcttctgctcacgaactgtgaattctctctgcccagcacatcatggcgaacgcagcttcttctctgtttcctacttgccgcctccgcgccgctaatcgtcgccacggccaagaaatccggggacgtgtcggagctccagatcggcgtcaagtacaagccggaatcatgcagcattcaagctcacaaaggtgacaaggttaaagttcactaccgtggaaaacttactgatggaacggtttttgattcaagctatgaaagaggtgacccgattgaatttgaactgggcactggacaagtgatcaaaggatgggatca

SEQ ID NO: 65251 - DNA, 322 bp, Zea mays
ctgacaatcatgccctcacaagagaagaccaggatgcttttgctatccaaagcaaccagcgtggaattgctgctcgtgacagtggtgcttttgcatgggagattgttccgattgaagttcctgttgggagaggaaaaccacctgtacttattgagaaagatgaaagcctggataagtttgacccagcaaaactgaagaaacttcgcccaagtttcaaggagaatggtggtaccgttacagctggaaatgcttctagtataagtgatggggcggctgcattagttttggtgagtgggcagaaggctcaagagcttggcctgca

SEQ ID NO: 65252 - DNA, 341 bp, Zea mays
agcaccttcccaaaaaaatcccccattttcttcgaggcgaggagagcgtgaaagacagggcaccggcagcgacgatgtcggggcgcggcaagggcggcaaaggtctgggcaagggcggacaaagcgccaccgtaagtgctccgtgacaacatccagggcatcaccaagcccgcgatccgtacgctggctcggaggggcggcgtgaagcgcatttcggggcttatctacgaggagacccgcggcgtcctcaagatcttcctcgagaacgtcatccgcgacgccgtcacctacaccgagcacgcacgccgcaagactgttaccgccatggacgtcgtctagcg

SEQ ID NO: 65253 - DNA, 270 bp, Zea mays
  unsure (1)..(270): unsure at all n locations
acgaggcggaactgtgggaagaggtgggggccctacccatcttgctatactgtcacaacctccagaaaccatccatggatcacttagggtaaccgttcaaggcgaagtcattgagcagtctttcggagaggagcatttgtgctttaggacactgcaacgtttcacggctgcgacccttcaacatggtatgcaccctccaatttcgccgaaaccagaatggcgtgctttcatggatgagatggctatcgtcgncacaaacgaataccggtc

SEQ ID NO: 65254 - DNA, 308 bp, Zea mays
cccaaggaagaatgtctcatcatttccgtgagatgaaagttggtgattatatgtctgtgaagggacctaagggccgtttcaagtacctacctggacaagtgagagcattaggaatggtagctggaggatcaggcattactccaatgttccaagtcacaagggcaattcttgagaacccaaaggacaacacgaaagtacacttaatctatgcaaatgtcacgtatgaggatattcttctgaaggaagaacttgacggcatggccaaaaactatcctgatcgtttcaagatctactatgtcttgaatcag

SEQ ID NO: 65255 - DNA, 159 bp, Zea mays
agcagtccgcaggaccggtcactcggcagtcggcacgcaggctagcagcacagcagcagccagagccatcccctctcctcgctacgcttcgcttcctcggcgccgattcctcctcctcctcctccaccctcgtccgtcacgttccggcgcgcgagctcg

SEQ ID NO: 65256 - DNA, 330 bp, Zea mays
gaagtagggaagtaatactttctgtaaatgttgtgagctgtgaactttcaagagtgagtccccaggattcagattattcatggaatgttcttgcagttgataagaacaacattcttgcagtttccagcagccttattacactccctcagatgtactatgggattaaggtttctcagactgaaagcaattgggagtggcagggagtttcaactcctttcccaaagccatctgataagatcagctccgtactagcagagcataagttcagcatactcaaaatcccaattagcaacccttctgatgaacttgcaaatggggctaagcttcctt

SEQ ID NO: 65257 - DNA, 310 bp, Zea mays
aaatattattgcttttggactcctggcaagaggcatttggaggacctggaagtaaatacccacaatatcattgggcataccttgaagtaaagacgacaggtgtggtgttcccaaaacgtcctatggatgccccaccaatatttactcctccagctacacataattctgagacctatggttcacccagatattctgcgggaagtctaagtgacagaatgtcctcagatgttgagactcctgagttaggagatttgataagatcgaaatgtgacagactactgaatgataggtgttgctttaaccatctgat

SEQ ID NO: 65258 - DNA, 347 bp, Zea mays
caacgcctacattttccctggattcggcctcggtcttgttatctctggagccatccgtgtccaagaggacatgcttcttgccgcctcggaagcactagctgctcaggccacacaggagaacttcgacaagggatcaatcttcccgcccttcaccaacattagaaagatctctgcgcgcattgccgcagccgtggctgcaaaagcttatgaactcggtttggcgacccgtctgcctcccccaagggacctggtgaaatatgcacagagctgcatgtacactcctgtctaccgtaactaccgatagtgctgctgggatcaattctgcagtaataaaatatgtcgacgca

SEQ ID NO: 65259 - DNA, 242 bp, Zea mays
aacaagcaacatagaaagtggaatccagtagcaacaatagagcaacaatggcgaccaagatactttccctccttatgctccttgctctttctgcatgtgttgctaacgcgacaattttccctcaatgctcacaagctctatagcttcccttcttcccccataccttccatcaatgatagcttcagtatgtgaaaacccagctcttcaaccctataggctccaacaagcaatcgcagcaagca

SEQ ID NO: 65260 - DNA, 340 bp, Zea mays
tgaacagctggaacgtgagcaggctgccaaggtcactggcatgcttttggagatggatcagacggaggttcttcacctgctggagtcgccagatgctctgaaagccaaggttgctgaagccatggaggtcctccgctctgcccagcatctccagcagagcaatgtttctactgagcagcagctggctaatctatcattgaatgatggcgtcgtctccagctgaacgttaatgtttctgatgtttcggaagtgctgccagtgtttgcttgaatactaccctatctagagtgtaatgactttgtttacttggtttgttggagtcttagctgctcctattact

SEQ ID NO: 65261 - DNA, 238 bp, Zea mays
cagcttctcaccaccgctaccttcgatggcacccaaggcggacaagaagccggcggcgaagaagcctgcagaggaggagcccgcgacagagaaggcggagaaggctccggcggggaagaagcccaaggccgagaagcgctcccggcgagcaagtccgccggtaaggagggcggcgagggcaagaaggggaaaaagaaagcgaagaagtccgtggagacctacaagatctacatcttca

SEQ ID NO: 65262 - DNA, 282 bp, Zea mays
tgccactcaagggtattatgggctacgtggaggaggatctggtttccaccgacttcaccggtgacagcaggtcgagcatcttcgacgccaaggccgggattgccctgaacgaccacttcatcaagctcgtctcttggacgacaacgagtgtggctacaataaccgcgtcgacgacgtgatccgccacatgttcaagagccagtagagagagatatctctgcctccctatcgaaggtcgtcaccgatggcctttggtcgcagacatctttgctgctagtctat

SEQ ID NO: 65263 - DNA, 278 bp, Zea mays
ggcacatcgaggattaagctgccctctggcgccaagaagattgtccccagcagctgccgtgctatgattgggcaggttgctggtggaggcaggactgagaagccgatgctcaaggctggtaacgcgtaccacaagtacgtgtgaagaggaacagctggcccaaggtgcgtggtgtgaccatgaaccctgtggagcatccccacggaggaggtaaccacgaacacatcggtcacgcctctactgtccgccgagacgctccccctggccagaaggttggt

SEQ ID NO: 65264 - DNA, 327 bp, Zea mays
tatccttcgtaaacccttctctcttcttcccgcggcctgctcgttctatctgtccagcagacttgaggttccgagcagccggaaaccagcggcaaccgtcggcatggcgctcgtattgcattctcgggctggaaacaaaatgccttcaaggcacttattgctgcagaatacagtggggtcaaggttgagttgaccaaggattttgagatgggtgtctcgaacaagacccctgagtttctaaagatgaacccccttgggatagttcctgttctggagactcctgatggccctgtttttgagagtatgctattgcgcgctatgttgctc

SEQ ID NO: 65265 - DNA, 284 bp, Zea mays
gcgaggtggacatgtcctgcgtggaagatcaggattggctccccgaggacctcttggggttaactcccgtccatctgcacgcactattgctaagtcatttagcagaaccaaagacatgacatggcgacctgatctattagtgatagcatggcggctagtggaatagaaactggtacaaaattgtacatttcaaacttggactatggggtctctaatgaggatataaaggagctgttttcggaagttggtcatttgaaacgctttgctgttcactacgatggtta

SEQ ID NO: 65266 - DNA, 242 bp, Zea mays
attgattaagatcgacatcataagaggcacaaatctagctatccgtgatgtcatgtcgagtgatccttacgttatcattaacctaggacaccagacaatgaaaacgaaagtggtaaagagcagtctaaatcctgtaggaatgaaaggctcatgctttcgatacccgacccagtgccgctgcttaaactgcaagtctacgacaaggacacgttcaccactgacgaccggatgggggaggccga

SEQ ID NO: 65267 - DNA, 328 bp, Zea mays
aagagccttccgaaatgccttgcgagaaagaagagttgcttaacgccgctgtgcgtcgtgtcgatgcattggaagccgaactaattgtaacaaagaaggctttgcacgaggctcttatcaggcaagaggaactgctgcgtacatcgaccgcaaagagattgccaaggctcagagaaagaagaaagcaatgctttgctactaggacaaggagggagatacttctgcttcctcagaggagatgccaaagatggcgcctgagatgtaaccagcgatccccttcattttcctaacacttgtgaatcttctacaagtttcggttgtaaatcga

SEQ ID NO: 65268 - DNA, 327 bp, Zea mays
gttagttggcattgaagacgatgactgcttctgcagctgctggtgtgcagatggtggctgcacgcccttgcatttcggcctcgccaggaattcttaccgcacgggtttctaggactgattgcatgctcagtaccatgctacattcaccaaaatcagcagctcctggcctctaaggtttaagcgcaatgatgttgttgtaagagcaatatcggaagagtgtggcccgctaggcttcccattgatctcagaggtataagggcattcattgctggcagtgctgatgataatggctatggatgggcattgcgaaggcattgctgcggctgg

SEQ ID NO: 65269 - DNA, 241 bp, Zea mays
cacgctggcacactaactgaagtttattggaatgatgcaagaaagctagcacctgagcttgtttttcaaaagcagtactggacagatagtttcattcagtggtcccctctgggaacctacatggcaacggttcatggcagggatcacaggtgtggggcggtgaaaatggcttcgagcgtttgatgcgttttgctcattccatggtgaaactgattgacttctctcctggtgagaggtattt

SEQ ID NO: 65270 - DNA, 309 bp, Zea mays
gccacgatgacctcggcaagcgctgcgctaagtactacgaggccggtgcccgctttgccaagtggcgtgctgttctcaagattggccccaacgagccgtcacagcttgccattgatctgaatgctcagggtctggtcgctacgccatcatctgccaggagaacggtctggtgccaattgttgagcctgagatccttgttgatggccctcatgacattgatcgctgcgcttacgtcactgagacagtccttgctgcctagctacaagctctcaacgagcaccatgtcctcctggtaggtacctcctgaag

SEQ ID NO: 65271 - DNA, 226 bp, Zea mays
cctctcgtcgccgtcctctcccgttcgcaacgccacgctccccaccgccgaaatggccccgaagtgaggtggcagggcaccggtgccggccaagaagaagacggataaagtgacgaaccctctgttcgagaaaagccgaagcagttcggcatcggcggcgcgttgcctcccaagaaggacctgcaccgattcgtcaagtggcccaaggtcgtgcgcatccagcgcc

SEQ ID NO: 65272 - DNA, 237 bp, Zea mays
ggtgaaggggaagcctcactttgcagacttcaaccttgtgccgcctgattggggtggctacgcagggccatggattgatgcagcagcaaggagctgtgttggtctcgaggagttgcgcatgaagcggatggtgtgtttgatgagaaccttgagctgctagctcggtcattcctgagattcaaagtccttgtccttatcagctgcgaggggtttagcaccgatggtctagctgctatt

SEQ ID NO: 65273 - DNA, 238 bp, Zea mays
cgcgctcaaattcgttccgtccaggcaaggaagacatcgagcagccaaggagaggagaagatggctcgtacgaagcagaccgcccgcaagtccaccggaggcaaggccccgcgcaagcagctcgccaccaaggggcgaggaagtctgcgccgacgaccggcggcgtgaagaagccccacaggtacaggctcgggacggtggctctgcgcgagatccgcaagtaccagaagagcacgga

SEQ ID NO: 65274 - DNA, 333 bp, Zea mays
gcagttgcgaaggaacacgctgcctatggtgatactgtagaatcagtggctggtcagggagtcaaactgctgaatatattgagaaaatattgtgaagccttttcttccatggtggaaggcaaaaacagggtgctacagataaactttctggtggagcaaggatacactacatttttcagtcaatatttgtcaagagtctggaggaaattgacccttgcaagagtactagtgatgaagatatccgcacgaccatccagaattctgggggtccaaaaggggctatgtttctgctcgaggtaccatttgagattcttgtgcggaacagataggtcg

SEQ ID NO: 65275 - DNA, 315 bp, Zea mays
ccgcgtctcctctccagcgcccgccgtcgccgccgccctcctcttggtcccgccgtccgtcgaggtcatcatggtgagggtcagtgtgctcaacgatgcgctcaagtccatgtacaatgcagagaagagggcaagaggcaggtcatgatcaggccgtcgtccaaggtgatcatcaagttcctgacggtcatgcagcgtcatggatacattggcgagttcgagtacgtggatgaccacagagtcgggaagatgtggtggaatgaacggcatctaaacaatgcggtgtaattagccccggtttgatgttggggtaaa

SEQ ID NO: 65276 - DNA, 334 bp, Zea mays
gtggtctctcgggaaagtattgaatacacctgaggtttcacgtgtttatattggatcattcaatgacaaaccagtaaatgaatcagctgttggtccacttggaaaggaactatttgagagagagcaagatatcttctttctgatctcaaagatatccccaagaaagcctgtgaccgccggatcaatgaatttgttaaacgtgctagagctgccaagatccatgcttatataataggtcatctaaagaaggagatgcctacaatgatgggcaaagcaaaagcgcaacaacgactcatagacaatctgcctgatgagtttgcaaaggtgcaacggg

SEQ ID NO: 65277 - DNA, 329 bp, Zea mays
ttcgagttctggacagcctattgcggagaactcgtttactggcatgggagttggagcgggaatgaaagggctgaggcccgtcgttgaaggcatgaacatgggattcctgctccttgcttacaaccagactcaaataactgtggcatgcttcattacacttccggcggccagttcaaaatcccacttgtgatccgtggccccggtggtgtgggtcgtcagcttggagcagagcactcgcagcgcctggaatcgtatttcgagtccatcccaggcctgcagatggtcgcctgctcgactccttacaacgctaagggcctgatgaaagctgc

SEQ ID NO: 65278 - DNA, 137 bp, Zea mays
ggtgtggtcactgcaagcatcttgctccgatttatgagaagctggcttcagttttcaagcaggacgacggtgttgtgatctgcaatattgatgctgacaagcacactgacttggctgaaaaatatggtgttctggtt

SEQ ID NO: 65279 - DNA, 169 bp, Zea mays
ggcgaggcaaaagcgcaaacgcgaccacagacagagcgcgcttcaaggccttttttttttgagataacaaggaggagaggaggagatggcggtcacgatcacctgggtgaaggcgaggcagatcttcgaagccgcggcaaccccaccgtcgaggtggacgtgggcctca

SEQ ID NO: 65280 - DNA, 169 bp, Zea mays
gtcgcacatatctactatactatactctaggaagcaaggacaccaccgccatggcagccaagatgcttgcattgttcgctctcctagctctttgtgcaagcgccactagtgcgacccatattccagggacttgccaccagtcatgccattgggtaccatgaacccatgc

SEQ ID NO: 65281 - DNA, 98 bp, Zea mays
atttcttctctctctgctcctccgcatccgcctccgcctgatccatccaagacagggatcgccatgtcggactcggaggagcaccacttcgaatcgaa

SEQ ID NO: 65282 - DNA, 292 bp, Zea mays
cgccgtgatcgacgagctggagaagaacctgcagctgagccccgcgcacgtggaggcgtcccggatgacgctccaccggttcggcaacacctccagcagctccatctggtacgttctcgcctacatggaggctaagggccgcgtccgctgcggccaccgcgtctggcagatcgccttgatgagcgggttcaagtgcaacagcgccgtgtggcacgccctgcgcaacgtcaagccgtcgcccgacagcacctaggaggactgcattgaccgctacccggtggagctcgtcgac

SEQ ID NO: 65283 - DNA, 270 bp, Zea mays
aaggatctgaagcgtgggtatgtggcctccaactccaaggatgaccctgccaaggaggctgctagcttcacctcccaggtcatgatcatgaaccaccctggccagattggcaatggctatgcgcagtctggactgccacacctcacacattgctgtcaagtttgctgagctcgttaccaagattgataggcgatccggcaaggagctggagaaggagccgaaatttctcaagaacggtgatgctggtatggcgaagatggttcccactaa

SEQ ID NO: 65284 - DNA, 252 bp, Zea mays
gggtagcacacctctgtgcaaagcacattggtggcgggaagcggtgcatgtttgaaggaggtggtgtctgtgcaacaagtgtgcacggggctactgaatattgcgtggcgcatggaggaggaaaggctgttccgtgcccggctgcaccaagagtgctcgtatgcgcactgactgctgtgtgaagcacggtggcggcaagcggtgcaaggttgagaactgtggcaagagcgcccaggggagcacggacttctg

SEQ ID NO: 65285 - DNA, 150 bp, Zea mays
tcggcacgcaggctagcagcacagcagcagccagagccatcccctctcctcgctacgcttcgcttcctcggcgccgattcctcctcctcctcctccaccctcgtccgtccccttccggcgcacgagctcgcccgagatggcgaacgcgag

SEQ ID NO: 65286 - DNA, 375 bp, Zea mays
ctacctcaaggagaagtatgggaatccaacgatctacataacggagaacggaatggaccagcctggaaacttgacccgagaccagtacctgcgcgacgccacgagggtgcggttctacaggagctacatcggccagctgaagaaggccatagaccagggagcgaacgtggctggctacttctcctggtctctcctcgacaattcgagtggctggcagggtactcgtccaagttcggcatcgtctacgtggacttcaacacgctcgaacgccacccgaaggcgtcggcctactggttcagggacatgcttcagaagcattgagatctccagagccgagcctgagcacggaaggtaccattttgttcagcttcgcct

SEQ ID NO: 65287 - DNA, 148 bp, Zea mays
  unsure (1)..(148): unsure at all n locations
nctcgcctcctctccctagtctccacgacgcaagggagagtgacggaaagctacgcggcgcgagcgattgagggccaaggcgaagaggggaagcaccgcaccaggacccttgttcgccgccgccgcctctgatcctcgcgaggttgtc

SEQ ID NO: 65288 - DNA, 146 bp, Zea mays
tgggaatgcaacaccagtgtggtataacatggtgaaacaaggtctcatcagcgaccctgttttctctttctggtttaaccgacatgctgatgaaggagaaggtggtgaaattgtgtttggtggaatggattctagccactacaagg

SEQ ID NO: 65289 - DNA, 374 bp, Zea mays
atcgcagtcagtgaaccaagctgctgttggcagcttgccgccatctttggaacactactattgtacggccaaggcgcagacaaggttgacacattacggaggtgcaaccatgctctggaagcacagacagtgattgcatttatgaacaacaccaagccactgaaggatgttgtgtttaagttggaggcccgtggtatcaagccactgagctacatggagaccttggaaagcttgcaaggtcgacagttttgaaaaagttcaaggatggtgaattcagagttctcgttacgaatgagctgtctgccagaggactggacgtgccagaatgtgaccttgtggttaatctggaccttccaactgactccacacattat

SEQ ID NO: 65290 - DNA, 360 bp, Zea mays
tgggaatgcaacaccagtgtggtataacatggtgaaacaaggtctcatcagcgaccctgttttctctttctggtttaaccgacatgctgatgaaggagaaggtggtgaaattgtgtttggtggaatggattctagccactacaagggcgatcacacgtttgtcccagtcactcggaagggatactggcagttcaacatggtgatgtcctggttgatggaaagtccactgggttttgtgccggtggctgtgcagccatcgcagattctggaacttccttgcttgctggccccacagccataattactgaaatcaatgataagattggtgctgctggtgtagtcagccaggagtgcaagact

SEQ ID NO: 65291 - DNA, 364 bp, Zea mays
  unsure (1)..(364): unsure at all n locations
cgnctcgcctcacctcacctcacctcgccgactagggttttgtaccgccgtggatctcgccgtccccgccatggacgtctcgcacgcgggatcctccgtcgccggcgaggctccgacgaccggggagcaccggatggggactaccatcgtcggggtctgctacgagggcggcgtcgtcctgggcgccgattccaggaccgcactggaatgtatgtagccaaccgtgcttcagacaagattactcaactgacagacaatgtgtatgtctgtcgctctggatctgctgctgatacacaagtcatttcggattatgtacgctatttcctccaccaacacacaatccagcttggacaaccagctaccg

SEQ ID NO: 65292 - DNA, 144 bp, Zea mays
gggttctgaccacctgaggcaagtttttggcaagcagatgggcttgagcgatcaggacattgttgccctctctggtggccacaccttgggaaggtgccacaaagagcggtctggtttcgagggggcctggactacaaacccttt

SEQ ID NO: 65293 - DNA, 364 bp, Zea mays
  unsure (1)..(364): unsure at all n locations
cgccaccacagccgccagcagtccatcaccggttccgttcgaatgggccgcaagggacgcaaggctagggtttctgccgacgccgacgtcgacggcagcgaggatgagatggccgccgctcctgccgccgctgcgggcaggagcctctacgagatcttgggagttgagaagactgcttcacaacaagatataaagaagcatatcacaaattggctctgcacctccatccagataagaatcctggggatgaggaagccanagagaagtttcagcagctgcagaaggttatatccattcttggagatgcagagacaagagctttatatgatgagactggcattactgatgatgatgcactggtggg

SEQ ID NO: 65294 - DNA, 367 bp, Zea mays
gtggagaaggcggcccggttcaccgacatgcagtcgctcgtattcctggtgatagcaaacgggatggcagcgtgctacagcctgctgcagggcgggaggtgcctggtgagcatcctcacaggtggtggcgtactaatcaacaggcccatggcatgggccatcttctcctgcgatcaggtgatggcgtacttcacgatccggcggtggccgtggcgatggaggcggcgatgatcggcaagtacgggtcgcaggagttccagtggatgaagacgtgccacctctacaagcgtctctgcgcgcacgcgggtggcgccgtagcctacgcggtggcggccaacctgaacatggtcggcgtctcgctcgtctc

SEQ ID NO: 65295 - DNA, 362 bp, Zea mays
  unsure (1)..(362): unsure at all n locations
ctcgatctcaccgacaccgaggaagaagagatcaatggcgtccgagcagggagtcgtgatcgcgtgccacagcaaggctgagtttgacgcccacatgaccaaggcccaggaagccggcaagctggtggtcatcgacttcactgccgcctggtgcggtccatgccgcgccatcgccccactgttcgtcgaacacgccagaagttcactcaggtcgtcttcctgaaggtggacgtggacgaagtgaaggaagtcaccgcggcctacgaggtcgaggcgatgccgaccttccacttcgtcaagaacggctagacggtcgcgaccatcgtgggtgccangtaggacgagctcctggccctgatcga

SEQ ID NO: 65296 - DNA, 363 bp, Zea mays
ggcggtctcatctactgcatggagcatcttgaagacagactggatgattggtttgatgaacagctagagaactacttagatgatgattatcttgtgtttgattgccctggccagattgaactcttcacacatgttccagttctgcggaactttgtcgagcacctgaaacgaaaaaatttcaacgtttgcgctgttaccttcttgattcacagtttgtcagcgatgtaacaaaatacatcagtggttgcatggcttctctatctgctatgattcagcttgaacttcctcatatcaacatcctttcaaagatggatctggtctccaacaaaaaagatgtagaagagtacctggacccgaatgcac

SEQ ID NO: 65297 - DNA, 346 bp, Zea mays
  unsure (1)..(346): unsure at all n locations
accaaatctgcagttctgatgaacttggaatcaaggtctatagcatctgaagatattggaagacaggttcttacttatggggaaaggaagcccatcgagtatttcctgaaaacagttgaggagatcactttgaatgacattttgtcaaccgcaaaggagatgatgtctacaccactcacaatggcatcgtggggcgcgttattcatgttcctagctacgagtctgttagccgcaagtttcactcgaagtgagaggatccagcatgacctgttccaacaactgatgtgaagcctgcaacggccctcagctgggacagttactctcccacagaatanaaaaccatgtg

SEQ ID NO: 65298 - DNA, 139 bp, Zea mays
gttgcttcgtataacctggtctccgaaatctcgaatacccgtagcagctgcggttggatctcagatcggtgctgcggtccctcttttaatttgtttcccctccgcttccgttagcgccgactgatcgtcgagtcagatc

SEQ ID NO: 65299 - DNA, 342 bp, Zea mays
ttctgttcaggcattcgaccgatagagaggttgccttgatggctctcatggcctatctatcgtatatgctggcagagttgctagagctgagtggaattttgaccgtgttcttttgcggcattgtcatgtcccattatgcatggcacaacgtgacagagagctcaaggattacaacaaagcatatatttgcaaattatctttcattgccgagacattcatcttcctttacgtcggtatggatgctcttgacattgataagtggaggacatcataggaaagcttcaagacatccatcggtatctttggcatcctcatattgctcatactactgggacgagtggc

SEQ ID NO: 65300 - DNA, 137 bp, Zea mays
  unsure (1)..(137): unsure at all n locations
cgctanatcaaggctgcctagcgcctgtgaagatcctcattcctaaaggctcantcctctcgccaagtgacaaggctgctgttgttggtggtttcgtgctaacgactcagagagtgaccgatgtaatcctaatggcg

SEQ ID NO: 65301 - DNA, 312 bp, Zea mays
tcactatgccctaagggttttctcctgccaattgctaatgctgtactccacaactgtgtggctaggaaaatggaatctgctggtatcgatgccgctttgatgggtaaaccaaatcgtgagcctcgtgttgttgtacaaactgttagtgaagttgatatcttggacgatgggtatcgttggcgcaaatatgggcagaagtagtgaaaggaaatcccaacccacggagttactacaagtgcacaaatacaggatgcccggtcaggaagcatgttgagagagcatcacatgacccgaagtcggtgatcacaacat

SEQ ID NO: 65302 - DNA, 366 bp, Zea mays
cctggtctccctgtgcttctcgctcgcgctcgcgtggcaaacggacacggaatcgggctcaggcaggccgtaccactacggcgaggagagtttccggcactggacgcgctcccggcagggccggttcagggtgctggaacggttcacccacgagctgctggaggacgccgtcggcaactaccgcgtcgccgagcggaagccgcgccgcgcacgttcctgcagcccagccactacgacgccgacgaggtgatgttcgtgaaggaaggcgagggcgtcatcgtgctgctccgcggcgggaagagggagtcgttctgcgtcagggagggcgacgtcatggtcatccccgcgggcgtcgtcgtgtactcg

SEQ ID NO: 65303 - DNA, 187 bp, Zea mays
  unsure (1)..(187): unsure at all n locations
ntactaattatgactattactccgcgaacgtatctcggaatactgctcgagggcaggcaagtctacctgggggcgtatgacagcgaggaggcagctgctcgagcctatgacctcgcagctctcaagtactggggtcctgagactctgctcaactaccctgtggaggattactccagcgagatgctgg

SEQ ID NO: 65304 - DNA, 336 bp, Zea mays
ggattatgctagagcagatcaggcgggcgactgaggagcaaatccaggaacaacggagacagacagagagacatagggctgatctagagcaggcgaccatttcaaagaaagccatggcagaggcggaggggagaatactagtaacaaggcaaactgaagatgtgaagagacgattgattttggaggagataatgctgacagagagaagtggatccaagtgataaatacaacatttgagcatataggaggtggtttgcgaacgatattaaccgaccaaaataagctagtggtagcagttggatgggtaacagcacttgctgcagggatatacacaac

SEQ ID NO: 65305 - DNA, 357 bp, Zea mays
ttccctccgccgccgtctctgctctcaagatcgccatggcgtcagaaaagaagcagtcgaacccgatgcgggagatcaaggtgcagaagctcgtgctcaatatctccgttggagagagtggagatcgactcacccgcgccgccaaggtgttggagcagttgagtgggcagtctccggttttctccaaggcaggtatactgtgaggtctttcggtattcgtcgtaatgagaagattgcatgctacgttacggtcaggggtgagaaggcaatgcagcttcttgagagtggcctcaaaggtgaggagtatgagcttctgaggaggtacttcagtgatactggctgctttgggtttggtat

SEQ ID NO: 65306 - DNA, 324 bp, Zea mays
  unsure (1)..(324): unsure at all n locations
gcagcattggtgggtgacttcaacaactagggatccaaatgcagatcgtatgttcanaaatgagtttggtgtctgggatatttttctgcctaacaatgcagatggtacatcacctattcctcatggatctcgtgtanaggtgagaatggatactccatcagggatanaggattcaattccagcctggatcaagtctcagtgcaggctccaggagaaataccatatgatgggatttattatgatcctcctgaagaggtaaagtatgtgttcaggcatgcgcaacctaaacgaccanaattcatgcggatatatgatacacatgtc

SEQ ID NO: 65307 - DNA, 304 bp, Zea mays
cggtgcttctcctcctggtctccctgtgcttctcgctcgcgctcgcgtggcaaacggacacggaatcgggctcaggcaggccgtaccactacggcgaggagagtttccggcactggacgcgctcccggcagggccggttcagggtgctggaacggttcacccacgagctgctggaggacgccgtcggcaataccgcgtcgccgagctggaagccgcgccgcgcaacgttcctgcagcccagcaattagaggcgcacgaggtgatgttcgtgaaggaaggcgagggcgtcatcgtgctgctccgc

SEQ ID NO: 65308 - DNA, 362 bp, Zea mays
gccgcagtcccaccgaccccgccgccggtcgccctccatctcctcgccgctgcctctcgtttctcttttcaataatcaagatgagccgtggtggtagtgccggtggtggtcaaagttctctgggttatctctttggaagcggtgagccccccaaaccagcagtggcaccagctgcaagtgctccacctttgagaaaccatctgctgcaaagactgatgcggccaagcaggttgctgctggggttaccagccataccaataactaccacagggctgatggtcagaacactggcaacttccttacggaccgtccttcaaccaaggtccacgctgctcctggcgggtggctcttccctgggctac

SEQ ID NO: 65309 - DNA, 135 bp, Zea mays
acttcactccgagcctcagttcgcatccacgcgcgccgccgccgactcgccggtcgacgctcaccgcgcagcatggcggaacagactgagaaggctttcctcaagcagccaaaggttttcctcagctcaaagaaa

SEQ ID NO: 65310 - DNA, 136 bp, Zea mays
tgagaaagatgtcgtggttcgtgcaccaccaccacaaccagccggctctcccggcgtcgggcctcaaccaggtgttcaagatcttctgccgcgccaacgagaactactgcctggccgtccgcgacggcgccgtcgt

SEQ ID NO: 65311 - DNA, 330 bp, Zea mays
  unsure (1)..(330): unsure at all n locations
gcaacatagaaagtggaatccagtagcaacaatagagcaacaatggcgaccaagatatcttccctccttatgctccttgctctttctacatgtgttgctaacgcgacaattttccctcaatgctcacaagctcctatagcttcccttcttcccccataccttccatcaattatagcttcaatatgtgaaaacccagctcttcaaccatatagggctcaacaagcaatcgcagcaagcaacatacctttatcgacgnntgtgttcaacaatgncagccctatctttgtgcagtcattgtacaaacatcaggcacacagctgagcactcgtg

SEQ ID NO: 65312 - DNA, 315 bp, Zea mays
agcaaatgcaggtaggagcagtaggagggaggcaggtctacaagaatgtgttccatgcgctctactgcataatggagaaggaaggggttggcggcctgtacaaggggatcggaccgagctgcatcaagttgatgcctgcagcaggcatctcgttcatgtgctacgaggcctgtagaaaaatcctggtcgaagacatgaggatagtgagtgaagctgaagcatgtatgctcctgaggaggagtatgactgatgtgccaggtaagaggaggttagggttgggttgggaatatacctagtattatcactgctgaaatg

SEQ ID NO: 65313 - DNA, 237 bp, Zea mays
agcttgatgtcacattggcgttctttggcgatggtacctgtaatacatggccagttctttgagtgtctgaacatggcacagctttggaagcttcctattgtgtttgttgtggagaataacctgtgggcaattggaatgtcacacattagggctacaatcggacccagagatttggaagaaggggccagcatttggaatgcctggggtgcatgttgatggtatggatgtcctgaaggt

SEQ ID NO: 65314 - DNA, 320 bp, Zea mays
gagcattcagaaacacaccaagcgaacacattagcaacaacctatacaacaatggctaccaagatattatccctccttgcgcttcttgcgctttttgcgagcgcaacaaatgcgttcattattccacaatgctcacttgctacaagttccattattacacagttcctcccaccagttacttcaatgggcttggaaccccagctgtgaagcctataggctacacaagcattacggcgacgtcttacaacaccaatgtccagttgcacaacaatcctggcaatctaacagtacaacatcgcacgcacagcacaacaattcta

SEQ ID NO: 65315 - DNA, 328 bp, Zea mays
tccgcttcttgcagccgtcgccgcgaacgctccagagaacttccgtcaacatggggaagacacgtagtatgggagccgggcgcaagctcaagatccatcgcaggaaccagcggtgggctgacaaggcatacaagaagagccatttggggcaatgagtggaagaaacccttcgctggggtcatcccatgccaagggcattgtcctggagaagattggtattgagggcaagcagcccaactccgctatccactagtgtgctcgtgttcagcttgttaagaatggcaagaagattgctgccttcgtgccaaatgacggttgtttgaactac

SEQ ID NO: 65316 - DNA, 129 bp, Zea mays
ctcgttcaacggcacaaattttgttgattgccttgaaaagttcgttaacccccctcagacagaaggtattgtcctcattggtgaaattggaggtacggctgaggaggatgctgcgacattcatccagga

SEQ ID NO: 65317 - DNA, 286 bp, Zea mays
agtctcctcttcgcacgagcgcaacaccatccacccaccagttcgaagcggaggcgaccggcaacctgcggcggagatgtcaggcaggggcaagggcggcaaggggctcgggaagggcggcgcgaacgtcaccggaaggtgctgcgcgacaacatccaggggatcacgaagccggcgatccggaggctggcgatgaggggtgcgtgaacgcatctccgggctgatctacgaggagaccgccgcgtgctcaggatcttctcgagaatgtcatccgcacgctgtgact

SEQ ID NO: 65318 - DNA, 316 bp, Zea mays
aacataccagactatgcttaacaccctcgacggtgtcagagatgagacaggtgcaagccccactgcctgggctgtttggacgagggcatggactgctgaggagaacaggcatggtgatctgctcaacaagtatatgtacctcactgggagggtggatatgaggcagattgagaagacaattcagtatcttattggctctggaatggatcctaggactgagaataatccttatcttggtttcatctacacctccttccaagagcgggcgacctccatctcacacgggatcactgctcgtcacgccaaggactttggc

SEQ ID NO: 65319 - DNA, 330 bp, Zea mays
  unsure (1)..(330): unsure at all n locations
gattgttccaggtattagcagtcgaccggttcctcggagcacgatgaagtttgttgctgcctacctgcttgctgtcctcgctgggaacgccagcccctccgctgacgatttgactgccattctggagtcagttggctgtgaagttgacaatgaaaagatggaactcctgctgtcncaactgagcggtaaggacatcaccgagcttcattgccgcgggcagggagaagtttgcttcagtcccatgtggtggcggcggtgtcgctgttgcggcagctgcacctgctgctggcggactgcttctgcagctgagggcaagatagagagaaggtg

SEQ ID NO: 65320 - DNA, 326 bp, Zea mays
agtccttcagattgaaaatcagcaaagcagtttactggatcttctccagaaatttatggggaagtccgagaacggtatgcattctttggagacaagagtgcatgggctggagatggctttggatgagatctctcgtgatttggccttctcttcgggaaggatgtcaagcagagagcctgatgcaaagacgtgctgcattccgagcccataattctggagaaggcacaatggtggtaggtcttcctcaagggtttctgtctcagacgcagcaaacagctcagatgggagcagaacttcttacaagtgggagaggcagaggtttgggc

SEQ ID NO: 65321 - DNA, 139 bp, Zea mays
cggagagctgagagttggggtaaggaggctcatgaggcaactagataacatgccatcttcggttatctcatgccacatcatgcatcttggagtcctagcaactgcatctcatgccatctccacaggtactctcttttct

SEQ ID NO: 65322 - DNA, 330 bp, Zea mays
cagcaagcaacatagaaagtagaatccattagcaacaatagagcaacaatggcgaccaagatattttccctccttatgctccttgctctttctacatgtgttgctaacgcgacaattttccctcaatgctcacaagctcctatagcttcccttcttcccccataccttccatcaattatagcttcagtatgtgaaaacccagctcttcaaccatataggcgtcaacaagcaatcgcagcaagcaacatacctttatcgcccttgttgtttcaacaatcaccagcgctatctttggtgcagtcattggtacaaaccatcagggcacaacag

SEQ ID NO: 65323 - DNA, 326 bp, Zea mays
  unsure (1)..(326): unsure at all n locations
tgttccncactagcaaccgtccccacaatcctccgacgatgcctgccgcaccgacgctgttgctcccctgcgacgcggaggagccgctgctggcggagtcctccgaccgcttctccatgttcccgatccgtttcccgcagatctgggagttctacaagaaggcggtggcctccttctggactgcggaggaggtcgacctctctgccgacgcccggcactgggacgaggcgctgtcccccgacgagcggcacttcatctcccacgtgctcgccttcttcgcatgctccgacggcatcgtgctcgagaacctcgctccgcttcatgac

SEQ ID NO: 65324 - DNA, 318 bp, Zea mays
tgagaccaactagcaacatagaaagcacaatagtgtagcaacaatggcagccaaaatattttgcctccttatgctccttggtctttctgcaagtgctgctacggcgaccattttcccgcaatgctcgcaagctcctatagcttcccttcttcgcccgtacctctcaccagcggtgtcttcggtatgtgaaaacccaattcttcaactctacaggatccaaaggcaatcacagctggcatcttacctttatcacccttgttcctcctacaatcatcagcgctatacatcagttactttggtgcatttatggcacaaaca

SEQ ID NO: 65325 - DNA, 326 bp, Zea mays
  unsure (1)..(326): unsure at all n locations
tanaataacctttccagttccaccgggactagctgaaaggagagggaacggagggggatggcgtcgccggacgacgagataagccggctcttccgcatccgccgcacggtgtatgagatgctgcgcgaccgcggatacggtgtccgcgacgaacaaatcaagctcgaaaggcacaagttcatcgaacgctacggcaaccccgtccgccgtgacgagctcaccttcaacgccacaaagttgaacggcccatcggaccagatctacgtgttctttcctaatgaggcaaagcccggggtgaagacaatcaggactacgtcgagaagatg

SEQ ID NO: 65326 - DNA, 301 bp, Zea mays
atgatcttcagggcgacgaggatcaagcttacaggaaaatcaagctctgtgctgaagatgtgcagggcaggaatgtgctcacaaacttagggggtatgaatttttccactgataaactgagatccctagtgaagaagtggcagacattaatcgaagcccatgttgatgtcaagactaccgacaactacatgttgcgttgttctgcatcggctcacgatgaggcgccaaaccaggcagagaacctgtaagtcaggatccagatcgtcagaccgcgaaagatggtgagatatgacaacaggct

SEQ ID NO: 65327 - DNA, 273 bp, Zea mays
aagcaagataactagaaaaggctcctcccgaccgcaacgcccctcatctccctcgaccccgacatccccgactcgatggcgctcaaggcggagaagaagccagcggagatagaagcggcggccgaggagaaggcggagaagacgaccgcagggtagaagcccaaggccgagaagcggctgcccgcgtccaagtcctccgggaaggagtgcggcgagaagaagtggaagaagaaggccaagaagagcgtggagacctacaagatctacatcttc

SEQ ID NO: 65328 - DNA, 319 bp, Zea mays
  unsure (1)..(319): unsure at all n locations
cttcgaggtactcccatcgctatcgaccgggtcctcgagcgcaggagatggcggatcaggagaccccagttgcagttgaggcccctaccccggtccttggggagccgatggacttgatgactgctctgcagcttgtcatgaagaagtcgggtgctcatgatggccttgttaagggtcttcgtgaggctgccaaagcaattgagaagcatgctgccaacttcgtggttcttgcggatgactgtgaccagccggattatgtcaagctggtgaaggctcttggctcttagcacaacgtcacctggtnactgtgcctagcgct

SEQ ID NO: 65329 - DNA, 324 bp, Zea mays
  unsure (1)..(324): unsure at all n locations
gcaggttttggtgctgatattggaactgagaagttcatggacatcaaatgtaggtatagtggattggtgccgcagtgtgctattatcgtggccacaattagagctcttaaaatgcatggagggggngctgaagtggtggctggaaagcctctggatcatgcatatgtgagcgataatgtggcccttgttgaagctggatgtattaatcttgctaaacatatatcaaacacgaggagttatggagttaatgttgtagttgcaatcaacaaatttgcatcagatactgaggcagaaatgaaggcagtgcacagtgcagctatggct

SEQ ID NO: 65330 - DNA, 185 bp, Zea mays
  unsure (1)..(185): unsure at all n locations
gcgtgtgatngagaggttcgagaaagaggccgcggagatgaacaatcggtcattcaagtatgcctgggtgcttgacaagctcaaggccgagcgtgagagaggtantacaattgatattgcttagtggaagttcgagaccaccaagtactactgcactgtcattgatgcccctggacaccgtgact

SEQ ID NO: 65331 - DNA, 296 bp, Zea mays
aaatgatgaaagcagctgtgaagtggcggcttgcattcaaacctgaaaacatctgttgggatgatactgcatagtaagcagagactggtaagatatatagagcggattataaggacaaacatggcagaactgtttctgtattgaggcctggcttagagaacactacctcagcaataggacatatcaaatatctagtctactctctggagaaagcatatatgaacctgacggaagatcaagagaagatggtatggctgacagatttccagtgctggacaatgggaagcacaccactg

SEQ ID NO: 65332 - DNA, 328 bp, Zea mays
  unsure (1)..(328): unsure at all n locations
tggtgacattgtaactgcttccaatgggaagacaattgaggtaaataacactgacgcagaaggaaggctaacacttgctgatgctttggtctatgcttgcaaccaaggtgttgaaaagattattgatttggcaacgctgaccggcgcttgcgttgtcgcactcgggcctagcattgccgggatnttcacgccgagcgacgagcttgccaaggaggttgccgctgcttccgaggtatccggcgagaagttctggagactgccgctggaagagagctactgggagtctatgaagtctggcgtggctgatatggtcaacactggcggcagg

SEQ ID NO: 65333 - DNA, 152 bp, Zea mays
ccagggtgcagcaactgctccaggacttcttcaacggcaaggagctgtgcaagaacatcaaccccgatgagactgtcgcctatggtgctgctgtccaggctgccatcctgagcggtgagggcaatgagaaggtgcaggacctgcttctgctg

SEQ ID NO: 65334 - DNA, 324 bp, Zea mays
cggcgctggaggaggctggctccgactacgagatcgtgcccatcaacttcgccaccgccgagcacaagagccccgagcacctcgtccgcaacccgtttggtcaggttccagctctgcaggatggtgacttgtacctcttcgaatcacgagcaatctgcaagtacgctgctcgcacaaacaagccagagctgttgagggaaggaaacctcgaggaggcagcaatggtggatgtttggatcgaggtggaggctaaccagtacaccgctgcactgaatcgcatcctcttccaggtcctcatcagtgctatgcttgggggaacaccga

SEQ ID NO: 65335 - DNA, 171 bp, Zea mays
atatgcgccgttcaagagtctccttcccatagtgacaccagacgacattgtgttcggagggtgcgacattagcaacatgaacctggccgacctcatgatcagggccaaggtgctggatattgacctgcagaagcagctcaggccctacatggagtccatggtgccacttcc

SEQ ID NO: 65336 - DNA, 282 bp, Zea mays
tgcacaacggagatggcggcgatggcgtggtacgccaaggagttcgagaagcgtggcgtgaagctgctgggcatctcgtgcgacgacgtggagtcgcacaggcagtggaccaaggacgtggaggcgtacggcgggaagcagcagcagcagcaggcgacgacgacgaaggtgaggttcccgatcctggcggacccggcgcgggacgccatccggcagctgaacatagtggaccccgactagaaggatgcggcgtcgcggagcatgccgtcccgcgcgctccac

SEQ ID NO: 65337 - DNA, 240 bp, Zea mays
gtcttgacaagaaggccaccagctccggcgagaagaacgtgctcatcttcgaccttggtggtggcacgtctgatgtgtcgctcctcaccatcgaggagggcatcttcgaggtgaaggccactgcgggcgacactcaccttggcggcgatgacttcgacaatcgcatggtgaaccacttccgtctaggagttcaagcgcaagaattatgacggacataagcggcaaaccaccgtgcactgc

SEQ ID NO: 65338 - DNA, 267 bp, Zea mays
tcttaatctacaagtatggagatgaaaggaccaaagcccgtgcaatgctgtgtgacatatatcaccatgcgatctctgatgagttttcagtggctcgcgacttgcttttaatgagtcatttgcaagatggtattcagctcatggacatatcatcgcagattctattcaatagagtcatggcgcagttagggctgtgtgctttcagggctggttcgatacatgaagcccatggctgcttgactgagctctattctactgggagggtga

SEQ ID NO: 65339 - DNA, 288 bp, Zea mays
actgcatttggcctcatgaaaattgatgaagaagggaggatcattgagtttgctgataaaccgaaaggagagcagttgacatcaatgatggttgacaccaccatacttggccttgatgacgtgagggcaaaggtaatgccttatactgctagcatgggtatctatgttgtcagcaaagatgtaatgcttcagctcctccgtgaacaatttcctgaagccaatgactttggaattgaggttattcatgtgcaacagcattggatagagggttcaggctatctgtatgat

SEQ ID NO: 65340 - DNA, 320 bp, Zea mays
gagagatagtggtcttggttccgtggagggagatggcgaaggcgatgtcaaggtttatgggtgggttgcccgagctgaggactacgatgcaacgactgtggtaggaagattcttgagaaagcacactgtcctgcaaacaatagacgaggtttccaagactgaattagagaaatcaggggagatggtggcgatactggcatcccagatcgaggaaaagaaccgatacttgcaggatttggagacaaagaagaatgcgacagaactctccatctcaaggcttgaggaggacaacaggaaacttcatgaggcatacaatgaag

SEQ ID NO: 65341 - DNA, 301 bp, Zea mays
gaccgccgcgccacgctagcaactgaagtttcgtcctcgcggccttctctccgtccactcgaaccgcgccgacgagcgacgacaaccgttgctgcattcttcaatggcgactgtgccagttaacgcaaaacctgtcctgaaacaacctgacggggaagcctgtaattgtcaaactcaagtggggtatggagtacaaaggttatcttgtttcggtggactcctatatgaatctccagtttgccaacactgaggagtacattgatgggcaatctctggaaactgggagagatctgataggtgc

SEQ ID NO: 65342 - DNA, 145 bp, Zea mays
ttcggctcgagcgcgcgcctcaccgaggtgcgcaagaacggcacctgcgcctggctgaggccgacggcaagacccaggtgacggtggagtactcgaacgagggcggacgcatggtgcccgtccgcgtgcacaccgtgctcatctc

SEQ ID NO: 65343 - DNA, 353 bp, Zea mays
tcggctcgagattggtatctgctaaccggaactggcagatcgtttataccgacaacgagggtgatatgatgcttgtcggagatgacccgtgggaggagttctgcaacatagtgcgcaagatctacatctacacgaaggaggaggtccagaagatgaactcgaaatcatccgtgccgaggaaggaggaacccccagcagcaggcgaaggctgcgccgccgccgccgcaaacgagtaggatgtctgcctgcactgcagcaagcagttttagatgactaggtcgtgtggaggaagccgacgatgatgcatgcgtgatgaacccgttccttgtgcaggaggtggtgccagcccgggt

SEQ ID NO: 65344 - DNA, 348 bp, Zea mays
ttcggctcgagatcgtaactggggacgacatgcagactcagtgtgtcattgacaatcaagcatacctaagactttgaacctcactgacaccaaccacaagaaaagcatcatgaaagaagcatgctggacaatctcaaacatcacagctggtaacagggaacagattcaggccgtgattaatgcaaacataattgcacctctggtgcaacttctgcaaactgctgaatttgacatcaagaaagaagcagcctgggcaatttcaaatgccacttctggtggcacacatgatcagatcaagtaccttgttgcccagggatgcattaagccactctgtgatctgcttgtttg

SEQ ID NO: 65345 - DNA, 314 bp, Zea mays
  unsure (1)..(314): unsure at all n locations
gcacttgtcncttccaccagtaaagctccattgcagcatgcttgccgaggatgcgattaaagctgctgtaaaagactacgaagccaagaagtcgaagatggggcagaagggtgaagacagcccttcagagaaggctgctgaagcatgaaaggttctgccgtgaagtatattgtgctgatacgtttctcagtccatgactatccgccgcatattgccanagataaatgattctgtttgtgaggcgagggattgtgtgtaatgttcacgaatgtggtagtgcggcagtggctcactgttttaaggtcgtgacgact

SEQ ID NO: 65346 - DNA, 232 bp, Zea mays
acgcttccactgctgcacgaaggtggctgtctgcgttgtgtgctggcaatgcagatttgaaattcctaagctaagcacgttttgtattggcagtagaactccttgttgcctcgttaggcctggacccgctgtataatgctatgttgtgttggatcgctgacgatggttactgctgtgttgctagcaatgtggtacttgatctgtatcacggttgcaaataagtgctgtttct

SEQ ID NO: 65347 - DNA, 335 bp, Zea mays
aggaatcgatctaaagtattctggtgatttccctgtataaatacacggaaggcaaagcgcccaacatattttccaatcgagctatgctcgctctgttccgcttcacagatacaccaaagctttgtctacgctacaaaggtcatcccttgtggagaagtctagacagaagcctgaagaaaggatgaccgttctaaatgatgcactgcaacgcagtaactacgattctgcacccatgttgagggcatgtggtgcttcagttgctccgaaatttgaccaagttgaaggaaggatcttcaagcccatagctgaaaccggcaaggtgatgatatctttca

SEQ ID NO: 65348 - DNA, 247 bp, Zea mays
agcggtcctcgcgaaccctagagccgcagcagcacactcccgcagtagcagcagccgccgccgccgccgcccagccgcacgaaacaggaggaagatgccggcggggcacgggcttcggtcgcggacccgcgacctgttcgcgcggcacttccgcaagaagggttacatcccgctcaccacgtacctgcgcacctacaagatcggcgactacgtcgacgtcaaggtgaacggcgcgtgcacaaggcat

SEQ ID NO: 65349 - DNA, 331 bp, Zea mays
catctacctcaacgtcgacgccttccacggcgacaaggaccacggcggcgtgcgcgacggcaccaagatcgtcgtctggaactggtgcgagggcgacaaccagcgctggaagatcgtcccctggtaaatgtgctgttctgtggctcgactggtcatcaccatgatctggagctttgaaggcatagccacctgtggtcagcagctgctgccgtgttgctagaatcaagttggtggcgatcgatcgatcgatctttggtgatgggtgtacctccctgtgtgtgtgtgcttagcctcagtcgtctgtgacgaagtcagttatgtttcagtgaga

SEQ ID NO: 65350 - DNA, 315 bp, Zea mays
  unsure (1)..(315): unsure at all n locations
ggcccgtggtgcctcgtcgtgggctcgaagatccgggccagggtcgngcccgagctgcagctcaaggccttccccgcgcagccgggtggatttcgtcgccgacggcgtatgcggccctcaagttcctccactccgacggcttcggcgacttctgcgcgaacaccacagctgtatgtttgagaacagctacggcgtcgccgccacggacgagggccgcgccaaagtattcgggaaggacttcgcggcgtgggcgcgcccggacgacggcgacgagtcgatattggaggacgcgacgacggcttctccccgggcaca

SEQ ID NO: 65351 - DNA, 328 bp, Zea mays
tgccgagacaaagcccgcggagcagaatccgacggatgagactgtcgagaagaagcgcaaggccgctaatcgagtaccacgaatggattgcaggaagaactacgtggatgcacactgcaaatacagcgtcactacgtacgagatctacatcatcaacagtgtcatgcacgtgcacgcggacatcggtatatcgtccaacgacatgtccatcatgaactccttcatcaacgacatctacgagaagctggctgtcgaggccgacatactcgcccgctacaacaagatgctcaccataacctcccgggagatccagacttcggtgcgcctc

SEQ ID NO: 65352 - DNA, 298 bp, Zea mays
  unsure (1)..(298): unsure at all n locations
agaataagtagataaggacagtgagagagctgtgacaaaaaaggaggggattgaatttgctagggaatacggttgttctgttctagaatgcagtgcgaaaacaanagtaaatgtagaacagtgctttgaggaacttgtggctanagatattagacacngccaagctcctcgctgatgcttcgtctggggccaagaagaacatcttcaagcagaagcctccggaagccgatgccgctgcaagcagctgctgttaacatgctcttgcatgctaatccgcgtcctccgtgatgatgacgat

SEQ ID NO: 65353 - DNA, 318 bp, Zea mays
atctggtcaatgtggaccgtgcatgcatctgctgacgaacatacaagatggcaggtcccgactagacatgctgctatctaaagtgcacaattccaatcgtcccacactctctcctggatttgcgaagttgcacacacgcaagtttggtacacctttgagaaagtcgaccatgacaagtgatcaatataagaatgctgctctgcacgctaaggaacatattatggctggggatatcttccagattgtcttaagccagaggttcgagagacgaacatatgccaacccatttgaggtttatcgagcattacggattgtgaa

SEQ ID NO: 65354 - DNA, 328 bp, Zea mays
caggaggtggtccagcagcttcataaggttcttcgcccatttcttcttaggaggctcaagtctgatgtagaaaagggtctactccgaagaaggaacacatacttaaagttggaatgtctcagatgcaaaagcagtactatcgcgctctgcttcagaaggatttggaggttattaatgccggtggtgaacgcaagcgcatacttaacattgccatgcagctgcgcaagtgctgcaaccatccatatttgttccaaggagctgaaccctggccaccctacacaactggtgaacatctagttgagaatgcaggaaaaatggtctactagat

SEQ ID NO: 65355 - DNA, 281 bp, Zea mays
agtgtgtgcaaagctcgagctatggtgaagaagattcctctttaccagcacatcgcaaatcttgctggcgaacaaaactctggtgctccctgtacctgcctttaatgtgattaatggagggtcacatgctggaaacaagcttgccatgcaggagttcatgatcctcccaactggtgcctcctcgttcaaggaggccatgaagatgggagttgaggtgtaccacaacctgaagagcataatcaagaagaagtacggtcaggatgcgacaaacgtccgggatg

SEQ ID NO: 65356 - DNA, 296 bp, Zea mays
  unsure (1)..(296): unsure at all n locations
tagggtttttgattttatgcgccgccgctgctcatctcacatccctcgagaagacgcctgctactcgccgatcgatacgatggccgtcttctccgacctccacaccgccgacggcctcaagtccctcgaggctcanctcgccggcaaaacctatgtgtctggtgactccattactaaggatgacattaaggtcttcgccgcggtgacgtcgaagcttggcgctgagtttcctaatgccgcacgctggtacgagaccgtctctgcggctgtagcctcaagattccctggtaaggctg

SEQ ID NO: 65357 - DNA, 337 bp, Zea mays
gtggaatttgctttgaggtatgtgatgtcgttcttcatgctgatgctatccacaggggtggtggtcaggtcattcgcactgccaggagggtcatctatgcctctcagctcacggccaagccaaggctgctggagccagtctacctggtggagatccaggccccagaaaatgcacttggtggtatctacggtgttctgaaccagaagagaggtcatgtctttgaggagatgcagaggccgggtaacccgctctacaacatcaaggctttcctccctgtcatcgagtcctttggtttctccagccaactgagggccgcaacctctggtcaggcgttccc

SEQ ID NO: 65358 - DNA, 337 bp, Zea mays
  unsure (1)..(337): unsure at all n locations
ggcgaacgctcagcagccgaagttgtttgttggcatgatctcatccttatttttgctgaagcacttgccctctatggtctcatcgtcggcattatcctctcgtctcgtgccggccagtcncgcgcagattagaggcacgtttcagatgtcaacaccgtgccgccgacagttgcctggtcgtagctgggtcatgttctatatccatgagacaagaagctggagcactttgactctttgagaggcttacttttatgctgtctagttttccatcttctgttgagtcgagaatacaagacaggctgtgtagccaagggatgacttttacccttgtgccatt

SEQ ID NO: 65359 - DNA, 301 bp, Zea mays
ctaagactgtagatgtggaagagctcactgttgaggagcgaacctcttgtcggtcgcatacaagaatgtgattggggctcgccgtgcttcatggcgcattgtctcttctattgaacagaaggaggagtcccgtaagaacgaagagcatgtgaaccttatcaaggaataccgtgcgaagatcgaggctgaactgagcaatatctgtgatggcatcctgaagctgcttgactcccacctagtgccttcttctactgctgctgaatcaaaggtcttctaccctcaagatgagggtgactatcac

SEQ ID NO: 65360 - DNA, 230 bp, Zea mays
gtctttaatctccttccaaatctgaacgtaaatgagctaattaaagcctttgcagtgaaaacaaacgacatgatgttggtaatatatctgtcttctctgatccggagtgtcattgcgcttcacaatttgatcaacaataagatgctaaacaaggagcatgagaaggctgaggattcgaaaccagccgccattccaactgctgccggtggagggggagctaaagtgagctt

SEQ ID NO: 65361 - DNA, 246 bp, Zea mays
gggcaaagagatcaatggtgctggtatcaatgctagctttgctgttcaccaggatgttgatggaagggcaacagatgtagctctagggtggtcagtagctttaggttctcctttcacatttgctactactctagagcaggagtaccggagtgacatttttggcgagcgaggtattttgcttggtgctgtccatggcatggtggaggctcttttcaggagatacacagaacaaggacatgacgagga

SEQ ID NO: 65362 - DNA, 254 bp, Zea mays
  unsure (1)..(254): unsure at all n locations
gtgagatggctctgcaggctcactccaaggcgaacatnggggccaaatgagttgcaggtccaactgagtccatgaaggagaagcatggtggccaagtgagtcgaaggtccattcgagtccatgaaggtgaagcatgggagatccaagcgagtctggaaagattgtcgatgttagtaggctgtccttattttgtttagagacttgtggctatgtgattgatgtagcgaaacaaggctgtgatgtgtaactctgcc

SEQ ID NO: 65363 - DNA, 300 bp, Zea mays
  unsure (1)..(300): unsure at all n locations
cttgcctccgatccccaattcctccttcggatctcgcattagccgagcaggtgtgaaggaagggggacgcggaggaagatggggctcgcgttcgggaagctcttcagccggcttcgccaagaaggagatgcggatcctcatggtcggcctcgacgccgccggtaaaaccaccatcctctacaagctcaagctcggcgagatcgtcaccaccatccccaccatcggtttcaatgttgaaactgttgagtacaagaacattagcttcactgtctgggatgcggggngtcaggacaagataga

SEQ ID NO: 65364 - DNA, 316 bp, Zea mays
  unsure (1)..(316): unsure at all n locations
tgcaattctagaactggcttccttggaaagacacacgggactcgtcctcgtcttttctctgctggaagagttggatttgtcagaacactagtggagtgcaaggaatctagaattgganagcagcccattgaagtcccaccgaatgttactctcacattagaagagcagtttgtcaaagctaagggcccactaggggaattatctctcagcttcccaggtgatgtgaagattgtgaaagaagaatccggtaacctgagagtttataagactgcagagaccaagcgggcgaacagatgcacggtcttntcagaacatt

SEQ ID NO: 65365 - DNA, 180 bp, Zea mays
aaagaaagttaagaaaattactgttccggtccatgagttggtctatggggccttggctgcggctgacctgcagaaggctgtagagaaagagtatgagatggctcttcaagacagagtaatggaagaaacaaaggagaagaagaatgctgttgaagcttatgtgtatgacatgcgtaacaa

SEQ ID NO: 65366 - DNA, 210 bp, Zea mays
  unsure (1)..(210): unsure at all n locations
gtcagcctagcaattagctcatcgactccagattggagaactcgacaccatgaaggtgctgatcgttgcccttgctctcctggcgctcgctgcgagcgccgcctccagtacaagcggcggctgtggctgccagacaccaccgtttcatctaccgcctccgttctatatgccgcctccgttctantctccgccgcagcagcagccgcagcc

SEQ ID NO: 65367 - DNA, 293 bp, Zea mays
  unsure (1)..(293): unsure at all n locations
cagaagcaaaaaagatgctagaagatttgaataaggcagggaaaaaacatgtcgttgttgaaggggagcttactaaggaggccatcatggaattggcacggaatgaacagttaaaggagcgccacgaaatggagaaaaaactgcagaagtttgcaaaaacaatggattatctggaaagggcaaaaaggcaggaagaggcaccacataattagcaagcctttcaaaaacgactataggaagagaagagcctgcatgagcaagagcagctgctggagangtacgcatcaagcaac

SEQ ID NO: 65368 - DNA, 289 bp, Zea mays
  unsure (1)..(289): unsure at all n locations
cagatatcatgtgggatccaactgggagatatctcgcgactgcagttacctcagttcatgaaatggagaatggctttcaaatatggtccttcagtggcaagcatctttacaaggtgtcaaaggatcatttctatcagtttatatggcgcccgagaccgccctcactactgacggccgagaaggaagaagagagtctaaggaaccctaagaagctctgcaagaagntcgaacaagaagaccaggcagtcatcaanctgngttgcgagcaggaccgcaaaggcggacacag

SEQ ID NO: 65369 - DNA, 204 bp, Zea mays
  unsure (1)..(204): unsure at all n locations
tcttgttttcaatgatgacatccagggcacagcatcagtggtccttgcaggtttgttagcagcactcaaggtggttggtgggaccttggcagagcacacttatttattccttggtgctggggaggctggaactggtattgcagaactcattgctcttgagatttcaaaacagacgtcggctccaattgaagangtccgcaagaa

SEQ ID NO: 65370 - DNA, 270 bp, Zea mays
gatttctacaaacctgatcttgcaagtgaatatccggttgttgatggtaaattatcccaaacatgctacctgatggctcttgactcatgctacagacagttctgcaacaagtatgagaagattgcgggtaaacaattctcaatttcagatgcagaatattttgtgttccattctccatacaacaagctcgtgcagaagagttttgctcgactttactacaatgacttcatgcgcaactgcagctatgttgatgatgatgctaaagagaag

SEQ ID NO: 65371 - DNA, 207 bp, Zea mays
  unsure (1)..(207): unsure at all n locations
atcacttcggaggaggaaagtccactggtttcggcctcatctacgacaacctcgaggctgccaagaagttcgagccgaaataccgcctcatcaggaatggtcttgctactaaggttgagaagtcccgcaagcaaatgaaggagcggaagaacagggccaagaagatccgtggtgtcaagaagaccanaagctgcgacgccaagaaga

SEQ ID NO: 65372 - DNA, 285 bp, Zea mays
  unsure (1)..(285): unsure at all n locations
cgagtacccaacgcgctactagttctattgccgcaccccagatctccaggagggactcgttctttcagctaactacactgcacgcaatggccaccacggcgaccgaggcggcgccggcgcaggagcagcaggccaacggcaacggcgagcagaagacgcggcactccgaggtcggccacaagagcctgctcaagagcgacgaccatgaccaggacantcttgacacgagcgtgtatccgcgggagccggagagcatgtaggagctcctcgaggcatcgccaagca

SEQ ID NO: 65373 - DNA, 247 bp, Zea mays
  unsure (1)..(247): unsure at all n locations
ccaccctgccgcctcaccgcctctctcaatctgataccgcagatccgtcgtccggtgagtggaagccgcacgaacccatggcctccggcgagcttgcctgcacctacgccgctctcatcctcagcgacgatggcatcgccatcaccgccgagaagatcgccacgatcgtgaaggcggccaacatcaaggtcgagtcctactggccggccctcttcgccaagctcctggagaagcgcaacgntgagga

SEQ ID NO: 65374 - DNA, 296 bp, Zea mays
gttctcctttccccaaaggccaaaaccgaccccgctccacgcctccactcccagccccagcggatcttctcgagcggcggccggcgatggcagcgagcaacatcgggatgatggacggagcctacttcgtcgggcgcaacgagatcctcgcgtggatcaacactacgctgcacctcggcctctccaaggtggaggaggcggcgtcaggcgcggttgcgtgccaactgatggacgcggcgcatcccggcgccgtgccgatgcacaaggtcaactcgacgccaagacggagtacgaca

SEQ ID NO: 65375 - DNA, 301 bp, Zea mays
  unsure (1)..(301): unsure at all n locations
tgaaaagattgctgtccactgcacagttcaangggccaaggcagaagaaatcttggagaagggtctaaaggtgcgggagtatgagttaagaaaaaacaacttcaaagatactggaaactttggttttgggatccaggaacacatcgatctgggtatcaaatatgacccaagcattggtatctacggcctggacttctatgtggtgctgggtaggccaggtttcagcatcgcagacaagaagcgcaggacaggctgcattggggccaaacacagatcagcaaagaggaggccatgcgctggt

SEQ ID NO: 65376 - DNA, 297 bp, Zea mays
caaggatcaggaggctggaggagagggcccagagcagagccaagaaagcaggcacgctgcctttcagctgggtatacggtagggacgtccaactgtgagatcggaaacctgctgcggactgcttagacaagacctgctgtgtctgcgttacatagttctccaggttttgaccagatggtcccgtgtcgtcttatagagcgataggagaacgtgttggtctgtggtgtagctttgttttttatttttatttttctgttttgatgtacaacctgtgccgcatgaactggggcgtggaga

SEQ ID NO: 65377 - DNA, 282 bp, Zea mays
  unsure (1)..(282): unsure at all n locations
gtgctgatcttgctgccctttgtactgaagctgctcttcaatgcattcgtgagaagatggatattatagatcttgaggatgagacaatagatgctgagatactgaactctatggctgtctcaaatgatcatttcaagactgcacttgggacaagcaacccatctgctctgcgtgaaactgttgttgaagtgccaaactttctcttggaagactcttgaggccctgaaaattattagagggagcaataggagacntatcaanatccagaggagcaccagagaa

SEQ ID NO: 65378 - DNA, 252 bp, Zea mays
  unsure (1)..(252): unsure at all n locations
cttctccgttcggccgcccgcccgcccctcccctctctctgtctcgccgcccggggagaaggagggctccgccgctcccggggaagagcgcgccattgccgccgccgcgctgactggggaagatggttgtccaggagttcacagttgatctcaacaagccccttgttttccaggttggccaatcttaggaacggcaccaggaantggntcaccaaccgancgccagcaaggagggnccacgcnntttcggaa

SEQ ID NO: 65379 - DNA, 297 bp, Zea mays
cgccactgacgcccagacgctgtaccagcggttggtgttcaggcacaagctgtatcagctgcgggaggagagggacatgaagcccgagacctttgccagccttgtctctgcgctcctctacgagaagagattcgggccatatttttgccagccagtcattgctggacttggagatgacaacgtaccatttatttgtactatggactgcttaggtgcaaaggagctggccaaggattttgttgtatctgggacagcatcagaatctttgatggtgcttgtgagtccatgtacaagccg

SEQ ID NO: 65380 - DNA, 233 bp, Zea mays
cacaggctcaccccaccaacagcaagcgaaaatctcccgatcccctctagtctccgcggcgaagatgtcggggcgcggcaagggcgggaagggcctgggcaagggcggacgaagcgcaccggaaggtgctccgcgacaacatccaggggatcacgaagccggcgatccggcgagctgcgcgcaggggcggcgataagcgcagcgctgggcgcagctacgaggagacccgcggc

SEQ ID NO: 65381 - DNA, 293 bp, Zea mays
cagatatatattccagaaattaattggattcttatggttctttgtgttgctgtcactattgcatttcgtgatactactcttatacgcaatgcctacggtattgcctgcatgactgttatgtttgttactacattcttgatggcattgataatcatctttgtttggcaaaggaacataatatttgccctagtttttctggttttctttggatccattgaagctgtatatctttcgtcatctctcatgaaggttactcagggaggatggttcctcttgtgcttgctttcatattc

SEQ ID NO: 65382 - DNA, 180 bp, Zea mays
atttcttttgcccgcgcgataggaaatattctagtgggttaaggactaatcgctcatctggagttcgatattggaaagctaccgggaaggacaggccggtggtatataattctaggactgttgggatgaagagaactttagtgtttcatcttggcaagccaccacgaggtgatagaactg

SEQ ID NO: 65383 - DNA, 198 bp, Zea mays
ggcttagtggcagtggcaaaaccactatttactaccagcttcgggatggatcatcacatcaaggaactgttacttcaatggaagaaaacagtgatacttttgtgctgcattcggagcaagaaaggaaagacaaagtaaaacatgtgcatattattgatgttcctggtcatgctaggctcaaacccaaacttgatgaag

SEQ ID NO: 65384 - DNA, 244 bp, Zea mays
atcgaatttactgttcaggagagcaggctgtggatgttgcagtgcaggacagggaaacgtacgggcaaaagcgccgtaaagatcgccgtggacatggttaacgagggccttgttgagcgccgtgcggcgatcaagatggtagagccaggccacctggaccagcttctccatcctcagtttgagaacccatcggcgtacaaggaccaagtcattgccacgggcctaccggcgtcaccttgggccg

SEQ ID NO: 65385 - DNA, 155 bp, Zea mays
gcagattttcgagataacccttaagctgaagacaatcatcctcggggttgaagactcgtatacgattgtaatgtgaaggcgcagatccatgataaggaatgaattcctcctgatcagcggagactgatctttgctggcaagcagctggaagatgg

SEQ ID NO: 65386 - DNA, 77 bp, Zea mays
cttcagcagataatttgtgacttgcttgcattttttggacggatctgttcgtgtattaataattttgcactgacgat

SEQ ID NO: 65387 - DNA, 93 bp, Zea mays
  unsure (1)..(93): unsure at all n locations
tctcgctattctcggatttgganaggtcggatctgaagttgctcgtcgtgctanaggcttaggaatgcatgtgattgcacatgatccatatgc

SEQ ID NO: 65388 - DNA, 221 bp, Zea mays
tctcggtattcagctcgaggaacgtcgtcgacgtcctctcccccatggttttcattggtttgattgttggagccatgcttccgtactggttctctgccatgaccatgaagagtgttggaagcgctgccctgaagatggtggaggaggtccgcaggcagttcaacaccattcctgggttgatggagggaacagccaagcccgactacgcaacctgtgtgaag

SEQ ID NO: 65389 - DNA, 230 bp, Zea mays
taaaatttcttccattcaaccaactgtctacactgaaccctgctgcttatttgcagcaacaactattaccatttagccagctagctactgcctactctcaacaacaacaacttcttccatttaaccaattggccgcactgaaccccgctgcttatttgcagcagcaaatactactaccatttagccagcatagctacagcaagccgtgcttccttctagacacaacaaca

SEQ ID NO: 65390 - DNA, 238 bp, Zea mays
  unsure (1)..(238): unsure at all n locations
ttctcctccgacggcggtgcggctagctcaaccatggcggactccaaggccacctcggcggtcaccctccgcactcgcaagttcatgaccaaccgcctgctggcccgcaaacaatttgtgcttgaggttatccaccccggccgcgccaacgtctccaaggcggagttgaaggagaggcttgccaagatgtacgaggtgaaggacccaacaccantctcggcattaagattcgcaccca

SEQ ID NO: 65391 - DNA, 134 bp, Zea mays
tgaggaaggaaggacaggaggtgcttcaatatgaaggcgctcattcttgtcgggggtttcggaacccgccttcggcctttgactcttagcttcccgaagccccttgtggattttgcaaacaagcccatgattct

SEQ ID NO: 65392 - DNA, 237 bp, Zea mays
agatgccatgctttacattgccagcttctatttggagatcaatcggctgagaatgtcgtatgctactcttgagggggcttgccaggagatgagaagcagcaggctgttccacaaagtccttgaggctgttgtgaatttcggcaatttcatgagcaccaattcggggtctccaagttcaaaaggcttggagccaaacactgttctgaagatagctgatgtgaaaggagctgatgggaa

SEQ ID NO: 65393 - DNA, 129 bp, Zea mays
  unsure (1)..(129): unsure at all n locations
agtaccaatctcncctacaccagaaaaattcccagttctttggtccgcgtcagagaggcggcggcgatgtctgggcgcggcaagggcggcaagggtctgggcaagggcggcgcgaagcactcggaaggt

SEQ ID NO: 65394 - DNA, 252 bp, Zea mays
  unsure (1)..(252): unsure at all n locations
gatggaattgtgggctcagtgttccactatggtgcatttgttcacctgcgatttcctgatggattatatcatcttactggccttgtacatatctcggaggtgtcttgggatcttgtccaagacgtcaaggattttctaaacgaaggggatgctgtcaaggtcatagttgtgaacattgatatgacgaagtcaaggatagctttatctatcagacaacatgaggaagantcnttanttgaaacaattgacaaa

SEQ ID NO: 65395 - DNA, 139 bp, Zea mays
  unsure (1)..(139): unsure at all n locations
caaaacactagncctcgcgccgccgccgccgtgcccagcgctcgagctcctcgcctgccgcgagctcgcgccgcaacgccaccatgaagttcaacatcgcgaacccgtctaccgggtgccagaagaagctggaaatcga

SEQ ID NO: 65396 - DNA, 126 bp, Zea mays
cagcctgaaagacctgtacaagtcctttgtgtctgagtaccctatcgagtcgatcgaagacccatttgatcaggatgactggagcacttatgccaaactcactgatgagattggacagaaagtgca

SEQ ID NO: 65397 - DNA, 125 bp, Zea mays
ccagcgcctccaccctcctcgccgcctcactccctctgaggtcgcagatccgtccggttagacgaagccgcccgcacccatggcctccggtgagctcgcctgcacctacgccgccctcatcctca

SEQ ID NO: 65398 - DNA, 306 bp, Zea mays
  unsure (1)..(306): unsure at all n locations
gttcgtcctcatggcgccgccgcagccgaagtcgggcctcttcgtgggcatcaacaagggccatgtcgtcaccaagcgcgagtgcctctgcgcccgtcccaccgcaaggggaaagcaacgaagagggtgtccatggtcaggggcctgatcagagaggttgctggctttgctccttatgagaagcgtatcaccgagnctcntaaggcttgcaaggacaagcgcgcacataagcattccaagagaaagcgcggaacgctcaagagggcaaagaagaagagagaggagacgatggtgcgcctcatgaag

SEQ ID NO: 65399 - DNA, 212 bp, Zea mays
ctccaacattgcaattcatactttcaatcagagccagtatcctcgcattgttaccgaggacttcttgccacttccaagcaaagggacatcttggaaggatggctggtatcctccaggccatggtgatgtgttcccctctttgaataacagtggaaaactcgacatcttattggctcagggcaaggagtatgtcttcgttgctaactagacaa

SEQ ID NO: 65400 - DNA, 240 bp, Zea mays
agatattcctgctttggctgatatagttggcgacgaggacaaggctaaagaaattgttgaagcagcaaaggcttcaatgggccatgatctgtcaccagttgatttgatcaatgtccagcaatttgcccaaagggttatgaatctctctgagtatcgcaaaaacctttatgagtatcttgtgactaagatgaatgatattgcacccaacctgacatcgttgattggtgaagtagtttgagc

SEQ ID NO: 65401 - DNA, 226 bp, Zea mays
aataagctgctttggtcaggccaagaggctgtggtcaaccaaagggatgcagatattctcttcctatggaagaggtatgagctcttacatgagaagtctgaagagaagcaggaagttctgagggagatcaccggaacagtaaggcataggaagcatctggacaacagcatcaacttcatcggaaagcttctcttcggggctagaaagggccttcacacttaggccg

SEQ ID NO: 65402 - DNA, 122 bp, Zea mays
ctttctgatgttaacaagttggtcaaggagatccggtctgatgtttctgaagtagttgcagctgacgagtttgagtacaaggatcctgttgatggctctgtgtccaagcaccagggcatccg

SEQ ID NO: 65403 - DNA, 188 bp, Zea mays
  unsure (1)..(188): unsure at all n locations
aacagaacaggagcgacaacaacgncgctnacagtagtaactcggaatcggctcgagcatcgaagtgtccaccatccagataggtgctgcctgactggcacaactgcatccaacaatgacttggcgagtcttattgagtgtacagtctgctttgactatgtgttaccgcccattcttcaatgtcagag

SEQ ID NO: 65404 - DNA, 120 bp, Zea mays
tgttgcttccattcaaccaactggctgtgtcaaactctgctgcgtacctacaacagcgacaacagttacttaatccattggcagtggctaacccattggtcgctaccttcctgcagcagc

SEQ ID NO: 65405 - DNA, 192 bp, Zea mays
gaagcggcggcggcggagaaacgcaggcgaaggcgagggtgtgagggaaggagcaccagccatggtgcacgtcaacttctaccgcaactatggtaagacgttcaagaaaccaaggcgtccttatgagaaggagcgtcttgatgctgaactgaagctggtcggtgagtatgggctgaggtgcaagcgtgagct

SEQ ID NO: 65406 - DNA, 276 bp, Zea mays
  unsure (1)..(276): unsure at all n locations
ccaggtaagcagcagcaggaaccctagcaccgccgcatccgcagccatgggtatcgacctcgttgccggtgggaggaacaagaagaccaagcgcacncgccgaagtccgacgatgtttatctcaagctccttgtcaagctctaccgtttcttggtcaggaggaccaagagcaacttcaatgctgtcattccaagaggcatcttcatagcaaaaccaantgcccaccaagtgctcaatcgccgccgtgtcaagatcantgaaggacaggagaagaac

SEQ ID NO: 65407 - DNA, 262 bp, Zea mays
  unsure (1)..(262): unsure at all n locations
ctgagaacaaggaggactacaacaagttttacgaggctttctccaagaacctcaagcttggcatccacgaggactcgcagaacaggaccaagatcgccgagcttctgagataccactccaccaagagtggtgatgagctgaccagcctcaaggactacgtgaccaggatgaaggagggacagaatgacatatactatatcactggtgagagcaagaaggcagcggagaactccccccttccttagaagcntaagaagagggg

SEQ ID NO: 65408 - DNA, 127 bp, Zea mays
  unsure (1)..(127): unsure at all n locations
cgacgatgaagctgatcaagcaccctaacgtcgtccgcatatacgaggtgatgggaagtanaacaaagatctacattgtgttagaattcgctaccggtggcgagctctttgatacaattgttaacca

SEQ ID NO: 65409 - DNA, 308 bp, Zea mays
gtgttggcaagagttgcctcctgttgcggttctctgatggttccttcactacaagctttattaccacaattggtattgactttaagatacggacaatagacttggatggtaagcgtataaagctacagatttgggatacagcgggccaagaacgcttccgtactattaccactgcgtactaccgtggagctatgggtatcttgctggtttatgatgtcaccgatgaatcttctttcaacaacatccgaaactggattcggaacattgagcaacatgcctctgataatgtcaacaaaattttggtgggc

SEQ ID NO: 65410 - DNA, 136 bp, Zea mays
cgaatacacgcattgtaatatctgatgtggatggaactatcaccaagtctgatgttcttgggcagttcatgccactagttggagtagattggtcccaaaacggagttgctcattgatcatctgcaataaaggaaaa

SEQ ID NO: 65411 - DNA, 191 bp, Zea mays
gggcaatgttgaggccactggtgaggacttctctgttgagccagctgatgagaggaggccattccgtgctctcttggatgttggccttatcaggactacaacagggaaccgtgtctttggtgccctcaagggagctttggatgggggcctggatattcctcacagcgagaagaggtttgctggattcaaga

SEQ ID NO: 65412 - DNA, 351 bp, Zea mays
tagttacacgtagtaagtcgaattcggtcgaggtgcatcaattaatgttgcaaacctccgaaggttcgacagtggctgttttcggtttaggagccgttggtcttgccgctgcagaaggtgcaaggattgctggagcgtcaaggatcattggtgtcgacctgaaccccagcagattcgaagaagctaggaagttcggttgcactgaatttgtgaacccaaaagaccacaacaagccagtgcaggaggtacttgctgagatgaccaacggaggggtcgaccgcagtgtggaatgcactggcaacattaatgctatgatccaagttttcgaatgtgttcatgatggctggggtg

SEQ ID NO: 65413 - DNA, 188 bp, Zea mays
cacctagcgaacgcactagcaacgacctaacaacaatggcttccaagacattatccctccttgcgcttcttgccctttttgtgagtgcaacaaatgcgttcattattccacaatgctcacttgctccgagtgccattattccacagttcctccctccagttacttcaatgggcttcgaacacccagct

SEQ ID NO: 65414 - DNA, 312 bp, Zea mays
ccgccaccaggtgcagagtctttcgtcatctcttctccggcgaagaacccccagtcgcccaccagatcacttgttaaactttgttgaggggtgatggcggtttctttcgcaaacctcagctccgaggcagggcttaataagcttgatgagtaccttctcactcgcagctacatcactggctaccaagcttccaaggatgacttggctgtctacacttcgttttcgtctgctccctcgtccaagtatatcaacgtagcaaggtggtttaatcacattgatgcgctcgtgaggctgagcggaattactgcagag

SEQ ID NO: 65415 - DNA, 217 bp, Zea mays
ggacgcagtactgcaggaagtcttccaaagcattggtccagtagaagggtgcaagctcatcagaaaagaaaagtcatcctttggtttcattgactaccatgatcgcagatatgctgcactagcaattttatctctcaatggcagacaactgtatggtcagccgattaaagtcaattgggcatatacaagtactccgagggatggcacatcaggtcat

SEQ ID NO: 65416 - DNA, 319 bp, Zea mays
gggaacgccgccgacgccgcaggaggagacgcatcgaggttagcacgcgaagaagcgaccatgagggccaagtggaagaagaagcgcatgaggaggctcaagaggaagcgcagaaagatgaggcagagatccaagtaggcagatcgagatggattgtggacctgatgacatgcgtgggtacatacatttcttcggatgcgttggtgtgcctgtggagagatgtcaacctgccatggtgtcacggtccgccatcagttgaacgtcttgcctgcacttcagtaggccacttttcatggttctagttgtatttgaatccagg

SEQ ID NO: 65417 - DNA, 300 bp, Zea mays
cacaacccagtcgctcaaaaccctagagctctcgcctgctcgcctccgccgccggagcgagctccccatcttcatccgtcaaccatcgcgacccagatcagcaagaagaagaagttcgtcagcgacggtgttttctacgccgatctctatgagatgctgacgcgggagctggcggaggatggctactctggcgtggaggtgcgcgtcacgctgatgcgcacggagatcatcatccgcgccacggcacgcagaacgttctcggcgagaaggtccatagatcagggatttacctccgtcgtc

SEQ ID NO: 65418 - DNA, 187 bp, Zea mays
ctccgattagttgttgagactgatagcacggacatgttccagatgaataagcttctgtccaagcatatacgtcctctggagagtaaaaatgattcgaaaccagaagcaaagaaattgaagccacagggtgatgaaccaatttcttcagttgaaactgatgttaaccaacttccccttatggtttctg

SEQ ID NO: 65419 - DNA, 305 bp, Zea mays
gcgcgaagaatccgcatttccccttccccgcaccgcaccgcacccaacccccgtcggagagagagatggcatcggtggcggagatgcagcccctcgcgccggcggggtaccgcgcgcgccggagatgaaggagaaggtggaggcgtcggtggtggacctggaggccgggaccggggagacgctgtacccggggatctcgcgcggggagagcgccctccgatggggcttcgtccgcaaggtctacggcatcctcgctgcgcactgctcctcaccaccgccgtctccgccctcaccgttctccaccc

SEQ ID NO: 65420 - DNA, 179 bp, Zea mays
aacaagcaacatagaaagtggaatccagtagcaacaatacagcaacaatggcgaccaagatactttccctccttatgctccttgctctttctgcatgtgttgctaacgcgacaattttccctcaatgctcacaagctcctatagcttcccttcttcccccataccttccatcaatgata

SEQ ID NO: 65421 - DNA, 153 bp, Zea mays
gacaacgttaaggccaagatccaggacaaggagggcatccccccagaccagcagcggctcatctttgctggcaaacagcttgaggacgggcgcacgcttgctgactacaacatccagaaggagagcaccctcgacctggtgctccgtctcagg

SEQ ID NO: 65422 - DNA, 302 bp, Zea mays
ctcttctccggcgaagaacccccagtcgcccaccagatcacacgttaaactttgttgaggggtgatggcggcttctttcgcaaacctcagctccgaggcagggcttaaaaagcttgatgagtaccttctcactcgcagctacatcagtggctaccaagcttccagggatgacttggctggctacacttcgttgtcgtctgctccctcgtccaagtatatcaacgtagcaaggtggtttaatcacattgatgcgctcgtgaggctgagcgtaattactgcagagggccaaggtgtgaaggttg

SEQ ID NO: 65423 - DNA, 284 bp, Zea mays
ctctgctagtgccaggattccgccctatccatcccatcaacctcagctaaggtccccagcggcgacgaggcgatggcggcgcctgtgacggtgtacggaccgatgctctcaccagctgtggcccgcgtggcgacctgcctcctggagaaggacgtgccgttccagatcgagccggtggacatgtccaagggcgagcacaagtcgccgtccttcctcaagctccagcccttcggacaggtccctgccttcaaggacacctcacaaccgtctttgagtcaaggtat

SEQ ID NO: 65424 - DNA, 177 bp, Zea mays
gaagaactaccaaccgtgagcgccgagtacagcgaggccgtcgagaaggccaggcgcaagcgccgcgccctcatcgccgagaagagctgcgcacccctcatgctccgcctcgcgtggcactccgcggggacgttcgacgtgtcgtcgaggaccggcggtcccttcggtaccatgaag

SEQ ID NO: 65425 - DNA, 158 bp, Zea mays
cagagtcccaggatgtgattgacacaaacactggactggtttacactaacatgttcgacgcccaggtcgattccatcttctttgcgctcatggctctgaacttcaagactttgaagatcatgatcactgagtcagggtggccaaacaaaggggcggtc

SEQ ID NO: 65426 - DNA, 310 bp, Zea mays
gtttattgaacgaaaggaggttaagcagatgttaattgctctcctaggagaatcagaaatgaggctatctgatgagatcattgagacaatcctggataagacattttcagatgctgatgcaaatcaggatggaaaaatagatagaacagagtgggagaattttgtcacaagaaatccttccttgatgaagataatgactctgccatacctcaaggacataacaacaacattccctagctttgtgtttaactcggaagtcgacgatctcgtcacgtgaccacactctctccgatgtatagttaataaggag

SEQ ID NO: 65427 - DNA, 180 bp, Zea mays
gttccgtggagtcaacggaactgttgcccatgaattcatcattgatctaagggcatttaagacgactgctggtatagagcccggagatgtggcaaagcgcttgatggactacgggttccacgcaccgaccatgtcatggcctgttcctggcacacttatgattgaaccaactgaaagtgg

SEQ ID NO: 65428 - DNA, 151 bp, Zea mays
gaagagcttgacattgatgtgcttgtgcatggcgagcctgagagaaacgatatggttgagtacttcggtgagcagctctccggttttgcgttcactgccaatggcggggtgcagtcttatgggtcagagtgcgtcaagcctccgatcatct

SEQ ID NO: 65429 - DNA, 306 bp, Zea mays
gcggtggcatgaagggcgggagcaaggccgtcgtggtggcgcacaagcacgccggtgtcttcatctccaagtccaaggaggatgcgctctgcaccaagaacatggtcccgggagagtccgtgtacggagagaagcgtgtctccgttcagaatgaggatggaacaaaagtcgaatacagggtgtggaaccccttccgttccaagctggctgctgctgtgcttggtggtgttgacaacatctggattgctcctggtacccgtgtgctgtatcttggtgctgcttctggcacaactgtatctcatgtgt

SEQ ID NO: 65430 - DNA, 179 bp, Zea mays
caccatacgagtttgttgaaggcatgaaaaagaagggaatccgtgtgcctgggattggtcacaggattaagagcagagacaacagggataagcgtgtgcagcttctacagaaatatgctcacacgcatttcccttcagtcaagtacatggaatacgctgttcaggttgagacctacacc

SEQ ID NO: 65431 - DNA, 207 bp, Zea mays
caacgacctaacaccaatggctaccaagatattagccctccttgcgcttcttgcccttttagtgagcgcaacaaatgcgttcattattccacagtgctcacttgctcctagtgccattattccacagttcctcccaccagttacttcaatgggcttcgaacatccagccgtgcaagcctacaggctacaactagcgcttgcggcgag

SEQ ID NO: 65432 - DNA, 276 bp, Zea mays
cgcttccagccgccgccgcgtccgcctcgccaagcgcacagcgcgccgcagcacatcgctctcttgatctcagccatggcggaggtggagcagcaacaggacacgccgaagctcttcaaccgctggaccttcgatgatgtccaggtgaacgacatctcgctgaacgactacctcgctgtgaacgcgacgaagcacgcgatgtacctgccgcacaccgctgggcgctactccaagaagcggttccgcaaggcgcagtgcgcgatcgttgagcgcctt

SEQ ID NO: 65433 - DNA, 298 bp, Zea mays
ctgtccacctctctcgctctgggccgccgccgccgccctaagccacgtgctgaggctttcgttggtctcttcgccggcgacgagcacccagcagttctctagaaatggctgatggtgaggacatccagcctcttgtctgcgacaatggcactggaatggtcaaggctggttttgctggcgatgatgcaccaagggcggttttccctagcattgttggccgtcctcgccacactggtgtcatggtagggatgggacagaaggacgcatatgttggcgatgaggcacagtccaagagagg

SEQ ID NO: 65434 - DNA, 300 bp, Zea mays
gaagagcttgacattgatgtgcttgtgcatggcgagcctgagagaaacgatatggttgagtacttcggtgagcagctctccggttttgcgttcactgccaatggctgggtgcagtcttatgggtcaaggtgcgtcaagcctccgatcatctacggtgacgtgagccgccccaaccccatgaccgttttctggtcgaagacggcacagagcatgacgtctcgcccaatgaaggggatgctgactggcccagtcacaatcctcaactggtccttcgtccggaatgaccagccgaggtttgag

SEQ ID NO: 65435 - DNA, 173 bp, Zea mays
cgctcactgccgtaacatttgtaaccgatgatgatagatccctcttgaaagcaattgcaaagaaggctggttcacaactgaaaagccgcattgttgcagagaaacctgtggctgagtgtgcacaactgattgagcaactagaagatcagatttccatcatcattcgagaagaa

SEQ ID NO: 65436 - DNA, 168 bp, Zea mays
aagtccaaaagatcatagcacacgggatcaactgttttgtcaacaggcagttaatctataacttccctgaggaactctttgctgacgctggcatacttgcaattgagcatgctgactttgagggcattgaacggttagctcttgttactggtggtgagatcgcatcaa

SEQ ID NO: 65437 - DNA, 291 bp, Zea mays
cccgggtctccagcattcctatcctctccccgcccgcccgtgccgccgccgcggcttcccttcctctcccgagccaagatgaatgttgaaaagctcaagaagatggcaggtgctgtgcgcaccggggggaagggtagcgtgcgcaggaagaagaaggcagtccacaagactacaaccacagatgacaaacggcttcaaagcaccttgaaaagaataggagtgaacagcattcctggtattgaagaggtcaacatctttaaggatgatgttgttattcagtttgtaaatcct

SEQ ID NO: 65438 - DNA, 297 bp, Zea mays
ctgggatcggcttccttcagttctgtaacctcaacacctttaggaccaagttcatccttgggttctcagttttcatgggcctttctgttcctcaatacttcaatgagtacacatctattgctggttatggtcctgttcacacacattcaagatggttcaacgatatagtgaatgtgatattctcgtccaaggcgtttgttgctggcttcgtggcatatttgctggacaacactattgacaggcatgaagcttcagtcaggagagaccgaggctacattggtgggacaaattcggtcg

SEQ ID NO: 65439 - DNA, 295 bp, Zea mays
tcgggtcaaaccctaagcagggagttgatttatccgctgcagccatgagtaagttgcagtctgagtctgtcaaggatgccatctcccagattgttggggatgccaaggagaagaataggaagttcactgagactgtggaacttcagattggtctgaagaattatgatccacagaaggacaagcgtttcagtggctctgttaagttgccccatatccctcgtcccaagatgaaggtgtgcatgcttggtgatgcccagcatgttgaggaggccgagaagatgggacttgactacat

SEQ ID NO: 65440 - DNA, 142 bp, Zea mays
ggagaagcggaaggtggagccgccctttaagcccaaagtgaaatccccttcagactacagcaactttgacccagagttcctgaatgagaaaccccaactttccttcagtgacaagaacctcatcgactctatggaccagaca

SEQ ID NO: 65441 - DNA, 222 bp, Zea mays
  unsure (1)..(222): unsure at all n locations
agaacaagtgggatattacgttatgagcgtgtctttggtgaaggttttgtgagcactggtggaatcgagactacaaaggaatttgtgggcatgctcgatcttaaaccgggccagaaagtacttgatgtcggatgtggaattggaggcggcgacttntacatggctgcatactatgatgtccatgttcttggtattgatctatcggtgaacatggtttcattt

SEQ ID NO: 65442 - DNA, 331 bp, Zea mays
atcgggagcttgggcagtatgaagacctggtagctagggtcacaaacttccataatgaggacaagggcttcatggttttggatggcgatgtttttgatgttccaattaggaaggacattgttcaccgagtagtaaggtggcagcttgctacaagacagcaggggacacattcaactaaaactatcagtgaagttagtggcactggaagaaagccgtacccgcaaaaaggaaccggaaaagcacgacatggaacactgcgcggtgcccagtttcgtggtggtgcaccatgcatgggcctaaacctcgaagccatgcaatctagctgcagaag

SEQ ID NO: 65443 - DNA, 336 bp, Zea mays
ggcttagtggcagtggcaaaaccactatttattaccagcttcgggatggatcatcacatcaaggaactgttacttcaatggaagaatacagtgatatttttgtgctgcattcggagcaagacaggacagacaaagtataacatgtgcatattattgatgttcctggtcatgctaggctcaaacccaaacttgatgaagtcctgcctaaagctgctgcggttgtctttgttgttgatgctcaagattacttgtctagcatgcaagctgctgcagagtacctgtatgacattctgacaaaggcaactgtagtgaagaaaaaggtccctgtgcttatat

SEQ ID NO: 65444 - DNA, 328 bp, Zea mays
attttccagatgttcgtacccaagcgatgtttcagttgctggatacaggctttgtgggccttatattttcttgttttagtgaagatgctcaaaaggttggaaaaatccaagtgactgcctttcagtcagagggtggacaacagcatgcccttcctcttgccattgctccagttattgaccttgattcatcccttagttcatcagataatgcactcacttcacattctgcattggttgaaggcatggaacaggacacaggggattccagggcctcaaagcataacaaggcctggaaaagatctttggatttctactctcatcctgacac

SEQ ID NO: 65445 - DNA, 335 bp, Zea mays
cttgaagaggacgtgaagcatttccattctgttcaaaagcaagcatgtgataaatttgatccaagttttcacccaagattcaaaaaatggtgtgatgattatttctatattaagcaccgtaatgagcggcgtgggctaggtggaatattttttgatgaccttaatgattacgatcaagaaatgcttctcaactttgctacagaatgtgcggactctgtacttcctgcgtacataccgatcatagaacggcggaagaacactccgttcaatgaggagcacagggcatggcagcaattgcggagaggtcgttatgtggagttcaaccttgtctacga

SEQ ID NO: 65446 - DNA, 321 bp, Zea mays
tgcggaaaagatgaatggggcctcaggagctgagctcaaggccgtctgcacagaggctggaatgtttgctcttcgtgagagaagggtgcacgttacccaggaggacttcgagatggcagtggccaaggtgatgaagatagacacggagaagaacatgtccctgcgcaactctggaagtgaggctcgtgcccaccgttcacggcctccccgaagctagtggcagtgccttcatatccatatcttttaccaaagcagtggaatggtgtaacggcatgctctggacaatgttatctcaagttgcgccgcgcatgcttatgttta

SEQ ID NO: 65447 - DNA, 331 bp, Zea mays
tgaaagcttcaagacatccatcggtatctttggcatcctcatattgctcatactactgggacgagtggcatttgttttccctatatccatttggtcaaatatcatgagtggaagttctgaaagaaccccgatcacattcaagcaccaggttattatttggtgggctgggctcatgagaggtgctgtttccattgcactagcatacaatcagttcacattctcaggtgtaacatcggatccagttcatgccaccatcatcaccagcacaataatcgtcgtcttcttcaccactctggtgtttggcttcttgaccaggctcctgatcagtggc

SEQ ID NO: 65448 - DNA, 334 bp, Zea mays
caccttccctggtgaagctgatgaagcgcctgatactgtcactggagacattgtattcgtcctccagcagaaggatcactccaaattcaaaagacagggtgaagatctcttctatgagcacaccttgtctctgaccgaagcactatgtgggttccaatttgttcttacacatctggacaacaggcagcttctcatcaaatcagaccctggtgaagttgttaaacctgaccaattcaaggcgattaatgatgaggggatgccaatttaccagaggccgttcatgaaggggaagctgtacatccatttcacggtggagttcgctgactcgttggca

SEQ ID NO: 65449 - DNA, 308 bp, Zea mays
ggttaattgaaatcaagttcaggtcagaggaactccaagactgtatgggtaggcttgacccagagttgataaatctgaaagcaaaactcgaagatgtaaatcatggaaatggaagtctaccagacatagaagggattcggaagagtatagaagcacgtacgaaacagttgctgcctttatatacccagattgcaatacggtttgctgaattgcatgatacttccctaagaatggcagctaaaggtgtgattaagaaagttgtagactgggaagaatcagctcgtactactataaaaggctacggagga

SEQ ID NO: 65450 - DNA, 332 bp, Zea mays
  unsure (1)..(332): unsure at all n locations
ctcaaatcnccaaagcctccgacccccttcctctctccctccgccgccgctgcgcacgcagggtaacaagcgacatgggcgtctacacctttgtgtgccgcaacaacggcggcgagtggaccgccaagcagcactccggcgagatcgaggcttccgccgctaccccatacgagctgcagcgccgcctcgtcgctgccgcctccgcggccgactctgcctacggcgtccagtcgtccttctccatggtcacccccagctccgccgtgttccaggtgatcgtcggtgctgtcggtggtggtgcaatgatggtgagcggaggtggcggcggcggt

SEQ ID NO: 65451 - DNA, 333 bp, Zea mays
tggttggcagtaagatgaagagttcatcagaccttttgatcatcgtcggatcaatgtattttgctgttgcatttgttggctttgaaaactgtaactctgctcaacctgttattgccgtggaaaggacagtcttttacagagagcgtgcagctggaatgtactcggctataccctatgctttctcgcaggttgttgctgagataccatatgtgttcgtcgagagtgtcatatacactgttatcgtgtacccgatgatgtctttccagtggactcgtacgaaattcttctggttcttctacatttcgttcctctcgtttctctacttcacttact

SEQ ID NO: 65452 - DNA, 302 bp, Zea mays
cggaatggaccagcctggaaacttgacccgagaccagtacctgcgcgacgccacgagggtgcggttctacaggagctacatcggccagctgaagaaggccatagaccagggagcgaacgtggctggctacttcgcctggtctctcctcgacaacttcgagtggctggcagggtactcgtccaagttcggcatcgtctacgtggacttcgtcacgctcgaacgccacccgaaggcgtcggcctactggttcagggactgcttcagaagcttgagatctccaagctgagctgagcacggaagta

SEQ ID NO: 65453 - DNA, 356 bp, Zea mays
gcgacgtcaggtcggaatgcgtgtcgagccgcgctcgaaggcgtgacacgggtgaattccctcctgaacctccctagactactgtcgggcgacaagcgatcgaccagctggaggaagcggcggtgaccggtgaggaagctctcctacaattctttgccgagttcaggtgggggttcatgcagaggcgcgtgcaaaatcctttagggcttgttcgtttacgtcggattgcacccggaatcgttccagctaatcaaagtttatataaattagagaaacaatccggctaagaatcgttccgacccaccaatccgacacaaacgaacaaggccttagtctctgggaatttgttatagctg

SEQ ID NO: 65454 - DNA, 333 bp, Zea mays
tcagcattcaaaaacacaccaagcgaagccactagcaacgacctaacaccaatggctaccaagatattagccctccttgcgcttcttgcccttttagtgagcgcaacaaatgcgttcattattccacagtgctcacttgcgcctagtgccattattccacagttcctcccaccagttacttcaatgggcttcgaacatccagccgtgcaagcctacaggctacaactagcgcttgcggcgagcgccttacaacaaccaattgcccaattgcaacaacagtccttggcacatctaaccctacaaaccattgcaacgcaacaacaacaacaacaa

SEQ ID NO: 65455 - DNA, 136 bp, Zea mays
caaacagcgagctgcatcaggtgttctctgagtggaacaaggggcggctcctcagtttcttgattgagatcacggccgacatctttggtatcaaggatgacaagggtgaaggctacctggtcgacaaggtcctgga

SEQ ID NO: 65456 - DNA, 279 bp, Zea mays
  unsure (1)..(279): unsure at all n locations
gcctccaccctcctcgccgcctcactccctctgaggtcgcagatccgtccggttagacgaagccgnccgcacgcatggcctccagtgagctcgactgcacctacgccgtcctcatcctcagcgacgacggcatcgccatcaccgacgagaagatcgacagcatcgtgaaggcggccaacatcaaggtcgagtcctactggccggcgctcttcgctaaactcctggagaagcgcatgttgacgatctaatccctccgctggatcagtggtggcgtgctcc

SEQ ID NO: 65457 - DNA, 321 bp, Zea mays
tgctgtttggtgtgactactcttgatgttgttcgtgctaaaactttttatgctggaaaagcgggtgtgccagttactgaggtgaacgtacctgttgttggaggccatgcgggtattactattctgccactcttctcgcaggccactcctgcaagcaattcgttgtcccaagaagacattgaggccctcaccaagaggacacaagatggtgggacagaggtggttgaagcaaaggcgggaaaaggctctgcaacgttgtccatggcatatgctggtgctgtttttgcagatgcatgtttgacaggtctgaatggagttccag

SEQ ID NO: 65458 - DNA, 330 bp, Zea mays
gtcggcgacgactacgccgggtcttcttcggacccaggtcgttgccgcctacgccaggtgcccaaatcttcttagggcccttcgccggcgacgagcacacaagcttagttgacccccaacaaattgcaaaatgtcagccaatgtcggtgaatcaaccagcggtggcagcagcaacgatgcagctggggggagctttgaatgtaacatatgctttgagctgcctcaagagccaatagtgactctttgtggccacctcttctgctggccatgcctttaccggtggctgcacatccatgcacattcgccagagtgcccagtgtgcaaggctct

SEQ ID NO: 65459 - DNA, 322 bp, Zea mays
  unsure (1)..(322): unsure at all n locations
cggaaagggaaaacgccaccacacgcggatcgaattaggctctccgagtctccggttccctcctctcggcggcggctcaggtcnctctccatctccgacgtggcgcttggcgtctgacctcaacaagcaagaaagcaaatagcangcggcagggttgcgcatgccaccctcaagggcccgagtgtggtgaaggagatcttcattggactgaccctgggtctgatcgcgggaggcatgtggaagatgcaccactggaacgagcagaggaagactaggtccttctatgacatgcgtgacaagggccagatcagcgttgtcgtcg

SEQ ID NO: 65460 - DNA, 321 bp, Zea mays
gctcttaggctggatgtagtgggcttgaccgctcatctgcggattacatcggcatgctggccactgtgatgaatgctatatttcttcaagcgacgatggagagcatcagaataccgacccgtgtccagactgccttccgtatgtcagaagttgcagaaccatacatacgccgaagagctgtcagacatttagagaaaggaagagttgtcatatttgctgctggaacagggaacccattcttcacgactgatacagctgctgctctccgttgtgccgaaatcaatgcagaggtagtgctgaaacaacaatgttgatggtgtg

SEQ ID NO: 65461 - DNA, 129 bp, Zea mays
ccacccaccagttcgaagcggaggcgaccggcaacctgcggcggagatatcaggcaggggcaagggcggcaaggggctcgggaaaggcggcgcgaacgtcaccggaaggtgctacgcgacaacatccag

SEQ ID NO: 65462 - DNA, 170 bp, Zea mays
cactgctgccacaccatgatttcttttgcaagaaacctttgccactggcaatatcagatacacattatcttcacaatattgtgggagacactgaaattcgaaaaggagacggaatggcgttagatcaacttgttcagaatgcatatatgagggatacacctgcttatatt

SEQ ID NO: 65463 - DNA, 223 bp, Zea mays
  unsure (1)..(223): unsure at all n locations
cgagatgaaactgatggacattgatagcgagcacctcggaatccctgattccgagtaccaggccatcgtccgcatgccttctgctgagtttatgaggatctgcaaagatcttagcagcatcggagacacagtcgtcatctcggtgactaaggagggcgtgaagttctccacatctggagaaattgggagtgcaaacattgtctgcaggcagaaccanactatt

SEQ ID NO: 65464 - DNA, 318 bp, Zea mays
atgcggagtgcgaccacctcatcgcgctggcgcaggacaagctggagaagtctatggtggcggacaacaagtccggtaagagtgtccagagtgaggtgcgcaccagttccggcatgttcctcgagaagaagcaggatgaagtagtaacgaggatagaggagaggatatctgcttggacatttcttccaccaggcgatggtgaagccattcagatattacactaccagaatggtgagaaatatgaaccccactacgactacttccatgacaaaaataatcaggccctgggcggccagcgcattgccactgtgctgatgt

SEQ ID NO: 65465 - DNA, 318 bp, Zea mays
cattttctctcctctctccgtcgccgcctcgggccaaaccctacgcagggagttgattgatcgattgcagccatgagtaagttgcattccgagcttctcaaggattgcatctcccagatagttcaggatgccaagaagaataggaagttcactgagactgttgagcttcagattagtctgaagaattatgatccacaaaaggacaagcgtttcagtggctctgttaagttgcctcacatccctcgtccaaagatgaaggtgtgcatgcgtggtgatgcccagcacgttgaggaggctgagaagatgggacttgactac

SEQ ID NO: 65466 - DNA, 163 bp, Zea mays
cacactttacatataattccagattctagacaagtcaatgctgatgagttgcagcctggcgtctgctatttacagatcactgctgttgatcctgtaatggaggatgaggacttgggtagcaggagggacaggatttgctctttatctactggtactgtacgtg

SEQ ID NO: 65467 - DNA, 120 bp, Zea mays
cgtagtaagtcggaattcggtcgatgttgctaccgcaagcattttcgcacaatgctcacaagctcctatagcttcccttcttcacccatacctctcagcagcggtgtcttgcatgtggtg

SEQ ID NO: 65468 - DNA, 160 bp, Zea mays
gattcggctcgagctgagctgctcatccgcaatctcgccttccagcgcctcgtccgcgagatcgcgcaggacttcaagactgatctgaggttccagtcctccgccgtcgcggcgctgcaagaagccgccgaggcgtacctggtggggctcttcgaggaca

SEQ ID NO: 65469 - DNA, 143 bp, Zea mays
  unsure (1)..(143): unsure at all n locations
caaatatgtagttggtgaaggtttcttgaagctgagaagatggtgctgaagacagaactctgccgcttcagcggccagaagatttaatcttgggnaaggcatcggattaatccgtgctgattctcaggttactagctatcata

SEQ ID NO: 65470 - DNA, 316 bp, Zea mays
cgttcctgaaggcagagcttggatgactcagctcttggcagtggcttgcttgtctttggcttcgaaaatcgaagagacttttgtgccactacccttgggatttgcaggtagcggaggcaaagtttgtttttgagggaaggaccataaaaaggatggagcttctggtgctaagcaccttaaagtggaggatgcatgctgttactgcttgctcatttgttgaatactttcttcataaattgagtgatcatggtgcaccctccttgcttgcacgctctcgctcttcggaccttgtcttgagcaccgctaaaggtgctga

SEQ ID NO: 65471 - DNA, 70 bp, Zea mays
agataatggtgagattaggtggattattgactctgttgtgggcaaggaggatgggcttggtgttgagaac

SEQ ID NO: 65472 - DNA, 104 bp, Zea mays
ctccgcctctcgagtctcgtccacacgtcatcctcctagctcctctactcgccagtcgccatgggcaagattaagatcggaatcaacggcttcggaaggatcgg

SEQ ID NO: 65473 - DNA, 363 bp, Zea mays
ggtgcacggtagtgagtcggaatcggctcgagtggcgatggaaatctgggagctactgaaagaattctttgatgcagaaattagaaagctgaagctacaaccatattatttcgctattgttgttactgagaatgttctacagaaggaaaaggaccacattgagggctttgcacctgaggtagcttgggttactaaatctgggaaatctgacctggaagcaccgattgcaagtgcgcccacaggtgagcttgtaatgaacccggctttctccatatggataagacgccaccgagacttacccttgaggtgtaatcaatggtgtcatgttgttagatgggagtttagcgatccgactcctttcat

SEQ ID NO: 65474 - DNA, 248 bp, Zea mays
  unsure (1)..(248): unsure at all n locations
cgctcacncgcctccactccccctcgcaggcgctgcccaggtaagtcggcggcggcgatgacaacgcgcttcaagaagaaccgcaagaagcgcggccacgtgtccgccgggcacggccgaatcggcaagcacaggaagcacccgggaggtcgcggtaacgccggtggcatgcaccaccaccgtatcctcttcgacaagtaccatccgggctacttcggcaaggttggcatgcgttacttccataagct

SEQ ID NO: 65475 - DNA, 140 bp, Zea mays
  unsure (1)..(140): unsure at all n locations
cacagaggctggaatgtatgctcttcgtgagagaagggtgcacgttacccaggaggacttcgagatggcagtggccaaggntgatgaagaaagcacggagaagaacatgtccctgcgcaactctggaagtgaggctcgtg

SEQ ID NO: 65476 - DNA, 147 bp, Zea mays
  unsure (1)..(147): unsure at all n locations
caccttcctcgccgcctcactcnctctgaggtcgcagatccgtccggttagacgaagccgcccgcacccatggcctccggtgagcttcgctgcaactacngcggccctcatcctcagcgacgacggaatcgccatcaccgccgagaa

SEQ ID NO: 65477 - DNA, 194 bp, Zea mays
caacacgtgatgcaactaatactatctgtacgcatggttcacgagcaatgcctagcggcggtttgagcatggacggacctcacacaacactcagtggtactggagttgaccggatggcattccttcaggctactataacccgtgacaatattgagtttgtaaatggtgcaattgtgggagacagatacattttc

SEQ ID NO: 65478 - DNA, 361 bp, Zea mays
  unsure (1)..(361): unsure at all n locations
atcaagaaagaggactgggacaagttgcatgttcacatagcctcgtacaacaacttccccactgctgctggtttggcctcttcggctgctggccttgcctgtttcgttttcacccttggaaagctgatgaatgtgacagaagattatggagaactttcttcaatagcaaggcagggatctgggagtgcatgccgcagtatatatggtggttttgtgaaatggtgcatgggagaaaaagatgatggaagtgacagtattgccgtgcagcttgctgacganaaacactggaatgatcttgtaattattattgcagtggtcagttcaaagcagaagganaccagtagcaccagtgggatgcgag

SEQ ID NO: 65479 - DNA, 187 bp, Zea mays
agatcacgcatcatggactcgcctactactgtggatttgtacgccattatagacttggtgctgcgaaagactgctttggtgatttgtgggtttgttgctgtgtaaaaagatcctcatggcttccagaagaccatgaaggtttggatctatcatgtaattccttgttatctgccaattatgtatgaac

SEQ ID NO: 65480 - DNA, 185 bp, Zea mays
ttcctattcgcgccgccgccgctgctgcaagcgccagctacgccgtcgtccgaatagtacactttaacgccgccatggggcgtatgcacagccgcgggaagggtatctcgtcgtctgcgctgccgtacaagaggacgcctcctacctggctgaagaccgccgcctccgatgtggaggagatgatc

SEQ ID NO: 65481 - DNA, 145 bp, Zea mays
  unsure (1)..(145): unsure at all n locations
gtgtgactgacgtagctccgggcgaccatgtcnttcctgtgttcactggggagtgcaaggagtgtgcccactgcaagtcggcagagagcaacatgtgtgatctgctcaggatcaacaccgatcgcggtgtgagaatctgtgttgg

SEQ ID NO: 65482 - DNA, 290 bp, Zea mays
  unsure (1)..(290): unsure at all n locations
cctgactacagggaaagaaggctcattggaaagtgccctttaactccagaagaggtaggtcttattctacgtgctacgggatttgataactcaacatggatttaccttgctcctggcaagctctttggtgggaaacacttcatgaagccattcaaggctatgtttccacgtcttaaaaaccatagtatgatcagaagtggaagctggaagcaatatccggggcagcagggtcagcagtgattcatggtctgccctgtcggcatnttatatatgatggtcgagcacttcgc

SEQ ID NO: 65483 - DNA, 263 bp, Zea mays
attcttgcgacggaagcataatctgcacgagagacagacgacgagatggccgatgcggaggacgccgccgccgcgcgccgacgggccgccataatcgactaccgcaagaagctgctcaactgcagggagctcgagtcgcgcgtcggcaccgtgagagacagccttaaaaatgcaaagcagggattttaccaagactgaagacgacttgaaatctctgcagagcgtggggcaaataattggagaggttctccgacctcttgata

SEQ ID NO: 65484 - DNA, 354 bp, Zea mays
  unsure (1)..(354): unsure at all n locations
aatccttcaagcgcaactgcctcctcctcgtcgtccggtcgtgagaagggatggcgggccgtggcaaggctatcggcgctggcgccgcgaagaaggcaacgtcgaggagctccaaggccggactccagttccccgtcggcaggattgccaggttcctcaaggcgggcaagtacgcggaggcgtcggcgccggcgcccccgtgtacctcgccgccgtcctcgagtacctcgcggctgaggttctcgaacttgccgggaacgccgcgagggacaacaagaagacccgcattgtgccgcgccacatccagcttgctgtgcgcgacgtcgaggagctgaccaaactgntgggtggtgc

SEQ ID NO: 65485 - DNA, 357 bp, Zea mays
gaacttgttcataggtgtggctctggctgcaaggtctaagtacaccctacagcagttgggcattactcatgtactctgattgtgttcaaatgagattggtcaatccgattcccaatttcccgatctttttgaatacaagaactcttcaattagcgttgatgatgatgcaaacatcagtgatctttttgaggaagcatcagacttcattgatcatgtggatcatgttgggggcaatgttctagttcattgctctgaagggaaaagtcggagtgccatagtcgtacttgcctatcttatgcttagagagggctttactcttgcataagcctggaacttactgaagatagtacaccgtcg

SEQ ID NO: 65486 - DNA, 360 bp, Zea mays
  unsure (1)..(360): unsure at all n locations
ctcgcctcctcacctgccgcgtgacgcccccagagatggggcgagacaagagccgtcgtctatacggcagccgccacttccggcagcggcttgtgctggcgacgctcacctctaccgctgtcaccatcgaggacatccgctcaggggacgcttcgccggaggctccgcccttacgaggtctccctcctccgcctcctcgacaagatctcagaccatcacaccattgacctcaacgagacaggaacgaagctgaggtaccggccgggggtgattatcaggggatagggccttgagcacgactgcgggggtgcacggnggtattggctactttcttgagccactcatactgcttggtctatt

SEQ ID NO: 65487 - DNA, 126 bp, Zea mays
gcaatatgccaggagatgttctccgagtatgtggtcagttggctgtctcgcagagttttggagacaggactctaaaatcactattgagatcagagcctgatataaaagtcgaagacatagatcaca

SEQ ID NO: 65488 - DNA, 372 bp, Zea mays
  unsure (1)..(372): unsure at all n locations
tcagtgctcggaatcggctcgataggctnctctccccggctctccgccttcctcttccagtcnccgcgcgcgagatcgccgccccgtgtgggccctagatcccgatggcctcgcgccgccgcaccctgctcaaggtcatcatcctcggcgatagtggggttgggaagacttccttgatgaaccaatatgtgaacaagaagttcagcaatcagtacaaggctacgatcggcgcggatttcctcaccaaggaggtgcagttcgaggacaggctcttcactctgcaaatatgggacactgctggccaggaaaggtttcagagtctcggcgttgcattctaccggggagcagcattgtgtgtcctagtctatgatg

SEQ ID NO: 65489 - DNA, 346 bp, Zea mays
cttcaacatttcagcatcatcaattgtcagcaaatggcgtggagattcagagaagcttgtcaaagttctgtttgagcttgctaggcatcatgcaccatccacaatattccttgatgaaatagatgctatcatcagccagcgtggtgaagctcgcagtgagcatgaagctagtcgtcgcttgaagactgagctacttattcagatggatggtctgacaaagacaaacgacttggtattcgtacttgcagctacaaatcttccctgggaattggatgcagccatgctccgccggcttgagcagcggattcttgtaccgcttcctgaaggtgaagcaaggcaatcgatg

SEQ ID NO: 65490 - DNA, 328 bp, Zea mays
ggttaagatattcaacactaacaacttgtgggtgaaccttaaagctgtcaagagactagtagaggctgaggcacttaagatggaaattattccaaaccccaaggaagttgatggtgtgaaagtccttcaatttgaaactgcagctggtgcagctattcgtttctttgacaaagcgattggaattaatgttccccgctcaagatttctcccagtgaaggctacatctgatttattgcttgtgcagtctgatctttacaccttggtcgatggctttgtcatccgcaacccatccagaacgaatccagctaatccttcgattgagcttgga

SEQ ID NO: 65491 - DNA, 119 bp, Zea mays
gctgccattgccatctactgacctgtgacctccgcatttccaaacagcccgagcgagctagagctagcagagcggtaggcacctccctcctcaaggatcatggcccgcacgcagcagtt

SEQ ID NO: 65492 - DNA, 354 bp, Zea mays
caggaatctagtgtctccaaggtggaggacaggtctgcagaggacaaagaaagatggtggaagaaggggttgaaagccatctcggatgggaagctggccgttgtccttttggccggtggtcagggtactcgactgggaagctcagatcctaatggatgtttcaatatcggacttccatcaggatagtcacttttccagctccaagctgaaaggattctgtgcgttcaaaagctggctgctcaatctagcgaaagcccgagtaacactgtgccgatccactggtacataatgacaagctcctttacagatgctgccaccgccacattctttgaaacccgtagatattgtggcttt

SEQ ID NO: 65493 - DNA, 244 bp, Zea mays
agcaccgctcgctgatgatgctgatgaggatgactttctgttcgaagaccggttcagcattgtctacaaccttgaccgtgaattcggcccgaggtttaatgatcatatgcagtattgtgttaatcatctagaggaaatttacaagctctccaaggtgaaagtccacctatcggctgtctaagggatcatgatggacatcattgataagatattggtacgcggtgagtagatagagcgtttggtg

SEQ ID NO: 65494 - DNA, 207 bp, Zea mays
gacttattggaagacataataggaaaccatggcccaagtttgtgaatgctaggaacagacatcttgcaacacctgaggctattgatttggtagataaactcctccggtatgatcaccagaaaaggcctacagccaaggaaaccatggctcacccgtatttcaatccagtaagaagccccgaaagcaagacgaattcacaatagctaa

SEQ ID NO: 65495 - DNA, 101 bp, Zea mays
  unsure (1)..(101): unsure at all n locations
ctgagcacattctcatggttgatatcatcnctgacgctgctgttcgtaaggcaatgaacgacataaatgcagcccaaaggcttcaactggtcagtggttac

SEQ ID NO: 65496 - DNA, 354 bp, Zea mays
tgtcgcggaccgcgacctgttcgcgcggccgttccgcaagaagggttacatcccgctcaccacgtacctgcgcacagccaagatcggcgactacgtcgacgtcaaggtgaacggcgccgcgcacaagggcatgccgcacaagttctaccacggccgcaccggtcgcgtctggaacgtcaccaagcgcgccatcggcgttgacgatcaacaagcaggttaatggccgcatcatcaggaagcgtatccatgtccgtgtggagcatgtgcagccctcccgttgcacagatgagttccgcttgacgacagccaagaacgatcagctcaaggttgatgccagtgacgtggcgaagtgat

SEQ ID NO: 65497 - DNA, 349 bp, Zea mays
gcaaagttgacctccatggtcttgtacagcactatataaaacttagcgaggcagagaagaaccggaaactgaatgatctcttggacgctcttgatttcaaccaagttgtgatattcgtgaagagtgttagcagagctgccgaactgaataagttactttgtgaatgcaacttcccatcaatctgcattcattctggaatgactcaggaagaaaggctaacaagatataagaacttcaaggaaggccacaagagaattcttgtggctacagatttagttggcaggggcattgacattgagcgtgtcaacattgtgataaactatgacatgccagactcagctgatactta

SEQ ID NO: 65498 - DNA, 188 bp, Zea mays
cgcgagagtgcgcccgggtgggctctagatcccgatggcctcgcgccgccgcaccctgctcaaggtcatcatcctcggcgacagcggggttgggaagacgtctttgacgaaccaatatgtgaacaagaagttcagcaaccagtacaaggctacgattggggcggatttcctcaccaaggaggtgcagt

SEQ ID NO: 65499 - DNA, 132 bp, Zea mays
agcttttgggacacggacgcgcctcacgccggactcggccgactagcacataggtgccgatagtgtacaacagtggcagccatactatgctgcctcctgctgctccttggcctatctgccagcgctgctacg

SEQ ID NO: 65500 - DNA, 90 bp, Zea mays
cgaaatatttgcgtccttatgctccttggtgcttctgcaagtgctgctaccgcgaccattttctcgcaaagctcacaagctcctatagct

SEQ ID NO: 65501 - DNA, 132 bp, Zea mays
cggctcgagggcatgcgatggttctactctggcgacattggagcactacacccagatggatgtcacgaaattatcgaccgcaagaaggatatagtcacgcttcaacacggtgaatatgtgtctctagggaag

SEQ ID NO: 65502 - DNA, 335 bp, Zea mays
ctgcctcgtgtggccgtcgtctcccgttcggaacgccaagccccaactccggtcgaaatggcccccaagcgaggtggcagggcgccggtgccggccaagaagaagacggataaagtgacgaacccgctattcgagaagaggccgaagcagttcggcatcggcggcgcgttgccgctcaagaaggacctgcaccagttcgtcaagtggcccaatgtcgtgcgtatccagcggcacgccggatcctcaagcagcgcctcaaggtaccatcggcgctcaatcagtgcaaccgcatccgcgacgaaaacctcgctacgaacctgtttaagatgcttctc

SEQ ID NO: 65503 - DNA, 341 bp, Zea mays
gtgtccatagcaccgcagagactgagatcgggggctttgtcaagacccacaagaccaatgcgtacttcaagcgtttccaggtgaagttcaagagaaggcgcgctggcaagacagactacagggccaggataaggctgattaaccaagacaaaaacaagtacaatacacccaaatacagatttgttgtgcgatttaccaacaaggacatcacagcacaaatcatctctgctagtatagcaggtgatatggatcttgcttctgcttactcgcatgagttgccacgatatggtcttgaagttggtctgaccaactatgcagctgcctactgcactggccttctg

SEQ ID NO: 65504 - DNA, 73 bp, Zea mays
cgaccaagaggcgcgcaaaccaagtcaagagaacctgctatgctcaggcataccagatccgtcagatccgccg

SEQ ID NO: 65505 - DNA, 88 bp, Zea mays
  unsure (1)..(88): unsure at all n locations
cccaactagcaacatagaaagcactatagtgtaccaacaatggcagccanaatatcgtgcgtccttatgctccttggtcttgctgcaa

SEQ ID NO: 65506 - DNA, 339 bp, Zea mays
agtgcggaggcaggaagagagacgacggcggccatggcgacctccttccaggggacgaccaccaagtgcaccgcctgcgacaagactgtgtatcttgtggacaagctcaccgccgacaaccgcatctaccacaaggcctgcttccgctgccaccactgcaagggcaccctcaagctcgccaactacaactccttcgagggagtgctctactgcaggcctcacttcgaccagctgttcaagaggacagggagcttggacaagagcttcgaaggaactcccacgggtgtctagccagatagatacgttgggaatgagaatgctactacagtctcaagcgcc

SEQ ID NO: 65507 - DNA, 302 bp, Zea mays
aaagcaggtagacatgttgttcaaggatctggatgaaagtgtagtatcgcctgacgtatatacttacaatggggtgcttgacgcatacgggaagaatggcatgatcaaagagatggaatctgtgttggtgcggatgaaaagcacgcaatgccgtccagatgtgatcacattcaacatactcatagattcatacgggagaagccgacatttgataagatggagcacgtgttcaagagcctactgcggtcaaaggagaggcctacacacccgacgtttaattccatgataacaaattatgggag

SEQ ID NO: 65508 - DNA, 130 bp, Zea mays
  unsure (1)..(130): unsure at all n locations
gagnaacacaccaagcgaaggcactagcaacgacctaacaacaatggctaccacgatattagccctccttgcgcttctggcccgtattttagagcgcaacaaatgcgttcattattccacaatgctcact

SEQ ID NO: 65509 - DNA, 161 bp, Zea mays
gcctgcgcccaggggttctggcatcgtcgccgcgcgcgtgcccaagaaggtgctgcagttcgctggcattgacgatgtcttcacctcgtcccgtggctccactaagacccttggcaacttcgtcaaggcaaccttcgactgcctcatgaagacctacggct

SEQ ID NO: 65510 - DNA, 269 bp, Zea mays
gcaccttcccaaaaaatcccccattttcttcgaggcgaggagagcgtgaaagacagggcaccggcagcgacgatgtcggggcgcggcaagggcggcaaaggtctgggcaagggcggagcaaagcgccaccggaaggtgctccgtgacaacatccagggcatcaccaagcccgccatccggaggctggctcggaggggcggcgtgaagcgcatttcggggcttatctacgaggagacccgcggcgtcctcaagatcttcctcgagaacgt

SEQ ID NO: 65511 - DNA, 303 bp, Zea mays
tgacaactcttacttcaaggaacttctgagtggtgataaggagggccttcttcagctcccaagtgacaaagccctgctgagcgaccctgttttccgccctcttgtcgagaaatatgctgcggatgagaaggctttctttgatgactacaaagaggcccacctcaagctctccgaactggggtttgctgatgcttaaatagaccctatcttggagtgatacattctgctgcctgtatggaatcatgtggtcttttgcatctggagtcaatgtgaacaagcagattgtcgtattgtctttctcgt

SEQ ID NO: 65512 - DNA, 78 bp, Zea mays
catggccaagctggcagagcaggcggagcggtacgaggagatggtcgagttcatggagcgcgtcgcgcgctccgccgg

SEQ ID NO: 65513 - DNA, 198 bp, Zea mays
gagaagtgcctgagggatgccaagatggacaagagcaccgtccatgacgttgtacttgttggtggctccactaggatccccagggtgcagcaactgctccaggacttcttcaacggcaaggagctgtgcgagaacatcaacccgggtaaggctgtcgcctatggtgctgctgtccaggtgcaatcctgagcggtgagg

SEQ ID NO: 65514 - DNA, 303 bp, Zea mays
gaaacaactaattccaagatttctgctattaaagaggagaaagatatgctgtcaaagttccttgaggaacaaaagaaaagtacggttgaagctcaggaaaacatggaggatgctcagaataccataaaaaggcttgggactgagagggagagttttgaagtaaggtctaagaaacttgaagaagagttggccacagcgaaaggtgagatattgcgtttgaggagacatattagtacaggtgggtctccgaacacccaagttctttcggaagcaggtgcagcgccaattagcagtcgagcactg

SEQ ID NO: 65515 - DNA, 298 bp, Zea mays
agaatctgaccggcatactgatgttatggatgctataactgaatacctcggtattggatcataccgtaaatggccagaggagaaacgccaagaatggctactatcggaacttaatggaaagaggccgttatttggtccggaccttcccaagtcagatgagattgctgatgtactagatactttccacgtattagctgaacttccatcagacagctttggtgcatatgtaatatctatggcgactgctccctcagatgtccttgctgtggagctcttgcagcgtgaatgccatgtgaaa

SEQ ID NO: 65516 - DNA, 299 bp, Zea mays
ctcccagggagcagcttgccaccaaggctgcccgtaagtctgcccccaccactggtggagtgaagaagcctcaccgctaccgccctggaactgttgcactccgtgagatccgcaagtaccagaagagcactgagctgctgatcaggaagctgcccttccagaggctcgttagggaaattgcacaggacttcaagactgatttgcgtttccagagccatgcggtgcttgctctccaggaggctgctgaggcataccttgttggcctgtttgaggacaccaacctgtgcgccatccatgct

SEQ ID NO: 65517 - DNA, 139 bp, Zea mays
ggaagaagggggcggccgggcgcaaggcaggcggccccaggaagaagtcggtgacgcggtccgtcaaggccgggctgcagttccccgtcggcctgatcgggcgctacctcaagaagggccggtactcgcagccgtgggt

SEQ ID NO: 65518 - DNA, 144 bp, Zea mays
caaatatatatgctgatggaagcatctgtttggatatcctacagaaccagtggagtcctatatatgatgttgctgcaattttaacttctatccagtccctgctgtgtgatccaaacccaaactcccctgcaaactcagaagcag

SEQ ID NO: 65519 - DNA, 145 bp, Zea mays
caaatatatatgctgatggaagcatctgtttggatatcctacagaaccagtggagtcctatatatgatgttgctgcaattttaacttctatccagtccctgctgtgtgatccaaacccaaactcccctgcaaactcagaagcagc

SEQ ID NO: 65520 - DNA, 294 bp, Zea mays
ttgctatgttgtaatgagcctgcagagacatttgtacgcgccgacggggcattcatcccatttgctcacgacttcgacatctccacagtcacaactacagttaggggtgttggtgacattggggatgttaaggttatagatctgcagagtccacttaatagcctcatagggaggcaagtatgcaaaatcggcagaagttctggtcacacaactggaactgtggtggcttatgcccttgagtacaatgacgagaaaggaataagctcttcactgacctccttgttgtcggcgaaa

SEQ ID NO: 65521 - DNA, 303 bp, Zea mays
cctccaccctccagcgcctccaccctcctcgccgcctcactccctctgaggtcgcagatccgtccggttagacgaagccgcccgcacccatggcctccggtgagctcgcctgcacctacgccgccctcatcctcagcgacgacggcatcgccatcaccgccgagaagatcgccaccatcgtgaaggcggccaacatcaaggtcgagtcctactggccggcgctcttcgctaagctcctggagaagcgcagtgttgaggatctaatcctctccgttggatctggtggtggcgctgctccaattg

SEQ ID NO: 65522 - DNA, 306 bp, Zea mays
cacatctaaccctacaaaccattgcaacgcaacaacaacaacaacaacagtttctgccatcactgagccacctagccgtggtgaaccctgtcacctacttgcaacagcagctgcttgcatccaacccacttgctctggcgaacgtagctgcataccagcaacaacaacagctgcaacagtttatgccagtgctcagtcaactagccatggtgaaccctgccgtctacctacaactactttcatctagcccgctcgcggtgggcaatgcacctacgtacctacaacaacagttgctgcaacaaattg

SEQ ID NO: 65523 - DNA, 307 bp, Zea mays
gcttatctgcggtgtcagctactgccacttcatgcaaatttgtcaccgggacttgaagctggagaacacgttgttggatggcagcccggcgccgcgcctaaagatctgcgactttggctactctaagtcatcgctgctgcactcaaagcctaaatccacggttggaactccggcgtacattgctccggaggtactctctcgccgggaatacgacggcaagatggcagacgtttggtcttgtggagtgactctttacgtgatgctggttggtgcatacccttttgaggaccccgatgatcccaagaat

SEQ ID NO: 65524 - DNA, 179 bp, Zea mays
gtcgtcctcctagctcctctactcgccagtcgccatgggcaagattaagatcggaatcaacggcttcggaaggatcggcaggctcgtggccagggtcgccctccagagcgaggatgtcgagctcgtcgccgtcaacgaccccttcatcaccacggactacatgacctacatgttcaagt

SEQ ID NO: 65525 - DNA, 169 bp, Zea mays
aacagttgttgccgttctacctgcacgctgcgcctaacgctggcaccctcttacaactgcaacaattgctgccattcaaccaacttgctttgacaaacccaacagcgttctaccaacaacccatcattggtggtgccctctttgagattgcttatgagttatacttcaa

SEQ ID NO: 65526 - DNA, 124 bp, Zea mays
gttccatgtacatgcacttggtgacaccaccaatggatgcatgtcaactggaccacactacaatcctgcgagcaaggagcatggggcaccagaagatgagaaccgccatgctggtgatcttgga

SEQ ID NO: 65527 - DNA, 297 bp, Zea mays
ggaaatacccccctacaccttgcctgtgagcagggctgcctggccagcgtgggagtcctgactcagtcctgcaccaccccgcacctccactccatcctgaaggctaccaactacaatggccacacgtgtctacacttagcctctatccatggctacctgggcatcgtggagcttttggtgtccttgggtgctgatgtcaatgctcaggagccctgtaatggccggactgcccttcacctcgcagtggacctgcaaaatcctgacctggtgtcactcctgttgaagtgtggggctgat

SEQ ID NO: 65528 - DNA, 306 bp, Zea mays
cctagcaccgccgcatccgcagccatgggtatcgacctcgttgccggtgggaggaacaagaagaccaagcgcacagcgccgaagtccgacgatgtttatctcaagctccttgtcaagctctaccgtttcttggtcaggaggaccaagagcaacttcaatgctgtcattctcaagaggctcttcatgagcaaaaccaatcgcccaccaatctccatgcgccgccttgtcaagttcatggaaggataggagaagaacattgctgtgattgttggcacagtcacagatgacaagaggatccaagaggtt

SEQ ID NO: 65529 - DNA, 163 bp, Zea mays
tctgaatgtactgctgaagaagcatataactggactcagggtcgtgcaatatttgccagtggcagtccatttgaccctgtggagtacgatgggaaggtttttgtacctggacagtcgaacaacgcctacattttccctggattcggcctcggtctggtgatct

SEQ ID NO: 65530 - DNA, 112 bp, Zea mays
gcagtccgcagaccggtcactcggcagtcggcacgcaggctagcagcacagcagcagccagagccatcccctctcctcgctacgcttcgcttcctcggcgccgattcctcct

SEQ ID NO: 65531 - DNA, 123 bp, Zea mays
gtggtctataatgcatcaaacaatgagcttgtgaggactcagactcttgtgaagagcgccattgtacaagttgatgctgctccattcaagcagtggtacctcactcactatggagtggacatc

SEQ ID NO: 65532 - DNA, 296 bp, Zea mays
  unsure (1)..(296): unsure at all n locations
ttccgttctcaaaccaacctaggcaattcgccgcagcctctcaccctcgcgagtcccgacctcccgcagccgccgcacagatggcacccaaggcggagaagaagccggcggccaagaagcccgcggaggaggagcccgcgacagagaaggtggagaaggctccggcggggaagaagcccaaggccgagaagcgcctcccggcgggcaagtccaaggagggcggcgagggcaagaaggggnaaaagaaggcgaagaagtccgtggagacctacaagatctacatcttcaaggtgctg

SEQ ID NO: 65533 - DNA, 285 bp, Zea mays
caggacccccagaggcggccgtggcggcggtggcaggggtggccgcggcggtggcatgaagggcgggagcaaggccgtcgtggtggcgcacaagcacgccggtgtcttcatctccaagtccaaggaggatgcgctctgcaccaagaacatggtcccgggagagtccgtgtacggagagaagcgtgtctccgttcagaatgaggatggaacaaaagtcgaatacagggtgtggaacccttccgttccaagctggctgctgctgtgcttggtggtgttgacacatct

SEQ ID NO: 65534 - DNA, 300 bp, Zea mays
cccaacgagaagagcggcggcgcgggcggacaaggagcaggcggaggaggagctgtgccaagccacaatgggtatctcacgcgactcgatgcacaagcgccgtgccaccggtggaaagcagaaggcctggaggaagaagcgaaagtatgagcttggtcgccagccggccaacaccaagttgtcaagcaataagacagtgaggagggtccgtgttcgtggaggtaacgtgaagtggagggctcttcgccttgatactggtaactactcatggggaagtgaagctgttacccgcaagacccg

SEQ ID NO: 65535 - DNA, 304 bp, Zea mays
tcgatggtgtcagagatgagacaggtgcaagccccactgcctgggctgtttggacgagggcatggactgctgaggagaacaggcatggtgatctgctcaacaagtatatgtacctcactgggatggtggatatgaggcagattgagatgacaattcagtagcttattggctctggaatggatcctaggactgagaataatccttatcgtagtttcatctacacctccttccaagagcgggcgaccttcatctcatactgtaacactgctcgtcacgccaaggactttggcgacttatagttgca

SEQ ID NO: 65536 - DNA, 167 bp, Zea mays
gattgtccaacattagtatgcactgatctggcagctagaggcctggacctggatgttgaccatgtcatcatgtttgacttcccatcgaattctattgattaccttcacagaaccgggagaactgcacgcatgggagccaaagggatagttacaagcattgtggctaa

SEQ ID NO: 65537 - DNA, 287 bp, Zea mays
ctcctccgaagccatcgtccccgtcccagcctccccggactccaggggcaaaagctgcagcgtcgagatggtgaaggggcgcacggggcagcgcgtgaggctctacgtccggggcaccgtccttggatacaagcggtccaagtcgaaccagtacgagactacgtcgctggtgcagatcgagggggtgaacaccaaggaggacgtcgcgtggtactgcgggaagcggatggcctacatctacaaggccaagaccaagagcagcggcacccactaccgctgcatctggg

SEQ ID NO: 65538 - DNA, 297 bp, Zea mays
ttctcaaggaaggtggagagaatgcagaggtcaacatttgtaacttagaagagtatatttctttggttgtggatgctactgttaagaccggcataatgcggcaagtagaggcatttaaggcaggattcaatcaggtgtttgacatatcatcactgcaaatattttctcctcaagaacttgattatctgatttgtggtcgctgtgaactttgggagccggaaacactgcctgaacatataaaattcgaccatggttatacctctaagagtcctgcaattgttaattttcttgagatca

SEQ ID NO: 65539 - DNA, 296 bp, Zea mays
cccaggtggcggcagcggcggcggggtagcatttgtgctacgagggcttttgcaatggcggcttcggggttcggcggcggcgaggcgttccggctctcggccgcaccaggggccggcttactgaagctgcacaagggcgacatcaccctctggtccgtcgactgcgccaccgacgccatcgttaatgctgctaatgagcgaatgttaggtggcggaggtgttgatggagctatacatcaagctgctggaccagagctagtgcaagcatgccggaaagttccagaggtcaaaccagg

SEQ ID NO: 65540 - DNA, 352 bp, Zea mays
attcggctcgagcacgcctccgccaccctaccaactactcaataaccctagctaaaccccacgccgccgcggcgacctcctccgccggcaggatggacagcctcaggggagccaagttgccgggcgtgccgaaggcgggagtgcgctcgtgaaggtggcgctgctcggcggcgcggggctctacgccgtcctcaacagcttctacaacgtcgagggcggacaccgcgccatcgtcttcaaccgcctcgaggggatcaaggacaaggtgtacaccgaaggaactcacctgatgatcccgtggatcgataagccgatcatctacgacgtccgcgcccgacccgacctcgtcgag

SEQ ID NO: 65541 - DNA, 337 bp, Zea mays
acaggatatattgtcagtccagatgcaatgtttgatgtgcaggtgaaaaggatacatgaatataagcggcagctgctaaatatccttggaattgtctaccgctacaagaagatgaaagaaatgagcacagaagaaagagcaaagagctttgttccaagggtatgcatattcggtgggaaagcatttgccacatatatacaggcaaaaaggatcgttaaatttattacagatgtggcagctaccgtgaaccatgattcagacattggagatttgttgaaggtcgtattagttccagactataatgttagtgttgccgaggcgctaattcctgccagtg

SEQ ID NO: 65542 - DNA, 259 bp, Zea mays
gatatgaactagaagaaccacggagttctgaaggtgatcaactcccaaggcttcaaagcttgcaaaggatactccaaggaagtgtggctgtgcaggtcaacagtggggtattaagtgtgtgcactgcattcttatctggcgagccagcaactaagctcagatcgcaagaactgcagcagctcatcgcagcattgcttgaattcatggctgtctgcaagcgtgcaatccgtgagcatttcagattgataggtgaagaaga

SEQ ID NO: 65543 - DNA, 332 bp, Zea mays
gcgccactgatctgctctgttgctggtgactatgagcagtagcgagagggattctggatggccaagtcgaagaaccacaccgcgcataaccagtcgttcaaggcgcacaagaacggcatcaagaagcccaagcgccaccgccagacctccaccaaggggatggacccgaagtttctgaggaacttgaggtactcaaggaagggcaacaagaagagtggcgaggctgagtccgaggagtaagatgatggtgattgagtctgtggcgacaaatgcatctcatgtatcgctaagagtcttagctagtgacttagttctcacttctgtgtgactgt

SEQ ID NO: 65544 - DNA, 298 bp, Zea mays
gtggtctataatgcatcaaacaatgagcttgtgaggactcagactcttgtgaagagcgccattgtacaagttgatgctgctccattcaagcagtggtacctcactcactatggagtggacatcggtaggaagaagaaggtgcctgttgctaagaaggatgcgactgatggacaagagtgtgaggctatagctgaggaatcaaagtagagtaaccatgtgcagaggaagattgagaagcgacagaggaccgtgcactcgacactcatgttgaagagcaatatggcagtaggagattgtt

SEQ ID NO: 65545 - DNA, 328 bp, Zea mays
gtcgtgcggcaacgagccaatcttcaaggacggcaaaggatgcgggtcctgctaccagatccggtgcaaggaccaccctgcgtgctccggcgtggcggagacggtgatcatcacggacatgaactactacccggtggccccctaccacttcgacctgagcggcactgccttcggggccatggcaaaagacgagcacaacgacgagctaaggcacgcaggaatcatcgacatccagttcaagagggttccctgccagtaccctggtctgacggtgaccttccacatcgagcgtggctccaaccccaactacctggcggtgctggtggag

SEQ ID NO: 65546 - DNA, 274 bp, Zea mays
cctcacacggcactccagccgctagccctcactcaaccagacaaccagtacaccaccgccaccaagcccgggccgaataactctgccgggcaaccgccgcccttcgccggcaaagaacgcccaccagatccaccccggcctgctatggagtccgcggtgaacccgaaggcgtacccgctggctgatgcgcactgacgatgggtatcctcgatatctccagcaggccgccactacaagcagctcagaagggagcgacgaagcgacgataccctga

SEQ ID NO: 65547 - DNA, 333 bp, Zea mays
  unsure (1)..(333): unsure at all n locations
ccgcctcgggccaaaccctacgcagggagttgattgatcgattgcagccatgagtaagttgcattccgagcttctcaaggattgcatctcccagatagttcaggatgccaagaagaataggaagttcactgagactgttgagcttcagattagtctgaagaattatgatccacaaaaggacaagcgtttcagtggctctgttaagttgcctcacatccctcgtccanagatgaaggtgtgcatgcttggtgatgcncagcacgttgaggaggctgagaagatgggacttgactacatggatgttgaggcctcaaaagaaatgacaagacaaga

SEQ ID NO: 65548 - DNA, 289 bp, Zea mays
caaccatgcggagatggggctcacgttcacgaagctgttcaggcggctattcgccaagaaggagatgaggattctcatggtcggtctcgatgcagctggtaagaccacaatcctctacaagctcaagctcggcgagatcgtcaccaccatccccaccattggatttaacgttgagactgtcgagtacaagaacattagtttcactgtttgggatgtcggtgtcagtctaggtccgcccctgtggagcatacgccagacaccagggctcttttgttcgtgcacacgcagg

SEQ ID NO: 65549 - DNA, 314 bp, Zea mays
tcggtatcaacgagtacacatccagctacatgaaggggcagaagctggtccagctggcgcccagtagctactctgccgattggcaggttcaatatgtttttgcacgcaatggcaaaccgattggaccacaggcgaattctaagtggctctacatcgccccgacggggatgtacgggtgcgtgaactacctcaaggagaagtatgggaatccaacgatctacataacggagaacggaatggaccagcctggaaacttgacccgagaccagtacctgcgcgacgccacgagggtgcggatctacaggagctacatc

SEQ ID NO: 65550 - DNA, 326 bp, Zea mays
ctcccgcctccactaccccactcccaggcgccgcacaggtacgtcgccggcggcgatgacgacgcgcttcaagaagaaccgcaagaagcgcggccacgtgtccgccgggcacggccgcatcggcaagcaccggaagcatcccggaggtcgcggtaacgccggtggcatgcaccaccaccgcatcctcttcgacaagtaccatcccggctacttcggtaaggtcggcatgcgctacttccacaagctccgcaacaagttctactgccccgcggtcaacatcgagcgcctctggtcgatggtgcccgccgaaaggcgcggaagcgtcg

SEQ ID NO: 65551 - DNA, 338 bp, Zea mays
gatgatttgctgctgcaacaagatggatgcaaccactccgaaatactccaaggcacgttatgatgagattgtgaaggaagtctcatcctacctcaagaaagttgggtacaaccctgataagattgccttcgttcccatttctggttttgagggcgacaacatgattgagaggtccaccaaccttgattggtacaaaggcccaaccctgcttgaggctcttgaccagatcaccgagcccaagaggccttcggacaagcccctgcgtctgccactccaggatgtgtacaagattggtggtattggaactgtaccggttggtcgtgtggagactggtgtca

SEQ ID NO: 65552 - DNA, 336 bp, Zea mays
tctcggtatacggctcgaggtcaaatcactggaatgaacatgggaaacctgcctttgacagcttcttgcagaaggaatctgaaaaaacattgcagacaaagaaatgggctgagcctcatctggaaactgctaagacaaaatggatgcctgttgctaaagaaaaatgggttaccttgaagaaacatgcaaagccctatgtccaaatggtctcagagaaatcattggaggcttatcaaacatcaagtgactttgtcaggcctcatcttgtaaatgcacatcaagttgttgatccctatttcccaggagccaagaaattatccaagccatatgttgatc

SEQ ID NO: 65553 - DNA, 184 bp, Zea mays
gggtgattgatgtggccaaagacatttgcaggctctttggcttggatactgacaaagtaatcaggtttgttgagaacaggcccttcaatgaccagaggtacttcttggatgaacagaagcttaagagactgggatgggcagagcgcacaccatgggaagatggcttgaagaagacaatcgagtg

SEQ ID NO: 65554 - DNA, 141 bp, Zea mays
aagcaacatagaaagtggaatccagtagcaacaatagagcaacaatggcgaccaagatacttaccctgcttatactccatgcacatactgcatgtgatgctaacgcgacaatactccctcaatgctcacaagcgcctgtag

SEQ ID NO: 65555 - DNA, 337 bp, Zea mays
ctctccagcaatccctagcagaagccttccatcctcactcgctcgatggcccgcacgaagcagacggcgaggaagtccaccggcggcaaggcgccgaggaagcagctggcgactaaggcggcccgcaagtctgcccctgcgaccggcggagtgaagaagccccaccgcttccgacccggcaccgtcgcgctccgggagatccgcaagtaccagaagagcacggagctgctgatccgcaagctgccgttccagcgcctggtgcgggagatcgcgcaggacttcaagaccgacctacgcttccagagctctgctgtctccgcgctgcaggaggcggctg

SEQ ID NO: 65556 - DNA, 346 bp, Zea mays
caatcgtctgacaaatcttgcggagattgatcccctggcatctcttccaaagctacagttccttagcttactggataatactgtaactaagcagccagattacaggctgtatgtgatccataaattgaagcatttgcgtttgctggatttcaagaaagtgaaacaacaggagagagttgcggcagcgaaaaagttccactcaaaggaagcagaggaggaggcaaagaaggtgcctgccaaaacgtttactcctggtctgcctgatgctcaggacatcacaatggagccacaaggtcctaaagtagttgctccaactcctgaacaaatcacagctatcaaggctgct

SEQ ID NO: 65557 - DNA, 339 bp, Zea mays
caatcagtgggcagcggtcccactttggatttagcatcccgattagctcgtttgagagcggttgttctacatagcccaattttgtctggcttaagggtgatgtatcctgtaaaacatacatactggtttgacatatacaagaacatcgacaaaattccattagtcaggtgtcccgtgctagtgatacatggcacagccgacgaggttgtcgactgctcccacgggcggtcgctgtgggagctggcggacgtgaagtacgagccgctgtggatcaagggcgggaaccactgcaacctagagctgtacccggagtacatcaagcacctgaagaagttcgtc

SEQ ID NO: 65558 - DNA, 180 bp, Zea mays
ccaccagcagttctgtagaaatggctgatggtgaggacatccagcctcttgtctgcgacaatggaaccggaatggtcaaggctggttttgccggcgatgatgcaccaagggctgtattccctagcatcgttgggcgtcctcgtcacaccggtgtcatggtagggatggggcagaaggatg

SEQ ID NO: 65559 - DNA, 213 bp, Zea mays
gttgttttcttcacaaattcaggcacggaggcaaatgagcttgcactgatgattgcacggctttacactggttgcaatgacattatctctcttaggaatggataccatgggaatgctgctggaacaatgggtgctactgctcaatccaattggaaattcaatgttgttcagacgggagtacaccatgcgcttaatccagaccccttcagaggt

SEQ ID NO: 65560 - DNA, 272 bp, Zea mays
  unsure (1)..(272): unsure at all n locations
cttgtgtcnccgccgccgccacctgctgcagcttctcaaccggataggtagcaccggagcaggtagaacgctgcacaatccccttcgccgccgccaagatggtgaacgttcctaagaccaagaagacgtactgcaagaacaaagagtgcaagatgcacacactccacaaggtgactcagtataagaagggcaaggatagcctgtctgcccagggaaagcgccgctatgaccgcaagcagtcaggatatggtggtcagaccaagcctgtcttc

SEQ ID NO: 65561 - DNA, 253 bp, Zea mays
cacttctccaggtaaggaaagggttcgtactcatggcgccgccgcagccaaagtcgggccttttcgttggcatcaacaagggtcatgtcgtcaccaagcgcgagctgcctccccgcccgtgccaccgcaaggggaaatcaacgaagagggtgtctatggtcaggggcctgatcagagaggttgctgggtttgctccttatgagaagcgtatcactgagcttctgaaggttggcaaggacaagcgtgccctgaa

SEQ ID NO: 65562 - DNA, 243 bp, Zea mays
atgatgctggtcatgacatggctgtcaagttgaaagtacggggtctagaagctgttgatcgagctattggtcagcttgcgatgcttctttgggaagctgaaaaggccggacactatcagtactttctttgcgtcactggagaccattctactcctgttgaatatggtgatcatagcttcgaacccgtcccgtttgcaatatgcagactgagagattatgcaggagccattggggaggataata

SEQ ID NO: 65563 - DNA, 313 bp, Zea mays
gggctctggatctggtctcactgtgattgataatcttgggcaaatgagccagtcattgggttacgaggaaacccatatatttgtgtcaatgataagcatctggaactttcttggacgtattggtggagggtatttctcagagattattgtcaaagattacgcatatccaagggcgatcgcattagcgatagctcaagtcctgatggcgatcgggcacttcaacttcgcgatggcttggcccgggacaatgtacatcggcacgctgctcgtcggagtaggctacggcgcgcactgggccatcgtgccagccgcg

SEQ ID NO: 65564 - DNA, 160 bp, Zea mays
agtgtaataccactacatccgctacattattgtcctggcaatgcagcccaggatgcttgtgactgtcgacgaggatctgaagcccctgtcagtacctgttcgcgacgggcaagctggcgacgtggctggtcaggcatgaaggccgaagacaatcaccggc

SEQ ID NO: 65565 - DNA, 153 bp, Zea mays
gctgggcactctagtcactggatgtgttgtgcatgcatcagctgtatgcccgtcgtctgttatggagaatattggtcaaatgtattctcttgctgaataattcgtgacatctaattgtgatgtatcgtctctttgctgaataatcagcttctg

SEQ ID NO: 65566 - DNA, 159 bp, Zea mays
caccacctcgcctgcgatctacgtagcctccgtcgcgacgagcatcgatcatgtcggcctactgcgtctaagtaccaggatgagctcatcaagaatgctgcctacattggcacccccggcaaggggatccttgctgctgatgagtccactggcaccatt

SEQ ID NO: 65567 - DNA, 155 bp, Zea mays
ggtgttttctccaagctgacaaatgcttactgtctggtagcgattggagggtcagagaacttctacagtgcctcttaggctgagcttgcagatgccatccctgtggtcaagacctctattggtggcactagaataataggccgactttgtgttgg

SEQ ID NO: 65568 - DNA, 175 bp, Zea mays
tgcgcctaccggaccgacgaagggaagccctagtgctgaacgtggtcaggcgcgccgagcaaatgttgatcaataatccgtcacgtgtcaaggagtacctaccaatcaccggtctggctcaattcaataagctgagcgctaagcttatctttagcgctgacagccctgctattca

SEQ ID NO: 65569 - DNA, 331 bp, Zea mays
gcgcgtcgctgcttccattaccgcctccgcaaccagcccgccgcgcccccgagcgtttcgttccgggagcggcaagactgggacacgccagccctttatttcgagctttctgcgtgcgggaggggggttgacaggcgatggcggccgagggcgaggcggcggcgctggagttcacaccgacgtggatcgtcgcggcggtctgctctctcatcgtgctcctctcgctcgtcgccgagcgatgcctccactacctcggcaagacgctcaagaggaagaaccagaagccgctcttcgaggcgctgctcaaggtcaaagaagagttgatgcttct

SEQ ID NO: 65570 - DNA, 247 bp, Zea mays
gtgctgaacattgagttgcaacaaatcatcgaggcttgcaaatttcttgatgagaaatggaatcccaagttcacgttgattattgcccagaagaatcatcacactaaatttttcattcctggaaagccagataatgtcccaccaggaactgtggtggacaacaaagtctgccatccaaagaacttcgatttctacatgtgtgcgcatgctggaatgatcgggactacgaggccaactcactatccac

SEQ ID NO: 65571 - DNA, 273 bp, Zea mays
  unsure (1)..(273): unsure at all n locations
gaataaatatgatactcaatcaactaatacctgaaacagtaagaatattctcggagtccanaaaatttgaaggattacgagttcgctgagtctggtataacacaccattttcagttgaaaatgtcactccttcagtgatacaggaatggattgaaaaagctcctactgaaaaactccatcttccataacctaatattttcataccaaagggattancntctgaaagaagngtcagaatagggtacctatccaacagtgttaaggaagagccca

SEQ ID NO: 65572 - DNA, 244 bp, Zea mays
cttcgccgccgccaagatggtgaacgttcctaagaccaagaagacgtatgcaagaacaaagagtgcaagaagcacacactccacaaggttattcagtataagatgggcaaggatagcctgtctgcccagggaaagcgccgttatgaccgcaagcagtcaggatatggtggtcagaccaagcctgtcttccacaagaaggccaagaccaccaagaagattgttctgaagctgcagcgccagagct

SEQ ID NO: 65573 - DNA, 259 bp, Zea mays
  unsure (1)..(259): unsure at all n locations
gatgatttgctgctgcaacaagatggatgcaaccactccgaaatactcaaggcacgttatgatgagattgtgaaggaagtctcatccctacctcaatgacagttgggtacaaccctgataagattgccttcgttcccatttctggttttgagggcgacaacatgattgagaggtcctacaaccttgattggtacaaaggcccaaccctgcttgaggctcttaccagantaccgagcccaagaggccntcggacaagccc

SEQ ID NO: 65574 - DNA, 207 bp, Zea mays
catctcgccgccgccgcgatgtctcgccgctatgacagtcgcacgacgacttctcgccggaggggcgtctctaccaggtggagtacgcgatggaagcgatcggcaagccgggtcagccctcgggatcctggcggccgacggcgtagtcctggtcggcgagaagaaggtgacctccaagctcctccagacctcccgctccgccgagaa

SEQ ID NO: 65575 - DNA, 308 bp, Zea mays
gctacctcaccaaggcaccactggttccgcccggcacaccggtggtgaatgctctggcaaagcagagggcgatgctggagaacatcatgagggcctgcgttggcctggccccagagaacaacatgatcctggagtacaagtgagccaagcggcgtggcctgcagctggatatggaggaggctgcacgaagggaactagagaggcgatattagttgtgggattgtgttggcttctcgtattatccttttgcgttcttttctggtcaccgctgtcgcgcttatgtattttattggtcggaccgtaactat

SEQ ID NO: 65576 - DNA, 306 bp, Zea mays
cctctcctctcgaggtattagcagtcgaccggttcctcggagcacgatgaagtttgttgctgcctacctgcttgctgtcctcgctgggaacgccagcccctccgctgacgatttgactgccattctggagtcagttggctgtgaagttgacaatgaaaagatggaactcctgctgtcccaactgagcggtaaggacatcaccgagctcattgccgcgggcagggagaagtttgcttcagtcccatgtggtggcggcggtgtcgctgttgcggcagctgcacctgctgctggcggactgcttctgca

SEQ ID NO: 65577 - DNA, 293 bp, Zea mays
ggaagatgaagatgataaaacagttttggatctagctgtggttttgtttgaaacagcaacgcttcggtcagggtatcttttaccagacactaaagcatatggagatagaatagaaagaatgcttcgcctcagtttgaacattgaccctgatgcaaaggtggaagaagagcctgaagaagaacctgaagagacagcagaagacacaacagaagacacagagcaagacgaagatgaagaaatggatgtgggaacagatgaagaagaagaaacagcaaaggaatctacagctgaaa

SEQ ID NO: 65578 - DNA, 307 bp, Zea mays
gatattttgagcttgtcataaagatgtatccccaagggagaatgtcccatcatttccgcgagatgaaagttggtgattatttgtctgtgaagggacctaagggccgattcaagtaccacgttggccaagtgagggcatttggaatgctggctggtggatcaggcattactccaatgtttcaagttgccagagcaattcttgagaaccctaatgacaacaccaaggttcacttaatttatgctaatgtcacatatgaagacattcttctgaaggatgagctggacgacatggccaaaacctatcctgg

SEQ ID NO: 65579 - DNA, 171 bp, Zea mays
cggacatctaccaccccgacggcaccgcggccgacgagcacggccaccaccacatgagcgtgttgcagcagcacgtcgccttcttcgaccgcgacgacaacggcatcatctacccttgggagacgtactccggatgccgtgcgcttgggttcaacatgatcctgtctctct

SEQ ID NO: 65580 - DNA, 154 bp, Zea mays
cattgattgtgctgagcacttgataaaaagcaagtactgctccagggaaaagctttgcattaatggcagaagcgcaggtggcttattgatgggtgctgtcctaaatatgaggcctgacttattcagggcagctgttgctggagtcccttttgta

SEQ ID NO: 65581 - DNA, 300 bp, Zea mays
gttgggtctgggacaccatggctccgatgaagctgtacggggcggtgatgtcgtggaacgtgacgaggtgcgcaacggcgctggaggaggctggctccgactacgagatcgtgcccatcaacttcgccaccgccgagcacaagagccccgagcacctcgtccgcaacccgtttggtcaggttccagctctgcaggatggtgacttgtacctcttcgaatcacgcgcaatctgcaagtacgctgctcgcaaaaacaagccagagctgttgaggcgaggaacctcgaggaggcagcatggtg

SEQ ID NO: 65582 - DNA, 307 bp, Zea mays
gatgaactggatggacaagaaggggatgggagtggcaagtcgaagcaaagcaggagtgagaagaagagccgcaaggccatgctgaagcttggcatgaagcccatcactggtgtcagccgggtcactgtgaagaaaagcaagaatatgctttttgtcatctcgaagccagatgtgttcaagagcccaaactcggacacctatgtcatattcggcgaggcgaagatcgaggacctcagctcccagctgcagacccaagctgcagagcagttcaaggctcctgacctgagccaaatgatcccgaagcctg

SEQ ID NO: 65583 - DNA, 254 bp, Zea mays
tgccgcgccgccaccccctacaggtaaggaagaggagggcaggatgtcgcaccgtaagttcgagcacccgaggcacggctccctcggcttccttcccaggaagcgctcctcccgtcaccgcggcaaggtgaagtcattccctagggatgaccccaagaagccttgccatctcactgccttccttggctacaaggctggcatacttcacattgtccgtgaggttgagaagccaggatccaaactccataagaagg

SEQ ID NO: 65584 - DNA, 287 bp, Zea mays
gactgaaacttgtgctggagggacattttcagagtatgatgacacatctgtcggtcgtgttggtgctccactaccttgttcgtatattaagttgattgactggcctgagggtggatacttgactgctgatttaccaatgcctcggggagaaattgtcattggaggtccaaatataactaaaggctatttcaagaatgaagctaaaacaaatgaagtctacaaggatgatgagaaaggtatgcgatggttctattctggcgacatcggacggttccatccagatggct

SEQ ID NO: 65585 - DNA, 92 bp, Zea mays
acaccacctcgccgcgatctccgtagcctccgtcgcgtcgagcatcgatcatgtcggcctactgcggaaagtacaaggatgagctcatcaag

SEQ ID NO: 65586 - DNA, 298 bp, Zea mays
agagtctatgatgaaagcagctctagataaatggggaacaatagatgtgctggtaaataatgcagggattacacgagacacattgttgatgaggatgaagaaatctcagtggcaagacgtaattgatctgaatcttactggtgtcttcctttgtacacaggctgcaacaaaagtaatgatgaaaaagagaaagggaaaaattatcaacattgcatctgtagttggtcttactggcaatgttggccaagctaattatagcgcaccaaggctggagtgattggtttcacaaaaacagttg

SEQ ID NO: 65587 - DNA, 125 bp, Zea mays
cctcaagttcgctcagtacactggcgctcatgccatcgctgggaggcacacccctggtaccttcactaaccagctccagacctccttcagcgagcctcggctgctcatccttaccgacccaagga

SEQ ID NO: 65588 - DNA, 302 bp, Zea mays
ccacctgagaggaagtacagtgtctggataggaggttcgatcctagcttcgctcagcactttccaacagatgtggatatccaaggaggagtatgatgagtctggcccggcaatcgtccacaggaagtgcttctaggtttcgcaagttcctcattgttatctagtctcaagttatgcccccgtcatttctcgagatatgtgtggcagatttgcctgcgacgtttattttcatcggacctgagtcttctcggggttagcagctacctttgtctgttgtggctccctgtgcgagcgtgctgtgtc

SEQ ID NO: 65589 - DNA, 294 bp, Zea mays
gtcgcctccctttccccttccctccctccctctccccgcgggccgccagaggcaatttcgccctcgattcgaccccgattcgtccgcccgcgaccgggattccctccgccaagcgcggatctgaacgctgcgctccgtgtcgccgctcgaatccgccatgaagggggccaaatccaagggcgacgccaaggccgatgccaagctggcggtgaagagcaagggggcggagaagcccgccaagggcaggaaagggaaggccggcaaggaccccaacaagcctaagagggctcccag

SEQ ID NO: 65590 - DNA, 283 bp, Zea mays
caggagtttgcccaggatgtgggccgcacgttcaagcaattcaacaagttaactgaggacaaggcagacgtgcagtccatcatcggcctgcagcgcttcttcgagacgcgcatgaacgaggccttcggtgacaccaagttctctgctgtgctggtggcacccccgccgatgagcctgcctggtgctggcctgagttcccaggagctgtctgactgccctggtgatggcccctgaggctggagctcccatggccagcccagcctggctctgttctctgtcctgt

SEQ ID NO: 65591 - DNA, 297 bp, Zea mays
gccaagacggttgttgaggttgatgctcttgctaaggcattggctggtcaaaaggatgaggcttacttcgcagcaaatgctgcagctcaggcctcgaggaaatcctcaccccgtgtgaccaatgaagaagtccagaaggctgctgctgctctcaagggctctgaccaccgccgtgcgaccaacgttagtgctagattggatgcccagcagaagaagcttaacctccccatccttcccaccactacaatcggttcgttcccacaaaccgttgagctcaggagggtccgccgtgagtac

SEQ ID NO: 65592 - DNA, 88 bp, Zea mays
cggaggatctctacttcctcattaagaaggccgtggcgattaggaagcatctggagatgaacaggaaggacaaggactccatattcag

SEQ ID NO: 65593 - DNA, 160 bp, Zea mays
actgactgtccggagtgatctgatgtttagcagtaccttgttaccagtatgcggtgatgcgtaggctgcagatgggacgaatgtgcttgtatgtgtatgtgtcctgctgcaagttgtcctttgctatttagaatggaagaagaaatgccttgtttctctg

SEQ ID NO: 65594 - DNA, 91 bp, Zea mays
tgtcactcggcacgcaggctagcagcacagcagcagccagagccatcccctctcctcgctacgcttcgcttcctcggcgccgattcctcct

SEQ ID NO: 65595 - DNA, 290 bp, Zea mays
acttcacgcacctcatgcccacccgctacaccctcgacgtcgacttcaaggacgtcgcatcgggcgggcccgacgcgctctccacccgggacaagaaggtcgaagcctgcaaggccgccaaggcgcgcctcgaggagaggttcaagaccggcaagaacaggtggttctttaccaaactccgcttctagacgtcgggcgtccctcatagtgtctgatttagttgtcaatttcttgtacctgaaccctttaaggtatctctgttttgctatttccatgaaggcttcgtgctt

SEQ ID NO: 65596 - DNA, 301 bp, Zea mays
gtgatgccaatgctgctctagagatcaacccagactctgcaaaaggctataaaactcgtggaatggcatatgccatgcttggcaaatgggaggaagctgctcatgatctgcacacagcatctaacatggattacgacgaggagatcaatgctgtgctcaagaaggtggagcctaatgctcacaagatagtggaccatcgcaggaagtatcagaggttgagaaaagagagggaggaaaagagagcgcataggatcggcttcgtcaacgtgcagaggcgcaggctgcttacgacaaggccaag

SEQ ID NO: 65597 - DNA, 88 bp, Zea mays
cgaccagggtaaccgcaccacgccctcgtacgtcgccttcaccgactccgagcgcctcatcggagatgcggccaagaaccaggtcgcc

SEQ ID NO: 65598 - DNA, 169 bp, Zea mays
ttctgattctaccaccacccgcctcctctcgagttcgatctgtttgctcccccagacatgtcgggccgcggcaagggaggcaagggcctgggtaagggcagcgcgaaacgccaccgcaaggtgctccgcgacaacatccagggcatcacgaagccggccatccggaggc

SEQ ID NO: 65599 - DNA, 164 bp, Zea mays
gctatggtccggtgcacactggcgccagatggttcaatgacatgatcaacgtgccattcacgtcgaagccgttcgtcgctgggttggtagcctatatcctggacaacaccctccaggtaaaggagagcgcggtgcggaaggacaggggcaaccactggtgggag

SEQ ID NO: 65600 - DNA, 287 bp, Zea mays
cgtgatctcaacccaaggcgtgcctccgctccggtcacccgtcgctccacgcaaccatgtcgaggacgaagaccagggagcccaaggaggagaacgtcacccttggacccactgtccgtgaaggagagtatgtctttggtgtcgctcacatctttgcatccttcaatgacaccttcattcatatcactgatttgtctgggagggaactctggttcggatcaccggtggcatgaaagtaaaggctgaccgtgacgagtcgtcaccttacgctgctatgcttgctgctc

SEQ ID NO: 65601 - DNA, 295 bp, Zea mays
ctcattgcagataatttttagcttagggcctggtggctaggtcggttctctcctttccagtcggagacctctgccgcaaacatgctccgccagatcatcggtcaggccaagaagcatccgagcttgatccccctctttgtatttattggaactggagctactggagcaacactgtatctcttgcgtctggcattgttcaatccagatgtttgttgggacagaaataacccagagccctggaacaaactgggtcccaatgatcaatacaagttctactcagtgaatgtggattaca

SEQ ID NO: 65602 - DNA, 292 bp, Zea mays
cataaactggagagggaggaaagcttggtgtcggcgtttgcgttcttcgataaggacgggagtggcttcataacgatcgacgagctctcacaagcatgcgaacagttcggtctttctgatgtccatctcgaggatatgatcaaagatgtggaccaaaacaatgacggtcagattgattatagtgagtttgccgcgatgatgagaaagggcaatgctggcggagcaggacggcggaccatgaggaacagcttgcatgtgaatcttggcgagctcctgaagcccaccgagacct

SEQ ID NO: 65603 - DNA, 258 bp, Zea mays
gaaatgtcaggggttcgggccccctatgaggagcccatcaaaagtgaagtcaatgaaaatttattctccaactaccctgttcttgatgttggaactggaaatggtcttcttttgcaagcattggctaagcaggggtttacagacttaactggaacagattacagtaaaggagctgttgaacttgcaagaaacctagctgctcgtgatggcttctcttcaataaactttttggttgatgatgtacttgagacaagttag

SEQ ID NO: 65604 - DNA, 79 bp, Zea mays
cggatctaggaagtgggcaccacgcttcgattacatcttgacccaacaggcgtttgtgactgttgacaagaaagcaccg

SEQ ID NO: 65605 - DNA, 87 bp, Zea mays
tgggtgtcgctgtgaacgatgagtgcatgctgaagtttggcgagctgcagtcgaagaggctgcaccgcttcataactttcaagatgg

SEQ ID NO: 65606 - DNA, 164 bp, Zea mays
agcggctacacaaggccccgtggcgatcacaaaaaaggagcctatatccatgtactagaattattcagtttcactccacatcgtgatgttgtatttttacttttgtcgtgctataggggatagcgctcctcgttggcgccactggggggtggttctgcctctgg

SEQ ID NO: 65607 - DNA, 290 bp, Zea mays
ctcaacgacgtctgccggcagtgctcctgctcctcctcctccttcccggccgccgcgcgagcttgggttagtgtctcttctaagcggagacctgtgagaggagccatcatcatggccgctgttgagactgttgtcctcaaggttgctatgtcatgcgagggttgcgccggggcggtcagaagagtgctctccaagatggaaggagttgaaaccttcgacatagacctcaaggagcagaaggtgacagtcaaaggcaatgtcaagcctgaggacgtcttccagacggtttc

SEQ ID NO: 65608 - DNA, 294 bp, Zea mays
gtaatgttaatgcatctgccattaatgttataaataccatcagtttgcaggaagtgcatatcagaggagtttgtaaataaggaagtgtgctgctgccctgtttgtagcattgacttgggctgtgctccactggagaaactcagaattgatcatagcctacagtatgtaaggtcaaaggtatttccttctaaaaaacgaaaggttgaggatccagaagtcacatcgccaattacatcacctataaagacgaaagtacggtctttatcttctttgacaaaacatgctcctcaaatg

SEQ ID NO: 65609 - DNA, 287 bp, Zea mays
gaacaaccgcagtcgaattgttcgtgaaggctggcagtgatggggccaagattgggaactgcccattctcccagagactgttcatggtactgtggctcaagggagtcaccttcaatgttaccaccgttgacaccaaaaggcggaccgagacagtgcagaagctgtgcccaggggggcagctcccattcctgctgtatggcactgaagtgcacacagacaccaacaagattgaggaatttctggaggcagtgctgtgccctcccaggtaacccaagctggcagctctg

SEQ ID NO: 65610 - DNA, 269 bp, Zea mays
cgactcgctcaaggtgctcgaggccgacatccagcacgccaactccattgcttctgaatttaggagggaatatgatggcgcctcccttcagatgaggatggcatattgccctgctgcccactttttcctttttcttgtgcagtggacagactgcaaccttgctggtgcacttgggctgttgaggattctaatttataaggtttacgctgatgggacaaccaccatgtgtactcatgaaagcaaagcaagcattagggaattttatgctg

SEQ ID NO: 65611 - DNA, 79 bp, Zea mays
caatcgtctgacaaatcttgcggagattgatcccctggcatctcttccaaagctacagttccttagcttactggataat

SEQ ID NO: 65612 - DNA, 277 bp, Zea mays
ctcgctttcgtcttttcccctctgctcgagtacgagcggctactcccggcggcggcggcgatgagcgcggtgaacatcaccaacgttgcggtgctggataaccccaccgccttcctcaatcccttccagtttgagatctcctacgagtgcctcgtgcccctcgacgacgatctggagtggaagcttatatatgttggatcagctgaagatgaaaactacgatcaacagcttgagagcgtgcttgttggccctgtcaatgttgggacctaccgttttg

SEQ ID NO: 65613 - DNA, 314 bp, Zea mays
cactgctcttgaaatagcttacaaacaggcaaaaaagcgaggaataagagttcgtggggttctcatatctaacccttccaacccaacaggaggcattgtgccaaaagaaatactgcatgaccttctacagtttgctgcagagaagaacatacacttaatttctgatgaaatattgctggttcaacatatggaagtgacaagtttgttagcgtggcagatgttgtggatgaactagaggactttgataaaggcagagttcatatcatatatgggctctcaaaagacctatctcttgccgggtttcgagttggagt

SEQ ID NO: 65614 - DNA, 271 bp, Zea mays
ggctcgctaggcatcatcatgatcatgcatcatggacttggcctactactgtggatttgtatgccattatagacttggtgctgtgaaagactgcttgatgatttgcgggtttgttgctgtgtaaaaaaaggtcccatggctcccagaagaccatgaaggttcggattatcatgtaattccttgttatctgccaattatgtatggactatggacatgtgttgcgctgttcaacttactactacaaataagtaatcgataatgttcccttcca

SEQ ID NO: 65615 - DNA, 186 bp, Zea mays
cggctttgtcaaggatgtagccaacatcataatctatgactgaggaagcgatggtggaggctgtggccctctacaaccctgtgagctttgcctttgaggtgactcaggacttcatgatgtatagaacgggcatctactccagtacttcctgccataaaactccagataagtaaaccatgcagtact

SEQ ID NO: 65616 - DNA, 196 bp, Zea mays
tgcctgtaccggattttagcttctatgatcgttctgctccaatttatacgcaacctagatatttgcctccttcaaaggttcttgatgctgatgtgacagacagtgttattggagaagggtgtgttattaaacattgcacaatcaatcattccgtagttggactccgttccgcatttctgaaggtgcagttatagag

SEQ ID NO: 65617 - DNA, 303 bp, Zea mays
tcctgccgctccgagaaagcaaacaagcgtcagtaccgccggcttcctccgcgctttctccccgccgccgccgccgccgctccttccctacgccaggcacgccaagatgaagctcgtcaggttccttatgaagctgaacaatgagacggtcaccatcgagctcaagaacggcaggttgtacacggcaccatcaccggtgttgacataagcatgaacactcatctgaagacagtgaagcttacactgaaagggaagaacctgtaacattgaccactcagcgtgcgaggaaacacatcgctacta

SEQ ID NO: 65618 - DNA, 249 bp, Zea mays
gacgtcacatcagcagccgccgaaggacagcgccgacgccgagcatgggctccatcccgcatccaccgccagaatgtttctcacgaggacggagtacgaccgctgggtgaacaccttctcgccggacgggcggctgttccaggtcgagtacgccatcgaggccatcatgttgggaccactgcgatcgggttgacaacaccggatggtgttgtccttgctgttgagaaacgtgtgacctcgcgactgctg

SEQ ID NO: 65619 - DNA, 246 bp, Zea mays
acgacacgatggagaatctactggcatctgtggacaagaacgaggcggaggtatcaccatcaacactatatgccattgcctgtgtcatggagggggtgccgttcatcaatgggagcccccagaacacctttgtgcctgggctgattgatcttgctataaaaaacaatgcttgattggtggtgacgacttcaagagtggacagaccaagatgaaatctgtcttggtcgatttccttgttggtgctgg

SEQ ID NO: 65620 - DNA, 283 bp, Zea mays
ggagtacaagggttatcttgcttctgtggactcatatatgaatctccagcttgccaacactgaggagtacattgatggtcaattctctggaaacctgggagagattctgatcaggtgcaacaacgtcatgtatctccgaggcgttccagaggatgcagagatagagatgcagagtgaggagatgcgatcaatgttagattgataaatgtaatatggttctggcatcaatgttcgaatatgccggtgacaagtagatctatcggatcgctttgttctcttgagt

SEQ ID NO: 65621 - DNA, 303 bp, Zea mays
gcacagctttggaagcttcctattgtgtttgttgtggagaataacctgtgggcaattggaatgtcacacattagggctacatcggacccagagatttggaagaaggggccagcatttggaatgcctggggtgcatgttgatggtatggatgtcctgaaggtcagggagttgctaaggaggcaattgagagggcaaggagaggtgaagggccaaccctagtcgagtgtgaaacatacaggttccggggtcactcccttgcagacccagatgagctcaggaagcctgatgagaaaacacactacg

SEQ ID NO: 65622 - DNA, 151 bp, Zea mays
atggcggttggcaagaacaagcgccttacgaaaggcggcaaaaagggagccaagaagaaagtggttgatccattttctaagaaagattggtatgatgtgaaagcacctgctatgttcaatatcagaaatattggaaagacgctcgtcacca

SEQ ID NO: 65623 - DNA, 253 bp, Zea mays
ctcccaacaccacctcgcctgcgatcttcgtagcctccgtcgcgtcgagcatcgatcatgtcggcctactgcggaaagtacaaggatgagctcatcaagaatgctgcctacattggcacccccggcaagggtatccttgctgctgatgagtccactggcaccattgcaagcgcctttccagcatcaatgtcgagaacgttgaggagaaccgccgtgccctccgtgagctcctattctgctgccctggtgctct

SEQ ID NO: 65624 - DNA, 179 bp, Zea mays
gaatgttccggattctacctatgatatgattggaggccttgaccagcaaattaaagagatcaaagaggtcattgagcttccaatcaaacatccggaactgtttgagagccttggaattgcacaaccaaaggtttgtttacttttttgaagaccatcttaactttggaactttacatgta

SEQ ID NO: 65625 - DNA, 285 bp, Zea mays
ggcgaaatggcccccaagcgaggtggcagggcgccggtgccggccaagaagaagacggataaagtgacgaaccctctgtttgagaagaggccgaagcagttcggcatcggcggcgcgttgccgcccaagaaggacctgcaccggttcgtcaagtggcccaaggcgtgcgtatccagcgccagcgccgcatcctcaagcagcgcctcaaggtaccaccggcgctcaaccagttcacccgcaccctcgacaagaactcgctacgaactgtttaagatgttctcaata

SEQ ID NO: 65626 - DNA, 307 bp, Zea mays
gccgccgcaccagcaatcacagcagcccggagaacgccctggtccaacaagatgcagatcttcgtgaagacgctgacagggaagaccatcaccctcgaggtcgagagcagcgacaccatcgacaatgtcaaggccaagatccaggacaaggaagggatcccgccgaccagcagcggctgatctttgccgggaagcagctggaggatggccgcacccttgcggactataacatccaaaaggagtctacgctccacctacgtgcttaggctccgcggtggaatcattgagccctctctgcaggcgctcg

SEQ ID NO: 65627 - DNA, 228 bp, Zea mays
ggttttgtgaaatggtgcatgggagaaaaagatgatggaagtgacagtattgccgtgcagcttgctgacgaaacacactggaatgatcttgtaattattattgcagtggtcagttcaaagcagaaggaaaccagtagcaccagtgggatgcgagatagtgtgaaacaagtcctctcttgcagtacagggcccagacagtggtgccaggtcgggtgttgaaaatggaag

SEQ ID NO: 65628 - DNA, 308 bp, Zea mays
cgtcgagtggccagctgcagcacctaccagtgttcccacaaccacatcacttcccacttccaaggtttttggtcgcgacagggatcgtgatcatatagtagattttcttctcgacaagacaacaactgctcaggcaagctcagctaagtactcgggtttggccatgttggagtaggaggaatggggaagtccaccttagcacagtatgtctacaacgacaaaaggatagaagaatgcttcgatgtcaggatgtgggtgtgtatctcacgcaaacttgatgtccatcgtcacacaagggagatcatgga

SEQ ID NO: 65629 - DNA, 261 bp, Zea mays
ggcgttttgatagacaggtgtctgtcgacgttcctgatgtacgtggaaggacagagattctaaaagtgcatggtagcaacaagaagtttgattctgatgttactcttgatgtcatagcaatgagaacacctgggttcagcggagcagacttggcaaacctctgaatgaagcagccattctggctggaagacggggaaggacagcaatttcttcaaaagagattgatgattctattgacagtattgtagctagtatggaggg

SEQ ID NO: 65630 - DNA, 282 bp, Zea mays
gtaccaattgcaagagagtctatccgggcagttggaaaaatagcactgcagcagtatgatgttaatgccattgtggacaggcttctacaatttcttgaaatggataaggattatgtgactgctgaaactctagtcttggtgaaagatcttctcagaaaattcctcaatggagtcatgattgtatagcagttgtgggaaatatcagcagcaaaaacattcaggagccaaaaggaaaagcagctctcatatggatgttgggagatattcacaggactgcatgat

SEQ ID NO: 65631 - DNA, 270 bp, Zea mays
gtcgcaactcgcaatcaaatcgaacgaacccagccgaagcgcgagctgagcaaggcggaagcggcgatggagcggctgcagcggatctttggcgcctccggcatggggcagccgccgacggactcgccgctgctcgactcttccgagcaggtctactctcctccctcgcgcttctcaagatgctcaagcacgggagggccggcgtgcccatggaggtcatgggtctcatgctcggcgagttcgtcgatgactacaccgtccaggtcgtcg

SEQ ID NO: 65632 - DNA, 294 bp, Zea mays
gctaagttgatttaccgacctgacacgggtgaaattcttggggttcacattttgggtttgcatgctgctgatctcattcacgaggcatcaaatgccatcgccctaggaactcgtgtgcaagacatcaagtttgctgttcacgcacaccctacatttctgaggtcctggatgaactcttcaaagcagccaaggttaattccggtgtttctcattctgtaaatgaaccagttgcagcctagagaaaggccggatagcaagccaaggcagccaccccaaccactcctgaaggtcctc

SEQ ID NO: 65633 - DNA, 234 bp, Zea mays
cttttggatgatcttgagggaacaaattctgatcaaagtgattcagaccatgtcacactagcgataagtattgaggacacaggtgttgggataccattgcaagcacaagatcgtgtttttacaccgtttatgcaggctgatagttcaacttcaggaattatggtggtactggcatcggtttaagcattagcaagtgcctagctgaacttatgggtgggcagataattttgtcag

SEQ ID NO: 65634 - DNA, 243 bp, Zea mays
gggagcagaaacgttggcgtgttggttgggtggcgtcggcatggactaggcaacgaagaagaatgtggaggctacggtgctggagatcctccggggctccgatatggagtccgtgacggagtacaaggtccgctccgctgccagcgaccgcctcgcatcgacctctccatacccgaccgcaagctcttcgtccgcggcgtctttgaggaatacctactttcactctcctccaagaaggaggcg

SEQ ID NO: 65635 - DNA, 201 bp, Zea mays
gcgatggcgatggccaggctcaccaagatcgggatgctgttcgtgcggtgccgcggcggcatcagccactcaccggaggagtcggtgatggacaacgacgtgtggaccgcggggctcgcgctgttcaacttcatcgaccagaacgcggtgtcaaagaactggatgccgggcaaacgtgatagctgtggcgctggcggtggc

SEQ ID NO: 65636 - DNA, 288 bp, Zea mays
cgtctttaaaccctgcgtggcaatccctgacgcacctgcgtgatgcccagggaatacagggcgacctggaagtccaactacttccttaagatcatccaactattggatgattatccgaaatgtttcattgtgggagcagacaatgtgggctccagcagatgcagcagatccgcatgtcccttcgcgggaaggctgtggtgctgatgggcaagaacaccatgatgcgcaaggccatccgagggcacctggaaacaaccagtctggagaaactgtgcctcataccggggg

SEQ ID NO: 65637 - DNA, 239 bp, Zea mays
ccaagatccaggacaaggagggcattcccccagaccagcagcgtctgatctttgcgggcaagcagctggaggatggccgcactctcgcggactacaacatccagaaggagagcacccttcaccttgttctccgcctcagaggtggtatgcgatctttgtaaagaccctgactggaaaaaccataaccctggaggttgagagctcggacaccatcgacatgtgaaggcgaaatccaggac

SEQ ID NO: 65638 - DNA, 196 bp, Zea mays
aaagggttgtgaggtcattgtgagtggaaagctcagggctcaaagagccaagtccatgaagttcaaggatggctacatgatctcatctggtcagccagtgaatgagtacatcgactcagctgtgagacacgtcctcctcagacagggtgttctgggtatcaatgtgaagatcacgcttgactgggacccgaaggca

SEQ ID NO: 65639 - DNA, 236 bp, Zea mays
  unsure (1)..(236): unsure at all n locations
ganattgtggatgaggaagccaccaagcctgagggatggttggatgatgaacccgaggagattgatgatcctgaggcagccaagcccgaggactgggacgatgaagaggatggtgaatgggaggcaccaaagattgacaaccccaggtgtgaagaagcacctggatgtggcgagtggaagaggccgatgaagcagaatcctgcttacaaaggcaagtggcatgcacctatgattga

SEQ ID NO: 65640 - DNA, 157 bp, Zea mays
gcggcaactcgacggccaaccgcgccaccctgccgcggcagccatggtgcatgttaacttctaccgcaactatgggaagactttcaagaagccaaggcggccgtatgagaaggagcgcctagatgctgagctgaagctggttggtgagtatggcctg

SEQ ID NO: 65641 - DNA, 351 bp, Zea mays
gcaaacactgaaaggtacagcaatgtgtgcgctggtctcaacgacacgatggagaatctgctggcatctgtggacaagaacgaggcggagatctcgccatcaacactatatgccattgcctgtgtcatggagggggtgccgttcatcaacgggagcccccagaacacctttgtgcctgggctgattgatcttgctatcaaaaacaactgcttgattggtggtgacgacttcaagagtggacagaccaagatgaaatctgtcttggtcgatttccttgttggtgctggaataaagcccacctcaatctgagctacaaccacttgggaaacaacgatggcatgatactgtctg

SEQ ID NO: 65642 - DNA, 360 bp, Zea mays
cagttcgcatccacgcgcgccgccgccgcctcgccggtcgacgctcaccgcgcagcatggcggaacagactgagaaggctttcctcaagcagccaaaggttttcctcagctcaaagaaatctggcaagggtaagaagcctggcaagagcggcaaccgattctggaagagcattggccttggcttcaagactcccagggaagcaatcgaagggacctacattgacaagaaatgcccattcactggaactgtttctatcagaggcagaattattgctgggacatgccacagtgctaagatgaacagaattcattgttcgcaggaactacctccactttgtaaagaaataccagagtatgaga

SEQ ID NO: 65643 - DNA, 356 bp, Zea mays
tgatcttctcaactaccaggtgaaagcatacctcgatcgcaagtcactggcaaattctctgaacgacataaagaccgtagttatgcaacttcacgacctcatcagtgttatagacttatagtcatcattgttacactactatttatgggcattgcgacaaccaagattcttgttgtcatctcgtcccagcttctggttgcgggattcatatttgggaatgcatgcaagactgtatttgaggcccttatatttgtattcatcatgcatccatttgaggttgctaaccgctgtgttatcgacgaaacagatgatcgtcgaggaaattaatatattaaccactgttctcttcaagaatg

SEQ ID NO: 65644 - DNA, 351 bp, Zea mays
cttgtttaccattcctccccaaaacacatcctgcgatcctcgaagcctccgccgagcatcgatcatgtcggcctactgcggcaagtacgcggatgagctcatcaagaatgctgcctacatcggcacccctggcaagggtatccttgctgctgatgagtcaactggcaccattggcaagcgcctttccagcatcaatgtcgagaacgtggaggagaaccggcgggctctccgtgagctcctgttctgctgccctggtgccctccagtacatcagcggtgtgatcctcttcgaggagcacctctacacaagaccaaggatggcaagcttttgtcgatgtctcaaggagggagg

SEQ ID NO: 65645 - DNA, 114 bp, Zea mays
tgtagagattgaatcgctgaattaactaaagcttgatgatgtcattgatcttgtcattccaagaggcagcaataagctggtttcgcaaatcaaggcatcgactaagatacctgt

SEQ ID NO: 65646 - DNA, 336 bp, Zea mays
cacatcacaacaagggtcttgctttcacggagaaggagagggatgcacaccacttgcgtgggctgcttcctcctgcagttgttcctcaagaactccaaattaagaagatcatgcacaacctgcggcagtaccaggtccctttgcagcgctatatggccatgatggaccttcaggagaggcacgagaggctttctacaagcttttactcgataacgtggaggagctgcttcctgtggtttatacaccaactgtaggtgaggcctaccagaagtatgggcccatctttcgacacacacagggtctgtatcagcttgagggacaaagggaaggtcctag

SEQ ID NO: 65647 - DNA, 351 bp, Zea mays
atgatcccaaacgccgtggccatgctcgacgggctgtgcaagaacggcctggtgcaggacgccatgaagctgtttggtctaatgcgagagaagggagccatcccggaggtggttatctacacagctgtcgtcgaggcattctgcaaggtggctaagctagacgacgccgtgagaattttcaggacgatgcaagggaatggagtcatccccaatgcattcagctattggctcctgatacaggggctgtacaaggggggcaggctggatgatgctgtcgggttctgtgtggagatgtttgaggccgcttgcaccgaatgcggagacgtttgtaggcttgcttgatgcagtgtg

SEQ ID NO: 65648 - DNA, 348 bp, Zea mays
acaagattggtggtattggaactgttccagttggtcgtgtggagactggtgtcatcaagcctggaatggttgtcaccttcggtccaactggcctgaccactgaggtgaagtctgttgagatgcaccacgaggctctccaggaggcccttcctggtgacaatgttggcttcaatgtgaagaacgttgctgtgaaggatctcaaacgtgggtacgtggcctccaactctaaggatgaccctgccaaggaggctgctagcttcacctcccaagtcatcatcatgaaccaccctgggcagattgcaatggctatgcaccagtgctggactgccacacctcgcacattgctgt

SEQ ID NO: 65649 - DNA, 352 bp, Zea mays
ccaaacatcaagaactggcagatcgaaagctacggcgagcacgagtaccacagggccaaagtgcacttaagatgtgcgcgtgggcagtccatttccgcaatcaaattcgcaagctttgggacacctacgggaacctgtggagatttccagcaaggagattgccactcagctaactctcacacagtcctagagaagaaatgcattggactccaaagatgcgtcgtcgccatctcccccgagagctttggaggagacccctgcccgagcgtgacgaaaagggtggcggtccaggcagtatgttctccgtcgcgtagccttacttctccaagcaatggatttggcaggcggtcga

SEQ ID NO: 65650 - DNA, 309 bp, Zea mays
ccatgactactgctggttatgatgccctgcagcaaggttggccaaaaggaagaggaagaatcaatacaggggtatccgccagcggccttggggtaagtgggctgctgagatcagagatccccagaagggcgttcgtgtttggcttggtactttcaatagtcccgaggaagctgcaagagcttatgatgctgaagcgcgcaggattcgtggcaagaaggccaaggttaactttcctgatgcaccagcagttggtcagaagtgccgttctagttcagcttctgctaaagcactcaagtcatgtgtgaacag

SEQ ID NO: 65651 - DNA, 205 bp, Zea mays
tatcatcttatccccgcctcctccggtcctcccgccgctgttgctcacttctgagtcccgacgcacgagctcccaagagctagccatggcgtccaccaccctctcctccgccttcaccctcctatcccgcccctcctccggtcctcccgccgctgttgctcacttctgagtcccgacgcacgagctccaagaagcagctcgagga

SEQ ID NO: 65652 - DNA, 160 bp, Zea mays
gggaagaaccgaggtggaacaactacacaagatttttaagctatgcggttcacctgctgatgattattggaagaagtcgaagttgcctcatgcaacagtatttaaaccgcatcatccatatcccagtacccttcgagatgtttttaaagaggtcccagaa

SEQ ID NO: 65653 - DNA, 189 bp, Zea mays
ctcaaatatgaaaatgatgctggcaagaaggaaattcagctgcagcttgagaagatgaagaaatatgcttctgttatccgtgtcattgctcatacccagattaggaagatgaagggtttgaaacagaagaaggctcacctgatggagattcaggtcaatggtggtaccattgctgacaaggtggactac

SEQ ID NO: 65654 - DNA, 263 bp, Zea mays
tgttcatccggaacaataattaaaggggatccggatttgttcttgtgatataattaacgattcctgttatacttggaagtacaagaatgcttgttgcacgagtggcagactcgaactggaacttatacacaaagttcagacacagtgctatgaggatgctaagctgatgaagctgtttccggaaatcataagaacactgtatgaccaagatgtcctagctgaagatactatagtcctttggttccgtaaaggttcaaacccga

SEQ ID NO: 65655 - DNA, 348 bp, Zea mays
aaagcaacgctaatgactgctgtacctgctatacttgatcgtgttcgtgatggtgtacgaaaaaatgtagatgcaaaaggtgggttagcgaagagattatttgatattgcctatagccgtcgtctagctgctgtcaatggaagctggttgggtgcgaggggactagagaagcttttgtgggatatgctcgtcttccgaaaggttcgtgcaatcttgggaggacggattcgctttattcttgcaggtggagcacctctgtcaggggaaacacagagatttatcaatatatgtcttgtgctccaatatctcaaggatatggcttgactgaagactgtagctggtgggaca

SEQ ID NO: 65656 - DNA, 347 bp, Zea mays
cacgaaaacacatttgtgggatgactggtgatggagtaaatgatgcccctgccctaaagaaagctgatattggtatagcagttgctgatgccactgatgcagccaggagtgcttctgacattgtcctgacagaacctggcttgagtgtgataattagtgccgttcttaccagccgggcaattttccagaggatgaagaactacacgatctatgctgtttccatcacaatacgtattgtgctaggatttatgctacttgccctcatatgggagttcgatttcgcaccatttatggtacattattgcaattctaaatgacggtaccataatgaccatatcgaaggatcg

SEQ ID NO: 65657 - DNA, 350 bp, Zea mays
aggagaacaagagcgaagagtactattctaatgaccgtgacaggaccaagaatttgggagtgttgctgcatggtgatggtagtttctcagggcagggcgttgtgtatgagacgctgcatctcagtgcccttgaaaactacaccactggtgggacaatacatatcgtggtcaataatcaggttgctttcactactgatccaaggtcagggagatcctcacaatattgcacagatgtagcaaaagcattggatgctcctattttccatgttaacggtgatgatttggaggctgttgttcagtctgtgagctcgccgcagaatggcgtcagacatttcattcagatgtagtgg

SEQ ID NO: 65658 - DNA, 353 bp, Zea mays
agagacaacaagcaacatagagagtggaatccagtagcaacaatagagcaacaatggcgaccaagatattttccctccttatgctccttgctctttctgcatgtgttgctaacgcgacaattttccctcaatgctcacaagctcctatagcttcccttcttcccccataccttccatcaatgatagctcctatgtgaaaaccagatctgtaaccctataggctgcaacaagcaatcgcagcaagcagcatacctttatcacccttgtttcaacaatcgcgcgcactatctttggtgcaggcttgtacgaaccatcagggcacagcggctgcagcaactcgtgctacctgtgat

SEQ ID NO: 65659 - DNA, 351 bp, Zea mays
gccgccgtcgcagcaatcacagcagcccggagaacggccaggtccgacaagatgcagatcttcgtgaagacgctgacagggaagaccatcaccctcgaggtcgagagcagcgacaccatcgacaatgtcaaggccaagatccaggacaaggaagggatcccgccggaccagcagcggctgatctttgccgggaagcagctggaggatggccgcacccttgcggactataacatccaaaaggagtctacgctccacctcgtgctcaggctccgcggtggcatcattgagccctcgctgcacgctcgctcgcaagtacaaccaggacaagatgatctgccgcaatgctatgca

SEQ ID NO: 65660 - DNA, 340 bp, Zea mays
acaaacccctgcctcccaccagaaaagcaagcagaccacacccacccgcctctaaaccaaccagcctgtccccattccccgtccccggcgatgcacgccagcatccactccctcccgtcagcctcttcttctccccctgatgagcgctgagttctgtgctgccgctgctggtgctgtggccatggagctcggagtcggggatgtgatggggctgcagcaaggcatcgccgccgccaccgggccatcgtccggagacagcgacctgggtcttctcaagcgagcaggcctcgcccaggcagcacctctacccctgcgctttcctcgaccaacagaagatgct

SEQ ID NO: 65661 - DNA, 385 bp, Zea mays
atacacgaggtagtaactcggaatctcgtcgtacagctcgagcaaaaagtcagaagaagcttgcaagcgagaagggtgaagtctacactttgcttgggcggtcgcgccattttccttacctgactcagtatggtcctggccaacgaggtcatattgagcgtgctgctataaatgcaccagtgcagggaagtgcagcagatgttgctatgtgtgccatgcttgagatcgaaaggaatgtccgccttaaggagcttggttggaggctcttattgcaggtgcatgatgaagtgatactggaagggccttcagagtctgctgaggtggccaaggctaagtggtggagtgtatgtccaaacctttctacggaaccttagtcttgaacgtc

SEQ ID NO: 65662 - DNA, 311 bp, Zea mays
aggcggtggacgacagcaccacaccacctccaactacccgagaccatcgacgagcatcttcctgcatctgcaatggctgccgctaccgtgtccgtcgcccgcatcaagctgggctcccaagggctagaggtctccgtgcagggcctcggctgcatgggcatgtgcgccttctacggtccgcccaaacccgagcctgacatgatcaagctcatccaccacgccgtcgccgccggggtcacctccttgacacctccgacatgtacggtccgcacaccaacgagatcctgctaggcaagcgttcaaggcggtgt

SEQ ID NO: 65663 - DNA, 292 bp, Zea mays
  unsure (1)..(292): unsure at all n locations
cggcggtcgacgctcaccgcgcagccatggcggaacagactgagaaggctttccttaagcagccaaaggttttcctccacatcaagaaatctggcaatggtaagaagcctggcaaaggcggcaaccgattctggaagagcattggccttggcttcaagactcccagggaagcaatcgaagggacctacattgacaagcaatgcccattcactggaactgttctatcagacgcaaattattgctgngacatgcacagtgctaagatgacagactatcttgtcgcagactctca

SEQ ID NO: 65664 - DNA, 233 bp, Zea mays
cgctcacgcgagtagagtcggaatcggtcgaagagcgcgagtggaactgtggaagcgtcgagcttttttcttctttgtcttgctgcgcaagaagaagggatacgagaggagggcggcgatggcgaagaggctgctctcgtcgctgaaccgggtgctggtggagaagctggtgcagcgctagaagaccgccggcagcatcctcctcccggtaacatccaagcagctgaatgctg

SEQ ID NO: 65665 - DNA, 344 bp, Zea mays
  unsure (1)..(344): unsure at all n locations
attccgcattcgatccaactcctgagcactttctcctcgtccccgacaagccaatcgaagccgagatacggccatggactccaccggcaccggagcagggggtaaggggaagaagggagcggccgggcgcaaggtcggcgggccaaggaagaagtcggtgtcgaggtccgtgaaggccgggctccagttccccgtcggccgcatcgggcgctacttgaagaagggccgctacgcgcagctgtncggcaccggcgcccccgtctacctcgccgctgtcctcgaatacctcgccgcgaggttctggagctcgctggtaatgctgccagggacaacaagaagattcg

SEQ ID NO: 65666 - DNA, 334 bp, Zea mays
ccgacgcgccggcagatcccaagctcaccctagagggggaagagggcgaccgaaggcggcgatgggtttcatcatggacttcgcggagaatctgatcctccgtctgatggaggacccggacaagcgcgaccaggttcggcgggagcatgtctacaagatgaaggagcggtgcgagcgcactaaggcggcgtggagcctccctctgcgcccctacggcttctggaccttcgaccgcttcaactcgcagctctcctaggatcccgagatcagccaggccgccggcgtacgggacctacgacgacctcatcgcacgccattctggcatcgcgccgtc

SEQ ID NO: 65667 - DNA, 342 bp, Zea mays
  unsure (1)..(342): unsure at all n locations
aacaggcaccctggttcccctggnacaccggtggtgaacgctctggccaagcagatggcgatgctggagaacatcatgagggcctgcgttgggctggcgccagagaacaacatgatcctggagtacaagtgagccaagtggcgtgccctgcagcgcgaggttagctgctggaagggaactagacaggcgagagtagctgtgggattgtgttgggcttgtcgtgttttcttttgcgttctttcctagtcattgctgttgcgcttttgtatgtgtcggacacgtaactaccangctctgctattagcggcacggagcctgtaattgtattgtatgatactgtga

SEQ ID NO: 65668 - DNA, 157 bp, Zea mays
ctagtactcagccgccgcaatcaggggggcaggtagctcgagcgcgcgctccacctgcgccgacgcgatgcgggccaagtggaagaagaagaggatgcggcgcctcaagatgaagctgccggcaaatgaggcagagatctaagtaggcgcatcttgt

SEQ ID NO: 65669 - DNA, 344 bp, Zea mays
accatacttcaggcttggttacaatagcttgggtgcgtttgccaccatcaatcacctccactttcaggcgtactacttgtcagtgcctttccctgttgagaaggcagctacccacaagatcccactctctgaggacacgaagaagaatggggtgaccgtgtccaagctgataaattatcctgtgagaggcctggtatatgagggagggcacacctggacgacctggccactgtggtttctaatgcttgcatttggctgcaagacaacaatgtgccttacaatgtgctcatttagactgtggcaagagggttttcctgttccccagtgctacgcagagaagcagg

SEQ ID NO: 65670 - DNA, 333 bp, Zea mays
gtcgcctcgaattcttcccagctagtagcgtgtgccgtaccccgtcgctcaagcgggatggcgtagagtggggatccgcccggatctgctgatgagaagatgactccaatatccgaacggtcttccgacgaacgtcaagggcttcctccagcatgcttttcaaatccttttgattttggttctatgcaaagtttgctcaatgatccatctattaaggagatggcagatcaaattgcaagggatcctgcattcaaccggatggctgagcagctacagaaaagtgctcaaagcaggagaacagggcacacctccattaaatgctcaacaatacat

SEQ ID NO: 65671 - DNA, 331 bp, Zea mays
caggctgcaaagactgagatagaaaagttgaaactttcggagcttacctgccgggaaggcattgttgaagtgtgaaagataatttatggagtgcatgacgaagcgaaggacaaagcttttgagttggagttgagctggatctgtgatgaatcgaaccgtcagcatcagaaggttccaaatgaactgttggagcaggccaaagctgctgctcaggcagctcttgaggagatggatgctgactaagaaacaggacgatttgcccagacttggtgtttttggtgctgttgaaatccgatccctttggggtgaccactggacatggcaatttgtc

SEQ ID NO: 65672 - DNA, 338 bp, Zea mays
  unsure (1)..(338): unsure at all n locations
aaaaaagtcagaagaagcttgcaagcgagaagggtgaagtctacactttgcttgggcggtcgcgcattttaccttactgactcagtatggtcctggccaacgaggtcatattgagcgtgctgctataaatgcaccagtgcagggaagtgcagcagatgttgctatgtgtgccatgcttgagatcgaaaggaatgtccgccttaaggagcttggttggaggctcttattgcaggtgcatgatgaagtgatactggaagggccttcagagtctgctgaggtggccaaggctagtggtggagtgtatgtccaaacctntctacggaaccaacatcttgaac

SEQ ID NO: 65673 - DNA, 334 bp, Zea mays
aacaaggaaggcttgatagcggtatttgatcttggaggaggaacttttgatatctctatcctggagatctcaaatggagtttttgaggtgaaagcaacaaatggtgatactttcttgggtggtgaagattttgataacacgctactagagttcttggtgagtgatttcaagaaaaccgagggcattgatctgtcaaaggatagattggccctgcaaaggcttcgtgaagctgctgaaaaggcaaaggttgaactttcatcgacttctcagacagaaatcaatctgccatcataacagctgatgcttcaggggcaaaacatttgaacattacact

SEQ ID NO: 65674 - DNA, 340 bp, Zea mays
cgacgcgccgtcactgaatcctcagatcacggctagccgtaatcacgccactctgctgactcccggcgagcagtgtaacattttccttccagccatggccagggagaagactcacatcagcattgtggtcattggacatgtcgactctggcaagtcgaccaccactggccacctgatctacaagctcggcggtattgacaagcgtgtgattgagaggttcgagaaagaggccgcggagatgaacaagcggtcattcaagtatgcctgggtgcttgacaagctcaaggccgacgtgagagaggtatcacaattgatattgctttgtggaagttcgagacca

SEQ ID NO: 65675 - DNA, 315 bp, Zea mays
agagaactcaggagatattcaatcgatggcactgagcctcgcgtcctcttcgcgctctgctgtgggatgttctcttctcctgcggtaaggatcttctctgctgaaaacgttcgagctgagcttcaggagtccatgagagactacatccgagcgtcagttggcataaacgacaagggagagctcgtagtccccaagctactgcagagctacgccaagggcatcgtggaggactccctgctcgccgactggatctgccgccatctgacactagaccaagtcgccgcgatccaggaacgtcatcgtcgtcgtcgcata

SEQ ID NO: 65676 - DNA, 364 bp, Zea mays
  unsure (1)..(364): unsure at all n locations
ctccaagctcgtcgacgtctcccgcttcggcgtcatctacgccggcgcacagaagaacgtcgggccctccggcgtcaccatcgccatcgtgcgcaaggacctcattggcgccgctcagcccatcacgcccgtcatgctcgacttcaagacgcacgccgacaacgcctccctctataacaccccgccctgcttcgccatctacgtctgcggcctcgtcttcgaggacctgctcgcgcagggcggncttgccgaggtcgagaagaagaacgcgcgcaaggccggcgccctctacgacaccatcgacgccagcgggaggtactacgtctgccccgtcgacaagtccgtgcgctcgcacatgaacgtg

SEQ ID NO: 65677 - DNA, 222 bp, Zea mays
attcaactagccaataaacttttcacacaagctgaactctaccagttttgtgcaagcattcaggaactcataattcctgtgtatagaagcagaagggcttatggacagctggccaaatgccacacatcgctcacaaacatctatgagtcaattcttgaacaggaggctagccctataccattcattgatgccacatactaccgagtgggtttctatggtgag

SEQ ID NO: 65678 - DNA, 256 bp, Zea mays
  unsure (1)..(256): unsure at all n locations
aatngacgttgtctacgcgctcaagcgtcaggttcgcaccctctacggtttcggcggctaggtcgcactctctcgcggtggcgaattacgtggtggcgatggcggtcgtgttgtgttcttggtctagtgttgtctgtgttgtctttatcggtgctgttttctgtggtggttgtgctgcatcgttctagtttctagttcatgtgctgtaatatctcgctgctgtaatcaatggaatggcctcgtttccaggctcaag

SEQ ID NO: 65679 - DNA, 358 bp, Zea mays
  unsure (1)..(358): unsure at all n locations
catgacttctacaactacgatatggagaaggcagaatttgcaggcctctttgcgaagttcacccaggatttggcgctgatcggagctctgctctactntctgggcatgaagaactccatcccgaagcggcagggcggcaagaagaaggcccccaaggcgaagacgaactagggctgcttagatagctgcacgcctcaggcggggtgtatcaggagacaggtctatttcgaagcaggcccagcgcgatgcagcgaatgccatcgagctgcgcttttacagttctatcatcagattcgatttgccgcctgaaacaaggtgtgacccgggtgggtangcgactagattgcacgattatgta

SEQ ID NO: 65680 - DNA, 220 bp, Zea mays
agccaccgccgtcgccgcccaaccgcagtaaggaggaaggagcacgaagatgccggcggggcacgggctgcggtcgcggacccgcgacctgttcgcgcggcccttccgcaagacggggtacatcccactcaccacgtacctgcgcacctacaagatcggcgactacgtcgacgtcaaggttaactgcgcggcacaaaggggcatgcagcacaagttctac

SEQ ID NO: 65681 - DNA, 204 bp, Zea mays
  unsure (1)..(204): unsure at all n locations
gagacgaggagcacagatctggcgcgnagcctggtggcgccggacatctaccaccccgacggcaccgcggccgacgagcacggccatcaacacatgagcgtgttgcagcagcacgtcgacttcttcgaccgcgacgacaacggcatcatctacccttgggagacgtactccggatgccgtgcgcttggttcaacatgatcctgt

SEQ ID NO: 65682 - DNA, 213 bp, Zea mays
actttcagcattcaaaaacacaccaagcgaagcgcactagcaacgacctaacaccaatggctaccaagatattagccctccttgcgcttcttgcccttttagtgagcgcaacaaatgcgttcattattccacagtgctcacttgctcctagtgccattattccacagttcctcccaccagttacttcaatgggcttcgaacatccagccgtgc

SEQ ID NO: 65683 - DNA, 331 bp, Zea mays
tagggaaatctggatatcaacagatatgtgatcaagaacagtactactggggaaattattataaaacatctgaacaaagagcaggaagctgaccagagcaatttccgtgacgcatctaccaatactgatctcgaagttcaggaaaaaatgtctctcctggaatggtttgccaatgaatacaagaagtttggttgctcgctggagtttgtgaccaacaagtctcaggagggatccagttctgtagaggattaggtggcattggtggcatgttgcgctaccagctggatatccgttcttatgatgagcttctgatgatgacatgtgtatgaga

SEQ ID NO: 65684 - DNA, 289 bp, Zea mays
agctgcgcttgggacgcgtcgacaaggaatgggtccacgtcctcagcgaagggtgggcgagcccgctgcaacggttcatgcgcgagatgacgttctccaagcacttcatctcaatgccatccgcggccaggatggcaggatggtcaacatgtccgtccccatcgtgctctccgtcggggacgcacagcgaagggccatccaggccgacggcgccacgcgcgtcgcgctcgttgacgagcgcgacgctccatcgccgtcctcagcgacattgagatctataagcataata

SEQ ID NO: 65685 - DNA, 308 bp, Zea mays
gaacccggaggatcttgatgccatgaaggacgttatgccacaggcctacaaagagctagtcgagaactgcaggatactggagagcactataaagaaatgcaggacatcgaatttactgttcaggagagcaggctgtggatgttgcagtgcaggacagggaaacgtacgggcaaaagcgccgtaaagatcgccgtggacatggttaacgagggccttgttgagcgccgtgcggcgatcaagatggtagagccaggccacctggaccagcttctccatcctcagtttgagaacccatcggcgtacaagga

SEQ ID NO: 65686 - DNA, 315 bp, Zea mays
  unsure (1)..(315): unsure at all n locations
ctctttcgcgactcaccccggagccggagcagagatcgccagcgctaccggcgcggaggcatggcgggggccggagacaaggtggactacgtcttcaaggtggtgctgatcggagactcggcggtgggcaagtcgcagatcctcgcacgcttcgcccgcaacgagttcagcctcgactccaaggccaccatcggcgtcgagttccagagccgcaccctcgtcatcgaccacaggagcgtcaaggcccagatctgggacacgccggccangagaggtacagagcgtgactagtgcttatatagaggtcactgggac

SEQ ID NO: 65687 - DNA, 218 bp, Zea mays
aattttcttgcttaggaaaaaggagtttgattggttctatgagggtggtgcagcagcattttcccagatgcatgggaacatttagagatttatctctgaggatgaaaggaattgtttcgtagatgcttataacaacaggttaacttcctctgatcctattgttcaggttgaagctgctaagcgctggacgatatgggagatgatgactgcgcaactta

SEQ ID NO: 65688 - DNA, 361 bp, Zea mays
aagaccattaccaatgccaagaacaagaaaccagagaggacagccgcgaatacaatccgaatcccctccaaaaacccaccataccgtctcccgcatctgcaagaacaagatcaggagagcatcctagggggaagaaacaggagggggaaaaagaagcccagaaagaccaactgaccaaacaaaaaggtggcatctttgtgtcaccgaggcaccgccgatcacagaccaaagcccgctcctctggtccatcccaagcgtacagcagccgagatttcttcgatctgcgcttgcgttttcttttcttgtaaagattttagttttccccgcttcaactgttgctagccttgagtcgctgagaagt

SEQ ID NO: 65689 - DNA, 164 bp, Zea mays
tgaaggtgagaggtagagcggctattgatgttgtgtgcaaccccttggggaaatctggaggtgctctgatccagcagttcatgatcctgtcattcggatctctcgcgaactcgacaccctaccttggcggaatactcctggtgatcgtccttgcatggctgggt

SEQ ID NO: 65690 - DNA, 225 bp, Zea mays
acgatcctcaattcctccttcggatctcgcattcagcgcagcgcaggtgtgaaggaacggggacgcggaggaagatggggctcgcgttcgggaagctcttcagccggctcttcagcaagaaggagatgcggatcctcatggtcggcctcgacgccgccggtaaaaccaccatcctctacaagctcaatctcggcgagatcgacaccacgatccccaacatcgttt

SEQ ID NO: 65691 - DNA, 354 bp, Zea mays
  unsure (1)..(354): unsure at all n locations
atcgtaactggggacgacatgcagactcagtgtgtcattgacaatcaagcacttccatgccttttgaacctactgaccaccaaccacaagaanagcatcaagaaagaagcatgctggacaatctcaaacatcacagctggtaacagggaacagattcaggccgtgattaatgcaaacataattgcacctctggtgcaacttctggaaactgctgaatttgacatcaagaaagaagcagcctgcgcaatgtcagatgcgacttctggtggcacacatgatcagatcaagtaccttgttgcccaaggttgcattaagctactctgtgatctgcttgtttcccggatccagaatgta

SEQ ID NO: 65692 - DNA, 163 bp, Zea mays
  unsure (1)..(163): unsure at all n locations
agagcatgtgaatgaaagcatgattactggcgaatcacagccagtagcanagagaaagggtgacactgtaattggaggtacagtgaatgagaatggtgtgcttcatgtccgggctacatttgtgggatcagagggtgcactggcacagattgtagggctagtt

SEQ ID NO: 65693 - DNA, 215 bp, Zea mays
aaaaggcacgttatgatgagattgtgaaggaagtctcttcctacctgaagaaggttggatacaaccctgataagatccacttcgttccaatctctggtcttgaaggtgacaacatgattgagaggtcaccaaccttgactggtacaaggggccaaccctacttgaggctctggacttgatcaatgagccaaagaggcttcagacaagccctgcgt

SEQ ID NO: 65694 - DNA, 303 bp, Zea mays
  unsure (1)..(303): unsure at all n locations
tagacccgtcatcgatctcgtttcaaatccatccatcctcgtttcctccgtcccgcagcatctcaaccccatggccaagatcaagatcgggatcaatgggttcggcaggatcggaaggctggtcggcaaggtggccctgcagagtgacgatgtcgagctcgtcgccgtgaacgaccccttcatcagcaccgactacatgacctacatgttcaagtacgacactgtgcacggacagtggaagcaccatgaagtcaaggctgaagactccanaacgcttctctgtggtgagaaggaggtgctgtg

SEQ ID NO: 65695 - DNA, 297 bp, Zea mays
atcatcctcaacttctcaaggattacatgaatggagctgagaaaacaaactttatatatcctagtgctgttgacaatttccgaacgcaatttgctaacttggaggacaatggaggatagagtgtggcgcacaccgcttcatcagacaggaagcatgtttcgctcccaaggacaaccacagttcattctaatccaatccctccaaatggaacctcccaagttccccgaaagattcccacaggtagaccaggagagtggttggttagtaatacatttgagacgaactgctgttatcata

SEQ ID NO: 65696 - DNA, 353 bp, Zea mays
taaggctgcttgcaaaaacgagcctgaaagtactgaagccaagagggcggcagagttgctatacgaggctgcgctgatctccagtgggtatactcctgacagtccagcggactgggaggcaagatctacgagatgatgaccatggccctcggcgggagatgggggaggttggagacagaggaggctgaagtcatcgccagcatcgacgacgcggactcgtctgaaggtgccacgaccacgacagaggtagtcgagccctctgaggtcaggacagagagcgactcgtggaaggattagatagttctgtatgcaaggattatgccctggtgtggtgtatgacactggatgtaacg

SEQ ID NO: 65697 - DNA, 219 bp, Zea mays
atggtgacgacagtgccgagcctgctaatcctgttgccagtgaaattattgtaacccagcttgcaagcatgggcttcaactaccttcattgtcagaaagctgctattaacacatcaaacacaggagttgaggaagcgatgaattggctcctctcgcacatggatgatccagatataaatgacgcaatatcaaaagattcacgtgcttatgagccatctg

SEQ ID NO: 65698 - DNA, 273 bp, Zea mays
acatcacaggctaactatatcctgggagacaacccgatgaagcttagctaccttgtgggatatgggagcagctagccacagcaagtgcaccacagagcggcgtcgatccccgcggatgcgaaaacaagctgcaaagggttcgagtatctgcactcgctcaagccgaacgcaaacgtggctacgggcgccctggtgggtgggtcattccagaacgacaccttcgtggactcccgtgacaacgccgtgcagacggagtcgagcactacaacagtg

SEQ ID NO: 65699 - DNA, 261 bp, Zea mays
ctcctccggatttcgcagtcagcggtggtgaaggtagcgggcgcggaggaagatggggctcgcgttcgggaagatcttcagccggctcttcagcaagaaggagatgcggattcttatggtcggtctcgacgccgccggtaaaaccaccatcctctacaagctcaagctcggcgagatcgtcacaaccatccccaccatcggtttcaatgttgaaactgttgagtacaagaacattagcttcacggtctgggatgtcggggg

SEQ ID NO: 65700 - DNA, 350 bp, Zea mays
  unsure (1)..(350): unsure at all n locations
gaagcgagaagaccagaaggtgagaagagagagagagagtgtgtgtgatcggtacaaggatcaccgctgtgcctgcgcgtgctgcttcaccgaatcgagtcagatcctgtccgaatccgagctaagggatggcaaccggtagtgaagcctcgaaggcagctgaggctgtggttgactggcataaacacgacagcaagaggatgctccatgcggtttaccgtgttgggactggaccgcacaatcaagtactacacggaatgctttgggatgaaactgctgacgaaaagggatgttcctgatgagaagtacaccaatgccttccttggctttnnggcagagacaccaacttt

SEQ ID NO: 65701 - DNA, 228 bp, Zea mays
ctctttcgcgactccccccggagccggagcagagatcgccagcggtaccggcgcggaggcatggcgggggccggagacaaggtggactacgtcttcaaggtggtgctgatcggagactcggcggtgggcaagtcgcagatcctcgcccgatctcgcccgcaacgagttcagcctcgactacaaggccaccatcggcgtcgagttcgagaggcgcaccctcgtcatcga

SEQ ID NO: 65702 - DNA, 205 bp, Zea mays
gaaggagaagtgcaaggaagcaggcggccaccatggtgaagggacgcacgggacagcgcgtcaggctctacgtccggggcaccatcctcggatacaagacgtgcaagtcgaaccagtacgagaccacgtcgctcgttcagatccagggggtgaacaccaaggaggacgtcgcgtggtacgctggcaacggcatggcgtacatcta

SEQ ID NO: 65703 - DNA, 143 bp, Zea mays
ggcttatattccactcctcctttattggccgtgcttcaactaagaacaagggcagaatggctcgttacctggcaaacaaatgctcgattgcttcacgcattgactgctactcggaggctagcacttctgtctttgggcaaaag

SEQ ID NO: 65704 - DNA, 336 bp, Zea mays
  unsure (1)..(336): unsure at all n locations
acgcaacttcacagcgtatcatcgttttccatcgctcctactcctatcatccagaaaatctgagcggtattgatggcgnccaaggcggagaagaagccggcggcgaagaaggtggcggaggaggagcgctcggagaaggcggctccggcggagaaggcccccgcggggaagaagcccaaggcggagaagcggctacctgcgggcaagtccgccggcaaggagggcggcgacaagaagggtaggaagaaggcgaagaagagcgtggagacctacaagatctacatcttcaaggtcctgaagcaggtgcacctcgacatcggcatctcctccaaggca

SEQ ID NO: 65705 - DNA, 375 bp, Zea mays
cgtttggatgatcttgagggaacaaattctgatcaaagtgattcagaccatgtcacactagcgataagtattgaggacacaggtgttgggataccattgcaagcacaagatcgtgtttttacaccgtttatgcaggctgatagttcaacttcaaggaattatggtggtactggcatcggtttaagcattagcaagtgcctagctgacttatgggtgggcagataagttttgtcagccgtccttttgttggaagtacattcactttctccaccacactgaagcgctcatacaaagatatttcagttgattcaagtaggagcttgttagaggcactaccaactgcttttaagggaatgaaggccatcttgatagatg

SEQ ID NO: 65706 - DNA, 328 bp, Zea mays
gtcctctgttacttctccctccgccgccactcccctcccattcaccgccaccgccaattccataccgtcctccgccacctctgctgagagcgagaagagatggcaggcaagggtgatgggccggcaatcggcatcgatctcggcacgacgtactcttgcgtcggcgtctggcagcacgaccgtgtcgagatcatcgccaacgaccagggtaaccgcaccacaccctcgtacgtcgccttcaccgactccgagcgcctcatcggagatgcggccaagaaccaggtcgccatgaaccccatcaacaccgtctttgatgccaagcgtctca

SEQ ID NO: 65707 - DNA, 135 bp, Zea mays
atcttcaccgacgaactcgaatcgctcaacacacgacgcgtgtaatgattccgatgcagtccggtttcatcaatgggaagcctatctaccactttgttgggacttctacttcagcgagtacaccgtcatgcatgt

SEQ ID NO: 65708 - DNA, 111 bp, Zea mays
cgcataataaggaagaaagggtagcaagaacatggggggacactgcacctggattaccttaatgtcgaggaggcaattaccaatgctggtgactggttggttggtggggac

SEQ ID NO: 65709 - DNA, 124 bp, Zea mays
tgtcgaagcgaggtaggggaggttcggctgggaacaagttccgcatgtcactgggtctaccggtggcggccacggtgaactgcgcggacaacacgggcgccaagaacctctacatcatctccgt

SEQ ID NO: 65710 - DNA, 119 bp, Zea mays
cgtcgctgcgctgtccgtgttctcctggatgtacaagtacctgacgggcaagcatccgccgtgcgccgaccagctggagcacgccaaggcgatgctggcgtccaagggccgcgacatca

SEQ ID NO: 65711 - DNA, 355 bp, Zea mays
  unsure (1)..(355): unsure at all n locations
ctcgtcaacaacgacctggtatgaataatggacctgaaatacatgatgagaacgggatcgagtgcatgagagcttctggaaagcttgctgcacaggttttgaaatttgctgggactcttgtaaagccaggcataacgactgatgaaattgataaagcagtgcaccaaatgataattgataatggagcattccttcacctcttggttattgtggatacccaaagagtgtctgcacttcagtgaatgaatgcatctgtcatgggattccggattctcgtcnccttgaggatggagatatcatcaatattgatgttactgtgctactcnatggctaccatggtgatacatctgctaca

SEQ ID NO: 65712 - DNA, 122 bp, Zea mays
ccaggtccttggtcagccgccactaactttctttcgtgaggttctctccctgtgcgacaacccagccctcatggacagagatgaagctcgtgccttattcagcccttgtagcataagaaggg

SEQ ID NO: 65713 - DNA, 119 bp, Zea mays
ctccgggaagcatagaggcaacaactttggaagcaagtaggaacccaatgaggcgtcagattgcaaatccagcaaggcccacacggacactaacttcttttgcccgtggtgttcggaga

SEQ ID NO: 65714 - DNA, 116 bp, Zea mays
ggacgacgacgatgatgttgacctttttggtgaggagaccgaagatgagaagaaggctgctgaagagcgtgctgcagctgccaaggcttctggcaagacgcaagaatctgggaagt

SEQ ID NO: 65715 - DNA, 115 bp, Zea mays
  unsure (1)..(115): unsure at all n locations
tgactacgtagacgtcagtgttgctgttggcacttccaagggccttgtggtgcctgttatccgagatgctgataccatgaactntgctgacattgagaaagggataaacaacctt

SEQ ID NO: 65716 - DNA, 116 bp, Zea mays
  unsure (1)..(116): unsure at all n locations
agccgacgcgccgtcactgaatcctcagatcacggctagccgtaatcacgacactctgctgactcncggcgagcagtgtaacatttcgcttcagccatgggcaaggagaagactca

SEQ ID NO: 65717 - DNA, 344 bp, Zea mays
gaggagaagaaggatgatggcaaggaggagaagaaagatgaagacaagaaagaagcggataaacagaaggatgatggcaatgctggtgatgaagggaaagacaaagaccctggcgccgttgctaacatgtatatgcactacccgaggtccaatcatctgagcgaatacggatatgcctaccagtacccgcctcagctcttcagcgacgagaacccgaatgcctgttctctgatgtgagaaagccagaaccaagtgaccttaagcgcgaaaataagaggggattgagttatccctgattttggaggttcaggaagtttagaatctctcttctattctaagttgac

SEQ ID NO: 65718 - DNA, 118 bp, Zea mays
ctgtgaagtccgcaatggatgctgcagaagctgctctttcaggaaataaaccgttttgtgttactcatgtggatgtgggtcttgataccacggctgtccgtgaggcggttatcaaagt

SEQ ID NO: 65719 - DNA, 110 bp, Zea mays
tgtgacacaacgacggcatgaaactgtctggccctcaaacattcaggtccaaggagatctcccagagcaacgtggtggatgacatagtctcaagcaatgccattctctat

SEQ ID NO: 65720 - DNA, 351 bp, Zea mays
  unsure (1)..(351): unsure at all n locations
gaaatatcacatgatataccatttctcactgtagtctcttcactgaagcgactgatgcgctacagccttggatctgttgctctgggttcacttgttgtatctgttgttgaatgggtgcggtttatactagaatgccttcgtcgcaagttgaagctagttgattctgctcgagagagctgctttggaaaagcgacgtcctcctcttctgaatgctgcctgggttgcatagactggaccctcaagtcagtaaatcgaaatgcctacattatgattgccatcgccgggaaaagtttcttcanagcttcagtgctcgcaactggattaataatgaagacattctgcgcatcggaa

SEQ ID NO: 65721 - DNA, 115 bp, Zea mays
ccacgttccaccagccggcgcaccttcttctcactccgctggcgccggcgccgcgttatccatggcgtcggagaagaagcaatccaacccgatgagggagatcaaggtgcagaag

SEQ ID NO: 65722 - DNA, 117 bp, Zea mays
gcgaaggaggaggagcagcagcagcaggcggcgccgaggagcggcatcccactcagtgcttgcaaccatggctaggggattgaagaagcacttgaagaggctcaatgcgcccaagca

SEQ ID NO: 65723 - DNA, 122 bp, Zea mays
atgttgagcattcagagacacaccaagcgaagctactagcaacgacctaacaacaatggctaccaagatattagccctccttgcgcttcttgcgctttttgtgagcgcaacaaatgcgttca

SEQ ID NO: 65724 - DNA, 108 bp, Zea mays
agaatactcttgctgataaaaatgcaccatatgaagaagtttcgaagcagattgaggatatgtgtgggtccacaaaggcagctgctgtccctgtggttcctgactcag

SEQ ID NO: 65725 - DNA, 111 bp, Zea mays
aggtacggccgtctcatcgcccccatggcccacgagaagaagctgtccaacccgatgcgggagatcaaggtgcagaagctcgtcctcaatatctccgtcggggagagcggc

SEQ ID NO: 65726 - DNA, 326 bp, Zea mays
ccaatctagaagcacacctctccctctctctctcttcgccgtccgaagctccgcaccccaatctaatcgacacctcaccgagatgggccgcaagttcgtcgtcggtggcaactggaaatgcaatggaaccacagatcaggtcgagaagattgtcaaaaccctgaatgaaggacaggttcccccttcaatgttgtggaggtcgttgtcagccctccttatgtcttccttcctgtggtcaagagccagctgcgccaagagttccatgttgctgctcagaactgctgggtgaagaagggatgtgctttcactggtgaagtcatgctgag

SEQ ID NO: 65727 - DNA, 282 bp, Zea mays
cagcctccttccctcgatctattcctcatcttgtcctccctttgctaaaaataacgaggcagaggcatcttcgttttgacgtgcgcttcctcttcctcgctcgctctcggtcgcagtgatggctgatgtcgacgagtaccgttgcttcattgggaacctgtcctggtcaacgactgatgaaagcctaaggatgcgttcagcaaattcggcaacctcactgaggcacaggtggttcttgacaaattttcaggccgttctcgtagtttcggctttgtaactttt

SEQ ID NO: 65728 - DNA, 128 bp, Zea mays
  unsure (1)..(128): unsure at all n locations
ctcgaatcgttcnccaccatggcgtcgcagggatcctccgtcttcgccgcactcgagcaggcaccggaggactccatcctcggagtgaccgttgcctacaacaaggatcncagccccgtgaaggtcaa

SEQ ID NO: 65729 - DNA, 127 bp, Zea mays
ggtttcgtcgcgaagcggagtcgctgcccgacgggacggtgaacctgatgatctggcagtgcaccatcctcggcaagcaagggactgacttggaaggtggatacttccctctcacccttcattttag

SEQ ID NO: 65730 - DNA, 128 bp, Zea mays
tatcgaagcgaggtaggggaggttcggctgggaacaagttccgcatgtcactggtcctaccggtggctgccacggtgaactgcgcggacaacacgggcgccaagaacctctacatcatctccgtcaag

SEQ ID NO: 65731 - DNA, 236 bp, Zea mays
tagacattgaccttttgcactgtctcattaatgcatggaatatgcagtctgatgttgaaaggcaagatttctttccagttagcgattgagggcgatgaccccaatgatgacacgtgtggtatttgcggcgatggaggcaatttgatctgctgtgatggatgcccctcgacatttcacatgagttgtctaggactagaggcacctcccttgattatgggtgttgtaaaaactgctca

SEQ ID NO: 65732 - DNA, 212 bp, Zea mays
cagcgttcgtagctgtctgcgtagtgtaccttggccgtagctagtgctactctttactttggagtagcttaataataataatgtagctagcaacatgcatgtaggcgatcatacgtacgtacgtacatgcaggtacgtgtgtgtgtgatcatgtatgcttccagaagggtatcctagcttaatcagtcacgtcgtcaagtgtcaatatggca

SEQ ID NO: 65733 - DNA, 320 bp, Zea mays
ctccgcacaaggcaacagaacattgctgagataactgaaatgattcatgtcgcaagccttctgcatgatgatgttcttgatgatgctgatacaaggcgcggtgccagttcattgaatctcatcatggggaacaagctttctgtgctggctggtgatttccttctgtctagagcatgtgtggcccttgcagcacttgggaaccagaggtggtttctctaatggcaactgctgtagaacatctagttactggtgaaactatgcagatctcaacaagcagagagcaacggcgaagatggagtactactgcatatgagtactac

SEQ ID NO: 65734 - DNA, 236 bp, Zea mays
agatcacacacactcgagaactccatttcgatcccatttgaaatcaacccatcctcgtttcctccgtctagcagcctctcaccctcatggccaaagatcaagatcgggatcaatgggtttggcaggatcggaaggctggtggccagggtggccctgcagagcgacgacgtcgagctcgtcgccgtgaacgaccccttcatagcaccgattacatgacctagatgtagaagtatgac

SEQ ID NO: 65735 - DNA, 359 bp, Zea mays
  unsure (1)..(359): unsure at all n locations
aggaaatagaaagtctccctggactctaaaatcaatgcctgtgaacacatgaactgtttgtgtcacccatgttcctctgctccttggcactttctgatggatgctcaaatgcttaagaaagactcatagaagcgactcctattcctatgccaggtcattgagataccaaggggcagcaaggttaaatatggacttgcaagaaaactggactgatcaaggtggaccgtgtgctgtattcatcagttgtttaccctcacaactatggattcattcctcgcacgctttgtgaagacagtgatcctttggatgtactggttataatgcangagcctgttatcccaggctgtttcctacgtgcg

SEQ ID NO: 65736 - DNA, 322 bp, Zea mays
  unsure (1)..(322): unsure at all n locations
atatcccctgtcncgctaggattcccccgaaaccctcccctaaaaccccagagctcagaagagcgcaagatgttcggcttcgggcaccacggccaccacggtcagaacccgccggcgcacggctgcgtgcaccagcccaccttcaagatcttctgcaaggccgacgaggggtactgcctcaccgtccgcgacggcacgtggtgctggcccccgccaacccgcgcgacgagcaccagcactggtacaaggacatgcgcttcagcagccacgtcaaggacgaggatggcaacgctgcgttcgcgctcgtcaacaaggccactgg

SEQ ID NO: 65737 - DNA, 298 bp, Zea mays
gtcgccctcaaattcgttccgtccaggcaaggaagaaatcgagcagccaaggagaggagaagatggttcgtacgaagcagaccgcccgcaagtccacgggaggcaaggccccgcgcaagcagctcgccaccaaggcggcgaggaagtctgcgccgacgaccggcggcgtgaagaagccccacaggtacaggcccggacggtggctctgcgcgagatccgcaagtaccagaagagcacggagctgctgatccggaagttgcccttccagcgcctggtccgtgagatcgctcaggacttc

SEQ ID NO: 65738 - DNA, 163 bp, Zea mays
tagggttccatggccaacagcaacctcccgcgccgaatcatcaaggagacgcagcggctcctcagcgaaccagcgccggggattagcgcgtcgccgtcggataagaacatgcggtacttcaatgtcatgatccttggccccgcacagtcaccctatgaaggtg

SEQ ID NO: 65739 - DNA, 348 bp, Zea mays
cgttttcctcactctctcctccagctcagggtccggcggcgaagggaaggcaagatgtacaccgcgaggaagaagatccagaaggagaagggtcctgagccctccgagttcgaggactccgttgcccaggctttctttgatctggagaacgggaaccaggagctcaagagcgacctcaaggacctgtacatcaacatgctatccagatggatgttaccgggagtaggaaggctgttgtcattcacgtcccataccgcctgcgcaaggccttcaggaagatccatgtcagactcgtcagggagctggagaagaaattcagcggcaaggatgtggtaattgttgctacac

SEQ ID NO: 65740 - DNA, 348 bp, Zea mays
  unsure (1)..(348): unsure at all n locations
tgacagcccaaagtctatctttgaaattcctggagcaaaggaggttgctattgagacagcctcattctcgaagtacgctgggttcacaggtgtccgtctaggttggactgttgtccccaaggagctccttttctcggatggacatccagttgctaaagatttcaatcgcatagtttgcacttgcttcaatgggcatcaaacattgcgcaantggtggtttagcctgcctctctccagacggtctaaaggctatgcaagatgttgttggcttctacaaggagaacatgaataatcgttgagacnttacatcatcggattcaacgttatggcgccaagacgtccntngta

SEQ ID NO: 65741 - DNA, 343 bp, Zea mays
ttacaaaggtgactatgacacatttgagaggacaagggaagagcaccttaagaatcagcagaaagcctttgaaacaaatgagaaggccagacagcacatgcagacattcattgacaagtttcggtacaatgcagagagagcatcacttgttcaatcaagaatcaaggcattggagcgaatggaacatgttgatcagttgtcagcgatccagactataaatttgaatttccgaccccagatgaccgccctgggccaccaatcatcagcttcagtgatgcctcatttggttaccctggagggcctaccttgtttaaaaatttgaattttggtatcgacctggaca

SEQ ID NO: 65742 - DNA, 346 bp, Zea mays
gtctggcttggatttggtgcagcgataaagcacatcatgcagaaggacatcaggaacatccatatactgagagaaatgtacaatgagtggccattcttcagggtcacccttgatttgcttgagatggttttcgcgaagggagacccgggaatcgcagctgtgtacgacaaattgctagtggctgatgatttcaatccttcggcgagcaactgaggaagaactatgaggagacaaaagagctactccttcaggttgctggtcacaaggacgtccttgaaggtgatccttatctgaagcagcgtctgcggctgcgtgagcctacatcaccatctgaagtgtgcaggct

SEQ ID NO: 65743 - DNA, 325 bp, Zea mays
gaagcgagaagaccagaaggtgagaagagagagagagagtgtgtgtgatcggtacaaggatcaccgctgtgcctgcgcgtgctgcttcaaccgattcgagtcagatcctgtccgaatccgagctaagggatggcaaccggtagtgaagcctcgaaggcagctgaggctgtggttgactggcataaacacgacagcaagaggatctccatgcggtttaccgtgttggggatctggaccgcacaatcaagtactacacggaatgctttgggatgaaactgctgaggaaaagggatgttcctgatgagaagtacaccaatgcttcctt

SEQ ID NO: 65744 - DNA, 329 bp, Zea mays
acgagacggaggagagaatacttcgggaagatacgattatcaatgcacggagagtggagttcccttcaaagccagctgtatcaaatgaagcgaaaggatctgatacgccggtgcttgacatacaaccaatcagagagaccagatgtactaaccatagctcaagatccttatctctcatacgcaaagaggtagccgctatgcggagaacactaaggcaagggtagctgcttatttaatgagattatttatgtatggtgatgataatcctagtagagggcgcagagtgttcgacaagctcaagaagaccagagagggtgtaactgtatatg

SEQ ID NO: 65745 - DNA, 333 bp, Zea mays
cagtggtttgctataacacgaaggcatgctttattgattctggcagacaacctttactacaataagttcaagctgtactgcaagccagcagaaggacgcaactgtattgctgatgagcattatttgccaaccctcttcaatatggttgaccctggtggaatagctaactggtcagtgactcatgttgattggtccagggaaaatggcatccaaggtcatatagagctgcagatgttacatatcaactcttaaagaacataacgtctgtcaatgagaatgttcacattacaagtgatgataaaaagtgtgtgcacagacccatgtatgtggatg

SEQ ID NO: 65746 - DNA, 322 bp, Zea mays
ctgccgcgccagactatggcgctccaaaccgagccttgtggcaagcgtcgttcaatgccttctttgggctgctcactaagtactgcatgagtaagtatgatagcatggttcacacgatgcacaagctcggtgctgctgctgcaacagcgatacgcaaggaacttccggttgagcttctgcgcgccagcttcccacacggatgagcagcagcgcagactactgctcgagttcgcccagcggaccgtgcccgtctctggccatggctccgacgggtgacggacgggcgagtggcggctggtggaacatggcatctgaaacaata

SEQ ID NO: 65747 - DNA, 338 bp, Zea mays
aagagaatgaaatgatgctggaccagatggcggatgcagctgagaccattgcagtgactccagaggagaacgaagctatacttcgtcttgaagggatgggctttgaccgggcactggtcctggaagtgttcttcgcgtgcaacaagaatgagcagctgaccgccaactacctcttggatcacatgcacgattcgacaacgatgactggctcggagggccaccgctatgagggcgctctcgatccctacatcatgcgaacgaaggctgtagggcagtagtaggaaaacgttttgggattcgtcgcgtctgttcgctcactctacatattcgtttggctt

SEQ ID NO: 65748 - DNA, 335 bp, Zea mays
gagcagaggaggatggctcgtacgaagcagaccgcccgcaagtccacgggaggcaaggccccccgcaagcagctcgccaccaaggcggcgaggaagtcggcgccgacgaccggcggcgtgaagaagccccacaggtacaggcccggaaccgtggcgctgcgcgagatccgcaagtaccagaagagcacgggctgctgatccgcaagctgcccttccagcgcctggtgcgcgagatcgcgcaggacttcaagacagacctccggttcagagcgagccgtgctggcgctcgcagtagctgctgaggctactcgtcggtctcttcgaggacacaactc

SEQ ID NO: 65749 - DNA, 331 bp, Zea mays
cggctatggtggcggtggctatggcggcggctatggtggtggtagcggtggctatggcggcggcggcacggtgactatggtggcggcagcggtggatatggtggcaactacggcaacagggctggtggtggctatggtggtggtggtgattatggagttgcaggtggggctgaaggcagtgttgctctggaggtagcgacagctttggcagcagtaactttgctgacagtggttttggtgaaaaccctgctggtagctttggcgcaacgggtggttcgagtggctgctgatgggtctctgctggcacacctggtgacgggtacgagatgat

SEQ ID NO: 65750 - DNA, 132 bp, Zea mays
ctcagccgctgcagccaatcgctcgccagcagccgtcgtcgccaccgctgcagcgcggaggcgaccccgcatcgccgcgaagatgcagatctccgtgaagaccctgacggggaaaacgatcacgttggaggt

SEQ ID NO: 65751 - DNA, 199 bp, Zea mays
gttggggatgccaaggagaagaataggaagttcactgagactgtggaacttcagattggtctgaagaattatgatccacagaaggacaagggtttcattaggtctgttaagttgccccatatccctcgtcccaagatgaaggtgtgcatgcttggtgatgcgcagcatgttgaggaggccgagaagatgggacttacta

SEQ ID NO: 65752 - DNA, 231 bp, Zea mays
gttggacttcgttgtagccaatgccattggaacaagtcctctcagatcatgatagcgaagacgaggttgatgatgacattgccgactttgaggatagacggatgctcgacgattttgttgatgttacaaaagatgagaagcttattatgcatatgtggaattcatttgttcgaaagcaaagggtgctagccgtggtcatataccgtgggcatgcgaggcgttctccagatg

SEQ ID NO: 65753 - DNA, 308 bp, Zea mays
atctggattgctcctggtacgcgtgtgctgtatcttggtgctgcttctggcacaactgtatctcatgtgtctgatattgtagggctggatggtctggtctacgctgttgagttctctcacaggagtggaagagaccttgtcaacatggcaaagaagaggaccaatgtgatccccattattgaggatgccagcatccggcaaggtaccggatgttggttggcatggttgatgttatcttctctgatgttgcacagccagaccaggctaggatcttagcacttaatgcttcatacttcttgatgacggtg

SEQ ID NO: 65754 - DNA, 332 bp, Zea mays
atcatagagagtgttggagagggtgtgactgacgctgctccgggcgaccatgtccttcctgtgttcactggggagtgcaaggagtgtgcacactgcaagtcggcagagagcaacatgtgtgatctgctcaggatcaacaccgaccgcggtgtgatgattgccgatggcaagtcgcggttttcaatcaagggaagcctatctaccactttgttgggacttccagcttcagcgagtacaccgtcatgcatgtgggttgtgttgtatagatcaaccctcaggctcaccttgataaagtttgcgtccttagctgtggtatatctaccggtcttggt

SEQ ID NO: 65755 - DNA, 348 bp, Zea mays
aaatacatagatcctacatacatggtccgtgctattccaagcaatgcatcagacaatgtctactgtacacttctagctcacagtgctatccatggtgcaatggcggggtacagtttcactgttgggatggtcaacggaagacatacctatatacctttctacagggtgacatccacaaggaacaaggtaaagtcacggacaggatgtgggcaaggcttctgtcgtccaccaaccagccaagtttcctgagtcagaaggatatcgacgaagcgagtgaggcggataggctggcaaacaggccaccgctgccaacgggtgccagctctcgcgtggcgaggtctttcgatc

SEQ ID NO: 65756 - DNA, 329 bp, Zea mays
gtctgcaagtcctaatgtgaggggccctcctgcacttgttttcagcttctcacaaatggaagatagactcaaggctgcctacaaagcccaactgagggcaagttccccgaagcactgagacagttccttagcatcttgcataccattccagttattgtggtggattcgcggagagaagttgatgagtgaaggaattaatcgagatagtgagggagtatgttcttggtctgaggatggaactcaagagaaaggaattgagggatgatgtgacccgtcagcaggagttggctgcttacttcacgaactgctagcttcagagagttcatatg

SEQ ID NO: 65757 - DNA, 352 bp, Zea mays
agataatggtgaaattaggtggattattgactctgttgtgggcaaggaggatgggcttggtgttgagaacatacatggaagtgctgctattgccagtgcttattctagggcatatgaggagacatttacacttacatttgtgactgggcggactgtaggaataggagcctatcttgctcgacttggatacggtgcatacagcgctttgaccagcctattattttaacagggttttctgccctgaacaagctccttgggcgagaagtgtacagctcccacatgcagctgggtggtcctaagatcatggcgaccaatggtgttgtcgacttgaccgtatcagatgatcttgaag

SEQ ID NO: 65758 - DNA, 176 bp, Zea mays
ccagccgccaccaggtgcagagtctttcgtcatctcttctccggcgaagaacccccagtcgcccaccagatcacttgttaaactttgttgaggggtgatggcggtttctttcgcaaacctcagctccgaggcagggcttaaaaagcttgatgagtaccttctcactcagatacatc

SEQ ID NO: 65759 - DNA, 339 bp, Zea mays
atcgcgcccccgctcgcttcacttctctaggtgcgcaccgatcagaagagatggcggtgccgctgctgacgaagaagatcgtgaagaagcgggtccagcagttcaagaggccccacctcgaccgctacaagtgccttaagccaagctggcgctaggcaaagggtattgactcccgtgtcaggaggaagtcaagggatgcaccttgatgcgcaacattggctatggttctgacaagtcgaccatggcactactcgcgcaacaagtcaagaagtttgtggtccacaacgtttcctgagctggagttgctcatgatgcacaacaggacctactgcgctgaat

SEQ ID NO: 65760 - DNA, 240 bp, Zea mays
gtctcgttttggacatgacacacttgttgatgccatgcttaaggatggactttgggatgtatacaatgactgtgccatgggaatgtgtgccgaactttgtgctgacaatcatgccctcacaagagaagaccaggatgcttttgctatccaaagcaaccagcgtggaattgctgctcgtgacagtgagcttttgcatgggagattgcgcctgaagttcctgttgggagagaaaccactgta

SEQ ID NO: 65761 - DNA, 164 bp, Zea mays
gttctatctgtatcagcatattatctatgctgtccagctcaccagcaaagcaacgcccagccgataacgatcgctatgtcaggaactgtcggaattgggaggtcaccataaggagaccacgtggtggttccatgacgacactgtgtgatgggtctttccggctg

SEQ ID NO: 65762 - DNA, 246 bp, Zea mays
ctggcttggaggatctcaaggcagctcctctggactcattgtcaagaaaacaatgaaggtcgatatcccagtagacaaatatccaacatacaattttgttggccgcatccttggtccaagaggaaattccttgaagcgggtggaggcaaatacggattgccgcgtgctaataagaggtcgtggcagatcaaagatccagcacgggaggaaatgatgcgagggaagccaggatatgagcatctgaat

SEQ ID NO: 65763 - DNA, 277 bp, Zea mays
ggagaagccgccgtcgcagcaatcacagcagcccggagaacggccaggtccgacaagatgcagatcttcgtgaagacgctgacagggaagacgatcaccctcgaggtcgagagcagcgacaccatcgacaatgtcaaggccaagatccaggacaaggaagggatcccgccggaccagcagcggctatctttgccgggaagcagctggaggatggccgcacccttgcggactataacatccaaaaggagtctacgctcgacctcgtgctcaggctcgc

SEQ ID NO: 65764 - DNA, 119 bp, Zea mays
caaatacagtagataaggatagtgagagagctgtgacaaaaaacgagcggattgcatttgctagggaatacggttgtttgcctctagaatgcagtgcgagaacaaaagtacatgtagaa

SEQ ID NO: 65765 - DNA, 330 bp, Zea mays
taatcctctctttccctactcgcggaagccaactccaccggcaggggaagcggaagggaagcacctcggccccggcaagatggtgctcgcacagcttggccggaagaatctccggcgccctggcgcagatgagcaacgccacggtgatcgatgagaaggtgctcaacgagtgcctcaacgagatctcgcgcgcgctcctacaggccgatgtccagttcaagatggtccgcgacatgcaggctaacatcaagcgcatcgtcaacctcgaggcgcttgccgcaggcaccaacaagcgccgcatcatgcagctagctgtcttcacggaactct

SEQ ID NO: 65766 - DNA, 379 bp, Zea mays
gcctcagttcgcatccacgcgcgccgccgccgcctcgccggtcgacgctcaccgcgcagcatggcggaacagactgagaaggctttcctcaagcaagcaaaaggttttcctcagctcaaagaaatctggcaagggtaagaagcctggcaagggcggcaaccgattctggaagagcattggccttggcttcaagactcccagggaagcaatcgaagggacctacattgacaagaaatgcccattcactggaactgtttctatcagaggcagaattattgctgggacatgccacagtgctaagatgaacagaactatcattgttcgcaggaactacctccactttgtaaagaaataccagaggtatgagaagaggcactcc

SEQ ID NO: 65767 - DNA, 366 bp, Zea mays
acggccggtccgtcctcctcccgcaagcccaacaagcgcttcgagatcaagaagtggaacgccgtcgcgctctgggcatgggatatcgtcgtcgacaactgcgccgacttgcggcaaccacatcatggatctatgcatcgagtgccaggcgaaccaagccagcgctaccagcgaggagtgcactgttgcttggggagtctgtaatcatgcttttcacttccactgcatcagcaggtggcttaagactcgtcaagtgtgcccattagatatcagtgagtgggagttccagaaatatggccactagttcctgggcaccctcatgtgatgttggggcttacttctagtgactgctaccactcgagtgta

SEQ ID NO: 65768 - DNA, 98 bp, Zea mays
cacacactcgctttcttcggttcttcctcctcgagcagccacttccgtctctaaccctacagcgacgacgagagcgaggctatgaaggggaagaagcc

SEQ ID NO: 65769 - DNA, 374 bp, Zea mays
caacataccagactatgcttaacaccctcgacggtgtcagagatgagacaggtgcaagccccactgcttgggctgtttggacgagggcattgactgctgaagaagaccaggcatggtgatcttctcaacaagtacatgtacctcactgggagggtggatatgaggcaaattgagaagacaattcagtatcttattggctctggaatggatcctaggactgaaaataatccttatcttggtttcatctacacctccttccaagagcgggcgaccttcatctcgcatgggaacactgctcgtcatgccaaggactttggcgacttaaagctcgcacaaatctgtggcatcatcgcctcagatgagaagcgacatga

SEQ ID NO: 65770 - DNA, 281 bp, Zea mays
cgaaacccagctcttcaaccatataggcttcaacaagcaatcgcagcaagcaacatacctttatcgcccttgttgtttcaacaatcgccagcctaccttggagaagcattggtcaaccatcgggacacagctgagactcgtgtactctgtaccaagtatctggaacttctcctatctcagacacattctccatcacactgctaatgactgtgtattgagacatatacattagcactagtatgctattagacacattctcattacattgcgatgaccgtgta

SEQ ID NO: 65771 - DNA, 372 bp, Zea mays
ctcctcgcatttccttgcaaccgattgccttcacccctcccaacccaagaccgatggcgcccaaggccgagaagaagcccgcggcgaagaagccggccgaagaagaagcccgcggggaagaagacgaccgccgggaagaagcccaaggcggagaagcggatccccgctggcaagtccgccggcaaggagggcggcgagggcaagcgtggcaagaagaagggcaagaagagcgtggagacgtacaagatctacatcttcaaggtgctgaagcaggtgcacccggacatcggcatctcctccaaggccatgtccatcatgaactccttcatcaacgacatcttcgagaagctggccggcgaggcgccaagctcg

SEQ ID NO: 65772 - DNA, 355 bp, Zea mays
cagagtcagagcaaccctatctcttccccactccgctcctcgctcaccctctcaccaaatccttctcctccgcgccgccacagccgggcgcggctccccggttggagatccaggagatatgcctcgttatgatgatcgccatgggaatacacgcttgtatgttggaagattggcccctcgcacccgttcccgcgacctagaatatcttttcagcaaatatggaagaatacgtgaagtggagttgaagcgtgactatgcattcattgaattcagtgacccccgtgatgctgatgatgcgcagtacaacctagatggcagggaagtcgatggaagccgtattattgttgaatttgct

SEQ ID NO: 65773 - DNA, 360 bp, Zea mays
  unsure (1)..(360): unsure at all n locations
gtccagaacgtgtgcgccttgaagaaatgagggagaagttctcccttcaggatagagttgagatgttaggagctgtacctcatgctcaggtgcgatcgggtcctgatatctggacatatatttttgaacagttcactcacagaggcattttgcatagccattctagaagcagctagctgtggactgttgacagtgagcactagagtcggtggtgtccctgaggttcttccagatgacatgatagtacttgcagaaccagctcctggagatatggtaagagctgtcaagaaagccatcgacatgctacctggaatagancccagattatgcacttcggatgaaagactttatagttgggac

SEQ ID NO: 65774 - DNA, 352 bp, Zea mays
ctcaaagcctccgacccccttcctctctccctccgccgccgctgcgcacgcagggaacaagcgacatgggcgtctacacctttgtgtgccgcaacaaccggcgccaattggaccgccaagcagaactccggcgagatcgaggcttccgccgctaccccatacgagctgcagcgccgcctcgtcgctgccgcctccgcggccgactctgcctacggcgtccagtcgtccttctccatggtcacccccagctccgccgtgttccaggtgatcgtcggtgctgtcggtggtggtgcaatgatggtgagcggaggtggcggcggcggtgctgctgcatctggtggtgctgctgccg

SEQ ID NO: 65775 - DNA, 366 bp, Zea mays
atctcccctcgcttccctcttctggtctccgccccgctccttgcctccgatccccaattcctccttcggatctcgcattcagcgcaggcattgtgttaaaggaagggggacgcgtaggaagatggggctcgcgttcgggaagctcttcagccggctcttcgccaagaaggagatgcggatcctcatggtcggcctcgacgccgccggtaaaaccaccatcctctacaagctcaagctcggcgagatcgtcaccaccatccccaccatcggtttcaatgttgaaactgttgagtacaagaacattagcttcactgtctgggatgtcggtggtcaggacaagatcagacctctttggaggcattactt

SEQ ID NO: 65776 - DNA, 364 bp, Zea mays
cggaaagatcactattgatccagatgacccagcggcagtttctcgttatgcccaagtcatgaagactgtaagggaaaaggcggatcttctctctgattctcaaaggattaaatataccattgagaccttcaccaagggcatccctgatgcacggacttacttgaatactcttcaacagctcagaataaagagtggtcttatagatcatcttggaattgagcctttgatgatggaagctcttgagaagattgagaaggacattaagaaaccacttttgaggagcgacaagaagaacatggccaccctcttggcagagtatgacaagattaactaaaagcttggctttcggaaggaggatcttcca

SEQ ID NO: 65777 - DNA, 98 bp, Zea mays
  unsure (1)..(98): unsure at all n locations
cttntccaatttgggtgccttttatttctttctcttgactaattgttctggctaggactcgcagtattatagtgaataggagtggtgaaagtgggcat

SEQ ID NO: 65778 - DNA, 244 bp, Zea mays
  unsure (1)..(244): unsure at all n locations
ctctttcgcctcctcgcttcgcttcctcggcggattcctcctccctcgaccgtcnccgtcaccgtccccttccggcgcgcaactcgcccgagatggcaacgcgagatcggtgtcctgtgatgacgatgcatctcagtcgggactgcagtcgagagctcacgttctacttcagatggacgacagtcaagagatcgttgtgacagtcggaccgcacactagagctcacacactccgagatgctgcg

SEQ ID NO: 65779 - DNA, 386 bp, Zea mays
  unsure (1)..(386): unsure at all n locations
caacaagcaacataganagtggaatccagtagcaacaacagagcaacaatggcgaccaagatattttccctccttatgctccttgctctttctgcatgtggttgttacggcgacaattttccctcaatgctcacaagctcctatagcttcccttcttcccccataccttccatcaatgatagcttcagtatgtgaaaacccagctcttcagccctataggctccaacaagcaatcgcagcaagcaacatacctttatcacccttgttgtttcaacaatcgccagccctatctttggtgcagtcattggtacaaaccatcagggcacagcagctgcagcaactcgtgctacctgtgatcaaccaagtagctctggcaaacctttctc

SEQ ID NO: 65780 - DNA, 360 bp, Zea mays
ctggttttgagggcgacaacatgattgagaggtccaccaaccttgactggtacaaaggcccaaccctgcttgaggctcttgaccagtcaccgagccaagaggcttcagacaagcccttgcgtctgcccctacaggatgtgtacaagattggtggtattggaactgtaccggttggtcgtgtggagactggtgtcatcaagcctggtatggttgtcacctttggtccaactggcctgactaccgaggtgaagtctgttgagatgcaccacgaggcgcttcaggaggctcttcctggtgacaatgttggcttcaacgtgaagaacgttgctgtcaaggatctcaagcgtgggtttgtggctc

SEQ ID NO: 65781 - DNA, 365 bp, Zea mays
  unsure (1)..(365): unsure at all n locations
cctcatcgccaccagcgcaaagccgccctatcgtcctgtcgtgagaagcaatggcgggccgtggcaaggcaattggcgctggtgccgcgaagaaggcaacgtcaangagctccaaagctgggctgcagtttcccgtcggcaggatcgctcggttcctcaaggccggcaagtacgccgagcgcgtgggcgccggcgcccctgtctacctcgcagctgtcctcgagtacctcgccgctgaggtcctggagcttgctgggaacgcagcgagggataacaagaagacccgtatcgtgccgcgtcacatccagctcgccgtgcgcaacgacgaggagctgaccaagtngcttggtggtgccaccatcgcg

SEQ ID NO: 65782 - DNA, 321 bp, Zea mays
  unsure (1)..(321): unsure at all n locations
gtacgctactccgctgcccctcagtcctcagttcctcacctagcggtagcgtgcgcgcgggagacgtagatggcggcttcggaggcggcagcggcggcggcaacaccggtgacgccgacagnagggacggtgatcgcgatccacagcctggaggagtggagcatccagatcgaggaggccaacagcgccaagaagctggtggtgattgacttcactgcaacatggtgtcctccgtgccgcgccatggctccaattnttgctgatatggccaagaagtcnccaaatgttgttttcctgaaagttgatgtggatgaaatgaag

SEQ ID NO: 65783 - DNA, 318 bp, Zea mays
gcgatatcgggtttactagatggaactggggagtacactctggtttatgaggattatgaaggcgatagggtgctggttggcgatgtcccctgggggatgtatgtttcttcgggtgaagaggctgcgcgttctgaagacatctgacctctcttcatctctaacagcacctcctggccagaagaggacggtaactgagtgtccagtgtttacctcttagacacttccttgcagtgatgttggtgtgctgtgaagaagaaaacgtcttctgagcttgtatcatctttcttcgtggtttcttcctcttcttttccctacttt

SEQ ID NO: 65784 - DNA, 318 bp, Zea mays
ggtcatccggatcctaaccttacctatgcaaaagagttggttgaacgcatgggtcttggatagtcatcctcaaatgttgagcctcctgaatttggtgctgcagctgatggagatgctgaccgcaacatgattcttggtaaaagattctttgtgacaccgtcggactctgttgccattatcgcagccaatgctgttcaatcaattccttactttgcttctggcctgaagggagttgccaggagcatgccaacatctgctgcccttgatgttgttgcaaagaatttgaaccttaagttctttgaggtgcctactggatgg

SEQ ID NO: 65785 - DNA, 351 bp, Zea mays
atccagcatggtccctcagtcggatcggctcgagtgagcttatggaagagttcatggctgctgttaagcaaatctacggcgagaaagtcctcattcagtttgaggacttcgcgaatcataatgcttttaatttgcttgcaaaatatagcaagagccatcttgttttcaatgatgacatccagggcacagcatcagtggtccttgcaggtttgttagcagcactcaaggtggttggtgggaccttggcagagcacacttatttattccttggtgctggggaggctggaactggtattgcagaactcattgctcttgagatttcaaaacagacgtcggctccaattgaagagt

SEQ ID NO: 65786 - DNA, 315 bp, Zea mays
ggccagtcggtggtgcggcggctgcagtcggagctgatggcgctgatgatgggcggcgaccgggcagtcggcatttcccgagggggacaacatgctccactgggtgggcaccatcgacggctcgccgggacggcctacgagggcacctcctaccgcctcgcgttggccttcaccgccgagtacccgtacaagccgcccaaggtgcggttcgacaccccctgcttccaccccaacgtcgacgtgcacggcaacatctgcctggacatcctccaggacaagtggtctccgcctacgacgtgcgcaccatcctcctct

SEQ ID NO: 65787 - DNA, 280 bp, Zea mays
ggagacgagaggagaggctggtgtctcggacaccatggctccgatgaagctgtacggtgcggtgatgtcgtggaacgtgacgatgtgcgcaacggcgctggatgaggctcgatacgactatgagatcgtgcccatcatcttcgccaccgccgtccacaggagtcacgagcacttcgtccgcaacccgtttggtcaggtaccagctctgcacgacggtgacttgtacctcttcgaatcacgcgcaatctgcaagtacgctgctcgcaaagacaagccatag

SEQ ID NO: 65788 - DNA, 317 bp, Zea mays
cacgaagctgctggggctgccgaatcaccgacgatggcctgatcaagatttcgtccgcggattgcgtcggcaatctgacgtccatatcgctctggggattggccggggtcaccgataagggcgtggtccgtctggtttcgagggcttattctctgcagcacctcaatatcggtggaacgttcatcacagatgaatccctctacgcagtcgcaaacagctgcgcaaatcttaagagcatcatcctgtggagctgccgccacgtgacggagggcgggctggtggcgctggtgaacaagtgccggcggctggagtgcatc

SEQ ID NO: 65789 - DNA, 319 bp, Zea mays
gcacaacaatgtcttcctcctcaccgctgctcgccagaactgcaacgcggccagcatcctcctcttcctccaccgtgtcgtagatgtgtttaagcactacttcgaggaactgggaagaggagtcgctcagagataattttgtcgttgtgtatgagttgctggatgagatgatggatttcgggtacccacaatacacggaggcgaagatcctaagtgagttcatcaagacagatgcgtacaggatggaggtcacacagcgtccacccatggccgtgacaaatgctgtgtcatggaggagcgaggggatccgttacaagaa

SEQ ID NO: 65790 - DNA, 313 bp, Zea mays
accttattgactcgcctggacacgttgattcttcttcggaagtcacagaaagctcttcgcatcaccgatggtgctctgggtgtgagtgactgtaatgcaggtgtctgtgtgcaaactgagactgtgcttcgccaagccttggtgagaggattaggccagatctcacggtgaacaagatggacaggtgcttccttgagcttcaggttgagggtgaggatcttatcagactttctcacgtgtcattgagaatgccaatgtcatcatggcaacatatgaagataagctccttggtgatgtccaagtatacccagag

SEQ ID NO: 65791 - DNA, 206 bp, Zea mays
cttgcttctcaggccacaacaggaagcactggatgggatgacgatgatgcttttgttgcctggaaggacagtcctgaaaactacaaggggcatatcccaagcttagggctcaaaagtgtctcatcgctctctgatctgctgatcagtcagatctgagcatctcgaggcttctacgtatagatagatgtccttcaaacgagttgtca

SEQ ID NO: 65792 - DNA, 311 bp, Zea mays
agaatctcccttctcctactctcgtcattcctagattatgttgcttggagcggacgctcacaaattgatatcggagacactgatctaagcgctagcacacacctactacacgcgtcgcgcgaaggaatccggatccatggagcccaacctgaagatggcgatcgaggaacaatccaagcttcttcgcgacatctgtgaccacctctttgctcaggagacgcgttggtgcacgctcgagacaaccgtcgcgtggaacaccgcgtcaccgcaacatctggtagccaacatcgccatcgagagtctgacatcga

SEQ ID NO: 65793 - DNA, 309 bp, Zea mays
tggacttgcagttgctgatggagcaaaagctgctggtgcttctcgagttattggcattgacatcgacaataaaaagtttgatgttgcaagaactttggatgtaacagaattgttaacccaaaagagcatgacaataccgatacagcaggtcctggtcgatcttacagatggcggcgtggattacagctttgagtgcattggaaatgtttcgattatgtagggctgcactggaatgctgccacaagggctggggaacctccgtcatcgtcggcgttgccgcctctggccatgagatctcacacgaccatt

SEQ ID NO: 65794 - DNA, 309 bp, Zea mays
attgatacgaactagcaacatacatagtgaagtacactagcaacatcttagcaccaattgcagccaagatttttgctcaatccttgctcctcctatgctcttttcagctagcgttgctacggcgacaataattccacaatgctcacaacaatacctctctccggtgacagccgcgagatttgaatacccaactatacaatcctacaggctacaagaggccatcgcagcaagcatcttacggtcgttagcattgaccgtccaacaaccatatgccctattgcaacaaccatccttaatgaatctatatct

SEQ ID NO: 65795 - DNA, 221 bp, Zea mays
agaagaacgaacctgagtctgctaagaagctagcatctgttgctgacctttatgtcaatgatgcttttggcacggcacacagagctcatgcttcaccgaagagttacaagtattgaagctgctgttgctggctctcatgcagaagaacttgactacctgtggagctgtgccaaccaagaagcatgcgtatgtgtgaccagccagagatggcatgagcgtct

SEQ ID NO: 65796 - DNA, 309 bp, Zea mays
catttgttagatgaagacttcgaagctgtggtgggggatttcggtttggccaaactaatggattacaaggatacgcatgtaactactgctgttcgaggaacattgggcacattgcacctgaatacctttcgacaggaaaatcctctgagaaaactgatgtatttggctatggaattactcttttagagcttattacaggacaacgtgccttcgatctagctcgtcttgctaatgatgatgatgtcatgcttcttgactgggtcaagggagtgctcaaggagaagaaactggagagtctggtcgacgaag

SEQ ID NO: 65797 - DNA, 345 bp, Zea mays
  unsure (1)..(345): unsure at all n locations
tgttgcagntaggtacgatgctcggaatgctgctcgagagcgccgccaccgccaccgcgaggatgccgttcaagaggttcgtggagatcgggcgcgtggctctggtgaactacggggatgactattggcgtctcgtcgtcatcgtcgatgttggcgacaataaaagggcacttgtggatgctcctgatatggtcaggtgccaggtgaacttcaagcggctctcacttactgacatcaagattgacatcaaacgtgtccccaagaagacagccctgatcaaggcgatggaggaagctgatgtgaagaccaagtgggagaacagctcatggggcaagaagctgattg

SEQ ID NO: 65798 - DNA, 308 bp, Zea mays
tggcgcgccacaatgacctcgaggggtctactggagaaggatttcgagcagattgcgggagttcctccaccaggcagtgaccatctgcctgaacatccagaacgagtaccggcaagctcctcaaggacttcaacaagggcctggtgaacaacaaggacatcgagaacctcaaggtccaggtggagaagtttgccgactccttcgacatgcctgggatcacgcttgagagcatgaaatacaaggagtagacatgcctcccatgcgcggcaaggtcctcctgtaccgatgtctttccttgtggtggcgca

SEQ ID NO: 65799 - DNA, 302 bp, Zea mays
gtgagccaagacctatctgttatcaacttggtaattgttaagaagggttagaacgatctgcctggtttaactgacactgagaagccaaggatgatgggtctcaaaagggctccaagatcaggaagctgttcaatcttgcaaaggatgacgacgtgcgcaagtacgtgaacacgtaccgcaggacattcactaccaagaatggcaagaaggtgagcaaggcacctaagatccagcggcttgtgacccccttgaccctccagaggaagcgtgctagaattgctgacaagaagaagaggatcgct

SEQ ID NO: 65800 - DNA, 157 bp, Zea mays
aggcgcctgccagaccgcctcctcttccccgcctccgtgtgcccaaggccaggccaacagtttttaggtggaattggtacatgctaacaaccactgccttatagctagtggcagtcacgagtcactcctgaatgtaggccgaaattgctctttacta

SEQ ID NO: 65801 - DNA, 293 bp, Zea mays
agatagatagagataggagaaggaacatggaagcaaagcacaagatgtggccgccgcagtccgcaccccctccccaatcacgctacccgacaccgcgctccgcagattcgtagtcgctgctaggcttccggcgagatggacgtggtgaaggcggcgcagttgtcggggcggacgctggaacgggtagtggtgcatcccttggtgctgctcagcatcgtcgaccactacaaccgcgtcgcccgctacacccgcaagcgcgtcgtcggcgtcctcctcggcacctcatcccgcgg

SEQ ID NO: 65802 - DNA, 150 bp, Zea mays
aggctcgagcagaaacacaccagtgcgaagactattagcaacaacctaacaacaatggctaccaagatattatcctccttgcgttcgtgcgttttgcgaggcacaatggtcatatcatatgctatgtcagtcatattaagtctccacagt

SEQ ID NO: 65803 - DNA, 304 bp, Zea mays
gatggctaggcctgttattgctaaggcaatggttgatgttgccaaggaagttggtgcggatgcagttgcccaatggttgcactggataaggcaatgatcagggttcgctttgagcttacattctatgctttaaatcctgaacttatagtggtggcaccttggagggagtgggatatcacaggacgtgaagatgattgaatatgcaaagaaacataatgtacctgttccagtttcaaagaaatcaatatacagccgagaccgaaacttgtggcaccttagccatgagggtgacatcctggaggac

SEQ ID NO: 65804 - DNA, 306 bp, Zea mays
gattgttcagaggactcccgagaggcagaggagggtggagcccgtgccgcagagggcagcagacaggccgaggtacaatgacagaacccgctacgcacgcaggagggagaacagcgatgaactgtgcgataaaatcataaaaaagaccacagcaacaagtcccaggtggtttcagctctggaattcaaggatcacctagtatcacctgtattaaattggcaatctcactttacctgcagtctagagtatcgtttctatgtgctcagcttggacgtattgtattctgtaattacagctacttggaga

SEQ ID NO: 65805 - DNA, 302 bp, Zea mays
cagaagagaaagtcgacattattcttgttgttggacgatggaattcaagtaacacctctcatctgcaagacattggagaactcagtggaattccatcatactggattgacagtgatcaacggattggaccaggaaacaggatcagctacaagctaaatcatcgtgaactggttgagacaaataactggttactcgacgggcctattaccattggtgttacttcaggtgcctcaactccagataaggttgtcgaggatgctcttcagaaggtatctcagatcaagcgtcaggacattatgcag

SEQ ID NO: 65806 - DNA, 297 bp, Zea mays
gaattgataaggaaggaaatttgggtggagaaattgttcctcggtctgttctgctgtgcaccttggagggcggttcgtatttgctttgtgctcttgtgggatgggtaattggttcagtttctactgaatgcaagtacaggtgaactgactgatagacagaaggttaccctcgggacccaacccatcagccttcgtaccttctcatcaaagggtaccacccacgtgttcgcttcgtcagataggccaactgtcatctatagcagcaataagaagcttctctacagcaatgtcaatttg

SEQ ID NO: 65807 - DNA, 92 bp, Zea mays
ctctctttgatcggagaggcggatgtacagcatgctcgatatgtctagtttggatgtcatgtttatgatgaggaataaaatgcagtgttcac

SEQ ID NO: 65808 - DNA, 302 bp, Zea mays
gttacttcaatgggcttcgaacacccagctgtgcaagcctataggctacaacaagcaattgcggcgagcgtcttacaacaaccaatttcccagttgcaacaacaaatcttggcacatctaacaatacaaaccatcgcaacgcaacagcaacaacaattcctaccagcactgagccacctagccatggtgaaccctgccgcctacttgcaacagcagttgcttgcatcaaacccacttgctctggcaaacgtagttgcaaaccagccacaacaacagctgcaacagtttctgccagcgctcag

SEQ ID NO: 65809 - DNA, 300 bp, Zea mays
cgacttgctgattgttatactgcctgacaataatggttctctttacggggatgtcaaaaggatctgtgagactaatcttggattggtctcccaatgctgtctgactaaacatgttttcaaggtgaacaagcagcagtatcttgcaaatgttgccctgaaaataaatgtgaaggttgggggaaggaatactgtgcttgttgatgctttggcaaggagaatcccccttgtcagtgacatagcgactattatctttggtgctgatgtgacccatccccatcctggggaagattctagtccttc

SEQ ID NO: 65810 - DNA, 301 bp, Zea mays
atagaatactctgagtgctcgctgagatacatcatggtgatcaagctctccgatcccactggcgaggcttgggtgtctgtgttcgatgagcatgcagagaagatcattggctgcagcgccgacgagcttgatcggatcaggaaagatgagggggacgacagctacgttctcaagctcaaggaagctacctgggttcctcacctgttccgtgtcagcgtcacgcagcatgaatacatgaacgagatgaggcatgagatcaccgtgatgggtgaagcacggtcgactcgcagctgagtcaagt

SEQ ID NO: 65811 - DNA, 189 bp, Zea mays
aagcgacgcactagcaacgacctaacaccaatggctaccaagatattagccctccttgcgcttcttgcccttttagtgagcgcaacaaatgcgttcattattccacagtgctcacttgctcctagtgccagtattccacagttcctcccaccagttacttcaatgggcttcgaacatccagccgtgcaa

SEQ ID NO: 65812 - DNA, 242 bp, Zea mays
caaccatgtcggcgatgatgcaaccgcagatcatcctgctcaaggagggcacggacacgtcgcaggggcgcgctcaggtggtgagcaatatcaacgcgtgcacggcggtgggcgacaccgtgcgggaccacgctggggcctcgggggatggacaagctcatccacgacgacaagggcggagtcaccatctccaacgacggcgccaccatcatgcgcctcctcgacatcgtgcaccccgccgc

SEQ ID NO: 65813 - DNA, 191 bp, Zea mays
ggtggcatgaaggtgaaggctgaccgtgacgagtcgtcaccttacgctgctatgcttgctgctcaagatgtcgcacagcgctgcaaggcagctggcattactgcactgcacattaagcttcgtgccaccggaggcaacaagaccaagacccctggacctggtgcccagtctgccctcagggcgcttgctcg

SEQ ID NO: 65814 - DNA, 275 bp, Zea mays
ttaatgagcaggctgttgacatcattaagagatttcttctgggcaagactattgatgttctcctgtatgtggatcgtttggatgcggtacagatgggatacacttgatggacaggttataagagccatcaccaattcatttggaaaagatatttggcgaagatcattggttgtgttgacccatgctcaactctcaccacctgatggaatcgagtataatgatttctttacaagaaggtcagaggcacttttgcgatacatccattcgggagcagg

SEQ ID NO: 65815 - DNA, 364 bp, Zea mays
gcggcgcggcctacaaccgttttcgtgctcacacacccaaaccttagtcgcgatcaggccccaaggactcgagatgaagtcgagggcacgttcaaccgccggcgactccaggctctcggtgaggaagaccaaggctgagaaggacccaaacaagcccaagaggcctccgagcgcgttcttcgtcttcatggaggagttcaggaaggactacacggagaagcaccccaatgtgaagcaagtctccctgattggcaaggctggtggtgacaagtggaagtccctgtctgatgccgagaaggctccctacgtgtctaaggcagagaagctcaaggctgagtacaccaagaagatcgacgcttacaac

SEQ ID NO: 65816 - DNA, 212 bp, Zea mays
cttgtgcttcagaactttgcaacgctacactgcagctactcttgagcatggcatgcatcctccgatttcccctaagccagaatggcgtgctctgatggatgaaatggctgttgtagcaactaaagaatatcgatcaattgtcttccaagaaccacgcttcgttgaatacttcagatcggctacacctgagactgaatatggtaggatgaata

SEQ ID NO: 65817 - DNA, 228 bp, Zea mays
  unsure (1)..(228): unsure at all n locations
gagtagtaagtcggaaccggtcgagctcctcgccccgcctccactaccccactcccaggcgacgcacaggtacgtcgccggcggcgatgacgacgcgcttcaataagaaccgcaagaagcgcggccacgtgtccgccgggcacggtcgcatcggcaagcacaggaagcatcgctgaggtcgcggtaacgccggtngcatgcagcaatagcgcatcctcttcgacaagt

SEQ ID NO: 65818 - DNA, 353 bp, Zea mays
  unsure (1)..(353): unsure at all n locations
cgcggtctgctcgttcgatctgtgcagcagacctgaggtcncgggcgaccgtgaagcagcttcaatcgtcggcatcgcgctcgtattgcatagtggtggctggaaacaagaatgccttcaaagcacttattgctgcagaatacagtgggatcacggttgagttgaccaaggattttgagatgggtgtctccaacaagacccctgagtttcttaagatgaacccccgtgggacggttcctgttctggagactcctgatggccctgtctttgagagtaatgctatcgcacgctatgttgctcgcttgaaggatgacaaccctctttttgggtcttcccgtattgaacaagccacg

SEQ ID NO: 65819 - DNA, 324 bp, Zea mays
atgatgtgcagcttatcattcagtgtgaacctccccgggatgttgaagcttacatacaccggtcaggtcggacagggagagcaagtaatactgggtgttgctgtcatgctttatgagcccagatataagcacagtgtcagcagactagaaagggagtctggggttaaatttgagcatatctctgcgccacaacccactgatgtagcacaatctgctggcagtgaagctgcagatgcaattgcgagtgtgtcagacagtgttattcctatcttcaggcagcaagcagagcagttgctaagctcttccagtctgtctgcagctgac

SEQ ID NO: 65820 - DNA, 348 bp, Zea mays
caacctcctctgctctcccccacctcccggtccggcagcagagagcgggggtgcagagagatcgagatccggaggccgcgagtgggagcgccacaaccagcgactgcggcaatggcgggcacggtgacggtcccggggtcgtcgaccccctccacgccgctgctcaaggacgagctcgacatcgtgatcccgacgatccgcaacctcgacttcctggagatgtggcggcccttcttccagccctaccacctcatcatcgtgcaggacggcgacccgaccaagaccatcaacgtgctcgagggcttcgactacgagctctacaaccgcaacgacatcaaccgcatcctc

SEQ ID NO: 65821 - DNA, 342 bp, Zea mays
caactgacaacaagaccaagcatcagactatcagagttctagtgccattcatgtaaattaattaatctggtccgtttctggatatcacacagcatcaagaagggtggcccaaacccttcatccaacacaactttatcagctatactagagaaagcaagggaacttgatgtccctagagaaattttggagcgcaacatcaaaagggcatcagaaaagggacaagatacttacacagaaaaggtttatgagatgtcagacaagctcgagtggtgaacataaaagttactgatgcagataaggaccaactgctcaccgttgcgttagatgctggtgctgatgacg

SEQ ID NO: 65822 - DNA, 130 bp, Zea mays
attgatctcaaggtccgctacaaggacgatctaccattagttcttcatggtgtaagttgtatgtttcctggcgggaaaaagattgggatagtagggcgtactggaagcggtaaatctactcgtattcagg

SEQ ID NO: 65823 - DNA, 342 bp, Zea mays
cgctaaatcaaggctgcctagcgcctgtgaagatcctcattcctaaaggctctttcctctcgccaagtgacaaggctgctgttcgtttgtgggccatgtgctaacgtctcagagagtgaccgatgtaatcctaatggcgttccaagcctgtgcctgctctcagggctgcatgaacaatttgaccttcggggacgacaccttcggttactacgagaccatcggaggtggatgtggagctgggccgacatgggacggcactagcggtgttcagtgtcacatgacaaacacaaggatgactgaccctgagatctttgagcagcggtaccctgtccttctgcacac

SEQ ID NO: 65824 - DNA, 369 bp, Zea mays
agcaccggagtagctcggaatcggtcgacgttcggcgatgtcggggcgcggcaagggcggcaagggctggcaaggggcgcaagcgccacgaagtctgcgcgacaaatccaggcatcacgaagccggcgatccgtaggctggccaggaggggcggcgtcaagcgcatttctgggctcatctacgaggagacccgcggcgtgctcaagatcttcctcgagaacgtcatccgcgacgccgtcacctacaccgagcacgctcgccgcaagaccgtcaccgccatggatgtcgtctacgcgctcaagcgccagggccgcacgctctacggcttcggcggctaggccgctcccttctgatctttgatatgacggc

SEQ ID NO: 65825 - DNA, 350 bp, Zea mays
acctgagcctctttgccaggtcatgcttcgtgttggtgaccttgagcgttctatcaagttttatgagaaggccctagggactgaagctcctaaaggaagaaggatgtacctgattacaagtataccattgccatgttgggctatgctgatgaggacaagacaactgttctggagctgacgtacaactatggagtcacagaatacagcaagggcaatgcatatgctcaggttgccattggcaccaatgatgtgtacaagagcgccgaggcggttgatctggcgaccaaagactaggtggcaagattttgcggcagcagggcctctacctgggatcaacactaagatcgcct

SEQ ID NO: 65826 - DNA, 142 bp, Zea mays
tgagaccaacaagcaacatagaaagtggaatacagtagcaagaatagagcaacaatggcggccaagatattttccatccttatgctccgtgctctttctgcatgtgttgctaacgcgaccattttgcctcaatactcacaag

SEQ ID NO: 65827 - DNA, 299 bp, Zea mays
aacgccggagctcgacaaggacgaccgacgacgcacgcggagatccggcgtactgcacattttgaaaactgaactgtaagatagcatccgcagagctttcccgtgaggacaatgtgtacatggcgaactcgctgagcaggcggagaggtacgaggagatggttgagttcatggagaaagtagccaagactgttgactcggaggaactcactgtggaggaacgacactcttgtctgttgcatacaagaacgtcattggagccgccgcgcctcatggcgcatcatctacttcatcgagcag

SEQ ID NO: 65828 - DNA, 275 bp, Zea mays
tgggtgatcctccacctctaccctttcctgaagggtctcatggggaagcagaaccgcacaccgaccatcgtcatcgtttagtccgtccttcttgcttgcatattctcgctgctatgggtgaagatcgactccttcatatcccctacccagaaggctctttcccgtgggcagtgtggtgtaaactgctgaaatgatccgaactgcctgctgaataacattgctccggcacaatcatgatctaccccttcgtgtaaataccagaggttaggcaagac

SEQ ID NO: 65829 - DNA, 362 bp, Zea mays
ccattatggtatcgtgaagggtgactacctgatgatcaagggctgctgtgtgggtccaaagaagagggtggtgacctccgccagtccctcctgaagcagacttcccggctggcgctggaggagatcaagctcaagttcatcgacacatcatccaaatttgggcacggtcgcttccagactaccgatgagaagcagaggttctttggcaagctcaaggcgtaaggtgctgcacggtcgcttccagactaccgatgagaagcagaggttctttggcaagctcaaggcgtaaggtgctgcggtgcagcgacaagtcgcatttctcagaatcatcagactgtgatacttctgtttgtaacttgctg

SEQ ID NO: 65830 - DNA, 350 bp, Zea mays
gcgtactgtctgtgcgaaggcgaccattccttcttcgctccttcgccgccgctatggttaagtactcgcaggagccgggcaaccctaccaaatcggccaaggccatgggaagggacctgagggtccacttcaagaacacaagggagacagcttttgcgcttcgcaagctgcctttgaccaaggctaagcgataccttgaggatgttattgctcacaagcaggcaattcccttccggagatactgtggaggtgttggtcgcaccgcacaagcaaagtctcgccactccaatgggcagggtcgctggcctgttaagtcagccaggttcatattggatttgctgaagaatgct

SEQ ID NO: 65831 - DNA, 355 bp, Zea mays
tctggggtttagataaaaagctcgctcaaaggaagcatttcccatctgtgaattggctcatttcctattcgaaatactccaaggccctgagtccttttatgagaagtttgatccagatttcattgatattaggacaaaagcacgtgaggtgttgcagagggaggacgatctaaatgaaattgtgcagcttgttggtaaagatgcgctggcagaatctgacaagattacactggagacagcaaagctactgagagaagattatttggcacaaaatgcatttaccccatatgataagttctgcccattctacaaatccgtttggatgatgcgcaatattattcacttcaacacattg

SEQ ID NO: 65832 - DNA, 360 bp, Zea mays
cggctcgagcgaatacatttatgcaggttcatccccatacatccgttgaagaccttgacgagctctccacgctcctccaagttcctcttgtcgcaggaactgtgaacagaggaagcgaggtcattgctgcaggcatgacagtgaacgactggactgccttttgtggctcggacacgacagccaccgagctctcagtcatcgaaagcgtcttcaagctgagagaagggcagcccactgcgattatcgaggacatgaggaagtctctgatagacagttacgtgtaactggggggccagcagatgtgggtcagagtttgcctttgctaaaagatgtattgctagctatagtcgaattatcagt

SEQ ID NO: 65833 - DNA, 359 bp, Zea mays
cataagcaggaaattaatggctggggatggggagctgaagctgctgggcatgtgggcgagcccgttcgtccttcgtgcgagactcgcgctcagcttcaaggggcctcaagtatgagtacgtcgaggaggagatctttggaaacaagagcgagctcctcctcgagtccaacccggtgcacaagaaggtacccgtgctcatccacaacggcaaggctatctgcgagtcacagatcatcgtgcagtacatcagtgaggtctacgacggcacaggcccttctctcctccccgtcggcgcctacgaccgtgctgtggctcgcttttgggccgcctacgttgacgaaaaggtcttcagctcgttc

SEQ ID NO: 65834 - DNA, 367 bp, Zea mays
  unsure (1)..(367): unsure at all n locations
acgagtggaatcggtcgaanagtgtggaaccgtgtgattcagcgtggtataacatgcaaactacaggtgttctttacacgtgagggtaaaggctggggagtacgcacagtggaagatctcccaagaggtgcctttgtctgtgaatatgttggagagatactaacaagtgctgaattgcacgaaagagcaattgagaatcgcaagaaatggtaagcatatgcatcaagtgctcctggacgctggttggggttcaggtgtagtattgagggatgaggacgcttgtagccttgatggttcattttatgggaacgtcgggcggtttatcaaccaccggtatgtaggatacttgctcgtttttttttgctgt

SEQ ID NO: 65835 - DNA, 354 bp, Zea mays
tgttggagagtgaatgggccaagcttactggaacaaatgatgtaagcttccttgagttctgcataaaaaaatcaactaccgaagcggaaatactcctccatgagaacattggttcccttgaccgcgaccacgagttcatcgacaagttcctcaactacaaggccttcctgtcagcagatgtgatccacatggccttccaagctcccagcagccgtggtgacggtgcagggcgggcaaaccctgctgctgcagctagaggaggcacggtcatagacgcggatctggatggcggcgggaagaacaaggggaagaaggggaagaaggtgactgccgcagtgttggggttcaacgtgg

SEQ ID NO: 65836 - DNA, 214 bp, Zea mays
acccacacagaagcggcggcggcggacaaacgcaggcgaaggcgagggtgtgagggaagtacacaccaggtgacgtcaattctaccgcaactatggtaagacgttcaagaaaccaaggcgtccttatgagaaggagcgtcttgatgctgaactgaagctggttggtgagtatgggctgaggtgcgagcgtgagctttggagggtccagtatgca

SEQ ID NO: 65837 - DNA, 137 bp, Zea mays
  unsure (1)..(137): unsure at all n locations
cagtactatagcttttgtgcttggtgcagtcacctcactagtttccggctttcttggaatgaagatcgcaattatgcgaatgcccggacnatttagaggccagaaagggtgtcggaaaggcatttattactgccttc

SEQ ID NO: 65838 - DNA, 355 bp, Zea mays
  unsure (1)..(355): unsure at all n locations
atctctacgagctccagggcctgtcaccgtggtacgacaacctatgccgccctgtcacagacttgctgcccattatcgccagcgaggtccgtggagtcaccagcaatccaacgattttccanaaggccatttcatcgtccagcgcatatgatgatcagttcaagcagctcatttcggctggaaaggacgcggagagcgcttactgggaactcgttataaaggatatccaagatgcgtgcaaactttttgagcccatctacgatgagactgatggggctgatgggtatgtctccgtagaggtgtctcctaggttggcaaatgacactcaaggaactgttgaagcggcatagtggtt

SEQ ID NO: 65839 - DNA, 351 bp, Zea mays
  unsure (1)..(351): unsure at all n locations
aaaatttcttggcggatcatgcacatgcagtgagaagggtggttgcctcaggtctaacaggggtccatggaatgaccctgtcattatgaagctaatacacagtatggaaggtggtagtactagagaaataaagcaagtttctgacggggacgaaagaagtggctcttccctaagggcagaaaacctgaagggcatgcttagtgacatatcaaatgctgaatctgagtcggatgttgatgacgttggtttaacagttgtccanaagagtacggaccacagtttactaaccccagttcatgaagaagtcaaggggtcagatacttcgatattttgtagttctagcagtaagca

SEQ ID NO: 65840 - DNA, 353 bp, Zea mays
  unsure (1)..(353): unsure at all n locations
attttcagcattcanaaacacaccaagcgaacgcactagcaacgacctaacaccaatggctaccaagatattagccctccttgcgcttcttgcccttttagtgagcgcaacaaatgcgttcattattccacagtgctcacttgctcctagtgccattattccacagttcctcccaccagttacttcaatgggcttcgaacatccagccgtgcaagcctacaggctacaactagcgcttgcggcgagcgccttacaacaaccaattgcccaattgcaacaacaatccttggcacatctaaccctacaaaccattgcaacgcaacaacaacaacaacaacagtttctgccatcac

SEQ ID NO: 65841 - DNA, 353 bp, Zea mays
ccatactccataagaaggaaacttgtgaggctgttaccatcattgaaacccctcctcttgtcattgttgggctcgtggcatatgtgaagactcctcgtggcctccgcacactcaactctgtttgggcccaacatcttagcgaagaagtgaggagaaggttctacaagaactggtgcaagagcaagaagaaggctttcacaaagtatgctctcaaatatgaaaatgatgctggcaagaaggaaattcagctgcagcttgagaagatgaagaaatatgcttctgttatccgtgtcattgctcatacccagattaggaagatgaagggtttgaagcagaagaaggctcacctgatg

SEQ ID NO: 65842 - DNA, 346 bp, Zea mays
tgtccgacatactcattgcagccattccagagttcgtgggcgagaatgtccagataatcgttcttggcacgggaaagaagaagatggaggaggaactaacgcagctggaagtgaaatatccaaacaacgctagaggcatagcgaaattcaatgttccattggcacacatgatgtttgctggggctgacttcattatcgtcccgagcaggtttgagccatgtggtctcattcagctgcaagggatgagatatggagtgattcccatctgttcatccactggaggacttgtcgacacggttgaggagggtgtcaccggattccacatgggttctttcaatgtcgagtg

SEQ ID NO: 65843 - DNA, 343 bp, Zea mays
  unsure (1)..(343): unsure at all n locations
tgcgggcgaccganaatcacgggcgcgagagatcggagcacggcatgtcggaggagcagttcctcgccgtggcggtggaagccgccaagagcgccggcgagattattcgcaagggattctaccagaccaagaacgtcgagcacaagggccaggtggatttggtgacggagacggacaaggcctgcgaggacctacatcttcaaccacctccggaagcacttcccggaccacaagttcatcggggaggaggagtccgcggcgctcggggccaccgctgacctcaccgacgaccccacctggatcgtcgatccctcgacgggaccactatttcgtccatggtttc

SEQ ID NO: 65844 - DNA, 312 bp, Zea mays
aaggcatttgacattgggcaagaaatacgtggagcatgcaaattctattgaagatctttctccacatgtaccactatataaagtcatggaagggaatgagccatgcttcttcaagacgtacttttcttgggataacacaaaatctttggttcatggaaattccttccagaagaaactctcgctgctttttggattgcgttctgagggtgcacctaggagctctggtaatggtgggccaactcagagggcatctgcattagcagctctatcatccgcattcaatccatcatctcaacaaagctgtctaatgag

SEQ ID NO: 65845 - DNA, 347 bp, Zea mays
ctcagttcgcatccacgcgcgccgccgccgcctcgccggtcgacgctcaccgcgcagcatggcggaacagactgagaaggctttcctcaagcagccaaaggttttcctcagctcaaagaaatctggcaagggtaagaagcctggcaagggcggcaaccgattctggaagagcattggccttggcttcaagactcccagggaagcaatcgaagggacctacattgacaagaaatgcccattcactggaactgtttctatcagaggcagaattattgctgggacatgccacagtgctaagatgaacagaactatcattgttcgcaggaactacctccactttgtaaaga

SEQ ID NO: 65846 - DNA, 347 bp, Zea mays
  unsure (1)..(347): unsure at all n locations
tcctacgacnccaacgtgcgcctcccgctctggccgtcgcccgacgccgcacgcgagggcatcctcagcatctggaaggaggccgactacatcaaggtcagcgacgacgaggtggccttcctcacgcgcggggacgccaacgacgagaagaacgtgctgtccctgtggtttgacgggctcaagctgctcgtcgtcaccgacggggacaagggatgcaggtacttcaccaaggacttcaagggcagcgtgcccggcttcaaggtcgacaccgtcgacaccaccggcgccggcgacgccttcgtcggctcactcctcgtcaacgtcgccaaggacgactccatcttcca

SEQ ID NO: 65847 - DNA, 346 bp, Zea mays
atccagatcagcaaagcggcagtgcgtagagaggatcgtcgaacagaacagcatgaagatggtcatcgttctcgtcgtgtgcctggctctgtcagctgccagcgcctctgcaatgcagatgccctgcccctgcgcggggctgcagggcttgtacggcgctggcgccggcctgacgacgatgatgggcgccggcgggctgtacccctacgcggagtacctgaggcagccgcagtgcagcccgctggcggcggcgccctactacgccgggtgtgggcagccgagcgccatgttccagccgctccggcaacagtgctgccagcagcagatgaggatgatggacgtgcat

SEQ ID NO: 65848 - DNA, 337 bp, Zea mays
gtcaaggagatcctcggtacctgcgtcacgtcgggtgcaccgtcgacggcaaggaccccaaggacctgcagcaggagattgacgacggcgaggtggagatcccgtccgcttaagaaggattggtgtccaggactgtgttatctttgctgctgaagccattctctgcctagattttctcatatttatttgaggtgggggtggacgtggacgtggaactatggaagttatcacagcggagttttgcttagaaactttgtcatgctttaagtctgagacaatttctgtcaaattttatgaacattcctaggtacaatcgaagttaccagtgcctgagttt

SEQ ID NO: 65849 - DNA, 339 bp, Zea mays
cggagggataggcgaaagagtagcagcagcaggcggcgccgagtagcggctccccacctcgagactgccaccatggctagagcgattgaagagcatttgaagaggctcaatgcgcccaagcattggatgctggacaagcttggcggagcttttgctcccaagccatcttctggacctcacaagtctagggagtgcctgccactgatcctcatcatcaggaacaggctcaagtatgctcttacatagcgtgaggtcatttccatcctgatgcaacgccatgtacttgttgatggcaaggtcaggacagacaagacctaccctgctgggttcatggatgtc

SEQ ID NO: 65850 - DNA, 333 bp, Zea mays
  unsure (1)..(333): unsure at all n locations
tggaggaatgccaggggttttttatgcanaaagattacaaaatgtttccgccaaccgtggactgggacaacattaactggtcaactagaaggccacagatggatttccctgtgcagtctgctatctgtacactggaagatgtagatgttatcaaggaaggacaggctaggattgctggatatgcactttcaggtggtggccgtggcattgagagagtggatgtatcagctgatgggggtaagacctgggtcgaggctcgtagataccagaaagacaatgtggcgtatgtgtcagatggacctcaaagtgacaagtgggcttgggttctctttg

SEQ ID NO: 65851 - DNA, 205 bp, Zea mays
ctttgtacacaggctgcaacaacagtaatgatgaaaaagagaaacggaaaaattatcaacattgcatctgtagttggtcttactggccatgtttgcccaagctattattacgccaccaaggctggagtgattggtttcacaaaaacagttgccagggagtatgcaagcagaaatatcaatgtgaatgctattgcaccagggttca

SEQ ID NO: 65852 - DNA, 168 bp, Zea mays
agcacaggcagctcgagagagagagagagagatagatgtcgtggttcgggcaccaccagcacaaccagccggctcgcccggcgtcaggccccaaccaggtgttcaagatcttctgccgcggcaacgagaactactgcctggctgtccgcgacagcgccatcgtactgg

SEQ ID NO: 65853 - DNA, 298 bp, Zea mays
  unsure (1)..(298): unsure at all n locations
agacaattcagtatcttattggctctggaatggatcctaggactgaaaataatccttatcttggtttcatctacacctccttccaagagcgggcgaccttcatctcgcatgggaacactgctcgtcatgccaaggactttggcgacttaaagctcgcacnaatctgtggcatcatcggcctcagatgagaagcgacatgaactgcgtaaccaagatcgtggagagttgttgagacgacctgatgtacgtggtgcctgctgcatgtgagagagtccatgctgcactgagttgcgtcagc

SEQ ID NO: 65854 - DNA, 224 bp, Zea mays
gaatggtgggctgctcctgaatctgttaccgacaagattttctctaatacaacgacaatctctgaatacctcatctctgaagacctaccagatgttgatatttctgttgtcggtgtcaccagcttcagtgagaccgaaggccctttgatgtggatgttttgactcaagtgtagattacataagtaatgaagcaattttgactcgaagcataaaaaactgtgact

SEQ ID NO: 65855 - DNA, 182 bp, Zea mays
tggagaactttggaaaattcttaaagctgggtgccatggaagataaggaaaatcacaagagaattgctcctttgttgcgcttcttctcttctcaaagcaacaatgaattgattagcttggatgaatatgtggaaaacatgaaacctgaagcagaggactgtacttccatgctgcagatagta

SEQ ID NO: 65856 - DNA, 198 bp, Zea mays
tcggtcgaggactggattgtgaaggtggcagactttggtctttcacgtctcaagcgtgaaactttcttgacaacaaaaacaggaaaaggaacaccccaatggatggcgctcgaggtgttgcgcaatgaaccttccgatgagaagtctgatgtgtacagttacggggttatcgtgtgggaacttgttactcagaagata

SEQ ID NO: 65857 - DNA, 199 bp, Zea mays
cgccagcatggcatccaacggcatcgctcccagagatgtatgtgttgttggtgttgcacgcacacctttgggtggtttccttggtgccttgtcttccttgcccgcaacaaagcttggctctataagcaattgaagctgctctagaaagagcaaatgtggatccagccctcgtgcaggaggtctttttcggaaacgtctt

SEQ ID NO: 65858 - DNA, 143 bp, Zea mays
  unsure (1)..(143): unsure at all n locations
cgcaccacaagcgagcgaaggaccggggcggaagaagagagagaagacgtctctctcctctcggcgtccccgatctccaacctctcgtctgctgcctgcctgcctgcctgcctgcaanaaggagtttgtcatggcgtctaagc

SEQ ID NO: 65859 - DNA, 300 bp, Zea mays
aggagctttacaaaactcacaatgagagaagggaccgcctgacaatgaagatcattgatgagcacgctaagtctctcaaggagagtggcgccaagcagcactttgtggatgcactcttcactctcaaacaacagtatgaccttagtgaagacacagttattggacttctatgggatatgatcactgctggaatggcacaacagtcatctcagtcgagtgggcgatggcagagctgtcaggaaccccagggttcagaagaagctgcagaggagctcgaccgtgtggttggccgtgaccgcg

SEQ ID NO: 65860 - DNA, 101 bp, Zea mays
tggacggagagccgcgacgtcggccacggcttccgctgcgtcggcatggtgaacaagatctacctcaacttcgatgcgtgccacggcgacaaggacacagc

SEQ ID NO: 65861 - DNA, 108 bp, Zea mays
ctgcacttgatactgtaaacaggatgaagctttacgctgagtctcttgcacgttttcaaggaggctcgcctcatatttatccattatatgggttgagtgaactaccac

SEQ ID NO: 65862 - DNA, 164 bp, Zea mays
cagcgggtcagtgatgacgtgagggatgaggtgtttatgcactgtccaaaggctccaagattagcattcccagaggaagataatggcagtttgaagaagattccgaatctttcagagcctgcagaatattcgagacttggactagtgccaagaagagctgacct

SEQ ID NO: 65863 - DNA, 123 bp, Zea mays
agtacatcgagtggttcaagaaggctgggtttagggatgtcaagctgaagaggattggaccgaagtggtaccgcggtgtccgatagcatgagctcatcatgggctgctccgtcacaggcgtca

SEQ ID NO: 65864 - DNA, 187 bp, Zea mays
ctcggcagtcggcacgcaggctagcagcacagcagcagccagagctatcgcctctcctcgctacggttcggttcctcggcgccgattcctgcgtgtcgtcgtccaacctcgtccgtaccgttccggcgcgcgagtcggtcgagatggcgaacgcgagatcgagtgtcgctgtgaacgatgagtgcat

SEQ ID NO: 65865 - DNA, 327 bp, Zea mays
  unsure (1)..(327): unsure at all n locations
gggtgtcgctgtgaacgatgagtgcatgctgaagtttggcgagctgcagtcgaagaggctgcaccgcttcataactttcaagatggacgacaagttcaaggagatagttgtggaccaggtcggggatcgcgctaccagctacgatgacttcacaaacagcctccctgagaatgactgcgatacgcgatctatgatttcgactttgttactgcagaggatgtccagaagagcaggatcttctatatcctatggtccccatcctccgccaaggtgaagagcaagatgctttacgcaagctcanaccagaaattccagagtgggctcaat

SEQ ID NO: 65866 - DNA, 199 bp, Zea mays
gagcattcagaaacacacctagcgaaggcactagcaacgacctaacaacaatggcttccaagacattatccctccttgcgcttcttgccctttttgtgagtgcaacaaatgcgttcattattccacaatgctcacttgctccgagtgccattattccacagttcctccctccagttactcaatgggcttcgaacaccca

SEQ ID NO: 65867 - DNA, 324 bp, Zea mays
gtttacctggtggagatccaggccccagaaaatgcacttggtggcatatacggtgttctgaaccagaagagaggatatgtattcgaggagatgcaaaggcctggtaccccgctctacaacatcaaggctttcctccctgtcatcgagtcctttgggttctcaagccagctgagggctgcacctctggtcaggcgttcccccagtgtgtgtttgaccactgggacatgatgggctcggatcctttggaggctggctcccaggctgcccagctggtgctggatatccgcaagaaggaaggtctgaaagaacagatgactcctcttt

SEQ ID NO: 65868 - DNA, 200 bp, Zea mays
cgcctgtccactttccccgtgcttctccgccgtcgaggccgcgtcccagtgcgaagagaccacgactcagatggccagccgctgggtccggcccgaggtgtacccgctgttcgcggcaacgggcgtggccgtcggcatctgcggatttcagctcttccggaacatcaccggcaacccggagtcagggtaaacaaggcagg

SEQ ID NO: 65869 - DNA, 203 bp, Zea mays
tgttgtacttccttacaaggatagtttgttgcttttgagtagatatttgcaacaacttgtcatggaatctcttgggaaagaatttgatctggatggcaaccgggtaaatcaagggctatctgtatatggaaacaaaggaagcactgaccagcacgcttacattcagcagctgagagaaggtgacacaacttctttgttacttt

SEQ ID NO: 65870 - DNA, 340 bp, Zea mays
ttgagaccaacaagcaacatagaaagtggaatccagtagcaacaatagagcaacaatggcgaccaagatactttccctccttatgctccttgctctttctgcatgtgttgctaacgcgacaattttccctcaatgctcacaagctcctatagcttcccttcttcccccataccttccatcaagatagcttcagtatgtgaaaacccagctcttcaaccctataggctccaacaagcaatcgcagcaagcaacatacctttatcacccttgtttcaacaatcgccagccctatctttggtgcagtcattggtacaaaccatcaaggcacagcagctgcagc

SEQ ID NO: 65871 - DNA, 338 bp, Zea mays
gattacccaagacgccactctgaagctgctacattcactggatccaattaaaaataaggacaccaaggataggggcacattacatcttaaggtaaagtaccacccctttacaaaggaagagcagctggaagccctagagatggaaaaacaagccatagaggagaggaagcgtctgaaggaggctgggataattggtagcacaatggatgctgttggttctggtgttggatttgtgggtactggcattggcgctggcctcggtttcgttggttcaggaattggtgctggcgcaggcttgttacctctggtattggtgctgtcagcagtggccttggtaa

SEQ ID NO: 65872 - DNA, 303 bp, Zea mays
  unsure (1)..(303): unsure at all n locations
atttcatctgtgggaccaaatgcagcagttattcactataaacctgaagcaagcacatgttcggaaatggatgctgataaaatatatctttgtgactctggggcacagtacctggatggtacaacagacattacaagaactgtacattttggtaaaccctcagcacatgagaagtcatgctacacacagttttgaaaggccacattgcactagacattgctgtgtntcctaatgggacgacaggacatgctcttgatattctttcacgagcaccactctggagagagggtcttgactatcggc

SEQ ID NO: 65873 - DNA, 205 bp, Zea mays
ctaagactgtagatgtggaagagctcactgttgaggagcgtaacctcttgtcggtcgcatacaagaatgtgattggggctcgccgtgcttcatggcgcattgtctcttctattgaacagaaggaggagtcccgtaagaacgaagagcatgtgaaccttatcaaggaataccgtgcgaagatcgaggctaactgagcaatatctgt

SEQ ID NO: 65874 - DNA, 329 bp, Zea mays
ctccggtggctccaccactagcaacccgtgcagcgagcccacaccgaccactgccatgtcgaggcgcggcgactgggtctacgagaacaacggcgggacctgcgtggccatcgccggcgccgattactgtgtcgtcgcggcggacacccgcctctctgtcggatacagcatcctcacggcgaccactctaagatctgcgacctggctgacaaatgtgtactagcatcttctggctttcagggtgatattacagctctgcacaagaacctagctgccagagaattgctataccaacacgagcataacaagaggatgagctgccctgccat

SEQ ID NO: 65875 - DNA, 334 bp, Zea mays
caacaagctcgtgcagaagagtttcgctcgactttattacaatgactttttgcgcaactgcagctctgttgatgatgatgctaaagagaagctccagtctttttcaaatttgactggtgaagagagctaccagagtcgcgacttggaaaaggcctcacaacaggtcgcgaacacctcctgacatcaaagttcagccatcgactctgcttccgaaacaaattggtaacatgtatactgcatccctttatgctgcattagcatctgtgctatataacaagcatgatagtctgaatgggcaaagaattgtgatgttctcttacggcatggtttgaca

SEQ ID NO: 65876 - DNA, 311 bp, Zea mays
cgcgaatcataatgcttttaatttgcttgcaaaatatagcaagagccatcttgttttcaatgatgacatccagggcacagcatcagtggtccttgcaggtttgttagcagcactcaaggtggttggtgggaccttggcagagcacacttatttattccttggtgctggggaggctgaactggtattgcagaactcattgctcttgagatttcaaaacagacgtcggctccaattgaagagtgccgcaagaagatttggttggtggactcaaagggtttgattgttgactctcgtaaaaactccgttcagtc

SEQ ID NO: 65877 - DNA, 327 bp, Zea mays
agctccttcagattgaacatcagcaaagcagtttactggatcttctccagaaatttatggggaagtccgagaacggtatgcattctttggagacaagagtgcatgggctggagatggctttggatgagatctctcgtgatttggccttctcttcgggaaggatgtcaagcagaggcctgatgcaaagacgtgctgcattccgagcccaaaattctggagaatgcacaatggtggtaggtcttcctcaaggtatactgtctcagacgcagcaaacagctcagatgggagcagaacttcttacaagtgggagaggcagaggtttaggct

SEQ ID NO: 65878 - DNA, 161 bp, Zea mays
gcctcgaccagcagcaaatgtttgtgtgaccatcagtgacctcaagaccgaagaaaggaagcaaaagctttccaggtataggaagaagaagatcaagcggaactttggcaggaagatcaagtacgcgtgcaggaaggctctggcagacagccagccaagag

SEQ ID NO: 65879 - DNA, 196 bp, Zea mays
tagctccttcagattgaaaatcagcaaagcagtttactggatcttctccagaaatttatggggaagtccgagaacggtatgcattctttggagacaagagtgcatgggctggagatggctttggatgagatctctcgtgatttggccttctcttcgggaagtatgtcaagcagagagctgatgcaaagacgtgctg

SEQ ID NO: 65880 - DNA, 197 bp, Zea mays
ctgctgagcactggtgagactgaggagttcttcacttcatatgatgaagtttttgaaagttttgatgacatgggccttcaagagaatcttttgagaggcatttatgcatatggttttgagaaaccatctgcaattcagcagagaggaattgttcccttctgcaaggggcttgatgtcatcagcaagcacaatctggt

SEQ ID NO: 65881 - DNA, 187 bp, Zea mays
tacaactccatctcaaaaagaccaaataaacaacattctgtaggctttgaccttactatcttctgctcctctaggatctgtgccagttcagaagcaggcgagcctcttccctgatgataaagaagataacttgctgggtaccacatgcctgattgccacagctgtcatcacgttatttaatgaccta

SEQ ID NO: 65882 - DNA, 325 bp, Zea mays
cacattgggaagagcgcaaggttaagcacgaaagctgcagctggaaatatgagttttgacatacagtgcaaacattgtgaaaaggaatcaataaatagttctctgttgaacttgttaacatacccatggattgagaagagggtgaatgaaggcactttgaatcttcatggaggctatacaacttcgtcgattgcacatttgagaaatggacattgttgtaccgtgaagggttggaaggtggaagcaagtatgccataaagaaccggtccacctggtgttgaccaacgaagtcgtgtttcttgggtaaattcatctgctcccgctg

SEQ ID NO: 65883 - DNA, 327 bp, Zea mays
tgcaaatttcttgatgagaaatggaatcccaagttcacgttgattattgcccagaagaatcatcacactaaatttttcattcctggaaagccagataatgtcccaccaggaactgtggtggacaacaaagtctgccatccaaagaacttcgatttctacatgtgtgcgcatgtggaatgatcgggactacgaggccaactcactaccacatcctgcatgatgagataggcttcagtcctgatgatctgcaggagctggtgcattcgctctcttatgtgtaccaaaggagcacaacagccatatcagtcgttgctcccatctgctacg

SEQ ID NO: 65884 - DNA, 177 bp, Zea mays
tgatatgtgcaagggagtgcagtatctcaatgaaatcaaggattctgttgtggctggtttccagtgggcatcgaaggagggtgcactggctgaagagaacatgcgcgggatttgcttcgaggtctgtgatgtcgttcttcatgccgatgctatccacaggggtggtggccagtcatt

SEQ ID NO: 65885 - DNA, 322 bp, Zea mays
gataaatgtggggatactgatgattgtatttcaacttctgaagctgctgaacaagcagcaaaacttccagaagtgaacattaataatcttccagtccctggcgaagttgaattcataaatggtggtcctccgtgtcagggattctctgggatgaatagattcaaccaaagccatggagtaaagttcagtgtgagatgattctagcattcctctcattcgctgagtatttccgtcccagattctttctgttagaaaatgttcggaactttgtttccttcaacaaagggcagacttccgtttggcagttgcatctcttctggag

SEQ ID NO: 65886 - DNA, 167 bp, Zea mays
  unsure (1)..(167): unsure at all n locations
tanaaactgaggggatgacacctgaaacgggaacctaccgttggatggcaccagagatgattcagcataggccatatgaccagaaagttgatgtctacagctttggcattgtgctgtgggagctcataactggcatgctcccttttgctaacatgacagcagtgcaa

SEQ ID NO: 65887 - DNA, 288 bp, Zea mays
gcgtcttcgatgctgagaaggcaaacaagttgaagcaatctcttcccccaggtttgaccgtcgaggaggtctgattggatacatggcaacgccgagttgaactacccaagcttctttatcagtagcagagcatgctactctatgtacttttggaacctaagctattagacctgcagtgttggatgtctggatcttgcatttttggagaaataccaatttacctcgttcaaggatgcaagtatatttcttgtttaactgcacattactttatatttatgcctgtttcat

SEQ ID NO: 65888 - DNA, 190 bp, Zea mays
attgagaccaactagcaacatagaaagcacaatagtgtaccaacaatggcagccaaaatattttgcctccttatgctccttggtctttctgcaagtgctgctacggcgaccattttcccgcaatgctcgcaagctcctatagcttcccttcttcccccgtacctctcaccagcggtgtctcggtatgtga

SEQ ID NO: 65889 - DNA, 274 bp, Zea mays
gcgtcttcgatgctgagaaggcaaacaagttgaagcaatctcttcacccaggtttgaccgtcgaggaggtctgattggatacatggcaacgccgagttgaactacccaagcttctttatcagtagcagagcatgctactctatgtacttttggaacctaagctattagacctgcagtgttggatgtctggatcttgcatttttggagaaataccaatttacctcgttcaaggatgcaagtatatttcttgtttaactgcacattactttatatt

SEQ ID NO: 65890 - DNA, 319 bp, Zea mays
ctttctcactcatcgctcgtggagttgcagccatggctgctccggtcgccgcatactccccggcgctgcgggtccaagtgaaagcagccatggatgcagcgtcgtcgttccgagtattggcatctctcagtttccccgggcaaagagcaagctttccatcgattcggatcagaagtgctctcaagtgtcctgttcgctggcaaaacaagaaacagttgagaaggtcagcgagatcgtgaagaatcagttagctctacccgaagacaccggagtaacaggagagacaaagtttgtagacattggagccgactcactggac

SEQ ID NO: 65891 - DNA, 177 bp, Zea mays
  unsure (1)..(177): unsure at all n locations
attgagaccaactagcaacatagaaagcacaatagtgtaccaacaatggcagccanaatattttggctccttatgctccttggtctttctgcaagtgctgctacggcgaccattttcccgcaatgctcgcaagctcctatagcttcccttcttcccccgtacctctcaccgcggtgt

SEQ ID NO: 65892 - DNA, 151 bp, Zea mays
tagctgtgcaagcctacaggctacaacaagcgcttgcggcgagcgtcttacaacaaccaattaaccaattgcaacaacaatccttggcacatctaaccatacaaaccatcgcaacacaacagcaacaacagttcctaccagcactgagcca

SEQ ID NO: 65893 - DNA, 139 bp, Zea mays
gtttcgcgtccgcctcagctcgccgcaaggagaggtaagttcaggagacatcttcgagaagctgaaatgcctcctaaagctgctcctgccaagaagggtgatgccaagacccaggccttgaaggttgccaaggctgtga

SEQ ID NO: 65894 - DNA, 205 bp, Zea mays
  unsure (1)..(205): unsure at all n locations
cttggaggcacgcggattaagacncgcaagcggaacattgcagctcctttggaccctgcatcattctctgatgcaattgtccagatttatctggataatggtggagatctggaactcgtcgccaaaagtattgagtcttccgacctcaacttctcacgttacggtgacacctttttgaggtggtttttgttggaggacgcactca

SEQ ID NO: 65895 - DNA, 142 bp, Zea mays
gtcctctgttacttctccctccgccgccactcacctcacattcaccgccaccgccaattccataccgtcctccgccacctctgctgagagcgaagagagatggcaggcaagggtgatgggccggcaatcggcatcgatctcg

SEQ ID NO: 65896 - DNA, 334 bp, Zea mays
ctggcttctcctccccctcttaccaagtcctcctcgggttagggttccttagggttttgtggaggggcgatggcggttgctgatgtggagtaccgttgcttcgtcggcgggcttgcctgggccaccagcaacgagtcgctggagaatgccttcgcctcctacggcgagatcctcgctccaaggtcatcaccgaccgggagacggggaagtctcgcggcttcggcttcgttaccttctcctccgagcactccatgctcgacgctatcgagtacatgaacggcaaggagctcgacggccgtaacatcaccgttaaccaggcccagtcgcgtggcgg

SEQ ID NO: 65897 - DNA, 170 bp, Zea mays
ctttcagcaaaagctaactcttttaccgctgaaaagaaatggaggaattccaaggatacaaaccctcctgatctatatgcaaagttatgagtgcgctttacaacttgctcgatggttcttctgacaacacaaaatttgaggacgactgccgagctattattgggactcaa

SEQ ID NO: 65898 - DNA, 306 bp, Zea mays
atcaggaagaaccttgtgaagaagtgtgttgagctcttctttgagattgcttagaacaaggaggactacaacaagttttacgaggctttctccaagaacctcaagcttggcatccacgaggactcgcagaacaggaccaagatcgccgcgcttctgagataccactcaccaagagtggtgatgagctgaccagcctcaaggactacgtgaccaggatgaaggagggacagaatgacatatactatatcactggtgagagcaagaaggcagtggagaatcgcccttccttgagaagctgaagaagag

SEQ ID NO: 65899 - DNA, 318 bp, Zea mays
acttgctccaagttccattattacacagttcctcccaccagttacttcaatgggcttcgaacacccagctgttcaagcctataggctacaacaagcaattgcggcgagcgtcttacaacaaccaatttcccagttgcaaagacaatccttggcacatctaacaataaaaccatcgcaacgcaacagcaacaacaattcctaccagcactgagccaactagccatggtgaaccctgccgcctacttgcaacagcagttgcttgcatcaaacccacttgctctggcaaacgtgttgcgaaccagccacaacaacagctgc

SEQ ID NO: 65900 - DNA, 187 bp, Zea mays
ctagcaacatagaaagcacaatagtgtaccaacaatggcagccataatattttgcctccttatgctccttggtctttctgcaagtgctgctacggcgaccattttcccgcaatgctcgcaagctcctatagcttcccttcttcccccgtacctctcaccagcggtgtttcggtatgtgaaaacccat

SEQ ID NO: 65901 - DNA, 204 bp, Zea mays
tgtgtttcttccccggaagtgcttccgagaataaatttttcttatctgattgtctaaaacctataacgggtgtaatggtatcgtagtggttggttgagcatcaagtgactcatattttgtcaggtctatgtgtcatcgttaaacttttaacggtcattatatttcaaaagtttgcattttccaaaaaaaaaaaaaagggcggcc

SEQ ID NO: 65902 - DNA, 281 bp, Zea mays
taaacaaaagatatgctggagcttcaaactggactgttaaggaagttgttgagactgtaaagaatgactttggtagcattgatatccttgtacactctctcgccaacggtcctgaggtaatcaagtcactgcttgagacatcaaggagaggataccttgctgcaatttcagcactagttattcttatgtttctttacttcaacacttccttcccataatgaatccaggaggtgctagtatctctttgacctacatagcttctgaaaggataattcctggct

SEQ ID NO: 65903 - DNA, 166 bp, Zea mays
tatccagttggctctgatttgtggaacatactattctacagagcgattcaatattccttatcgatgctggagaatgccatcatggtatgtcactttggcaatgtgttgcgccgtgcagtcatcgaggatacctggcactatctcctgcacagactcctgcaccaca

SEQ ID NO: 65904 - DNA, 345 bp, Zea mays
  unsure (1)..(345): unsure at all n locations
cagagagagagagagagagaccgacgcgccggcagatcccaagttcaccggagagggggaagagggcgacgaagcggcgatgggtttcatcatggacttcgcggagaatctgatcctccgtctgatggaggacncggacaagcgcgaccaggttcggcgggagcatgtctacaagatgaaggagcggtgcgagcgcactaaggcggcgtggagcctccctctgcgcccctacggcttctggaccttcgacggcttcaactcgcaactctcctgggatccccagatcagcaaggccgcgggcgtcgggaccctacgaagactcatcgccgacatctggtcgccgcg

SEQ ID NO: 65905 - DNA, 151 bp, Zea mays
gtgcttgttgctgccaacacagcagcagtagtcgcaatgcggcttgtgagacctgggaagagaaataaggatgttactgaagcgattcagaaagttgctgctgcttatgattgcaaaattgtggaaggtgttcttagccatcaactgaaac

SEQ ID NO: 65906 - DNA, 373 bp, Zea mays
cgcactcgcacgtacaccacactagttaccacagccgacgggcgccatgaaagtcccggtgcttctcctcctggtctccctgtgcttctcgctcgcgctcgcgtggcaaacggacacggaatcgggctcaggcaggccgtaccactacggcgaggagagtttccggcactggacgcgctcccggcagggccggttcacggtgctggaacggttcacccacgagctgctggaggacgccgtcggcaactaccgcgtcgccgagctggaagccgcgccgcgcacgttcctgcagcccagccactacgacgccgacgaggtgatgttcgtgaaggaaggcgagggcgtcatcgtgctgctccgcggcgggaagagg

SEQ ID NO: 65907 - DNA, 164 bp, Zea mays
  unsure (1)..(164): unsure at all n locations
gagggtntatcttcgttcgtctcgtttgttgttgcccatctgtgtttttgattgcaaggtcgctctgtgtcagttgttagtgctgtgttcatcctcggctccagcagacccatgcatcaaccagcatggactgtggatcgatggatgctgttactcctgtcagg

SEQ ID NO: 65908 - DNA, 172 bp, Zea mays
tcgatgtcgcagtacgaatggcgatgatggcggatcctccgaatggaatcgggaaccaatgtaagcattactactctatgtggcagacttatttgagatagacaccatatatgtgccgatcaagcgcattggtcgaggagcttataggatagtttgttcatccattaatcgg

SEQ ID NO: 65909 - DNA, 276 bp, Zea mays
ccgccgccgacgccgcaggaggagacgcatcgaggttagcacgcgaagaagcgaccatgagggccaagtggaagaagaagcgcatgaggaggctcaagaggaagcgcagaaagatgaggcagagatccaagtaggcagatcgagatggattgtggacctgatgacatgcgtgggtacatacatttcttcggatgcgttggtgtgcctgtggagagatgtcaacctgccatggtgtcacggtccgccatcagttgaacgtcttgcctgcacttcagt

SEQ ID NO: 65910 - DNA, 192 bp, Zea mays
gcatccctcaccgtagtaactcggaatcggctcgagggacgccagcggagccggtagcaaggcgaagaagggggcggctgggcgcaatgctggcggccccaggaagaagtcggtgtcgcggtccgtcaaggccgggctgcagttccccgtcggccggatcgggcgctacctcaagaagggccggtacgcgca

SEQ ID NO: 65911 - DNA, 153 bp, Zea mays
accagctcatccacacggtgcgcacccaccgcggcgcgcacgaccagagcttcggctgtgtcacgcaggaggaggacgacgcggggtgcgtcggcgtctccctggccaaggagctcatggtggtcgccggcgaggccctgcgcaccaacatca

SEQ ID NO: 65912 - DNA, 163 bp, Zea mays
agcgaatacctgcggcatgtcgacaagtgtggcagtcacctacgcgccctcatctccaacaagggatgcgcctcgatcatgctccggctcgcatggcatcatgctggaacttatgacctgaagacaaaaactggtggtgcagatggttcgattagatatgaag

SEQ ID NO: 65913 - DNA, 183 bp, Zea mays
aaaagcgcatgagcgtagtaagtcggattcggtcgaggattcaaccaatcgtgctccgtcggtcaccgtcgtccacgcaacatgtcaggaggagacagggacccaaggaggagaacgtcacccttggacccactgtccgtgatagagagtatgtctttggtgttgctcacatctttgcatcct

SEQ ID NO: 65914 - DNA, 153 bp, Zea mays
cgccggattgctgacgcaatcgacgtacacgactgctcgtcttggatccgctatggttctaactaacgaagcatgttgaaggagtgaagggaagccattgccgctatgtcagtaagctttcatgagtctgactgctggtgcaattggtgcttg

SEQ ID NO: 65915 - DNA, 157 bp, Zea mays
gaagaagtgtggccacagcaaccagctgagggcaaagaagaagatcaagaactgaagcttgccagatcggttccatgcatggtttgcgtcaacaagacgaagtttcaaagcttttgtagctgcataggctgctgcaacgtttttcagtcgtaactcg

SEQ ID NO: 65916 - DNA, 108 bp, Zea mays
gcatcccctcacgccgagccgcctcaccgccgccggagaagatgggtcgcgtgatccgcgcgcagctaaggtgtgctgggtccgtgttcaagtctcacacccaccacc

SEQ ID NO: 65917 - DNA, 147 bp, Zea mays
cttgtttctaagttcattccggaagttattggcaaagagattgagaagtctacctccagcatcttcccacttcaaaacgtcttcatccgcaaggtgaagatactcaaggcccccaagtttgatctcgggaagttgatggaggttcat

SEQ ID NO: 65918 - DNA, 292 bp, Zea mays
aaaccagaccaccaaacaagtgccagcgccctctcgcagtcgccgcaatggagagcaccttcatcatgatcaagcctgacggcgtccagaggggcctcattggtgagatcatcagccgttttgagaagaagggcttctacctcaaggccttgaagcttgtcaacgtggagagtcgttgccgaaagcatacgcgatctcgctcaagcctcttccaggctcgtgatacacattctgcctgtggtgcatgtctggaggcaaacgcgtcaaatggcgcagacatggcgcataccct

SEQ ID NO: 65919 - DNA, 366 bp, Zea mays
cccaaacaagcaaccaccgcctcaccgatctcgtcgagaggaagcccaatcccgaaaccgccgccctattccaatggcgcccaaggccgagaagaagcccgccgccaagaagcctgcggatgaggagccggcggcggagaaggccacggcggggaagaagcccaaggccgagaagcggctccccgcgggcaagtccgcaggcaaagagggtggcgagaagaaggggaagaagaaggcaaagaagtcggtggagacgtacaagatctacatcttcaaggtgctgacacaggtgcacccggacattggcatctcgtccaaggccatgtccatcatgaactccttcatcaacgacatcttcgagaagct

SEQ ID NO: 65920 - DNA, 153 bp, Zea mays
acacaatctcacctacaccagaaaaatcaccagttcttcggtccgcgtcagagatgccgcggcgatgtctgggcgcggcaagggcggcaatggtctgggaaagggcggcgcgaagcacgcggtaaggtgctccgcgacaacatccagggcatc

SEQ ID NO: 65921 - DNA, 159 bp, Zea mays
  unsure (1)..(159): unsure at all n locations
gcttntttcttctttgtcttgctgcgcagaagaagggaaacgagaggcgggcggcgatggcgaagaggctgctcccgtcgctgaaccgggtgctggtggagaagctggtgcagcccaagaagaccgccggcggcatcctcgtcccggaaacatccaagc

SEQ ID NO: 65922 - DNA, 159 bp, Zea mays
  unsure (1)..(159): unsure at all n locations
agcgatcanaaggcttcatggtggccatcagttccaaggtgatcgtgaattcctggccgaaatggagacaattggaaaggtgaaacatcctaaccttgttcctctacttggctactgtgtatgtggtgatgaaaggttcctgatatacgagtacatgga

SEQ ID NO: 65923 - DNA, 193 bp, Zea mays
gaacactactacttagtaactcggaatcggtcgagctttcctccggcatcgacgagcgacccagcgcccgagtctctctccctgctcccacgacccatggcggcggatatggcgtacgcgccgccgatgaaggcgggcaaggccgggttcgaggctggcatgatggatccgcagcacaggatccgcatcacgc

SEQ ID NO: 65924 - DNA, 374 bp, Zea mays
ttcgatctttggtaccgagaaggacagggtcaactgccctttttacttcaagattggggcttgtcgtcatggggatcgctgttctcgtctgcacaacaggccaactatatcgccaactcttgtgcttgctaacatgtatcagcgccctgatatgataactcctggagttgatgctcaaggccaacctattgatcctgagaagatgcaggagcattttgaggacttctatgaggacatctatgaggagttgggcaagtttggtgagattgagaatctgaatgtttgtgataaccttgctgaccacatgattgggaatgtctatgttcagttcagagaggaagaacaggcagctgcagcatacaatgctcttcagg

SEQ ID NO: 65925 - DNA, 141 bp, Zea mays
cggatgggttggtgttagacatactggaagtgtgctattccagtgctattctagggcatatgaggagacatttacacttacatttgtgactgggcggactgtaggaataggatgctatcttgctcgacttggtatacggtg

SEQ ID NO: 65926 - DNA, 347 bp, Zea mays
gtgaacgaagagatgattgagacgttgttcgtctcaaattcgacatggagatcctccaagagtggaatcaaggcgccaaattccagttcgtgcagccaggagaacacggtcctcgacccgaagaaatcacaaaacatcgcgataatgctgagggcgctcaatgcgaccaaggaagaagtgtgcagagcactcctagatgggcaggcagagagccttggatctgagctcttggagatgctgctgaagatggcgcctagcagggaagaggagatcaagttgaaagaatgcagggaggacgctgtgtcaaagcttagccctgctgaaacttcctcaaggcggtgctcgcg

SEQ ID NO: 65927 - DNA, 355 bp, Zea mays
tcgccttgctcgccgtcggggccatttcgtcgccgcgcggcgagccgcccatgttgagctcgcggcggatctgatgggcttgttgtgatctcctgcaggtaagacagaggaggagggcaggatgtcgcaccgtaagttcgagcacccgaggcacggctccctcggcttccttcccaggaagcgctcctcccgtcaccgcggcaaggtgaagtcattccctagggatgaccccaagaagccttgccatctcactgccttccttggctacaaggctggcatgactcacattgtccgtgtagttgagaagccaggatccaaactccataagaaggaaacttgtgaggctgttaccatc

SEQ ID NO: 65928 - DNA, 355 bp, Zea mays
aaagtgccgtgaagatcgccgtggacatggttaacgagggccttgttgagccccgctcagcgatcaagatggtagagccaggccacctggaccagcttctccatcctcagtttgagaacccgtcggcgtacaaggatcaagtcattgccactggtctgccagcctcacctggggctgctgtgggccaggttgtgttcactgctgaggatgctgaagcatggcattcccaagggaaagctgctattctggtaagggcggagaccagccctgaggacgttggtggcatgcacgctgctgtggggattcttacagagaggggtggcatgacttcccacgctgctgtggtcgcacgtgg

SEQ ID NO: 65929 - DNA, 359 bp, Zea mays
cagcaagcaacatagaaagtagaatccattagcaacaatagagcaacaatggcgaccaagatattttccctccttatgctccttgctctttctacatgtgttgctaacgcgacaattttccctcaatgctcacaagctcctatagcttcccttcttcccccataccttccatcaattatagcttcagtatgtgaaaacccagctcttcaaccatataggcttcaacaagcaatcgcagcaagcaacatacctttatcgcccttgttgtttcaacaatcaccagccctatctttggtgcagtcattggtacaaaccatcagggcacaacagctgcagcaactcgtgctacctgtgatcaa

SEQ ID NO: 65930 - DNA, 355 bp, Zea mays
gtctcaacgacacgatggagaatctactggcatctgtggacaagaacgaggcggaggtatcaccatcaacactatatgccattgcctgtgtcatggagggggtgccgttcatcaatgggagcccccagaacacctttgtgcctgggctgattgatcttgctataaaaaacaactgcttgattggtggtgacgacttcaagagtggacagaccaagatgaaatctgtcttggtcgatttccttgttggtgctggaataaagcccacctcaatcgtgagctacaaccacttgggaaacaacgatggcatgaacctgtctgcccctcaaacattcaggtccaaggagatctccaagag

SEQ ID NO: 65931 - DNA, 354 bp, Zea mays
accaaatcatgcatggtactgaaatgagatgcaattccaattctattgtttggatgtcactgaattgtacgttctaattccacgcaataccgagggctgatgctttgtattgggagaggatgttctagttatagtctaattctagggaattaggcctctgattccaaatctcaattccacgagcaagcaaacaacagaatttagaaaaactgattctaattcccaattctgtgctccaatatctatatccaaccggggtgttagtattatgtagtttcactggctcttctagttgtgcttttatcgaatcttttgtgacctgaagattaaatttgaggttttcaggaagcggac

SEQ ID NO: 65932 - DNA, 259 bp, Zea mays
caatccttcaagcgcaagtgcctcctcctcgtcgtccggtcgtgagaagggatggcgggccgtggcaaggctatcggcgctggcgcgcgaagaaggcaacgtcgaggagctccaaggccggactccagttccccgtcggcaggattgctaggttcctcaatgcgggcaagtacgctgagcgcgtcggcgccggcgctcccgtatacctcgccgccgtcctcgagtacctcgcggctgaggttctcgaacttgccgggaa

SEQ ID NO: 65933 - DNA, 378 bp, Zea mays
gtcgtcacggtagtaactcggaatcggtcgaggttcctccttgattcgcttgatgctgctggcattgatgctgattctacctgcaagattgagaagttcctgattcagccaagaattgaggatgcggtgcttgggcggggcaaggtggacaagccaattgcatggagaagtgcatttgcagctgctgggttcgcacctgttccacccagcaatttggcggaggcacaggccgactgcctcctgaagcgggtgcaggtccgcggtttccacgtggagaaatgcggggtcgggctcacactatactggcagtgtggcgagcttgtcactgtatcagcatggcggtgctgatcagcgatccacgcctgtgcgcaccatgtt

SEQ ID NO: 65934 - DNA, 357 bp, Zea mays
cctctctccgtcgccgcctcgggccaaaccctacgcagggagttgattgatcgattgcagccatgagtaagttgcattccgagcttctcaaggattgcatctcccagatagttcaggatgccaagaagaataggaagttcactgagactgttgagcttcagattagtctgaagaattatgatccacaaaaggacaagcgtttcagtggctctgataagttgcctcacatccctcgtccaaagatgaaggtgtgcatgcttggtgatgcccagcacgttgaggaggctgagaagatgggacttgactacatggatgttgaggccctcaagaatatgaacaagaacaagaagcttgtta

SEQ ID NO: 65935 - DNA, 193 bp, Zea mays
  unsure (1)..(193): unsure at all n locations
ggctcaccacaccaaccaacaagcanaaattccccaatcctctcgtctccgcggcgaagatgtcggggcgcggcaagggcggcaagggcctgggcaagggcggcgcgaacgtcaccggaaggtgctgcgcgacaacatccaggggatcacgaagccggcgatccggatgctagctcggcggggcggcgtaaag

SEQ ID NO: 65936 - DNA, 300 bp, Zea mays
gtggctgccgctgcccgtcacgcacaggtgcgacgtgtacagcttcggcatgctggtgttcgagatcctcgggaggcggcgcaacctggagctgcagcaccccgccgtgaccgtgagccaggagtggtaccccaggtgggtgtggcagaggttcgaccaggggaagttcggcgacgtcatggcagcgtcggggatccacgccaaggacggggagaaggcggacggatgtgcaaggtggcgctctggtgcgtgcagtaccagccggaggcgaggccgtccatgagcagcgtcgtcatgatg

SEQ ID NO: 65937 - DNA, 353 bp, Zea mays
gataaagagaacgaaagaaggaaggtacaagggaaggaagttcagttcagtatgtcatttctttggatatcaggctcgaggatctacaccatcaaatttcgactgtgactatgcttatgctcttggacgtatctccctgcatatgattgcagttggattgactggctacatggcaactgtggctaatctgaaagaccctgttgactaatggagatgtgctgctgctcctttaactgcgatgatgagtgtgaagaggcatttacgtggccctggagcaatccctatagggaggccttccattgcaccttctccaattgacctgaaagggaaggcttatgagttgctgcgagaga

SEQ ID NO: 65938 - DNA, 345 bp, Zea mays
cggcttcctcgccgccgtcctcgtgcccgctggcgactcagcgcccgtcggctccgccatcgcgctgcttaccgagtcagaggaggacatcccagtggcccagtcacaggctgcctccttctcctccacgtcccccttaccgtcgcctccgcaagaaactgctgctcaagaagcatccccttccccgccgccacctcctcccccagggccggtgtcagtctctgctcccacgccgccttagccagcaacacaaggcgagcgtgtggttgcttcaccctacgccaagaagctcgccaaggacctcggcgttgatctgttctcagtcacggggtcaggccctgtggg

SEQ ID NO: 65939 - DNA, 306 bp, Zea mays
ctcgccgccccagttcgccaccccctgctcacccacccgtcccctcctgctcgcccatggctcccatcgctgtcggcgacgcccgccccgacggccagctcgggtggttcgacgagaacgaccagctgcagcaggtctccgtccacgcgctcgtcgtcggcaagaaggtcatcctcttcggcgtccccggcgccttcaccccgacctgcagcgaccatcatgtgccatgcttcatcacacatgctgagcagctcaaagctcagggtgtagacgagatcctgcttatcagcggtaacgactccttcg

SEQ ID NO: 65940 - DNA, 97 bp, Zea mays
caacaacacatcattggtggtgccctcttttagattgattattagttgtaattcaataataaagttttttggatgatgtatgtggccaaccagaaat

SEQ ID NO: 65941 - DNA, 308 bp, Zea mays
ggatcagactgaggtcctccacctgcttgagtctcctgatgccctcaagtcaaaggttgctgaggcgatggatgtactccacaatgtggcccatcagcagaacgcaaacaccccgaccagtcagcttgctgcattatcactaaccgaaggcattatctcctaacttgaaagccataacaaactatcttcagtttgcaattgagtgatgtttccagaggttatctggcacatgacagtattgctccttttaattcttctatggttggacttgagtgctgttttcgtatttacactctgcggtgtactgc

SEQ ID NO: 65942 - DNA, 334 bp, Zea mays
  unsure (1)..(334): unsure at all n locations
ccaatttcaaatccttcgatcgcgcagccgcccgccctctcgcagctctctccgatggcccgcacgaagcagacggcgaggcagtcaactggcggcaaggcgccgcngaagcagctggccaccaaggcggcgcgcaagtcggctccggccaccggcggcgtgaagaagccgcacaggttccgccccggcaccgtcgctctccgcgagatccgcaagtaccagaagagcacggagctgctcatccggaagctgcccttactagcggctgtgcgtgagatcgcgcaagacttcaagaccgaccttcggttccagtcctccgctgtcgccgcgctgc

SEQ ID NO: 65943 - DNA, 151 bp, Zea mays
ctcggctctcgcatcgatgaagaacgtagcaaaatgcgatacctggtgtgaattgcagaatcccgcgaaccatcgagtttttgaacgcaagttgcgcccgaagccttctggcggagggcacgtctgcctgggcgtcacgccaaaagaagga

SEQ ID NO: 65944 - DNA, 235 bp, Zea mays
cggtcgaggcctcttagataagatgtagtgggcttgaccgctcatctgcggattacatcggcatgctggccactgtgatgaatgctatatttcttcaagcgacgatggagagcatcggaataccgacccgtgtccagactgccttccgtatgtcagaagttgcagaaccatacatacgccgaagagctgtcagacatttagagaaaggaagagttgtcatatttgctgctggaac

SEQ ID NO: 65945 - DNA, 331 bp, Zea mays
tggtcacaccgcgcactgtcatgataggagggaaagcgtttgcaacatacactaatgccaaaagaatagtgaaattggtgaatgatgttggtgctgttgtgaacaatgatcccgtagttaacaaatatctgaaggttgtctttatcccaaattacaatgtatcagtggctgaagtgcttattcctggtagcgaattgtcacagcatattagtactgctggtatggaagcaagtggatcaagcaacatgaaattctctctgaatggttgtgttatcattagcacccttgatggagctaatgttgatataagagaggaggttggagaagataa

SEQ ID NO: 65946 - DNA, 318 bp, Zea mays
  unsure (1)..(318): unsure at all n locations
ctaatattctgtggaagattgngcggtgatcccaaaatcatacaggagtttgtgcaacttgctggtagggcataagctgctgcttctgaagctatggatgctgaggcaatccttggggacataccagatgaattcctcgatccaattcagtatactctaatgaaagatcctgtgacactgccatcgtcaaaggtcacagtagaccggcccgtaattatcaggcatctgctgagtgattctacagatccatttaaccgctcccacctcactcaagacatgctgataccanacacggagctcaagttgcagatcgaggag

SEQ ID NO: 65947 - DNA, 151 bp, Zea mays
tagccggcggcggcggcggcggcgcacagcggcagcagcatccgaagatggtgacattcctcaagcccggcaaggccgttatcctcctccagggccgcttcgccggcaggaaggcagttatcgtgcgcgtgttcgaggagggcacccgcga

SEQ ID NO: 65948 - DNA, 341 bp, Zea mays
ctcgacgcgcaaccagtgccgcacccagaccagatctccgcgacatatcagtcgttcgtccagctaactgcactgcactgcactgcacgcaatggccaccacggcgaccgaggcggccaaggctgcaccggcgcaggagcagcaggccaacggcaacggcaacggcgagcagaagacgcgccactccgaggtcggccacaagagcctgcttctgcgcgacgacctgtaccagtacatcctggacacgagcgtgtacccgcgggagccggagagcatgaaggagctgcgcgagatcaccgccaagcacccatggaacctgatgaccacctccgccgacgagg

SEQ ID NO: 65949 - DNA, 341 bp, Zea mays
cgctgggtcgggcgatcctgtgctctccttcaactcccacggtctcttcgacttcgagccgatgcgggagtccaagccggagcacgagacgtgggaggagcacttccggagccacaccgacaagcgcccccgaggtccgcagtccatcaccttcgacctctccttttatggcgcggacttcgtctacggtctcccggagcacgggtccacctcgctcgtcctccgccgcacccgcggcccgggggtcgaggagtccgaaccctaccgcctcttcaacctagacgtcttcgagtacctccacgaatcgcccttcggtctgtatggctcgatccccttcatga

SEQ ID NO: 65950 - DNA, 361 bp, Zea mays
tcctaagaccaagaagacgtactgcaagaacaaagagtgcaagaagcacacactccacaaggtgactcagtataagaatggccaggatagcctgtctgcccagggaaagcgccgttatgaccgcaagcagtcaggatatggtggtcagaccaagcctgtcttccacaagaaggccaagaccaccaagaagattgttctgaagctgcagtgccagagctgcaagcactactcacagcacgccatcaagagatgcaagcattttgagattggtggagacaagaagggcaagggcacatctcttttctaagcttctcgtccacctgtctcccttgttgagttgaagctgtgggtctactactac

SEQ ID NO: 65951 - DNA, 265 bp, Zea mays
  unsure (1)..(265): unsure at all n locations
agctcatgtttctgctcgagccagaaggtgcgncaccggctgaacgacgactgggcttacggcaatgatctcgaggcccggccatgtgacttccaagcagaggcattttgctctccgttgccaacatggaacgcttcaatgcccggcgctatgaccggacccacagcaaccctgacttctggccagtggacaattgcctgcagagcgtcttgggccaacgggtagatcttctctgagacttccagatgaactatgacctatggct

SEQ ID NO: 65952 - DNA, 250 bp, Zea mays
ctctttcacaaatccaccgccggctcggctcgcccatcttcgcgccaagcaccgaatctccgatggcccgcacgaagcagacggcgcgaaagtcgacgggcggcaaggcgccccgcaagcagctggccaccaaggcggcgcgcaagtcggcgccggcaaccggtggcgtgaagaagcctcaccgcttcctgcccggcaccgtcgcgctccgggagattcgcaagtaccagaagagcacggagctgctcat

SEQ ID NO: 65953 - DNA, 192 bp, Zea mays
  unsure (1)..(192): unsure at all n locations
aagctcgaatcggtcgagactntccgaggaggacctgattgagaagtgtgccactggtgtctccatggttgcctccctgtcactggcgatctcgtacccgacccttgctgctgtgccccacatgttcatcaatgggtacaagaatgtgcttgctgttgctgtcgagacagactactcgtacccacatgctga

SEQ ID NO: 65954 - DNA, 203 bp, Zea mays
  unsure (1)..(203): unsure at all n locations
tagctcgtagatcggctcgagagtnggaacatatgatagagacctactgaatgatgaattctacattggcttaaagcaaagaagatcaactgagccatggatatacgtctgatattgctcggagtgagttgataggccgcggttaggcagagctatggacaaaaagttcttgtccagtgtgaggagcttcgctaaccacaatg

SEQ ID NO: 65955 - DNA, 310 bp, Zea mays
cctgctcgatcggtcgagataacaattgaaacaccgagctttttatgtactggggagaggtctaattaggaagttgaacaaaagcatgttccatgtatcaggtagccctggtaggcaccagtggctgcagtcactgtatgtgagtggttgttgccgttgctctttgctaagtggttttccttcgtgagtgatggtgtaaattgatgggtgtgcatcaattcggagttctgagaggcgagtgatgttcatatatacaataggcgttttcatcctcttgatgtttttctcgatgatgtctatcaaactttgt

SEQ ID NO: 65956 - DNA, 211 bp, Zea mays
gcgtagtgagtcggaatcggctcgagctgtgaatgacgagtgcatgctcaagttcggcgagctgcagtcgaagatggtgcaccgcttcctaacttgcaggcatgtcgaaattcagggagatcgttctggaccaggtcggggatcgcgctaccagctacgaggacttcacaaggagcgtctccgagattgagtgccgatacgcgatctatga

SEQ ID NO: 65957 - DNA, 272 bp, Zea mays
acgaggtcgtaactcggaagtcgtgctcgagacgacctcgtcgagctcttccacgcgcgcgccacgagaaggttccagaggggtctgaagaagacgcccatggcgctcatccagaaactgcgcacggcgacaaaggatgctcctgctggtgagaagcccgagccagtcaagacacatctccgtaacatgatcattgtccctgagatgataggaagcatagttggggtctacaccggctagaccttcaaccaggttgagatcaagcctgagat

SEQ ID NO: 65958 - DNA, 147 bp, Zea mays
ccgagatcaaggacttcattgtgatcgtgaggatgaaggatgcccgatcagtgaagatcaagaggagcaaggatgtggtcaaattcaatgtctgctgatccaagtatttgtacaccctctacgtctttgatgctgtgaaaacaaaca

SEQ ID NO: 65959 - DNA, 274 bp, Zea mays
ctgatgatggtagtaggtcggaattcggtcgaggttgtcgatgacaagctgggggcgctctgcatgcaatggttgcgagacgaggtctgttcaatcagagatgctgccgctaacaactcgaagcgcctggcagaagagtttggtccagagtgggcaatgcagcatatagtccctaaggcgatggagttgctcagcatcccactactatcatagcgcatgatcgatctgcaggcaatctgcttgctagctcctgtcatgggtgcagagatcacct

SEQ ID NO: 65960 - DNA, 218 bp, Zea mays
ggcggacttgtttacagactatgctgactactgatttaagacctacggcgatcgcgtagagcactggtttacgatcaatgagctaaggtaatgagcgctacttggctatgacacagggtcaaatcctcctcaaaggtgcaccagatgcgctgctggtgggaattcagccgaccgaaccttacatagttgctcataattatctctatgcacatgctact

SEQ ID NO: 65961 - DNA, 367 bp, Zea mays
agacactctagtaaagtgagaaatacacttatattcaacacatttgtattgtgccaggtgtttaatgaggtcaattctcgtaaaccagaagaactgaacatcttttccggagtttcaagagatcatcttttcttggcagtagtgagcataactgttgtgatgcaggtgataattattgagttcctcgggaaatttacatcaacagtgagactcaactggaagctttggcttgtttctgtagttattgcttttctaagttggcgcttggcttttgttggaaaattcattccagttccgaggactgaattgaaggatctcattgtaaggtgttggcctaaacgtggcgagagtgcagcacaacagactc

SEQ ID NO: 65962 - DNA, 264 bp, Zea mays
cgcatcgtcgctgagaaggttacttactactttaggaagccatgtgttaatgatataataattgtcaaaagccctccagtgctgcaggacgttgggtatactgataatgatgttttcattaaaagagtagttgccagggagggagatgttgttgaggttcatgaaggaaaactcgttgtgaatggtgaggctagaaatgaagaattcattcttgagccaccttcttatgacatgaatcctgtgcaagtaccagaaaactctgtt

SEQ ID NO: 65963 - DNA, 354 bp, Zea mays
  unsure (1)..(354): unsure at all n locations
aggaagccaagtgctctcttgggtgcgctcgtcgccggtggcagtgagccagtgatgcatcttcatctccggcttccttattaggatcagctcgtcgatcgatcatggcgtcgtcgagctcggctgctactaccagtggtgacagtcagggtctcaaggctcgagatgcctgcatcgtcggcgtcgcccgcacgcccatgcgcacttctcgggtcgctgtcgtccctccccgccaccaagctcggctccatcgccatccagggtgctctcaagagggcgaaggtcgacgcggcgctcgtgcaggaggtgttcatgggcaacgtcctcagcgccaacctcggccangctccggca

SEQ ID NO: 65964 - DNA, 287 bp, Zea mays
  unsure (1)..(287): unsure at all n locations
gtagctctgagatcggctcgagcgccatggcagccaagatgcttgcattgttcgctctcctagctctttgtgcaagcgccactagtgcgacgcatattccagtgcacttgccaccagtcatngcattgggtaccatgaacgcatgcatgcagtactgcatgatgcaacaggggcttgcagcttgatggcgtgtccgtccctgatgctgcagcaactgttggccttaccgcttcagacgatgccagtgatgatgcacagatgatgacgcctaacatgatgtcaccatt

SEQ ID NO: 65965 - DNA, 266 bp, Zea mays
gaaatacttgataaaggctatgatccttacagcatcactttttccattcttgtgtttctcgattggattgttgttaaacactattgctatcttctaccgatcattagcagctataccattttggcacaatggttgtcatgtttattctttgggctttcatctccttcccgttggttctattggggactgtagttggtagaaattggagtggtgctcccaacaacccgtgtcgtgtgaaaacgatcccgcgcccaattcctgaaaag

SEQ ID NO: 65966 - DNA, 380 bp, Zea mays
cgcgccgtcactgaatcctcagatcacggctagccgtaatcacgccactctgctgactcccggcgagcagtgtaacattgttccttcaggccatgggcaaggagaagactcacatcaacattgtggtcattggacatgtcgactctggcaagtcgaccaccactggccacctgatctacaagctcggcggtattgacaagcgtgtgattgagaggttcgagaaagaggccgcggagatgaacaagcggtcattcaagtatgcctgggtgcttgacaagctcaaggccgagcgtgagagaggtatcacaattgatattgctctgtggaagttcgagaccacaagtactactgcactgtcattgatgccctggacacgtgac

SEQ ID NO: 65967 - DNA, 185 bp, Zea mays
cgacccgcgccaccccgtctgcctcccccggcaccgatcggggttgatcgatggcgtcgaagatgatcctgaaggagttgaaggactgcagaaggacccgccacctcctgcagcgcatgtcctgttcgtgaggacatgttccattggcaagcgaccatcatggggccttcggacagcccatttgc

SEQ ID NO: 65968 - DNA, 189 bp, Zea mays
attctctctgctctagcaccagccatggcgaagcgcagcttcttctctgtgtcctactcgccgcctccgcgccgctaatcgtcgccacggccaagaaatccggtgacgtgtcggagctccagatcggcgtcaagtacaagccggaatcatgcagcattcaagctcacaaaggtgacaaggttaaagttc

SEQ ID NO: 65969 - DNA, 191 bp, Zea mays
acgatcgccaattcctccttcggatctcgcattcagcgcacgcagcgtgtgaaggaagggggacgcggaggaagatagggctcgcgttcgggaagctcttcagccggctcttcgccaagaaggagatgcggatcctcatggtcggcctctacgccgccggtaaaaccaccatcctctacaagctcaagctc

SEQ ID NO: 65970 - DNA, 159 bp, Zea mays
  unsure (1)..(159): unsure at all n locations
ggtactaactcggaatcggctcgaggtgctcagagaagatccaagggaaaaggccattctgatgnttttatacttagatccactccataataagtgtgttgaggaagtttcttcttgtaatatattcatggtgaagggacatagtatttctactccact

SEQ ID NO: 65971 - DNA, 311 bp, Zea mays
acgtgacgtataactgaatctgtcacaaaagatcgctccggtctcctcttctcacgtttcggcacagggcatatgatgcagcgcggcccgacgagaacagaggtgctgtcgctcttccgttccttactccgcacggcgaagaagttctcggactacaacatccgcgagtacacgcgccgacgcgccgcggactccttccgcgaaaaccgcgccctcgccgatgcgtcggccgccgccgcggcgttctcggaggggaagaagcagctagaggttgcgaacggcaagcagtggtttactctctctacgcccca

SEQ ID NO: 65972 - DNA, 368 bp, Zea mays
  unsure (1)..(368): unsure at all n locations
gccaccgccgctagaagaagagctcggcgattcccaggtcncgcgagaatatgccgaagcagatccatgagattaaggacttcctcctcaccgcgaggaggaaggatgcccgctcagtgaagatcaagaggagtaaggatgttgtcaagttcaaggtgcgctgctccaagtacttgtacacgctctgcgtcttcgatgctgagaaggcaaacaagttgaagcaatctcttcccctaggtttgaccgtcgaggaggtctgattggatacatggcaacgccgagttgaactacccaagcttctttatcagtagcagagcatgctactctatgtacttttggaacctaagctattagacatgtcagtgttg

SEQ ID NO: 65973 - DNA, 166 bp, Zea mays
acaacgtagtaggctcgaatcggctcgagcggaactgtttcgcttcagcgggcagaagatttatcctgggataggcattagatttatccgtgctgattctcaggtcttcctttttgccagctcgatatgcaagcgctacttccacaaccgcctgaaacctgcaaag

SEQ ID NO: 65974 - DNA, 259 bp, Zea mays
cgacctcaaacagcaggagaatgttttggctgagtcaaggatgatggtcacagactgccacaaacgacttgaaactgcactggctgacttgaaagcaacactggctgaactgaaggagtcagatgagcaaggtgccgagattggagaagctgagagtacaatcgcagaagttgaagcagttgtcaagccagcagaagattaaactaaaaaaactcttggtttgctgaactgttagcgcacatcctattttcgcatattg

SEQ ID NO: 65975 - DNA, 253 bp, Zea mays
  unsure (1)..(253): unsure at all n locations
tctccctagccgncgctgccagcgatcgtctccctgagaggtggcgggaccgaggaacttgccgagtactaggtagagaaattcgtgagatctgttccggatcaggcgtgcgagctcgggaatcaggggtgtcacacatagcttcgtcgatgtgaatttgatgtactaatggagtctaatggtggcaacaagtctagcagtagtcgttctatgatgtatgaagctccccttggctacagcattgatgacgttc

SEQ ID NO: 65976 - DNA, 362 bp, Zea mays
  unsure (1)..(362): unsure at all n locations
ggtgacatcaaagttctcatggccactaataggcctgatacattggatcctgcacttctgcgacctggtcgtctggacagaaaggtagaattcgggctacctgacctggagggccgtacccanattttcaagatccatacacgaaccatgaactgcgagcgagacattcgttttgagcttctggcacggctctgccccaactctactggagcggatataagaagcgtgtgcacagaagccgggatgtatgccattcgtgcccgcaggaaaacggtgacagagaaggattttctcgatgctgtcaataaggtcatcaagggctaccagaaattcagtgcgacacccaagtatatggtgtacaa

SEQ ID NO: 65977 - DNA, 294 bp, Zea mays
  unsure (1)..(294): unsure at all n locations
aagcatntgagggttaagggacctgtccggatccctactaaggttctccacatcaccactcgcaagtcgccttgcggtgaaggaacaaacacatgggatcggtttgagttccgcattcacaagagggtgattgacctaatcagctcccctgatgtggtgaagcagatcacctccatcacaattgagcccggtgttgaggttgaggtgaccattgccgacgtgtaaggacgtgaagttcagcaatgtcatcgacaatctttttctttgtgctccctgtgtgctcgcaagagagat

SEQ ID NO: 65978 - DNA, 295 bp, Zea mays
ctgcagcaaaccgtgcttccttcttgacacagcaacagttgctgccaatctaccagcagtttgcggctaaccccgcaaccctcttacaactacaacaattgttggcctttgtccaacttgctttgacagacccagcggcctcctaccaacaacacatcattggtggtgccctcttttagattgcttattagttgtaattcaataataaagttttttggatgatgtatgtggccaaccagaaataagaagttacatttccagattctaatgtgatattggtctccaagggagttcg

SEQ ID NO: 65979 - DNA, 292 bp, Zea mays
atgattacttcgagtattttggaccagacttcagactgcatattagtcgctcaaacatgacaagccagaacactccagaatatatggaggagataaacagcgtttatttgaaatctgcgatgttacacatgcgctggtgttcaatgaagctatccgaagatgctgtcatgaagcagtggtatgggatgggaagacctacagagattctatcggcacaacaacggtactttgagaaatccagatctgagagagtgagagctagatgcgtgcaagaagacaaaacggatagagc

SEQ ID NO: 65980 - DNA, 317 bp, Zea mays
acagattttatgaaaagctttatgcactactgactccggctgttttcatggcaaaacaccgatcagtgtttttgcaacttcttgacacatgcctgaaatcttcttatcttcctgcctatcttgctgctgcgtttgcaaaaagattgagtagacttgctctttcagttcctccagctggagctcttattattattgctttaattcataatctgctgaggagacacccctcagttaattttttggtccattgggaggttgatgagagtgatagcaatgccacaagagaagctagtcaatctaagaagattggttctgat

SEQ ID NO: 65981 - DNA, 304 bp, Zea mays
ctcatcctcgcccaagtccttcgtgaagtccaccgtctccgcccacgacgtcgtcatcttctccaagtcatactgcccgtactgcaaaagagcaaaggccgtgtttaaggagcttgagttgaagaaagagccatatgttgtggagcttgatcagcgagaggatggctcagagattcaggatgccttacttgagatagttggcaggcgtactgtccctcaagtttttgtccatggaaagcacctgggtggttctgacgatactgttgactcctacgaaagtggaaactggctagactctaacatc

SEQ ID NO: 65982 - DNA, 308 bp, Zea mays
aggagttggaaagggtataattggcgcagtgcacaaccagttagcggagttcttgatcttttatcaagaactactgaaggtgccaatgcggtaaaaatgaaaatatcatcagcgataatggctgaggagcagttgctgcgtaggcgtcttcctcgagctattggtgggaatagtttgctctatccttatgacggacacaaagctactggccaggctatcttgcatctagctgaatgtgctacattccttggtcaaattgatatttttaaaatccgaggaaagtttgcttctaccgatgcttatgagga

SEQ ID NO: 65983 - DNA, 305 bp, Zea mays
  unsure (1)..(305): unsure at all n locations
caaggtntccagctggaaatgggggaacaattgaacttatttacatgcagatgtatgccccaacaactttagtccctgcacgtgatttttggacactacgatacacgacaacaatggaagatggcagccttgtggtctgtgagagatccttgagtggttctggtggtggtccaaatgcagcctctacacaacaatttgttagggctgagatgcttccaagtgggtatttagttcgcccatgcgaaggtggaggatcaattgtgcatatagtggaccatctagatctcgaagcatggagtgttcct

SEQ ID NO: 65984 - DNA, 78 bp, Zea mays
accaatgatgggttatagttcaataataaagttttttatctgatgtttgtggcttcccagaaataagaaagtacattt

SEQ ID NO: 65985 - DNA, 298 bp, Zea mays
caagcgcaacgctcgcgactcccacgttccggtgctggcgccgcttccgatcgggttcgctgtgttcatggtgcacctggcgacgatcccgatcactggcaccgggtatcaacccggcgaggagcctcggcgccgccgtcgtgtacaacaacagcaaagcctggagcgaccagtggatcttctgggtgggaccgttcatcggagcggcgatcgcagcgctataccaccagatcgtcctccgcgccagcgccaggggtacggctccttccggagcaacgcctaggaccatctcgtcggc

SEQ ID NO: 65986 - DNA, 310 bp, Zea mays
aggcacagctcttctgtctccacgagattgttgaattcctctctgccctagcaccagccatggcgaagcgcagcttcttctctgtttcctactcgccgcctccgcgccgctaatcgtcgccacggccaagaaatccggggacgtgtcggagctccagatcggcgtcaagtacaagccggaatcatgcagcattcaagctcacaaaggtgacaaggttaaagttcactaccgtggaaaacttactgatggaacggtttttgattcaagctatgaaagaggtgacccgattgaatttgaattgggcactgga

SEQ ID NO: 65987 - DNA, 309 bp, Zea mays
ccactctccgcttcgcgctccgatcgacctgctccctccccaccaccaagcccatggcggaccagctcaccgacgaccagatcgccgagttcaaggaggccttcagcctcttcgacaaggacggggatggttgcatcacgaccaaggagctgggcactgtcatgcgctcgctggggcaaaatcctacagaggctgagctccaggacatgatcaacgaggtcgatgctgatggcaacggcaccatcgatttcccagagtttctcaaccttatggctcgcaagatgaaggacaccgactctgaggaagagt

SEQ ID NO: 65988 - DNA, 306 bp, Zea mays
ctctcgcgacccactatcccaaaaccgtagcgccctcgcctgctcgccgccgccgtcgttgcgagctccccatcttcctccgtcaaccatggcgacccagatcagcaagaagaagaagttcgtcagcgacggcgtgttctacgccgagctcaatgagatgctgacgcgggagctcgcggaggacggctactccggcgtggaggtgcgcgtcacaccgatgcgcacggagatcatcatccgcgccacgcgcacgcagaacgtgctcggcgagaagggccgcaggatcagggagctcacgtctgtcgt

SEQ ID NO: 65989 - DNA, 304 bp, Zea mays
ggttcctcttgttggaacaccgcagaattgggacatcaggtggcccttatccgtcaagtcgctaacaaagttttcaccagtatggggaaaactattgggtacaagatcggaacgatgattgagattcccagggcagctctagtggctgacgagatcgcggagcaggctgaattcttctcctttggaacgaacgacctcacgcagatgaccattggctacagcagggatgatgtggggaagttcatccccatttatctggctcagggcatcctccagcatgaccccttcgaggttctcgaccaga

SEQ ID NO: 65990 - DNA, 186 bp, Zea mays
  unsure (1)..(186): unsure at all n locations
gacncagagtgtgcagatggtggcaaatggactgtcgcatgcaacagaaaggcaacctttgagaccatgtggcttgaaacgttgatggctcttattggggagcagttcgatgaaacagaggacatgtgtggaattgttgctagtgtccgtgcaagatgagatgagctggcattatggactaggact

SEQ ID NO: 65991 - DNA, 302 bp, Zea mays
ttctgacaggtgaaactgtagagcgtaatgcatcacagccaccagaagaaattacccataacatccacttctggaggaatggcttcacagtaaacgatggtccacttagaagttttgatgatccagcaaatgcaccctttttaaagagcatcaaggattctgactgcccaactgagcttgtgccggctgatgagaaatctatagtgaatgtgaatcttgtccggacggaagaagaatttactgagccagtcaagcgtgctgctccttttgaaggggaacgaagaaacctcatggaaccttct

SEQ ID NO: 65992 - DNA, 303 bp, Zea mays
cggcttacatagacttcaaggatcaggactctgtgtctaaagcccttgagctcagtggctctgacattggtggtggctatgagctttatgttgatgaagccagaccaagaggcgatggccagcgtggtggtggtagatctggtggccgttctggtgggagatttggtgaccgttctggtggccggcgtggtggtggtagatttggtgaaagatctgggggcagggatggtggcggcagattcggtggccgacgtggtggtagggatggcggccgaggacgtggtggccgtggctttggtaaca

SEQ ID NO: 65993 - DNA, 310 bp, Zea mays
gaatctaataactcggcatctatgctatccgttgagacaattgagaaaatgatggaagatccagctgtgcagaagatggtgtatccctacttgcctgaagagatgcggaacccaaattcatttaagtggatgctgcagaatccaatgtaccgccaacaactacaggatatgctaaataacatgggcgcaactcctgatcaatgggataaccgcatgcttgatcaccttaagaacttcgaccttagcagtccagaagtgcggcacagtttgcgcaagttggcatgactcctgaggaagtagtatcgaaaat

SEQ ID NO: 65994 - DNA, 306 bp, Zea mays
ctgagttgttctgcaaagggcagttaacaaagccttgcaaggggatattgcttttcggacctcctggcactggaaaaactatgcttgccaaagcagtagcaactgaagcaggcgctaatttcatcaatatatcaatgtcgagcattacatctaagtggtttggtgaaggggagaagtatgtaaaggctgttttctcactagcaagtaaaatagcacccagtgttatatttattgatgaggtcgatagtatgctaggaaggagagaaaatccaggggagcatgaagcgatgcgcaagatgaagaatg

SEQ ID NO: 65995 - DNA, 308 bp, Zea mays
cgacaagtaccatccgggctacttcggcaaggttggcatgcgttacttccataagctccgcaacaagttctactgccccgcggtcaacatcgagcgcctctggtcgatggtgcccaccgacaaggcggcggaggccggcggcgacaaggccccgcagatcgacgtcacgcagttcggctacttcaaggtgctcgggaagggggtgctgccgccaaagcccattgtcgtcaaggccaagctcatctccaaggtcgccgagaagaagatcaaggcagcaggcggcgccgtcgtgctcaccgcctaggttt

SEQ ID NO: 65996 - DNA, 304 bp, Zea mays
cgctaaatcaaggctgcctagcgcctgtgaagatcctcattcctaaaggctctttcctctcgccaagtgacaaggctgctgttgttggtggcaatgtgctaacgtctcagagagtgaccgatgtaatcctaatggcgttccaagcctgtgcctgctctcagggctgcatgaacaatttgaccttcggggacgacaccttcggttactacgagaccatcggaggtggatgtggagctgggccgacatgggacggcactagcggtgttcagtgtcacatgacaaacacaaggatgactgaccctga

SEQ ID NO: 65997 - DNA, 299 bp, Zea mays
cgatttcgtgctcacacacccaaaccttagtcgcgatcaggccccaaggactcgagatgaagtcgagggcacggtccaccgccggctgatccaggctctcggtgaggaagaccaaggctgagaaggacccaaacaagcccaagaggcctccgagcgcgttcttcgtcttcatggaggagttcaggaaggactacaaggagaagcaccccaatgtgaagcaagtctccctgattggcaaggctggtggtgacaagtggaagtccctgtctgatgccgagaaggtccctacgtgtctaagg

SEQ ID NO: 65998 - DNA, 299 bp, Zea mays
caggaaggaggagatggcgtcaaagaggattcagaaggagctcaaggatctgcagaaggaccctcccacctcgtgcagtgcaggtcctgttggtgaagacatgttccactggcaggcaacaataatgggtccatctgatagcccatattctggtggagttttcctagtcacaatccattttcctcctgattatcctttcaaaccaccaaaggtggcatttcgtactaaggtgttccatccaaacatcaacagcaacgggagcatttgcctcgacatcttgaaggaccagtggagtccgg

SEQ ID NO: 65999 - DNA, 297 bp, Zea mays
atgatccaaggagcattctgcatgacaaactcgatgcatatacgaagaagtaatagaggcatgtgcgcttcatgttgacatattcggcatacacagaggagatatgtcacatattggagagacaggtaccaacttatctggtggacaaagagctcgtctagcattggcaagggctttgtaccacaattctgatgtatacttgtttgatgacatccttagcgcggttgactcccaagttgcttcgtgcatcctggataaggctataatgggggcacaactaatgcagaaaacaagatt

SEQ ID NO: 66000 - DNA, 300 bp, Zea mays
tggggaggagaaacagtttgcagccgaagagatctcctctatggttctcatcaagatgcgtgagatcgctgaagcttaccttggcagcacgatcaagaatgctgttgtcacggtccctgcctatttcaacgactcgcagaggcaggccacaaaggatgctggggtgattgctggcctcaatgtgctgcgtatcatcaatgagccaaccgctgctgctattgcctatggtcttgacaagaaggcaaccagtgtcggtgagaagaatgtcctcatctttgaccttggaggtggtacttcgat

SEQ ID NO: 66001 - DNA, 300 bp, Zea mays
gccttcccccctcccaacccaagaccgatggcgcccaaggccgagaagaagcccgcggcgaagaagccggcggaggaggagcccgcggcggagaagacgaccgccgggaagaagcccaaggcggagaagcggatccccgctggcaagtccgccggcaaggagggcggcgagggcaagcgtggcaagaagaagggcaagaagagcgtggagacgtacaagatctacatcttcaaggtgctgaagcaggtgcacccggacatcggcatctcctccaaggccatgtccatcatgaactccttc

SEQ ID NO: 66002 - DNA, 301 bp, Zea mays
aggaaatctgtcacttgcatcgttcgctttgacactgaggtggagctggcgtacttcaaccatggaggcatcctcccttatgtcatccgcaacttggcagctgcgcataactgaggcaagatcacacaccgtttgacccacaatggcagtggcaggctccatgttcccagggctagcgacctggttctcaatgtagtgacatttgtgatggatctaggggtctctttgtcgattcagcccataaataaagtgtgaaataaaagccgcagtcggaggcaggaacctgctgattgagggaaca

SEQ ID NO: 66003 - DNA, 262 bp, Zea mays
tggcaatgctgaggatatggtgacaaggaacaaatctggcaagccgttgctcgacaagaatggtggtatccagattctaacctcgcatagccttcagccggtgccggttgccattggaggccctggtcttcaccccggagtgagattccggaacgacattcaaatccctgggctcgccaatgtagccgcaactgtgatgaacctccatggatttgaggcccctgctgactacgagcaaccctaattgaagtggctgacaact

SEQ ID NO: 66004 - DNA, 296 bp, Zea mays
  unsure (1)..(296): unsure at all n locations
gctagctggattgcttcagtggccacaaggaacctttgcctccaaggttatattggacaccgagaaacaaaaagctactgttgagcgagaagttgatggtggaattgaaaccatatgccttgatttgccagcagtgatcaccacggatttgagacttaaccagccaaggtatgcaactttgccgaacataatgaaggcaaagtccaaagttattaagaaagttgtccctaaagacctcggtgtagacattagatcagacatggaggttattgaggtcaacgaaccaccanaacgga

SEQ ID NO: 66005 - DNA, 301 bp, Zea mays
tcggggtccagcagctatgcgattgccaagttcgtggaggacaagcacaaggacaagctcccgcccaacttccgcaagcttctgaacgttcagctcaagaagctcgtcgccggcggcaagctgaccaaggtgaagaactcgtacaagctgtcgtccgccgccaccaagccgaatcccaagcccaaggccgccccgaagaagcccaagactggcgctaagaagcccaaggccgctgccaagcccaaagctaagacccccgccaaggcgaacacgccacaaagcccaacccgccgcgaagcga

SEQ ID NO: 66006 - DNA, 296 bp, Zea mays
gttctatgtctaggaactagtttgcagattactcctgcatgtaatatgcctctgatgtcaatcaagaatggggggagggtggccattgtaaatcttcaggcaactccagaggataaaaaggcaagccttgtcatccatggacttgttgataaggtcattgctggagtcatgagcaagttgagtctgcgaattcctccatacatacgtactgactttgttcagctcactctcaggcactcactgaaaaagaaatgtgttagatggactcttcgagtaacaagtattcacggcctccg

SEQ ID NO: 66007 - DNA, 292 bp, Zea mays
gacgaaagggccaggcttgaggtggtgggagagtaccaccttggggagtttgtgaacagattccgccatggttcactggtgatgcgcttccggactcggatatagggcagatccctacggtcatctttggcacaataaacggggtgattggcattattgcctccctcccgcacgaccaatacatcttcctggagaagctccagtcgacccttgtgaagtacataaagggcgtcggaaacctgagccacgagcaatggcggtccttccataacgacaagaagacggcagaggc

SEQ ID NO: 66008 - DNA, 280 bp, Zea mays
gtagcctggcaagccaggttccgctgtccttcgattagtacggggaaagaagaagaagaagaagcccaggccggagaaccatcgcctgcatttcgatctgtttcaccgcaattcgcattgttagtcgtgtattggagttatgtgtacttggtttccaagaactttggttccttctcgttttttttccttgtttgatcgctttttggcagcgctggcctggttcctagtatggtgggaattggctgcaccttttgcttcgaataaaaatgcctgctcgttc

SEQ ID NO: 66009 - DNA, 265 bp, Zea mays
cagctgcctgccttcagccttgcctctctttcgcgactcccccggagccggagcagagatcgccagctctaccggcgcggatgcatggcgggggccggagacaaggtggactacgtcttcaaggtggtgctgatcggagactcggcggtgggcaagtcgcagatcctcgcccgcttcagtcgcaacgagttcagcctcgactccaaggccaccatcggcgtcgagttccagacccgcagcctcgtcatcgaccacatgagcgtca

SEQ ID NO: 66010 - DNA, 236 bp, Zea mays
caaaaacacaccaagcgaagcgactagcaacgacctaacaccaatggctaccaagatattagccctccttgcgcttcttgcccttttagtgagcgcaacaaatgcgttcattattccacagtgctcacttgctcctagtgccagtattccacagttcctcccaccagttacttcaatgggcttcgaacatccagccgtgcaagcctacaggctacaactagcgcttgctgcgagcg

SEQ ID NO: 66011 - DNA, 290 bp, Zea mays
cgcctcgaccggatctcgtcggactcggatccgcccgaccaccccgcgccgccgcagatcaaagaagatggcagctgtcgacacattcctcttcacccccgagtctgtgaacgagggacaccctgacaagctctgtgaccaggtctcagatgccgttcttgacgcttgccttgctgaggaccctgacagcaaggttgcttgtgagacctgcaccaagaccaacatggtcatggtctttggtgagatcaccaccaaggccaatgttgactacgagaagattgtcagggaga

SEQ ID NO: 66012 - DNA, 286 bp, Zea mays
aatgagtggccattcttcagggtcaccttgatttgcttgagatggttttcgcgaagggagacccgggaatcgcagctgtgtacgacaaattgctagtggctgatgatttgcaatccttcggcgagcaactgaggaagaactatgaggagacaaaagagctactccttcaggttgctggtcacaaggacgtccttgaaggtgatccttatctgaagcagcgtctgcggctgcgtgagtcctacatcaccactctgaacgtgtgccaggcctacaccctgaagcggat

SEQ ID NO: 66013 - DNA, 290 bp, Zea mays
ccagagcctgcttggagagccgaacaacgactcgccgctcaacactcaggcggcagcgctctagggcgaaccaggaagagtttaggaagatggtggagaaaatctacaagcccgccgcatagaggaggatgacagcgccggtgaagatgtgggttcttcaagcactcatttcgcttggattgatcgacaagagataatatttggattgtttgggttcccagtctggtgctgtagcatgaaggaatatttgggtcgcctagagcgtggcgattctgtaattttgttctttg

SEQ ID NO: 66014 - DNA, 180 bp, Zea mays
cacttgttgatgccatgcttaaggatggactttgggatgtatacaatgactgtgccatgggaatgtgtgccgaactttgtgctgacaatcatgccctcacaagagaagaccaggatgcttttgctatccaaagcaaccagcgtggaattgctgctcgtgacagtggtgcttgtgcatggg

SEQ ID NO: 66015 - DNA, 214 bp, Zea mays
  unsure (1)..(214): unsure at all n locations
aanaacataggctgctcagaagggtaaggtcggaatagtcctggacttcaactggtacgaggctcttacaaactcacctgatgaccaagcagcagctcaaagagccagggacttgcacattggctggtttgttgatccattgataaacggacactatccacagataatgcaagatctcgtgaaggagaggctgccatgttcactcctgaccagg

SEQ ID NO: 66016 - DNA, 367 bp, Zea mays
agcgtcgccagtcgctacttcgcctccgatcctcgtcgccgacgcatccacccgaaccctcctccgcgacctcgccgtcgccgcagccttggccatgtcgatcttcgagtataatgggtccgccgtggtggcgatggtggggaagaactgtttcgcgatcgccagcgaccggcggctgggcgtgcagcttcagaccatcgcgacagacttccagcgggtgttcaaggtccacgacaagctttacatcggcctctctgggctcgccactgacgcccagacgctgtaccagcggttggtgttcaggcacaagctgtatcagctacgggaggagagggacatgaagcccgagacctttccagccttgtct

SEQ ID NO: 66017 - DNA, 363 bp, Zea mays
cgcgaccgtacccgcctcgcggttcaaccaaatccctctcgcctcatcgccaccagcgcaaagccgccctatcgtcctgtcgtgagagagcattgacgggctcgtggcaaggcgattggcgctggtgccgcgaagaaggcaacgtcaaggagctccaaggctgggctgcagtttcccgtcggcaggatcgctcggttcctcaaggccggcaagtacgccgagcgcgtaggcgccggctcccctgtctacctcgcagctgtcctcgagtacctcgccgctgaggtcctggagcttgctgggaacgcagcgagtgataacaagaagacccgcatcgtgccgcgtcacatccagctcgccgtcgca

SEQ ID NO: 66018 - DNA, 262 bp, Zea mays
  unsure (1)..(262): unsure at all n locations
tgccgcttcctccaaagccactccaaacccccgcttccagaaccttctcgaaactctccgcctcctcctctactcgctccgatggcgnaagaccgatgcgcgtgctcgtcactggcgccgcaggcaaattggatatgctcttgttcccatgattgctaggggagttatgcttggtgcagaccagcctgttattctgcacatgcttgatattccgccagcagctgaagcccttaatggtgtaaagatggagttggttaatgct

SEQ ID NO: 66019 - DNA, 382 bp, Zea mays
  unsure (1)..(382): unsure at all n locations
cgtagaactcggaatcggctcgagggagtcttcccatcggaggcgagagcccgagtccttcctcagcgtcttcagcgacgacgttatccangcgtcgttcaacactcggcggggagaattgggagaaagtgttcgagaagcagagcaagggggagatcacgacggcgtccgaggaacagatccgggagctgagcaggtcctgctcacgtggtggccgcggcagccgcggcgagggtggcgactcgggttcttcttcttcttccaagtgggagatcaaaccgtccagcctcacggacaagaagccgacccattccaacagccacggcaggcactacgagatcaccggcgacgagtgcccgcacctccggctgctcgacatgga

SEQ ID NO: 66020 - DNA, 352 bp, Zea mays
  unsure (1)..(352): unsure at all n locations
aaatggagtaagtcggaatcggctcgagacccacacagaagcggcggcggcggagagaacgcangcgaaggcgagggtgtgatggaaggacaccagccatggtgcacgtcaacttctaccgcaactatgataagacgttcaagaaaccaaggcgtccttatgagaaggagcgtcttgatgctgaactgaagctggttggtgagtatgggctgaggtgcaagcgtgagctttcgagggtccagtatgcactgagcaggatccgtaatgctgcaaggcacttgctcacccttgacgagaagaacccgcgtcgtatctttgaagggtgaggccttcttcgccgcatgaaccgcta

SEQ ID NO: 66021 - DNA, 354 bp, Zea mays
ctctctacctctacctactggagtacggagcacgccgcacgagccctttccgccgccgccaaaatggtgaacgttcctaagaccaagaagacctactgcaagaacaaggagtgcaagaagcacactctccacaaggttactcagtacaagaagggtaaggatagcctgtctgcccagggaaagcgccgttatgaccgcaagcagtcaggatatggtggccagaccaagcctgtcttccacaagaaggccaagaccaccaagaaaatcgtattgaacctgcagtgccagagctgcaagcactactcacagcacgcaattaagaggtgcagcattttgagattggtggagcaagaa

SEQ ID NO: 66022 - DNA, 358 bp, Zea mays
caccggcggcttaaaccctagttctcactcccatcgccgcttcagctccgccgctgcagatggagttctggggtctcgaggtcaagcctggttccactgttaagtgtgagcctggatatggctttgtgctgcacctttcccaggctgctcttggggaatcgaagaagagtgataatgccttgatgtatgtcaaaattgatgatcagaaacttgccattggaaccctctctgttgacaagaaactacacattcaatttgatctgattttcgataaagagtttgagctgtcgcacacatcagaaactacaagcgtcttcttcactggctacaaggttgaacagccattcgagaagatgaa

SEQ ID NO: 66023 - DNA, 357 bp, Zea mays
ggcgtcttcacttgttctggtcttctcgtatgcctgatgaagaggttcacattttggcctcaggcttatcttggcctgacattcaactggggagctttactagggtgggctgctattaaggaaagcatagaccctgcaatcatccttccattgtatacagctggtatttgttggacgctggtgtatgatactatatatgcgcatcaggtgtttcgctatccctactttcatattaatccttgatgaagtggccatttcatgttgtcgcggtggtcttatacttgcatatctccatgcatctcaggacaaagaagatgacctgaaagtaggagtcaagtccacagcttaagatttggg

SEQ ID NO: 66024 - DNA, 184 bp, Zea mays
  unsure (1)..(184): unsure at all n locations
acaatggcccccgatattacctgaagcctacttggatatctctggaagttctattaatcccagtgagagaacctatccagaggagatgatccaaactgggatatccaccattgatgtgatgaactccattgctcgtgggcaaaaatcccctantttctgctgctggactccctcaaatgaattg

SEQ ID NO: 66025 - DNA, 213 bp, Zea mays
ccatcatgcccaaggacatccagctcgcgcgccgcatccgcggggagcgcgcataggcggcccccggataggccggtggccgttgcgcatctcttctcggaagtttgtactagtggtcgggacgtgtggaaggagtggtgtactgatctgcaatgtctcaaaccatgtcaacctctttgttgtcatcaatggaaatcgctacttatgtgtgct

SEQ ID NO: 66026 - DNA, 362 bp, Zea mays
  unsure (1)..(362): unsure at all n locations
gcagaatgcanagaatgcaagttttgcaagagcggaaagaccaacctctgtggtaaggtccgtagtgccacaggcgtaggtgtcatgaatgatgttatgacgagcaggttctctgtaaatggaaagcccatttaccatttcatggggacatcgacattcagccagtacactgtggtgcatgatgtcagtgttgcaaagatcaacccacaggcacccttagataaagtctgcctgctcggttgtggtgttcctactggtcttggagcggtgtggaatactgcaaaggttgaatctggctcagttgttgctgtttttggccttggaacagttggacttgcagttgctgagggagcaaagctgct

SEQ ID NO: 66027 - DNA, 365 bp, Zea mays
cggcgggcagagaatgtctacaggtccttcaactatcccgaacgaagtcgggcagcaaggatatggcccttcaggaatcccgggaacggatggctcaaggagtatggacttgaaagcctttccaccaggatatggacctgctggagaaaaccagggcggtggtgcttcagggagcgtcataagcccccaagctcggtctgcagagaacgtagagttttcagacgacgctagaaaaaaggctatacagcgggagctgagacggcggcagaagttcaggtgatggccgtgatgcgaatttctgatcatgctcatcgaattgtgactacggattactactttttaagactacatatcgagtcttgatg

SEQ ID NO: 66028 - DNA, 366 bp, Zea mays
  unsure (1)..(366): unsure at all n locations
agatacactcctgcaattgatatttggagcattgggtgcatatttgctgaacttctcactnggaggccactatttcctgggaagaaatgttttacaaccaattagatattataacagatcttcttggaactccatcatctgagaccttatctcgggccaggagatacttaagctgcatgcggaaaaaatatcccgtgccctttactcataaatttcgaaatgccgatcctttggctcttcgtcttttagagcgtttacttgcatttgatcctaaagatcggcctactgcagaagaggctctagctgatccatactttgcatcccttgctaatgtggaacgtgagccatcaagaacccaatttctaa

SEQ ID NO: 66029 - DNA, 260 bp, Zea mays
acgtccgtacctccagaggaccgtacctgctgctgtgcctgctgttgttttcctctctggtggacagagcgaggaggaggccacccggaaacttcaatgccatgaacaagctcagcaccaagaagccgtggtccctgtctttctccttcggccgtcgcctccaggcgagcaccctgaaggcctgggctggcaaggtggagaacttggagaaggctagagctgcgttcctcgccaggtgcaaggccaactctgaggctacc

SEQ ID NO: 66030 - DNA, 373 bp, Zea mays
cgctattgcaaattctagaaggaagacaaagatagtatgcaccataggtccctcaaccaacactcgtgagatgatttggaagcctgcagagactgggattgaatgtagcacgccttaatatgtcccatggtgaccaccagtcacaccagaaggttattgatttggtcaaggagtacaatgcacagaacactgatggaaatgttattgccatcatgctggacactaagggtcctgaagttagaagtggggatgttcctgagccactatcgtccgtcgtctacactatttgcgtttacaaacgaggaacgagtgaagcaacggctggcactctaccagggggtcatccctattcacatgcagttctctgacgacg

SEQ ID NO: 66031 - DNA, 356 bp, Zea mays
ctcaacttcgacgccttccacggcgacaaggaccacggcggcgtgcgcgacggcaccaacatcgtgctctggaagtcgtgcgagggcgacaaccagcgctggaagatcgtcccctggtaaatgtgctgttctgtggctgcactggtcatcaccatgatctggagctttgaaggcatagccacctgtggtcagcagttgctgccgtgttgctagaataaagttggtggcgatcgatcgatcgatctttggtgatgggtgtcctaccatgtgtgttgtgtttagttccagtcggttgtgaagaatccattatttttgagtgagaggggtacttcgctctttcggttactctgtacttg

SEQ ID NO: 66032 - DNA, 362 bp, Zea mays
gaaatttatggttgtgaacattacaaacggaactgcaaacttgttgctgcatgctgcaacaagctgttcacatgcagattttgccatgataaaagttagtgaccatacaatggaaaggaaagcaacacaggaaatgatgtgcatggtgtgcctaaagattcaacccgttggtccgttctgccaaaccccatcttgtaacagactatcgatggcaaagtactactgcaacatctgcaaatttttcgatgacgaaaggactgtgtaccactgcccgttttgtaatttgtgtcgtcttgggaaaggtcttggtgttgatttctttcattgcatgaaatgcaactgctgtcttggaatgaaattaa

SEQ ID NO: 66033 - DNA, 357 bp, Zea mays
caactcaacacgtcacaggcatcaatttttgggcactcaatgggagggcatggcgcgctgacaatttacttgaaaaacactgataaatacaaatccgttgtcaccatttgctccaattgccaatccgataaactgcccttggggtcagaaagcattctcaaattacctgggctcaactaaatcagattgggaggaatatgacgcaacctgcctgattaaaaagaacagcaaagttcccactactatcctaattgaccagggggaggccgacaagttcctggctgagcagcagttgctacctcacaagttcgaggaggcgtgcaaggccgcaggggctgctctgaccttgcgcatgca

SEQ ID NO: 66034 - DNA, 360 bp, Zea mays
cctcgctctccgaaatcaaggtagcatacaccgctgcagtttctagagccctctctgccatcgtgatcccactagtcacgatgccttgctctcgctaagcccgcctcccgcaccgccaagcccgccgcggctccgaagccgaagcctgccgccgccaagccgaaggggccaccgctggtgcctcccacccgccttacttcgagatgatcaaggaggctatcacggcgctaaaggagaggaccggctccagctcgcaagcgatcgccaagtatgtgggggacaagcacggcgcgtctctgccggccaacttcaagaagatgctttccatccagctccgtgggtccgcagcaagggaagctc

SEQ ID NO: 66035 - DNA, 359 bp, Zea mays
aaagatggtagggttttgaaagaagatgtgttgaattatgctgtcagcaaaggtgtttgcaacaacaatcgttagcttcggaaaggaacatttgtcaaagttgagttactagaggaagggaaagcattactcgatgaggacttctatgaagataagaaaatccttctcaggggataccagagatcaatggtcaaatcaatgagcctggcagcaaaagttccacattttcattatctagaggagataaattgtgattctcttgtgcaactaaaaaccacatttcacaatgagaacaaggatcaaactatcaagcacactttccttccggtcctcataaagtcactttctatggcatgagt

SEQ ID NO: 66036 - DNA, 347 bp, Zea mays
cgcggggcagtacgcggtggagctggtggccgggcgggagagcgccatcgtccaggtcatccgcaccgtgcccaaccgcgcctacaacctgtcgttcgccgtcggcgacgcccggaacggctgccacggctctatgctggtggaggcgttcgcgggcaacgtcacgcagaaggtgccgttcgattccgccgggaaaggcgggttcaagacggcggcgttcaggttcgttgccggcggcgtccgcacccgcctcagcttctacagctcctactaccacaccaaggtcaccgacggcgtctcgctctgcggccccgttgctgaccaggtcaaggttgtgccggtcaagc

SEQ ID NO: 66037 - DNA, 329 bp, Zea mays
  unsure (1)..(329): unsure at all n locations
cgtngtctctcgggaaagtattgaatacacctgaggtttcacgtgtttatattggatattcaatgacaaaccagtaaatgaatcagctgttggtccacttggaaaggaactatttgagagatagcaagatgatcttctgtctgatctcaaagatatccccaagaaagcctgtgaccgccggatcaatgaatttggtaaacgtgctagagctgccaagatccatgcttatataataggtcatctaaagaaggagatgcctacaatgatgggcaaagcaaaagcccaacaacgactcatatacaatcggcctgatgagtgtgcaaaggtgc

SEQ ID NO: 66038 - DNA, 336 bp, Zea mays
ctcagctttcaccctgggcatctgcactctttgagtgtttgccccttttatcaggaagcagctacttctccatcctgaatctgatgattcagctcaactttctcagattgagacagagaagcatctagcacagttagttgagactgagatgaacagacgtttgaacgatggcacttacaaaggatagaagtttaatgcaatctgtcacttctttggctaccaagctaggggagcactgccttccaagtttgactgcgattatgcctatgtcttggggcatgtgtgctaccacatcatagctgccggtttgaacggttacatggccacagtgacaaa

SEQ ID NO: 66039 - DNA, 357 bp, Zea mays
gtttgaagatgacgctggcctttctctagagtctggctcttgtcaagattcttcaaaggttgagcaacgtaaaacagcttaccgctgcaggaaatgcaggaagagttattgctgtagagggcaatgttataagtcatgttcctggtgagggtgaatcttgctttgattggaaccgaagaaagagtggtcatccatacaacaacaaagaacatggttgctcatctttgtgtgtcgaacctctgaaatggatgactccagtagaagacggcgctttggagggaaagctatcatgcatccactgtggagctcggttgggatacttcaactggtcagggatacagtgcaatgtggtagctg

SEQ ID NO: 66040 - DNA, 235 bp, Zea mays
cgctatatctctatagccaacacacacacaaatactctccattccattccatctcagaggatagaataatgggcggtctctccaccaaggctttttccttgggtcctcctccggctcgtttgttacaccgggacgcaaggcgggccggtgactatggtgtcggcgatgaagtgcgagtcgcatagcttccgcttcaagggaccttgctcgagggacgccaactgcgcaaacgtct

SEQ ID NO: 66041 - DNA, 228 bp, Zea mays
  unsure (1)..(228): unsure at all n locations
cttccgttctcaaaccaacctaggcaatgcgccgcagcctctcagactcgcgagtcncgacctcccgcagccgccgcacagatggcacccaaggcggagaagaagccggcggccaagaagcccgcggaggaggagcccgcgacagagaaggtggagaaggctccggcggggaagaagcccaaggccgagaagcgcctcccggcgggcaagtccaaggagggcggcgag

SEQ ID NO: 66042 - DNA, 285 bp, Zea mays
atcggactgagctcttctttcatgaagctcgtgtcttggtatgacaacgagtggggctacagcaaccgggttctggatctgatcgcccacatggccctcgtcagcggcgccgccaagctctgacgtccgtgctcgttcctccagtagtagcctaggagaaaggctgcaattttgacggccattttctgttagctgttgtctggaataaagatcaaatgctggaacacttcgaactcgcgcgagactggactcagatccatggcctgtatgttagttgtagaaggg

SEQ ID NO: 66043 - DNA, 355 bp, Zea mays
gaaggtcgtcgacgtcctctcccccaaggttttcattggtttgattgttggagccatgctatccgatactggttctactgccgatgaccgatgaaagaggtgttggaagcgctgccctgaagatggtggaggaggtccgcaggcagttcaacaccattcctgggttgatggagggaacagccaagcccgactacgcaacctgtgtgaagatctccactgatgcttccatcaaggagatgattcctccgggcgctctggtcatgctgactcccctcatcgttggaacctctttggcgtcgagactctctccggcgttcttgctagtgcctggtttctggagtgcaatcgccatctc

SEQ ID NO: 66044 - DNA, 349 bp, Zea mays
  unsure (1)..(349): unsure at all n locations
tacgatctgacgctcatctcacatcagtagtcgaccaagcacaagcagcagagcggccggaatatgtggacgatcaggaaggtggcgacgccgcaggtggccgtcgtcctgctgctcctcatcgtcgttgcgcaggaggcggcgccgttggcggaggcgcgcgtgtgccggcgccggagcgcgggcttcaagggggtctgcatgtccgaccacaactgcgcgcaggtgtgcttgcaggagggctacggcggcggcaactgcgacggcatcatgcgccagtgcaagtgcatcgtcgagtgctagctagctaggctctaggatctagcaagctagctatacngcctttaat

SEQ ID NO: 66045 - DNA, 333 bp, Zea mays
agcgcaggagtgcccagcactagcgccgcgccgccgccgcatcagacatggcgctggccgctcgcctcgtctcgcgctcccgtcagggatatgtgggttcaggcactttggggaatagaggtgtcactcaagttcgctcctttgccaaggatgcagctccagctgaccgtcctcctgtcagtggggatgatctcctgaagggcatattctttgaggtaaagaagaagtttgagacagctcttggtgttcttaaaaaggaaaagatcactatggatccagatgacccagcggcagtttctcgttatgcgcagtcatgaagactgtaagggaaaa

SEQ ID NO: 66046 - DNA, 328 bp, Zea mays
  unsure (1)..(328): unsure at all n locations
gctccttcgcaacgggcggcgtgctgaatcctttgcagacgaatccgtgcgacgcggggctggatctcagtggatcgtaggcacaaggccactctgccacgtacaatgccccgtcgcgttcgagcacaataatggccggaggaggtgacgatgaactcaagctgctgggggcgtgggcgagcgcattcgtcctgcgggtgaagctcgcgctcagcttcaagggcctgagctacgaggacgtggatgaggactctccggcggcaagagcgagctgctcctcgagtccaacccggtgcacaagaangtgcccgttgtcctccacaacggc

SEQ ID NO: 66047 - DNA, 341 bp, Zea mays
aattgctgtaccaacaccagcataataaaaggatgagctgccccgccatggcacagctcctctccaataccctgtactacaagcgattcttcccatattacgccttcaatgtgctcggtgagcttgacagcgaggggacaggatgcgttttcacctatgatgcagtaggttcctatgagagaaccggttacagtgctcagggaacgggatctactttgatcatgccagtcctggacaatcaactaaaatcaccaagtcctctattactccctgtcagggatgctgtcacaccattgtcggagtcagaggccatcgatctagttaaggacgtgttcgatctg

SEQ ID NO: 66048 - DNA, 344 bp, Zea mays
cgcctcgaccggatctcgtcggactcggatccgcccgaccaccccgcgccgccgcagatcaaagaagatggcagctgtcgacacattcctcttcacctcggagtctgtgaacgagggacaccctgacaagctctgtgaccaggtctcagatgccgttcttgacgcttgccttgttgaggaccctgacagcaaggttgcttgtgagacctgcaccaagaccaacatggtcatggtctttggtgagatcacaaccaaggccaatgtgactacgagaagattgtcaaggagacctgcggcaacatggggtttgtgtcaaacgatgtggggctgacgccacactgcaa

SEQ ID NO: 66049 - DNA, 272 bp, Zea mays
ggatattctgttggaaaatctctcgtggaagaggataaacttgagctcgcaacttctcttattgagaaggcgaggcaaagggggttctcttttgcttcccactgtatttagtagcggcaatttgcactgatgctgagacaagatttcctgcactgctatcctgatgactggatggctatttggctgatgccacaacatcacgaacattgcccacagctgttattgacggccatggatttagtcgaaattcactgcatgaggcgatcagaact

SEQ ID NO: 66050 - DNA, 311 bp, Zea mays
cctcccgacgcactcgcccaaaaccgtagcgccctcgcctgctcgccgccccgtcgttgcgagctccccatcttcctccgttaaccatggcaacccagatcagcaagaataagaagttcgtcagcgacggcgtgttctacgccgagctcaatgagatgctgacgcgggagctcgcggaggacggctactccggcgtggaggtgcgtgtcacactgatgcgcacggagatcatcatccgcgcaacggcacgcagaacgtgctcggcgagaagggccgcaggatcagggagctcacgtctgtagtccagaaga

SEQ ID NO: 66051 - DNA, 276 bp, Zea mays
gagattcatcaggaaaggaagggccgagatgtatatatactgggttccgcaatgttggaaaatctgcatttatcagtgcaatgctaagaaacaatggcgtacaaggacccggtggcagcggcagctcaaaaatacaagccaatacagtctgctgttcctggaacaacccttggccctattcaaattgaagcatttttaagcggagggaaattgtgatatacacctggagtccaccttcaccataggcgggtagcagttatccatgctgatgatcgg

SEQ ID NO: 66052 - DNA, 318 bp, Zea mays
gtcgcgcgcaaggccggcatcgacctcaacaagaagtgagaacagccaaactatggtgtggtggcacactggcatcgaccccagtttgaattgtgtaccataccaatcagtgtaggcagatcgaggttgcacatgctgtgggtctgtttagttcagcttttttctgaccaacttttctgaaaatctggatacgaggagaatctagctgtggggagaacctgagtatcattacgattacgtgtgaagaaggataaagttgttcatagggctcaagatctagaaattgacggattcctactattacaacaactcaaccga

SEQ ID NO: 66053 - DNA, 351 bp, Zea mays
gtcgaagcgaggtacgggaggttcggctgggaacaagttccgcatgtcactgggtctaccggtggcggccacggtgaactgcgcggacaacacgggcgccaagaacctctacatcatctccgtcaagggcatcaagggccgcctcaaccgcctcccgtccgcctgtgtcggcgacatggtcatggccaccgtaaagaagggaaagcccgacctcaggaagaaagtgatgcccgccgtcatcgtccgccagcgcaagccgtggcgtcgcaaggacggtgtctacatgtacttcgagataatgctggagtgattgtgaatcccacaggtgagatgaaggttctgcaatcactg

SEQ ID NO: 66054 - DNA, 219 bp, Zea mays
cgtcgagcaccacgtcggtgaccgcggtgtcttcgccagggcctctggggactacgccattgtgatcagccacaaccctgacaacggcacatcgaggattaagctgccctctggcgccaagaagattgtccccagcagctgccgtgctatgattgggcaggttgctggtggaggcaggactgagaagccgatgctcaaggctggtaacgcgtaccacaa

SEQ ID NO: 66055 - DNA, 144 bp, Zea mays
aagagtgttagcagagctgccgaactgaataagttactttgtgaatgcaacttcccatcaatctgcattcattctggaatgactcaggaagaaaggctaacaagatataagaacttcaaggaaggccacaagagaattcttgtg

SEQ ID NO: 66056 - DNA, 196 bp, Zea mays
  unsure (1)..(196): unsure at all n locations
gcgcctcgccgtcgtaactcgctcgacgtcctacaaggacagcactttgatcatgcagctccttcgtgataacgtgacnctatggacttctgacatctcggaggacgctgcggaagagatcagggaggcgcccaagcacgactcgagcgacgggcagtaaagccggctttacgtgcctagaagctagtacctagtg

SEQ ID NO: 66057 - DNA, 349 bp, Zea mays
gaaattattcaagctatgtggaaggaaatcccgggtagaacaaaagattatataactcacccaaaacgaaatggttaccagagcttgcatgtggccatcgatgtcagtgaacctgggaaggtgaggccattaatggaggtacagatacgcaccaaggagatgcataggtttgctgttggtggagaggcatctcactctctctacaagggtggtcttactgatcctggagaggctaaaaggctcaagactattatgttggcggcacggagttagcagctctgcgcctacgagcctacaggcagtgaccacgtattgggaactgcaagaaccggctttctgtcacttgaca

SEQ ID NO: 66058 - DNA, 130 bp, Zea mays
caagcttggttctatagcaattgaagctgctctgaaaagagcaaatgtggatccggccctcgtgcaggaggtctttttcggaaacgtcttgagtgctaatttgggacaagctcctgcaaggcaagccgct

SEQ ID NO: 66059 - DNA, 129 bp, Zea mays
ctcgctttggatcgattggtttcgtaactggtgagggactgacggtctcggagtggattgatttgggattctgttcgaagatttgcggaggggggcaatggcgaccgcggggaaggtgatcaactgcaa

SEQ ID NO: 66060 - DNA, 99 bp, Zea mays
attcgttccaactcctgagcactttctcctcgtccccgacaagccaatcgaagccgagatacggccatggactccaccggcaccggagcagggggtaag

SEQ ID NO: 66061 - DNA, 174 bp, Zea mays
ggtgaactttacgagcttgatggactaaaatcacaacccacaccccatggcccatcatcacctgaaaccttgttgcaggatgctgcagaagtcatcaaagctagaattgcggagaaccctaactcgatgaacttcaatgtcatggccctttcaaagaagtgaggtacacggtgt

SEQ ID NO: 66062 - DNA, 345 bp, Zea mays
agagaatctccaagcaaacaaacagggtagagggagaggagaggagaggagaggagaggttgggtctgggacaccatggctccgatgaagctgtacggggcggtgatgtcgtggaacgtgacgaggtgcgcaacggcgctggaggaggctggctccgactacgagatcgtgcccatcaacttcgccaccgccgagcacaagagccccgagcacctcgtccgcaacccgtttggtcaggttccagctctgcaggatggtgacttgtacctcttcgaatcacgagcatctgcaagtacgctgctgcaaaaacaagccagagctgttgacggaaggaaacctcgagga

SEQ ID NO: 66063 - DNA, 158 bp, Zea mays
gtccgtctccaactcactagtactcagccgccgcaatcatgggggcaggtagctcgagcgcgcgctccacctgcgccgacgcgatgcgggccaagtggaagaagaagaggatgcggaggctcaagaggaagcgccggaaaatgaggcagagatctaag

SEQ ID NO: 66064 - DNA, 165 bp, Zea mays
aagctttgcaacagtagcaacctgcctcatccatggcatatgtggaagcttgatagtgtccatgagttgttgaaacgtgattaccagctccgccctgttgcaattgagattttcagcatggatggttgcaatgagcttctagttttccacacaaaggagagagag

SEQ ID NO: 66065 - DNA, 347 bp, Zea mays
ctgcaattggccttcatgatctgcggtcacggttgagcatcattccccaagaccctacattgtttgagggtactatcagaatgaaccttgatcctcttgaggagtgcactgatcaagaaatttgggaggcactagaaaagtgtcagctaggagaggtcattcgttccaaggaagagaaacttgacagtccagtgctagaaaacggggataactggagcgtgggacagcgccaacttattgcactgggtagggcgctgctcaagcaggcaaaaattttggtactcgataggcgacagcatctgtcgacacagcaacagacaatcttatccagaagatcatccgcagtg

SEQ ID NO: 66066 - DNA, 171 bp, Zea mays
cttgcaatcacaacgaacaaaagctctcgatctcaccgacaccgaggaagaagagatcaatggcgtccgagcagggagtcgtgatcgcgtgccacagcaaggctgagtttgacgcccacatgaccaaggcccaggaagccggcaagctggtggtcatcgacttcactgccg

SEQ ID NO: 66067 - DNA, 331 bp, Zea mays
cttcgagttcttttttccttttggcttattgcgcaagaagggtacacgagaggacggcggcgatggcgaagaggctgctcccgtctctgaaccgagagctggtcgagaagctggtgcagcccaagaagaccgccggcggcatcctccttccggaaacatccaagcagctgaatgctgctaaagtggtggctgttggccctggtgagcgcgacaaggcaggcaatctgatcccagttgctctgaaggaaggtgacactgttctcctgccagagtatggtggaacgaagttaagcttgcagctgataaagagtacccctctacagagacacga

SEQ ID NO: 66068 - DNA, 316 bp, Zea mays
cgttacagctggaaatgcttctagtataagtgatggggcggctgcattagttgtggtgagtgggcagaaggctcaagagcttagcctgcaagtccttgcaaggatcagaggatatgcagatgcagctcaagctccggaactttttacaaccaccccagcacttgcgataccaaaggctatatcaaatgctggattagagtcatcccatgttgatttttttgagattaatgaagcattttctgctgtcgcacttgcaaatcaaaagcttcttgggattccttcagaaaagtaatgtccatggaggagctgtgtctct

SEQ ID NO: 66069 - DNA, 291 bp, Zea mays
tgagaataatccttatcttggtttcatctacacctccttccaagagcgggcgaccttcatctcacacgggaacactgctcgtcacgccaaggactttggcgacttaaagcttgcacaaatctgcggcatcatcgcctcagatgagaagcgacatgaaactgcgtacaccaagatcgtggagaagctgtttgagatcgaccctgatggtaccgtggtcgctctggctgacatgatgaggaagaagatctcaatgcctgcccacctgatagttgacgggcaggacgcaagctg

SEQ ID NO: 66070 - DNA, 251 bp, Zea mays
aatgaactgaaagcaggaagccattattttgctgtatatggtgacaatttctttaaaagtgcaagctatactattgaggttgtatctggtgaaaccttctctgctcaaaaagagaagctacgaagtgtggaggcaaagataattgcaaaacgatctgagctgtctaaatttgagtctgagtatcgcgaggttttggcaaagttcactgagatgactagcagatatgctcaagaaatgcaaacgattgatga

SEQ ID NO: 66071 - DNA, 102 bp, Zea mays
ggagctcgagagcgtgcggttcatggcgcgcgagatcctcatcctgcgccgcctcgaccaccccaatgtcgtcaagctcgacgggctcgtcacctcccgcat

SEQ ID NO: 66072 - DNA, 304 bp, Zea mays
cttctctgttaagtggcacattgtcaaggacgtgcccaacaatattctcaagcacatcatcctggagaacaatgagaacaagcctgtcacaaacagccgtgacactcaggagatacgcctcgaacaaggccttcagatgctcaagatattcaaggatcatgtcagcaaaacttccatcctcgacgactttgccttctatgagagccgccagaagttgatgcaggataagaggtccaaacagcagcagctccaaaagcaggtctgggacactaggacccccgttctgtcaccggtgaacgaccac

SEQ ID NO: 66073 - DNA, 81 bp, Zea mays
ctcggcagtcggcacgctagttagcagcacagcagcagccagagccatcccctctcctcgctacgcttcgcttcctcggcg

SEQ ID NO: 66074 - DNA, 113 bp, Zea mays
tgtctggtgtgtatgtgtgtggtcacacttgccagccagcagaggcgcctgcttgtacctagattactgtttccattgtcgtcatcatcggctaacattgtcataatgtcagt

SEQ ID NO: 66075 - DNA, 340 bp, Zea mays
  unsure (1)..(340): unsure at all n locations
tgganattttgctccagttaagaaagtggcatgtaatatttacaggtacgcctggaaaccctagccttgacaccttgatgagcatgctcagtgggcttggttcgggaggtggcataggtgttccaaatacttccaatgtgccaccggaggagctctatgccacacagcttactcagctccaagaaatgggtttcattgacactgcggagaacattcaagcactgctcgctaccgctgggaatgtacatgctgcggtggagcgtcttctcgggaacttggcagtagctcaaacgagcgagccacacaccgccagtanatcttaaaatgtcgcgcatctgca

SEQ ID NO: 66076 - DNA, 241 bp, Zea mays
cccaaccccatgaccgttttctggtcgaagacggcacagagcatgacgtctcgcccaatgaaggggatgctgactagtccagtcacaatcctcaactggtccttcgtccggaatgaccagcgaggtttgagacttgctaccagatcgctcttgcgatcaagaaggaagtcgaggatcttgaggctggtggtaatcaggtcatccaaatcgacgaggctgcactgagagaggggctgcgctc

SEQ ID NO: 66077 - DNA, 290 bp, Zea mays
  unsure (1)..(290): unsure at all n locations
caagaagttgctgttgaaacatttggctctatggcaaagacggagaatatctgtttcattcttgagcaggtccggctatgcctggatcggcaagattttgtcagagcacaaattttatccaggaaaatcagtactagagtatttcacgcagatccatcaaaggaaaaaaagaaaccanaggaaggtgacagtattgttcaggatgctcctgcagatattccttcccttctagaattgaagcgcgtctactacgaactgatgattcgttattactctcaaacaatgattac

SEQ ID NO: 66078 - DNA, 333 bp, Zea mays
cggagatcaccctgaggaccgccttcctgtttcctgggattgctttcggtattttcttcatccttaatgctctaatatggggggagaagtcgtctggcgctgttcctttcaccacaatgtttgctttggtcctcctctggtttggtatctcggttcctcttgtatttgtcgggagctatctgggcttcaagcaacctgccattgaggctccggtgaagacgaacaagatcccaagacaggtctctgagcaggcttggtacatgaaccctgccttcaccatctgattggtggcatacttccgttcggagcagtcttcatcgagctcttcttcat

SEQ ID NO: 66079 - DNA, 312 bp, Zea mays
caccacctcgcctgcgatcttcgtagcctccgtctcgtcgagcatcgagcatgtgcggcctattggggaaagtacgagggttagttcctgaagaatgctgcgtacagtggcacccccggcaagggtatccgtgctgctgatgaatccactggcaccattggcaagcgcctttccagcatcaatgtcgagaacgttgaggagaaccgccgtgccctccgtgagctcctattctgctgccctagtgctctccagtacatcagcggtgggatcctcttcgaggagaccctgtaccagaagaccaaggatggcaag

SEQ ID NO: 66080 - DNA, 282 bp, Zea mays
aagcacctgggcctcgagatggaactattcagtgttttattaagagggataaatctacccaaatctacagtctgtaccttaagtttaagccctattgtcacagattcacagtatcaggctcaatattccatagaaaaagggagacgaaaatacatgtttttctgccgtgcctgtcgaaaatggcaaattccttctatccgcaaaaagaactgccggtgcacctttgctgaatatataatatcaataaattcgggtgatacctctaggggtacaagtaacaac

SEQ ID NO: 66081 - DNA, 158 bp, Zea mays
ccacctcgccgcgatctccgtagcctccgtcgcgtcgagcatcgatcatgtcggcctactgcggaaagtacaaggatgagctcatcaaggattgctgcctacattggcacccctggcaagggtatccttgctgctgatgagtccactggcaccattgg

SEQ ID NO: 66082 - DNA, 177 bp, Zea mays
caatgtcagatgccacttctggtggcacacatgatcagatcaagtaccttgttgcccatggttgcattaagccactctgttatctgcttgtttgcccggatcccagaatcgtaacagtttacttggagggtctcgagaacatcctgaaggttggcgatgcagagaaaaaccttggtg

SEQ ID NO: 66083 - DNA, 235 bp, Zea mays
aatgagtggccattcttcagggtcaccttgagttgcttgagatggttgtcgcgaagggagacccgggaatcgcagctgtgtacgaccaattgggtagtggctgatgattttcaatccttcggcgagcaactgaggaagaactatgaggagacaaaagagctactccttcaggttgctggtcacaaggacgtccgtgaaggtgatccttatctgaagcagcgtctgcggctgcgtg

SEQ ID NO: 66084 - DNA, 336 bp, Zea mays
  unsure (1)..(336): unsure at all n locations
cagaggtctagaacaagagtgacatttccacgtgtctggacaaacacctgctgtagccatcctctctaccgcgagtcagagttgaatggaggagaattgtgcaggggtgagaaatgcagcccaacgcaaactatgtgatgaactgggaatagttgctgacgaattacctgttgaccagttcatcctccttgggaggatgcttgacatngctcctgcacgtggaaattgggcgaacacgagtgagatacctcctgttcaggttgccggacacgagacactcacccgaatcctaaagaggtggcgacgtcaagtacgtgaacgcgatcactgaaagac

SEQ ID NO: 66085 - DNA, 197 bp, Zea mays
cctcagactcctctccgcacacaccctctctacctcgccgtcgccgtcgcatctgccatgggggcgtacaagtacgtctcggagttatggaagaaggaagcaatccgacgtgatgcggttcgttcaacgcgtgcgctgttgggagtacaggcagcagcgggccatcgtccgcctaacaaggcccacccgcgccgaca

SEQ ID NO: 66086 - DNA, 149 bp, Zea mays
ccaatccagatcagcaaagcggcagtgcgtagagaggatcgtcgaacagaacagcatgaagatggtcatcgttctcgtcgtctgcctgaactctgtcagctgccagcgcctctgcaatgcagatgccctacccctgcgcggggctgcag

SEQ ID NO: 66087 - DNA, 189 bp, Zea mays
tcatccacgttgagcggatcacccgcgagattgtgaacggctccaccgtgaacgtgggcatccacccgtccaaggtcatggttaccaagctgaagcttgacacaggaccgcaaggcgctcctcgaccgcaaggctcgaggccgcgccgccgacaaggctaagggcaatttactgccgacgacgtcgccg

SEQ ID NO: 66088 - DNA, 126 bp, Zea mays
gcggaaatctcgccatcaacactatatgccattgcctgtgtcacggaaggggtgccattcatcaatgggagcccccagaacacttttgtgcctaggctgattgatcttgctatcaagaacaattgc

SEQ ID NO: 66089 - DNA, 159 bp, Zea mays
catgagactgcgtacaccaagatcgtggagaagctgtttgagatcgaccctgatggtaccgtggtcgctctggctgacatgatgaggaagaagatctcaatgcctgcccacctgatgtttgacgggcaggacgacaagctgttcgagcacttctccatg

SEQ ID NO: 66090 - DNA, 108 bp, Zea mays
tgatcaccgtactagtcggaatcgactcacatggacgttttacgcgctcaacgtcaggaacgcacctctacggtttcggcggctaggtcgccctctctcccagtggcg

SEQ ID NO: 66091 - DNA, 170 bp, Zea mays
aagctttgctacagtagcaacctgcctcatccatggcatatgtggaagcttgatagtgtccatgagttgttgaaacgtgattaccagctccgccctgttgcaatggaaattttcagcatggatggttgcaatgagctactagttttccacaaaaaggagagagaggaagt

SEQ ID NO: 66092 - DNA, 248 bp, Zea mays
cataacgtttgagtatagtagacacaaactccttggttttgaagtacttggatgatgattcagaatgggtcttgatgacatgcgatgcagatctacaggagtgcctacatgtatactaactagcaggaatccatacaatcatgatttcagttcatttagctgttagtccacctacaagggtgactactggtcacactggtttgtcatgacaacagtatgaacctcaccacgttgtgaggtgtaatcag

SEQ ID NO: 66093 - DNA, 304 bp, Zea mays
cgcttatttactcattcccagtaacatgcagtggtggtgaatggataatcgttcgaggcctctcgatcgatgagctctcgaggatagaagatggataccattacccaagagctgtcggaagagaagtcgcttgcttactcatgcctcgatgtaaatatatcacacacccagagagcaattgctaccccctgtgttatgaataacagaaactccagctccgaccatagattctcactcagaactgctgcacgtcgctgtgctagcgtattgctggctacgaccacgtgtacgagactacgatggc

SEQ ID NO: 66094 - DNA, 121 bp, Zea mays
aatgatcaccccaccgtcgtaactcggattcgccgacttccgccctggacagtgtggccgagctgatgagtacatcctacagggtaaagagcttgagttctacctgaagaagctacagagg

SEQ ID NO: 66095 - DNA, 133 bp, Zea mays
agaaaattccagttctttggtccgcgtcagagaggcggcggcgatgtctgggcgcggcaagggcggcaagggtcttggcaagggccgcgcgatcgatccgggaaggtgctccgcgacaacattccaggcatca

SEQ ID NO: 66096 - DNA, 169 bp, Zea mays
acgctcgagcgtcgtaactcggaatcggtcgagcaagtccacggcgaactctcggctatcatgtctagccgcgagcaaggcgggaatgatctggagcatggcggcgccaagcggcaccagcaggtgctacgcgacaacatccagggcatcaccaagccggcgattcgca

SEQ ID NO: 66097 - DNA, 127 bp, Zea mays
  unsure (1)..(127): unsure at all n locations
tgtgatcgagcgtcgtagctcggattcagtcgacgtgttataataatgaagtaccagctgctgccatcgtgatgctatgctgctctagagatcanctcagactctgcgaaaggctataaactcgtgg

SEQ ID NO: 66098 - DNA, 64 bp, Zea mays
ccaacaagcaacatagagagtggaatccagtagcaacaacagagcagcaatggcgaccaagata

SEQ ID NO: 66099 - DNA, 158 bp, Zea mays
  unsure (1)..(158): unsure at all n locations
cgtacccgcctcacggttcaaccatatccctctcgcctcatccacancagcgcaaagccgccctatcgtcctgtcgtgagaggcaattgcggaccgtggcaaggcgattggcgctggtgccgcgaagcaggcaacgtcaaggagctccaaggctgagc

SEQ ID NO: 66100 - DNA, 320 bp, Zea mays
ctgggacgaggcgctgtccccgacgagcggcacttcatctcccacgtgctcgccttcttcgctgcctccgacggcatcgtgttcgagaacctcgcttcccgcttcatgaccgacgttcaggtcgccgaggcgcgggccttctacggcttccagatcgccatcgagaacatccactcggagatgtattcgctgctgctcgagacctacatccgcgaccacgtcgagaaggaccgcctgttccgcgccatcgacaccgtgctcgcggtccggcgcaaggctgactgggccatgcgctggatcgacggcggggagcgcttcgc

SEQ ID NO: 66101 - DNA, 323 bp, Zea mays
caatccctcgtagcagcagcaccagtagattctccttcctctccggcggcgatgtctgggcgcggcataggcggccaagggctggggcaagggcggcgcaagcggcaccgcaaggtgctccgcgacaacatccaagggatcacgaagccggcgatccggaggcttgcgaagaggggcggcgtgaagcgcatctccgggctcatctacgaggagacccgcggcgtgcgtcaagatcttcctcgagaacgtcatccgcgaagccgtcacctacactgagcacgctcgtcgaaaaccgtcaacggcatggacgtcgtctacgccct

SEQ ID NO: 66102 - DNA, 334 bp, Zea mays
aattgctgtaccaacaccagcataataaaaggatgagctgccccgccatggcacagctcctctccaataccctggtactacaagcggatgctcccatattacgccttcaatgtgctcggtaggcttgacagcgaggggaaaggatgcgttttcacctatgatgcagtaggttcctatgagagaaccggttacagtgctcagggaacgggatctactttgatcatgccagtcctggacaatcaactaaaatcaccaagtcctctatgactcgctgtcagggatgctgtcacaccattgtcggagtcagaggcatcgatctagttaggacgtgtcg

SEQ ID NO: 66103 - DNA, 164 bp, Zea mays
agcgtcgccgcgctacggctcagatcttcgtcgtcatcttctccggcaacgagcacccagagatggtggtccttcaaccagatcggttcctgagcgagctgacgagcatgtacgagcggacacggagaagggcttcgtctgggctcacatgaagcgatcaactc

SEQ ID NO: 66104 - DNA, 230 bp, Zea mays
  unsure (1)..(230): unsure at all n locations
agcaacataganagcacaatagtgtaccaacaatggcagccagaatattttgcctccttatgctccttggtctttctgcaagtgttgctacggcgaccattttcccgcaatgctcgcaagctcctatagcttcgcttcttcccgcgtacctctcatcagcggtgtcttcggtatgtgaagacccattcttcaacgctacaggatccaacaggcatcacagctggcatctt

SEQ ID NO: 66105 - DNA, 254 bp, Zea mays
cttgtctcaggcttcgtggtggcatcatcgagccttcgctcatggctttggctcgcatatacaaccaggacaagaagatttgccgcaaatgctatgctcgtctgcaccctagggctgtgaactgccgtaagaagaagtgcggtcatagtaaccagttgaggcctaagaagaagatcaagtaaattcctgggtgggatattgttggtctctactttcgttgtgttgtcttagaacagtgacttgttggtattatc

SEQ ID NO: 66106 - DNA, 322 bp, Zea mays
  unsure (1)..(322): unsure at all n locations
tgtcattcactggaactgcttctatcagaggcagaattattgctgggacatgccacagtgctaagatgaacagaactatcattgttcgcaggaactacctccactttgtagagaaataccagaggtatgagaagaggcactccaacattcctgctcacatctctccatgcttccgtgtgaaggaaggtgaccatgtcatcattnggcagtgcaggccctgtcanaactgtgaggtcaatgtcgtcaagtcatccagctgatcgcagctgctgaagaagcttcacacagctgagttatagactatgtcatgagtagctatgat

SEQ ID NO: 66107 - DNA, 311 bp, Zea mays
  unsure (1)..(311): unsure at all n locations
tgatcagcgtagtaagtcggaatcggctcgacggatgagggagggcgacacactgctttcttctctaactacaaacctcagtgtcactngaggactgctgatgtcactggaaaagtagagttgcccgaaaatgttaacatggttatgcctggagacaatgttactgccgtgtgtgaactgatttcagcagttccacttgaagcaggacaaagatgtgcctcgagagaaggtggaagaacagttggtgccggtgtggtgtcaaaagtactgagctagtgcatttgccatgattcaaagtttagtctacccat

SEQ ID NO: 66108 - DNA, 280 bp, Zea mays
  unsure (1)..(280): unsure at all n locations
cgagttgttgagattgagactcctgttntgtccaagtctacacctgaaggtgctcgggactatcttgtaccatcgagagttcagccaggaacattctacgctctccctcaaagccctcagctgttcaagcaaatggtgatgggttctggttgtgaanaatgatatcagattgcaaagtgcttccgagatgaagatctgcgtgcggacaggccaccagagtttacacaacttgatatggaggttgcttgtacatctatggaggatatgttgaagttgaatg

SEQ ID NO: 66109 - DNA, 146 bp, Zea mays
tgcggcggacacggaggcgaaggaggaggagcagcagcatcaggcggcgccgaggagcggcatctcactcagtgcttgcatactttgctaggggattgaagaagcacttgaagaggctcaatgcgcccaagcattggatgctcgac

SEQ ID NO: 66110 - DNA, 152 bp, Zea mays
acaggaggcgactatgaaggccaagtggaagaagaagcgcatgatgaggctgaagaggaagcgccgaaagatgaggcagagatccaagtaggctgatggggattgtggatggtggtgtcggcatagttgtgttacgtatcttcgatgcgtga

SEQ ID NO: 66111 - DNA, 239 bp, Zea mays
cgtgatccagccaccgccgctagaagaagagctcggcgattcgcaggtcgcgcgagaatatgccgaagcagatccatgagattaaggacttccttctcaccgcgaggaggaaggatgcacgctcagtgaagatcaagaggagtaaggatgttgtcacgttcaaggtgcgctgctccaagtacttgtacacgctctgcgtcttcgatgctgagaagggcaacaagttgaagcaatctctt

SEQ ID NO: 66112 - DNA, 164 bp, Zea mays
  unsure (1)..(164): unsure at all n locations
agacaatggatntcttcgatccatcaaggaaagatgatctcctcttcatctctggcacaaagatgcgcactcttgccaagaaccgcgagagtcncccggatggttttatgttgccgtgtggctggaaagtgctcgttgaatactatgacagcttggtgccatcc

SEQ ID NO: 66113 - DNA, 113 bp, Zea mays
cttaggagaggagtacctgaggtgcttggttcaattcttggaggcttgaaggctatcgtcaatgtcattggtatgactaaagtgactccaccaatcaaggatcttcttcctcg

SEQ ID NO: 66114 - DNA, 190 bp, Zea mays
ctcgccacaaacgccgcatcaccgatagttcgcaaagatggcgacgccgctgctgacgcagaagatcgtgaagaagagggtcaagcagttcaagaggcgccatcttgatcgacacaagtgccttaagccaagctggcgcaggcccaagggtatcgactcgcgcgtcaggcgtaagttcaagggatgcact

SEQ ID NO: 66115 - DNA, 151 bp, Zea mays
attgaacgtgctgcttatttgcagcaacaactattaccattcagccagctagctactgcctactctcagcaacaacaacttcttccatttaaccagttggccgcactgaaccccgctgcttatttgcagcagcaaatactactaccattta

SEQ ID NO: 66116 - DNA, 115 bp, Zea mays
gcttaagcagaccggcaagccagaaatggttgtaggttggtatcactcacatcctggcttcggatgctggctatcaggcgtcgatatcaatactcagcagagttttgaagctttg

SEQ ID NO: 66117 - DNA, 98 bp, Zea mays
  unsure (1)..(98): unsure at all n locations
cgtgtcggcacaacactgttggagtcgcanaggtggtgcttataccggtgaggttagtgctgaaatgcttgttaatatgggaattccttgggttatta

SEQ ID NO: 66118 - DNA, 137 bp, Zea mays
cgggctaactttgagttgccactgagacacacgaggaactactgtacgacaaggagatattgcttgagaatggtgatcgctgggagactgagattgctgagaacttgagatctgagagcctctatcgctgaatctgt

SEQ ID NO: 66119 - DNA, 94 bp, Zea mays
ccacatggaccgcgactacggcatcctcaaccgcgtgttccacaacatcacggacacgcacgtcgcgcaccacctcttctccaccatgccgcac

SEQ ID NO: 66120 - DNA, 103 bp, Zea mays
caaatcggggaaacatggaccagaacttccttcaattcgacacggcacctcggcaaattgagccagacacaactcggaaaaccccagactactttttgtaatt

SEQ ID NO: 66121 - DNA, 200 bp, Zea mays
cattcagccagctatctgctgcctacgcccagcaatttcttccattcaaccaactgacagcattgaactctcctgcttatttacagcagcaacaactactaccattcagccagctagctggtgtgagccctgctaccttcttgacacaaccacagttgttgccggtctaccagcacgctgcgcctaacgctggcacctct

SEQ ID NO: 66122 - DNA, 295 bp, Zea mays
tccgtctccaactcactagtactcagccgccgcaatcaggggggcaggtagctcgagcgcgcgctccacctgcgccgacgcgatgcgggccaagtggaagaagaagaggatgcggaggctcaagaggaagcgccggaaaatgaggcagagatctaagtaggcgcatcttgtgaccgaggatggcgagcttctcctgcaccatggctgtgacgcgttgggatgattgtccgctttgtagacgtgctttgctgtagacgtagcgatgtaaccgcctatttgataatctatatgtctg

SEQ ID NO: 66123 - DNA, 313 bp, Zea mays
  unsure (1)..(313): unsure at all n locations
ggtccgttcaaccaggccacaaggtgatcttggctcactgcatcccttcactgctggagtgtatgttgcactaatgatggctcagattgaggtccttaggaagaagggccactcttactcagagataattaatgagtgcctgatcgagtccgtggactcgttgaacccgttcatgcatgctcgcggtgtggccttcatggtcgataactgctccacaactgctcgtttgggatctaggaagtgggcaccacgctttcgatacatcttgacccaacaggcgnttgtgactgttgacaagagagcaccgatcaac

SEQ ID NO: 66124 - DNA, 281 bp, Zea mays
  unsure (1)..(281): unsure at all n locations
gtgtacgatgctcggagatcggctcgagctccacaggaggcaccaagccaaaggtggttgaggcaccagcagaagaggaagcaccaaagccanagccaaagaatcctcttgacttgctgccaccaagcaagatggtccttgatgactggaagaggctatactcagacacaaagactaacttccgggaggttgccatcaaaggttcctggacatgtacgacccagagggctactctttgtggtctgtgactacaagtacatgatgagacaccgtctcctttt

SEQ ID NO: 66125 - DNA, 271 bp, Zea mays
catttattggcacaaaacatcagggcacaacaactacaacaacttgtgctagcaaaccttgctgcctactctcagcaacaacagtttcttccattcaaccaactagcaacattgaactctgcttcttatttgcaacaacagcaactaccattcagccagctatctgctgcctacccccagcaatttcttccattcaaccaactgacagctttgacctctcctgcttatttacagcagcaacaactactaccattcagccagctagctggtg

SEQ ID NO: 66126 - DNA, 347 bp, Zea mays
  unsure (1)..(347): unsure at all n locations
agaaagaccaagcgtgaacgcaaaacaacaaggtacatgacgaatcggnaacatgcgcgcatcctgggtacacgatccttgcagatgagcatctatgctccagtcatgggtnagcttgagtgagaaatgaccctcttgggatacagtgaaggagctgatagcgcgcagagtatacttcacgatcagacgttacttacctgatggaagctatgaagactggggagtagacgagctcattgtggaggactcctggaaacgtcaggttggtggagactgaagacgcggatatacttggcatggaaacggtctgtggtgcagtgggtgttcctgtagttacagttcttcgt

SEQ ID NO: 66127 - DNA, 115 bp, Zea mays
cggttggaccgcaaacatggacaggataatgaacgcccaatctctaagggacaacagcatggcagggtacatgtcaagcaacaagaccacagagatcaaccctgagaacccaatc

SEQ ID NO: 66128 - DNA, 351 bp, Zea mays
tccacagacaacagagaacttgcgtgctctaggcactagagagaaagggtttggatacaagggatccagtttccatcgtgtcatcagcgactttatgattcagggtggagatttgacaagggcaatggtatccggtggggagcatatatggacgcaccttcaaagatgagaacttcaaattggttcacactggacctggagtggtcagcatggctaatgctgggccgaacaccaatggcagccagttctttatttgcactgtcaagacaccttggttggacggaaggcatgtcgtgtttggccaggtcctggaagggatggatgtcgtaagtctgatcgagtcggcagaga

SEQ ID NO: 66129 - DNA, 273 bp, Zea mays
gcaagtgcaccttccaagttagcattgcttaaatttgcctttgtcacatttgccatggaatacatcttttgatggatcaaatattacaggcgctgacttcacggatgtaccactaagagaagatcaacgtgaatacctctgcaaagttgctgatggagtgaacccaacaactggaaatgctacgcgtgatacattgttctgcaattagtattccattgctgaatactcactccaagaccttcaaatgtttgcgtagaatggtttcatagctaa

SEQ ID NO: 66130 - DNA, 245 bp, Zea mays
gtttctggcagtgccacaacagctacagcgcatgtgacctcggttctgatgggactgacagactaatcaagctggtacgagaagtgcaacagaggaggacatccgaaggcggaagcactagtctgtttggcgcaaagatcaccggcggaggctccggcggcacagtatgtgtggttgggaagaactgcgccaggagcagtgaagagattgcagagattcagcacagatacaaggctgagaccggg

SEQ ID NO: 66131 - DNA, 189 bp, Zea mays
ctggtagttgatgctgaaactgacaaagtacttggtgcatccatgtgtggaccagacgcacctgaaattatccatggcatcgctattgcggttaaatgttgagccaccacagcagacttcgacagcactgtcggaatccacccttccgctgctgaagagttcgtgaccatgcgcaccgtgacaaggcgc

SEQ ID NO: 66132 - DNA, 189 bp, Zea mays
tggttaccattcctccccaaaacacatcctgcgatcctcgaagactccgccgagcatcgatcatgtaggcctactgcggcaagtacgcggatgagctcattgagaatgctgcctacatcggcacgcctggcaagggtatactagctgctgatgagtcaactggcaccattgggaagcgcctttcaagca

SEQ ID NO: 66133 - DNA, 264 bp, Zea mays
  unsure (1)..(264): unsure at all n locations
caagttgaccctcacaaagagaagccagcatctgtgcaacgagcattgtctgttcttgagatggaagttgagcagataaagaaaggaagttatgatcacttcatgcanaaagaaatccatgaacagccacattcgttgnaaagcacaatgangggtagattgaangatnngtgngggtgtctacgtggactgaaggaatatctcaagacaattaggcgctgtagaagggtggtaattatcggctgtggacaaagtacaatgctg

SEQ ID NO: 66134 - DNA, 200 bp, Zea mays
cttccctcccgacccactcgcccaaaaccgtagcgccctcgcctgcacgccgccgccgtcgttgcgagctccccatcttcctccgttaaccatggcgacccagatcagcaagaagaagaagttcgtcagcgacggcgtgttctacgccgagctcaatgagatgctgacgcgggagctcgcggaggacggctactccggcg

SEQ ID NO: 66135 - DNA, 289 bp, Zea mays
cggagggcctccggatcttctactaactggtccaggatctgaagtgtttcgtgttctcgctcatcaaccttcacttcaagatctagccgatccagtcttgagctccatcccaagccttcatgtagctggtttgtgagactgcgagtgttttgagagagaaccttttaaccatgtaagatgatgttgatattgtggacgatgcgtgcgatcggccctgtgtggtgcacttagtggaagtggaacccccctttgcatttgttttgtgcaaactgctgagtagtagtgaacg

SEQ ID NO: 66136 - DNA, 132 bp, Zea mays
ccaaaccaggtcaagagaacctgctatgctcaggcatcccagattcggcagattcgccgcaagatggttgagattatgatcaaccaggcttctacatgtgaccttaaagaacttgtttctaagttcattccg

SEQ ID NO: 66137 - DNA, 99 bp, Zea mays
attagatgaagaaatgtcggcagacccttctgttttcttgatgggagaagaggttggcgagtaccaaggtgcatacaagatatccaagggtttgcttga

SEQ ID NO: 66138 - DNA, 330 bp, Zea mays
  unsure (1)..(330): unsure at all n locations
caaagatatcgctgctggtattcaaagtagtaaatcaaacaattacaaaagatctgaaggccagaactgtggaaatttccttacggaccgtccgtcgaccaaggtgcaagcagctccaggtggcgactcttcactcggttatctttttagtggcagcaaagatggcaagtgatgtacacctgctgttagtgttcgccatgatcatgggagaaggttctgcttaacaaaggaaaaagggaaaagaatcttgtattcccatgagtaaatatcanactgctcatggtatctatgttgttgggatgcttgtatgtgtgtacatgtcgtgtgtgt

SEQ ID NO: 66139 - DNA, 348 bp, Zea mays
ataacacatggtgggagtggggtaccagatgcattactgaaccagatgtttggaaacaacgggctagaatccgaggagggtattagcctactgatcagcagaaagctgctgaagctgatgaatggagatgttcgctatctaagggaagcaggcaaatcagcttttatcctctctgctgaacttgcagcagcccataatttgaacagttaaaagtgttggaaaaaagaatataagatgatgcaaccagcaaaacacaatctgttttgtacatcataaagagaacggagctagacattaattgcatccaatgtaactctaatgtgttcccacgtttcttattaactgctc

SEQ ID NO: 66140 - DNA, 135 bp, Zea mays
gcaattgattttgggccgtttgcactttgttaggttcattagggttattgtacgttgcaattgtccagttatctttgtatggatttgtactttatgtctgagaaaattagtgattgtgcttttatgccggacttg

SEQ ID NO: 66141 - DNA, 332 bp, Zea mays
ggaagaagtttctaacgggctacatcccaccaccgcacgatgtcggcagcggcgcgatgtgctgccgaatgcggtgaccttcgtgacgggcaacgccaagaagctggaggaggtccgcgccatcctcgggtcttccaccccattccagtcgctcaagctcgacctgcctgaactgcaaggggagccagagtacatatccaaagagaaagcacgaatcgctgcatctcaggtgaatgggcctgtactggtggaggacacctgcctatgttttaatgcgctcagaggcctaccaggaccctacataaagtggtgtcttgagaagattgggcatg

SEQ ID NO: 66142 - DNA, 317 bp, Zea mays
  unsure (1)..(317): unsure at all n locations
ggggcggcgtcaacgcatctccgggctcatctacgaggagacccgcggcgtgctcaagatcttcctcgagaacgtcatccgcgacgccgtcacctacaccgagcacgcccgccgcaagactgtgaccgccatggacgttgtctacgctctcaagcgccagggccgcaccctctacggtttcggcggttaagtcgcccctctcccgatggcgattgacgtggtggcgtngccgtcgtgttgtgtcttggtctagttagtctgtgttgctttatcggtctgtttctgtgtggtgtatgcacgtctagttctatccagtg

SEQ ID NO: 66143 - DNA, 322 bp, Zea mays
  unsure (1)..(322): unsure at all n locations
ctcaaagctttcaaaaattcagtctaagatatccagtctagctgagaagctaaaacatgatttttggtaatgacaaggagttctattccttttatgatcagtgttttgagaccaaggaagggaagtatacttacaaggtctgtgcatataagacagcatcacaggctgaagggcacagttctaccacctgggggcggtggacaaatttgaaattcgtacagatnatgcacgttgcagtggagacaatgctggatggtctgacngatgctaaggtaggttagatgtggctgacatgagctaatgagtaatgagctagcaatcg

SEQ ID NO: 66144 - DNA, 308 bp, Zea mays
ctccaaatttcataaacaagacagtcgatggaaaactactagagccttatgagatagctgctgttgaagtcccagaggagtccatgggatcagttgttgagcttttagggaaaaggcgtggacagatggttgacatggaagctaacgggacggagggaacaacattgctgaaatagaagattcctagcagaggccttattggacttcggcctccaatgcttacagcttctcgtggcagagctatattgaatacaatctttgacagtgatggctcatgggctggagtcttagctcacgtgatcagggat

SEQ ID NO: 66145 - DNA, 338 bp, Zea mays
agctgctctcgtccctagaaataaagcagctcctccgcggggcggcgaactactacccatcgccaaaaccctagccccgatccggtcgaggagcactacttcttggcatggcgggcacccctagccaggcaagcctcctgctccagaagcagctcaaggatcttgcgaagaaccccgtggatgggttctccgcagggcttgtagacgatagcaacgtcttcgagtggcaggtcaccatcatcggcccgcccgacacccgatatgatggaggctacttcaatgcaataatgaccttcccccagaactatcccaacagcccgccatcagtaagatttact

SEQ ID NO: 66146 - DNA, 339 bp, Zea mays
gacggctgcatcaccaccaaggaacttggaactgtgatgcgctcgttggggcagaaccctactgaggctgagcttcaggacatgatcaacgaggtcgatgctgctggcaatggaaccatcgacttccctgagtttctcaacctgatggcacgcaagatgaaggacacagactctgaggaggagctcaaggaggccttccgcgtgttcgacaaggaccagaacggcttcatctctgctgctgaacttcgacatgtcatgaccaacctaggtgagatattgacggacgaggaggtggatgagatgatccgtgaagccgacgtggacggtgatggccagatc

SEQ ID NO: 66147 - DNA, 333 bp, Zea mays
gtccactcacttaaagtttctctggaagatctttacaatggaatctcaaagaagctctctctttcgcgcaatgtcatctgctccaagtgcaaggtgaagggctcgaagtctggtgcttcaatgaggtgccctgggtgccagggctcaggtatgaaagtcaccattcgtcactgggggcttccatgatacagcagatgcagcagccttgcaacgagtgcaaggggactggggagagcatcaacgagaagtgacgctgcgtcaggtgcaagggtgagtaggtcagtcaggagaagcaggttcttgcagttcatgtacgagatggatgcacacagc

SEQ ID NO: 66148 - DNA, 340 bp, Zea mays
  unsure (1)..(340): unsure at all n locations
gtggaatccagtagcaacaatagagcaacaatggcgaccaagatattttccctccttatgctccttgctctttctacatgtgttgctaacgcgacaattttccctcaatgctcacaagctcctatagcttcccttcttcccccataccttccatcaattatagcttcaatatgtgaaaacccagctcttcaaccatataggcttcaacaagcaatcgcagcaagcaacatacctttatcgcccttgttgtttcaacaatcgccagccctatctttggtgcagtcattggtacaaaccatcagggcacaacagctgcagcaactcgtgctnactctgatca

SEQ ID NO: 66149 - DNA, 325 bp, Zea mays
agctcacttaacgccgccgcggagctgctccgcgcccccgacgccggtgattaggagcaggagcaagaggggttcggaatggccaagtctaagaaccacacggcgcataaccagtcgttcaaggcgcacaagaacggcatcaagaagcccaagcgccaccgccagacctccaccaaggggatggaccccaagtttctgaggaacttgaggtactcaaggaagggcaataagaagagttgtgaggctgagtcagaggagtgagatgatgcctgagtttgtggcgacacatgcatctcttgtatcgttagggtcttagttgtgaact

SEQ ID NO: 66150 - DNA, 335 bp, Zea mays
ctttctcctcgtccccgacaagccaatcgaagccgagatacggccatggactccaccggcaccggagcagggggtaaggggaagaagggagcggccgggcgcaaggtcggcgggccaaggaagaagtcggtgtcgaggtccgtgaaggccgggctccagttccccgtcggccgcatcgggcgctacttgaagaagggccgctacgcgcatgctgtcggcaccggcgcccccgtctacctcgccgctgtcctcgaatcactcgccgctgaggttacagcactcgccggtaatgctgccagggacaacaagaagactcgcattattccgcgccacgt

SEQ ID NO: 66151 - DNA, 319 bp, Zea mays
tttgaagatcatgatcactgagtcagggtggccaaacaaaggggcggtcaaggagactggagccacaccagacaatgctcagacctacaataccaatttgatacgccatgttgttaatgacagcggcacaccggcgaaaccaggggaagagattgatgtctacatattttcattgttcaatgagaacaggaaacctggcatcgagtcggagaggaactggggactgttttttcctgataagagctctatctacagccttgattggacgggccgaggcaatgtggatgttatgactggagcaaacattacgagtgctaat

SEQ ID NO: 66152 - DNA, 312 bp, Zea mays
cagcggaagatggtgctccagataagaaggcaccacatacgagtgacatttgagataccatatttcaccgtatcacgtattcaggtccgttatctgcagataattgaatagagtcgttaccaagcactcccctgggttagatatatcacgatttctggcgaatatgagctgagacttatatgagttttctctaatctggctaatcgaagacatttatgaagctgctagatacatatttgctcgagacagcaactgtatgacatctggatgtgcacctggacgtcttctgccagacatacaaggtattccccc

SEQ ID NO: 66153 - DNA, 313 bp, Zea mays
  unsure (1)..(313): unsure at all n locations
cttgaagaacagaaaccagaaagggtaaagccgtttatgactggagctgcnagagaaattaagcacatccttgctaatttcaataactaccagttttttattggtgaaaacatgaatccagatggcatggttgctctactggactaccgtgaagatggtgtgactccattcatgatgttctttaaggatggcttagagatggaaaatgttacaaattggatctatcgctgtcacataattggccgtgcttacatcatacacacaggattaggacaatggatgatatcacttgagtttatttgacggattattg

SEQ ID NO: 66154 - DNA, 307 bp, Zea mays
ccgcggtgtgctcaagatctttctggagaacgtcattcgtgacgccgtcacctacactgagcacgcccgccgcaagaccgtcaccgccatggatgtcgtctacgcgctcaagcgacagggccgcaccctctacggcttcggcggctaggtcgcttcctcatctggtggcgaactgcatgtgtgtcggtggtggtcgtgttgtgtgtctaatctagtgtagtccgatctctctgttgtcgctgtggtgtgtggtgtcttgtagttcatttcctgcaataccaacttgccattatcaatggaaaccctc

SEQ ID NO: 66155 - DNA, 280 bp, Zea mays
gcaacttggcgatggaggagaagcagatccagcagaacatccagatgagcgtcaacttccttgtttcccttctgaagaagaactggcagaatgtgagatgcctctacgtcaagagcaccatggggaagccatacagggtgttctaagtatgctcttttgtgaagtctgctaggttctggcaccgaggttttatagaatagacttctgtcagagtatgtttttggacgatcctatattcgtcctgcgtatatgttcagatggggtatactataagtacctg

SEQ ID NO: 66156 - DNA, 340 bp, Zea mays
gcttccagagccccccgccgccgctgcgccctcctctcggtcctgccgtccgtcgaggtaaaaggacagcatggtgagggtcagcgtgctcaatgatgctctcaagtccatgtacaatgctgaaaagatagggaaacgtcaggtcatgatcaggccgtcatccaaggtgatcatcaagttcctgacggtcatgcagcgccatggttacattggcgagttcgagtacgtggatgaccacagagctgggaagatcgtggtggagctgaatggaagactgaataaatgtggtgttattagcccacgtgttgatgtaggtgttaaggagatcgagggatggacg

SEQ ID NO: 66157 - DNA, 331 bp, Zea mays
ggggacttgctcgatatgctgctattgctcaggataatggtttagtgccaattgtggagccagagattcttcttgatggcgaccatgggatcgagggagctcttgaggtggcagagaaagtgtggtctgaggtgtttttctacttagccgagaacaatgttctgtttgagggtatcctgctgaagcctagcatggtcacccctggagctgagcacaaggagaaggcttctccagaagccattgcaaagtacacgctaacaatgctcagaaggagagtacctcccgctgttcctggaatcatgttcctttctggtggacagtccgaggtgga

SEQ ID NO: 66158 - DNA, 338 bp, Zea mays
cgctctcgttctggtttatagatctttgcgaaggaactttacagcgctcaaccaaagatgcacaacgaggaaggacagatcactgagctttacattcctaggaagtgctccgacacaaacagattgattaccgctaaggaccatgcttcggttcagatcaacattgggcatgtggatgagaatggcgtctacaatggccatttctccacttttgccctctgcggattcatccgtgctcagggtgatgctgacagtgctctagaccgcttgtggcagaagaagaaagttgaagttaagcaacagtagacacccatgatagtttgttacttcgttatgta

SEQ ID NO: 66159 - DNA, 312 bp, Zea mays
cgtggttcacgtgaaatcgaagagacgttgttggagcaccttggagttaaacgaaatgaggtgaccagtgatggtttattttctgttggagaaatggagtgcatgggttgctgtgtgaatgctcctatgattgctgtggctgactactcgaaaggctcagagggttacacatataactactatgaggacctcactccaaaacgagttgttgagattgttgagatgcttagagaggtgaacacccctcgaggacaagcaccagagcgaaaacttggcctgcggggggacacacttgcacgagagcgaactcct

SEQ ID NO: 66160 - DNA, 330 bp, Zea mays
cattgatcttggatacctcctatcaaatgctggattgcctgaatggagcagctcccaaattaggagccaggacgtccacactaatggccctgttcttgatgagacaatccttgcagatcctgagatagctgatgctattgagaatgagaaggaagtttccaaggcatttcaaatctataatgttgacagagctgtctgtggtcgggtagcaggtgtgattgcctagaagtatggagacacaggttttgctggccagctcaacatcacgttcaatggaagtgcagggcagtcctatggtagtatctgactcctggaatgaacatcggctag

SEQ ID NO: 66161 - DNA, 325 bp, Zea mays
gcaacatcgagcattctgtgattggagtctgctcacgtgtcagctctggatgtgaactcaaggactccgtgatgatgggagcggacacctatgaaactgaagaagaagcttcaaagctactgttagctgggaaggtcgcagttggaataggaaggcacactaagatcaggaactgtatcattgacatgaatgctaggattgggaagaacgtggtgatcacacacagtaagggcatccaagaggctgatcacccggaagaagggtactacataaggtctggaatcgtggtgatcgtgaagaatgcactcatcacgatgggctgtca

SEQ ID NO: 66162 - DNA, 317 bp, Zea mays
caactacaaaggttgctgtaggagataagatattgaagtagtgctaagtgcctaacacctgcagtgaacaatggcctctgcatcagcatctctgcccaagtctgcacttgttcttgacaagtctgattgggtgaagggacaaacacttcgtcaaccttctgctgcatcagttgtgagatgcaaccccaccaccccatcaggcctcaccatcagagctggttcctatgctgatcgactcgttaagaccgcgataacagtggcttcatcagggagtggtatgttggcatggatgagtccaatgtacctgtgggaagcgt

SEQ ID NO: 66163 - DNA, 310 bp, Zea mays
gagcatcatggcctcgagagcagtgctattgttcgctatgtgtgtgcttccggccatggctgtgtgcattcgcccagcaaagatccctttttgcgtgaagggtcgcgtctgctgtgacgcttgccgtgctggttgtgagacctcagcaaccacctacattgccggtgctgagattatgttgctatgcaagagcagggttagcaacgaggttgtgtacaccaagaaggggtacactgactcaactggagcatacacaatgtacgtggacgaggatcacgcagatcaaatatgcagtgccaagcttgtaagc

SEQ ID NO: 66164 - DNA, 316 bp, Zea mays
cgccatggcagccaagatgcttgcattgttcgctctcctagctctttgtgcaagcgccactagtgcgacccatattccagggcacttgccaccagtcatgccattgggtaccatgaacccatgcatgcagtactgcatgatgcaacaggggcttgccagcttgatggcgtgtccgtccctgatgctgcagcaactgttgggcttgacgcttcagacgatgccagtgatgatgccacagatgatgacgcctaactatgatgtcacattgatgatgccgagcatgatgtcaccaatggtcttgccgagcatgatgtcg

SEQ ID NO: 66165 - DNA, 312 bp, Zea mays
gcaacttggcgatggaggagaagcagatccagcagaacatccagatgagcgtcaacttccttgtttcccttctgaagaagaactggcagaatgtgagatgcctctacgtcaagagcaccatggggaagccatacagggtgttctaagtatgctcttttgtgaagtctgctaggttctggcaccgagggtttattgaattaaacttttgttaagagtatgtttttggacgatcctatatgtcgtcctggcgctactatgtttcagaatggtggtactactataagtatcctggcgctttaagtattgcttgac

SEQ ID NO: 66166 - DNA, 296 bp, Zea mays
gtgatgccaatgctgctctagagatcaacccagactctgcaaaaggctataaaactcgtggaatggcatatgccatgcttggcaaatgggaggaagctgctcatgatctgcacactgcatctaacatggattacgacgaggagatcaatgctgtgctcaagaaggtggagcctaatgctcacaagttagtggcacatcgcatgaagtatgagaggttgagaagagagagggaggattagagagcgcagatgatcgagctcgtcacgtgagaggcgcagctgcttacgacaggcgag

SEQ ID NO: 66167 - DNA, 162 bp, Zea mays
cagcaacatcagattcttccattcaaccaactggctgcattgaactctgctgcttatgtgcaacaacaattaccattcagccagctagttgctgcctacccccagcaatttcttccatgcaaccaactagcagcatggtactctgctgcttatctacagcag

SEQ ID NO: 66168 - DNA, 183 bp, Zea mays
gccacagggtggtcgatttggcacacctagtagcaagcaagtgaccacgggcagctacagcagggagtggagacccattggaggaattctgcgagacatagcttgcctgatgagcatgcaaagtatatgactagaggagagcgccttttgctgatttgatgattaccattaccagcagcaaac

SEQ ID NO: 66169 - DNA, 304 bp, Zea mays
cgactcagcgtagtaagctcggttggtgagaagctaactgatgaggaggtggacgagatgatccgtgaggctgatgtcgtggtgatggccagatcaactacgaggagtttgtcaaggtcatgatggccaagtgagccacagaaccataatctgaaggcagagaagattatgcattgcatattagtcaagatgcaactttttattccatcgacttctagtgaaacattctgctagttgtagttgctgaaaaaggaatgtagttcctgctttgttcttccctccatgtgttttcagactgttgttc

SEQ ID NO: 66170 - DNA, 343 bp, Zea mays
gtatttcaaacttgatctcacaaactcttctggtcctcctcaagagggttcctcctaagggaaaaaacttgcttgtcgttggaacaacaagcgaggttggcttcctagaatctgttggaatgtgtgacgtgttctctgtgacctaccatgttcccaaactgaaaaaggaggatgccaaaaatgtattgcatcatcttgatgtgttcgatgacggagatcttgacgcagcagcagaagcactggacgatatgccaatcaagaagttgtacacacttgttgagatggctgctcaggggccaaccggaggaagtgctgaagcgatttatgccggagagagaagata

SEQ ID NO: 66171 - DNA, 376 bp, Zea mays
gcctgtagcgtagtaactcggaatcggtcgagggacccaacaccatcttcgtcttcaagttccgcacccacttcgtgtaggcaagtccactggcttcggcctcatctacgataacctcgagtctgccaagaagttcgagcccaaataccgcctcatcaggaatggtcttgctactaaggttgagaagtcccgcaagcaaatgaaagagcggaagaacagggccaagaagatccgtggtgtcaagaagaccaaggctggtgacgccaagaagaagtaaacagtcatttatatttctgtattactgtcctgaactctgggtggtcgtctagttgcaatgtcataattatggtcgtgttaggtttgttccgcactcagc

SEQ ID NO: 66172 - DNA, 342 bp, Zea mays
cctccatcggcctccgatctctccacgagcctccgctccaatcgaggatccgcggcggcgggcagtggtcggccggcgatggcgcaccgagtggacaacgagtacgactacctcttcaagatcgtgctcatcggcgactccggcgtcggcaagtccaacatcctttcccggttcacccgcaacgagttctgcctcgagtccaagtccaccatcggcgtcgagttcgccacccgcaccctccagattgaagggaaaaccatcaaagctcaaatatgggatactgcggggcaagagaggtcacgtgcaatcacaagtgcttactacagaggaccgtgggtgcac

SEQ ID NO: 66173 - DNA, 338 bp, Zea mays
  unsure (1)..(338): unsure at all n locations
agcggcctttacaacgcgagcgagttctggatcggctgcgactctgcgagcggtggttccacggcaagtgcgtgcggatcacccctgcgaaagcggatcacataaagcactacaagtgcccggactgcagctcgaagaagatgaggcagtaggtgtaggtccccgcgtgatctgactgacccgtgtgatctgatccaaaccataactccctccgtttgtttgtctcaaggtcgcagctagcagatgtgaattccttcatttgtggggcttgtttatgtggtggtaggaagaggcaaaggactgatagatagagatacatgaccgttttctntatatat

SEQ ID NO: 66174 - DNA, 334 bp, Zea mays
ctctttttctgtaccagggcattgagccaagcattaggaggacatttggcccttcttactaggagtttatgatttgaatagctctgaagaggaaaggaactctgttaagataaagaaaaggaaagagtatgaaaagctgaggaggcagtgccaacaaattctgaatggctacaagggaaattcgttgaaggcaataactgaagttaataatgaggtgtgttctagtttagaaggtactgctgatggatcagaatcaccttgttttgaagatgccaatgctatacgtgctcctgtttcactcgaggagctgaagcctgaacagaatgaattgacc

SEQ ID NO: 66175 - DNA, 340 bp, Zea mays
  unsure (1)..(340): unsure at all n locations
atntagaccaactagcaacatagaaagcacaatagtgaccaacaatggcagccaatttatgttgcctccttatgctccttggtatttctgcaagtgctgctacggcgaccattttcccgcaatgctcacaagctcctttagcttcccttcttcccccgtacctctcaccagcggtgtcttcggtatgtgaaaacccaattcttcaaccctacaggatccaacaggcaatcgcagctggcatcttacctttatcacccttgttcctccaacaatcatcagccctattacagcagttacctttggtgcatttattggcacaaaacatcaggcacaacaacta

SEQ ID NO: 66176 - DNA, 332 bp, Zea mays
cttctggtggtttgtcagaggtcgaaattgagaagaggtgaaggaggcagagctacattctcagaaggaccaggaaaggaagtctcttattgatctcaagaactctgcagatactacgatctacagcattgagaagagtgtcagcgagtacaaggacaaggtccctgctgaagtcaccaaggagatcgagtctgctgtctctgatctgagggcagctatggctgaggatgatctggacaagatcaagcagaagctggaagcagcaaacaaggctgtttcaaagatcggagagcacatgcaacaaggtggtggtggcggcggcagctggtggc

SEQ ID NO: 66177 - DNA, 241 bp, Zea mays
ctgtttcgtttatgtgatatggacaagtatgtgtactgcttgcttgtgctagtgtaatgtagtgtagtggtggccagtggcacaacctaataagcgcatgaactaattgcttgcgtgtgtagttaagtaccgatcggtaattttatattgcgagtaaataaatggacctgtagtggtggagtaaataatccctgctgttcggtgttcttatcgctcctcgtatagatattatatagagtac

SEQ ID NO: 66178 - DNA, 307 bp, Zea mays
aagagcgcaaacgcgaccacagacagagcgcgcttcaggccttctttttttgagataacaaggaggagaggaggagatggcggtcacgatcacctgggtgaaggcgaggcagatcttcgacagccgcggcaaccccaccgtcgaggtggacgtgggcctcagcgacggcagctacgcgaggggggccgtacccagcggcgcatccactggaatatatgaggccttggagttgagggatggaggatctgattatcttggcaagggtgtacttaaggctgtcagcaacgtaaacaacattattggacca

SEQ ID NO: 66179 - DNA, 177 bp, Zea mays
cgagatcatccttgtggacgttgcccacaaagccacacaaccgacccgaggatcaactggctatgcaaccctgtgcacaagcaccgcgagctccgtggcctcacctcagcaggcaagaagtaccgtggcctgcggggcaatggccacattcaccacaagaacatgccctcaaggaga

SEQ ID NO: 66180 - DNA, 340 bp, Zea mays
  unsure (1)..(340): unsure at all n locations
ctcncgtcgcctccgcctccgccttcagtttagccccaagcaggggcgccgcgcggggtattctgtccgtcgttgagggtagagagtcacttgcaccgggggagcggagatgaagccggttgtggggatcgtggtgtcgaacaagatgcagaagtcggtggtggttgcagtggaccgtctcttccacaacaaggtatacaaccgctacgtcaagcgcacctccaagttcatggcacacgacgatgacgactcctgcaacattggcgaccgggttaggctggatccttctaggcccttgagcagacacaagcactgggttgttgcgaaattctccgcagag

SEQ ID NO: 66181 - DNA, 335 bp, Zea mays
atgtctcaaaaggatctcttagaattgccaacaacagttcaagacagtcaaaaatgactatgagttgtcactaaacgagaatgctattgttgaagaagcagagggggagactttccttccaccagtgcaatacaaccttgtcaagattgatcagctaggaccatacgtcggtggcagggagcttgtagatattgttactgtggttcagagcgtatctcccacactcagtgttaggagaaagattgacaacgagacaataccgaagcgtgatattggtgtagcagatgactctggcaacactgttactagttctctctggaatacttgctactacg

SEQ ID NO: 66182 - DNA, 336 bp, Zea mays
gtgctgttcgcaatgctggattaattgtcacatgattactgatcctatgcatggatacaccatcaaggccccttgtggtctgaagactcgtccattcgactcaattctggctgaagtgcgcgcattcttcgacgtgcatgatcaagaaggaagtcacccaggaggcatccaccttgaaatgactgggcagaacgtgaccgagtgcattggtggatcacggactgtgaccttcgatgaccttagtgaccgctaccacacccactgtgacccaatgctgaacgcctcccagtccctggagctcgccttcatcattgcagagagtcaggaagaggaggt

SEQ ID NO: 66183 - DNA, 338 bp, Zea mays
gcggctgcagctcagcagctccagacctcacccaggcacctaccacaccgcccgccgccgatcccgtcacccgtctcctccccgctgcggagcgtctccagccctgcccggtgcccgcccagatggcaaacgcggcgtcagggatggccgtggacgacgactgcaagcgccggttcctggagctcaaggccaagaggacgcaccgcttcatcatctacaggatcgacgagaagaagaagatggtggtggtggagcaggtgggcaagcccgtgctcggctacgacgacttcgccgccagcctccccgccaacgagtgcaggtaccatcttcgactacga

SEQ ID NO: 66184 - DNA, 313 bp, Zea mays
gcaacatagaaagtggaatccagtagcaacaatagagcgacaatggagaccaagatattttccctccttatgctccttgctctttctacatgtgttgctaacgcgacaattttccctcaatgctcacaagctcctatagcttccctttttcccccataccttccatcaattatagcttcagtatgtgaaaacccagctcttcaaccatataggcttcaacaagcaatcgcagcaagcaacatacctttatcgcccttgttgtgtcaacaatcgccagccctatctttggtgcagtcattggtacaaaccatca

SEQ ID NO: 66185 - DNA, 334 bp, Zea mays
ccaagcacctccctaatccagattgagaatgtaactctaaggaagaagttgcgtggtactgtgggaagcgcatggcttacatctacaaagcgaaggtaaagaagaacggaagccactatcgctgcatttggggtaaggtcaccaggcctcatggtaacagtggtatagttcgagctaagttcaagtccaatctgccacctaggtcaatgggtgcaagggttagagtattcatgtatccaagcaatatatgagatattaagtgtaaaacctttctgcttgagcctactcctttatccgtggagatatgctccaatattccaggattcgtgtgtcg

SEQ ID NO: 66186 - DNA, 327 bp, Zea mays
aatcccgcgatctgaagcgactagtcgaaggggcggcggcggcgatggtggagcgacctggagacggagaagaagaagaccccggtggcgctgatgcccatcgcgaacctctcgctggaaagaagctctgcaagcggaccctcaagctcgtgcgacgagcctctgaggccaagtgcctcaagcgcggagtcaaagaggtagtcaagagcattcgccgcgggaacaaagggttgtgtgtgattgctggaaatatttctcctattgatgtgattacacacgttccaatactatgtgaggaatctaatgttccttacatatatgtccatc

SEQ ID NO: 66187 - DNA, 334 bp, Zea mays
ggactaattggtatataccatgattggtgtgatcatttggcacttatccaagaacatatgaccttttgcatgctgatcatttgttctcacggctcaaaaacaggtgcaagcagcctgtgaccattgttgtcgagatggaccgtatattacggccaggaggttggataattatacgtgacaaagttgaaattctaaatccgttggaggaaatattgaaaagtatgcagtgggagattagaatgacttttgctcaagacaaggagggtatcttgtgtgcacggacaactatgtggaggccttgagtctctattatatgcaattcctcttgtataac

SEQ ID NO: 66188 - DNA, 331 bp, Zea mays
aagcgaacgcactagcaacgacctaacaccatggctaccaagatattagccctccttgcgcttcttgcccttttagtgagcgcaacaaatgcgttcattatcccacagtgctcacttgcttctagtgccagtattccacagttcctcccaccagttacttcaatgggcttcgaacatccagctctgcaagcctacaggctacaactagcgcttgcggcgagcgccttacaacaaccaattgcccaattgcaacaacaatccttggcacatctaaccctacaaaccattgcaacgcaacaacaacaacaacagtttctgcatcactgagcca

SEQ ID NO: 66189 - DNA, 235 bp, Zea mays
agactggcaagccaggttccgctgtccttcgttagtacggggaaagaagaagaagaagaagcccaggccggagaaccatcgcctgcatttcgatctgtttcaccgcaattcgcattgttagtactgtattggagttatgtgtacttggtttccaagaactttggttccttctcgttttttttccttgtttgatcgattttgggcagcgctggcctggttcctagtatggtgggaa

SEQ ID NO: 66190 - DNA, 276 bp, Zea mays
tcacaacccagtcgctcaaaaccctagagctctcgcctgctcgcctccgccgccggagcgagctccccatcttcatccgtcaaccatggcgacccagatcagcaagaagaagaagttcgtcagcgacggtgttttctacgccgagctcaatgagatgctgacgcgggagctggcggaggatggctactctggcgtggaggtgcgcgtcacgccgatgcgcacggagatcatcatccgcgccacgcgcacgcagaacgtgctcggcgagaagggccg

SEQ ID NO: 66191 - DNA, 261 bp, Zea mays
  unsure (1)..(261): unsure at all n locations
agganattgacccgactttctctgggacacgtgaatacaagcttttagctgatcttgctgcatctatggatgaaggggatgttgccanattcactgatgcaatcacagaatttgatagcatgacacgtctggatccttggaaaaccaccctgctgctcagggcgaagaacgagctgaagaaaaaggaggacgatgaggacgaccttacataagtattgtagtaaaaagacatggtacgatatgtcttggtttgtgcctcca

SEQ ID NO: 66192 - DNA, 159 bp, Zea mays
gtcatcgcggcactgggcaggctatgatgatcaaaggtgactggatcaagccaggtgctgcggtcatcgatgtcgggacgaactccatcgacgaccctacccggaagtccgggtaccggcacgtcggcgatgtggatttcgcagcggcgagcaaggttg

SEQ ID NO: 66193 - DNA, 177 bp, Zea mays
aaatccttcaacaggagagtggtacacgggcaggcgcatcttgattcatccacagtggacaatatgaggaggcttctggagcatgctggtgttcctgggcacatatatccactatcattactgtgctacgatgttatgcctccagcacaacaggtcgagatagagattggtgaacag

SEQ ID NO: 66194 - DNA, 188 bp, Zea mays
  unsure (1)..(188): unsure at all n locations
caaccctgagagagctgttgaatatttgtattccggcataccagagcaagctgaagctccacctgttacccgagagcctgcaagtgctcaacctgcanatcctccagctgctgctccacaggcagcacaaccagcatctgttccctctagtggacctaatgccaatcctttagatctccttccccagg

SEQ ID NO: 66195 - DNA, 196 bp, Zea mays
cacgacagaaggaaggtacaagggaaggaagttcagttcagtatgtcatttctttggatatcaggctcgaggatctacaccatcaaatttcgactgtgactatgcttatgctcttggacgtatctccctgcatatgattgcagttggattgactggctacatggcactgtggctaatctgaaagaccctgttgaca

SEQ ID NO: 66196 - DNA, 230 bp, Zea mays
aagaaatccaccgccaaactccaagactccacgtcggtgaggaagatagtgaatctggacgaccacattgcgctggcctgcgcggggctgaagtgcgacgcacgcgtgctcataaacagggcacgtgtggagtgccagagtcacaggctcaccgtggaggatcccgtcacggttgagtacataacgcggtacattgcggggctccagcagaagtacacgcagagcggcgg

SEQ ID NO: 66197 - DNA, 215 bp, Zea mays
gtaccagaagagcactgagctgctcatccgcaagctccccttccagcgcctggtccgcgagatcgcgcaggacttcaagacggacctgcggttccagtcgtcggcggtggcggcgctgcaggaggccgcggaggcgtacctggtggggctcttcgaggacaccaacctctgcgccatccacgccaagagggtcaccatcatgcccaaggacatcc

SEQ ID NO: 66198 - DNA, 215 bp, Zea mays
cacgagggttaattcttcaaactacgatccaatgaacgcctggacccatggtgcgcagatggttgcgttcaacatgcagggccatgataaagcgctccggttgatgcaagggtttttcagagccaatgggggctgtggttatgttaaaaagcctgacttcttgctaagaacaggtccaaatggggaagtatttgaccccaaggctagtttgccag

SEQ ID NO: 66199 - DNA, 212 bp, Zea mays
  unsure (1)..(212): unsure at all n locations
agtacctaatgtanaaaagcagcatgaagtgaacgttggcatctcaaattcttttggatttggaggtcacaattctgtcgtagtatttgcgccataaaagccataaggtgttcctggcctcacaaaccttggtcagaacaacgaggatctttaggagtttctgcgttcaattttcatgtgttctctttaggggaagttatgtcagatctgag

SEQ ID NO: 66200 - DNA, 157 bp, Zea mays
tccacagctcgcagccgtattcctgtctcgtatcctctctcgccgctccgatggcccgcacgaagcaaacagcaaggaagtcgaccggcggcaagtttccccggaagcagctggccactaaggctgcgcgcaagtcggccccggccaccggcggcgt

SEQ ID NO: 66201 - DNA, 150 bp, Zea mays
gcaacatagaaagtggaatacagtagctaaaatagagcaacaatggcggccaagatattttccatccttatgctccttgctctttctgcatgtgttgctaacgcgaccatttttcctcaatactcacaagctcctatagctgcacttctt

SEQ ID NO: 66202 - DNA, 156 bp, Zea mays
aagagagttgggtacaaccctgataagattgcctttgttcccatttctggttttgagggtgacaacatgattgagaggtccaccaaccttgactggtacaaaggcccaaccctgcttgaggctcgttgacagatcaccgagcccaagatgccttca

SEQ ID NO: 66203 - DNA, 240 bp, Zea mays
cactggtggctcttctcctgcagtgttcaatgctgcacggctcatgtctaccaagctatttattggtggtcttgactggggtgttgctgacgtgaaactaagagaagcatttagcagctttggagaggttactgaagcgagggtgatcacagacagggagactgggaggtcaagaggctttggctttgtgaactactccgacagtgatgctgccaaggaagctatttctgcaatggatgg

SEQ ID NO: 66204 - DNA, 196 bp, Zea mays
  unsure (1)..(196): unsure at all n locations
caactagcaacatagaaagcacaatagtgtaccaacaatggcagccgaaatattttgcttccttatgctccttggtctttctgcaagtggtgctaccgcaaccattttcccacaatgctcacaagctcctatagcttcccttcttaccccatacctctcaccagcggtgtcttcaatgtgtngaaacccattgttc

SEQ ID NO: 66205 - DNA, 186 bp, Zea mays
tggcaatcgcagcaggcatcttacctttatcacccttgttcctccaacaaccgtcagggctattacagcagttacctttggtgcatttgttggcacaaaacatcaaggcacaacaactacaacaacttgtgctaggaaaccttgctggctactctcagcaacagcagtgtcttccattcaaccaac

SEQ ID NO: 66206 - DNA, 152 bp, Zea mays
  unsure (1)..(152): unsure at all n locations
gttggtggtcatttgcttccatctactgcccagactaaaccacaaggaggtgaggttgttgctgttggagcaggaaggaccatcggggacaagaanatagctgtggatatagagactggagcacaagtagtatactcaaagtatgctgggac

SEQ ID NO: 66207 - DNA, 165 bp, Zea mays
gccaaggcgaggctggcgtccaaggcacgcgacatcaaggatgcagcacagcaccgcatcgaccaggcgcaggggtcttgagagaagaacacactcgagcggaccgcgcgcgcgacctccttgaaccactgccggcgcggcggcatatggcccttaaacgcggtg

SEQ ID NO: 66208 - DNA, 250 bp, Zea mays
gcgatcactggacctcaaagtgtccgtacaaggacctggcaccaccgactgaaactttcacggacaggcctccaacgtcagatggccctcctgcaccaggtggtcctgctaagggagcatatgttcctccaaccatgagaggaggtgctgataggactggagactcgatgcgccgcaggaacgacgagaattccgtccgtgtgaccaacctctcggaggacacccgcgagcctgacctccttgagctctt

SEQ ID NO: 66209 - DNA, 151 bp, Zea mays
  unsure (1)..(151): unsure at all n locations
cactgataaggagaccaccacccaaggccatgacgaccttggcaagcgttgcgccaagtactacgaggcaggtgcccgctttgccaagtggcgcgctgttctcaagattggcnctaatgagccatcacagcttgccatcgacctgaacgct

SEQ ID NO: 66210 - DNA, 149 bp, Zea mays
  unsure (1)..(149): unsure at all n locations
tgaaccatgtgtgagcaccggtagtgccttcaaagttagtggtgcgacatcaaccgaatggccagctaaggacgacaaggaatcgaagcgtgaaaggaggaagcagtcanacagggagtctgcccggcgctcaaggctgaggaagcagg

SEQ ID NO: 66211 - DNA, 121 bp, Zea mays
agaacgtagcaaaatgcgatacctggtgtgaattgcagaatcccgcgaaccatcgagtttttgaacgcaagttgcgcccgaagccttctggcggagggcacgtctgcctgggcgtcacgcc

SEQ ID NO: 66212 - DNA, 175 bp, Zea mays
  unsure (1)..(175): unsure at all n locations
atcatccaggagtccgacatcatgaaggaggacgacagcaactggcccgagcccgaccgcatcggccgccaggagctcgagatcgtcatgggcaacgagcacatttcattcaccgattccaagatncggctcctcgtcgatgtccagtccagcaangatcccggaggcctccgga

SEQ ID NO: 66213 - DNA, 219 bp, Zea mays
tcttgacacaacgattatattcacagaggaccacattagccaagattatttacgccctcgcttgctaagaagtatgaggaactgtatcagcaaaatggtgtccaattcataaagggagctcttatgcgaaaacttggagctggctctgatggaagggtgtcttctgcagtacttaaggatggatctgtagttgacgctgatacagtaattgttggtata

SEQ ID NO: 66214 - DNA, 200 bp, Zea mays
atctcatacttcggctcgagcaacaaatgcgttcattattccacagtgctcactgtgtctagtgccagtattccacagttcctcccaccagttacttcaatgggcttcattgatacagccgtgcaagcctacaggctgacactatggcttgcggcgagcgccttacaacaaccaattgcccaattgcaacaacaatcctt

SEQ ID NO: 66215 - DNA, 207 bp, Zea mays
ctggctcacttctccaggaaagtgttcgtctcatggcgccgcgcagccgaagtcgggcctcttcgtgggcatcaacaagggccatgtcgtcaccaagcgcgagctgcctctgcgcccgtcccaccgcaaggggaaagcaacgaagagggtgtccatggtcaggggcctgatcagagaggttgctggctttgctccttatgagacgcg

SEQ ID NO: 66216 - DNA, 267 bp, Zea mays
gctcaggataatggtttagtgccaattgtggagccagagattcttcttgatggagaccatgggatcgagggagctcttgaggtggcagagaaagtgtggtctgaggtgtttttctacttagccgagaacaatgttctgtttgagggtatcctgctgaagcctagcatggtcacccctggagctgagcacaaggagaaggcttctccagaagccattgcaaagtacacgctaacaatgctcagaaggagagtacctcccgctgttcct

SEQ ID NO: 66217 - DNA, 263 bp, Zea mays
agacgaagagcgtggagtacatgccgctgttcctgtcactggcttccctggtgaacggcatctgctggaccgcctacgcgctcatccgcttcgacctctacatcaccatccccaacgggctgggcgtgctgttcgcgctggcgcactgctcctgtacgccatctactacaagaacacccagaagatcgtggaggcacgcagccgcaaggcgggccaggtcgccatgacggaggtggtcgtcgacggcagcagggcctccaaca

SEQ ID NO: 66218 - DNA, 220 bp, Zea mays
attgaaggcagccatagaaaaggcggctacactggaaaggtggtcattggaatggatgttgctgcttctgaattcttcggtgagaaagacaagacttatgatcttaatttcaaggaggagaacaacgatggctcaaacaaaatttcaggcgacagcctgaaagacctgtacaagtcctttgtttctgagtaccctatcgagtcgatcgaagacccatttg

SEQ ID NO: 66219 - DNA, 164 bp, Zea mays
agaaagctttgacgtaatcaattcagatcagagcctctcgctgcatatatatttacaaataccaagaagcttaaggagcaatttgttatgactatgtcagctggcggtttggttgttaatgacactactccacatcttgcagttcatacttgaccatttggggg

SEQ ID NO: 66220 - DNA, 191 bp, Zea mays
  unsure (1)..(191): unsure at all n locations
cagcattcanaaacacaccaagcgaggcactagcaacgacctaacaccaatggctaccaagatattagccctccttgcgcttcttgcccttttagtgagcgcaacaaatgcgttcattattccggagtgctcacttgctcctagtgccattattccacagttcctcccaccggttacttcaatgggcttcg

SEQ ID NO: 66221 - DNA, 183 bp, Zea mays
ctcgctttggatcgattggtttcgtactggtgagggactgaaggtctcggagtggattgatttgggattctgttcgaagatttgcggaggggggcaatggcgaccgcggggaaggtgatcaagtgcaaagctacggtggcatgggaggccggcaagccactgtcgatcgaggaggtggaggta

SEQ ID NO: 66222 - DNA, 136 bp, Zea mays
ctaagagtgtcttggacattcaaaattgagggagcgtaagatagagtatgacttgaagacagcaatatctttggttaaagaaacagctaaaaccaagtttgtagaaacagtagaagcccatttccacacaacatac

SEQ ID NO: 66223 - DNA, 357 bp, Zea mays
tgttgttgggaatttttaaattgttgaagtttacagttaaagaggttgacacaactacgggggaagctgatgaggatggtgtggaggatgaataccagttagaggactttgaaattgtttcagctgattatatgctgagggttgttgtctccaacttcaggaacgcctgggaaaatatggacccagatagtgagcgcgtcgatgagtatggactcggggttagagaaagtttggctgaggctgtcaatgctgtcattaatatccttggaatgcagccgtgtgagggcactgaggttgtaccgaaaaatgcaagatcgcacacctgccttctatctggtgtatttattggcaacatga

SEQ ID NO: 66224 - DNA, 201 bp, Zea mays
caacaagcgacatagacagtgaatccagtagcaacaacagagtaacaatggcgaccaagatattttccctccgtatgctccttgctctttctgcatgtgttgctaacgcgacaattttccctcaatgctcacaagctcctatagcttcccttcttcccccataccttccatcaatgatagcttcggtatgtgaaaacccag

SEQ ID NO: 66225 - DNA, 204 bp, Zea mays
gacaggggtggtggctgcttcgagagttaataatttgtttatgtccagaacatcatagattggcgcagcagcagactagcaaattactcatatcatataagaagatggcccgttctctctcgcaagccagacgtattggtgtccttgttgctcaatctatctccctaattcacgttcatcggcgaggttacgcagtggcatccg

SEQ ID NO: 66226 - DNA, 160 bp, Zea mays
ctgcaaggcccgagagatactagctcagtggctcagtcagcatccgaagcttcggatcccacaccgaggaaattaaaggagaagagagggtcggaataatggcggccgaggagggtgcggtgatcgcgtgccacaccaaggacgagttcgacgcccgcat

SEQ ID NO: 66227 - DNA, 253 bp, Zea mays
ttaatttcaagaggagaacagatggctcaaacaaattcaggcgacagctgaaagacctgtacaagtcgtttgtttctgagtaccctatcgagtcgatcgaagacccatttgatcaggatgactggtgcacttatgccagactcactgatgagcttggacagaaagtgcagattgtaggagatgatcttctcgttaccaaccccaccagggtcgccaaggccatcaatgagaagacctgcaatgctctcctctt

SEQ ID NO: 66228 - DNA, 157 bp, Zea mays
gattttagccgccgccgctgctatctcacatccctcgagaagacgcctgctcctcgccgatcgatacgatggccgtcttctccgacctccacaccgccgacggcctcaagtccctcgaggctcacctcgccggcaaaacctatgtgtctggtgactc

SEQ ID NO: 66229 - DNA, 341 bp, Zea mays
  unsure (1)..(341): unsure at all n locations
gcatagtccaatgtatggtgtctggatgactcttctggtttattgcaaaatacaggagagaatgatctgacaactagaacattcgttaaggtttacaagtcaggatcggtggggagatccttggacatcacccggttctctaattatgctgaacttcgagaagaactgggtcagatgttcggcattaagggtcagttggatgaccctgatagatcaggctggcagcttgtatttgtcgacagggagaacgatgtgcttctccttggagacgacccctgggagtcatttgtgaatagtgtatggtacatcaanatactttcacctgaggatgtgcataagat

SEQ ID NO: 66230 - DNA, 296 bp, Zea mays
  unsure (1)..(296): unsure at all n locations
gtactgaaacaacgtcttgctccttggggcatcagaacctgagagaaggcactgttattgtcgaatcctggaagtccttgtaaatgtctgggcttatcacagtggaaggaagatggtctaccttaaccctttcactggggataccagtgagcagcatctgctcgataagagaaatgggatgtgggtaaagttcttcaatttcacccttctgaagagcatggatgaggatctggcagaagaagctgatgatggcatgcatcctggganagagcagtggctgtggccattgactggtc

SEQ ID NO: 66231 - DNA, 162 bp, Zea mays
cgccgtgatcgacgagctagagaagaacctgcagctgagccccgcgcacgtggaggcgtcacggatgacgctccaccggttcggcaacacctccagcagctccatctggtacgagctcgcctacatggaggccaagggccgcgtccgccgcggccaccgcgt

SEQ ID NO: 66232 - DNA, 212 bp, Zea mays
cgccgtgatcgacgagctggagaagaacctgcagctgagcccgcgcacgtggaggcgtcccggatgacgctccaccggttcggcaacacctccagcagctccatctggtacgagctcgcctacatggaggccaagggccgcgtccgccgcggccaccgcgtctggcagatcgccttcagcagcgggttcaagtgcaacagcgccgtgtggca

SEQ ID NO: 66233 - DNA, 169 bp, Zea mays
ggcaaagttcagcgctgcgtgactcgaaggacagcattgacatgaccgcaagtgaactacagaagaaccctatcaactatacacagattgctgtgctcgcggatgacatattgaaaaatgtggaatatgatgctctgagggttattttcaactagttccattctgtcat

SEQ ID NO: 66234 - DNA, 163 bp, Zea mays
accgattgagcacggattgtgagcaactgggatgacatggagataatctggcatcatactttctacaacgagcttcgtgttgccccagaggagcaccctgtgttgctcaccgaggctcctttgaaccccaaggccaacagggatgagatgacccaaattatgt

SEQ ID NO: 66235 - DNA, 352 bp, Zea mays
agaaaactagataagctcctcccgaccgcaacgcccctcatctccctcgaccccgacatccccgacccgatggcgcccaaggcggagaagaagccagcggagaagaagccggcggccgaggagaaggcggagaagacgaccgcaggaagaagcccaaggccgagaagcggctgcccgcgtccaagtcctccggcaaggagggcggcgagaagaaggggaagaagaaggccaagaagagcgtggagacctacaagatctacatcttcaaggtgctgaagcaggtgcaccccgacatcggcatatcctccaaggccatgtccatcatgaactccttcatcaacgacatctttga

SEQ ID NO: 66236 - DNA, 292 bp, Zea mays
ctttccccagactatcccaacagcccgccatcagtaagatttacatctgggatgtggcatccgaatgtttatccggatgggcgtgtttgcatttctattcttcatccacctggtgaagatcccagtggttatgagcttgcaagcgaacggtggacaccagtgcacacggttgaaagtatagttctgagcatcatttcaatgctctctagtccgaatgacgagtctccagcaaatattgaagctgccaaggattggagagagaagcgggatgagttcaagaagaaggttaggc

SEQ ID NO: 66237 - DNA, 183 bp, Zea mays
ctgtctacctcgagctgtcctcgagtacctcgccgctgaggtcctggagcttgctgggaacgcagcgagggataacaagaagacccgcatcgtgccgcgtcacatccagctcgccgtgcgcaacgacgaggagctgaccaagctgcttggtggtgcccacatcgcgagcggcggcgttatgcc

SEQ ID NO: 66238 - DNA, 270 bp, Zea mays
gggcgccattgaggcagaagttagcaagcagtgcaacgcgcttccaagaggtgaattcgcttcagaagcacttagccacagcttcactgtgtgcgcgaaagatatggttgaggcgatatcattctcaaatctgtatgcccctgagcatttgatcatcaacgtaaaggatgctgagcagtgggaggagttcatcgaaaacgcacggtcagttgtcttgggccaatggaccccagagagcgtgggcgattatgcgagcgggacgaaccatgt

SEQ ID NO: 66239 - DNA, 115 bp, Zea mays
ctttccccagaactatcccaacagcccgccatcagtaagatggacttctgggatctggcatccgaatgtttatccggatgggcgtgtttgcatttctattcttcatccacctggt

SEQ ID NO: 66240 - DNA, 179 bp, Zea mays
gctggaagctacacagccagcagagttccagaggtgtatggtgccactttttcgtcagatctcgcgatgtttaagcagttctcactttcaggtggcagaaagagcgctcttcctatggaacagcaatcacatcgagggtgtgatcaaacacaacagcaaggttatactgcccgtagtcc

SEQ ID NO: 66241 - DNA, 100 bp, Zea mays
cgaccattttcccgcaatgctcgcaagctcctatagcttggcttcttcgcccgtacctctcacgagcggtgtcttcggtatgtgagtacccaattcttca

SEQ ID NO: 66242 - DNA, 178 bp, Zea mays
ggagaccggcgccctcctcttccctgccattaacgtcaacgattccgtcaccaagagcaagtttgacaacctgtatggttgccgccactcactccctgatggtctgatgagggccaccgacgttatgatcgccggtaaggttgccgtggtctgcggatacggtgatgttggcaagggt

SEQ ID NO: 66243 - DNA, 178 bp, Zea mays
  unsure (1)..(178): unsure at all n locations
catcagtcagtatattgccaacatgataaggtttctggtggatagctacaacaagcccgtccctgctattctggagatcccatccaatgaccatccatatgatcctgcgcacgactcggtgctctctcgagttaaatatctgttctctgcagtatcggtggcgtctgatangcgatga

SEQ ID NO: 66244 - DNA, 178 bp, Zea mays
agacaattcagtatcttattggctctggaatggatcctaggactgaaaataatccttatcttggtttcatctacacctacttccaagagcgggcgaccttcatctcgcatgggaacactgctcgtcatgccaaggactttggcgacttaaagctcgcacaaatctgtggcatcatcgc

SEQ ID NO: 66245 - DNA, 138 bp, Zea mays
  unsure (1)..(138): unsure at all n locations
agaanacgagcttgccgatgccaaatttgcctggctttgcgcaaaacatgtcaagagcaacgcaattgtgatagccaagaacaactgcatgctgggaatgggcagtggtcagccgaacaggcgagagagcgttcgaat

SEQ ID NO: 66246 - DNA, 338 bp, Zea mays
gcggcgagttcagatcccacaatcttcttgtagcacaccactgtcttcgtccaactcggcggcgatgtctgggcgcggcaagggcggcaaggggctgggcaagggcggcgcgaaacgccaccgtaaggttctccgcgacaacatccagggtatcacgaagccggcaatccggaggctggcgaggaggggcggcgtgaagcgtatctccgggcttatctacgaggaaacccgcggcgtgctcaagatcttcctcgagaatgtcatccgcgacgcggtcacctacaccgagcacgctcgccgcaagaccgtcaccgccatggaatttgtgtacgccctca

SEQ ID NO: 66247 - DNA, 144 bp, Zea mays
gaatgaagttgtcacttgggaatgacattgagatactatgcctacacacgccttaccacactaaaggtcatatcagctactatgttactagtaaggagggtgaaatccagcggtcttcaccggagataccttgttcattgctgg

SEQ ID NO: 66248 - DNA, 340 bp, Zea mays
caaaggttctggatcgtggagagaagattgagctgcttgtcgacaagaccgagaatcttcactcacaggcacaagatttcagacagcagggaacaaatgtcaggagaaagatgtggttacagaacatgaaaatcaagctcatcgtcctgggaataatcatcgcactcattctgatcattatcctctctgtctgtcatggtttcaaatgccattaagcacagaccagaatactgatacattcaactgcacctattatactgctgcttggagcaaaaaaaagtatgatcttttgtagtgtcgctagtgtgctgtggcccggtcattatgcataggtgtttta

SEQ ID NO: 66249 - DNA, 347 bp, Zea mays
cggtcgaagcccagtaaccttacttacagaaggtgttaaagttagtccagcagtgttgcagtctgctggtttgaacttgaaacaggtatacacaaggtcattcattgctgcattctgctcccatgcataccaacaggtatcatacatgatcctcgccagggtatcctcagtcacacattcagtgggcaattgcgtcaagcgtgtggtggtcattgtgacctctgttctgttcttcaggacccctgtttctcccatcaactctcttggtaccgggatcgctcttgctggagtttcctatactcgcaattgaagagacttaagcccagcccaagactgcttgatcatat

SEQ ID NO: 66250 - DNA, 188 bp, Zea mays
gcaaatacatgggtagtcagtggagtaccccagacaaaaagtctacaagaccttctgccaacaattatcaaccaactgggccctgataacctggagaacctcaagaggcttgctgagcatttccagaagcaggtacctggtgccgaagccagcgccagtgcagctgcccaggatgaggacgatgtccc

SEQ ID NO: 66251 - DNA, 336 bp, Zea mays
caaacctacagttctgattgggacgtctggagttggaagaacattcacaaaagaagttgttgaggccatggcttccttcaatgagaggcctatcatcttttcactgtcaaatccaacctctcattctgaatgtactgctgaagaagcatataactggactcagggtcgtgcaatatttgccagtggcagtccatttgaccctgtggagtacgatgggaaggtttttgtacctggacagtcgaacaacgcctacattttccctggattcggcctcggtcttgttatctctggagccatccgtgtccacgaggacatgcttcttgccgcctcggaagc

SEQ ID NO: 66252 - DNA, 126 bp, Zea mays
  unsure (1)..(126): unsure at all n locations
ganacacacctagcgaaggtactagcaacgacctaacaacaatggcttccaagacattatccctccttgcgcttcttgccctagttgtgagtgcaacaaatgcgttcattattccacaatgctcac

SEQ ID NO: 66253 - DNA, 335 bp, Zea mays
tatcctctcctctgtccctctacggtgcttctgctcgccggcccaaaatcgcctcatcgaccacgcccccttccaggctcccgtctccatgggtctcctctcaaacaggattgggagggagagcctcaaggcgggggatcatatctactcctggagggcggcgtgggtctacgcgcatcacggaatatatgtgggcgatgataaggtgatccatttcacaagaggaagaggacaggaggtcggaacaggaactgtcgtcgatattattcttgtgagtccaccccaaaacgaagcaacacgcctatcccggtgtgcaccgacgaaaccagcgacag

SEQ ID NO: 66254 - DNA, 144 bp, Zea mays
agagaacaagaacataagggaccacagcggcggtaacagaagaacaagcagagaatgggtcgagtgagaacgaagacggtgaagaaatcctctcggcaggtgatagagcgtcactactcgcgcatgaccctggacttccacaca

SEQ ID NO: 66255 - DNA, 166 bp, Zea mays
atccaagcaactacaagcaatctggtattattccgctgcttgatcttgcacagcagcagcatggtggatgggtgccagttgcagcaatggatgctattgctaaaatcgtcgaagttgcaccaatcagggtttatgaagttgcaaccttttataccatgtttaacag

SEQ ID NO: 66256 - DNA, 101 bp, Zea mays
gcaaatactactaccatttagccagctagctgcggcaaaccgtgcttccttcttgacacagcaacagttgctgcctttctaccagcagtttgcggctaacc

SEQ ID NO: 66257 - DNA, 333 bp, Zea mays
agcaaatcgccaattcctccgagttcgagcgaccatgtcggggcgtggcaagggcgggaagggtctgggcaaaggcggcgccaagcgtcactcgcaagttctccgcgacaacatccagggcatcacgaagccggcgatccggaggctggcgaggaggggcggcgtgaagcgcatctcggggctcatctacgaggagacccgcggcgtgctcaagatcttcctcgagaacgtcatccgcgacgccgtaacctacacggagcacgcccgccgcaagaccgtcaccgccatggacgtcgtctacgccctcaagcgccagggtcgcaccctctacgg

SEQ ID NO: 66258 - DNA, 97 bp, Zea mays
caaacctcttcgttccttcgattcattccatttcttccaaaatggccaaagacccagttcgcgttctcgtcactggagccgcagggcaaattggata

SEQ ID NO: 66259 - DNA, 310 bp, Zea mays
  unsure (1)..(310): unsure at all n locations
cgagcacgtctacatctcctccctagcgcttctcaagatgctcaagcacgggaaggctggggtgctcatgtaagtcaaacagctcatgctcggcgagttcgtcgacgactacaccgtcagggtcgtcgacgtcttcgccatgccgcaaagtgtgactagtgtcagcgtcgaggccgtagaccacgtcttccagacaaacaagcttgacatgcttaagcagaccggcaggccagaaatggttgtaggttggtatcactcacatcctggcttcggatgctgtctatcangcgtcgatatcaatactcagcag

SEQ ID NO: 66260 - DNA, 344 bp, Zea mays
attcggctcgagctcttccatacgaccatatcctacctccaaattcccaattgtcaacctctcctcagagttcgagtgaccatgtcggggcgcggaaagggcgggaaggggctgggaaagggcggcgcgaacgtcaccgcaaggtcctccgcgacaacatccagggcattacgaagccggcgatccggaggctggcgagaaggggcggcgtgaagcgcatctcggggctcatctacgaggagacccgcggcgtgctcaagatcttcctcgagaacgtcattcgcgacgctgtcacctacacggagcacgcccgccgtaagaccgtcaccgccatggacgtcgtc

SEQ ID NO: 66261 - DNA, 335 bp, Zea mays
ttcggctcgaggcatctgcttccagagccccccgccgccgctgcgccctcctctcggtcctgccgtccgtcgaggtaaaaggacagcatggtgagggtcagcgtgctcaatgatgctctcaagtccatgtacaatgctgaaaagatagggaaacgtcaggtcatgatcaggccgtcatccaaggtgatcatcaagttcctgacggtcatgcagcgccatggctacattggcgagttcgagtacgtggatgaccacagagctgggaagatcgtggtggagctgaatggaagactgaataaatgtggtgttattagcccacgttttgatgtaggtgt

SEQ ID NO: 66262 - DNA, 329 bp, Zea mays
  unsure (1)..(329): unsure at all n locations
ggcggcgcacatcgctaccaccgtccaaagatggtgaagttcctcaagcccggcaaggccgttatcctcctccagggccggttcgccggccggaaggcntgatcgtgcgcgttttcgaggagggcacccgtgatcgtccctacgggcactgcctcgtcgcgggcctcgccaagtaccccaagaaggtgatccgcaaggactccgccaagaagacggccaagaagtcccgcgtcaagtgcttcatcaagctcgtcaacttcacgcacctcatgcccacccgctacaccctcgacgtcgactttaaggacgtcgcatcgggcgggcccgac

SEQ ID NO: 66263 - DNA, 334 bp, Zea mays
aacgaaagaaggaaggtacaagggaaggaagttcagttcagtatgtcatttctttggatatcaggctcgaggatctacaccatcaaatttcgactgtgactatgcttatgctcttggacgtatctccctgcatatgattgcagttggattgactggctacatggcaactgtggctaatctgaaagaccctgttgacaaatggagatgtgctgctgctcctttaactgcgatgatgagtgtgaagaggcatttacgtggccctggagcaatccctatagggaggccttccattcacccttctccaattgacctgaaagggaaggcttatgagttg

SEQ ID NO: 66264 - DNA, 350 bp, Zea mays
aatcggctcgaggcagcagatcctcgtgcgaagaaagcgctagcccttcgtactgtcccgatggcccgcacgaagcagacggcgaggaagtccactggcggcaaggcgccaaggaagcagctggccacgaagacggcgcgcaagtctgccccggcgaccggcggagtgaagaagccccaccgtttccgccccggcaccgtcgcgctccgggagatccgcaagtatcagaagagcacggagctgctgatccgcaagctgccgttccagcgcctggttcgatgagatcgccaggacttcaagaccggacttcgctatcagagctccgccgtcgctgcgctgcaggaggcgtc

SEQ ID NO: 66265 - DNA, 302 bp, Zea mays
cctcgatttccccttaacacagcacagaggaagcaggcggcggcgatggcatggagggcgagcctgtctcggagcctaaaggagatccgcgtcctcttctgtcagttctccccggccagcgccgctgcccgtgagttcgtgaagaagaactatggtgacatcaaggcccgcaacccctccctccccttccttgtccgcgagtgctccggtgtcccgccccagctctgggcgcgctacgatatgggtgtggagagatgcgtgaacttggatggcctgacggaagcacagattgataataagct

SEQ ID NO: 66266 - DNA, 323 bp, Zea mays
cgaggcgaggagagcgtgaaagacagggcaccggcagcgacgatgtcggggcgcggcaagggcggcaaaggtctgggcaagggcggagcaaagcgccaccgtaaggtgctccgtgacaacatccagggcatcaccaagcccgcgatccgtaggctggctcggaggggcggcgtgaagcgcatttcggggcttatctacgaggagacccgcggcgtcctcaagatcttcctcgacgaacgtcatccgcgacgccgtcacctacaccgagcacgcacgccgcaagactgttaccgccatggacgtcgtctacgcgctcaagcgcc

SEQ ID NO: 66267 - DNA, 324 bp, Zea mays
cagcggacgatatctttctgacagatggagccacctcagcgatcaactgcaagatgcagatactcatcaggtctcacgaagtaggcatcttgagccctctacccgaataccccttgtactcggcctccatcatactgcacggtggaacgatggtgccgtacaatctcactgcagataacggttgagggctagagatctttgaagtcaagaggtgcttggtagaagctcgtacggctggcctcactgttagagctatggtggtactaaatcacggcaactctactggacaggtgctatccgtcactaaccaggaggagatagtag

SEQ ID NO: 66268 - DNA, 328 bp, Zea mays
gacaactctctctaccgtccgataccccaagcaccagcgcggcggcggcgaccatggctgtcggaaagaacaagaggatctccaagggaaagaagggtggcaagaaaaagaccgtcgaccctttctctaagaaggattggtatgacatcaaggcaccgtcggtgttcagtgtgcgcaacatcgggaagactctcgtatccaggacacagggtaccaggattgcttctgagggtctgaagcacagagtctttgaggtttgcctagctgatcttcagggcgacgaggatcaagcttacaggaaaatcaggctccgtgctgaagatgtgca

SEQ ID NO: 66269 - DNA, 324 bp, Zea mays
caaaatttcaattggaagtgatgctgtttatgctgctgaagcctttttacagactggtgtaaagacagggaaaagcagcttggagcaaatctctagagtatatggcaatcaggctgtagttgtcagtattgatcctcgacgggtatatgtcaaaagtcaagaagatgtgccatttaaaacttaaaggtgtctactaaaggtccatcgggagaagaatatgcatggtaccagtgcacagtgaatggtggacgtgatagccgagctataggagcatatgaactagcgatactgtggaagaattgtgcgcaggagtaatacttctta

SEQ ID NO: 66270 - DNA, 325 bp, Zea mays
tctacatgtacttcgaagataatgctggagtcattgtgaaccccaagggcgagatgaaaggatctgctatcactggacctattggcaaggagtgtgctgacctttggcccaggattgctagtgcagcaaatgctattgtctgatactactggttgagatagttttattgtgatccattttaaccttttctgcacttcaacatctgtggaaatttacttgattaatgtactaagggaaaagacgcttaggcgcacaattaaaataggccgaactgtgcacttctgtagtcagtttagtgatgtgctggcgttgtgatcttgtttgg

SEQ ID NO: 66271 - DNA, 326 bp, Zea mays
tggcggcttaaaccctagttctcactcccatcgccgcttcagctccgccgctgcagatggagttctggggtctcgaggtcaagcctggttccactgttaagtgtgagcctggatatggctttgtgctgcacctttcccaggctgctcttggggaatcgaagaagagtgataatgccttgatgtatgtcaaaattgatgatcagaaacttgccattggaaccctctctgttgacaagaacccacacattcaatttgatctgattttcgataaagagtttgagctgtcgcacacatcaaaaactaccagcgtcttcttcactggctac

SEQ ID NO: 66272 - DNA, 324 bp, Zea mays
aattcttgctgatgggaaattaacagacgctaaggctgaccagcttgctaagattcaaaagcaggtcggtttgcctactgaacatgcacagaaactcattaagggtattacaacgacaaagttatcttctgcaattgaagcctctgttgctcggggtctcatcggtatacagcaggtccgacgattgaaggaagcaaacttccaactagatagcttgattgcggaccgcagcgagaaagcatttataggaaaactgttgacgagctcttttcttcaggtacaggggatttcgatgaagaggaaatgtatgtgaagattccagct

SEQ ID NO: 66273 - DNA, 321 bp, Zea mays
aaaccctttggtctttgacaactcttacttcaacgaacttctgagtggtgataaggagggccttcttcagctcccaagtgacaaagccctgctgagcgaccctgttttccgccctcttgtcgagaaatatgctgtggatgagaaggctttctttgatgactacaaagaggcccacctcaagctctccgaactggggtttgctgatgcttaaatagaccctatcttggagtgatacattctgctgcctgtatggaatcatgtggtcttttgcatctggagtcaatcgtgaacaagcagattgtcgtattgtctttctcgtaa

SEQ ID NO: 66274 - DNA, 330 bp, Zea mays
  unsure (1)..(330): unsure at all n locations
aanatgctgacgccagttgaggtcctctgtaaatcatatccatcagagtttactgcatactttcattactgtagatcactacgattcgaagataaaccagattactcctatttgaagagactcttccgtgacttatttatccgcgaggggtaccaactagattatgtatttgactggaccattatgaaatatcctcagtttagagataaaagcaaaattcagtctagcggcaagattagtgggttggcaggccttctaattaaaggactgatagaactgcagctgaagctttgtttagaaggactggatctggttctggtcacaatcgag

SEQ ID NO: 66275 - DNA, 291 bp, Zea mays
cgctcgtatataacgcatgcacgtacacaccatgctcgacgagcagatgcgcgtggtggtcaagatgtactggggtgatccgagggagaaggtgtgcgacgcggtggaggagctccagatggagtcgctcgtcatgggcagccgtggcctcggccagtgccaaaggattctgctgggaagtgtgacgaactacgtgctgtccaatgcgtcatgccccgtgaccgtcgtcaagtcgaagtagtggctctggcctttcatttccagaaagatgaatctgcagctaacctatac

SEQ ID NO: 66276 - DNA, 317 bp, Zea mays
  unsure (1)..(317): unsure at all n locations
ggagagtttccggcactggacgcgctcccagcaggccggttcagggagctggacaggttcacccacgagctgctggaggacgccgtcggcaactaccgcgtcgacgagctggaagaggcgccgcgcacgttcctgcagcccagcctctacgacgccgacgaggtgatgttcgtgaaggaaggcgagggcgtcatcgtgctgctccgcggcgggaagagggagtcgttatgcgtcagggagggcgacgtcatggtcatccccgcgggcgacgtcgtgtactcggccatgacgcnacagtcggaatggttccgcgtcgt

SEQ ID NO: 66277 - DNA, 320 bp, Zea mays
gaactgcggaaaaggaaaatcctgctcgagccaatggtcacatcttcaatgttgggaatcctgacattgaggttacggttagggagttggcccaaatgatgacagaggtctatgcaaacgtctcaggagaggcgccgctggatgagcctatgatcgacgtgagttcgagtcagttctacggtgaagtatacgatgacagtgataagagaattcctgacatgactataatcaacaagcagctaggttggaacccaaagacacctctcaaggatctgctggagacaacattgacgtaccagcacaagacatacaaagaagct

SEQ ID NO: 66278 - DNA, 322 bp, Zea mays
gaactgcggaaaaggaaaatcctgctcgagccaatggtcacatcttcaatgttgggaatcctgacaatgaggttacggttagggagttggcccaaatgatgacagaggtctatgcaaacgtctcaggagaggcgccgctggatgagcctatgatttacgtgagttcgagtcagttctacggtgaaggatacgatgacagtgataagagaattcctgacatgactataatcaacaagcagctaggttggaacccaaagacacctctcaaggatctgctggagacaacattgacgtaccagcacaagacatacaaagaagctgt

SEQ ID NO: 66279 - DNA, 326 bp, Zea mays
cgaggtctacggcaagaccatcggcagcttcctccccaaagaccacccgctccgcaaggatgcctgaattttatgttcttaaagaagatgagtcgccctgtatttcaggtccaatcgtgaaacaaagatggtcctatgcatgcgcaaaacaacttattgagaggcttgtatttgctgaaggtgcagaaaatggccttgatttcacaatcgtgagacctttcaattggattggaccaaggatggacttcattcctggtgttgatggtcctagtgaaggtgtgcctcgggttttggcttgcttcagtaacaatctgctccggagagag

SEQ ID NO: 66280 - DNA, 315 bp, Zea mays
gccgtatcagaggtctgacttcgaaggcattttccgtgctatggatggactcccggtgaccatccgactcctggaccctcccctccacgagttccttccagaagggaacatcgaggacattgtaagtgaattatgtgctgagacgggagccaaccaggaggatgctctcgcgcgaattgaaaagctttcagaagtaaacccgatgcttggcttccgtgggtgcaggcttggtatatcgtaccctgaattgacagagatgcaagcccgggccatttttgaagctgctatagcaatgaccaacccaggtgttcaagt

SEQ ID NO: 66281 - DNA, 329 bp, Zea mays
  unsure (1)..(329): unsure at all n locations
canatattcattttctttgaaggcatatatggtggagctttatcaagataatcttgtggacctgttattgcccagaaatgcaaagcagctgaatgtagagataaaaaaagattccaagggtgttgttaccgttgaaaatgtaacagttgtgagcatttcaagtattgaggaactgagggctataatctcaagaggttctgagaggaggcacactgctggaacgaatatgaatgatgagagttcaaggtctcatttaattctttcaatcattattgaaagtacaaatctccanactcaatcatatgcaagaggcaagctaagttttgtgg

SEQ ID NO: 66282 - DNA, 322 bp, Zea mays
  unsure (1)..(322): unsure at all n locations
gcttaagcagaccggcaggccagaaatggttgtaggttggtatcactcacatcctggcttcggatgctggctatcaggcgtcgatatcaatactcagcagagttttgaagctttgaaccccagagccgttgctgttgtgatagaccccatccagagtgtgaaggggaaggtggttattgatgcattccgcctcattaatcctcagaccatgatgcttggccaggagccacgtcagacaacatcanatgttgggcacctaaatgagccatctattcaggctcttatccatgggctgaatagacactactactcaattgcaatc

SEQ ID NO: 66283 - DNA, 302 bp, Zea mays
  unsure (1)..(302): unsure at all n locations
cgacaggtgaagccgccgccgctgcagtgtccatagccaccgcagagactgagatggggggttttgtcaagacccacaagaccaatgcgtacttcaagcgtttccaggtgaagttcaagagaaggcgcgctggcaagacagactacagggccaggataaggctgattaaccaagacaaaaacaagtacaatacacccanatacagatttgttgtgcgatttaccaacaaggacatcacagcacaaatcatctctgctagtatagcaggtgatatggtncttgcttctgcttactcgcatgag

SEQ ID NO: 66284 - DNA, 318 bp, Zea mays
tcgcgcgcacgcctcctgaagcttctagacgttcgaggaggaggaggggaggctcccgccgccgccgccgcagccatggcgtccaccaaggtgcagcgtatcatgacccagcccatcaacctcatcttccgagtcctccagagcaaagcgcgcatccagatctggctcttcgagcagaaggacctccggattgagggtcgcatcatcggattcgatgagtacatgaacttggtcctcgaagatgctgaggaaatcaacgtcaagaaaaacactaggaagacactgggccggatactcctcaaaggtgacaacataact

SEQ ID NO: 66285 - DNA, 320 bp, Zea mays
ttctgattcagtttgattgtaataaaaacaagactacattccaatccaacgatgtatgcacctgacacctagcaaggaccttgatggccagcagctaaccttaccgtagaaactgacgcattttataaatcacattcacatcttcatcacaatataaaggtactcaacaaccgatagagagatgattcacatagaaacatatagctgggttgaataagcaccattacggtcctatcagataacacagttgctacagacagatagataacatacatagaagccagcaggcagcagcacctaactacagcaagagacgtgaa

SEQ ID NO: 66286 - DNA, 317 bp, Zea mays
ggcggcctttacaacgcgagcgagttctggatcggctgcgacatctgcgagcggtggttccacggcaagtgcgtgcggatcacccctgcgaaagcggatcacataaagcactacaagtgcccggactgcagctcgaagaagatgaggcagtaggtgtaggtccccgagtgatctgactgacccgtgtgatctgatccagaccataactccctccgtttgtttgtctcaaggtcgcagctagcagatgtgaattccttcatttgtgggagttgtttatgtggtggtaggaagaagcaaaggactgatagatagagata

SEQ ID NO: 66287 - DNA, 321 bp, Zea mays
cagcaacagcagttacctttggtgcatttgttggcacaaaacatcagggcacaacaactacaacaactcgtgctagcaaaccttgctgcctactctcagcaacaacagtttctgccattcaaccaactagctgcattgaactctgctgcttatttgcagcaacaacaactactaccattcagccagctagctgctgcctacccccggcaatttcttccattcaaccaactggcagcattgaactctcatgcttatgtacaacaacaacaactactaccattcagccagctagctgctgtgagccctgctgccttcttgaca

SEQ ID NO: 66288 - DNA, 285 bp, Zea mays
  unsure (1)..(285): unsure at all n locations
tagcaacatagaaagcacaatagtgtaccaacaatggcagccaaaatattttgcctccttatgctccttggtatttctgcaagtgctgctacggcgaccattttcccgcaatgctcacaagctcctatagcttcgcttcttcccccgtacctctcaccagctgtgtcttcggtatgtgacaacncaattcatcaacctacaggatctacaggcaatgcagctggcacttacattatcaccttgttctcgacatcatcagcctatacagcagtactatgtgattat

SEQ ID NO: 66289 - DNA, 321 bp, Zea mays
agcacactctgcttcttcggattccgatcgcacgcgccgtcaccatggtgaacgttccgacaacatagaagacatactgcaagagtaaggagtgcaggaagcacacgctgcacaaggttacccaatacaagaagggtaacgatagcatagctgcccaaggaaaacgccgttatgatcgcaaacaatccggttatggtggacaaactaagcccgtcttccacaagaaggctaaaaccaccaagaagattgttctgaggttgcaatgccagggttgcaagcatgtctcccaacacagctataagaggtgcaacactttgagat

SEQ ID NO: 66290 - DNA, 321 bp, Zea mays
gtcggcgacgactacgccgggtcttcttcggacccaggtcgttgccgcctacgccaggtgcccaaatcttcttagggcccttcgccggcgacgagcacacaagcttggttgacccccaacaaattgcagaatgtcagccaatgtcggtgaatcaaccagcggtggcagcagcaacgatgcagctggggggagctttgaatgtaacatatgctttgagctgcctcaagagccaatagtgactctttgtggccacctcttctgctaggcatgcctttaccggtggctgcacatccatgcacattcgccagagtgcccagtgtg

SEQ ID NO: 66291 - DNA, 204 bp, Zea mays
aggggacgtggcatcatgggatccaagtcgcaggccaagaccaaggcccgggataagctgctcgccaaggaggctgcgcacggactgacctagattgtctactgctgtgtctggcctgtagtgtgacggggaataactgaactcgtattgtggtactccgaatctagttgcatatgttgctgtccacagaccatgtctagaagc

SEQ ID NO: 66292 - DNA, 342 bp, Zea mays
atggcatccattaggaagtcttccttcatggtcccatctgctgacacctatgctcgtgctgccgttcgtcacattggatacgagcctaggtgcacaccatactggccacactctgtcgtgtggttcttgatctccattcttcccgagtcccttatcgacagcgtgcgcctgggcatgtgcataagatccgcaagaaggggctggccaaggacgccaagaagaaggcgctgtgattgatgtttcagaatgcatattcagattcgcacatttcctcatcacctgtagtagacatgtgccttgttgtagtcactttattagctaccattgcctcctgagtctgtt

SEQ ID NO: 66293 - DNA, 338 bp, Zea mays
gttgcaattcaagcagtcctgtcactctatgctagtggccgtactactggtattgttctcgattctggtgatggtgtgatccatactgtgcccatttatgaaggatatgcccttcctcatgctattctacgtctggatcttgctggtcgggacctcaccgactcgctcatgaaaattctcactgagaggggttattccttcacaacctccgccgagcgagaaattgtaattgacatcaaggagaagcttgcgtatatagctcttgactacgagcaagagttggagactgccaagaacagctcctcagttgaacagagctatgagctacctgatggcca

SEQ ID NO: 66294 - DNA, 172 bp, Zea mays
cgtagtaactcggaatcggctcgaggcgccaacgtcgcctggcggccgtctgcagctccgcgcctctgctcggaagttggtgaaggtttcttgaagctgagaagatggtgctgaagacagcactctgccgcttcagcggccagaagatttatcctgggacaggcatccgatt

SEQ ID NO: 66295 - DNA, 334 bp, Zea mays
  unsure (1)..(334): unsure at all n locations
ccgccgtcgtgcgctcgctacccctctccctcgaggcctttgccggcgaagagcgcccagtcgcccaccaggatgaagtttgttgctgcctatctgcttgctgtcctcgctgggaactccagcccctctgccgaggacttgacatccattctggagtcagttggctgtgaagttgacaatganagatggaactccttctgtcccagctgagcggtaaggacattaccgagctcattgccgccggcagggagaaggttgcttcagtcgcatgtggcggtggcggtgtggctgtcgcggcaagctgccctgctgctggacgcggcggcgctcctgc

SEQ ID NO: 66296 - DNA, 197 bp, Zea mays
cgatgcacgcgtacataccgctcgatgaagttcgtctgaccaactatgcagctgcctactgcactggccttctgttggctcgccgtgtgctcaagacccgtggtttagataaggaatatgagggccatgttgaaaatcatggtgacgacctctctgttgagccagctgatgagaggaggctttccgtgctctcttgg

SEQ ID NO: 66297 - DNA, 342 bp, Zea mays
  unsure (1)..(342): unsure at all n locations
ctgggacgaggcgctgtcncccgacgagcggcacttcatctcccacgtgagcgccttcttcgctgcctccgacggcatcgtgctcgagaacctcgcttcccgcttcatgaccgacgttcaggtcgccgaggcgcgggccttctacggcttccagatcgccatcgagaacatccactcggaatgtattcgctgctgctcgagacctacatccgcgaccacgtcgagaaggaccgcctgttccgcgccatcgacaccgtgcccgcggtccggcgcaaggctgactgggccatgcgctggatcgacggcggggagcgcttcgctgagcgcatcgttgccttcgcc

SEQ ID NO: 66298 - DNA, 342 bp, Zea mays
atcgccggtggcatcggcgccgccgtgcggcgaagtcgccgacgtggacatcgtccgaatgcaggcagacgggcgcctccctctcacacagcggcgcaactacaagtccgtcgtggaaacatcacgcgaatggcgaacaagaaggcgtcactagcctttggagaggctcatcgcttaccgtgagcgggcgatgctcgtgacggcgtcgcagctcgcgtcgtacgacaagttcaaagcaacgatcttggagaccggcatgatgcgcggcgggctcgggacccatgtcacggcgagcttcgccggcgggttcgtcgcggcagtagcgtcgaaccccgtcgacgt

SEQ ID NO: 66299 - DNA, 280 bp, Zea mays
  unsure (1)..(280): unsure at all n locations
ctggtaaactatgcccggtcaacgaaagaggctgaagaggtctccaaagagattgaagcatctggtggtgaggctatcaccttcggaggagatgtttcanaagaagctgatgtagagtctatgatgaaagcagctctagataaatggggaacaatagatgtgctggtanataatgcagggattacagagacacattgttgatgaggatgaagaaatctcagtggcaagacgtaattgatctgaatcttactggtgtcttcctttgtacacaggctgcaac

SEQ ID NO: 66300 - DNA, 335 bp, Zea mays
gtcatgtcattcttcctgttggccccagtaaccttacttacagaaggtgttaaaattagtccagcactgttgcagtctgctggtttgaacttgatccaggtatacacaaggtcattgattgctgcattctgcttccatgcataccaacaggtgtcatacatgatcctcgccagggtatcccagtcacacattcagtgggcaattgcgtcaagcgtgtagtggtcattgtgacctctgttctgttcttcaggacccctgtttctcccatcaactctctcggtaccgggatcgctcttgctggagtcttcctatactcgcaattcgagagacttaag

SEQ ID NO: 66301 - DNA, 342 bp, Zea mays
atggcatccattatgaagtcgtccttcatggtcccatctgctgacacctatgctcgtgctgccgttcgtcacattggatacgagcctaagtgcacaccatactggccacactctgtcgtgtggttcttgatctccattcttcccgagtcccttacttacagcgtgcgcctgggcatgtgcataagatccgcaagaaggggctggccaaggacgccaagaagaaggcgctgtgattgatgtttcagaatgcatattcagattcgcacatttcctcatcacctgtagtagacatgtgccttgttgtagtcactttattagctacattgcctcctgagtctgtta

SEQ ID NO: 66302 - DNA, 197 bp, Zea mays
  unsure (1)..(197): unsure at all n locations
gaagggatgcagcagccgatgcacattagccgcagtncggcgataccccagctgccggaatcaccacggagcagatccaagagtatctcggtgagaataagcagcttattttggctattttcggaaatcagaacctaggataattggcagaatgtgctcagtatcaatcacagctcagaagatcctcttgtatctcg

SEQ ID NO: 66303 - DNA, 363 bp, Zea mays
  unsure (1)..(363): unsure at all n locations
cagtcagaggccggaatcggctcgagcgccgtcgtgcgatcgctacgcctctctatcgacgtctttgccggcgaagagcggccagtcggccaacatgatgaagtttgttgctggctatctgcttgctgtcctcgctgggaaatccagnctctcgggcgatgacttgacatccattctggagtcagttggctgtgaagttgacaatgaaagatggaactccttctgtcccagctgagcggtaaggacattaccgagctcattgccgccggcaaggagaagtttgcttcagtcgcatgtggcggtggcggtgtggctgtcgcggcagctgccctgctagtaaaaaggcggagtactgcagctgag

SEQ ID NO: 66304 - DNA, 294 bp, Zea mays
atggtgctctccccgccaagaaagttacgtagagtgacagcgcatgaagggatggaaggtatgcacaggacagataaagtggacagacatccttctgggatgaggcaaaacgatgacatgcccagtcagagttctagaattccaatgtcagttgatgttggggctgtgtttggccacgacctgcatctaggccaacattgaacagtgcggacaagtctcgtttaaaacggaaacttgatatggatccagagtttggatacgcggagtagaaggaacacatgtatacatgcacca

SEQ ID NO: 66305 - DNA, 318 bp, Zea mays
ctcatctcacatccctcgagaagacgcctgctcctcgccgatcgatacgatggccgttctctccgacctccacaccgccgacgagctcaagtctctcgaggctcacctcgccggcaaaacctatgtgtctggtgactccattactaaggatgacattaaggtcttcgccgcggtccgtcgaagcctggcgctgagtttcctaatgccgcccgctggtacgagaccgtcactgcggctgtagcctcaagattccctggtaaggctgtcggcgtaaatctgcctgcgggatcagctcctgcggcagctgctcctgcggat

SEQ ID NO: 66306 - DNA, 331 bp, Zea mays
  unsure (1)..(331): unsure at all n locations
gagctngggaaactccctgacgacactgcttctaccttaaaagcatggtggcaggctcattctaagtggccgtacccaaccgaggaagacaaggctcgactggtgcaggaaacagggctacaactgaagcagatcaataactggtttatcaaccagcgtaacgaaactggacaacaattcggcgtcatcctcgtcggacaaaagcaagagaanaaggaacactgcaggtgatgggaacgcagaaccagcctggtagggcatggtcggggaacgaatttatgtacataatgcttctactgtgaagagttccatcatatttgttgctccagaa

SEQ ID NO: 66307 - DNA, 132 bp, Zea mays
ccgcattcgttccaactcctgagcactttctcctcgtccccgacaagccaatcgaagccgagatacggccatggactccaccggcaccggagcaaggggtaaggggaagaagggatcgggcgggcgcaaggt

SEQ ID NO: 66308 - DNA, 306 bp, Zea mays
gttcgtcctcatggcgccgccgcagccgaagtcgggcctcttcgtgggcatcaacaagggccatgtcgtcaccaagcgcgagctgctctgcgcccgtcccaccgcaaggggaaagcaacgaagagggtgtccatggtcaggggcctgatcagagaggttgctggctttgctccttatgagaagcgtatcaccgagcttctgaaggttggcaaggacaagcgcgctctgaagcttgccaagagaaagcttggaactcacaagagggcaaagaagaagagagaggagatgatgggcgtcctcaggaag

SEQ ID NO: 66309 - DNA, 256 bp, Zea mays
aggagcttatttttgacaaggacgaccagttggctgttgagtttgttaccgctgcagcaaatatcagatgttcctcttttggaataccactgcatagtctttttgaagctaaaggtgttgctggaaatatagttcatgctgtggcaactaccaatgctataattgctggtctaatcgtcatcgaggcaattaaagtgctcaagggtgattatcaagattatagaatgacatattgccttgagcatccagcaaggaa

SEQ ID NO: 66310 - DNA, 308 bp, Zea mays
cttgcatggagttcttcgttgctttcttctggaagccgtgacaagagcatcctccaccatgatatccgtgctcaagaagatcatgttagcaagcttaccgggcataaatctgaggtttgtggactcaagtggtcttatgacaatcgtcagcttgcatcgggtggcaatgacaacagactttttgtttggaatccacattcagtacagccagtactgaagtatactgagcacacagcagctgtcaaagctattgcctggtcacctcatctccatgggctgcttgcatctggtggaggaactgcagatag

SEQ ID NO: 66311 - DNA, 80 bp, Zea mays
tgatggcttcacgcaggctcgtatcttctctgattcgatcctcccttcgtagatctcaatcgaagccctcaatttccaca

SEQ ID NO: 66312 - DNA, 301 bp, Zea mays
  unsure (1)..(301): unsure at all n locations
ccaagtgcctggagataagaccgcgggacatcacgatgatgccttcagcaccttctggagccagactggtngtgggaagcacgtcccgtgcaatcttcgttgatctagaacccactgtgatcgatgaggtgcgcactggcacgtaccgccagctcttccaccctgagcagctcatcagtggcaaggaggatgccgctaacaatttcgcccgtggccactacacaattggcaaggagattgttgatctgtgccttgaccgtatccgcaagcttgctgacaactgcaccggcctccagggctt

SEQ ID NO: 66313 - DNA, 249 bp, Zea mays
  unsure (1)..(249): unsure at all n locations
acaagaccgtcctcaagacgctgcgcaacggcaanggaaagctgatcatcatcgcagacaactgcactccacttangaagggtnanattnagtactacgccatgctggccaaagttagcgtgcaccatttccacggaaacaatgtaagaactggcactgcctgcggcaagtactacagggtgtgctgcctcagtatcatcgacccaggtgactcggacattatcagtaccacccctggcacccagtgag

SEQ ID NO: 66314 - DNA, 199 bp, Zea mays
agaagttaaggttgtctccgacatgcacgagaggaaagctgagatggcacggcaagctgatgccttcatagctcttcctggagggtacagaacaatggaagaactgttagagatgataacgtggtcacagctcggaattcatgacaaaccagtcggtttgctgaacgttgatggctactacgacccgctgctcatgctg

SEQ ID NO: 66315 - DNA, 183 bp, Zea mays
ctgagactgtggaacttcagattggtctgaagaattatgatccacagaaggacaagcgtttcagtggctctgttaagttgccccatatccctcgtcccaagatgaaggtgtgcatgcttggtgatgcccagcatgttgaggaggccgagaagatgggacttgactacatggatgttgaggctc

SEQ ID NO: 66316 - DNA, 209 bp, Zea mays
ctactatactatactctaggaagcaaggacaccaccgccatggcagccaagatgcttgcattgttcgctctcctagctctttgtgcaagcgccactagtgcgacccatattccagggcacttgccaccagtcatgccattgggtaccatgaacccatgcatgcagtactgcatgatgcaacaggggcttgccagcttgatggcgtgtcc

SEQ ID NO: 66317 - DNA, 298 bp, Zea mays
  unsure (1)..(298): unsure at all n locations
cagaagataacgagganaatggccagcccatggatgatgattatgaagatcaagttccagattactcaataggctattctaccggctcgaggcaccatgtaatgatgtccatgatggaccatgatagtgacgaggaggatgaagatgctgaaggtgatgagaatgtggaagaagatgcagaccttgcagttgacgatgccgatgttgagatggacgaagatgatgaaattggtgatgatggagaggatggtggcgttggaggggagatgaatgcggatgaggatccggatgctacttc

SEQ ID NO: 66318 - DNA, 146 bp, Zea mays
cttttctcgtttagaacctctaaaatttcgcccactcgccagtcgcagcagcacctgtagcagccatggacgccacggagcggtagcaaggggaagaagggggcggccgggcgcaaggcaggcggccccaggaagaagtcggtgac

SEQ ID NO: 66319 - DNA, 198 bp, Zea mays
tgtctggtccccacccctcagcgcgacgaaggtaagatgttcctgcggaggatcctgaccggcgggggcggcctggcggccctgagggcggcgcgcgccgtgaaggagacgacggggatcgtgggccttgaggtggtgcctaacgcgcgagaggttctggtagggctctacgagcgcacgctcaaagagatcaaggcc

SEQ ID NO: 66320 - DNA, 292 bp, Zea mays
  unsure (1)..(292): unsure at all n locations
cacaggttccatcagtaccaggtggtgggtcgcgcgctgccgaccccaaccgatgagcaccccaagatctaccgcatgaagctctgggccaccaacgaggttcgcgnccaagtccaagttgctggtactagtctgagaaagctcaagaaggtgaagaagagcaatggccagatgcttgccatcaacgagatctttgagcgcaacccgaccaccatcaagaactatggcatctggctgcgctaccagagcaggactggttaccacaacatgtacaaggagtaccgcgacacca

SEQ ID NO: 66321 - DNA, 279 bp, Zea mays
agccgccgccgctgctcatctcacatccctcgagaagacgcctgctcctcgccgatcgatacgatggccgtcttctccgacctccacaccgccgacggcctcaagtccctcgaggctcacctcgccggcaaaacctatgtgtctggtgactccattactaaggatgacattaaggtcttcgccgcggtgccgtcgaagcctggcgctgagtttcctaatgccgcccgctggtacgagaccgtctctgcggctgtagcctcaagattccctggtaaggct

SEQ ID NO: 66322 - DNA, 103 bp, Zea mays
gcaaccgattgccttcccccctcccaacccaagaccgatggcgccctaggccgagaagaagcccgcggcgaagaagccggcggaggaggagcccgcggcggag

SEQ ID NO: 66323 - DNA, 254 bp, Zea mays
agcgcgtccacctcccaaacccctactcccccaggaagcaatggcttcccccacccagggccaggtcatcacctccaaagcggcggtggcgtacgacaacaacaagccgctcgtgatcgaggacgtgcaggtggcgccgccgcagccggcgaggtccgcgtcaagatcctcttcaccgcgctctgccacaccgaccacttgtcctggagcggtaaggatcctgagggtctttttccttgcattcttggccacga

SEQ ID NO: 66324 - DNA, 254 bp, Zea mays
gattttgaggctacaggcagagtttgcaaaatcatcaagttatcctgaaaattttcttttggaggctcttcattctactggctattctggtgctttagcaaacccactaattgtgccagatattcagttagcagattgaatgcagatgtcctggagcaatttataactgagaactacactgcttccagaattgttctagctgcatcaggtgttgatcatgatgaattggtatctattgccgaaccccttctgtc

SEQ ID NO: 66325 - DNA, 256 bp, Zea mays
tccaatccagatcagcaaagcggcagtgcgtagagaggatcgtcgaacagaacagcatgaagatggtcatcgttctcgtcgtgtgcctggctctatcagctgccagcgcctctgcaatgcaatgccctgcccctgcgcggggctgcagggcttgtacggcgctggcgccggcctgacgacgatgatgggcgccggcgggctgtacccctacgcggagtacctgaggcagccgcagtgcagcccgctggcggcggcg

SEQ ID NO: 66326 - DNA, 250 bp, Zea mays
acttgagctcgcaacttctcttattgagaaggcgaaggcaaagggggtttctcttttgcttcccactgatattgtagtagcatacaagtttgcagctgatgctgagagcaagattgtcctgccactgctatccctgatgactggatgggtcttgatgttggccctgatgccaccaaaacattcaacgaagcattggacaccaccaagactgttatttggaacggccccatgggagtgtttgagttcgaga

SEQ ID NO: 66327 - DNA, 114 bp, Zea mays
ctttgctaggggaataagtcataagtctgtctggaagggtaaagtttgagctttgctagtgtggctgggcactctagtcactggatgtgttgtgcatgcatcagctgtatgccc

SEQ ID NO: 66328 - DNA, 241 bp, Zea mays
cttgtcccctattaccttaatgaaaaaactgggtggggtttggagatctctgatcttaagatgcaactggaaaatgctcggtcaaaaggcattgatgttagggcctgcgtggttatcaatccaggaaatccgactgggcaggttcttgctgaagacaaccaatatgatatagtgaaattctgcaaaaatgagggccttgttcttctagctgatgaggtatatcaagagaacatctatgtgg

SEQ ID NO: 66329 - DNA, 252 bp, Zea mays
actatgttgatcgggggaaacagagcatagaaacaatatgccttctcttggcgtacaagataaagtacccagaaaacttctttcttctcaggggaaaccatgaatgtgcctcgatcaccggatatatgggttttttgatgagtgtaagaggagattcaatgtgcgtatctggaagatattcactgagtgttttaactgcctcccagtggctgcacttattgacgataagatcttttgcatgcatggggggtt

SEQ ID NO: 66330 - DNA, 244 bp, Zea mays
ctagctttgtcatgtcctgctcattcactaaccaggtcattgcccaacttgaactgtggaaggagaagagctctggcaagtatgagaagaaggtgtatgtgctccccaagcaccttgatgagaaggttgctgctctccacttgggcaagcttggtgccaagctgaccaagctcaccaagtctcaggccgactacatcagcgtgccgatcgagggtccctacaagcctgcccactaccggtacta

SEQ ID NO: 66331 - DNA, 246 bp, Zea mays
gctcatcccacatcagtagtcgaccaagcacaagcagcagagccggccggaatatgtggacgatcaggaaggtggcgacgccgcaggtggccgtcctcctgctgctcctcatcgtcgttgcgcaggaggcggcgccgttggcggaggcgcgcgtgtgccggcgccggagcgcgggcttcaagggggtctgcatgtccgaccacaactgcgcgcaggtgtgcttgcaggaaggctacggcggcggca

SEQ ID NO: 66332 - DNA, 225 bp, Zea mays
gcgaaggagtagcagcagcaggcgccgccgagtagcggctccccatctcgagcttgccaccatggctagaggattgaagaagcatttgaagaggctcaatgcccccaagcattggatgctggacaagcttggcggagcttttgctcccaagcgcatctggtggacctcacaagtctagggagtgcctgccactgatcctcatcatcaggaacaggctcaagtatg

SEQ ID NO: 66333 - DNA, 248 bp, Zea mays
gcccatggtaccaggaatgggagtgcccctacatccagccgcagctgacgtgccaggcgcacggccgccccgacaaggcgtaccagagctggcgctggcagccgcggggctgttcgtgcccagcttcaacgcgacgctgatgctggagatgctgcgggggaagcggatgctgttcgtggggcactcgctgaaccgggggcagtacgtgtccctcctctgcctcctgcaccgggccatccccgacggcg

SEQ ID NO: 66334 - DNA, 249 bp, Zea mays
gccaaggcgaggctggcgtccaaggcccgcgacatcaaggatgcagcacagcaccgcatcgaccaggcgcaggggtcttgagagaagaaccacactcgagcggaccgcgcgcgcgacctccttgaaccactgccggcgcggcggcatatggcccttaaaggcggtggctgctgctacgtacgctgccgtagagtctcggtcgccgcgatagctctagctagtcgtttatgtgttgtgctttgtgtgtgc

SEQ ID NO: 66335 - DNA, 241 bp, Zea mays
cggagattccgcactatgtgggagcgctattgccgtggagtttctgctattctatatgttgtggacgctgctgaccgagatagtgtcccaatcgcgaaaagtgagttgcatgatctgctgacgaaacagtgtttggctgggattcccttgcttgtccttggcaacaaaattgacaagtcagaagcgctttcgaggcaggccttggttgatcaacttggactggaattgataaaggaccgtg

SEQ ID NO: 66336 - DNA, 247 bp, Zea mays
ccagagccccccgccgccgctgcgccctcctctcggtcctgccgtccgtcgaggtaaaaggacagcatggtgagggtcagcgtgctcaatgatgctctcaagtccatgtacaatgctgaaaagatagggaaacgtcaggtcatgatcaggccgtcatccaaggtgatcatcaagttcctgacggtcatgcagcgccatggctacattggcgagttcgagtacgtggatgaccacagagctgggaaga

SEQ ID NO: 66337 - DNA, 252 bp, Zea mays
cagcctagcaattagcttatcgactccagattggagaactcgacaccatgaaggtgctgatcgttgcccttgctctcctggcgctcgctgcgagcgccgcctccagtacaagcggggctgtggctgccagacatcaccgtttcatctaccgcctccgttctatatgccgcctccgttctatctgccgccgcagcagcagccgcagccatggcaataccccactcaaatgccgcagctaagcccgtgccagca

SEQ ID NO: 66338 - DNA, 351 bp, Zea mays
  unsure (1)..(351): unsure at all n locations
ctttctcctcgtcnccgacaagccactcgaagccgagatacggtcatggactccaccggcaccggagcagcggggaagggaaagaagggagcggccgggcgcaaggtcggcgggccaaggaagaagtcggtgtcgaggtccgtgaaggctgggctccagttccccgtcggccgcatcgggcgctacttgaagaagggccgctacgcgcagcgtgtcggcaccggcgcacccgtctacctcgccgctgtcctcgaatacctcgccgctgaggttctggagctcgccggtaatgctgccagggacaacaagaagactcgcattattccgcgccacgtgcttctggcgatccgg

SEQ ID NO: 66339 - DNA, 347 bp, Zea mays
atcagcttccttccacattcgtctcgagatctcgccccgtcgccatggacgcgatcgacagcgtggtggatcccctccgcgacttcgccaaggacagcgtccgcctcgtcaagcgctgccacaagcccgaccgcaaggagttcaccaaggtggcggcgcggacggcgatcgggttcgtcgtcatgggcttcgtcggcttcttcgttaagctcatcttcatccccatcaacaacatcatcgtcggttccggctaggcttacaggagtacagggcgactagcatgggagtagtgcaatacttttgggagcaatagataacgaggatcctggtctttcgaatagtattgt

SEQ ID NO: 66340 - DNA, 184 bp, Zea mays
gaaggactgaaggagaagagggtacggccgtctcctcgcccccatggcccacgagaagaagctgtccaacccgatgcgggagatcaaggtgcagaagctcgtcctcaatatctccgtcggggagagcggcgaccgtctcacccgcgccgcaaaggtgctcgagcagctcagcggccagaccccc

SEQ ID NO: 66341 - DNA, 388 bp, Zea mays
  unsure (1)..(388): unsure at all n locations
atctccgtcatatctaagtacggcactcggctcgagctcctctccgccgcccgccgcagcagcacccaccgggcaagatgcagacgatcctggcgtcggagacgatggacatcccggagggcgtcatggtcacggtggccgccaagctggtcacggtggagggcccccgcggcaagctcacccgcaacttcaagcacctcaacctcgacttccagctgcaggaggccggccgcaagctcaaggtggacgcctggttcggcacccgccgcaccatggccgccatccgcaccgccatctcccacgtccagaacctcatcaagggggtcacaagggctaccgctacaagnatgagttcgtctacgcccacttccccatcaacgggctcatc

SEQ ID NO: 66342 - DNA, 338 bp, Zea mays
attcgatccaactcctgagcactttctcctcgtccccgacaagccaatcgaagccgagatacggccatggactccaccggcaccggagcagggggtaaggggaagaagggagcggccgggcgcaaggtcggcgggccaaggaagaagtcggtgtcgaggtccgtgaaggccgggctccagttccccgtcggccgcatcgggcgctacttgaagaagggccgctacgcgcagcgtgtcggcaccggcgcccccgtctacctcgccgctgtcctcgaatacctcgccgctgaggttctggagctcgctggtaatgctgccagggacaacaagaagactcg

SEQ ID NO: 66343 - DNA, 307 bp, Zea mays
cgccgctcgcgcatcctattgccctcgcgccaccgtcgccgccgccgccgctgcagcgagccaccgtcccgccgtcgcttgaggtagacaccaatccaccgccatggggcgtatgcacagccgcgggaagggtatctcttcatcggcgctgccgtacaagaggactcctccgatctggctcaagacagctaccaccgaggtggaggagatgataccaaggctgcgaagaagggccagatgccgtcgcagattggtgttctgctccgtgaccagcacggcatcccgcttgtcaagagcgtgactggta

SEQ ID NO: 66344 - DNA, 338 bp, Zea mays
ccaccccgcagccgccctagcacccgcgacgagcaggatctgcccagttgctcttgcggtagttcccccaactgtcaccatgcagaacgaggagggtaagactgtggacctctatgtccccaggaagtgctcggccacaaacaggatcatcactgccaaggaccatgcctctgtccagatcaacattggccacttggatgcgaatggcctgtatgatggtcacttcacaacgtttgctctctctgggtttgtccgtgctcagggtgacgcagacagctccttggacaggctgtggcaaaagaagaaggctgatatcaagcagtagattttacatctag

SEQ ID NO: 66345 - DNA, 336 bp, Zea mays
ctcatcaggaggagcatggccgaccataaggaggagcagtctgtgatatgcaagatctccgagaagttccacggcggggactcctcgtcgtcgtctgactcggacgacgagaagaagaaggggtcttcctcggcgtcggcgacggaggccatgaaagccaagatctaccgcctcttcggccgcgagaggcccgtccactctgtcctcggcggcggcaagcccgccgatcttgtcctatggaggaacaagaagatctcaggcggggtactcgatggtgccacggccatctggctcctgttcgaggttatggagtaccatctcctcaccttggtgtgc

SEQ ID NO: 66346 - DNA, 235 bp, Zea mays
ggttaacttcctctgatcctgttgttcaggttgaagctgctaagcgctaggacgatgtgggagatgatgactgcgcaacttatccataacaatgataacattaaacgaggagaagatgatgaatgttcactggcatttgcaaggattgaaaccactactttgtgattaagggatttaacagtccgatcttccattggcatgttgataaatccgctataaggttatgtacgggcgt

SEQ ID NO: 66347 - DNA, 197 bp, Zea mays
gccacatctaacaatacaagccatcacaacgcaacagcaacaacagttcctaccagcactgagccacctagccatggtgaaccctgccgcctacttgcaagagcagctgcttgcatccaagccacttgctctggcgaacgtagttagcaaccagcaacaaccacagctacaacagttctgccaacgctcagtcaact

SEQ ID NO: 66348 - DNA, 268 bp, Zea mays
  unsure (1)..(268): unsure at all n locations
cagaaatggatggcatgaatgccaagaaaagtgtgtttattattggagctacaaacaggcctgacatcattgaccctgctctgctgaggccagggcgtcttgaccagctgatctacattccactgcctgatgagcagtctaggctccagatcttcaaggcctgccttaggaagtcncctgtggcgaaggatgtggacttgaatgctcttgctaagtacatcaagggttcagtgtagcangtatcacagaaatttgccagcgtgcgtgc

SEQ ID NO: 66349 - DNA, 121 bp, Zea mays
ctctgcaggcgctcgctcgcaagtacaaccaggacaagatgatctgccgcaaatgctatgcacgactgcaccctagggctgtcaactgccgcaagaagaagtgtggtcacagcaaccagct

SEQ ID NO: 66350 - DNA, 380 bp, Zea mays
tcgacttcctccgtgacgaaagctctcgcagcgagtgggacatcctctccaatggcggcattgttcaagagatggctcacatcgccaacggccgcgaccatggaaactgcgtctcgcttcttcgtgtcaatagcacgaactcgaaccacagcagcatgctgatcctccaggagagctgcaccgacatgtcgggctcgtacgtcatctacgcccggtggatgtggtcgccatgaacgtggtcctcaacggcggcgaccctgactacgtggcgctcctgccctccggcttcgcgatcctgcccgacggcccatcgtcagggagcagcagcatgctgcaaggcgacggcggcgtcggctcaggtgggtcgctcctgacggtgg

SEQ ID NO: 66351 - DNA, 352 bp, Zea mays
  unsure (1)..(352): unsure at all n locations
ggccgtggctccggcgcccgccccgtcgctcgcttgcagggagtcactgtccaaatcggcagctcgcaccagctagtcagcatcgtcttcgaggccgagaggttaagggctccacgctgctcaccaacggagtgataacggatgggtcagacgagtgggcgatctacggtggcaccgctctgttcgccatggccaccggtgtcattcgagaaggtttgtcgccggtagcaacgacggcaactctgatgagcttaccagcatcgaagttttctgcccggcgtttggctcggcacaaccacagccanacaagcaggactccgtctctgtcaccaacattggggtatggggtgga

SEQ ID NO: 66352 - DNA, 334 bp, Zea mays
atcagcagcatgaacctggcagatgccatgaccagggccaaggtgctggacattgacctgcagaagcagctcaggccctacatggagtccatggtgccacttcccggtgtctatgatccggacttcatcgccgctaaccagggctctcgtgccaacaatgtcatcgagggcaccaggaaagaacaggtggagcagatcataaaagatatcaggagtttaaggagaagaacaccgtggacaaggtatttgtgctgtggactgcaacactgacagtacagcatgtatgtgtggtctcacgacacatggagatctgctggcactgtgacaagacgag

SEQ ID NO: 66353 - DNA, 309 bp, Zea mays
gtggatatctctgagcgagtcggacaaggctccctatgtagccaaggctaacaagctcaagctcgagtacaacaaggccatcgctgcctacaacaagggcgagagactgcagctaagaaggctcctgccaaggaggaagaggaggaagatgaagaggagtctgacaagtccaagtcggaggtcaatgacgaggatgatgaagagggtagtgaggagatgaagatgatgacgagtgatggagctcctcgagacaatggaccgtgcttcatccaacaatggagcggctacacaaggccccgtggcgatcac

SEQ ID NO: 66354 - DNA, 383 bp, Zea mays
gcggtgagcccccaaaccagcagtggcaccagcttcaagtgctccacctgttgagaaaccatctgctgcaaagactgatgcggccaagcaggttgctgctggccttaccagccaaaccaataactaccacagggctgatggtcagaacactggcaacttccttacggaccgtccttcaaccaaggtccacgctgctcctggcggtggctctccctgggctacctgttcggtggcaactgatgcccgtgctggtgcgctcaccaaagttatcctcccctgcctgctgcgtgctatgtctgaatcgtgaacaaccgttgtcatttcatgtgtgtaccccgtgcaatgctttgtgcgcatggttgatttctctgtggcaaacttcc

SEQ ID NO: 66355 - DNA, 365 bp, Zea mays
  unsure (1)..(365): unsure at all n locations
cattaatcgaagcccatgttgatgtcaagacaaccgacaactacatgttgcgtttgttctgcatcggcttcacgaagaggcgcccaaaccaggtcaagagaacctgctatgctcaggcatcccagatccgtcagatccgccgtaagatggttgagattatgatcaacctggcttctacatgtgacctgaaagaacttgtttcgaagttcatccagaagttattggtaaggagattgagaagtctacctccagcatcttcccacttcaaaacgtcttcatccgcaaggtgaagatactcaaggcccccaagttcgatcttgggaactcatggaggntcatggcgactacaaagaggatgttggtgt

SEQ ID NO: 66356 - DNA, 291 bp, Zea mays
cttgacatagactttgggattgccgatgtgtagatttcatcgctgtttcatttgtcaagtctgcagaagtaattaggcacttgaaaagctacatagctgcaaggagccgtggaagtgacatggcagtcattgcgaacatcgagagcatcgactctctaaagaactgggagagatcatcgagcgtcagaggcgccatgtagccaaggacatggggcgcagatccctggagcagtccctcgatcagcaagatcgtcagtctcagcactgacaagcgtcatgcgctccagtctc

SEQ ID NO: 66357 - DNA, 298 bp, Zea mays
gccgtcgccagtcgctacttcccctccgatcctcgtcgccgacgcatccacccgaaccctcctccgcgacctcgccgtcgccgcagccttggccatgtcgatcttcgagtataatgggtccgccgtggtggcgatggtggggaagaactgtttcgcgatcgccagcgaccggcggctgggcgtgcagcttcagaccatcgcgacagacttcagcgggtgttcaaggtccacgacaagctttacatcggcctctctgggctcgccactgacgctcagacgcctgtaccacggttggtgt

SEQ ID NO: 66358 - DNA, 327 bp, Zea mays
  unsure (1)..(327): unsure at all n locations
atcgccggaaaggttgccgtggtctgcggatacggtgatgtgggcaagggttgtgctgctgccctcaagcaggctggtgcccgtgtcattgtgaccgagatcgacgccatctgtagcctccaggctctgatggagggtcttcaggtccttcccttggaggaccgtgtctctgaagctcacatcgtcgtnngacacactggcaccaaggtatcatcatggttgaccacatcgaggagatgaagaacatgcccatgtctgcaacatttggcactntgacaatgacattgatatgctcggccttgagacctaccctgcgtcagcgcatca

SEQ ID NO: 66359 - DNA, 240 bp, Zea mays
ggatattgctcttgctgatctggctccaacccaccccatcaggctcgggcttgctctcaacttctcagtgttctactacgagatcctcaactgccctgaccgtgcttgcaaccttgaaagcaggccttggatgaggcatctccggctagacactcgggaaggagtctacaaggaagcattgatcatgagtctggtgcaattactatggatcgaacacgagagcgggataataggacagtg

SEQ ID NO: 66360 - DNA, 308 bp, Zea mays
  unsure (1)..(308): unsure at all n locations
cgagaagggaatgcgctatgcaatgccaaatgctagagtaatgattcatcaacctcaaggtggatctgagggtaatgtggaggaggtgaggcgacaggttggagaaaccatctatgctcgtaataaagttgataaaatgtttgccgctttcaccgggcaaccacttgacatggtgcagcagtggacagagagggatcggttcatgtctgcttagaggccatggatttcggattgcttgatgctttactggnaacaagatactagagaacgggcacaacccacattctaatagcagactagnaatactg

SEQ ID NO: 66361 - DNA, 150 bp, Zea mays
aggagttcagccaagcctgtgactggataaagaatcgcttgggtgacaaggttgcacgtgttgacatatctaatcgtctcaggtcatcgccatgtgttcttgttgcagcgaagtttggttggtcagccaatatggataggctgatgagag

SEQ ID NO: 66362 - DNA, 347 bp, Zea mays
attttgaccatttagagccttacatgatctatcatgctgcacgattagttgcactgcttgaggcatatgcactttatgatccagagatcgggtactgtcaaggaatgagtgatctcttgtcaccaataattgcagtcatggaggaagatcatgaagcgttctggtgctttgtgggtttcatgaggaaagccagacacaacttcaggcttgacgaggttgggataaaaagacagctgaaaaccgtctcgcagatcatcaagcgcaaggattcacacctctacaggcacctgcagaaactgcaggcggaagactgcttctttctgtaccgaatggtggtgggtctcttc

SEQ ID NO: 66363 - DNA, 348 bp, Zea mays
tttcgcgcaatgtcatctgctccaagtgcaagggcaagggctcgaagtctggtgcctcaatgaggtgccctggttgccagggctcaggcatgaaagtcactattcgtcagctgggcgcttggatgatacagcagatgcagcagccttgcaatgagtgcaaggggactggagagagcatcaatgagaaggaccgctgtccagggtgcaagggtgagacggtcattcatgagaagaaggttcttgaggttcatgttgagaaggggatgcaacacaaccagaagatcatctgccctggtgcagctgatgtagcgcctgatactgtcactggagacattgtattcgtcctcc

SEQ ID NO: 66364 - DNA, 254 bp, Zea mays
acagctcacagcaaacaccgcgaaccgcccccgctcgcaaacccgaccgagcaaagcgcaaagccccccaaccgcggatcaatccgcagcatcgatggcgcgcaaggcggagaaaaagccgacggcgaagaagcccgcggaggaggagcccgcgaccgagaaggcggagaaggctccggcagggaagaaaccgaagggcagcaaacgcctcaccgcgggcaagtccgacgccggcgaccgcaagaagggcaaga

SEQ ID NO: 66365 - DNA, 322 bp, Zea mays
ctccagcaatccctagcagacgccttccatcctcactcgctcgatggcccgcacgaagccgactgcgaggaagtccaccggcggcaaggcgccgaggcagcagctggcgactaaggcggcccgcaagtctgcccctgcgatcgtcggagttaagaagccccaccgcttccgcctcggcaccgtcgcgctccgcgagatccgctagtaccagatgagcacggagctgctgatccgcaagctgccgttccagcgcctggtgcgggagatcgcgcaggacttcaagaccgacgtacgcttccagagctccgctgtctccgcgctg

SEQ ID NO: 66366 - DNA, 330 bp, Zea mays
ggacgacgaggagcacgaggtttacggccaggagatccctgaggacggcgatatggacggcgctgacgttgatatggccgccgccggggacgacgcggcgaagcttcaggagcttgacgagatgaagcgcaagctgaaggagatggaggaggaggccgccgccctccgcgatatgcaggccaaggtcgccaaggagatgccaggaggtgaccctagtatatctacagctgaggcgaaggagcaggtggatgcccggtctgtgtatgttggaaatgttgattatgcttgcaccccagaagaagtgcagcagcatttccagcgtgtgaactg

SEQ ID NO: 66367 - DNA, 341 bp, Zea mays
gtcggcgtcttcctccgctacggcatcggggtaattaacactcagcttagcatctgattaattgatgcatcgtcgttctcatcagatgtgtgtaagtaaagtaactgcttgcttgcgatctactgtgtgcctgccctgcaggttgagttctggatctgcctgctgctcaccatcctgggctacatcccgggcatcatctacgccgtctacgtcctcgtcgcgtgacagcacaacatggtgtggtaggtatgacgacgatggtgaccgtccgctcgtgtcgccgggagctggaatatatgagacccagacccagtgcttctgatccatgcattccatgcatg

SEQ ID NO: 66368 - DNA, 163 bp, Zea mays
  unsure (1)..(163): unsure at all n locations
ctcccagcctctcttactctccggcgtcgccctgctcgctcgaagcagctgccggcaaaatggccccgaagagaggcggtagggcgccggtcaccgccaagaagaaggcggtagtgacgaacccgctcttcgagaagaggccgaagcagtctnggatcggcgg

SEQ ID NO: 66369 - DNA, 337 bp, Zea mays
gcatcgctcctctccccatcctgcacgctcctccgcctgattcccagcgcgtcgcacatctgctgctcgtcgcacttcaagagattcgatcgggttcgccggttcgcgcccgccgccatggcgacttcctcaggaccaaaggaggcgccacgaataaccctgggctccagaccgaggtcgaccccgccaccaaaggctacttcttgcaacaaacgatgttacgtgtgaaggacgcaaagtgagccttgacttctactcacgtgtgatcggcatgtcgttgctgaaaaggttggattctgaagagatgaaatgcagtttgtcatttctaggttacgag

SEQ ID NO: 66370 - DNA, 258 bp, Zea mays
caaatccagtaactcgcatcttcctgcgtcatccaagttctagcagcgcagcgctcggtttcgacaatgtcggggcgcggcaagggcggcaagggtctgggcaagggcggcgccaagcgccaccgcaaggtcctgcgcgacaacatccagggcatcaccaagccggcgatccggaggctggctaggaggggcggcgtcaagcgcatctccgggctcatctacgaggagacccgcggtgtgctcaagatctttctggag

SEQ ID NO: 66371 - DNA, 335 bp, Zea mays
ctccaattccctcgtagcagcagcaccagtagagtctccttcctctccggcggcgatgtctaggcgcggcaagggcggcaaggggctgggcaagggcggcgccaagcggcaccgcaaggtgtcccgcgacaacatccaagggatcacgaagccggcgatccggaggtttgcgaggagcggcggcgtgaagcgcatctccgggctcatctacgaggagacgcgcggcgtgctcaagatcttcctcgagaacgtcatccgcgacgccgtcacctacactgagcacgcccgtcagaaaaccgtcaccgccatggacgtcgtctacgccctcaagcgcc

SEQ ID NO: 66372 - DNA, 335 bp, Zea mays
  unsure (1)..(335): unsure at all n locations
tgccattgaaggtggcgctaccattgtccaacgtgcgagaaaagacgccgagacacgggagttcttggaagctgccaaggcctgtgtggaaatctgcaagtccagtggagtgccgctactgatcaatgaccgcgtagatgttgctctggcatgcgacgcagatggcgtccacgttggccaatcagacatgtcagcatgggaagtacgacggctcctaggacctgganaaatcatcggcgtctcatgtaaaaccccgggccaggccgaacatgcatngaaggattgcgcagactacatcgggctgtgcggtgtcttcccgaccacgacgaggcaaa

SEQ ID NO: 66373 - DNA, 66 bp, Zea mays
cgtctagatactacagagccccagagctcatatttggggctactgagtatactacagctagtgacg

SEQ ID NO: 66374 - DNA, 329 bp, Zea mays
attatgagcgattcatagatgttactctgacaagggataacaacattatcactggacagatataccagtctgtcatagagaaggagagaaggggtgattatcttagaaagactgtacaggttattcctcatgtcactgatgcaatacaacagtcgatacagtcagtgtcatcggttcctgtagtacggcagactcgtccagctgaagtttgtgttattgaagtggcaagcactgtaggtgatattgagtcgatgccattcattgaagcttacgccaattatccttttctcttggcaaggactaatactgcctcatacacgttagccttg

SEQ ID NO: 66375 - DNA, 103 bp, Zea mays
  unsure (1)..(103): unsure at all n locations
tggagggctcttcgccttgatactggtaactactcatggggaagtgaagctgttactcgcaagacncgtatcctcggcgtggtctacaatgcgtcaaacaatg

SEQ ID NO: 66376 - DNA, 312 bp, Zea mays
  unsure (1)..(312): unsure at all n locations
tgcgcagctccggctatgtcaatcttcgagtaccatgggtccgccgtggtggcgatggtggggaagaactgctacgcgattgncagcgaccggcggctcggcgtgcagcttcagaccatcgcgacagacttccagagggtgttcaagatccacgacaagctctacatcagcctctcagggctcgactacgacgctcagacgctgtaccagcggttggtcttcaggcacaagctgtatcagctgcgcgaggagagggacatgaagcctgagacttatgccagccttgtctctgcgctcctctacgagatgaga

SEQ ID NO: 66377 - DNA, 371 bp, Zea mays
gccgccgcaatcagggacaggtagctcgagcgcgcgctccacctgctccgacgcgatgcgggccaagtggaagaagaagaggatgcggagggctcaagaggaagcggcgggaaaatgaggcagagatctaagtaggcgcatcttgtgaccgaggatggcgagcttctcctgcaccatggctgagacgcgttgggatgattgtctccctttgtagacgtgctttgctgtagacgtaggcgatgtaaaccgtcctttttgattaattctagtatgttctgagactgggtttatattgtaatttgaggataattatatgatgctctaagtttattgatattcctgtcactcgaatatgttagatgtcctttctt

SEQ ID NO: 66378 - DNA, 353 bp, Zea mays
  unsure (1)..(353): unsure at all n locations
tgcgtcatctacgcgcaggaaggcgttccaagtgagggcatcagctcgggttgacaagttctcaaagagtgatatcagggtngtcccttcgcatctgtctggaaactgtcgcaaagctatgttgatcaggtagaagcgtgggaggtggcaagatgtgactggattctgtcgatgtcatggacgggcgctgtgtgcgaaatatcacaattggacctgtggttgttgatgctctgcgtcctgtgactgatcttccattggatgtacatctgatgattgtggaacctgagcagcgagtcactgattgtatcaaggcangtgctgatattgttagtgtccactgtgaacagacatcg

SEQ ID NO: 66379 - DNA, 383 bp, Zea mays
gtaccagtctgtgctttggagttattggtttcttgtatcttcggtatgttgcagaccctaaggttctttggatgtggtatgagccctatttgagggatgataaggagttctccccggatctaatggccgcaagacagccatgggtgtttatgtgcgtgatcttatacttggacagtactactttgatagtcttctaccaagaattcctctcccagtaactcgtcagattacagccaatcttgaaaagatgaaattgcccactaagctttctggggcaactggagactccagtcgtcagggatcagaagatactgcacgccgtcctccttcagtgaaagcttctctgtcaagttcctttggacagcgtgctccacatcgggctt

SEQ ID NO: 66380 - DNA, 382 bp, Zea mays
caaaaggttgtcatctctgctcctagcaaggatgccccatgtttgccgttggtgtcaacgagaaggagtacaagtctgacattaacattgtctccaatgctagctgcacaacaagctgcctggctcctctggctaaggtcatcaatgacaagttcggtatcgttgagggtctgatgaccactgtccatgccatcactgctacccagaagactgttgatgggccctcgtctaaggactggaggggtggaagggctgctagtttcaacatcattcccagcagcactggagctgctaaggctgttggcaaagtgcttcctgtccttaacggaaagttgactggaatgtctttccgtgtcgcaaccgtcgatgtgtctgttgttga

SEQ ID NO: 66381 - DNA, 320 bp, Zea mays
  unsure (1)..(320): unsure at all n locations
tggttgagattgtgatgggccttgaggagcacttcgacattagcgtggaggagtccagcgcgcagacaattgccaccgttgaagacgccgctgacctcgattggacaagcttgttgctgtgaaaggcataggctgcatctcttctatcatggtcttaccactctaggtttctatggtctgaagacttgtgatgttctccgcactgctgttgctattcncgtgtcgtaataatacgagatgttttaagcggctgaacacacggtggtgtaatctgttactggtaaggtgcattgttgtatgaagtcgttctcacccgagag

SEQ ID NO: 66382 - DNA, 393 bp, Zea mays
  unsure (1)..(393): unsure at all n locations
ggtgttctcgtacgaactcngatcggctcaggcgaacgcggaacaaacaactaaaatcccagcctgttcttgcgtgggtgtaacgtcgaggtcggcgcggttctcatccgcatcgaactcgatggtgcaagcgccgggagtaagatctgcaacgccaggctggttcttcttggagatgtggacgctggcaaatctagcttggttcttcggtatgttaagggacagtttgttgaattccaggaatcaacaattggagcagccttctattcccagaccttagcggtcaatgatgagactgttaagtttgaaatctgggatactgccgggcaggagaggtatcatagcttggctcccaggtactatagtggttcagctgctgccattgttgtctat

SEQ ID NO: 66383 - DNA, 375 bp, Zea mays
  unsure (1)..(375): unsure at all n locations
gaaggggtcggtttccttcacgatcgactgcaccaagccagtggaggacaagatcatggaggtcgcctcgctcgagaagttcctgcaggagcgcataagggtcgcgcggcaaggctggcaacctcggcgactccgtcaccatctctcgcgagaagaccaaggtcaccgtcacctctgacggacccttctccaagaggtacctgaagtacttgaccaagaagtacttgaagaagcacaacgtgcgggattggctacgcgtggttgctgccatcaaggaccgaaacgtctatgagctccgctacttcaacattgctgagaacgagggcgatgtagaagattagattgcactacgcttatatgntagtattgactcgt

SEQ ID NO: 66384 - DNA, 382 bp, Zea mays
gcagaacgatcggatctagcagaattctctcaacctcatcggcggcggcgaagagcgtgcggatcggagatggagacaagcgggtagaagaggatagctgcagcagcggccttctggaagccccgccacggtgtacctgtggctcgcgctcgccgaagcagcactgacgctcgcccaggctaagaaggacctaacggaggttacccacaaggtctacttcgatgtcgagattgacggcaagcccgcaggtcggattgtcatggggcttgttgggaagactgttcctaagacagcagagaacttccgagctctttgcacaggagagaaaggaattggcaagagtggcaaagctctccactacaaggggagtacattccacaga

SEQ ID NO: 66385 - DNA, 374 bp, Zea mays
caaaaacaactgcttgattggtggtgacgacttcaagagtggacagaccaagatgaaatctgtcttggtttatttcactgttggtgctggaataatagccagctcaattcgtgagtatcaacaatttggagaactacgatggcatgaacctgtctgcccctcaaacattcaggtccaaggagatctccaagagcaacgtggtggatgacatggtctcgagcaatgccatcctctatgagcccggcgagcatcccgatcatgtcgttgtcatcaagtatgtgccgtacgtgggagacagcaagagggctatggacgagtacacctcagagatcttcatgggcggcaagaacaccatcgtgctgcacaacacctgt

SEQ ID NO: 66386 - DNA, 76 bp, Zea mays
ccttgttgtgagtgcaacatatgcgttcattattccacaatgctcacttgcttcgagtgccattattccacagttc

SEQ ID NO: 66387 - DNA, 337 bp, Zea mays
tgacatcattggtgtgaccaaaggtaaaggttatgagggtgtggtcactcgttggggtgtcacccgccttccccgcaaaactcacaggggtctccgcaatgttgcttgtatcagtgcatggcatccggctagggtctcgtatacggttgcacgtgctggtcagaatgggtaccaccaccgcactgagatgaacaagaaggtctacaagatcggcaaggctggacaagagacccacgatgcctccacagagtttgacaggaccgagaaggacatcactcccatgggtggcttcaccactatggtatcgtgaagggtgactacttgatgatcaagggat

SEQ ID NO: 66388 - DNA, 322 bp, Zea mays
  unsure (1)..(322): unsure at all n locations
gctgcgtctgcagcgatgagtatgcttaggctacagaagaggcttgcctctagcgtcctccgctgtggtaanaagaaggtgtggtttgaccccaatgaacgcacgaatcgccatgccactctcgtcaaagatcaggagctgatcacgatggctgatctccggaacctgtgactgtcattccgggtcgatcggaagaaacttggccgacggaagcagcatatgggctaggaagagagggtatgccacgctcgatccgagaagtacctgatcgaggatagatctgcgcgcttctcaggagtacgggatctagagatgccgcata

SEQ ID NO: 66389 - DNA, 379 bp, Zea mays
caagatcacgatcaccaacgacaagggccggcttagcaaggaggagatcgagaagatggtgcatgaggctgagaagtacaatgcagaggacgatgaagtccagaaagaaggtggacgccaggaacgcgctcgagaattatgcctacaacatgaggaacaccatcaaggacgacaagatcgcctccaagctccccgctgaggacaagaagaagatcgaagatgccgttgacggcgccatcagctggctggacagcaaccagctggctgaggtggaggagttcgaagacaagatgaaggagcttgaggggatctgcaaccccatcatcgcgaagatgtaccagggcgagggcgcgggcatgggcgctgctgctggcatgga

SEQ ID NO: 66390 - DNA, 204 bp, Zea mays
taagaacgctaggagactcgtcgccagctcggggcgcgccctcgaagcaaccccccgcgaatgcccaacgagtggaggcgccgtgccgcaagaagttcggataaaggacgaacctctgttgagaagaagtcgaagcagttctgcatcggcggcgcgttgccgcccaagaaggacctgcaccggttcgtcaagtggcccaagtcg

SEQ ID NO: 66391 - DNA, 371 bp, Zea mays
  unsure (1)..(371): unsure at all n locations
ccgggtctatgtagcgtagtgagtcggaatcggctcgagaagtacaagnttgacaacctgtatggttgccgacactcgctccctgatggtctgatgacggcactgacgtatgatcgcggaacaagctgcgtggtctgcgaatacggtgatgtcggcatggtggtgcgtctgccgtcaagaaggtctgtgcccgtgtcagtttgaccgagatcgacgccatctgtgacctccaggctctgatcggagggtcttcaggtccttcccttggaggacgttgtctctgaagctgacatcttcgtgagcaccactggcaacaaggatatcatcatggttgaccagatgaggaagatgaagaacaatgccattgtctg

SEQ ID NO: 66392 - DNA, 362 bp, Zea mays
caatgatcaattgttctttccaggagttccaactgaagattataatacgcctggagaatctgctgagtatcgagctcctacacctgctggtgggacaaccagatccaggaatggatgctgaagatgttaatgatggtgacggatgatgatgatgaacttcgtcttaatgaagacgacgacgacgacgatgatttagatgaccttgaggaaggggaggatgaacctaacacacaacatcttgtacttgcacaatttgacaaagtgacgaggaccaagaatcgttggaagtgcactttgaacgatggaatcatgcatttgaatggtagggatgttctatttaacaaggcgacaggcgagtatga

SEQ ID NO: 66393 - DNA, 359 bp, Zea mays
cgagaagaggccgaagcagttcggcatcggcggcgcgttgcacgccaagaaggacctgcaccggttcctcaagtggcccaatgtcgtgcgtattcagttggctcgccgcattcctcaagcagcgccttcaagtaccaccggcgctcaaccagttcacccgcaccctcgacaagaacctcgctacgaacctgtttaagatgcttctcaagtaccggcctgaagacagggctgccaagaaggagaggcttctgaagagggccaagctgagaatgaaggataactgttgagtcgaagaaaccattgttgtgaatatggccttaccatgtgacttactcattgacagaacaagctcacttgtg

SEQ ID NO: 66394 - DNA, 296 bp, Zea mays
gctttcgaatgtgttcatgatggctggggtgttgctgtgctggtgggtgtgccacataaggacgctgagttcaagacccaccgatgaacttctgaacgatagacgctgaaggacctcttggcactacagcacgactgatctgcaatgtgtgactgacatgaaagactgagtgagagtcatcagacacgccgtcgcggatacaagctcgcctatgcatgtgaggatcgtgatatcgatgagactaatcgcgctattgtactgctggtgggtataaaagatctactgcttcgtagaga

SEQ ID NO: 66395 - DNA, 369 bp, Zea mays
  unsure (1)..(369): unsure at all n locations
ccggcccgaaaccgaaagcatccgcaccaatctctgcgtctcttcgtcttcggctgcgcggcggcggcagcagcggaggagagtgaggacccgctgtccggcgacatcccccgagccagaccatctacgtcaacaacctcagcgagaaggtcaagaaagaagaattgaagagatcgctttatgccttgtgctcacagtatcgaaggatactggatgtggtggcctgaaaacacaacaactgagagggcaagcatgggtggcgattagcgaaattacagctgctaccaatgctttccgtggattgcaagatnttgatttctacnggcaaaaaatgcgagtacagtatgcacaaagcaaatcagactgtat

SEQ ID NO: 66396 - DNA, 390 bp, Zea mays
tgccgtttgattcaccagaggctcaacagttgaataaggatatattcgaaactatctactatcatgctctgaaagcttctgctgaacttgctgctaaagaaggtccctatgaaacatatgaacggagccctgttcagaaaggcaatctccaaacctgacaatgtgggatgtattgccatctaaccagatggaactggccatctctaagggagaccatttcaaaagttgggataagaaattctctccttgttgctccaatgcccactgcttccactagtcagattcttggcaacaatgagtgttttgaaccctacacgtctaatatatacagtcgacgtgttctaagtggggaatttgttgtggtcaacaagcatcttcttcatgatctga

SEQ ID NO: 66397 - DNA, 363 bp, Zea mays
gcatgcagcgacgtaactcggaatctggtcgaccttcggatctcgcattcagcgcacgcacggtgtgaaggaagggggacgcggaggaagatggggctcgcgttcgggaagctcttcagccggctcttcgccaagacagagatgcggatcctcatggtcggcctcgacggcggcggtacaaatcacaatctctaatagttaaagctcgggagatcgtcacaccatccacacatcggttcaatgttgaactgtgagtcaagacattagcttcatgtctggatgtcggggtcagacagatcgactcttggagcatactccagaaaccaggtctacttgtgtggcacatgactgacgtttgtaagc

SEQ ID NO: 66398 - DNA, 131 bp, Zea mays
  unsure (1)..(131): unsure at all n locations
canaactttatgcagaaccctcagctgcaggagtttgaattccagaactttccgacttcttacctccgctgtgctgctcatcgtgttgcacaacattatggcttagagactatagtagcagatagtttagt

SEQ ID NO: 66399 - DNA, 378 bp, Zea mays
  unsure (1)..(378): unsure at all n locations
tggcagatagtcggtgatagatttacgcaccaattagcaatggagctcatcaaggaatggtaccttgcttctcaggccacaacaggaagcactgtatgggatgacgatgatgcttttgatgcctggtaagacagtcctgaatacttacaggagcatatccanaagcttagggctcataaagtgtctcattcgctctctgatcttgctgactccagttcagatctgcaagcattctcgcagggtctttctacgctattagataagatggatccctctcagagagcgaagtttgttcaggaagtcangaaggtccttgattgatgataccgacacatcgagcacaatgtgtgcatgtcacatctnntttgtctagtacat

SEQ ID NO: 66400 - DNA, 325 bp, Zea mays
  unsure (1)..(325): unsure at all n locations
cggagttactgcgccttctctaacaggggtggtttggttcatccccatacatccgttgaagaccttgacgagctctccacgctcctccaagttcctcttgtcgcaggaactgtgaacagaggaagcgaggtcattgctgcaggcatgacagtgaacgactggactgcctnttgtggctcggacacgacaccaccgagtctcagtcatcgaaacgtctcaactgagaaagggcacccactggatgggatgcatgagagtctctgtagcagtacggactggggcacagatatggcaattgcttgcaagtgtaaaacaagcgatacag

SEQ ID NO: 66401 - DNA, 306 bp, Zea mays
  unsure (1)..(306): unsure at all n locations
cgagcagcaggattcaccgaagagagtgggacgctgggtgatatatgggagattgtatcaaacagtgatctagttttgctactgatatcatgttctgctcaggctgataactacgagagaattttctcggacatgagaccaaacagtattcttgggttgtcacatggatttctccttggacatntgcaatctctgggtnttcgattccctagagcatcagtgtgattgctgtatgncccaggggaatgggcccatcagtcagaagactttatgttcaggggcaagagatcaatggtgctggtatca

SEQ ID NO: 66402 - DNA, 225 bp, Zea mays
  unsure (1)..(225): unsure at all n locations
tgttgttgccgttctacctgcacgctgcgcctaacgctggcaccctcttacaactgcaacaattgctgccattcaaccaacttgctttgacaaacgcaacagcgttctaccnacaacccatcattggtggtgcgctcttntagattgcttatgangtatacttcaataatgaagttttttggatgatgtttgtggcttcccagagatgagagagtacatttctag

SEQ ID NO: 66403 - DNA, 219 bp, Zea mays
ggcctcgtgtctatataggttgcatgaaatcgggcgaggttttctctgacttaacccacaagtggtacgaatcagactggtggaaatttggtgatgggaaatcgtactttcgacacgcttctggtgaaatgtttgtcctatcaagggcatagctcagttcatttctataaacaagtccgctctccggacatatgcccatgatgatgttagtgttggatc

SEQ ID NO: 66404 - DNA, 280 bp, Zea mays
tgacactccgccacctccaccctcgaatcgttccccactatggcgtcgcagggatcctccgtcttcgccgcactcgagcaggccccggaggaccccatcctcggagtgaccgttgcctacaacaagggatccagccccgtgaaagtcaacctcgggggtcggcgctaacggaaccgaggaagggaacccctagtgctgaacgtgttaagcgcgcgagcaatgttgatcataatcgtcagtgtcaggagtactaccatcacgttctgctgaatcatagctg

SEQ ID NO: 66405 - DNA, 373 bp, Zea mays
  unsure (1)..(373): unsure at all n locations
atacaagcaggtgaatggtcgcatcatcaggaagcgtatccatgtccgcgtggagcatgtgcagccgtctcgctgcacagaagagttccgcctgaggaaggtgaagaatgatcagctgaaggcggatgccaaggagcgctgcgaggtcatcagcaccnnagagcagcctgttgggtccaaagcatggcttcatggttgaggggactaccatcgagaccgtcactcccatcccgtacgatgtggtcaatgatcttaagggcggatacttaggtgtttgtctggtctttctacctgttggctttgctgtgttactctagtgcgtacaatnttgctcacactgagcagtagtatgaacctattgtgtgttcatgtt

SEQ ID NO: 66406 - DNA, 368 bp, Zea mays
  unsure (1)..(368): unsure at all n locations
catctatcctctgaagattgtcatcaagacctgtggcactaccaagctcctgctcacaattccaaggatcctagagcttagctgagagctgtctatgcctcttgctgctgtgaaatagctccgcgggacgttcatctntcctggcgcacagccagccccccaccggagcttctccgaggaaagtgctgtacttaaccgatacnnttggggcctgaagtctggtggcaatgcttatgtgattggagatgcagcaagaccaggacagaagtggcacatctactacgccactgagtacccagagcaaccaaatgtcaaccttgagatgtgcatgactggtctggacacgaagaaagcttcagtcttcttca

SEQ ID NO: 66407 - DNA, 368 bp, Zea mays
  unsure (1)..(368): unsure at all n locations
gtcagacaaagcctgttttccacaagaaggcanaaacaacaaagaagattgtgctgaagctgcagtgccagagctgcaagcactactctcaacacccgatcaagaggtgcaagcactttgagatcggtggtgacaagaaggcaagggaactctctgttctaagcgtatcataaacttgctcagggtctcaagtatctgtcagaatttaccattacaaacaccctgtgcttagcttctgcatatgttcttttgtcacatctttttggtacgttgtagtttgtatgagaccaagctattgtttcgtgttattattatatttcatgaaattgtcaacatgaccgtttgcttgactgtaaacatagttctga

SEQ ID NO: 66408 - DNA, 129 bp, Zea mays
  unsure (1)..(129): unsure at all n locations
tgcaagcccgtgccatctttgaagctgctatagcgatgaccaaccaaaggcgtcaagtcgttccagagataatggttcgctctggtggaacaccgcaggagattgggacatcangtgggcgctatccgt

SEQ ID NO: 66409 - DNA, 313 bp, Zea mays
ctatccagcactcgagagaaactccagagatcactggaaccaagctgtccgtagcctgacgctgaatgtccgcaagatcttctctgatcacgattctgcattttttggggagtgcgatcagaggttcagtgacgaggagctcaagcaggaggaatctgattcgaagcgagaagccctatggatgcgcttggaggaaatggcggcctcaaaacctcgcgaaaacagtcccttaggcgcaccgaatggcaaacccagccaagctgctggctaggatagccaccatatcagccgcagccgtgtaactctgactctg

SEQ ID NO: 66410 - DNA, 122 bp, Zea mays
  unsure (1)..(122): unsure at all n locations
ctcgtgtggccgtcgtctcncgttcggaacgccaagcccacctcaggcgaaatggccccaagcgaggtggcagggcgccggtgccggccaagaagaagacggataaagtgacgaactctctg

SEQ ID NO: 66411 - DNA, 129 bp, Zea mays
accccggcgaggagtatcatgagcttatggaagagttcatggctgctgttaagccaatctacggcgagaaagtctcattcagtttgaggacttcgcgaatcatagtgcttttaatgtgcttgcaaaata

SEQ ID NO: 66412 - DNA, 337 bp, Zea mays
  unsure (1)..(337): unsure at all n locations
cacctcgccgtcggcatgacaacagggtcgacgccgggttcggccccctctcagagataacgaaattctaccaaggattccgttgccttgtacgcggtgcaatgctataagtgctacaaatggagtacggatccaaaagagatttgagacggctcgtgagacctcacaagggtccatggtctccagcaacgaccagcagccttgtgagacgatgctgcattgagacgacagcagccgatctgggtttggacagcccacataccaagcctccccagagaggaaggctatggttagaggggcgatacacanaatggccatttatgcatgccaatggagc

SEQ ID NO: 66413 - DNA, 142 bp, Zea mays
  unsure (1)..(142): unsure at all n locations
ggacaactgaaggcgaaactagcagagttgaggacacgactattagagtgtccanaaggttccagcggatgtggagatggttctcacgtcacaaagtctgggcatggtcgtgctgcactttattggatttcccagtgttgga

SEQ ID NO: 66414 - DNA, 345 bp, Zea mays
  unsure (1)..(345): unsure at all n locations
gaacgagttccagaccaacctggtgcgctacgcgaggatccacttcatgctttcgtcctacgctccagtcatttctgctgtttagggctacacgagcagctgtccgtggccgaaatcaccaacagcgccttcgaggcatcctccatgatggcacaatgcgaccgccgccatggcaagtacatggcatgctgcctcatgtaccgtggtgatgtgggtcccaaggacgtgaacgctgctgtggccacaatcaagaccaagcgcaccatccagttcgtggactggtngccgactggcttcaagtgcggaatcaactagcagctttccagcgtcgtcaccggcggtgac

SEQ ID NO: 66415 - DNA, 198 bp, Zea mays
tttcctccgtcacgcagcatctcaacccatggccaagatcaagatcgggatctttcggttcggcaggatacggaagcttgtggccaaggtggccctgcagagtgacgatgtccagctcgtcgccgtggacgaccctctcatagcacgactacatgaccttcatgttcaatacgacactgtgcacggacagtggaagca

SEQ ID NO: 66416 - DNA, 304 bp, Zea mays
tgtgaatactcgacctgacttggcatattcagttggatatgtgagtagatttatggaggagccccatatggatcatcttgcagctgtgaagcagatcctgaggtacatagcagggacaagagattggggcctgttctattcaaggagaaatggagggagtgatgagctcttgggctatagtgacatgatatggctggcgacttggatggcagatagagcacatctgggatccttttctttcttgggaggagtcgaatcactggcaatcactaacttattgtggtgcgctatcagttgtgagcga

SEQ ID NO: 66417 - DNA, 159 bp, Zea mays
attcggctcgagccgcagttcacccgcgcccgagacgcaaccccgcgccaggagtaagcctgctctttcatcgatattatcgatatggcgccggaggagaatgtctacatggccaagctggctgagcaggccgaaaggtctgaagagatggttgagtat

SEQ ID NO: 66418 - DNA, 308 bp, Zea mays
tgctgaatatgttgttgaatcttctggtgtcttcacgacgactgataaagcatcagcacacttaaagggtggtgcaaagaaagtggtgatatctgcaccatcagctgatgctcccatgtttgtagttggagttaatgagaatagctatgatccaaagatgaatgttgtttctaatgcaagttgcactaccaactgccttgctccacttgccaacgttgtccatgaggaatttggcatcgtggagggccttatgacaactgttcatgcaacaacagctacccagaagaccgtcgatggtccttcgatga

SEQ ID NO: 66419 - DNA, 293 bp, Zea mays
taggccgaagagcacaaagcaaaacgcactgcccgatttgaacggcccatatcactcaacgtaaccctaaaaccgctgccgcaaccacgtataaaaacaccgcacgcgacgccgccgccgtcctattcctcggagaggagaagccgccgcaccagcaatcacagcagcccggagaacgccctggtccacaagatgcagatcttcgtgaagacgctgacagggaagaccatcaccctcgaggtcgagagcagcgacacaatcgacaatgtcaaggccaagtccaggacaaggag

SEQ ID NO: 66420 - DNA, 308 bp, Zea mays
tggcgcgcggcgtggtggctggggcgaagggtgtcgctgccggcggcggcggcaagaagaagggctccgtcacgttcacgatcgactgcaccaagcccgtcgaggacaagatcatggagatcgccacgctcgagaagttcctgcaggagcgcatcaaggtcgctggaggcaaggccggccagctcgcgagggcgtcaccgtcacccgcgataagtccaaggtcaccgtcacctccgacgggcctttctctaagaggtacctgaaatacttgaccaagaagtacctgaagaagcacgatgtgcgtgact

SEQ ID NO: 66421 - DNA, 299 bp, Zea mays
atgaaatcttggaaagatgttcttccacttcagaactgtattactcttgtgattacactaggcatgcttgagatggcattgtggtattttgagtatgcttgagttcaatgagactggagttcggccataaggtatcacattttgggctgtcacgtttggaactgtgaagaggacggctgctgaattattgtcctcattgtctcaatgggatatggtgttgtcgcacctaccttgggtggcttgacatcgaaagtggtcatgcttggaggaacgttctttctagcaacagaattcttgag

SEQ ID NO: 66422 - DNA, 322 bp, Zea mays
ttcggctcgagtatgagattgtgaaggaagtctcatcctacctcaagaaagttgggtacaaccctgataagattgccttcgttcccatttctggttttgagggcgacaacatgattgagaggtccaccaaccttgactggtacaaaggcccaaccctgcttgaggctcttgaccagatcaccgagcccaagaggccttcggacagccctgcgtctgcccctccaggatgtgtacaagattggtggtattggaactgtaccggttggtcgtgtggagactggtgtcatcaagcctggtatggtagtcacctttggccaactgg

SEQ ID NO: 66423 - DNA, 313 bp, Zea mays
acttggagtaccagtcttggaatggccatctagggttaaaattgcggctggttcagcacgcggaatagcctatcttcatgaagattgtaatgacatttttcattctttcacctgtttttgtgatgattttcactactctcagtctcatgcttttttgtttaattcttttccttggcaggtcacccagaataatccacagagatataaagtcgtctaatattttgctggataataacttcgatgcattggtaagaatgctttctacataatttcagtaacatcttataatggagtcatcagtcattgcattggt

SEQ ID NO: 66424 - DNA, 305 bp, Zea mays
tattggttttgcagggtgacgagtgatgtatgacggatgatactctgtccaagtgtttgcagtcagggaaaaaatctcgtcgttgtcggcctaaccgggttttctcgaaggactttctagatgcagtagattagtgccgtcttctgagtagtttccttgcaagtgtcgtcccgtccctggagagagcagtttagtttgtagtttcttcgcttcatcggcactcgaccgttgttggattgggatgtttagcctgcagtctgtacttaccccaagcatctatggtgcctgttttaaatctcagatca

SEQ ID NO: 66425 - DNA, 304 bp, Zea mays
gtctccttctcttcgcttccaatctgtcgaagcgagggcgtggaggttcggctggtaacaagttccggatgtcactgggtctaccagtggcagctactgtgaactgtaccgataacgttggagccaagaacctgtacatcatttctgtgaagggaatcaagggtcgccttaacaggcttccttcgcctgtgttggtgacatggttatggcgaccgtgaagaagggaaagcctgaccttagaaagaaggtgatgccagctgttattgtgaggcagcgcagccatggcgccgaaaggatggtgtct

SEQ ID NO: 66426 - DNA, 241 bp, Zea mays
gtgaccctccctcagccgcgtcgcgtcgcatcctacgatccacagctctctctgctcgcagccattgcgatgaactacccgaccgtgagcgccgagtacagcgaggctgtggagatggccaggcgctactccgagcgctcatcgtcgagaagagctgcgcctcgctcatgctccgcctcgtgtcggatccgcggggacgttcgacgtgtcgtcgagaaccggcgatccattgggcacgatg

SEQ ID NO: 66427 - DNA, 275 bp, Zea mays
tgacattggaacgggctttgggcatttcgcaattgctaatgatgatgtgtacaagttagctgagaatatcaaatccaagggtggtaagatcacccgcgaacctggtcctgtcaagggaggatccactgttattgccttcgcacaggatcctgatcgctacatgtttgagcttatccagagggctgacaccctgagcctctttagccagtcatgcttcgtgttggtgaccttgagcgttctatcaagttttatgagaaggccctagggatgaagct

SEQ ID NO: 66428 - DNA, 320 bp, Zea mays
ctgcttcagtttgtgaaaacccagcccatcaaccctacaggctccaacaagcaatcgcaacaagcaacttacctttatcacccctgttctttcaacaatcgccagccctatctttggtgcagtcattggtacaaaccatcagggcacaacagctgcaacaactcgtgctaccagtgatcagccaagtagcttggcaaacctttctccctactctcagcaacaacaatttcttccattcaaccaactgtctacactgaaccctgctgcttatttacaacacgataactactaccattcagccagctagctactgcctactc

SEQ ID NO: 66429 - DNA, 348 bp, Zea mays
agaagatcccggtcgtgatccgaggacccggcggtgtcggtcgccagctcggtgccgagcactcgcagcggctagagtcgtacttccagtcgattcctggccttcagatggttgcctgctccactccttacaacgcaaagggcctgatgaaggcggccataaggagcgagaaccccgtggtgctctttgagcacgtcctcttgtacaacctgaaggagaaaatccccgacgaggagtacatctgctgcctggaggaggcggagatggtgcggccaggtgagcacgtgaccatcctcacgtactcacgcatgaggtaccacgtgcatgcaggctgccaagacgctggtg

SEQ ID NO: 66430 - DNA, 349 bp, Zea mays
aaccagggatcgagactgaacagcagtccgagacgccatgaacgtggaggaggaggtcgggaggctcaaggaggagatccataggctcggccagcagcagcccgatggctcttacaaggtcaagtttggcgttctcttcaacgacgatcggtgtgcaaatatctttgaagcactagttggcaccttgagggccgccaagaagaggaagatcttgacctacgaaggcgagctgcttctgcaaggtgtccatgacaacgtggagataaccctgttgcccccacctgcagttgctgccgcttgaagcgaagagcaacaccaagttctcgattccatacaactcgtatgcttg

SEQ ID NO: 66431 - DNA, 346 bp, Zea mays
atcggccgagctccgcgccgctcccgctccgccccagcgcatcgctcgccgccacagcgtatcgcgacctcatcgatcaccttcagctttcaatcatggccgacgtctatgtctaatcggaggctgccgccggcgctcccaagtagaggacgttccgcaagaccagctaccgcggcgtcgaactagatgcgcttatcgacatgtcgactgacgacctcgtccagctcttcaccgcgcgctccaggagacggttccagagggctctgaagacgaagcccatgtcgctcatcacgacactgcgcaacgcgtacaaggatgctcctactggtgagaagttcgagccagt

SEQ ID NO: 66432 - DNA, 341 bp, Zea mays
attcggctcgagatttgaggatgaacgtgatggcaatgatgctatacgggctcttgatggttatccatttggccctggcagacgcaggctttcagtagagtggtcacggggtgagcaagctggtagacgtgatggcaacaaaccagaagcaaatactaagccaactaggacactgtttgtcatcaactttgatccaatgaacacaagagtcagtgacatcgaaaggcacttcacaccatttgggaacatatcaagtgttcggataaggaagaactttgcttttgttcagtttgaaactatggaagaagcaagaaaggctcttgaagctactcatgctacca

SEQ ID NO: 66433 - DNA, 362 bp, Zea mays
gaattcggctcaataggggcgcgggcggacaaggagcaggcggaggaggagttgtgccaagccacaatgggtatctcgcgtgactcgatgcacaagcgccgagccaccggtggaaagcagaaggcctggaggaagaagcgaaagtatgagcttggtcgccagccagccaacaccaagttgtcaagcaataagacagtgaggagggtccgtgttcgtggaggtaatgtgaaatggagggctcttcgccttgatactggtaactactcatggggaagtgaagctgttacccgcaagacccgtatcctcgacgtggtctacaatgcatcaaacaatgagcttgtgaggacacaaacccttgtgaa

SEQ ID NO: 66434 - DNA, 258 bp, Zea mays
atgaggtggcttacgccgtgggcaaggatacgagaattggccccaagttcctgaacgtcagtgttgggttcggtggctcatgcttccagaaggacatcctgaacctggtgtacatctgcgagtgcaacgtcctgctcgaggtggccaactactggaagcaggtgatcaagatcaacgactataagaagagccggttcgtgaaccgcgtcgtggcctccatgttcaacatcggcgccggtaagaagatcgccgtcctcg

SEQ ID NO: 66435 - DNA, 347 bp, Zea mays
attcggctcgaggcacactgagagcgacaaagctagctctctccagggatcggattcggatcaccatgccgtccaccgtgaactccgcgtccctcgaccagaaccttgagctcgccaagcaatgctcgcgagaggccgccctcgcagggttcaaggcagcagctgtcgcgaccgtcgcctctgcagttcccaccctggttagcgtcaggatgctgccatgggccaagggcaacatcaaccccgctggccaggccctcatcgtctccacagttgctggcatggcgtacttcatcgcggcggacaagaagatcctctcgctggcgaggcagcactcgtacgagaacgcg

SEQ ID NO: 66436 - DNA, 336 bp, Zea mays
cgctcctcgccgcgcctatcatccttgatctggtgctcctggctgagctcagcaccaggatccagctaaaacctgagggaacggacaagttccactccttccacccggtggccaccatccttagctatatcaccaaggcaccactggttccgtccggcacaccggtggtgaatgctctggcaaagcagagggcgatgctggagaacatcatgagggcctgcgttggcctggccccagagaacaacatgatcctggagtacaagtgagccaagcggcgtggcctgcagctggatatggaggaggctgcacgaagggaactagagaggcgagattagt

SEQ ID NO: 66437 - DNA, 357 bp, Zea mays
  unsure (1)..(357): unsure at all n locations
gattcggctcgatgttcaacaccagccgccgtcatgtcgaagcgaggtaggggaggttcggctgggaacaagttccgcatgtcactgggtctaccggtggcggccacggtgaactgcgcggacaacacgggcgccaagaacctctacatcatctccgtcaagggcatcaagggccgcctcaaccgcctcncgtccgcctgtgtcggcgacatggtcatggacaccgtaaagaaggganagcccgacctcaggaagaaagtgatgcccgccgtcatcgtccgccagcgcaagccgtggcgtcgcaaggacggtgtctacatgtacttcgaagataatgctggagtgattgtgaatcca

SEQ ID NO: 66438 - DNA, 279 bp, Zea mays
attcggctcgagcggacgcacacacagcccggtctccgatacacgatcacctcgtcgatccaagatgcagatcttcgtcaagaccctcactggcaagactatcaccctcgaggtggagtcttctgacaccattgacaacgtcaaggccaagatccaggacaaggagggcattccgccggaccagcagcggctgatcttcgctggcaagcagctgggagatgggcgcacacttgccgactacaacatccagaagcagagcactctccacctggtgctccg

SEQ ID NO: 66439 - DNA, 332 bp, Zea mays
cgctggtttaggagaagaaaaggcggcgcgcggcggaaaaccctagcttagctcctctccggcgtcaagtgctctccggtttgagggcgcgatgagggtgaaggtgatttcgcgttccaccgacgactacacgcgcgaggcagccaggacctgcagaaagtattccgcaactatgatccagcgcttcgtagtcaagagaaagctgttgagtatactcgggcactcaatgctgccaagttagagaagatatttgctaagccatttatcggagctatggatgggcatattgacgcggtatcgtgcatggctcaaaaccccaatcatttgaaagc

SEQ ID NO: 66440 - DNA, 311 bp, Zea mays
tggatattctgttggacaatctctcgtggaagaggtcaacttgagctacgaacttctcttattgagaaggcgaaggcaaagggggtttctcttttgcttcccactgatattgtagtagcggacaagtttgcagctgatgctgagagcaagattgtccctgccactgctatccctgatgactggatgggtcttgatgttggccctgatgccaccaaaacattcaacgaagcattggacatccacaagactgttatttggaacggcccatgggagtgtttgagttcgagaagttgcagctggcactgaggcga

SEQ ID NO: 66441 - DNA, 336 bp, Zea mays
agatccgcagttccccgcgccagggacgcaaccccgcgccaggagtaagtttgttcttttatcgatattatcgatatggcgagggaggagaatgtctacatggccaagctggctgagcaggccgaaaggtatgaagagatggttgagtatatggagaaggtggctaagactgtagatgtggaagagctcactgttgaggagcgtaacctcttgtcggtcgcatacaagaatgtgattggggctcgccgtgcttcatggcgcattgtctcttctattgaacagaaggaggagtccgtaagaacgaagagcatgtgaaccttatcaaggaataccgtg

SEQ ID NO: 66442 - DNA, 284 bp, Zea mays
  unsure (1)..(284): unsure at all n locations
taaatgtgggtcggcaagatgcanaaaaagcatttggaagagcatgtgtcgaatttgatgtcatcaaacatagttcagaccctaggaaccatgctcgacacggttgtcttttagtctactaataatattgttgtcccaaactgaaacatagccacactatcgaagcacacgtgcaatgagcttgacgccggatacattttggttctaaggtctgtttatgaatggatttgtctacatttcattgttgttaaacttcctaccttttctatcaaagcttaagtgcg

SEQ ID NO: 66443 - DNA, 344 bp, Zea mays
  unsure (1)..(344): unsure at all n locations
acgagaagagaccaggccgaaggaaaacaatcctgaaaccaagccatgggtctgcaggaggaatttgaggagcatgctgagaaggcaaagaccttgcctgagaacacgagcaatgagaacaagctgantctatacgggctctacaagcaagccacggttggagatgtgaataccgatcgtccgggcatattctaccnaaaggacagggccaagtgggatgcctggaaggctgttngaggcaaatcgaaggatgaggcgatgaatgactacatcaccaaggtgaagcagctccaggaggangctgccgctcttaaaagtctcttaatagtgttgcccaacagcta

SEQ ID NO: 66444 - DNA, 256 bp, Zea mays
cgcagctccaaagccactcccaaacccccgcttccagaaccttctcgaagctccccgccgcctcctccactcgcaccgatggcgaaggaaccaatgcgcgtgctcgtcactggcgccgcaggacaaattggatatgccctggttcccatgattgctaggggtgttatgcttggtgcagaccagcctgttattctgcacatgcttgacattccgccagcagctgaagcccttaatggtgttaagatggagttggttg

SEQ ID NO: 66445 - DNA, 353 bp, Zea mays
  unsure (1)..(353): unsure at all n locations
atctaccgtccgataccccaagcaccagcgcggcggcggcgaccatggctgtcggaaagaacaagaggatctccaagggaaagaagggtggcaagaanaagaccgtcgaccctttctctaagaaggattggtatgacatcaaggcaccgtcggtgttcagtgtgcgcaacatcgggaagactctcgtatccaggacacagggtaccaggattgcttctgagggtctgaagcacagagtctttgaggtttgcctagctgatcttcagggcgacgaggatcaagcttacaggaaaatcaggctccgtgctgaagatgtgcagggcaggaatgtgctcacaaacttttggggtatg

SEQ ID NO: 66446 - DNA, 339 bp, Zea mays
  unsure (1)..(339): unsure at all n locations
cattnttgaggacgttggtgaggttgttgatgttcgttttcctacacatgatgatggcaatcgtaaaggattttgctatgttgaatttgcttcagctgaagctgctgcaaaggcatatanagagaagcaatcaaaggagctgcatggtcgtgaagtaagacttgacttcgctaaaggaagaagtacacaaactcctcgcagcggcaatgatggatctttccagaaggctgctcggggtaacagcagctcaatatttatccggggctttgataaaaatctttcagaggatgagatccggagctctctcgaacaacattttagtgattgtggtgagatgac

SEQ ID NO: 66447 - DNA, 306 bp, Zea mays
tctgaagcagtttggcaaaagataagtgacccaaaaagtattcaagacatactcaaacaagtatacgctgaccattcaacaaatgtggacaaagtattctctcgtattgtggagataacacaacacccagcagctgctgcatcgtttgcctccattatgtttgctccaaggggtcagatatccttccaagaggccatctctaggtgccaagaccaaggcattcctatatctctcatgtatggaagagaagatccttggattagacctatttgggagcttaaagttaaacagcaaagtgccgaagca

SEQ ID NO: 66448 - DNA, 258 bp, Zea mays
tctgtagaccagtagctcggaatgacggtcgagatcctcctccagagctcgtcgccaccggccaccgccaccctcgatcacgccgtccgtcgaggtaaggtcagcatggtgagggtcagtgtgctcaacgatgcgctcaagtccatgtacaacgctgagaagattggcaagaggcaggtcatgatcaggccgtcatccaaggtcatcatcaagttcctgacggtcatgcagcgccatggctacattggagagttcgag

SEQ ID NO: 66449 - DNA, 347 bp, Zea mays
  unsure (1)..(347): unsure at all n locations
gaggagatggttcaagtggctctattgtgtactcaatatcttcccggtcataggcctaaaatgtcggaagtggtacgcatgcttgaaggtgatggactagcagaaagatgngaagcttctcatagagaaaacacaacaaagtgcaaaccacaagagtcctcttcatcagataggtattctgatctcactgatgactctttgttgttagtccaagccatggagctctcaggacccaggtgaattaattgtctagtggtacatttttatatttttgttttaaaggtttttanaagacagcatatgaaatgcaacagcatatgcatgatagttgaatctttgttacaaat

SEQ ID NO: 66450 - DNA, 348 bp, Zea mays
tgaagtgaaggatggcgaagtcaataagctctatgaagctaaggtctgggagaagccatgggagatattcaagcagctgcaggaattcaagcctgttgaagagggtgctagcgcctaaggatctgtcgtctccctgtgcaatttgctgcctgaagcgcaaaactaagttgcagaataaggagctgcttcggaacatgccagagcatgcaccctcgcgtattttcataaaatcagtgctcttaatgtaatatcttgaattgccgtgccatgtgtaataagtaatatcatgaataacagttgctattatgggttctaaatgtgtattaacagccatccatggcagagttc

SEQ ID NO: 66451 - DNA, 339 bp, Zea mays
tgtttgtggctgcctggagggcgtctaaaaattatagataggaaaaagaacattttcaagttagctcaaggagaatacatagctccagagaagattgagaatgtctatgctaagtgcaagttcattgctcaatgctttatatatggtgatagtttcaactcttccctagttgccattgtagcagtcgaaccggatgtgttgaaggcttgggctgcatcagaaggaatccagtacgaggacttgagacagctctgtgctgatcctagagcaacagctgctgtcctggctgatatggattccattgcgaaggaagcacagctgagaggtttcgagtttgct

SEQ ID NO: 66452 - DNA, 347 bp, Zea mays
attttctttggacttgtttttgccggggttggagcatacgctgtgtacaaatacaggctgcggagttacatggattcagagatccgtgccatcatggctcagtacatgcctctggataaccaagaaggagcaaaccagcatcaggtcgtgcacgccaatgatatctgaagctgcactccttttctgaagcagaaatagagggggcgtgcaacatttcacttgtgctgctgcatcattgggtcatgggttttacaggtataggtcaactaggctcaaagatacacaggttatgcgagatcaagatctactgtaccatgaattaagatttaagagagagacgttgtgcg

SEQ ID NO: 66453 - DNA, 343 bp, Zea mays
attgacttctacaccagttcagggaagagaaagcctgaccaagtcatcatcttcagggacggtgttagtgaaagtcagtttaatcaggtgctgaacattgagttgcaacaaatcattgaggcttgcaaatttcttgatgagaaatggaatcccaagttcacattgattattgccgcgaagaatcaccacactaaatttttcattcctggaaagccagataatgttccagccggcactgttgttgacaacaaagtctgtcatccaaggaacttcgatttctacatgtgttcacatgctggaatgattgggactaccaggccaactcactatcacatcctgcatg

SEQ ID NO: 66454 - DNA, 355 bp, Zea mays
ccgagagagctgctttggaaaagcgacgtcctcctcttctgaatgctgactgcgttgcatagactggaccctcaagtcagtaaatcgaaatgcctacattatgattgccatcaccgggaaaggtttcttcaaagcttcagtgctcgcaactggattaataatgaagaacattctgcgcatcggaaaagtcaacgtcattggagatgtcatcctcttcctgggaaaactctgtgtgagcctattctgtgcgcttttcgcctttctgatgttagacacccacaagtacaagtccgcacacaacaagatattcactccagttatccctgtcctggtaacatgggccctcggctacgta

SEQ ID NO: 66455 - DNA, 344 bp, Zea mays
taagaagaaaaccgtggaagatttctgcgacagaatccacaaggacatggtcaaacaatttaaatacgctctggtatggggttccagtgtgaaacataagcctcagagagttggcaaggagcatgagcttgacgatgaggacgtcgttcagatcattaagaaaatataggcgtatcatgtggtggaacaaaacctgttttttctggaaaactgggagcgttgaggattttgttgagtagtagcctcgcgagaagagcttgaactcggcctttgcttgttggtgaggctcatatgtaatgttccctgttctcagaaaatttgctttgatccaaagacaatgtgag

SEQ ID NO: 66456 - DNA, 348 bp, Zea mays
tgtcgccgcaatcagggacaggtagctcgagcgcgcgctccacctgctccgacgcgatgcgggccaagtggaagaagaagaggatgcggaggctcaagaggaagcgccggaaaatgaggcagagatctaagtaggcgcatcttgtgaccgaggatggcgagcttctcctgcaccatggctgagacgcgttgggatgattgtctccctttgtagacgtgctttgctgtagacgtaggcgatgtaaaccgtcctttttgattaattctagtatgttctgagactgggtttatattgtaatttgaggataattatatgatgctctaagtttattgatattcctgtcactcg

SEQ ID NO: 66457 - DNA, 347 bp, Zea mays
atgtcactgccgggttcgagatcgccctcgcctgcgacatcctcgtcgctggacgctccaccaagttcttggacacccacgccaagtttgggatatttccttcctggggtctttcacagaagctttctcgcatcattgagccgaatagagcaagggaagtgtcactaacttgcatgcctgttactgctgaaatggcagagaggtgggggcttgttaaccacgtcgtggatgataatgaggtgctgagtaaggcgatagaggttgctgaggctattgtgaggaacaaccgcaacttagttgtattgtacaaatcggttataaatgatggatttaagctggatttggag

SEQ ID NO: 66458 - DNA, 175 bp, Zea mays
  unsure (1)..(175): unsure at all n locations
tgcaatcgatcatcagtacgagggatgtacaggcacagcacttcttatttggtttgatcanaataaagattgttttgcccagtgtgctaatcttggtgattctgcttgcgtaatgagtgtcaatggaaagacgatcgatatgactgaagatcaccgggtagctagcgcaactgaa

SEQ ID NO: 66459 - DNA, 348 bp, Zea mays
  unsure (1)..(348): unsure at all n locations
atattccgcatttctcatcaaaggagccgctacatatacgatctttactacagaaggaaggagatatcacaggagctttatgagttctgcctagaccagggttatgcagaccgtaacctgattgcaaagtggaaaaagccaggttacgagcgcctttgttgcctccggtgcatacaaacacgtgaccacaacttcgcaacgacatgcgtctgccgcgtcnccaagcatctgagggaggaacaggtgatagaatgtgtccactgcggctgcaggggttgtgccagcggtgactaatcttgtcatcatgttgttgagctcacggctcatcatcgcaacgttaaccagatg

SEQ ID NO: 66460 - DNA, 327 bp, Zea mays
  unsure (1)..(327): unsure at all n locations
atcacgatccactcgagcaccaagccgagggaaggtgaggagcgatagcgcgcggcgtggtgtcggcgaagggcggcgcggtcgcgggcaagaagaaggggtcggtttccttcacgatcgactgcancaagccagtggaggacaagatcatggaggtcgcctcgctcgagaagttcctgcaggagcgcatcaaggtcgccggcggcaaggctggcaacctcggcgactccgtcaccatctctcgcgagaagaccaaggtcaccgtcacctctgacggaccttctccaagaggtactgaagtacttgacaagaatactgaagagcaca

SEQ ID NO: 66461 - DNA, 169 bp, Zea mays
  unsure (1)..(169): unsure at all n locations
ataaaagtatggaggcgggaaagcagctactgctgcagcgaacagcttgaagagggagtttggaccaaagcttacagagcacatgcagtactgtgtggacncacctgaggaggttagcaagcttgctaaggtgaaggcccaagtctctgaagtcaaaggagttatgatg

SEQ ID NO: 66462 - DNA, 330 bp, Zea mays
cattcctccccaaaacacatcctgcgatcctcgaagcctccgccgagcatcgatcatgtcggcctactgcggcaagtacgcggatgagctcatcaagaatgctgcctacatcggcacccctggcaagggtatccttgctgctgatgagtcaactggcaccattggcaagcgcctttccagcatcaatgtcgagaacgtggaggagaaccggcgggctctccgtgagctcctgttctgctgccctggtgccctccagtacatcagcggtgtgatcctcttcgaggagaccctctaccagaagaccaaggatggcaaagcttttgtcgatgt

SEQ ID NO: 66463 - DNA, 300 bp, Zea mays
atagaacattctcgttgaaatgggaacatactttcaagttcaggatgactatctagattgttttggtgatcctgaattcattggcaagatcggaactgacattgaagactacaaatgttcctggctagttgtgcaagctcttgagcgtgctgctgagaaccaaaagagcattctgtttgaaaattacggaaagtctgatccagcgtgtgttgcaaaggtgaaggacttgtacaaagagcttaaactggaggaggttttccatgagtacgagagggagagttacaacaagctgattgccga

SEQ ID NO: 66464 - DNA, 312 bp, Zea mays
cggagatgcggcactgatctgcctcgtggccgccgtcgccgccgcggccatcctcctgacagcgtcggccaagaagtccggcgacgtcaccgagcttcagatcggcgtcaagtacaagcctgagtcatgtacgctgcaagcacacaaaggagacaaaattaaggttcactatcgtgggacactcactgatggatcagttttcgattctagctatgacagaggtgacccgtttgaattcactcttggaaatggccaagtgataaaaggttgggaccaaggattgctcggtatgtgcgtgggtgaaaagaggaa

SEQ ID NO: 66465 - DNA, 310 bp, Zea mays
aggggacaaccgtttgcagaagtcaatcataacaaggggaatatcgccatctattggagcattcactgtccaatgtgctaaatgttttaaatggaggcttattccaacgaaagagaagtatgaagaaattcgtgaacgtattatagaggaaccttttgtatgcaaaagagctcgtgaatggagacctgatgtaacatgcaatgacccagaagatatatctcaggatggtagcaggctttgggctattgacaaacccaatattgcacaaccccctcgcggatgggaaaggcagattaggataagaggtgaa

SEQ ID NO: 66466 - DNA, 206 bp, Zea mays
atgctacctaccaaaaccctcacggatccctggcatttccatcgcctcactctgtaccccggacgagttgcagttggatctcagatcggtgatcacataaacaatggtgaaggctgttgctgtgcttggtagcagcgatggtgtcaagggcaccatcttcttcacccaagagggagatggccctaccagtgtcaccggaagtgtct

SEQ ID NO: 66467 - DNA, 308 bp, Zea mays
atttattgaggcctatagtgcagcatattactcatgcatggacatattgtatgagtgctatgaagacgtctcttctggatatgagataagaagtgtggtgttggcttggatgagattttatgataaggaatggctccctgctttccctatgggaataaattgatcaaacacgtatgtggaaggtgggtgaaagggtccgttcaaccaggccacaaggtgatcttggcccactgcatcccttcactgctggagtgtatgttgcactaatgatggctcagattgaggtccttaggaagaatggccactct

SEQ ID NO: 66468 - DNA, 304 bp, Zea mays
  unsure (1)..(304): unsure at all n locations
gcgcacgcacacaaacacacaccagcccagctccgagagatcatccggcggccggcgagatgagccgcggcacgggcgcgggttatgaccgccacatcaccattttctcncctgagggacgcctgtaccaagtcgagtacgcgttcaaggcggtgaagtcggcgggtgtcacgtcgatcggcgtccgcggcgcggactccgtctgcgtcgtcacccagaagaaagtcccggacaagttgctggatcagacgagcgtgacacacttgttcccgatcaccaagtacgtcggattgcttgccactgg

SEQ ID NO: 66469 - DNA, 313 bp, Zea mays
  unsure (1)..(313): unsure at all n locations
aagaggctttggctntgtgaactactccgacagtgatgctgccaaggacgttatttctgcaatggatggcaaggacattgatgggcggcaggtacgtgtcaacatggctaatgagagacctgctgggaaccgtggtggtggcggctatggtggcggcggctatggaggtggtggctacggaggtggtggcggctcacggaggtggtggctatggtggtggcagccaaagctatgatgcttgaggggggcaggatcctattaagtgcattatcaaccaagatatttgaaataatgaactttaggacttggtatg

SEQ ID NO: 66470 - DNA, 304 bp, Zea mays
tagttgatgctgttgttgctttctatgggacaccatcttctgagcttgctgatccttctaaggctaaggctcctatacaggctcatttcggggagcatgacaattttgttggtttttcagatgtcactgcagccaagtccctggaggagaagctcaaatcttccgggatatcatatgaagttcacatataccctggatgttcgcatgccttcatgaacacttcgcctgaggcactcaagaggaagaaggggatgggtctgactgatgagaaccaggaagccgtcgacctggcctggtctcgctt

SEQ ID NO: 66471 - DNA, 304 bp, Zea mays
  unsure (1)..(304): unsure at all n locations
ctnaatgccaatgcttcatcgtctctcagttttcagagatgatgttatcttcttgatatacctctatcagaggtggaagtatccggtcgacaagaagcgtgttaacgagtttggcttcgggggcgaggacgaaccggcagcccaggaggctgtggaaggaagtgattcagctgcagcaccccagctaacggaggccgggtccgagacgagtacggaggacaagaaaaccaagtgatctccaatcttttgatcatccaaatacaagcatacatctctgcaacatctgccttcccagcgggcgtga

SEQ ID NO: 66472 - DNA, 307 bp, Zea mays
acacacaccacaccacacctcctcgcttgcactccgctcgtctgacatctcgtcccgtcctttcgtttcgaagcctcgcgagccccgacgatggccaccaccgcggtgtcggtcgacgagaagctcgataagcttcgcgccgaggtcgccaagctcgaccagatcagcgagaacgagaagtccgggttcatcagcctcgtgtcacggtacctcagtggggaggcggagcagatcgagtggagcaagatccagacccctacggatgaggtggtggtgccctacgataccgtcgcgtcgcctcccgaaa

SEQ ID NO: 66473 - DNA, 304 bp, Zea mays
ctgtctacctcgcagctgtcctcgagtacctcgccgctgaggtcctggagcttgctgggaacgcagcgagggataacaagaagacccgcatcgtgccgcgtcacatccagctcgccgtgcgcaacgacgaggagctgaccaagctgcttggtggtgccaccatcgcgagcggcggcgttatgcccaacatccaccagcacctcctccccaagaaggctggctcgtccaaggcttccaccgtcgatgacgatgacaactgaagctgcccactggagaaggcattcgctaccgtctggtttcctag

SEQ ID NO: 66474 - DNA, 261 bp, Zea mays
tcaagcgcctttgctggcaccagagagaaatgtgttggatgcagcaagacagtctatccaactgagagggtcactgttaacaacactatgtaccacaagagctgcttcaagtgctgccatggagggtgcaccatcagcccttctaactacattgcgcacgaggggaagctgtactgcaagcaccaccacatccagctgatcaaggagaaggggaacttcagccagcttgagaatgaccacgagaagacatcacaggctggg

SEQ ID NO: 66475 - DNA, 303 bp, Zea mays
acattcacggtggagtatccagactcgttgacaccagagcagtgcaaagctctcgagacagtacttccaccaaggccttcatccaagctgacagacatggagatagatgaatgcgaggagacgactatgcatgatgtgaacaacatcgaggaagagatgcgcaggaagcaagctcacgctgcccaggaggcgtacgaggaggacgacgagatgccgggcggagccagagagtgcagtgcgcgcaacagtaagcagactatcatcaaggcaattgggaggggtggtgcccttaaagcatgggat

SEQ ID NO: 66476 - DNA, 305 bp, Zea mays
  unsure (1)..(305): unsure at all n locations
ganagttcagatgttcctttcgactgctcttacaatgtgggacgctgatttctatgtataagccgacgataatgtccatgtcaacattggtatcaccagatcgatnttggcgcgacacaggatgaaacctcgggtgtacattggctgcatgaaatctggacctgttgttgctaagaatgactccaagtattatgagccagaccattggaagtttgggactgagggtaacaactactttaggcatgcaacacgtcagttgtatgctgtaaccagggatttagcaacttacatatcagcaaaccggc

SEQ ID NO: 66477 - DNA, 170 bp, Zea mays
tcgtctcctcgtgcagatatcgaagaacaagaaggtgtccgttaggagctggaaacgcagggtcttcgtcgacttacgcgagttctacttcaaggacggcaagactctccccactcgcaaaggtatatcactccaattagatcagtggaagatattgaaggacaacatca

SEQ ID NO: 66478 - DNA, 304 bp, Zea mays
cacattcctcgcgcggcgaccaccacgaacgaagcgtgcggagagaccgaagaagcgggagagatggctcgtaccaagcagactgctcgcaagtccacgggagggaaagctcccaggaagcagcttgccaccaaggctgcccgtaagtctgcccccaccactggtggagtgaagaagcatcaccgctaccgccctggaactgttgcactccgtgagatccgcaagtaccagaagagcactgagctgatgatcaggaagctgcccttccagtggctcgttagggaaattgcacaggacttcaaga

SEQ ID NO: 66479 - DNA, 136 bp, Zea mays
tgcgtgcaaggggttgctgggtgtcgtacctacctgacgtatcattatctgtggttacattctggaccctgtattttctatgctttcatgtctctctactttctagtattaattatcaataagttggtttggaatg

SEQ ID NO: 66480 - DNA, 147 bp, Zea mays
acaccaccgccgctagaagaagagctcggcgattcccaggtcccgcgagaatatgctgaagcagatccatgagattaaggacttcctcctcaccgcgaggaggaaggatgcccgctcagtgaagatcaagaggagtaaggatgttgt

SEQ ID NO: 66481 - DNA, 300 bp, Zea mays
atattcgagaagttgaacactgaggttcttagtgtctctattgacagtgtgttctcccaccttgcatgggtgcagacagacaggaagtctggtgggcttggcgatcttaaatacccacttatttctgatgtcagcagatcaatttcacaggccttcggtgttctgatccctgaccatggtatcgctctgagaggactgttcatcattgacaaggagggagtgattcagcactctaccattaataaccttgccattggtcgcagtgtggacgagaccatgaggacgcttcacgcattgcag

SEQ ID NO: 66482 - DNA, 301 bp, Zea mays
gagatcgcaagaagggttgctgatgaagttcttgaggattgatcctcaagactcagcttcatatgttctacttgccaacatctattcttcagctaacagatggcaaaatgtctctgaggtgaggagagccatgacagacaagatggtgaagaaagcaccaggcataagttgggtagaagtaaagaatcaggttcatcagtttcatatgggtgatgaatgacacccaaaacacgtggagattaatcagtatctggaagaattaacttcagaaatcaagacgcagggctatgtacctgatact

SEQ ID NO: 66483 - DNA, 190 bp, Zea mays
aacgattcagaagacgccgtggacaaagccttgcacaagagcttccatgagctcaatggtaaaatggttgaggtcaagagggcagttccaaaggagcagtctcctggacccgtcgtacgttcacctgtgggagtggggcagaactatgctacgaacagggttcatagcttcctcaatggcttcaaccagg

SEQ ID NO: 66484 - DNA, 296 bp, Zea mays
aaaaaagatctctgaggaggaatacgtcactgccatcaaggaggaaatcaacaaggtcgttaagcttcaagaagagcttgacattgatgtgcttgtgcatggcgagcctgagagaaacgatatggttgagtacttcggtgagcagctctccggtttggcgttcactgccaatggctgggtgcagtcttatgggtcaaggtgcgtcaagcctccgatcatctacggtgacgtgagccgccccaaccccatgaccgttttctggtcgaagacggcacagagcatgacgtctcgcccaa

SEQ ID NO: 66485 - DNA, 295 bp, Zea mays
cggctcgaggaaccagtgaatgaaccatctcttgataattgctttgtctcgacaagctatgatgccaccacacattttgagacaactgtaacagatgttctgaacatgtatacaatgatcaccggaaagactgtagaccttagtgtggatttgagtgctgctagtgctgccgaagaatactcgtttcagtcatagtgtcatgtttatcaaagatcacatcgttggcgacagcacatgacccacattaatgaatggctggaatgcgtttattcggttccagattatatcatgccac

SEQ ID NO: 66486 - DNA, 293 bp, Zea mays
tgattctgctccatatggaagtccttcagctgaacgtcgggttaatctgtcaagcattagggctcctaagttgggcaatgctcgtacagatgtgaagcctgaccattttgctcgtgaagctaaggagttcttacgcacgaggttgattggcaaacaagtggctgttgaaatggaatactctcgaaggatcagcactgtagatggacagagtgctgctccaacagcaaacatggctgatacaagagttttagattatgggtcagtttttctgggttcaccatcacagactgatg

SEQ ID NO: 66487 - DNA, 293 bp, Zea mays
caaagaacggtttaagtctttcaatacacaattcgaagagcttcacgcgaagaatcacaatggatcgtacctgatcaagaactacgagaatccttgaggctcgctgtagccgaagtcctgttgccagcctaccgatcttttatcaaacgctttggcaatcttgtggacaacaacaagaacccgcagaagtacgtgcggtacagcccagaagcagtggaccaacttctaggccagttcttcgaagggcagcaatgggcggagcaaaagcgctgagcaacatagagtgagagtga

SEQ ID NO: 66488 - DNA, 296 bp, Zea mays
gcaatacctgaagtgattgagactgtcaaacagcaagttaaggatgctaaatttcctgatctagaggtcattcgcatgttgtgggatgtgctcatggaggctgttcagtggtctgggaagaaccagcaacagaattctaatgcagcacttcggcaggtgaaagcatgggctgagcttttgaatgctttttgcacgagtggcagactcgaactggaacttatatacaaagtacagacacagtgctatgaggatgctaagctgatgaagctgtttcctgaaatcataagaacactgta

SEQ ID NO: 66489 - DNA, 298 bp, Zea mays
ctcagcgtgggagctgaagaagaagttcggcaacggcgtgagcaccatggtcctcgtctacaacgccaccggggccagcctgagcctggtggacgacgggaaagactggatgggctccgtctacagctcgccgatcccggacaccttccacaacgggcagtggatcgccttcctccacgtcaagcccggctcgctggcgcagggcagccaggccgccagggtgttccgcggcagggacgtcgatggccggactcgggacttcgtcgtcgcctggtacatcccgtgggacaacataccg

SEQ ID NO: 66490 - DNA, 295 bp, Zea mays
gacgcagagaagctcacaaaggcccttttctcctttgcgactcgactagctcctgttatcatatttgtggacgaggttgacagcttacttggtgcaagaggtggtgcatttgagcatgaagcaacaagaaggatgcgcaatgaattcatggcagcttgggatggtctcaggtccaaagagaaccaacggattcttattcttggtgcaacaaatcgtccatttgatctggatgatgctgtgatacggcgtttacctagacggatatatgttgaccttccggatgcgcagaaccgaa

SEQ ID NO: 66491 - DNA, 295 bp, Zea mays
gtccagtgtgtccgctactccgctccccctcagtcctcagttcctcacctagcggtagcgtgcgcgcgggagacgtagatggcggcttcggaggcggcagcggcggcggcaacaccggtgacgccgacagaggggacggtgatcgcgatccacagcctggaggagtggagcatccagatcgaggaggccaacagcgccaagaagctggtggtgattgacttcactgcaacatggtgtcctccgtgccgcgccatggctccaatttttgctgatatggccaagaagtccccaaatg

SEQ ID NO: 66492 - DNA, 293 bp, Zea mays
cggctcgagtggacaagcaacagaatctgagatcatatctgctgcagaattggcaaatgctcacaagtttatcagttcggcgctgcagggatatgacacagtggttggagagcgtggagcccagttgtcaggagggcagaagcagcgagtggcgatcgcccgtgcaattgtgaaggaccctaggatcctgcttctggacgaagcgactagtgcgctggatgctgagtccgagcggatcgtccaggacgcactggacagggtgatggtgaaccggacaacagtgatcgtcgctc

SEQ ID NO: 66493 - DNA, 295 bp, Zea mays
ggtggccaggacaagatcaggcccctgtggaggcactactttcagaacacacagggacttatttttgttgtagacagcaacgacagggaacgtgttgttgaggctagagatgagctccacaggatgctgaatgaggatgagctgcgtgacgctgtgctgcttgtatttgcaaacaaacaagatcttcccaatgctatgaatgctgctgaaattactgacaagcttggtctgcattccctgcgacagcggcactggtacatccagagcacttgtgctacatctggtgaagggttgt

SEQ ID NO: 66494 - DNA, 294 bp, Zea mays
gagccgcgcacctatctggcaagcgacgccgcggcctcgatcggagtcggaggcgaacacccccatggcggcggctggcggcggcgcaggagggaaggtatccttcaagatcatcctcacctccgaccccaagctccctttcaaagtgttcagcgtgcccgatgcggcgcccttcaccgcggtgctcaagtacgccgcggaggagttcaaggtcccgccccagaccagtgccatcatcaccaacgatggaattggcatcaacccccagcaaagtgcaggcaacgtgtttctgaa

SEQ ID NO: 66495 - DNA, 292 bp, Zea mays
agcggcctcccaggtaagcaagagcgtccaccccgccgccgccatgaagcgcaatccccgcgtcacgagctctcgccggaagtgccgcaagggcacttcacggccccgtcctccgtccgccgcgttctcatgtccgccgggctgtcgacggagctccgccacaagtacaacgtgcgctccatcccgatccgcaaggacgacgaggtgcaggtcgtgcgcggcacctacaagggccgtgaggggaaggtggtgcaggtgtaccgccgccgctgggtcatccacgtcgagcgga

SEQ ID NO: 66496 - DNA, 293 bp, Zea mays
gggctgaggtacgatgacctgtacgacccctacttcgacctggacatcaaggaggcgctcgggaggctgcctagggaggtggtcgacgcccgcatccagcgcctcaagcgcgccatggacctctccatgaagcatcagtacctccccgaggacctccaggcacagcaggtcccattcagaggatatttgagtgacatgttggctctggtgaaaaaggaaaacgctgagcgtgaagcactgggagcccttccactctaccagagaacgcttccctaaatcgctggctaaacatg

SEQ ID NO: 66497 - DNA, 292 bp, Zea mays
cttcatctgcggatgcactgagagtaaaagagcttgccatcacgaatctcacaaactacctcacaaaagagaacagagctgaagacctcaggaaccttttgacccagctcaggcccttttttgcattgatccccaaggcgaagactgcgaagattgtgcgtggcatcattgatgccgttgccaaggtgcctggaacatctcagcttcagatctcactgtgcaaggagatggtagaatggacccgtgcagagaagcgaaccttcctcaggcagcgtgtggaagcaaggctggc

SEQ ID NO: 66498 - DNA, 294 bp, Zea mays
gacatatcatcgcagattttattcaatagagtcatggcccagttagggctgtgtgctttcagggctggtttgataaatgaagcccatggttgcttgactgagctatattctactgggagggtgaaagaattgcttgcacaaggtgtgcaacaaagccgataccatgaaaaaactcccgaacaggaaagacttgagaggagaagacaaatgccttaccatatgcatataaacctggagcttttggaagccacacacttgatctgtgcgatgctgattgaagtccccaatatggct

SEQ ID NO: 66499 - DNA, 294 bp, Zea mays
gtggtccgcagggactcggccaagaagacggcgaagaagtcgcgcgtcaagtgcttcatcaagctcgtcaacttcacccacctcatgcccacccgctacaccctcgacgtcgacttcaaggacgtggccaccggcgggcccgacgcgctctccacccgcgacaagaaggtcgccgcatgcaaggccgccaaggcgcgcctcgaggagaggttcaagaccggcaagaacaggtggttctttaccaagctccgcttctagatggtcggcgtcccgaatggtgaccgtcggtttctt

SEQ ID NO: 66500 - DNA, 291 bp, Zea mays
atcggcaaggccaatcccgagcagtggtgcgaaacctcgagcgctcgcgccggtgaccataacaaagaggaagccgcggtagcactggtagcggcagcagtaagggggagatgtcgtcggcgttcagcggcgatgagaccgcccctttcttcggcttccttggcgcctccgctgcgctcgtcttctcatgcatgggggcggcgtacgggacagccaagagtggcgtcggcgtggcgtccatgggtgtcatgcgcccagagctcgtcatgaagtccatcgtgcccgtggtca

SEQ ID NO: 66501 - DNA, 287 bp, Zea mays
ccagatcgcagcgatctccgccgccgccctctcagggattccgcgcgacaaagtcaggcgtagaggctccaggaggaggagggaggcgcacagggcgggtgggggagatgttcctctgggactggttctacggggtgctggcctccctcggcctgtggcagaaggaggccaagatcctcttccttggcctcgacaacgccggcaagaccacgctgctccacatgctcaaggacgagcggttggtgcagcaccagccgacgcagcacccgacgtcggaggagctcagc

SEQ ID NO: 66502 - DNA, 286 bp, Zea mays
agaacgcattcgtggatactcaagggagcttcagatgaacatctttctcagtttttgcagctagtaaaatatgttagtggctcctatgataggggggaaggatttgagttattaaataaggcaatctctgagtatgaaacttcaaaaaacaatgactcaggaagctaccacagattattttatttggcattgcctccatcagtctacccatcagtatgcaaaatgataagatcatattgcatgagtccatcttcacacactggttggacaagggttattgttgaaa

SEQ ID NO: 66503 - DNA, 290 bp, Zea mays
ctatcatgagatgtgttcgtgatcagaatggcaaccatgtcatccaaaaatgtatagaatgcatccctcaggagaggatacgatttatcatttctgcattttacggacatgtcgtggagctttctatgcatccttatggttgtcgtgttattcagaggatcttggagcattgtgacgatgaaagcactcaaaatgccatgatggaagagatcatgcagtccgtggttactttaacggaggaccagtatggtaattatgtaatccagcatgtcctgcaatatgggaaacca

SEQ ID NO: 66504 - DNA, 173 bp, Zea mays
caatgttctaagtactcagccagtggtatttactggttgacctactgtagtttgcgtcggaatagatatgtttttttactcttcgtggggcagttttgtactggtggattcataaggcctctgattatggtgcgttcggaacttataataataagcacatgaaattttgcttc

SEQ ID NO: 66505 - DNA, 290 bp, Zea mays
atcgttcaaggcctcccgatcgacgagctctcaaggaagaagatggatgccactgcccaagagctgtcggaagagaagtcgcttgcttactcatgcctcgagtaaattataccacacacccagagagcaattgctaccccctgtgttttgaataaaagaaactccagctccgtccatagattctcactcagaactgctgcacgtcgctgtgcaggcgtgttgctggcttcgcccagcgtgtacgagactacgagggcttgtagcccctttttggcctgatgacttgcgag

SEQ ID NO: 66506 - DNA, 288 bp, Zea mays
cagatgcgccagaaccgccccatcccctactggatccgcatgcgcactgacaataccatcaggtacaacgccaagcgcaggcactggcgccgcaccaagctcggcttctgagcgtcgggattggccggctgctgcgtcggaaggctagggtctaagagctatcttccttctgttttatcaatgtgtcagtttttctgtaagctagcaagtgttgctatgacgcttttattaagattctggtgagcggtgatgttaagagaaaattggcactactgtggtgtaccccaa

SEQ ID NO: 66507 - DNA, 238 bp, Zea mays
gtgtcgtgtttgatggagttcatggaatttttaatgcagatgaatcaatgccttacccagataagtttaatgattcatattcagaaacgaaagcggatgcagaaaagcttgtgatgagagctaatggtagggaagggcttcttacatgctgtatacgcccaagtagcatttttggccctggtgataagctaatggttccatctttggttgctgctgcaagggcagggaagtccaaata

SEQ ID NO: 66508 - DNA, 288 bp, Zea mays
ctaggtattgcagaggacactgaagaaagtctcaaggagcatatggctgcagctttgcgttctaatgctgatataatcattacttctggtggtgtttccatgggcgacagagatcttgtcaaaccttgcctggcaaagatgggtaaaattcactttgagaagatccagatgaaaccaggaaagccgttaacctttgctgagatcaccacacaagacacgccaaagccatctaaaacagttcttgcatttggtttgcctggaaatccagtgagctgtattgtttgcttt

SEQ ID NO: 66509 - DNA, 287 bp, Zea mays
ggtgaagccgccgccgctgcagtgtccatagccaccgcaggagactgagatggggggttttgtcaagacccacaagagcaatgcatacttcaagcgtttccaggtgaagttcaagagaaggcgcgctggcaagacagactacagggctcagataaggctgattaaccaagacaaaaacaagtacaatacacccaaatacagatttgttgtgcgatttaccaacaaggacatcacagcacaaatcatatctgctagtatagcaggtgatatggttcttgcttctgctt

SEQ ID NO: 66510 - DNA, 287 bp, Zea mays
tattgctattgtgctcatcagtcagtatattgccaacatgataagatttctggtggatagctacaacaagccagtccctgctattctggagatcccatccaaggaccatccatatgatccagcgcacgactcggtgctgtctcgagtgaagtatctcttctctgcggaatcggtggcgtctgataggcgatgaaggcatccttgtgtagtagtaccctttggtgtatctgttttgttatgtattgaaaagaagtggcatgcgtccgagcgagacagcaaacaataat

SEQ ID NO: 66511 - DNA, 283 bp, Zea mays
ccagatcgcagcgatctccgccgccgccctctcagggattccgcgcgacaaagtcaggcgtagaggctccaggaggaggagggaggcgcacagggcgggtgggggagatgttcctctgggactggttctacggggtgctggcctccctcggcctgtggcagaaggaggccaagatcctcttccttgtcctcgacaacgccggcaagaccacgctgctccacatgctcaaggacgagcggttggtgcagcaccagccgacgcagcacccgacgtcggaggagct

SEQ ID NO: 66512 - DNA, 284 bp, Zea mays
cgacagcctccttccctcgatctattcctcatcttgtcctccctttgctaaaaataacgaggcagaggcatcttcgttttgacgtgcgcttcctcttcctcgctcgctctcggtcgcagtgatggctgatgtcgacgagtaccgttgcttcattgggaacctgtcctggtcaacgactgatgaaagcctcaaggatgcgttcagcaaattcggcaacctcactgaggcaaaggtggttcttgacaaattttcaggccgttctcgtggtttcggctttgtaactt

SEQ ID NO: 66513 - DNA, 285 bp, Zea mays
ggacactctgaaaggagagctctgctgggagaatcaaatgaatttgttggagacaaggttgcgtatgccctgtctcagggactaaaggtcattgcatgtgttggtgagacccttgagcagagggaggctgggtctaccatggatgttgttcgtgcacaaacaaaagcaattgctgagaagatcaaggactggagcaacgtagttgttgcctatgaaccagtttgggctattggaactggtaaagttgccaccccagctcaggctcaggaagtgcacgcctccctg

SEQ ID NO: 66514 - DNA, 286 bp, Zea mays
ctcgagccgtttgtttgcaggaaattgatggggattcggaactagtttgtgtccatgattctgcgaggcccttagtttcttctgaagatgtaaaaaaggtcttagaagatgctgcagtacatggagcagctgttcttggtgtgcctgttaaagctacaataaaggaggccaatagtgattcttttgtcatcaaaactcttgaccggaaaactctctgggaaatgcaaactccacaggttatgaagccaaatttactcaaagatggttttgagcttgttaaacggga

SEQ ID NO: 66515 - DNA, 275 bp, Zea mays
actacccaaacccaacaggcggcgcacagcatcgccaccaccgtccaaagatggtgaagttcctcaagcccggcaaggccgttatcctcctccagggccggttcgccggccggaaggccgtgatcgtgcgcgttttcgaggagggcacccgtgatcgtacctacgggcactgcctcgtcgcgggcctcgccaagtaccccaagaaggtgatccgcaaggactccgccaagaagacggccaagaagtcccgcgtcaagtgcttcatcaagctcgtc

SEQ ID NO: 66516 - DNA, 275 bp, Zea mays
ggagcacggaggcgaaggaggaggagcagcagcagcaggcggcgccgaggagcggcatcccactcagtgcttgcaaccatggctaggggattgaagaagcacttgaagaggctcaatgcgcccaagcattggatgctcgacaagcttggcggagcttttgctcccaagccatcttctggacctcacaagtccagggagtgccttcctctgatcctcatcatcaggaacaggctcaagtatgctctgaactaccgtgaggtcatttctatcctgat

SEQ ID NO: 66517 - DNA, 275 bp, Zea mays
cggctcgaggaaacatcaagtgcaccccaatctactcaaggattgtctcactgtacgctgagcagaatgaactccaatttgctgtcccaggagggcttattggtgtgggaacaaccatggacccaactctaacgcgtgctgacaggctggttggccaggttcttggtgaagtaggttcactacctgatgtttacgtagagcttgagatcaatttcttcctactccggaggctgttgggtgtgaggacgaaaggtacagagaaggcagggaaggtg

SEQ ID NO: 66518 - DNA, 278 bp, Zea mays
cggtgacgacgaccgcgcgacgccgccgactccctactgcatcaggtgcctcggccttcgtcgtgctctccgcaggcaacgagtatagacgggcgcgcatggccaccttcgagctgtaccggaggtccaccatcggcatgtgcctcaccgagacgctcgacgagatggtctccaacggcaccctcagcccggagctcgctatccaggtcctcgtccagttcgacaagtccatgacggatgctctggagaaccaagtgaagagcaaggttactgtcaag

SEQ ID NO: 66519 - DNA, 279 bp, Zea mays
gggaagatgactaaagatctggcgattcttgtccatggatcttccagcgtcacgagaagccattacctgaacaccgaggagttcatcgacgcagtcgctactgagctccgatcaagactgggagccaactgagcctacaagaaactttgcatggcgactttgaatgcttcgtcaccgtcaccgatctgctagtcgtcttttctgttatgaagaagtgaatgtgcgtcaccgcagtttcgatgcaagctaattatagatgtggtgtcacgtgagcgctca

SEQ ID NO: 66520 - DNA, 281 bp, Zea mays
gggaagatgactaaagatctggcgattcttgtccatggatcttccagcgtcacgagaagccattacctgaacaccgaggagttcatcgacgcagtcgctactgagctccgatcaagactgggagccaactgagcctacaagaaactttgcatggcgactttgaatgcttcgtcaccgtcaccgatctgctagtcgtcttttctgttatgaagaagtgaatgtgcgtcaccgcagtttcgatgcaagctaattatagatgtggtgtcacgtgagcgctcaaa

SEQ ID NO: 66521 - DNA, 276 bp, Zea mays
ccgctcgcgctctcctcgcgttcgggaaggtcgtttcgccatggcctcggagacggagacgttcgccttccaggcggagatcaaccagctgctctcgctcatcatcaacaccttctactccaacaaggagatcttcctcagggagctcatctccaactcctccgatgccttggacaagatcaggtttgagagtttgacggacaagaccaagctggatgcacagccagagctgttcatccacattgtccccgacaaggccaacaacacgctgacaat

SEQ ID NO: 66522 - DNA, 273 bp, Zea mays
tcttgcctgtgctgcttccaatattgctgtggataatattgttgagcgacttgcacgatacagaacaaaattggtgaggttagggcaccctgctcgtttactgcctcaagtgctcgacagcgctcttgatgcacaggttttacgagctgataatagtagcttggcaggagacattcgcaaggaaatgaaggtgctcaatagcaaattgctgaaggctaaagataggaacactaaacgggacatcaggaaagagctcaaaacgcttgcaaaaga

SEQ ID NO: 66523 - DNA, 269 bp, Zea mays
gccaacgacaccatcaagatcgatctggagaccaacaagattgtggacttcatcaagtttgatgttggcaacgtcgtcatggtgactggcggaaggaacactggccgcgtgggtgttatcaagaacagggagaagcacaagggcagctttgagaccattcacgtggaggactccctgggccaccagttcgccacccgtatgggcaacgtgttcaccatcggcaagggtaataagccgtgggtgagcctgcccaagggcaagggaatcaa

SEQ ID NO: 66524 - DNA, 273 bp, Zea mays
tgactcgtgagtttgtgacagtggttttctctgtgccgccttttgcagggaaagggggtctgggttgcgtacaggcgaaaggcacgcgccgccgctgccgcgcgagcctctccgtccccatcgccgcgcagatggatccgtcgtcggagcccctgtacgcgcaggtcgagccgtacgactccgggttcctcaaggtctccgatgtccacaccatctactacgagcagtccgggaacccgcagggccatgcggccgtgtttctccacggcggtc

SEQ ID NO: 66525 - DNA, 271 bp, Zea mays
tgaagattgaggaccagctctcccttgggaagaggatgtcactagttgctagcactggcgcgatgcgagcccaaggggacactgcatatggagctaacctggaggcacgcttgaaggacaaagactatccgatagcccagtccctctcaaccttgggtctctctctgatgaagtggcgtcgggaccttgctctgggcgcaaacttgcagtcccagttttccatcggaagggggtcgaagatggcagttcgacttggtctgaacaacaagct

SEQ ID NO: 66526 - DNA, 276 bp, Zea mays; identical to SEQ ID NO: 4224

SEQ ID NO: 66527 - DNA, 277 bp, Zea mays
aataactttgatattcaaggaacacttgctcttcaggttctcaatgatactgatgggttcatccaattgcagattgaaagccaagatattcctgggcttagcttcaaaacacacccaaatatcaacaaggatttgtttaacagtcagcaaattttgggagcaaaagatccaaacaggccttttccgagtggtcaaaatgaaactcctctggtgaaatggagaatccaggggatggatggagtcatctttacctctgtcagtcaattgcttgccgtct

SEQ ID NO: 66528 - DNA, 273 bp, Zea mays
ggcggcggcggcgtggtgggagacgctggtggtggcagcggcggcggatggaaccggtgggagcagcaccacggtggtgtccatctgcatgttcacgacggtgctgtgcctgtgcctcgtcgccggccacctcctcgaggagaacaagtgggtcaatgagtccatcaccgccctcgtcatcgggtgcatcataggagtgatcgtatttctgctgaccaaggggaagcactcacacatcctgcggttcgatgagcagctcttcttcatctacgt

SEQ ID NO: 66529 - DNA, 165 bp, Zea mays
ctcgagccgctcgagccgctttaagaagtattactcggacatcgcagggcctgagtatgaccaaaagtacaagactctaatctacctcgcaggatctgcatctgctgaggtaattgctgatgtggctctctgcccttttgaagctgtgaaggtacgtgtgcagac

SEQ ID NO: 66530 - DNA, 263 bp, Zea mays
accgccacctacgcaacaccagacgctccagcagtccagcactcggagctcgcgcgcccgacggcccaccatgatcatccccaagaagaaccgcaatgagatctgcaagtacctcttcaaggagggcgtgctgtatgccaagaaggactacaacctggcgaagacccacagattgatgtgcccaacctcaaggtgatcaagctcatgcagagctccaagtccaaggactatgtcagagagaccttctcctggcagtactacta

SEQ ID NO: 66531 - DNA, 126 bp, Zea mays
gtcatgtttagattttaaccttgttttatgttggaaagtactgctacttgtctttatatttggtaattcagccgtaggttgctatgctggttgggatttactcgtgaaccagagtttttctatctt

SEQ ID NO: 66532 - DNA, 272 bp, Zea mays
gcgtcgcgtcgcatcctacgatccaaagctctctctgctcgcagccatggcgaagaactacccgaccgtgagcgccgagtacagcgaggctgtggagaaggccaggcgcaagctccgagccctcatcgccgagaagagctgcgccccgctcatgctccgcctcgcgtggcactccgcggggacgttcgacgtgtcgtcgaggaccggcggtccattcggcacgatgaagcatcagtcggaattggctcacggcgctaacgcggggctggaca

SEQ ID NO: 66533 - DNA, 271 bp, Zea mays
aagagtgcccgcggtcgctctgattgctgtgtgaagcacggtggtggcaagcgttgcaggttcgatgggtgtgacaagagcgcacaggggagcactgacttctgcaaggctcatggagggggcaagcgatgcgcttggagcaccggctgcgacaagttcgctaggggaaggagtggcctatgcgcagcgcatacgaccctgatggcttccaaggtagtgcaccatcctggacatgcacgaagcatggtcgggccttgccacttcagcggcg

SEQ ID NO: 66534 - DNA, 272 bp, Zea mays
agcacggaggcgaaggaggaggagcagcagcagcaggcagcgccgaggagcggcatcccactcagtgcttgcaaccatggctaggggattgaagaagcacttgaagaggctcaatgcgcccaagcattggatgctcgacaagcttggcggagcttttgctcccaagccatcttctggacctcacaagtccagggagtgccttcctctgatcctcatcatcaggaacaggctcaagtatgctctgaacgaccgtggagtcatttctatcctga

SEQ ID NO: 66535 - DNA, 273 bp, Zea mays
ccagcagccgtcgtcgccaccgctgcagcgcggaggcgaccccccatcgccgccaagatgcagatcttcgtgaagaccctgacggggaaaacgatcacgttggaggtggactcctcggacaccatcgacaacgtgaaggccaagatacaggacaaggagggcatcccgccggaccagcagcggctaatcttcgccggcaagcagctcgaggacggccgcaccctcgccgactacaacatccagaaggagtccaccctccacctggtgctccgc

SEQ ID NO: 66536 - DNA, 270 bp, Zea mays
atcccgtcgcatcccatcccactaccacccatctcgtcgtccgccgattcgatccggttcttccaacccaggggctgtgatggcgacgaagaggagcgtgggcaccctcggcgaggcggatctgaaggggaagaaggtgttcgtgcgcgccgacctcaacgtccctctcgacgacgcccagaagatcaccgacgacacccgcatccgcgcctccgtccccaccatcaagttcctcctcgagaagggcgccaaggtcatcctcgccagcca

SEQ ID NO: 66537 - DNA, 275 bp, Zea mays
gcctcgtccgcttctctctcacccttccttcccctcctctcctgtggatgctccctccctctccggctctccgcctctcccccgccccccaagcccaaatcaccgcgcctcgccccacagcaccggttgcgtgggaggagggagggaggaaggaaggaggggaggcggctgtcgggcgagatgagcgactcctactgccccgactgcaagaagcatacggaggtggcgttcgaccattcggcgggggacacggtgtgcaccgagtgcggcctcgt

SEQ ID NO: 66538 - DNA, 275 bp, Zea mays
gaacacctgaggcccttgccttgagaggaaaggctgcagtagcacaggccaaactagcaaatcggctctaccagaagaaattctctggcccaaggtgggaggcgttggccaagaaaggtgccaagaaacaaaggttgttgtgggcatccaccggtgtcaagaacccagcttatcctgacactctttatgtggacagtctcatcggacctgacacggtcaacacgatgcccgaccaagctttgcaagcattcatagaccacggcaccgtttcaagg

SEQ ID NO: 66539 - DNA, 274 bp, Zea mays
gacgcatcgaggttagcacgcgaagaagcgaccatgagggccaagtggaagaagaagcgcatgaggaggctcaagaggaagcgcagaaagatgaggcagagatccaagtaggcagatcgagatggattgtggacctgatgacatgcgtgggtacatacatttcttcggatgcgttggtgtgcctgtggagagatgtcaacctgccatggtgtcacggtccgccatcagttgaacgtcttgcctgcacttcagtaggccacttttcatggttcta

SEQ ID NO: 66540 - DNA, 274 bp, Zea mays
cccaggatcccgtcggccgaggagatcgccgaccgcatcgacaagatgctggccgtgctggacaccaacatcctctgggtgaaccccgactgcggcctcaagacccgcaagtacacggaggtcaagcccgccttaacaaaaatggtccccgctgctaagctcattcgcacccagctcgccagcgccaagtgagcacctttttttgcctttttcgtttccgaggagggcgtcgtcgatgccaatttgtttccaataaacagggctcccccctgtg

SEQ ID NO: 66541 - DNA, 279 bp, Zea mays
gtcgtgggagccccgcgcgttcgtgtaccacaacttcctctccaaggaagaatgtgaccatttgatttcactggcaaagcctcatatgaagaagtcaacagtagttgattcagcaactggaggcagcaaggacagcagggtgcggacaagttcaggaatgtttcttagaagagggcaggacaaaattattcggacaattgagaaaaggatagcagattacaccttcatacctgtagagcagggtgagggtcttcaagttctccactatgaagttgggca

SEQ ID NO: 66542 - DNA, 271 bp, Zea mays
ccccgccctggtgaaggggttcatgggggacgaccagctcggggaggcgctcgagggctccgacgtcgtcatcatccccgccggggtgcccaggaagcccggcatgactagggacgacctcttcaacatcaacgccggcatcgttaaggggctctgcactgccatcgccaagcactgccccaacgctcttgtcaatatgatcagcaaccctgttaactccactgtcccgattgcggcggaggttttcaagaaggctggtacttatgatgcg

SEQ ID NO: 66543 - DNA, 271 bp, Zea mays
gaagctgcgcaacgaagtactacaagaaggacaacagtgcccccaccttctccgatcaaaccgttgaagagatcatgaagattgtagaggaggcccgcacgccaccccagtcatctactccggtggctggttttggttgggctgaggaagaagagcaggaagatggcaagaggtctgatgatgacgagcagtatggggaggatgaggactacgatggcgaggacgagtatgataaacaggtgaagcatgtacatgccagcggggattttca

SEQ ID NO: 66544 - DNA, 267 bp, Zea mays
  unsure (1)..(267): unsure at all n locations
ctccactcatcttttctcgattagaacctctaaaatttcccccactcgccagtcgcagcagcacctgtagcagccatggacgccagcggagccggtagcaaggggaagaagggggcggccgggcgcaaggcaggcggccccaggaagaagtcggtgacgcggtccgtcaaggccgggctgcagttccccgtcggccggatcgggcgctacctcaagaagggccggtacgcgcagcgtggngcactggcgcccccgtctacctcgccg

SEQ ID NO: 66545 - DNA, 266 bp, Zea mays
acgcttccgaattcaccgactcctcctccacgccgcgtcgagatcgctcaggccttcgcttccagcaactccaccactcagcccacccgccggagcaatggggagcacggggcgcgaccggaggtgacccgcgccgacttccccgacggcttcgtcttcggcgtcgctaccttcacctaccagattgagggagcgagaagggagggaggcaaaggagacagcatatgggacgtatttacagatgacaaagaacatgtcttagacag

SEQ ID NO: 66546 - DNA, 267 bp, Zea mays
cttgtacgagggaccccttgatgatgtgtatgcaactgctatcagaaactgtgatccagagggtcctcttatgctgtatgtttcaaagatgattcctgcatctgacaagggcaggttctttgccttcggtcgtgtcttctcagggaaggttgctactggtatgaaggttcggatcatgggtcccaactatgtccccgggcagaagaaggatctgtatgtcaagagtgtccagcgtactgttatctggatgggaaagaagcaagagtc

SEQ ID NO: 66547 - DNA, 268 bp, Zea mays
cattactcgatgaggacttctatgaagataagaaaatccttctcaggggataccagagatcaatggtcaaatcaatgagcctggcagcaaaagttccacattttcattatctagaggagataaattgtgattctcttgtgcaactaaaaaccacatttcaaaatgagaacaaggatcaaactatcaagcacacttccttccgttcctcataaagtcactttctatggcactgagtaaataccctatgttgaacagttctttcattgag

SEQ ID NO: 66548 - DNA, 264 bp, Zea mays
cggctcgagcggggggccaggcgttccagttctactcggagggcgtgttcacgggcgactgcggtacggacctggaccacggcgtggcggcggtcggctacggcgtcggcgacgacggcacgccctactggatcgtcaagaactcctgggacacctcttcttcccagtgacacacacgaccacaactggcacgtaagtacacgttgccaggaatgacatgctatgctactagtgtttgcttgaactattatcgattgggtttgt

SEQ ID NO: 66549 - DNA, 268 bp, Zea mays
agatcacataaggatcttgacaaggatgcagctcctcacttccagaaagcagttaaattttatgatggtcttgctaagcagttggtcagtcaaggtcacgtgttagatgtttttgcttctgctctcgatcaggttgggctagctgagatgaaggttgctattgagagaacaggtggccttgttgtcttgtctgaaagttttgggcattccgtattcaaggattctttcaaacgcatttttgagggaggtgaacagtctctaggacttt

SEQ ID NO: 66550 - DNA, 270 bp, Zea mays
gggctacccggccttcgcgctcgtcaacaaggtcaccggcgaggcgctcaagcactccacggggcagggccaccccgtcaagctcgtgccctacaacccggactaccaggacgagtccgtgctctggaccgagagccgcgacgtcggcaacggcttccgctgcgtccgcatggtcaacaacatctacctcaacttcgacgccttccacggcgacaaggcccacggcggcgtccatgacggtaccgagatcgtgctctggaagtggtgcga

SEQ ID NO: 66551 - DNA, 270 bp, Zea mays
cgctgtgctgcttgtatttgcaaacaaacaagatcttcccaatgcaatgaatgctgctgaaattactaccaaccttggcctgaatcccctgggcaacgggaactggtacatccagagaacttgtgctacatctggtgaagggttgtatgaggggcttgactggctttccagcaacatctcaagcaagtcttgaagcttttcggcagggctcctagcgaaaggatgcctgaacaacttatggctgcttaatttttacatataattactaag

SEQ ID NO: 66552 - DNA, 300 bp, Zea mays
gggatgcagcagccgatgcacatgcagccgcagggccggcgatagcccagctgccggaatcaccacggagcagatccaaaagtatctggatgagaataagcagcttattttggctattttggaaaatcagaacctaggaaaattggcagaatgtgctcagtatcaatcacaacttcagaagaacctcttgtatctcgctgcaatcgcagatgcccaaccgcagactgctgtaagccgcactcagatggcgccgcctggtggatctcctggagtagggcagtacatgtcacaggtgcctat

SEQ ID NO: 66553 - DNA, 293 bp, Zea mays
gcagattaagttggacaaagagaagaaaatcctctccattcgggataggggtattggtatgaccaaggaagatcttattaagaaccttggaacgattgctaaatctggcacttcaggtacttcaggtactgccttttcatctttccagctgattactgcactcataatatttgtttatgagtgcaggaacaggagctgctcgagtctcttgtcgaagctgatacggtgagttctctgtgatgattggtctcagtattgtactgggtttcagtgtgtctgctcagagtcttagc

SEQ ID NO: 66554 - DNA, 296 bp, Zea mays
cgggcttgtaacccaggtgggggcattaaggtggtgcggatgtttggtaccgagtcttggtctgggcacatgctgttccttggttggcctgcccgttccaagttggtagtggccgttggaggcttgggcgaaggccctgggcttccttggacctagagtggcaggaacggcgtgaggctgtcttcacagagcagcgatcactgctcgctattaacggtgggaggataacaggccactgcagcatgggctcgcttaaggcccagactcatactaaatagaccaccattttttaaaaa

SEQ ID NO: 66555 - DNA, 295 bp, Zea mays
ccgcatccacggtgccaggcgaccgccgccgcttccctactcacccttggccggcgacgacgagcgcccactacggcaggatgacgacgctcaggaacctcaagatcaagacgtcgacgtgcaagaggatcgtgaaggagctgcgctcgtacgagaaggaggtggagaaggaggctgccaagaccgccgacatgaaggagaagggcgccgatccctacgacctcaaacagcaggagaatgttttggctgagtcaaggatgatggtcccagactgccacaaacgacttgaaactgc

SEQ ID NO: 66556 - DNA, 293 bp, Zea mays
ggcgaccctccctccttcgctccttccgcgccgcctcccggccgtcgccgccatggtgaagtactcgcaggagccgggcaaccctaccaagtcggctaaggccatgggcagggatctgagggtccacttcaagaacacaagggagacagcctttgcgcttcgcaagttgtctttgaccaaggctaagcgataccttgaggatgttattgctcacaagcaggcaattcccttccggagatactgtgggggtgttggtcgcaccgcgcaagctaagtcgcgccactccaatgggc

SEQ ID NO: 66557 - DNA, 297 bp, Zea mays
  unsure (1)..(297): unsure at all n locations
gcagccaaaacctacctagccgccgccgcaggcnaccccatcgccgccaagatgcagatctttgtgaagactctgacggggaagaccatcactttggaggtggagtcctcggacaccattgacaatgtgaaggccaagatccaggacaaggagggcatccccccggaccagcagcggctcatcttcgccggcaagcagctcgaggacggtcgcaccctcgccgactacaacattcagaaggagtccaccctccacctggtgctccgcctccgcggtggcgccaagaagcgtaagaag

SEQ ID NO: 66558 - DNA, 292 bp, Zea mays
gcgcaggatctgcgcgggggccacgttcgccatcgccaccgtcgagatcatgctcgcgaacctcatctaccatttcgactgggagatgcccgccgagatggagcgcaccggggccaaggtggacatgtccgaccagttcgggatgacgcttcgccggacgcagaaactttaccttgttcctagaattcccaaatgagtgtcgtcgtcgtcgtacaaatggcatgcatcttattgtaagttttggagtttgttgttgcacacgcaacgatggaccgcctgtgatatctttaat

SEQ ID NO: 66559 - DNA, 299 bp, Zea mays
ggatattgctattgtgctcatcagtcagtatattgccaacatgataagatttctggtggatagctacaacaagccagtccctgctattctggagatcccatccaaggaccatccatatgatccagcgcacgactcggtgctgtctcgagtgaagtatctcttctctgcggaatcggtggcgtctgataggcgatgaaggcatccttgtgtagtagtaccctttggtgtatctgttttgttatgtattgaaaagaagtggcatgcgtccgagcgagacagcaaacaataataatggttgt

SEQ ID NO: 66560 - DNA, 294 bp, Zea mays
gtcacaggcgccgtcaaaaacgtcgatggcctcgacatcgcgcactagtgaagcactcggcggagaacaaggggatcaagggcttcaaggggggagacgccatcgctccagactcgttgctcactgaagagtgcgacgtcctcatcccagcagcgcttgggggagtcataaacaaggataatgctaacgacataaaggcaaagtacatcatcgaggctgccaatcaccccacagatccagaggcagacgagatcctgtcaaagaaaggcgtcctcatcctccccgacatactgg

SEQ ID NO: 66561 - DNA, 293 bp, Zea mays
gtttttcacacgacggcggcgatgtcgtcggcctcctcctccgccgtcgccaacgccggtgaaggacgcgggggtgcggaggagggcgtggagatcacttacgtgagctatggcgaggagcagcatctgccgctggtgatgtccctagtggacgaggagctcagcgagccctattccatcttcacctaccgctacttcgtctacctctggccgcagctcaccttcctggcgttcgatggcgaggatggcaagtgcgtggggacagtcgtgtgcaagatgggggagcatagggg

SEQ ID NO: 66562 - DNA, 290 bp, Zea mays
gcgccgacaaaaccagaccaccaaacaagtgccagcgccctctcgcagtcgccgcaatggagagcaccttcatcatgatcaagcctgacggcgtccagaggggcctcattggtgagatcatcagccgttttgagaagaagggcttctacctcaaggccttgaagcttgtcaacgtggagaggtcgtttgccgagaagcactacgccgatctcgcctccaagcccttcttccagggcctcgtggactacatcatctctggccctgtggtggccatggtctgggagggcaag

SEQ ID NO: 66563 - DNA, 292 bp, Zea mays
aaggaagcgagaagaccagaaggtgagaagagagagagagagtgtgtgtgatcggtacaaggatcaccgctgtgcctgcgcgtgctgcttcaccgaatcgagtcagatcctgtccgaatccgagctaagggatggcaaccggtagtgaagcctcgaaggcagctgaggctgtggttgactggcataaacacgacagcaagaggatgctccatgcggtttaccgtgttggggatctggaccgcacaatcaagtactacacggaatgctttgggatgaaactgctgaggaaaag

SEQ ID NO: 66564 - DNA, 289 bp, Zea mays
gtttttcacacaacggcggcgatgtcgtcggcctcctcctccgccgccgccaacgccggtgaaggaagcgggggtgcggaggagggcgtggagatcacttacgtgagctatggcggggagcagcatctgccgctggtgatgtcgctggtggacgaggagctcagcgagccctattccatcttcacctaccgctacttcgtctacctctggccgcagctcaccttcctggcgttcgatgccagggatggcaagtgcgtggggacagtcgtgtgcaagatgggggagcata

SEQ ID NO: 66565 - DNA, 288 bp, Zea mays
ccggtttccggatagcttacctcccatcgacggtcggtgagccgttggtgagtggcgagacagcgggtgcgctgggcaagaacaggcgacgaagaagatgagcacgctggacacgcggacgctcaaggacgagctgacgagcatggacaggaagtgcctcgtggacctcggccacccgctgctcaaccgcgtcgccgacagcttcatccgcgccgctggggtcggggcggccagggccgtctccagggaggcctacgtcgtcaccgtcgaagggctttcaggagactc

SEQ ID NO: 66566 - DNA, 297 bp, Zea mays
gatatgtttcaagaggatctaggaacgaagatgtgcatacacgacactctcctcaagattattcacattctaagcaagaacgaagtagccacaacatgaattatgagtacagacgacataaaagagattcttcagcagcagataagcaccgaagacaagatgttggagatacaaatgacagacaattttcaacaatgggaaatgacagcaagtcccataggcataagcatgaagaacggcatagaagtgatcatggtaatggagaaaaagaagatgacagcaaaactaggcctagga

SEQ ID NO: 66567 - DNA, 284 bp, Zea mays
gcggcggcggcggagaaacgcaggcgaaggcgagggtgtgagggaaggagcaccagccatggtgcacgtcaacttctaccgcaactatggtaagacgttcaagaaaccaaggcgtccttatgagaaggagcgtcttgatgctgaactgaagctggttggtgagtatgggctgaggtgcaagcgtgagctttggagggtccagtatgcactgagcaggatccgtaatgctgcaaggcacttgctcacccttgacgagaagaaccccgtcgtatctttgagggtga

SEQ ID NO: 66568 - DNA, 158 bp, Zea mays
tatgccgatcgcgctcactagtcagtatattgccaacatagataagatttctggtggatagctacaacaagccagtccctgctattctggagatcccatccaaggaccatccatatgatccagcgcacgactcggtgctgtctcgagtgaagtatctc

SEQ ID NO: 66569 - DNA, 295 bp, Zea mays
ctcgagcggctcgagcggggggccaggcgttccagttctactcggagggcgtgttcacgggcgactgcggtacggacctggaccacggcgtggcggcggtcggctacggcgtcggcgacgacggcacgccctactggatcgtcaagaactcctgggacacctcttcttcccagtgacacacacgaccacaactggcacgtaagtacacgttgccaggaatgacatgctatgctactagtgtttgcttgaactattatcgattgggtttgtactagtgatgacagtttcatcgatt

SEQ ID NO: 66570 - DNA, 289 bp, Zea mays
gcacatagatattcttgtctccaatgctgccgcaaatccttctgtagatagcatacttgaaatgaaagagtctgttctcgataagttgtgggatattaacgtcaaggcttctatccttcttattcaggatgctgctcctcacctacggaaggggtcatctgtgattattatttcttcaattgctggttacaatccagaacaaggattgacaatgtatggtgtcacaaagactgctctctttggtctcacgaaggctcttgctggtgagatgggacccgatactcgtgtt

SEQ ID NO: 66571 - DNA, 289 bp, Zea mays
gaggacgtgaggcaagctctatatgcctccaagatctgcagttacgcgcagggcatgaacatcatcaaggccaagagctcagagaaaggatggggcctcaaccttggtgagctagcgaggatctggaagggagggtgcatcatccgtgccatcttcctcgaccgcatcaagaaggcgtacgataggaaccctaaccttgccaacctcctcgttgaccccgagttcgcccaggagatcatagacaggcaagctgcctggcgcagggttgtctgccttgccatcaacaatg

SEQ ID NO: 66572 - DNA, 288 bp, Zea mays
gctgcttccatcatctctactgaacagggagaagagctcaggaagcagataggcgctgtggcgtacatagaatgcagctcaaagacacagaggaacgtaaaggctgtgttcgacactgcaattaaagtagtgctgcaaccaccgaggagaagagaagttaccaggaagaaaatgaaggcaaggtcgaatcagtctctgagaagatacctctgtggaagcggatgtctcacatcgtaaagcacaggctcttctgcgactgttgtactggactggctagatggttgcagc

SEQ ID NO: 66573 - DNA, 287 bp, Zea mays
gtgaagaacaggcaagtcaaagccaagcaggttactttccacaggaagaagaatctgcagtactatgaaatttctgccaagagcaactacaactttgagaaacctttcctgtaccttgcaaggaagctggctggtgatccgaaccttcactttgttgaagctgttgctcttaagcctccggaagttaccatcgacatggctatgcagcagcagcatgaagctgagcttgctgcagcagctgaacaacctcttcctgatgacgatgatgatctgattgagtagaaagg

SEQ ID NO: 66574 - DNA, 284 bp, Zea mays
cggctcgaggaaacatcaagtgcaccccaatctactcaaggattgtctcactgtacgctgagcagaatgaactccaatttgctgtcccaggagggcttattggtgtgggaacaaccatggacccaactctaacgcgtgctgacaggctggttggccttgttcttggtgaagtaggttcactacctgatgtttacgtagagcttgagatcaatttcttcctactccggaggctgttgggtgtgaggacgaaaggtacagagaaggcagggaaggtgtcgaagctc

SEQ ID NO: 66575 - DNA, 284 bp, Zea mays
  unsure (1)..(284): unsure at all n locations
cttccacggcgacaagggactcngcggcgtgcgcgacggcaccaacctcgtgctctggaagtggctgcagggcatcaaccagcgctggaagatcgtcccctggtaaatgtgctgttctgtggctgcactggtcatcaccatgatctggagctttgaaggcatagccacctgtggtcagcagctgctgccgtgttgctaacataaagttggtggcgatcgatcgatcgatctttggtgatgggtgtccctccctgtgtgtttgtgtttagttccagtcgtttgtg

SEQ ID NO: 66576 - DNA, 280 bp, Zea mays
ccgacgttttgcatctccaagcagcatcgtctcctccccagatccatcaattcgttcggaccgcccttctcgtgtccccgttctaaagcgcggcaggctgagcggttccgtcagatttgagtcgtcatgaatcccgagtatgattaccttttcaaacttctgcttatcggtgattctggtgttggaaaatcatgcttgcttctcagatttgcagatgattcatatctggacagctacatcagcacaattggagttgactttaaaattaggacagtagagc

SEQ ID NO: 66577 - DNA, 278 bp, Zea mays
cttttgacaagaaatcatttgtgtcttacatcaaaaaatacatcaagaatctcactgctgtgttggagccagagaaagcggatgagttcaaaaagggtgtcgagggtgcaaccaagtttctccttagcaagctgaaggacctccaattttttgttggtgagtccatgaaggatgatgcgtctgtggtattcgcctattacaaggatggtgccactaatccgacattcctctatttctctcatggtcttaaggagatcaagtgctaggcgtgcggcgaa

SEQ ID NO: 66578 - DNA, 276 bp, Zea mays
ccggcaaggaccccaacaagcctaagagggctcccagcgctttcttcgtgttcatggaggaatttcgcaaggagttcaaggagaagaaccctaagaacaagtctgtcgctgcggtggggaaagctgctggcgacaggtggaaatccctgagcgagtcggacaaggctccctatgtagccaaggctaacaagctcaagctcgagtacaacaaggccatcgctgcctacaacaagggcgagagcactgcagctaagaaggctcctgccaaggaggaag

SEQ ID NO: 66579 - DNA, 278 bp, Zea mays
ctcacaaaaaccctcgctccccacaacccgccgccgcccacgccgccgcctgtaccagcggcgtcaagatgagtcggcaccctgaagtgaagtgggctcagaggatcgacaaggtttacatcactgtacagttacctgatgccaaggacgctaaggtcaatttggaaccagatggtgtcttcacattctctggcagtgctggtacaaacttatatgaattgaaactagatctgaatgacaaagtaaacgttgaggctagcaaaataagtgtgggtgtc

SEQ ID NO: 66580 - DNA, 284 bp, Zea mays
ccacattccagttccactccgcctccgctgccggtcgccgactccgaaactccgacagtccgaccacaaggatccacagaaggatgagtgaagaggataaggctgctgcttctgctgagcagccgaagagggcccctaagctcaatgaaaggatcctctcttctctgtccaggaggtccgtagctgctcatccgtggcatgatcttgagatcggtcctgatgctcctgctgttttcaatgttgttgttgagatcacaaagggaagcaaagttaaatatgagctc

SEQ ID NO: 66581 - DNA, 263 bp, Zea mays
cacttcacagtaaatatgtcaaaggtagagacaggtcttcatgtgtgagaaagtatagcgatagcagatcatctttagattattcttcagacagtgagcagtcaagtgttcaggccacacagtcagcccaggaaaaagagaagcagggccaaatggaaagaacacataatagacaagacaaaaacagaggtgaagaaaaatccaagtctgaacgggaatgccctcattcaaaaaaaggaatttgaaagagatctttctgatca

SEQ ID NO: 66582 - DNA, 277 bp, Zea mays
aatctagaagcacccctctccctctctctctcttcgccgtccgaagctccgcaccccaatctaatcgacacctcaccgagatgggccgcaagttcttcgtcggtggcaactggaaatgcaatggaaccacagatcaggtcgagaagattgtcaaaaccctgaatgaaggacaggttcccccttcagatgttgtggaggtcgttgtcagccctccttatgtcttccttcctgtggtcaagagccagctgcgccaagagttccatgttgctgctcagaa

SEQ ID NO: 66583 - DNA, 278 bp, Zea mays
aagcactgcaggccatcctgttatccagacgagcattacataccgacttatcttcatctgttccatgggccactcaacgccaacaggactatcacatgggttgattggtcaagaggaggcccgcacccagcaagttatggtgccacagacatcacagaagacttcatccaggccatcaggaataatggtacgcagtgcttttacaactcgaagcccacctctgtctgctacctcttcgcgaggaagttcgctcctaatgctttgccacggctgatgaa

SEQ ID NO: 66584 - DNA, 277 bp, Zea mays
gccatcacacacaagacacaaccccactcacccggcagggaggccctcttcgtcggcggaggccatggtttccctcaagccgcagaagaggctcgccgcgggagtcctaaaatgtggcaaggggaaggtgtggcttgaccccaacgaggtctacgagatctcgatggctaactcgcgtcagaacattcgtaagctggtgaaggatggattcataattaagaagccacagaaaatccactcaaggtcccgggcaaggagggcccatgaggccaagcag

SEQ ID NO: 66585 - DNA, 279 bp, Zea mays
cggaacgcacacaccgcccgtccccgatctccgatcccctcgtcgatccaaagatgcagatcttcgtcaagaccctcactggaaagactatcaccctcgaggtggagtcttctgacaccattgacaacgtcaaggccaagatccaggacaaggagggcatccccccggaccagcagcggctcatctttgctggcaagcagctcgaggacgggcgcacacttgccgactacaacatccagaaggagagcaccctccaccttgttctccgcctcaggggag

SEQ ID NO: 66586 - DNA, 276 bp, Zea mays
ctcaacccaagtcgtgcctccgctccggtcacccgtcgctccacgcaaccatgtcgaggaggaagaccagggagcccaaggaggagaacgtcacccttggacccactgtccgtgaaggagagtatgactttggtgttgctcacatctttgcatccttcaatgacaccttcattcatatcactgatttgtctgggagggaaactctggttcggatcaccggtggcatgaaggtgaaggctgaccgtgacgagtcgtcaccttacgctgctatgcttg

SEQ ID NO: 66587 - DNA, 276 bp, Zea mays
gcggcggcggaagtaagaggcgatggggcactccaacgtgtggaactcgcaccccaagaactacgggcccggatcccgcgtctgccgggtctgtgcgaaccctcatggactgatcaggaagtacgggctgatgtgctgcaggcagtgcttccgcagcaacgccaaggacattggcttcatcaagtaccgctgaagtcagctgggcgggctatctgaatgccatctcttggacagtgtagtagaggcgatgccacaattttaattactgtcatttag

SEQ ID NO: 66588 - DNA, 274 bp, Zea mays
gcggcggcggcggagaaacgcaggcgaaggcgagggtgtgagggaaggagcaccagccatggtgcacgtcaacttctaccgcaactatggtaagacgttcaagaaaccaaggcgtccttatgagaaggagcgtcttgatgctgaactgaagctggttggtgagtatgggctgaggtgcaagcgtgagctttggagggtccagtatgcactgagcaggatccgtaatgctgcaaggcacttgctcacccttgacgagaagaacccccgtcgtatc

SEQ ID NO: 66589 - DNA, 274 bp, Zea mays
gcaaggagtgccccaacacagagtgcggcgcgggcgtcttcatggccaaccacttcgaccgccactactgcggcaagtgcggcctcacctatgtctacaaccagaaggcgtaattgcttgccccgatttgctttatccgccaacctatcaagcattcagatgttggttactcaaattgtatctcatttagatctgtctgaggttgaaacttaaatggagcagtagtatctatcatattggtacccctgttactgagtataattttgttttcata

SEQ ID NO: 66590 - DNA, 265 bp, Zea mays
atccgccgttgctgctgacgcgtccacagaatggggggtttcgtgaagactcataagaccaatgcgtatttcaaacgtttccaagtgaaattcaagagaaggcgggctggcaagacagactacagggccaggataaggctgattaaccaagacaaaaacaagtacaacacacccaaatacagatttgttgtgcgatttaccaacaaggacatcactgcccaaatcatatctgctagtatagcgggtgatatggttcttgcttctg

SEQ ID NO: 66591 - DNA, 274 bp, Zea mays
tgacgaatgagatagctgatgaaaccgacagagaaacaggccgttcaaagcacatatcacctgtccctatccatttaagcatattttctccatatgttgtgaatcttactcttattgatcttcctgggcttactaaagtagccgttgagggccaaccggagaatattgttcaggacattgaaaacatggttcgctcatatattgaaaagccaaattgtataattctggctgtttccccagccaatcaggaccttgctacttctgatgcaatcaa

SEQ ID NO: 66592 - DNA, 243 bp, Zea mays
agccgccgttgctgctgccgcgtccacagaatggggggtttcgtgaagactcataagaccaatgcgtatttcaaacgtttccaagtgaaattcaagagaaggcgggctggcaagacagactacagggccaggataaggctgattaaccaagacaaaaacaagtacaacacacccaaatacagatttgttgtgcgatttaccaacaaggacatcactgcccaaatcacatctgctagtatagcg

SEQ ID NO: 66593 - DNA, 275 bp, Zea mays
gtttcgcgtccgcctcagcccgccgcaaggagaggtaagttcaggagacatcttcgagaagctgaaatggctcctaaagctgctcctgccaagaagggtgatgccaagacccaggccttgaaggttgccaaggctgtgaagtctggggcagccaagaagaagaccaagaagatccgcacgtctgtgacatttcaccgccccacgaccctgaagaaggctagggaccccaagtacccacgaatcagcactaccggaaggaacaagcttgatcagta

SEQ ID NO: 66594 - DNA, 275 bp, Zea mays
caacacttggcaaagcgtcttctttctgggaaggctgcttctgatgattctgagagaagcatgcttgtgaagctgaagacagaatgtggctaccagtttacttcaaagttggagggcatgttcactgatttgaagacctctcaggatactacacaagggttttatgcatctacttcctcggagctgccggcagatgcccccacaatgtctgtccagatactcacaactgggtcatggccaacgcaaacctgcaatacctgcaatctcccccctga

SEQ ID NO: 66595 - DNA, 272 bp, Zea mays
ctgcaagaagaacgaggtctggtaccctgtttccaagacgctggcagagaaggcggcttggaggtttgcggaggagaacggggtagacgtggttgtcgtcaacccggtgactgccatgggccccatgattccgcccaccatcaacttcagcatgaccgtgctcctacgcctgctacaaggttgcacggaggagtacagggacatctggatgggggcggtgcatgtgcacgacgccgccatggcgcatatcctggtgttcgagagcccggcgg

SEQ ID NO: 66596 - DNA, 272 bp, Zea mays
gaaaaaacccttgcgccgctgagctgagtctccttcctttctcccgtcgcctccgcctccgccttcagtttagcctccaagcaggggcgccgcgcggggtattctgtccgtcgttgagggtagagagtcacttgcaccgggggagcggagatgaagccggttgtggggatcgtggtgtcgaacaagatgcagaagtcggtggtggttgcagtggaccgtctcttccacaacaaggtatacaaccgctacgtcaagcgcacctccaagttcat

SEQ ID NO: 66597 - DNA, 272 bp, Zea mays
acttcctcgcgctcgcgctctcgagtcccgactcacctgcttctagccatggaggcgcctccatcttctcccttcctagtgttgctcctgctgttcttcccttcgagcggccttgccgcccccatggattttaaccatgaagtgcaagtccttatggtgatcaagagcctcctcaaggacccctatggcgcgctgagaaactgggacaggaactccgtcgatccctgtacctggtccttcatctcctgctcgccggagaatctcgtcactgc

SEQ ID NO: 66598 - DNA, 271 bp, Zea mays
ctcgagccgacttgttgccccaaccttaaggagatagacctcactgactgcggagtggatgacgcagcattgcagcacttggctaaatgctctgaattgcgaatattgaaattaggcctatgctcaagtatttctgacagaggcattgcatttatcagttctaattgtggaaagctcgtggagcttgatctctaccggtgcaactctattactgatgatggattggcagctttagcaaatggatgcaagaggattaagttactgaacttgt

SEQ ID NO: 66599 - DNA, 272 bp, Zea mays
aaagcctcaaaacctgatcatcagagaaacgaaaaggaagaggtgagcgtgggagaaaaaacaaaagaaaggaaaagagatatagccctgagaagaatgtcccttacaactgatgaactcaaggccaaggccgaggtatactacggtgacgagatctgccagctgtgtacccagctcctgctcagggaagcaggcctccccaatggcctgcttccattgaaggacctaatcgagtgcggctatgtccaggaaactggattcgtgtggctgaa

SEQ ID NO: 66600 - DNA, 271 bp, Zea mays
gcaaattgcactttctctccgcaccatcgtattctcaacagcgccgagccacaacacgatgtactcatacaaagacgcagataggcgtcgggagtgggtcgctcatcttcaggctggtgcaggcattgttgccgacagtagcccagatgacgaacaacgtgaatgcgagaataaggctgctgcactagctcgggccatcgatcttgcagagtcagcttttgtagacaaagaatagtgtgctatggttatcgtttagttcttgttcatgttt

SEQ ID NO: 66601 - DNA, 272 bp, Zea mays
cgagaagccgaagaaaattcgaagacgaggagcagctacactgcggacggacttcgggcatggagggccagttccaggttggcaaggaggaggtcatccaagcatggtacatggacgacagtgaagaggaccagaggcttcctcatcatcgcgagcccaaagaattcatccctctcgacaaactttccgaactaggaatattaagctggcgcctaaatgctgatgattgggagaatgatgagaacctcaagaaaattcgtgaagccaggggt

SEQ ID NO: 66602 - DNA, 350 bp, Zea mays
tgggtttgtgtctaaggaaatgatccaatctcattgtccagcgcctgctgaggacattcagatcctgagatgtggtcctcctccgatgaacaaggccatggctgcacaccttgacgagctcaactacacaaaggagatgcagttccagttctaagcaatgttaagtttgcaaataataattagtgacacatggttcttcggtcacaggaatagtacctgactctgctcgttagctgatatcaggaggaattcaggatcacatgatgattagtagtgcgccacattttttgcaatctctatttttgaggtcaaatgatatctacctccacataaatccacattggcagaga

SEQ ID NO: 66603 - DNA, 346 bp, Zea mays
ctcagcgtgggagctgaagaagaagttcggcaacggcgtgacaccatggtcctcgtctacaacgccaccggggccagcctgagcctggtggacgacgggaaagactggatgggctccgtctacagctcgccgatcccggacaccttccacaacgggcagtggatcgccttcctccacgtcaagccggctcgctggcgcagggcagccaggccgccagggtgttccgcggcagggacgtcgatggccggactcgggacttcgtcgtcgcctggtacatcccgtgggacaacataccgacacgagcttacactgaaattggcagtgaaaactacttcaagactcggtg

SEQ ID NO: 66604 - DNA, 340 bp, Zea mays
tgaagtccccttggctacagcattgaggacgttcgacctgccggaggcgtgaagaagttccagtctgctgcttactccaactgcgcgaagaagccatcctgatatcccttttggcttccttattctagtagtttaggatttcttttctgacactttgattctgaccaatctctctggcctgctgttcctgataatcgaccagttccccagtcttgctccttgcactcctccctcctccatctccagcattgtgttctgattcacctgctccaatggctgttctttctgctgctgatgcttccccggtctcagctatcgggtttgagggctatgagaagcg

SEQ ID NO: 66605 - DNA, 343 bp, Zea mays
ctcgagccgaatcggctcgaggtccaaactcgtgagcacttactcctcgtccccgaacagccactcgaagccgagatacggccatggactccaccggcaccggagcagcggggaagggaaagaagggagcggccgggcgcaaggtcggcgggccaaggaagaagtcggtgtcgaggtccgtgaagctgggctccagttccccgtcggccgcatcgggcgctacttgaagaagggccgctacgcgcagctgtcggcaccggcgcccccgtctacctcgccgctgtcctcgaatacctcgccgctgaggttctggagctcgccggtaatgctgccagggacaaca

SEQ ID NO: 66606 - DNA, 350 bp, Zea mays
gccatgtcgaggcgcggcgactgggtctacgagaacaacggcgggacctgcgtggccatcgccggcgctgattactgtgtcgtcgctgcggacacccgcctctctgtaggatacagtatcctcacgcgtgatcactccaagatctgcgacctggctgacaaatgtgtactggcatcttctggcttcaaggtgatattaaggctctgcagaagaacctagctgccagagaattgctgtaccaacaccagcataataaaaggatgagctgccccgccatggcacagctcctctccaataccctgtactacaagcgattcttcccatattacgccttcaatgtgctcggtggg

SEQ ID NO: 66607 - DNA, 333 bp, Zea mays
cttgtaaccaaggcttctgtcactagtgcagaagtaagccaggatggcaggttcatcactactgctgatggctcaagtgtaaaattctgggacgcgaatcactttggccttgttaaaagctatgatatgccatgcaatgtggaatcggcttcacttgaacctaagtctgggagtaaatttgtcgcggaggagaagatttatgggttcatgtatttgatttcttcactggtgaagacatacctgtaaccaaggacatcatggtccagtccactgtgtccggtttgcaccttgtggtgaatcatacgcatcgtgttcagatgatggcaccattcg

SEQ ID NO: 66608 - DNA, 321 bp, Zea mays
cggctcgaggcaggaggcggacaaggtaagcagcaatcgcaggaaccctagcgccgccgcacccgcaggaatgggtatcgacctcgtcgccggtgggaggaataagaagaccaagcgcactgcgcccaagtctgacgatgtctacctcaagctcctcgtcaagctctaccgtttcttggtcaggagaccaagagcaatttcaacgctgtcattctcaagaggcttttcatgagtaaaaccaaccgaccaccaatctccatgcgccgccttgtcaagtttatggaaggaaggagaagacatgctgtcatgttggcacgtcac

SEQ ID NO: 66609 - DNA, 322 bp, Zea mays
tatctatcgcgccgtcgtcggcgcccgcggatcggaccgtcatgaccatatctacctacgcatgatcactacttgaatgtctactaatgctacgtactactactgaataaaaaaacctctccgcgcacatcgtccttgtgtttgtgtgtgtgagagagagaggagacggagagccggccatgccttttggctgtttgtttggtttatttttgagttcatgcggtctttatttatttccatgtacgctgcttcctcgtacccactttaaatttgtaccatgcatgcatgttccttatgatacactcacctatagttgtttgcg

SEQ ID NO: 66610 - DNA, 346 bp, Zea mays
tagcacctggcgccgctggacaccatgaccccgaccgtgttcgacaacgactactacaagaacctgctgtcgcagaaggggctgctgcactcggaccaggagctgttcaacaacggcagcaccgacagcacggtcagcaactttgcgtccagctcggccgccttcaccagcgccttcacggcgccatggtgaagatggggaacctcggcccgctcaccgggaccagtgggcagatcaggctcacctgctggaagctcaactcgtcctaataattaaggacggacgtccgatagacgacctgcgcacatcgtatcgtacgtgcatgatacgcatacatctggaaact

SEQ ID NO: 66611 - DNA, 339 bp, Zea mays
ccgtgttccgtgtccgcgtccagtgtgtccgctactccgctccccctcagtcctacagttcctcacctagcggtagcgtgcgcgcgggagacgtagatggcggcttcggaggcggcagctgcggcggcaacaccggtgacgccgacagaggggacggtgatcgcgatccacagcctggaggagggagcatccagatcgaggaggccaacagcgccaagaagctggtggtgattgacttcactgcaacatggtgtcctccgtgccgcgccatggctccaatttttgctgatatggccaagaagtccccaaatgttgttttcctgaaagttgatgtggatg

SEQ ID NO: 66612 - DNA, 340 bp, Zea mays
gctttttgtcatctcgaagccagatgtgttcaagagcccaaactcggacacctatgtcatattcggcgaggcgaagatcgaggacctcagctcccagctgcagacccaagctgcagagcagttcaaggctcctgacctgagccaaatgatcccgaagcctgagacatctggcctgggcctgaggacaacgaggaggaggaggttgacgaaactggtgtcgaggccaaggatgtcgagctggtgatgactcaggcatctgtttcgaggcccagggcggtcaaggccctcaaagcttctaatggagacatcgtcaccgccattatggagctgactacttagt

SEQ ID NO: 66613 - DNA, 349 bp, Zea mays
cagccgagctcgagcgcgccattgctcacctttttccgtccagcgcaaagacaccgcgcgccagagagggtgagggattgccgtgaccgattcgaaagccgcttcgggcgcgggtgggatcggcccgtggccggcaaagatgtccggattcgtcggtgtcgtcgtgtccgacccctcgctgcagggcagttcacgcaggtcgagctccgatcgctcaaggccaagttcgtgtctctgaagagagattccggccatgtcaccactaagaatctcccggtgatgatgaagaagctgagggggctcaatgaggtggtctctgtggaggagatcgcggccttcctgtccgagt

SEQ ID NO: 66614 - DNA, 336 bp, Zea mays
gagagaggaagacaggaagagagagagagagcgcgcgcttccaggtttttagctgcaggggaggccgatagttctgttctactggaggaggagcagagagcaagatggggtccggatctttcctcaaggtgctggccaagaacttcgatgtccttgccgggccactcatatcacttgctatcctctatatgcttctgttagagcaatagagacaaaaaatcctgtagatgatcagcagtggctcacttactgggtgttgtactcatttgtcactttgtttgagctaacttttgctccaattatcgagtggcttccattttggtcatatgcaaaact

SEQ ID NO: 66615 - DNA, 337 bp, Zea mays
agagctcaagctcaaaagcaggcagctaatcttcatcacccacttgtttgtattgatgtcattgaagaaggtatagttgcaggaccacgggctggactctggaaggaagcaacttctttccaggaactgcttttctcagatacttgtaaaagcttagttcatgtgttcttttctcacgggcaacgtctaagattccaggtgctacagacttggggttgatgcctaggaaaataactaaagttgccattctaggtggtgggcttatgggttcaggaattgcaactgcgatggtattaagtaactatcctgtgctacttaaagaagtaaatgagaagtt

SEQ ID NO: 66616 - DNA, 339 bp, Zea mays
gccggccatggcggctgcggcggcgcagaagctcctcgaggcgagcacgaagatcatcggcgtcgggcgcaactacatcgcccacgccgaggagctcggcaacccggtccccaaggagcccgtactattcctaaagccgacctcgtcgttcctccacgctggcgtggccaccgccgcgtcgagatcccggagctgctcgaatcgctacaccacgaggtcgagctcgccgtcgttatctcccggcgtgggcgtgacattcctgaagcgtctgccatggacttcgtcggaggctatgcacttgctttggacatgacagcaaggggccttcaatctgttgct

SEQ ID NO: 66617 - DNA, 337 bp, Zea mays
ctacatttcttctctctctgctcctccgcctccgcctgatccatccaagacagggatcgccatgtcggactcggaggagcaccacttcgaatcgaaggccgacgctggggcgtccaagacctacccgcagcaggctggcaccgtccgtaagaacggcttcatcgtcatcaagaaccgccctgcaaggttgtggaggtttctacctccaagactggtaagcatggccacgccaaatgccactttgtcgccatagacatattcaatgggaaaaagcttgaagatattttccttcatcacacaactgtgacattccgcatgtgaaccgtactgagtatca

SEQ ID NO: 66618 - DNA, 341 bp, Zea mays
tacgaatctgcaggccccgaagcgaggtggcagggcaccggtgccggccaagaagaagtcggataaagtgacgaaccctctgttcgagaaaaggccgaagcagttcggcatcggcggcgcgttgcctcccaagaaggacctgcaccgattcgtcaagtggcccaaggtcgtgcgcatcagcgccagcgtcgcatcctcaagcagcgcctcaaggtgcctccggcgctcaaccagttcacccgcaccctcgacaagaacctcgctaccaacctgttcaagatgcttcttaagtaccggcccgaagacaaggctgccaagaaggagaggcttctgaagagggc

SEQ ID NO: 66619 - DNA, 315 bp, Zea mays
gttcgccatgacctcaatcaagggtgtcgggcgccgcttctccaacatcgtctgcaagaaggccgacatcgacatgaacaagagggccggcgagctgacgcctgatgagctggagcgcctgatgacggtcgtggccaaccctaggcaattcaaggtgccggactggttcctcaacaggagaaggattacaaggacggcaggttctcgcaggtcgtctccaacgcccttgatatgaagctcagggacgaccttgagaggctcaagaagatcaggaaccaccgtggtctgcgtcactactaggggctccgcgtccgt

SEQ ID NO: 66620 - DNA, 263 bp, Zea mays
tggagatgggttacaagaatcccattctactactacatcccttaggtggttataccaaagcggatgatgtcccactgccagttagaatggaacaacacagtaaggttttagaagatggagtgcttgatcctgagactactatagtgtctatatttccctcaccaatgcattatgctggtcaacagaagtgcagtggcatgcaaaggcacgaattaatgctggtgccaatttctatatagtaggccgcagatctgctggaatgg

SEQ ID NO: 66621 - DNA, 239 bp, Zea mays
gttctgtctgctactgaagctttgcttgcagatcatggcacaggcattgcaggccagcgtttcgtcatacagggattcggtaacgttggttcctgggcagctcagctgataagtgaagccggtggcaaggtgattgctatcagtgacgtcacaggcgcgtcaaaacgtcgatgctcgacatccgcagtagtgaagcactcggcggaacaagggacaaggcttcaagggaacgcatcgtc

SEQ ID NO: 66622 - DNA, 335 bp, Zea mays
cttgacctctacttcaagtataacgttacggaaatgctgtcaaatggatggatacaggtttcaaatggtaaggaatatgcactgagcgatgtcatcgataccatcaaacatgcttttgggggatcaccacaaattgtttgcaagaggggttcaatcgaagaacttaggttatgctcgacaaagaattgaagcctcgtgattgccttaccacttctttggcgaatggaagtgtatcaaaaagcaagcactgcccgcggtacatcaccttgccaacgtatgatccccttgtgcttgccaattccaactgtagagatcatgacacagttcgatgaatt

SEQ ID NO: 66623 - DNA, 337 bp, Zea mays
gggatgcagcagccgatgcacatgcagccgcaggtgccggcgataagcccagctgccggaatcaccacggagcagatccaaaagtatctggatgagaataagcagcttattttggctattttggaaaatcagaacctaggaaaattggcagaatgtgctcagtatcaatcacaactcagaagaacctcttgtatctcgctgcaatcgcagatgcccaaccgcagactgctgtaagccgcactcaagatggcgccgcctggtggatctcctggagtagggcagtacatgtcacaggtgcctatgttcccaccgagggacactctaacaccccagcaga

SEQ ID NO: 66624 - DNA, 336 bp, Zea mays
  unsure (1)..(336): unsure at all n locations
gatanaacagaatgggggaaagagatcggatggatatatggctctgttactgaagatattttaactggtttcaagatgcatgcaagaggttggatatccatctactgcatgccacttcggccttgcttcaagggttctgctccaattaatctttctgatcgtctcaaccaagtgtacgctgggctcttggttcagttgaaattctacttagcagacactgtcctatctggtatggttacacatggaagctanagcttctggagagactggcatacatcaacaccattgtttatccaattacatctatcccactagtagcatactgcgtccttcctg

SEQ ID NO: 66625 - DNA, 335 bp, Zea mays
ggaacgcacacacagcccggtccccgatctccgatcccctcgtcgatccaagatgcagatcttcgtcaagaccctcactggaaagactatcaccctcgaggtggagtcttctgacaccattgacaacgtcaaggccaagatccaggacaaggagggcattcccccggaccagcacggctcatcttcgctggcaagcagctcgaggacgggcgcacacttgccgactacaacatccagaaggagagcacactccaccttgtgctccgcctcaggggaggcatgcagatcttcgtcgacgacctcactggctagaccatcatcctcgaggtggagtc

SEQ ID NO: 66626 - DNA, 334 bp, Zea mays
ctcgagccgcagggagcacgccgcacgagccctttccgccgccgccaaaatggtgaacgttcctaagaccaagaagacctactgcaagaacaaggagtgcaagaagcacactctccacaaggttactcagtacaagaagggtaaggatagcctgtctgctcagggaaagcgcgttatgaccgcaagcagtcaggatatggtggccagaccaagcctgtcttccacaagaaggccaagaccaccaagataatcgtgttgaagctgcagtgccagagctgcaagcactactcacagcacgcaattaagaggtgcaagcattttgagattggtggag

SEQ ID NO: 66627 - DNA, 328 bp, Zea mays
  unsure (1)..(328): unsure at all n locations
gagcaaggggccaggggtttcttcaggggatgggtgcctactttgcttggttacagtgctcagggggcttgcaagtttggcttctatgagttctttaagaagtattactcggacattgcagggcctgagtatgcccaaaagtacaagactctaatctacctcgcaggatcgcatctgctgaggtaattgctgatgtggctctctgcccttttgaagctgtgaaggtacgtgtgcagacacaacctggatttgctcgtggattgagtgatgggctcccanatttgtccgatctgagggtgttcttgggctctacaagggattgttctct

SEQ ID NO: 66628 - DNA, 260 bp, Zea mays
tgttcgcgacgagctcgcctccaccgggccacttgctacgcagcttgctgaaattgttaatcaggggaaattagtttctgatgaaattatcatcaatcttttgtccaaaaggcttaagaaaggagaagaccagggagaatcaggatttattcttgatggttttccccgtacgtaaaacaagcggaaattcttgatggcgttacagatattgatatggtggttaatctgaaactaagagaagatgttatagtagagaagtg

SEQ ID NO: 66629 - DNA, 271 bp, Zea mays
atcagatcagaagcagcgaggtgaggcgcgatgcgagttattgctccatcccgcatccaccagcagaatgtttctcacgaggacggatacgaccgcggggtgaacacttctcgccggagagtccgctgttccaggtcgagtacgccatcgaggccatcaagttgggatccactgcgatcgggttgaaaacaacagatggtgtagtccttgctgttgagaaacttgtgacctcgccactgctggaaccaagcagtgtggaaaaaatcatgga

SEQ ID NO: 66630 - DNA, 343 bp, Zea mays
gtgcttgcagtatggatgatgccaagaggcttatagagctagtccaagggatcccatgcaagataaacctcatctctttcaatcgccacggcggttcccaattcaagcccacaccagacgataagataattgagttccgcaacgttttaattcaaggtggcctcactgtttttgttcggctcagcagaggggatgatcagatggctgcctgcgggcagctaggagagcctggaggctatcagctacctctgctccgtgtgcccgagatatttcaggtcgccttgtgatgctaacagtgcatacagtagaaatggtcctgagcagcttgacgaacacacggagt

SEQ ID NO: 66631 - DNA, 273 bp, Zea mays
  unsure (1)..(273): unsure at all n locations
aaaacaaaagggtaccggaagcggcganacctcgcctcccgccgctctcgcatcgtctccagagcgcacgtcagatcaggtgcgccgcgcccccctcgcctaagctgcgacgaccatccatcgaccaggaaggatgacgggctccatggatctcccggccaagggcgggttcagcttcgacctgtgtcgccggaacaacatgctggagaagaacggactcaaggtcccgggattcaggaagaccgggacaaccatcgtcggcctcgtctttca

SEQ ID NO: 66632 - DNA, 142 bp, Zea mays
ccgcaacggctccacctccaaggtggtcaaggtcgctgactgcggacagctctcctagatctctctagtctggtctgttcggccgcactcccaccgtcatcgtcgactcaccctgcgtccgttcctttggatctgaataaga

SEQ ID NO: 66633 - DNA, 327 bp, Zea mays
gaaggacctgacggaggttacgcacaaggtctacttcgacatcgagatcgacggcaaacccgcaggccggattgtcatggggctttgtgggaagactgttcctaagacggcaggtatttcgaacttgctattaacaattcagaactatcttctcatgaggcaagagaatactaatggaccctacttattgcttacctacagataacttccgagctctttgcacatgagagcaaggggtcggcaagagtggcataccctccactacagtggaagtaagtgccacagaatcacccgagcttcatctcctaggcagtgacttcactctcg

SEQ ID NO: 66634 - DNA, 299 bp, Zea mays
gtcaagagtcatatttgttgcaactgccaataggatgcaacctataccccctactctgttagacaggatggaaatcattgagctgccaggctacacacccgaagagaagttaaaaatagccaagaaacatctcataccaagggtattggagcagcatggcttgagtacgacaaatcttcagattcctgaggctatggtcaaactggtcatcgagaggtacacgagagaagctggtgtgcgcaatcttgaacggaacctagctgcattggctcgtgcagctgctgttgaggtcagagcag

SEQ ID NO: 66635 - DNA, 329 bp, Zea mays
  unsure (1)..(329): unsure at all n locations
cggctcgaggctcacttcttgttacatgactactacacttgaggcggggaacggcaagtgttccgtctgcttgagagcaggaagagggacgagctgagccaggagttgctagacaaggcacgagctcgtaaccgcggcggacgtacagtttcttctgtgaccctgacgctctgggagagaacctgtacacgattataaagttcggccttgttcaatacatgattctcaagacactatgcgctctcttggcgttggtcttggagccttttggagcctatggagatggcgatcaagtggnattacggatatccctacattgccgctgtcat

SEQ ID NO: 66636 - DNA, 79 bp, Zea mays
  unsure (1)..(79): unsure at all n locations
ccacagcccacataaaccacagcttcggaattgggctgtggtgaacgagganacgagatggctgaggttctcatggact

SEQ ID NO: 66637 - DNA, 347 bp, Zea mays
ccaggcgcgaatggcggcggcgaggagcctgcttctgaggcacctccgcttggcggcggccccgtcagcggcgtccgtgaggccgacggcgtcgttgcatgatgccctgtgggggcagcggaggatgtcttcggaggatgccaagggctctttcctggacaagagcgaggtcactgaacgcatcatcaaggtcgtcaagagcttcccgaagatcgatgacccctccaaggtgacaccagatgcccatttcaagaatgatcttggcctagacagtttggatgcagtgagttgtcatggccctggaagaggaattcagattcgagatacctgacaatgaagctgacaag

SEQ ID NO: 66638 - DNA, 257 bp, Zea mays
cgcattgggtacgtaaacacaggacttactgaagaaaagattttgagtaacttgaaacaatggaaatgtgtcttaaaatcattggatgatcctccaacaagtgttgaaccatgctgtatttgccaggaagactatgtggaaggcgaggacctgggcaggctggattgtggtcatgacttccacaccgcatgtatcaaacaatggctggttataaaaaacctgtgcccaatctgcaagaaaacagcactggacaccta

SEQ ID NO: 66639 - DNA, 104 bp, Zea mays
cggctcgagcttgttcccattatcacggcggcggtggcggacgtaaggcgaaggagtagcagcagcaggcggcgccgagtagcggctccccatctcgagcttgc

SEQ ID NO: 66640 - DNA, 302 bp, Zea mays
  unsure (1)..(302): unsure at all n locations
acgacaacgagtggggctacagcaaccgcgtcgtcgacctgatccgccacatgttcaagacccagtagagagagatatttctgcctccctatcgtgaggtcgtcnccaatggcctttggtcgcagacatctttgctgcttgtctatgctgagaataaatgtgaacggtgcccctggacgctggatccatgctggttttggacacgttgtctttttgtgtttaacttatctgctaccgtcctgtaacgaattcactaagttctagttcttttgtgctttgttaagaataaacaatgaggtttc

SEQ ID NO: 66641 - DNA, 342 bp, Zea mays
aagagaatgaagttgtggtgtaccgaagctttttgaaagccggattgcgattccccttgagcagcttcgtcgtggaggtgttgaaaatcttcgaagtctatcttcatcaacttactccagaggcgattataaggctaaatatcttcgtgtgggccacgagaagccaaggtctgaagcctgacgcaagaagcttctgcaatatacatgaattattatatgaaacaaagccttggggcaaagaacagtaccacaataactttggctgctacagtttcgtctctcggtcgggcaagctgtcccgtaccaacctttcggaagagatggcccggggattggatgaca

SEQ ID NO: 66642 - DNA, 345 bp, Zea mays
  unsure (1)..(345): unsure at all n locations
cttgcaccagaaatcatcaaaggggatggccatggaagcgctgttgactgatggacgtttggtgtcttcctttatgtacttctatacggcaatacactcttcagaggacctgggaatgatgaaacattggcaaatgtggtctaggggaatctccggttcccagaccatccagctgtgagcagcaacaccacagatctcatcagaggtttactggttaaggagcctgagaacagatttggatcgttgagaggagctgctgagatcgagcagcaccccttctttgttgctagnattgggctctgattcggtctgctgctcnaccagagacacaaccttgcgacatcg

SEQ ID NO: 66643 - DNA, 319 bp, Zea mays
ctcagaagtatcgtgtggagaacttgtatgagggaccccttgatgatgtttatgcaactgctatcagaaactgtgatccggagggccctcttatgctgtatgtttcaaagatgattccagcatctgacaagggcaggttctttgcctttggtcgtgtcttctcagggaaggttgctactggtatgaaagttcggatcatgggtacacaactatgtcgctggccagaagaaggacctgtatgtcaagagtgttcagcgtactgttatctggatgggaaagaaacaagagtcatgaggatgtccttgtggtacactgtgct

SEQ ID NO: 66644 - DNA, 323 bp, Zea mays
cgagattgttgaattcatctctgccctagcaccagccatggcgaacgacagcttcttctctgtttcctactcgccgcctccgcgccgctaatcgtcgccacggccaagaaatccggggacgtgtaggagctccagatcggcgtcaagtacaagccggaatcatgcagcattcaagctcacaaaggtgacaaggttaaagttcactaccgtggaaaacttactgatggaacggtttttgattcacgctatgaaagaggtgacccgattgatattgaatgggctggacaatgatcaaggagagatcagggtctcctggattgcgt

SEQ ID NO: 66645 - DNA, 330 bp, Zea mays
ctctccgcttccaagatgtcgaagcgaggacgtggaggttctgctggtaacaagttccggatgtcactgggtctaccagtggcagccactgtgaactgtgctgataacactggagccaagaacctttacatcatttctgtgaagggaatcaaggggcgccttaacaggcttccttctgcctgtgttggtgacatggttatggcaactgtgaagaagggaaagcctgaccttaggaagaaggtgatgccagctgtcattgtgaggcaacgcagccatggcgcaaaggatggtgtctcatgtacttgaagacatgctgagtgttgtgaccca

SEQ ID NO: 66646 - DNA, 301 bp, Zea mays
  unsure (1)..(301): unsure at all n locations
ccccgtcncccattccacccgccgccgccgacgcgccgcgcctgttcaagatgaatgtggagaagctcaagaagatggcgggtgctgtgcgcactggaggaaagggcagcatgcgcaggaagaagaaggcagtccacaagaccgcaaccaccgatgacaagcggcttcagagcacgttgaaaagaattggagtgaacactattcctggtattgaggaggtcaacatcttcagggatgatattgttatccaattccagaaccctaaagtgcgagcatccacctgcaaatacatgggtagtca

SEQ ID NO: 66647 - DNA, 327 bp, Zea mays
cgagattgttgaattcatctctgccctagcaccagccatggcgaagcgcagcttcttctctgtttcctactcgccgcctccgcgccgctaatcgtcgccacggccaagaaatccggggacgtgtcggagctccagatcggcgtcaagtacaagccggaatcatgcagcattcaagctcacaaaggtgacaaggttaaagttcactaccgtggaaaacttactgatggaacgagttatgattcaagctatgaaagaggtgacccgattgaatttgaatggcactggacaagtgatcaaggatgggtcagggctcctgggatgtgcgtg

SEQ ID NO: 66648 - DNA, 343 bp, Zea mays
gccaaccgcatccagtccacccccatccccctcgaccccgacaaacccgacacgatggcgcccaaggccgagaagaagccagcggagaagaagccggcggccgaggagaaggcggagaagacgaccgcaggtaagaagcccaagtccgagaagcgcctgccggcatcgaagtcctccggcaaggagggcggcgaaaagaaggggaagaagaaggccaagaagagcgtggagacctacagaatctacatcttcagagtcctgacagcggtgcaccccgacatcggactcctccaaggccatgtccatcatgaactcttcatcaacgacatatcgagagctcgcg

SEQ ID NO: 66649 - DNA, 357 bp, Zea mays
gagtgcgtgacgccgagtcagtcagaattcgctcatgagacttcgagatcaagcacactggtccatgccttctgtccatggccaatgccgggagatatacgaacggatcgcagttggtcatcaccacagtgacagcaaggtggtttgacgggaagcatagggtgtttggcaaggtgttgtctggaatggatgttgtgtacacagtcgaagctgaaggccgtcagagtggggagccgaagagcacagttgtgatagcagatagcggcgagctgccgatgtgagcgcgtgctgaattgatgtgccatccgaaacatgatgaatagaagtttctggtggacgtctgtcgttctagcactg

SEQ ID NO: 66650 - DNA, 316 bp, Zea mays
tcagctcacatatccgctcacctacctctccagcatctcacgtctccgtcgtctcgtctctgctcctcacctcgccgccagccatgggcaagatcaagatcggaatcaacggtttcggaaggatcggcaggctcgtggccagggtcgcactgcagagcgaggatgtcgaactcgtcgccgtcaacgaccccttcatcaccacggattacatgacctacatgttcaagtacgacaccgtgcacggccaatggcagcacagcgacatcaccctcaaggactccaagacgcttctcttcggcgagaagcaggtcacgtc

SEQ ID NO: 66651 - DNA, 343 bp, Zea mays
gtctggaggttggaacaaatagggaaggacgggtcattccataagaggctgaacaaatctggactatctacagttgaggatttcctgaggcttgtggttcgggatccacagaaattacgcagtatacttggcagtggtatgtccaacaaaatgtggacaacccttgtggagcatgcaaagacttgtaccttaagtggaaaatattacatatactattctgatgagactagaagtattggtgctattttcaacaacatctatgcattctgtgggttgattctggcgagcattttattcactgagagcttgatgataccaaagctgttgctgatgcatggtaaga

SEQ ID NO: 66652 - DNA, 310 bp, Zea mays
tataagtacattgtacttattcaactacaagcagttcccatctgtgcattggctcatttcctattcgaaatactccaagagccttgagtctttttacgagaaatttgatccagctatcattgatattaggagcaaagcacgtgaggtgttgcagaggaaggacgatctgaatgacattgtgcagcttgttggtaaagatgcgctatcatagtctgacaagattacgctggagacagcaaagcttgtgagagaggttatttggcacaaatgcattcacccatatgtaagtctgccatctacaatcgtttga

SEQ ID NO: 66653 - DNA, 348 bp, Zea mays
agcgagttaccagaggcccttcatgaaggtgagctctacatgcatttcacggtggagttccccgactcgctggcaccagagcagtgcaaggctctctgagtcggtacttccgccagagccttcgtccaagctgacagacatggagatcgatgactgcgaagagacaaccatgcatgatgtgaacaacatcgaggaagagatgcgcaggaagcaggctcatgctgctcaggaggcgtacgatgaggacgatgagatgcctggtggcagccaaagagtgcagtcggctcaacagtaagcagactaccataatgagattccaggcactttagttgctcttcgattatgcga

SEQ ID NO: 66654 - DNA, 303 bp, Zea mays
ctcgagccgctctaaggttccagcgagcgactgtgtcgagcaggagagagcgcgatggggcagatgcagcagctgatctgcctcgtggccgccgtcgccgccgcggccatcctcctgacagcgtcggccaagaagtccggcgacgtcaccgagcttcagatcggcgtcaagtacaagcctgagtcatgtacgctgcaagcacacaacggagacaaaattaaggttcactatcgtaggacactcactgatggatcaagtttcgattctagctatgacagaggtgagccggttgaattcactctt

SEQ ID NO: 66655 - DNA, 347 bp, Zea mays
tgacgaaattagagatggtgtagctgagtagcagtatcctcaggggagttcttagggtgagccagaagattgaagttcgccctggcattagttatgaaagaatgagaatggaaacattaggtgcacgccaatctactcaaggattgtctcactctatgctgagcagaatcagctccaatttgctgtcccaggagggcttattggtgtgggaacaaccatggacgcaactctaacgcgtgctgataggctggttggccaggttcttggtgaagttggttcactactggatgtttatgtagagcttgagatcaatgtctcctctccggaggctgttggtgtgagacgaa

SEQ ID NO: 66656 - DNA, 323 bp, Zea mays
gtccgcaccaataccgtgaagaagacctccaggcaggtgatcgcgaagtactactcacgcatgaccctcgacttccacaccaacaagaaggtgctcgaggaagtctcgattctagcctcgaagcagctccgcaacaaggtggctgacttcagtacccacctgatgcgccgcatccagcgcggcccagtccgcggcatctcgctcaagctgcaggaggaggagcgcgacgccgcatggacttcggccggagaagtcgcgctcgaggtcgacagatccgcgtcgacaagagaccatggagatgctcgctgcctcggcatggcgac

SEQ ID NO: 66657 - DNA, 318 bp, Zea mays
gtcaaaagaaacggtgaaaatctcagctatgagcacatctgtgtctctggacgcgaagcactatgtagcgttccaatgtagttctatacacatctgagagcaatcaggcaactgtctgcatcagatgcagacacctagtgaaagttgttaaacctgcccaattcgaggcgattaatgatgacgaggtgcccatttaccagaagcctttcatggaaggggaagctgtacatccatttgccggtggaatacctgactcgttagcaccagaacagtgcaagctctcgagacagtcttccaccaggacttcatccagctgac

SEQ ID NO: 66658 - DNA, 329 bp, Zea mays
gagatccagaaaggttcctcgtctgttgaaggtgttgaagctaaaacatggcaggtccctgaaaccctccctgagtaagtgctttgaaagatgggcgcacccctaagtctgacgtgccagtcatcacgccgcaagaactcgcagaggccgacggaatcctcttcgggttcccaacgaggtccggaatgatggcagcgcagatgaaggcgttcttcgattgcactggtcggctctggagggagcagagccttgccgagcagcctgccggcgtctgcttctgcactagatcgcagagtggttgccaggagacgacagcgttgacagcgatc

SEQ ID NO: 66659 - DNA, 298 bp, Zea mays
gtagacaggtcaagatctctgaggtgtgtcatcattataaacattttggcaagagtcctggtatgggcctgctcttcgtgctgttgcttcaatgagcaaggctgagttgggcagcaaaactgtaagcattggaatgatgcattcgtttgtacactgcagcattactacgtagggacaaaactactctaggcagatgttaggatctcatcaagattgctggtgaaactgtgctggtgggaagagctatcaagagagagaggcacagtgacacgcacaacagcaatatcttcagctggtc

SEQ ID NO: 66660 - DNA, 302 bp, Zea mays
gacatcgcatggagcgtacgtatctcggattcggtcgagtggtgactcggtgcagagggtagccatggcgatagctccttcgagcattggtgtacagcttgcgatgaagcaaactccaggatctcctgaggcacacacgctggcaaggtggatcggcaggagctacaagttccacactgagagcagaactcctccgcacggacatccaaggcacggatgcttccgtcaaagcgctgtggcaacactcggactcgatcatgtactgttccctgaagctgctccgtgttacctatgccaccaag

SEQ ID NO: 66661 - DNA, 332 bp, Zea mays
acaggtcagtcgggactacccgctgagtttaagcatataaataagcggaggagacagaacttacgaggattcccctagtaacggcgagcgaaccgggagcagcccagcttgagaatcgggcggcctcgccgcccgaagtgtagtctggagagacgtcctcagcgacggatcgggcccaagttctctggaaagggacgcctgggagggtgagagcccgtccggcccggacctatcgcacacgaagcgccgtcaacgatcggttatttaggatgcagcccaatcgggcggtaaactcgttcaaggtaaatacagcgagacgtctcgcgcacggg

SEQ ID NO: 66662 - DNA, 325 bp, Zea mays
acacaaggtcagcatcgtagataagatcaaggatgagatcaccggcgagcacggcgacaagtccggcgaccacaaggagaagcaggccaagaagaagaaggataagaagagagcacggcgaagagcactaccacgacggcggccacagtagcagcagcagcgagcacgatctgagatctggtgtcgcagcacaagtgcaacacaagtatgcttgctgagatggaggattcataccagctgatgctactgtagtgtttcactggtgtcatgcatacatgtatcgtgctattataatcaacaagacaaagactaacagtcatgatgg

SEQ ID NO: 66663 - DNA, 333 bp, Zea mays
agcagctcctccgcgggacgacgaactgctactcatcgccaaaacactagccccgatccggtcgaggagcactacttcttggcatggcgggacccctagccaggcaagcctcctgctccaggagcagctcaaagatcttgcgaagaaccccgtggatgggttctccgcagagcttgtagacgatagcaacgtcttcgagtggcaggtcaccatcatcggcccgctcgacacactatatgatggaggctacttcaatgcaataatgacctcgtcccagaagtatcccaacagcccgccatcagtaagattacttctgggatgtggcaccgaatg

SEQ ID NO: 66664 - DNA, 206 bp, Zea mays
cgtgcttggtcacctacaagaccaagattattgatgtcatcgagaagggagagagacagcccaacatcactattggcagtgtggtctccgttgtcatcgtgttcgttaccgttctcttcaagctcctgtttggtggcaagaaaccagtggcacctgtgaaacctgcagctgaggcgaagaagcccaaggccgcggagacggacggt

SEQ ID NO: 66665 - DNA, 332 bp, Zea mays
cgacatcgacgctgccttcgcgagaacgaagcagtcaggctgcccaagcacctcaggcgccggcgcgacaacaacctggcgccattggacctacagacccctaccgtcttcgagaacaactactacaggaacctcctcgccaagaaggggctcctgcactccgaccaggagctcttcaatggcggagcaccgacgcgctggtccagtcctacgtcgggagccagagcgcgttcttcgcggatttcgtggcgggcatgatcaagatgggcgacatcacaccgctgaccggctccaacaacggacagataaggagaactgcagaaggtcattag

SEQ ID NO: 66666 - DNA, 325 bp, Zea mays
ctcatctcattctcaagtgtgtcgccgcgagagcgccatggacaacctccaagtcactcctacttcggcgttcactcagtggaatgaactgaagttcgaaggcctgtacttgttccacaaatcccagggctcaggcgccaatcagactcaggtcataagcaacaaggcgccgattggcatcggtgccaacgtagttaacaactggacagtgtgtgacgggccagggccgaacgcagagcgcattagccgtgcacagggcttgcatatccaagccggcaactgggtcaactccttcagcctaatgttcgtggatcaacagttcagt

SEQ ID NO: 66667 - DNA, 339 bp, Zea mays
gctttgtgatgctcagcatgttgaggaggcagagagaatgggtatagacaatatggatgtggaagccctcaagacgatgaacaagaacaagaagctagtgaagaagctggcaaagaagtaccatgctgtccttgcatctgaggctatcattaagcaaattcctcgtcttcttagtcctggtcttaacaaggcaggaaaattcgctaccttggtgacacaccaggaatcccttgagtccaaggttaatgagacgaaggctacagttaagttccagctgaagaaggtgctttgcatgggtgttgctgttggcaactgcggcatggatgagtagcagatctt

SEQ ID NO: 66668 - DNA, 339 bp, Zea mays
gcaagaccgcatcctctcatcagcttccttccacattcgtctcgagatctcgccccgtcgccatggacgcgatcgacagcgtggtggatcccctccgcgacttcgccaaggacagcgtccgcctcgtcaagcgctgccacaagcccgaccgcaaggagttcaccaaggttgcggcgcggacggcgatcgggttcgtcgtcatgggcttcgtcggcttcttcgttaagctcatcgtcatccccatcaacaacatcatcgtcggttccggctaggcttacaggagtacagggcgactagcatgggagtagtgcaatacttttgaggagcaatagataacga

SEQ ID NO: 66669 - DNA, 298 bp, Zea mays
  unsure (1)..(298): unsure at all n locations
aaccggctcgagcgtaggcgagcctccctccgtcgctccttccgcgccgttcncggccgtcgtcgcatggtgaagtactcgcaggagccgggcaatcctacgcacgcggctaaggccataggcagggatctgagggtccacttcaagaacacaagggagacagcctttgcgcgtcgcaagttgtctttgaccaaggctaagcgataccttgaggatgttattgctcacaagcaggcaattcccttccggagatactgtgggggtgttggtcgcacgcgcaagctaagtcgcgccactc

SEQ ID NO: 66670 - DNA, 327 bp, Zea mays
cgccgacggctcgtcaccgacacgttcgcgcgggacttcgcgcgccgcggcatgctgacctacgtagagaggatccagagggaggagaggatcaacggcgtggagacactggagcatcagaagtggtcaggcgccaagttctacgacagggtgctcaaggctgtgcagtgtggcatctcctcgactgcagccatgggcaaaggagttactgaagagcagttcaaggatccacggcccacaactgggagcagtggcctgcaagttatggccacatccaggatttgatgaagactcagaagaagaagaatgatgtggatgaagctctaa

SEQ ID NO: 66671 - DNA, 338 bp, Zea mays
ttccgcgcctctacatttcttctctctctggtcctccggctccggctccggctgatccatctaagacagggatcgccatgtcggactcggaggagcaccacttcgaatcgaaggccgacgctggggcgtccaagacctacccgcagcaggctggcaccgtccgtaagaacggcttcatcgtcatcaagaagcgtccctgcaatgttgtggaggtttctacctccaagactggtaagcatggccacgccaaatgccactttgtcgccatagacatattcaatgggcaaaagcgtgaagatattgtgccttcatcacacaactgtgacattccgcatgtg

SEQ ID NO: 66672 - DNA, 333 bp, Zea mays
tatccttaagagtacatatcagggtgagcagattgaggttgtggttcacatgcccagccttgtcactggagatgagcctaatcatgaccgtgattgtgaggatgaggacacggcgggagatgacaatgacgaagatgaaggccagaagcctgaacagtcaagcattcctctcacagtcactatatccaagggtgacggtcctgttcttgcattcacctgcactgcctatcctgacgaggtcatcatcgactccatgtctgtgacacaacaatcaggggatgatgaacgtgacatgattgcatatgagggtcgtgattcgatgaccttgatgag

SEQ ID NO: 66673 - DNA, 339 bp, Zea mays
gtgataccgccgccgacgcagcagcaggagacgcgccaaggagagcccgcaatgaggcgactatgagggccaagtggaagaaggtgcgcatgaggaggctgaagaggaagcgccgaaagatgaggcagagatccaagtaggctgatggggattgtggatggtggtgtcggcatagttgtgttacgtttcttcgatgcgtgagttcatggagagatgtcacatcctagttcgtcgtcaccgtttgccatgggtccaatggctcgtcttagaaacctgcacttcagtaggccatctatcgtggtttctagctatatcgagagtattgtgctaagacgaatc

SEQ ID NO: 66674 - DNA, 272 bp, Zea mays
ctccggcatcgacgaggcgaaaccctagcgcccgagtccctctcccacctcccacaacccatggcggcggaaatggcgtacgcgccgccgatgaaggctggcaaggccgggttcgaggctggcatgatggatccacagcacaggatccgcatcacgctctcctccaagagcgtcaagaacctcgagaaagtctgcggggatctggtgaagggcgccacgggtaaggagctcagggacaggcccgtgcggatcctatcaaggggtgcacatca

SEQ ID NO: 66675 - DNA, 181 bp, Zea mays
cgacgctgaggctgctgctggacgagaaggacgaggcgcgcatctccgccttcctcgtcctcctcagggccaagggcgagaccttcgaagagatcgtggggctttcgaaggctatgttgagctgctgcatgctagtcgatggtctggacgacgccgtcgacattgtcgggacaggcggcga

SEQ ID NO: 66676 - DNA, 281 bp, Zea mays
cagccacccggttctccctcgctccagatctcccttcgcagccggccagggaccccttcacagcgcgggagatggctgatcaggaggtcccatgtgcagttgaggcaccaaccccagttcttggagagccaatggactacatgactgcgctgcagctggtgatgaagaagtcaagtgctcatgatggacttgtgaagggtcttcgcgaggctgcaaaggccattgataagcatgctgttcagctttgcgttcttgctgaggactgtgaccagccagattat

SEQ ID NO: 66677 - DNA, 276 bp, Zea mays
ccagacccagcagctattgtggtcgtccctcagccgcgtcgcaccgcatcgcattctacgattcgaagctctctctgctcgcagccatggcgaagaattacccaaccgtgagcgccgagtacagcgaggccgtcgagaaggccaggcgcaagctccgcgccctcatcgccgagaagagctgcgcgcccctcatgctccgcctcgcgtggcactccgcggggacgttcgacgtgtcgtcggggacgtcggtccttcggtactatgaagtgccggcgg

SEQ ID NO: 66678 - DNA, 182 bp, Zea mays
gcagtaccagtgttacaaattgtatcctttggttctgaattaagtaatcgtgcacctacgtttgacatggacctttctgattttatggatggcgacaaaccaatatcatatgataatgtgaaggaatacttttctcgggatccatcccaaaaatgggctgcctatgttgctggaactatttt

SEQ ID NO: 66679 - DNA, 280 bp, Zea mays
ccagattgttggggatgccaaggagaagaataggaagttcactgagactgtggaacttcagattggtctgaagaattatgatccacagaaggacaagcgtttcagtggctctgttaagttgccccatatccctcgtcccaagatgaaggtgtgcatgcttggtgatgcccagcatgttgaggaggccgagaagatgggacttgactacatggatgttgaggctctcaagaaaatgaacaagaacaagaagcttgttaagaggcttgccaagaagtaccat

SEQ ID NO: 66680 - DNA, 182 bp, Zea mays
ctcctcctcgcctcctctccctagcctccacgacgcaagggagagtgacggaaagcgacgcgtcgcgagctgaggagggccaaggggaagaggggaagcaccgcaccaggacccatgttcgccgccgccgcctctgatctccgcgaggttgtcaggattcaatatgtcgaccagcacattcg

SEQ ID NO: 66681 - DNA, 277 bp, Zea mays
aagaaagcgatgatgatatgggcttcagcctcttcgactaggctgcacagtcatcacagtattgtttcgggcagtgaaaccagaggaaaaccagagtcatgtttagattttaaccttgttttatgttggaaagtactgctacttgtctttatatttggtaattcagccgtaggttgctatgctggttgggatttactcgtgaaccagagtttttctatcttatatcctgattgtgttatcccagagtttcgtggctatgtaactattttgttgttac

SEQ ID NO: 66682 - DNA, 191 bp, Zea mays
agccatcaaggaggagttcccaatcctctcttacgccgatttctaccagctcgcgggagttgtggcagtggaggtcaccggtgggcctgagattcccttccacccgtaggaggacaagcctcagcccccacctgagggccgcttcctgatgccactaagggtctgacacctgagcagtttggcacagatgg

SEQ ID NO: 66683 - DNA, 184 bp, Zea mays
ctggaactggtacatatggacctttgccaaggatattcatttcagaacttcttgtggatgagttgactactcacagccaggacattatacataaatacattacaacttctggcaatggaaataatcatgctgctattgcaagtacatctggggagctaacatgggagaagcccatttattcaga

SEQ ID NO: 66684 - DNA, 313 bp, Zea mays
gagtgcatgcagcgtagtaactcggaatcggtcgagtccagcgggactcaccgactggctgctctggctcaagtcgtccgacctgggcttcgacgcctggcgcctcgacttcgccaagggctactcccccgaggtcgccaaggtctacgtcgacgccacggccccgaccttcgccgtcgccgaggtatggaacagcatggcgtacgacggggacaacaagcccgagtacgaccaggacccgcaccggcaggcgctggtggactgggtggacagggtgggcggggcggcttcgcggccaccgtcttcgacttca

SEQ ID NO: 66685 - DNA, 181 bp, Zea mays
caattcctccttcggatctcgcattcagcgcacgcaggtgtgaaggaagggggacgcggaggaagatggagctcgcgttcgggaagctcttcagccggctcttcgccaagaaggagatgcggatgttcatggtcggcctcgacgccgccggtaaaaccaccatcctctacaagctcaagct

SEQ ID NO: 66686 - DNA, 280 bp, Zea mays
agccagaagccacccattggcgtacgcgaggcgatcggagcatcccgtcccaagaggagaaactccggccggcgacgcgggggaaaatggggaagacgccggtgcggatgaaggcggtggtgtacgcgctgtcgcccttccagcagaaggtgatgccggggctgtggaaggacatcaccaccaagatccaccacaaggtcaccgagaactggatctccgccacgctcctcctcacccccgtcgtcggcacctaccaatacgccatgtggtacaaagagca

SEQ ID NO: 66687 - DNA, 201 bp, Zea mays
gccgccgcctcctatccaagaatgcatgagtcttagacgtgtggcagtaataattgcgtggggtgtagtaaaataataagcacgtttgttgagttgtaatggattcacattatgtgcattcgagacaggtccaaggaattgtatctctacagtgaaaatttcctttttcaccacgatgaatgcatgtcatactctctaaag

SEQ ID NO: 66688 - DNA, 278 bp, Zea mays
gacgttatgcatctccaagcagcatcgtctcctcgccagatccatcaattcgttcggaccgcacttctcgtgtcgccgttccagagcgcggcaggctgagcggttccgtcagatttgagtcgtcatgaatcccgagtatgattaccttttcaaacttctgcttatcggtgattctggtgttggagaatcatgcttgcttctcagatttgcagatgattcatatctggacagctacatcagcacaattggagttgactttagaattaggacagtagagc

SEQ ID NO: 66689 - DNA, 272 bp, Zea mays
gtcgtgggatcccagccaccgccgctagaagaagagctcggcgattcccaggtcccgcgagaatatgccgaagcagatccatgagattaaggacttcctcctcaccgcgaggaggaaggatgcccgctcagtgaagatcaagaggagtaaggatgttgtcaagttcaaggtgcgctgctccaagtacttgtacacgctctgcgtcttcgatgctgagaaggcaaacaagttgaagcaatctcttcccccaggtttgaccgtcgaggaggtct

SEQ ID NO: 66690 - DNA, 274 bp, Zea mays
gcagccgagcgactaagcgaagactcccttttccccgagcacaagagaaccatggcggcggcggcagtttacggcggcttcaaagggaagcttggcgtcgaggatgcccccgagctgcagctcaaccgcatccgcatcacactctcatccaagaacgtcaagaacttggagaaagtttgtgcggatttggtaaagggagccaaggacaagcatttgaggggtaagggacctgtccggatccctactaaggttctccacatcaccactcgcaagt

SEQ ID NO: 66691 - DNA, 311 bp, Zea mays
  unsure (1)..(311): unsure at all n locations
gagccatgcaggtacgaagtcggaatcggctcggtgactcgtgagtttgtgacagtggttttctctgtgccgccttttgcaggggaagggggtctgggttgcgtacaggcgaaaggcacgcgccgccgctgccgcgcgagcctctccgtccccatcgccgcgcagatggatccgtcgtcggagcccctgtacgcgcaggtcgagccgtacgactccgggttcctcaaggtctccgatgtccacaccatctactacgagcagtccgggaacccgcaggccatgcggcggtgtntctccacggcggtcccgga

SEQ ID NO: 66692 - DNA, 277 bp, Zea mays
agattactaggtgcttaatttaactagtggccctaggcgtgaaacttcaccagctccgccactgcccatggccaacggcttccggaccctcgctgcgtcgtcctcaccgccgacgctgcccgatccctcgtcgattccgtcgacgccttcctcttcgactgcgatggcgtcatttggaagggagatatgctcattgaaggggtcccagagacgatggagctactgaggaaactgggaaagaaattagtttttgtaccaaataactctagaaagtcaa

SEQ ID NO: 66693 - DNA, 282 bp, Zea mays
tgtgcccagtctgccctcagggcgcttgctcgttccgggatgaaaatcggacgcattgaggacgttaccccggtccccactgacagcactcgcagaaagggcggtaggaggggaaggaggctgtaggcgtctcgtctgcgtggcatttgccggctcttggccggtggccattatgaagctagccctctctgggtggtgttgctgttctgtgtttgtcaagacgagctttaattttgctctatgtggatgaccgtttaccgttactcgaacctatatgatgtt

SEQ ID NO: 66694 - DNA, 270 bp, Zea mays
acgctccttcctccccctatctagctagccttcccgttcctgcatcgcggcggagatgggcgcctccgccgacgcgggcgtccactccttccgcctcgggctcaaccgctatcgccgactcaccaacgacgagtaccgcgccacctacctcggcgtcaggagcaggccgcagacggagaggaggctcggtgacaggtacctggccggcgacaacgaggacctgccggagtccgtcgactggcgggccaaggagcgcgtcgcggaggtcaa

SEQ ID NO: 66695 - DNA, 273 bp, Zea mays
gtggagtctgattggacatgggatcagactatgagagtcatcataaatgacaaaagatatggtgctttgaaaactcttggagagagaaagcaagctttcaatgagtacttgaaccagcgcaaaaagtttgaagccgaagaaaaacgtatcaaacagaggaaagcacgtgatgatttccttgcaatgttggaagaacgcaaggagcttacatcatcaacaagatggagcaaagcaatacttatgtttgaagatgatgaaagattcaaagcagtt

SEQ ID NO: 66696 - DNA, 274 bp, Zea mays
gcgaaggcgagggtgtgagggaaggagcaccagccatggtgcacgtcaacttctaccgcaactatggtaagacgttcaagaaaccaaggcgtccttatgagaaggagcgtcttgatgctgaactgaagctggttggtgagtatgggctgaggtgcaagcgtgagctttggagggtccagtatgcactgagcaggatccgtaatgctgcaaggcacttgctcacccttgacgagaagaacccccgtcgtatctttgagggtgaggcacttcttcg

SEQ ID NO: 66697 - DNA, 278 bp, Zea mays
gaagcagctccaatcccctcgcccccacggaccctcgccgccggggaagcgccgctcgctcaggaggacagccatggcgccggagccggaggatgatattatgaacgagaagaatccccgcccgctcgacgaggacgacatcgcgctcctcaagacctatgggcttggcccgtactctactagcattaagaaggtcgagaaggagatcaaggaaatggccaagaaaatcaatgacctttgtggtataaaggagtctgatacagggttggctccaccta

SEQ ID NO: 66698 - DNA, 280 bp, Zea mays
ccggcaaggaccccaacaagcctaagagggctcccagcgctttcttcgtgttcatggaggaatttcgcaaggagttcaaggagaagaaccctaagaacaagtctgtcgctgcggtggggaaagctgctggcgacaggtggaaatccctgagcgagtcggacaaggctccctatgtagccaaggctaacaagctcaagctcgagtacaacaaggccatcgctgcctacaacaagggcgagagcactgcagctaagaaggctcctgccaaggaggaagagga

SEQ ID NO: 66699 - DNA, 360 bp, Zea mays
ttcgcatccaaactgacaaggataatggaataataacaattactgattctgggattggtatgacgaaacaagagcttattgattctcttgggactattgcaagcagtggaactgccaagttcctgaaggcattgaaggagagtcaagaagcgggcgtggacaacaacttgattggccaatttggtgttggtttctattacgcatatcttgtttcagagaaggttgttgtatcaacaaagaaggcaaaatctgacaaacaatatgtttaggaaggacaagcagattctggttcttatatgattagagaggatgagacccggagcagctcattcctaggggaactgcttactctctatctca

SEQ ID NO: 66700 - DNA, 318 bp, Zea mays
cgagcacaagtgcgtgctggactcctgcaggtatctgcaacaggagggattcgaggtcacctatctccccgtgcgcaaggacgggctcgtcgacctcgcgcactcgaggacgccatccgcccggacaccgggctggtgtctgtcatggctgtcaacaacgagatcggcgtcgtccagccgctcgaggagattgggcgcatctgcaaggagaaaggcgtgccgttccacactgatgctgcgcaggcgctgggcgaagatcccgattgatgtgaacaggatggggattgggctcatgtccttgtccggccacaagattta

SEQ ID NO: 66701 - DNA, 354 bp, Zea mays
  unsure (1)..(354): unsure at all n locations
caaggttcgagttcgtcaccgtctagtacgactgtgcgagggaggaagaggcgaggagaagatgcagatcttcgtgaagaccctgacggggaagaccatcaccctcgaggtggagagcagcgacaccgtcgacaacgtcaaagccanaatccaggacaaggaagggattcccccagatcaacagcgactgatattcgctggcaagcagctggaggatggacgcacgctggctgactacaacatccaaaaggagtcaactcttcatttggtcctcaggcttaggggtggaacatgatcaaggtcaaaactctcactgggagagagatcgagatcgacttgaacccactgactcga

SEQ ID NO: 66702 - DNA, 339 bp, Zea mays
ggatgaacgagcgaggattgaggccctggggggaaaggtcatccaatggaatggctaccgggtctccggtatacttgctatgtcaagatcgattggggaccggtatctgaagccgttcgtgattccaaaaccagaggtcacggtcgttcccagggcgaaagatgacgactgtctcatcctcgcaagcgatgggctgtgggatgtggtgacgaacgaagaggcatggccaaagaactgctgctaggtgctagctggtcgtacgcacgagacttgaccggcccacagttttttttttgggtccgttgggcgtcaagaattgtacattatatatggtagatg

SEQ ID NO: 66703 - DNA, 343 bp, Zea mays
aaagccaacgtgatcagagagggatatatagctagctagctagcatagcatggcgcttgtagccgacgacgacgccgagctcaaggccaaggccaaggccaaggccgaggtctactacggcgacgaggcctgtcagctgtgcgcgcactcctgctgagggaagcaggcctccccaacggcctgctgccgctggaggacctgacggagtgcggctacgtccaggagaccgggtacgtgtggctgaagcagggcaggagggtcgaccacgtcttccggagcctcggacgcctcgtctcctacggcgccgagatcaccgggtacgccgaaaaggccggatcaggaa

SEQ ID NO: 66704 - DNA, 337 bp, Zea mays
gccgggaccgtctgggtgaactgcttcgacgtcttcgatgctgcgattccgtttggcgggtacaagatgagcggcatggggagggagaagggcgttgacagcctgaagaactacctgcaggtgaaggcggtcgtcaccccaatcaagaacgccgcgtggttgtagacgctgcaagtgtggccttgtgcacgagaaccacgtatattcatttcctggtcacatccccgaacaatgtgaagcgttaatcagatagatgacgatgaagaagaacaactataataagatttgccctagcctgggttctcagttatctctaataagcttatggttggtgcca

SEQ ID NO: 66705 - DNA, 183 bp, Zea mays
gatgatgacctgattgccagactgttgaagctcgggtgttgcataaatacggaaatagctgttaagacagtcaaaaccatcaagttcttgggactacatgaagagactcaaatacctaagggttgatcgagcccatttgatgtgatttgccagcgcatggaacagaggatcgcctatggccac

SEQ ID NO: 66706 - DNA, 336 bp, Zea mays
  unsure (1)..(336): unsure at all n locations
ccctcggttcttctccaaatccaagtccaagtctaagtccaagcccaagaaggagaagtcgaagcctgatggtccaaaccaagagaacctcttcccggagctgattgctgagccaactgatgctcgctcgatgtcctttgttggcactcatgagtacttggccccagaaataataaaaggggagggccatggaagtgctgtggattggtggacctttggcatattcttgtacgagctgttgttcggcaagancctttcaaaggttccggcnccgggctacactcttcacgtcgtgggcagccttgaggtccggatcccgatagtgactctctgcga

SEQ ID NO: 66707 - DNA, 348 bp, Zea mays
gcgccatccctcactctcctccgaagccatcgtccacgtcccagcctccccggactctaggggcagaagctgcagcgtcgagatggtgaaggggcgcacggggcagcgcgtgaggctctacgtccggggcaccgtccttggatacaagcggtccaagtcgaaccagtacgagactacgtcgctggtgcagatcgagggggtgaacaccaaggaggacgtcgcgtggtactgcgggaagcggatggcctacatctacaaggccaagaccaagagcagcggcacccactaccgctgcatctggggcaaggtcgcccgcccgcatggcaactccgggtcgtccgcgccaag

SEQ ID NO: 66708 - DNA, 341 bp, Zea mays
gacgaccgccgccgcatcggaccgtgcccgaaccccccttctcctcgctgactcggctcccctcctccgccgtcgccggaggctagcaagtgggggacacagaagcattagctgggtgaaccaactcaaagggggcagggaattgtgtgctagtttgaatggctgctacaaagcttcaggccctttggaaccacccggttggccccaaaaccattcatttctgggcgccaccattcaaatggggcatcagcattgcacacatagccgactttgctaaaccacctgaaaagatatcttaccctcagcaagtggctgttgcatgcactggactcatgggtcag

SEQ ID NO: 66709 - DNA, 348 bp, Zea mays
cggctcgaggttggtatcgatgacgttgataatcttgctcggcaaccaaattcactagtgatcagctgcaatttgaagctgaacttggacagactacttgcgagaatgtgggaggagatgggcctagtgagggtgtatacaaagccacagggccagcagcctgatttcacagacccagttgttctttccaccgacagaggtggctgcacggtggaggacttctgcaatcatatccatagaagtttgctcaaggacgtgaagtatgtgctcgtatggggaaccagcgcaaggcactatccacagcattgcggcctcggctatggccttaagacgaggatgtcgtccaga

SEQ ID NO: 66710 - DNA, 184 bp, Zea mays
cttgactacatggatgttgaggctctcaagaaaatgaacaagaacaagaagcttgttaagaggcttgccaagaagtaccatgctttcttggcatcagaggccatcatcaagcagattccccgtctccttggtcctggtctcaacaaggcaggcaagttcccgaccctggttactcaccaggaat

SEQ ID NO: 66711 - DNA, 339 bp, Zea mays
  unsure (1)..(339): unsure at all n locations
ctcgagcgattcggctcgagatcacactcgtagagagaaggcaaaatatccccanaccctagctcccgatctcgatggtcgaacctcgcgtcttcttcgacatgaccgtcggcggcgcaccggcgggccggatcgtgatggagctgtacgccaacgaggtgcccaagaccgcggagaacttccgcgcgctgtgcacgggcgagaagggcgtgggcaagtccgggaagccgctccactacaagggctccaccttccaccgcgtcatccccgagttcatgtgccagggcggcgacttacaccgcggcaacggcaccggcggcgatccatctacggcgagaa

SEQ ID NO: 66712 - DNA, 303 bp, Zea mays
  unsure (1)..(303): unsure at all n locations
gctcgcccgagatggcgaacgcgagatcgggtgtcgctgtgaacgatgagtgcatgctgaagtttcgcgagctgcagtcgaagaggctgcaccgcttcataactttcaagatggacgacaagttcaaggagatagttgtggaccaggtcggggatcgcgctaccagctacgatgacttcacaaacagcctccctgagaatgactgccgatacgcgatctatgatttcgactttgttactgcagaggatgtccagaagagcangatcttctatatcctatggtccccatctccgccaagtgaag

SEQ ID NO: 66713 - DNA, 344 bp, Zea mays
caggacaccatcacagccctggaaatgggcgcggtagagatcctgatcgtgtgggaaaaccttgatgtcaggcgttatgagctcaagaacagtgccacaggagagacagtcgtgaagtacctgaacccagctcaggaggctgaccagagcaacttcactgacgaggcgacatccggagatctggaggtcattgacaacacgcagctgctggagtggttcgcggagaactaccaccagttcggctgcacgctggagttcgtcacgaacaagtcacaggaagggtctcagtactgccggggattacggcggattggtaggatcttcgctaccagcgacgtcagtgc

SEQ ID NO: 66714 - DNA, 308 bp, Zea mays
agcacaaggtttacggggatggtatccgactccagcagatcgtctccgacttcctatttgtttcggtgaagttctctcctgctggtggctctgttgacatctcttccaagctgactaagaacagcattggggaaaaccttcacctcatagacttcgaacttaggatcaagcaccgaggaacaggagtcccagcagaaatattgtcgcaaatgtatgaggaggacaataaagagcggtcagaggagggcttcagccttgctgtttctagacaccttctgaggctcatgaatggtgacattcgtcacctc

SEQ ID NO: 66715 - DNA, 337 bp, Zea mays
  unsure (1)..(337): unsure at all n locations
gcagttatataggaactcttattgatgatcttgttacaaaagatcttagagagccctatcgcatgctaacaagccgttcagaacaccggctattgcttcgatcagataatgctgatagtcgtttgacncctttgggacgagagattggtttaatagatgatagacgttgggagctttatcagtcaaagcaagcccgcattaagcaagagaaagaacggttgagatctacaaaagttccaggaggtgaatttgctgctgaagttactgcagtatccaaccaacctgtaaaggattcatctacacttgaagccatattaaagagccacatgtacaatat

SEQ ID NO: 66716 - DNA, 343 bp, Zea mays
gataagcaccgccatggcgatagctagccaatctcttgctgagaatcaacataaatacttcattttgttaatagtcacggatggcgtggtaactgattttcaagagactattgatgcgatcataaaggcatcagattttcctatatccataattgttgttggagttggaggggctgatttcaaggaaatggagtttctagatccaaacaaaggagagaaactggatagctcaaccgggagagttgcatcaagggatatgatacagtgtgccccgatgaaggatatgcacggcactgggatatccacacttcaatcacttcttgctgagtaccaggcaattcat

SEQ ID NO: 66717 - DNA, 335 bp, Zea mays
  unsure (1)..(335): unsure at all n locations
catagtcgtttctgattctcttgccatctcattgtatttggaagataagtatcctgagcatccactcctgcctaaagatctcaagaggaaagctcttaatcttcagattgcaaacattgtttgttcaagcattcaacctcttcaaggctatgctgttattggtctgcacgagggtaggatgagcccagatgagggccttcatattgttcanagttatattgacaagggattcagagcaatgcaatttcgggggaaattaagctacttgttgaagattgagcactataatgcaccttcaatcccanacaagcanaaatgtcattatgtcgggttca

SEQ ID NO: 66718 - DNA, 330 bp, Zea mays
ccttgctgggcgtgacctgactgacagcctgatgaagatcctcactgagagaggttactccttcaccacctctgctgaacgcgaaattgtaagagacatcaaggaaaagcttgcatatgtggctcttgaatacgaccaggagctcgagaatgccaagagcagctcatctgtggagaagagctacgagctgcctgatggtcaggtgatcaccattggggcagagaggttcagatgccctgaggtcctcttccagccttccttcattggtatggaagctcctggcatccatgagaccacctacaactccatcatgaagtcgatgtcgacatc

SEQ ID NO: 66719 - DNA, 356 bp, Zea mays
cgtctatcaaccagccaccgtgcagcggcaagggtgtccaggtcccgtaaaatctggcttttctccctccccataccccgcacacacactcgctttcttcggttcttcctcctcgagcagccacttccgtctctaaccctacagcgacgacgagagcgaggctatgaaggggaagaagccggtcaaggagctcaagctcaccgtgccggcgcaggagaccccggtagacaagttcctgacggcaagtggcacgttcaaggatggtgagctgaggctcaatcagagcggcttgcggcttatctctgaggaaaacggggatgaagatgaatctacaaagctgaaggtcgaagatgtgc

SEQ ID NO: 66720 - DNA, 332 bp, Zea mays
gtgaggtgaactagagtatgaggagggagagctttcagagcaaggcgaacatctccgcctaagaacaagatgacagtggaattccctggaataaacgcccgcatcccagaaaatggtgatcagtggctgtggggtagcaccccgccccagtcctcaggccgccaccactcattggattcgagggatttccatgatagagggcctcctggcgctgatcattattcaccgagataccactcccacgattttggacctttgcgcccaagcatagggagatcacactcagacagggggtggagaacccacctcgtgatgataatcgcctgcagatg

SEQ ID NO: 66721 - DNA, 348 bp, Zea mays
tgattatggctcccacagttgagctgaggcagcaggcgctggatcgccttctgccttaccagaggtctgacttcgaaggcatcttccgtgctatggatggactttcagtgactattcgacttctggaccctccactccacgagttccttccagaagggaacgtcgaggaaatcgtgcgtgaactgtgttctgagacgggagccaaccaggaggatgccctcgcacggatcgaaaagctttcggaagtaaacccgatgcttggcttccgtggctgcaggcttggtatatcgtaccctgagctaacagaaatgcaaggccgtgccatctttgaagctgctataacgatga

SEQ ID NO: 66722 - DNA, 277 bp, Zea mays
cagcgcaagccgtccctgacagcggcggcgacatggtgctcgaggcgacgatgatctgcatagacagctcggagtggatgcgggacggcgactacgcctcgtcgtcggtgcgaggcgcatgtcgatgccgtcaacctcagatgcggtgccaagacgcagtcgaacccggagtacacagtacgcgtgatgacgatggccgagaatggcgtccgcgtgcttgtcactcgcaccagcgatcgtcggaagattctcgcctgtatgcacgggttggaagtgg

SEQ ID NO: 66723 - DNA, 344 bp, Zea mays
cctgtgctctgttctcaaagacatggattgaagtttctggttcatcagcaaaggatgttgctaagcagctcaaggaacaacaaatggtgatgccaggccatcgtgagtcgaacttgcagaaggaacttaaccgatacatccccactgctgctgcatttggtggtgtatgcattggcgcattgaccgtcctggctgatttcatgggtgcgattggttcaggaactggtatattgctcgctgtgacaatcatataccaatacttcgaaacctttgagaaggaaagggcgactgagcttggtttctttgggttttgattagtagctgtggaaccttaacttggctat

SEQ ID NO: 66724 - DNA, 342 bp, Zea mays
gaagaagacactttgtatgagtacctgcttaaccctaaaaagtacattcctggaaccaagatggtcttccctgggctgaagaagccgcaggagcgtgctgatctcatcgcgtacctgaaggaagcaactgcatagttcattgacatgccttttgccatgaagagaaaaattgttttgcagtttaataaaaaacattttagacaacttgggtcaccctgtttgaacagggtgcaaccacgtctcattattttcgttcttatggtgtccgtatggaatgcctaggtgtgtagctgtgcgacaataacagttaaactttgacggctcctatgtcaactgctggag

SEQ ID NO: 66725 - DNA, 333 bp, Zea mays
ctggagcacggcgagcttcaccttcttgtgcttgtgcttgatcttcttgggcttggtgtacgtcttcttcttgcgcttcttggcgcctcccctgaggcggagcaccaggtgcagcgtcgactccttctggatgttgtagtcggcgagggtgcggccatcctcgagctgcttgccggcgaagatgaggcgctgctggtccggcgggatgccctccttgtcctggatcttggccttcacgttgtcgatggtgtccgaggactccacctccagcgtgatggtcttcctcgtcaaggtcttcacgaagatctgcatcttggcaaccgcgcacttctc

SEQ ID NO: 66726 - DNA, 326 bp, Zea mays
  unsure (1)..(326): unsure at all n locations
tgtgaactccctcagccgcgtcgcgtcgcatcctacgatccaaagctctctctgctcgcagccatggcgaagaactacccgaccgtgagcgccgagtacagcgaggctgtggagaaggccaggcgcagctccgagccctcatcgccgagaagagctgcgcccgctcatgctccgcctccgtggcactngcggggacgttcgacgtgtctcgaggaccgggtcattcggcagatgagcatagcggaattgtcacggcgtacgcgggcggaatcgcggtcgctgctcgagccatcaagagattccaatctctcttacgccgattctac

SEQ ID NO: 66727 - DNA, 358 bp, Zea mays
tccaagaagagggaagagcaccaaggaccttcggcgcccgttcaggatccacatcttcccgagcgagttcttggttgacctcttcctcttcggaccacctccaaggctcttggtgtagcttgccactctcaccaatcaagttttcatgtctgatctcgacattcagatcccaactgccttcgatcccttcgctgaggccaatgctggggactctggtgcggcagcagggtcaaaggactacgtacacgtgcgcatccagcagcgtaatggtcgcaagagcctgactaccgtccagggattgaagaaggagttcagctacagcaagatcctcaaaagatctcagatagagttctgctgc

SEQ ID NO: 66728 - DNA, 351 bp, Zea mays
  unsure (1)..(351): unsure at all n locations
gtcgggggtcaggacaagatcagacctctttggaggcattacttccagaacacccagggtcttatttttgttgtggacagcaatgaccgtgaccgtgttgttgaagccagagatgagctccacaggatgctgaacgaggatgagctacgtgatgctgtgctgcttgtttttgccaacaagcaagatcttcccaatgccatgaatgctgctgagattactgacaagcttggattacactcnctgcgccagcgacactggtacatccagagcacttgtgccacaactggcgaggagtctgtatgaggcctggactggctgtccagcaacattgcgagcaaggcttgaggccta

SEQ ID NO: 66729 - DNA, 342 bp, Zea mays
tggaaacaagactggaccgattaacttggggaacccaggtgaattcaccatgctggaacttgctgagaatgtgaaggagttgatcaacccagatgtgacagtgacgatgaccgagaacactcctgatgatccccgccagaggaagccggacatcacaaaggcgaaggaagttctgggatgggagcccaagatcgtcctgcgggacggcttggtgctcatggaggatgatttccgggagcgcctgaccgtgcccaagaaaaccaaggcctaaattgccctgcagttggggaagatatccacacggggaagcatactcatagtcgggctcgtcattattgtggc

SEQ ID NO: 66730 - DNA, 341 bp, Zea mays
  unsure (1)..(341): unsure at all n locations
tgtatatcttgatgttcataagctccctgaaagaccaaaaagtgaagttgagcgtaagagatgttattggggctattcttttgaaaaccttgccactgagaactcattcagcgacgatggaaggggtatcgatgcaaatgtagagttttgttctgtaataaagacaaaattgggtgcccatcggattgtcatgggtgctgagatggactgctgtgatgcaactgatgatggcaggaggttctatgtggagctgaaaacaagcagagagctgganatatcatacagtggaagcatatgataaagaaagctgacttagatttggattcaaatcgttcttgccg

SEQ ID NO: 66731 - DNA, 353 bp, Zea mays
attgagaagagcacaagctcaaagaaggctaagactgatgacgacgatggctcgaagtccgaggtcgatgatgaggatggcggtagtgacgaggataacgacgacgacgagtaaatagtatttccgctgttgtgaggtagcaaatcgattgttaggtccccaattagctcactggtttgctatctttaatgttaagttgtttggaacaggtgtttatgaaggggatctattagtttcgtgaggttgttagtttagtgcattagcaaagaaaaagccgaatgctgctagctattatgttgcttttcttttgctaatcacttgtgtcacaactttctgtacctgtttcattgact

SEQ ID NO: 66732 - DNA, 341 bp, Zea mays
cctcaccactgcctcgtgtggccgtcgtctcccgttcggaacgccaagcccccctccggcgaaatggcccccaagcgaggtggcagggcgccggtgccggccaagaagaagacggataaagtgacgaaccctctgtttgagaagaggccgaagcagttcggcatcggcggcgcgttgccgcccaagaaggacctgcaccggttcgtcaagtggcccaaggtcgtgcgtatccagcgccaggccgcatcctcaagcagcgcctcaaggtaccaccggcgctcaaccagttcacccgcaccctcgacaagaacctcgctacgaacctgtttaagatgcttctc

SEQ ID NO: 66733 - DNA, 353 bp, Zea mays
ggagaggcgcagagcatcgacgatggcgagcggcacatgaagagggagatcagcgagacccacgacaccctccgcttcggcctcaatgccggcgtcaaggccgacctcgcgccgccgcacccgctccagtccagcatccaatcggaggccaagttctgggcggacaagaagaagtttgggacagaggccatctacggatccgccttgaacatccgcaaggatctcgatgcccaaatcctctcaaggttccaaaggccccctggtgctttgccatcatctctgcttggatatgaggcactgacaggttccctagatgattttggttttgaagattatcttaacatgcctcaaga

SEQ ID NO: 66734 - DNA, 349 bp, Zea mays
ccgacatcgtcccttcgtccccacgagcaaccgataatccgccggcgttgagatgttggtttatcaggatctcctatctggcgacgagctcctgtcggattcattcacctacaaggagctcgagaacggcgtcctgtgggaggtcgagggaaagtgggtcacccaaggtcctgttgatgtggacattggtgccaatccatccgccgagggtggtgaggacgaaagcgttgatgacacagctgtgaaggtggttgatattgttgacacattccgtctacaggagcaacctccttttgacaagaaatcattgtgtcttacatcaagaaatacatcaagaatctcactgctg

SEQ ID NO: 66735 - DNA, 348 bp, Zea mays
gcatgacacgtcgagaccattcggatgtatctaatcagctttatgccaactatgctattggaaaggatgttcaggccatgaaggctgtcgttggagaggaggcactctcgtctgaggatctgctttacttagagttccttgacaagtttgagaggaagtttgtgacacaaggagcatatgacacacggaacatcttccagtcactcgatcttgcatggacattgcttcggatcttccctcgcgaacttctccaccgtattccagcaaagaccttggaccagtactatagcagagatgcttcccactgaatcactgatcgttgatcagtgttccaatattttggcaagt

SEQ ID NO: 66736 - DNA, 351 bp, Zea mays
ctggcgaggcaaaagcgcaaacgcgaccacagacagagcgcgcctcaaggccttttttttttgagataacaaggaggagaggaggagatggcggtcacgatcacctgggtgaaggcgaggcagatcttcgacagccgcggcaaccccaccgtcgaggtggacgtgggcctcagcgacggcagctacgcgaggggggccgtacccagcggcgcatccactggaatatatgaggccttggagttgagggatggaggatctgattatcttggcaagggtgttcttaaggctgtcagcaacgtaaacaacattattggaccagcgattgttggacaggacccactgagcaggttg

SEQ ID NO: 66737 - DNA, 334 bp, Zea mays
aaagctgaccccaaggatgagtttctttcaacactgcgggcgatcatccggtgcttaaccggccctgacagatacttcgagaaagtcattcgactggctcttggaggcatgggcactgatgaggatgacctcaccagggtcgtaactattcgggccgaggtcgacctgaagctgataaaggaggcttatccagaagagaaacagtgtgccgctggagcgtgctgtggccaaagatacaactagagattatgaggatataatgcttgccctccttggggcggagtgaggaggcgtgctcaactcgatctcatctgctcctacttgtttgatgggg

SEQ ID NO: 66738 - DNA, 339 bp, Zea mays
gctctggcaaggagcttgagaaggagccaaagttcctgaagaacggtgatgctggtatggtgaagatgatacccaccaagcccatggtggtggagacattctcagcgtatcctccccttggtaggtttgctgtccgtgacatgaggcagacggttgctgttggagttatcaagagtgtggagaagaaggacccaaccggcgccaaggtgaccaaggctgctgccaagaagaaatgatgcgatcctgcgcctgctttagcaatacctagttttcatcattacaagttttgtttgtggtcgttgctgttattgtgtgaactgttgagctctgttagcctgt

SEQ ID NO: 66739 - DNA, 352 bp, Zea mays
cagcaatgtacaggaagcagcacaagaaggatatccatgctgaggctgtcaagaagaggcgccgcgccaccaagaagccatactcgaggtccattgtgggtgcttccctagaggtgatccagaagaagagggctgagaagcccgaggtccgctatgctgctagagaagctgctcttcgcgagatcaaggagcgcatcaagaagaccaaggatgagaagaaggcgacaaaggctgaggtgaccaagtcccagaaggcacagacgaagggagcggtccagaagggttccaagggcaccaagttgggtggtggcggtggcaagcgctgaaagaacctaagtgtcgttcccttgac

SEQ ID NO: 66740 - DNA, 333 bp, Zea mays
cgcattgctgtcaagcgctttaaccgctctgcctggcccgacccgcgccagttcctggaagaagctagatcagttggcctgctccgaagcaaaaggttggcaaatttgcttggttgttgctgtgaaggtgatgagagattgcttgttgcagaatacatgcccaatgatacgctagcgaacaccttttccattgggagtcacaatcaatgaaatggaccatgagattaagggttgttctctgtctcgctgaggctttagaatattgcactaacaggggccgtgctctctaccatgatctcaatgcctatagagctctgtttgatgatgactgta

SEQ ID NO: 66741 - DNA, 345 bp, Zea mays
cactttcagagtttgctgttcttgggtttgaattgggttactccatggagaaccctaattcattggtactttgggaagcacaatttggcgattttgccaatggtgcacaagtgatgttcgaccaatttttgagcagcggcgaggcaaaatggttgcggcaaaccggccttgttgttctgttgcctcatggttatgatggccaaggtcctgagcattctagtgcccgcttggagcgcttccttcagatgagtgatgataatccttttgtcatacctgagatggaaccaacacttcgcaagcagatacaagagtgtaactggcaagttgtgaatgtgacaactcctg

SEQ ID NO: 66742 - DNA, 354 bp, Zea mays
gtcacccgccaggaggcggaccaacagccgcaccagcatggcgcacgcgacgagatcatccgccgcaccgtctacgtctccgacatcgatcaccaggttactgaagaaaacctggcagcactatttataaattgtggacaggttgtggactgtcgcatgtgtggagacccaaactcagtccttcggttcgccttcatagagttcactgatgaggagggtgcaagggctgctctgaatctgtcaggaactgtgctcggatattatcctgtcagggttctgccatcgaaaactgccattgcaccagtcaatccaacattcctacccaggtctgatgatgaacggtgaatgtgtgcg

SEQ ID NO: 66743 - DNA, 350 bp, Zea mays
cagcgcaagccttccctgacagcggcggcgacatggtgctcgaggcgacgatgatctgcatagacaactcggagtggatgcggaacggcgactacgcaccgtcgcggttccaggcgcaggccgatgccgtcaacctcatatgcggtgccaagacccagtcgaacccggagaacacagtaggcgtgatgacgatggccgggaagggcgtccgcgtgcttgtcactcccaccagcgacctcgggaagattctcgcctgtatgcacgggttggaagttggtgctgaggcaaacttggctgcggcaatccaggttgctcagcttgcgctaaagcatcgccagaacaagaggcag

SEQ ID NO: 66744 - DNA, 343 bp, Zea mays
tgtcctcctggagggtacctcctgaagcccaacatggtgactccaggctccgactgccagaaggtgacccctgaggtgattgctgagtacaccgtccgtaccctccagaggaccgtacctgctgctgtgcctgctgttgttttcctctctggtggacagagcgaggaggaggccacccgcaacctcaatgccatgaacaagctcagcaccaagaagccgtggtccctgtctttctccttcggccgtgcgctccaggcgagcaccctcaaggcctgggctggcaaggtggagaacttggagaaggctagagctgccttcctcgccaggtgcaaggcaactctga

SEQ ID NO: 66745 - DNA, 338 bp, Zea mays
gggattcctcttctttcccttcttagcagcatcctcccagtctacaaggaggtcattgctgagttgaaggcagctggggcttcatggattcagtttgatgagcccactcttgtcctcgaccttgattctgacaaattggctgcattctctgctgcatacgcagaacttgaatctgtactttctggattgaatgtgcttgttgagacttactttgctgatgttcctgctgagtcctacaagactctaacatccctgagcagtgtgactgcttatggtattgatcttgtccgtggaacccagactcttgggcttgtcacgagtgctggtttccctgctgg

SEQ ID NO: 66746 - DNA, 350 bp, Zea mays
gggctgaggtacgatgacctgtacgacccctacttcgacctggacatcaaggaggcgctcgggaggctgcctagggaggtggtcgacgcccgcatccagcgcctcaagcgcgccatggacctctccatgaagcatcagtacctccccgaggacctccaggcacagcaggtcccattcagaggatatttgagtgacatgttggctctggtgaaaaaggaaaacgctgagcgtgaagcactgggagcccttccactctaccagagaacgcttccctaaatcgctggctaaacatggttgcaagtcttctctttacggcaaatcagaatgcatgcaataaaatgcagtgggtg

SEQ ID NO: 66747 - DNA, 338 bp, Zea mays
ccgtgttccgtgtccgcgtccagtgtgtccgctactccgctccccctcagtcctcagttcctcacctagcggtagcgtgcgcgcgggagacgtagatggcggcttcggaggcggcagcggcggcggcaacaccggtgacgccgacagaggggacggtgatcgcgatccacagcctggaggagtggagcatccagatcgaggaggccaacagcgccaagaagctggtggtgattgacttcactgcaacatggtgtcctccgtgccgcgccatggctccaatttttgctgatatggccaagaagtccccaaatgttgttttcctgaaagttgatgtggat

SEQ ID NO: 66748 - DNA, 333 bp, Zea mays
agactttgcctgtcctgctgaactcgtcagatatgttagcatgtggagaggaccttggccttaatcctgcttgtgttcaccctgttatgcaagaacttgggtgattggattgcgtatccaaagaatgcctagtgaaacaaacttggaatttggtattccttctcagtatagctatatgacggtttgtgctccctcatgtcatgactgctctacattacgtgcttggtgggaagaagatgaagggaagaagaagtcgtttctacaagactgtagttggcaatgatgaggaggcccatctcgttgcacccggaagtagtgcacttcatgttcagc

SEQ ID NO: 66749 - DNA, 341 bp, Zea mays
gcacatagatattcttgtctccaatgctgccgcaaatccttctgtagatagcatacttgaaatgaaagagtctgttctcgataagttgtgggatattaacgtcaaggcttctatccttcttattcaggatgctgctcctcacctacggaaggggtcatctgtgattattatgtcttcaattgctggttacaatccagaacaaggattgacaatgtatggtgtcacaaagactgctctctttggtctcacgaaggctcttgctggtgagatgggacccgatactcgtgttaactgtatagcccctggttttgttcctacacggtttgctagtttcctcacag

SEQ ID NO: 66750 - DNA, 336 bp, Zea mays
cgcgaggagctcggctgcgtgttcctgaccggcgagaggctcaagtcccccggcgaggagtgcaacaaggtgttcgtcggcatcagccagggcaagctcgtggaccccatgctcgagtgcctcaaggagtgggacggcaagccgctgcccatcaacatcaagtaaaagaacgccaaggagaagaggagggaggggaggaaatacgtgaaaaaaaaataaaacctgtacacgtgtctgtccagatcgtgccgtcgatcgctcttcgttgttgatttttggttgtattgatcgatccgtatgtgtgcgtgcgtgtgtggcgttgctctttcttctttt

SEQ ID NO: 66751 - DNA, 341 bp, Zea mays
gccaacgacaccatcaagatcgatctggagaccaacaagattgtggacttcatcaagtttgatgttggcaacgtcgtcatggtgactggcggaaggaacactggccgcgtgggtgttatcaagaacagggagaagcacaagggcagctttgagaccattcacgtggaggactccctgggccaccagttcgccacccgtatgggcaacgtgttcaccatcggcaagggtaataagccgtgggtgagcctgcccaagggcaagggaatcaagctgagcatcatagaagagcaaaggaagcgggatgccgctgcccaggctgctgccaacgcataaatcctctg

SEQ ID NO: 66752 - DNA, 281 bp, Zea mays
gctgtactggaatgtgctgtccttggcttgcctgatgaagcctatggggaggttatatgtgcaataattgtgcctaaggaggatgcaaagaaaaaggctggacaggactcaaagccagcgctaaccttggaagcattaacaagttggtcgaaagataagcttgctccatacaagattccaacaagactatacttgtgggattctcttcctcggaatgccatgggaaaggttaacaagaaggagctgaagaaattgttaggagcttagccatgtgtatagat

SEQ ID NO: 66753 - DNA, 322 bp, Zea mays
gggctggcaaggtggagaacgtggagaaggctagagcggccttcctcgccaggtgcaaggccaactccgaggctaccctcggcacctacaagggtgatgctgccgccgacaccgagagccttcacgtcaaggactacaagtactgagttgcttctctttgcgatcccgttgttttggaactcctgcctgcgagtaggttgctgagtgttgtttgcttgttagagcttttatattcggacatgaaaaaaacatgcttcctatgtggatgatggttatctttatattcgtatattaactactaaaaaaaaaaaaaaaagggcgg

SEQ ID NO: 66754 - DNA, 336 bp, Zea mays
agagaccgtgcgcgtcgtcaaggtgcgggggtcgctgaggcgaggggacggccttgagctgctctccccgacgaggctggttgtcgccggcctgccgaaccggctggtggagagctccgacgactgggagacggcgagtgtcaccgggcagtacgtcgggccggtccaccggatcgggtcgtcggctacggtgaaggacggggacgtgtacgtcaaccatattgtcgggttcgggctcggcaggaagaagacgcacgtccttgcaagggcggtgttctcgccgttggcagtgacgagttgacgggccggcgcctccgcgcgcgctccgtcgtggga

SEQ ID NO: 66755 - DNA, 330 bp, Zea mays
agaagggtggcctgacaaaaaagctgtttgatttttcatataagcgaaatattgcagcaattgaagggagttggtttggatcttgggcaccagagaggatgttatgggatcacattatttataaaccaatacgggcaatgcttggaggacgtctaagatttgttctttgtggtggtgcacctctgtcaagtgacacacaaagatttatgaatatatgtctaggtgtcccagtcggtcaaggctatggattgactgaaacttgtgctggagcagctttcactgaatgggatgatacaagtgtgggtcgtgttggtccaccacttccttgct

SEQ ID NO: 66756 - DNA, 331 bp, Zea mays
gatgaatgatatgaagagcaggttctctgtaaatggaaaacccatttaccatttcatggggacatcaacattcagccagtacactgtggtgcatgatgtcagtgttgcaaagatcaacccacaggcacccttagataaagtctgcctgctcggttgtggtgttcctactggtcttggagcggtgtggaatactgcaaaggttgaatctggctcagttgttgctgtttttggccttggaacagttggacttgcagttgctgagggagcaaaagctgctggtgcttctcgagttattggcattgacatcgacaataaaaagtttgatgttgca

SEQ ID NO: 66757 - DNA, 329 bp, Zea mays
cccaatcgaaggacctagcgagcggcacggcggcggcgatcggagaagatggtgcgcaaggcgaaggttgagttcgacgagcagccgccggataacttcgacccgaagaacccgtatgccgacccggtggcgatgctcgagtaccgggaacacctggtgcgagagaagtggatccagatcgagaccgccaagatcatccgggagcgcctccgctggtgctaccgcatcgagggcatcaaccaccaccagaagtgccgccacctcgtcgaccaatacctagaggctacccgcggcgtgggttggggctaggatgcccgcccgcctgaact

SEQ ID NO: 66758 - DNA, 334 bp, Zea mays
cgcagcccggttctttgcgtgcggttgatctcgtcggaggcccggccgcggttccccaatccgccatcgaattcgatggcggccaacgccgggaataagatccgcaacgccaagctggttcttcttggagatgtgggcgctggcaaatctagcttggttcttcggtttgttaagggacagtttgttgaactccaggaatcaacaattggagcagccttcttttcccagaccttagcggtcaatgatgagactgttaagttcgaaatctgggatactgccgggcaggagaggtatcatagcttggctcccatgtactataggggtgcagctgctg

SEQ ID NO: 66759 - DNA, 317 bp, Zea mays
gctccttatctctgggcctttcaagatcaatggagtaccgatccgccgtgtgaaccagacctatgtcattactacatcaaccaaagttgacatctctggtgttgatgtcgccaagtttgatgacaagtactttgccagggagaagaagcagaaggtgcagaagaccgcgggcgagctttttgagacagaaaaggaggcatccaagtcactgcctgacttcaagaaggctgaccagaaggctgtggattctgctactgatcaaggctatcgaggctgtcctggagctgaaaacctatcttggcgcccggttctctctc

SEQ ID NO: 66760 - DNA, 330 bp, Zea mays
tggaaagcaacctgttggtacaatggcttacatgggcaatgtacaatatctgatgcaatgcaaatgtgctgttaacacagccgaagattggcttaaccctgttgccatacaagaggcgtttgaagcccgggctctcaggatggcagtaaactgtgcccagaacataggccaagcagcaaaccaagaagaaggtttctatgagcggtcccctgatttgctagaggctgcagtagctcacatccagttggtcattgtaaccaagttcattgcgaaggtacagcaggacattcctggacctggagtgaaggaacagctccagaacctttgcaa

SEQ ID NO: 66761 - DNA, 327 bp, Zea mays
gatctatgggcagatatatattccagaaataaattggattcttatggttctttgcgtcgctgtcactattgcatttcgtgatactactcttattggcaatgcctacggtattgcatgcatgactgttatgcttgttactacattcttgatggcattaatagtcatctttgtttggcaaaggaacataatattttccctagttttcctggttttctttggatccattgaagctgtatatctttcgtcatctctcatgaaggttcctcagggaggatgggtgcctcttgtgcttgcattcatattcatgtcagtcatgtacatctggca

SEQ ID NO: 66762 - DNA, 326 bp, Zea mays
  unsure (1)..(326): unsure at all n locations
cggctcgaggcggacgancagccaagcagaaaaatacgagtatcgcacgcgcaaggcgattcggtccccattctccacccaatagggagctagagctacgagagggggaaacggggggacgggaataggcgtcgtcggccatgtcgtcgtcgtggaactcggtgggtctggcgatcctgtaccaggtgctgggctgggtcgccttcgccgcgtggtccttcagcttctacccgcaggtcctcctcaactacaagcgcaagagtgttgtgggcctgaatttcgattttctggtgttgaacttgacaaagcactcgtcctacctcata

SEQ ID NO: 66763 - DNA, 327 bp, Zea mays
  unsure (1)..(327): unsure at all n locations
aagacaaacctgaatgtggagcaagtgtttttctccatcgcacgtgacatcaagcagaggcttgcggagactgattcaaagccagaggacaaggcaatcaaaattaacaagccagaccagggttccgaggcaccagctgcccagcgatctgcttgctgcggctcataagcagatgcacgatggccatagcctttggttatttgacattatttatttctcgcttggctgttataggaaggatttgaagaagccnattatgatataccgatgtggttgtactcgtggttgcttccattctttgaagcaaccacctcttgctgttgacgt

SEQ ID NO: 66764 - DNA, 328 bp, Zea mays
gtccgatgctcctgggagttaaagctgtaattgccaagagctttgagcgtatccacagaagcaacttggtggggatgggaatcattcctctgtgcttcaaagctggtgaggatgctgattcacttggcctcactggacatgagcggtacagcatcgatctccctaccaacctcagtgagatccgtcccggccaggatgtgactgttactaccgacaatgggaaatctttcacttgcatcgttcgctttgacactgaggtggagctggcgtacttcaaccatggaggcatcctcccttatgtcatccgcaacttggcagctgcgcataa

SEQ ID NO: 66765 - DNA, 322 bp, Zea mays
atcacattcccctccttcaaagccctgcgcgatttcgattcttcccctctatctccaggtatacgcatcggagcagcactgacacaaattctccaggaactccaagaattcatctgatatggcacgccaaaggattcagaaggacctcatggatctgcaaaaggagccaccgacatcaggcagtgcagggcctgctggagaggatctattccactggcaggtcacaatcatggggcctgagttacacccctatgcaggcggggttttctttattaatatccattttcctcctgactacccctataagcctccaaaagtgaac

SEQ ID NO: 66766 - DNA, 329 bp, Zea mays
cgcacagccgcacgaaaccctaacgctgccgccgcttcacaggtaagccgccgccatggtgtccggttccggcgtatgcgcgaagctatcgtggtggacgcgcgccaccacatgctgggccgcctgtcgtcgattatcgccaaggaactgctcaatgggcagaaggtggtcgtcgtccgctgcgaggagatctgttcgtcgggtgggctcgtacgccagaagatgaagtacctccgctttctccgcaagcggatgaacaccaagccatcccattgacccatccacttccgcgccccgtccaagatcctgtggcgcaccatccgcgggat

SEQ ID NO: 66767 - DNA, 324 bp, Zea mays
cagcgccgcgcttgcgtttccttctcttcgcttccaagatgtcgaagcgagggcgtggaggttcggctggtaacaagttccggatgtcactgggtctaccagtggcagctactgtgaactgtgccgataacactggagccaagaacctgtacatcatttctgtgaagggaatcaagggtcgccttaacaggcttccttctgcctgtgttggtgacatggttatggcgaccgtgaagaagggaaagcctgaccttagaaagaaggtgatgccagctgttattgtgaggcagcgcaaccatggcgccgaaaggatggtgtctacat

SEQ ID NO: 66768 - DNA, 326 bp, Zea mays
caaccgcttgcgtcagacgcacactgacggagagtgatcactgatttctggtcatggcaaccgtaactgaggaagttgctccggtcgtcaccgtctccgaggagccggcgccggaagcggcgaaggaggtggtggagaagccggaggaggggaagaagcccgacgaggagggtgacgagaggaagaaggccgaccccgccgccgagaaggagaagaaggcgaggaagccgcggagcaggaagcccaagtccgccgggctgcaccacccgccctatttcgagatgatcaaggaggcgatcctgtcgcaggacggcgggaaggtcggg

SEQ ID NO: 66769 - DNA, 329 bp, Zea mays
tgctactattgtgtgttttgctagttaagtcccaatgtgtcaacgacaatgaggagggtttcttcagtgcccgtggtcatcgacccctttacaatatgatcagaagagtctctcagcctgatgcctgccccaccgcccatcagtggaggtggctatcgggctcgtccagccaaagcagctgccactcaaaagaaagtaggaaagaagagcccctgatgctggaggctgtcttcacgctgtcccagacctttgtgtgttgtgtcctacaggatgtcagttgcaagaggctttgctacaacaggaaaggccaatcagatatagtgttgatg

SEQ ID NO: 66770 - DNA, 321 bp, Zea mays
cctcaagaccttcaaaagaaagctttgaatcaccagattgcaagcattgtagcttctggtattcaacctctccataacctcacagtgttgaggttcattgaccagaaggttggtgcaggggagagtgtgttgtggactcaacaacaaatcgagagaggtttcacagctattgagaacctgatacaactaaaaggatgcgccgggaagtatgcaacaggagatgaagtccaactggcagatgtattccttgcaccccagatctatgcagccattgaacgcactaaaattgacatgtcaaactaccccactcttgctaggctc

SEQ ID NO: 66771 - DNA, 329 bp, Zea mays
ggagcgcacacacacacaaccagatctcccccaaatccacccgtcggcacctccgcttcaagatgcagatctttgtgaaaaccctgactggcaagactatcaccctcgaggtggagtcgtctgactccattgacaacgttaaggccaagatccaggacaaggagggcatccccccagaccagcagcggctcatctttgctggcaaacagcttgaggacgggcgcacgcttgctgactacaacatccagaaggagagcaccctccaccttgtgctccgtctcaggggaggcatgcagatctttgtgaaaaccctgaccggcaagactatc

SEQ ID NO: 66772 - DNA, 324 bp, Zea mays
ggcttctcctccccctccggttcgggttcgggttcgtgaggttctccgaggtcctcgagtccaagatcatcctcgatcgggagacgcggtcgccggagccgctggatttcttcatctggactgtgcaggatgtagggttatggttggaggaaataaatcttggaagctaccgccaggcttttgaagaaaatggtgtcaatggagagtatctagaaagcctgtcggtgttcaccactgagcagattcttcgctttataagacgatgccatatgaaatggggagattttatcaccctctgtaaagagttgagacgcatcaaagttg

SEQ ID NO: 66773 - DNA, 324 bp, Zea mays
gattgataagaccctcaaggatggagtggtggacgtcaaaaggcagggagataggattatcctagtcaaactagttttggggatgtagtcttgaacattataagtgcatatgcccctcaagttggtctcagtgagagcaagaagaggaagttctgggaacttagatggcatggttcgagcggtacccaccaatgagaagcttttcataggaggagatctcaatggtcatgcaggttcaacaaatttaggttatgagctggctcatggaggtttcgggtatggtagcaggaatcaagaaggagaagatattttggattttgttgt

SEQ ID NO: 66774 - DNA, 305 bp, Zea mays
ggagctgagcttctagcaacgtacagtgtatccgccatgagtcctttcggggcggtgatcacgccagaaaccctcaagtacatgtccaagtaccagggacgtgagatcacgcaggtggactgcgcacgggaggcgatgaggctgatccacgcggaagacaagaacctcaaggccgaggactcagcgtgggagctgaagaagaagttcggcaacggcgtgagcaccatggtcctcgtctacaacgccaccggggccagcctgagcctggtggacgacgggaaagactggatgggctccgtctacaa

SEQ ID NO: 66775 - DNA, 322 bp, Zea mays
cggcggtcgactacggcgtcggcgacgacggcacgccctactggatcgtcaagaactcctggggcactcctggggcgagggtgcctacatccggatgcagcgcggcgccggcaacggggcctctgcggcatcgccatggaggcgtccttccccatcaagacctcgcccaaccctgcagacccgccgcgcaagccccgccgcgcgctcatcgccagggacacctcttcttcccagtgacacacacgaccacaactggcacgtaagtacacgttgccaggaatgacatgctatgctactagtgtttgcttgaactattatcgat

SEQ ID NO: 66776 - DNA, 315 bp, Zea mays
acgagagctagaagcgaaggagacaagcagttcttcagctaggcaggagggcacaggaaggaggagatggcgtcaaagaggattcagaaggagctcaaggatctgcagaaggaccctcccacctcgtgcagtgcaggtcctgttggtgaagacatgttccactggcaggcaacaataatgggtccatctgatagcccatattctggtggagttttcctagtcacaatccattttcctcctgattatcctgtcaaaccaccaaaggtggcatttcgtactaaggtgttccatccaaacatcaacagcaacgggagc

SEQ ID NO: 66777 - DNA, 319 bp, Zea mays
ggcgaccctccctccttcgctccttccgcgccgcctcccggccgtcgccgccatggtgaagtactcgcaggagccgggcaaccctaccaagtcggctaaggccatgggcagggatctgagggtccacttcaagaacacaagggagacagcctttgcgcttcgcaagttgtctttgaccaaggctaagcgataccttgaggatgttattgctcacaagcaggcaattcccttccggagatactgtgggggtgttggtcgcaccgcgcaagctaagtcgcgccactccaatgggcagggccgctggcccgttaaatcagcc

SEQ ID NO: 66778 - DNA, 323 bp, Zea mays
cgagattgttgaattcatctctgccctagcaccagccatggcgaagcgcagcttcttctctgtttcctactcgccgcctccgcgccgctaatcgtcgccacggccaagaaatccggggacgtgtcggagctccagatcggcgtcaagtacaagccggaatcatgcagcattcaagctcacaatggtgacaaggttaaagttcactaccgtggaaaacttactgatggaacggtttttgattcaagctatgaacgaggtgacccgattgaatttgaattgggcactggacaagtgatcacaggatgggatcagggtctcctggg

SEQ ID NO: 66779 - DNA, 323 bp, Zea mays
cgtccctcgccttcgccgccgaatccgagactccgatctcgggttcaccgcagcgcacagagcagccccgactcccggcccgatccgcgctctcctctccgtcgcttcagtcatggcaggaatggcacctgagggttctcagttcgatgctaagcactatgattctaagatgcaggagctgctgagcaccggtgagactgaggagttcttcacttcatatgatgaagtttttgagagttttgatgatatgggcctccaagagaatcttctgagaagcatttatgcttatggttttgagaagccatctgcaattcagcagagag

SEQ ID NO: 66780 - DNA, 319 bp, Zea mays
ctcgagccgggaagtcgctcacgcacacgttccgcccgatcgcgcgccaggtctcgtacgccgccgaggtcaccgccttcgtggaggaccggcagatgcggcgcatgaccggggtcaagaccatggagctcctcatctgggtcaccctctccgacatgtacgtcgacagggacgacccctccaagatcaccttcaagacgcccaccgggcttcggcaggacctaccccgtctccgccttcgccaaggaaggcgcccgtgacgacggcacggcggccaagcacaaggatgatgcccccgacccggccgccgtcgataagg

SEQ ID NO: 66781 - DNA, 267 bp, Zea mays
ccgtcggttcacttctccaggaaagggttcgtactcatggcgccgccgcagccaaagtcgggccttttcgttggcatcaacaagggtcatgtcgtcaccaagcgcgagctgcctccccgcccgtgccaccgcacagggaaatcaacgaagagggtgtctatggtcaggggcctgatcagagaggttgctgggtttgctccttatgagaagcgtatcactgagcttctgaaggttggcaaggacaagcgtgccctgaagcttgctaag

SEQ ID NO: 66782 - DNA, 310 bp, Zea mays
ccctaacctaccttagaccccgccgccgccgccgcccaagggagagagagacttgcacatcaaagggcgtccgatggggaagaagaagaagcgcgtcgataaggtcttctgctactactgcgaccgcgagttcgacgacgagaagatcctcgtccagcaccagaaggccaagcaacttcaagtgccacgtatgccacaagaagctctccaccgcctctggcatggccatacacgtcctccaggtccacaagggattcgtgaccaagggtcctaatgcaaagcctgatagggagtcaacggagatagagat

SEQ ID NO: 66783 - DNA, 310 bp, Zea mays
cgacccatccacgccgcgtcgccctccgcctccaaataaagtaaatgcgggtgacaggacgccaccaccaaatccacctgcgcccttaacccatcgccgccccgctcgatcccctccgccttcttcgccgccggcccccggactgcgaactcccaggagcctagaaggacccggcgccatggggttctgggagttttttcttaactggctccgcagcctcttcttcaagcaagagatggagctttcattggtcaggctccagaatgctgggaaaacatcacgtgtgaactccattgctactggaggtttt

SEQ ID NO: 66784 - DNA, 279 bp, Zea mays
ctggcatctcctcgccctcttacgaagtcctcctcgggttagggttccttagggatttgtggaagggcgatagcggcggctgatgtggagtaccggggctgcgtcggcgggcttgcctgggccgccagcaacgagtcgcgggagaatgccttcgcctcctgcggcgagatcctcgactccaaggtcatcgccgaccgggagacggagagggctcgcggctgcggcttcgttaccgtctccgccgagaactccatgctcgacgctatgcgaggacatgaa

SEQ ID NO: 66785 - DNA, 202 bp, Zea mays
catgaagcaaatactagttgttctgtacgaggccaacgcaatcttggtttacagtttgtgtgtacccaaataagcctgatgcctgcatattatgtggcatccttgattcttagggcctgtttgtttacccccatggattatataatctggattatttttggaggagtagtcctgtttgtttacccagattatttgagttgtt

SEQ ID NO: 66786 - DNA, 312 bp, Zea mays
cagcagcacacagccccatcccaatcctagtcgatcttcttcccctcctcaagagcgtgcccaagggtgcccaaggttgtttaggagacttaattactgtaatttgggttggtttgaaggaagaaaagaagctgaaccatggggaagagaaagtcagctgctaagccacctcctaagaagcggatggacaagcttgacactgtcttttcctgcccattctgcaaccacgggagtagtgttgagtgccgaattgacatgaagaatctgattggcgaagatcttgtagaatctgtcaggaaaacttcagcacaa

SEQ ID NO: 66787 - DNA, 318 bp, Zea mays
cagtccaagcaagcgatgagcacccctcgagatctctccctccccgcgccgacatggacgcagttgactcggtagtcgacccgctccgggagttcgccaaggacagcatccgcctcgtcaagcgctgccacaagccggaccgcaaggagttcaccaaggtcgccgcgcagactgcgatcggcttcgtcgtcatgggattcgtcggcttctttgtcaagctcatcttcatccctatcaacaacatcatcgtcggctccggctgatccgttcacctcaggctagtggctgccggagtagccaatggcgtcactaccttgg

SEQ ID NO: 66788 - DNA, 336 bp, Zea mays
tgctattgtctggatcgcggctcttgtttgcctcattattgcttggccaaaaagtgactggctttggcttattgatgtattcaattcaatacaagttggcatgacagcaatcaagtacatccctcaggccatcatgaacttcaggcggaagagcacaattggttggagcgttggcaatatattacttgatctcacaggaggggtgctgaatttttgtcagatgggtgtgcagtctatagatcaacatactttggtgaatttctatggaaacattgggaaaacccttctttcattggagacggttttctttgatgtcctgttcattatccacactac

SEQ ID NO: 66789 - DNA, 302 bp, Zea mays
atggactccaccggcaccggagcagggggtaaggggaagaagggagcggccgggcgcaaggtcggcgggccaaggaagaagtcggtgtcgaggtccgtgaaggccgggctccagttccccgtcggccgcatcgggcgctacttgaagaagggccgctacgcgcagcgtgtcggcaccggcgcccccgtctacctcgccgctgtcctcgaatacctcgccgctgaggttctggagctcgccggtaatgctgccagggacaacaagaagactcgcattattccgcgccacgtgcttctggcgat

SEQ ID NO: 66790 - DNA, 171 bp, Zea mays
tccaggtggagttgtatgcacccaggcagagatcatatggctacagatgcacatcattgaagatattttcgtcaattgccgccaagttttcaaaggctcagttaactatgcttggacagcagtacctacataccctagcggagttattgggttcatgcttggctccaccga

SEQ ID NO: 66791 - DNA, 328 bp, Zea mays
gagatggccaaaaagtggaaaattgttggagttgatttgattagtggtgtcacatgtgatgctccatatgaatggttggacaagactgactcagaatgggagttcaagagggatcagtcaagtgaaacttttcatgtggttgcctatgactttggtatcaaacataatattttgagacgattgacatcatatggatgcaaaataacagttgttccagcaaattggcctgcttcagaggtactcaatttgaggcctaatggtgtccttttaagcaatggtcctggagatccagctgcagttccctatgctgtgaagacgtacaagacat

SEQ ID NO: 66792 - DNA, 340 bp, Zea mays
aattcccaggcaggcaggtcggcgaggagggcaggaagaccgaagaccgagccgtgcgggggctcgggacgggaacgggacaggaccccaaaatctcagatccttcctgcccgcccgcccgtgcccgtcgacgcgtcgttcttgccggccgcgcctcacctccgccctctcctcctccagggggatcggatacgccacaggctgcgcgatggtgctgtgggtcttcggctacggctccctcatctggaaccccggcttcgacttcgacgacaaaatcctcggcttcatcaagggctacaagcgcacctttaatctcgcttgcatgaccacagaggcacac

SEQ ID NO: 66793 - DNA, 306 bp, Zea mays
  unsure (1)..(306): unsure at all n locations
gccgcccatcgtgcaccgcgacgtcaagtccagcaacatcttgctcgactcggagctcaatgccaaggtcgccgacttcgggctcgcccggatgttngtccaggccggcacgaccgacacgatgaccgccgtcgccggatcgttcggctacatggctcccgagtccgtgtacacgaggaaggtgaacgagaaggtcgacgtgtacagcttcggggtcgttctgttggagctgaccaccggcaggttggccaacgacggcggcgagcacggctccctggccgactgggcgtggcggcacctgcagtc

SEQ ID NO: 66794 - DNA, 342 bp, Zea mays
gcagattaagttggacaaagagaagaaaatcctctccattcgggataggggtattggtatgaccaaggaagatcttattaagaaccttggaacgattgctaaatctggcacttcaggtacttcaggtactgccttttcatctttccagctgattactgcactcataatatttgtttatgagtgcaggaacaggagctgctcgagtctcttgtcgaagctgatacggtgagttctctgtgatgattggtctcagtattgtactgggtttcagtgtgtctgctcagagtcttagcccgttgaatccatagtttgtctgtttttcaccggaactgtataggatgt

SEQ ID NO: 66795 - DNA, 348 bp, Zea mays
gttccaactcctgagcactttctcctcgtccccgacaagccaatcgaagccgagatacggccatggactccaccggcaccggagcagggggtaaggggaagaagggagcggccgggcgcaaggtcggcgggccaaggaagaagtcggtgtcgaggtccgtgaaggccgggctccagttccccgtcggccgcatcgggcgctacttgaagaagggccgctacgcgcagcgtgtcggcaccggcgcccccgtctacctcgccgctgtcctcgaatacctcgccgctgaggttctggagctcgccggtaatgctgccagggacaacaagaagatcgcattattccgcgcca

SEQ ID NO: 66796 - DNA, 219 bp, Zea mays
acgagagctagaagcgaaggagaaaagcagttcttcagctaggcaggagggcacaggaaggaggagatggcgtcaaagaggattcagaaggagctcaaggatctgcagaaggaccctcccacctcgtgcagtgcaggtcctgttggtgaagacatgttccactggcaggcaacaataatgggtccatctgatagcccatatcctggtggagtttcctag

SEQ ID NO: 66797 - DNA, 318 bp, Zea mays
cccggtcggaagcaccaccagctaccagggatgtctggcgaggaggaggagaacgccgcggagtcaagatcggcgaagagttcctcaaggccaagtgcctgatgaactgcgaggtggcgatcatcctggagcacaagtacgagcagatccagcagcacgcgtcgtcggagtcggacccgtcgtcgcaggtgtcgcaggtgttcgagaagtcgctgcagtacgtgaagcgcttcagccgctacaagaaccccgacgccgtgcgccaggtccgcgagacgctgagccgctacggcctcgccgagttcgagctctgcacgc

SEQ ID NO: 66798 - DNA, 343 bp, Zea mays
gccgccgccgctgcagactcctccttttcgatcccttcacaaagcgccgccgtcgccccatcgaacatggctccgaagaaggataaggccccgcccccgtcgtcgaagcccgccaagtccggcggtggcaagcagaagaagaagaagtggagcaagggaaagctaaaggagaaggtgaacaacgcggtgctgttcgaccaggctacctacgacaagctgctctctgaggtgcccaagtacaagcagatcaccccctccatcctatccgagcgcctcaggatcaatggctccctggctcggagggctatcaaggacctgatggcgcgtggctcatccggttggt

SEQ ID NO: 66799 - DNA, 330 bp, Zea mays
gcagccgacaactctctaccgtccgagaccccaagcaccagcgcggcggcggcggcggcggcgaccatggctgtcgggaagaacaagaggatctccaagggaaagaagggtggcaagaaaaagaccgtcgaccctttctctaagaaggattggtatgacatcaaggcaccgtcggtgttcagtgtgcgcaacatcgggaagactctcgtatccaggacacagggtaccaggattgcttctgagggtctgaagcacagagtctttgaggtttgcctagctgatcttcagggcgacgaggatcaagcttacaggaaatcaggctccgtgctg

SEQ ID NO: 66800 - DNA, 241 bp, Zea mays
cggctcgaggcaggaggcggacaaggtaagcagcaatcgcaggaaccctagcgccgccgcacccgcaggaatgggtatcgacctcgtcgccggtgggaggaataagaagaccaagcgcactgcgcccaagtctgacgatgtctacctcaagctcctcgtcaagctctaccgtttcttggtcaggaggaccaagagcaatttcaacgctgtcaatctcaagaggcttttcatgagtaaaacc

SEQ ID NO: 66801 - DNA, 321 bp, Zea mays
ctctcccgcgacgccaccaccacacgttcacggtagcgagagttatcgtcgtcggcggcgaagatggtgtcgctgaagctgcagaagcggctcgccgcgagcgtcctcaagtgtgggaaaggcaaagtctggcttgaccccaatgaagtcagcgagatctccatggctaactcccgccagaacatccggaagttggttaaggatgggtttatcatcaggaagcctcagaaggttcactctaggtcgcgtgcaagaagggcacatgaggccaagcagaagggaaggcactctggatatggcagcgcaggggtacaggaggta

SEQ ID NO: 66802 - DNA, 335 bp, Zea mays
ggcaactgactcagctgtcacacaaacaaagttccacatcatgcgattcgggcgcaaggttgaggatcctgacatgttagaaaggatacggctaaccatcatcaacaacctgctccagtatcatcctgaatcaagtgagaagttggcaatgggtgaattttttgggataaaacctcctgtgaagaaggttgatatcgatattgcaacacatatagttgttgaagacgacgggccaaaaagaagcatgctttacatagagacagccgatcggcctggcctacttcttgagataatcaagatcatcgcggacacaaatatgatgtggagtcagctga

SEQ ID NO: 66803 - DNA, 343 bp, Zea mays
cggtcgagtcgagcgattcggctcgacgctgttcctgaaacagttcgacgacgacaaggtccagtggatgcacatcgacatggctcgggccagtgtggagcgacaagaagcgggccgccaccgggttcggcgtttccaccctggtggagtgggttctcaacaactcgtcctcgtcgtgaacaaaacccataccccccctcgtatcacaatgcctttccatgcgtttttttttcctcctcttttgtgctaccattccatagttgcaaactgcagagcgcctcttggcatgccaagtgtgcgtgtggtaccgttgcgatagaataatcagatgggtagtggtgtc

SEQ ID NO: 66804 - DNA, 330 bp, Zea mays
cgtcgctccgccgccgccgaaacagcacatcgctctctcgatctcagccatggcggagtggagcagccccaggacgcggtgaagctcttcaaccgctggaccttcgacgatgtccaggtgaacgatatctcgctgaacgactacctggctgtgactgcggcgaacacgcgacattcttgccgcactccgcggggcgctactccaagaagcggttccgcaaggcgcagtgcgccatcgtcgagcgcctcaccaactcgctcatgatgcacgggcgcaacaacggcaagaaggtcatggccgtccgcatcatgaagcacccctggagatcat

SEQ ID NO: 66805 - DNA, 331 bp, Zea mays
ctcgaattacgattcccaatccagcaaaccctaccagccttttgcaaactcagagagggacccgatggcacccaaggcggagaagaagccggcggcgaagaagcccgcagaggaggagcccgcggccccggcggagaaggcccccgctgggaagaagccgaaggcgaagaagcggctcccggcgggaaaatccgccggcaaggaaggcggtgttgacaagaaggggcggaagaaggccaagaagagcgtggagacgtacaagatctacatcttcaaggtgctgaagcaggtgcacccggacatcggcatctccccaaggccatgtccatca

SEQ ID NO: 66806 - DNA, 334 bp, Zea mays
ggatgatcttagactcccaactgatgagactcttgtggcccagatcaaggaagggtttgaaagtggcaaggatcttgttgtgactgtccagtctgctatgggggaggagcagatctgcgcgctgaaggatgttggccccaagtaacttccctgccttggaatactgtatctcaaaacctaaatcgaaaaaagaagtgtatcaaggattgctacagagacatccatctggcttgagctggcttttgctatgtcaaacacaagtgcagggatcgctgggtgttgcaccgtgtctgcattatctgtggttacattctggacctgtattttctatgct

SEQ ID NO: 66807 - DNA, 334 bp, Zea mays
cggtcgagctcggaggcttccgtccgcaggcttgctatggtgttcttcgttatgttatggagagtggtgccacgggttgtgaggtgattgtgagtggacagctcagggcccaaagagccaagtccatgaagttcaaggatggctacatgatctcatctggtcagccagtgaacgagtacattgactcggctgtgagacacgttcttctcagacagggtgttctcggtatcaaggtgaagatcatgcttgactgggacccgaaggcaaggttcgcccgatcactgctcttccggacctggtgaccatccacatcccgaaggacgagacgagccgc

SEQ ID NO: 66808 - DNA, 334 bp, Zea mays
gaaatatatgaagaagggcctatccgtttggttagatgtgcccttggatgctcttgctaggcgcattgctaaagtgggaaccgcttctcgtcctcttctggaccaaccgtccggtgatccatacacaatggtagctacttattctttcaatattctttcatgctcgtgaaacggaattgtttcttttttctatttggacaaagaactgctcatagatccacttgagccttgaagccctatcctggattccagtcctttacttgtggtagcaaatgctcagacttcttatgctagttctaatatggatcactcactgggttccttattgttatag

SEQ ID NO: 66809 - DNA, 335 bp, Zea mays
tggtcaggcaggctcaggcaaagggggcggccaacaaggacgagcgatggcgaccaaggtcatctgcttccttgtgctcgcatccctgctcctcgccgtcgcctttcccgtgtctgctctgcggcagcaggtgaagaagggcggcggcggcggtggtggcggaggcagtgttagcggaagcggaggcggcaacctgaatccctgggagtgctcgcccaagtgcgggtcgcggtgctccaagacgcagtacaggaaggcctgcctcaccttatgcaacaagtgctgcgccaagtgcctctgcgtgccaccggggttctacgcaacaagggcgcctg

SEQ ID NO: 66810 - DNA, 190 bp, Zea mays
ggcttcctgcaggatggcactcctccttggcttgctgctgctagtagtagcttcgcccgcgatcgctgatgacgactccggtatctactaccagctggctcttatgtggccaggagcatactgcgagcagaccagcgctgggtgctgcaagccgaccaccggcgtctcgccggcgcgcgacttctacata

SEQ ID NO: 66811 - DNA, 293 bp, Zea mays
ccgtcggttcacttctccagagaactcgttcgtactcatggcgccgccgcagccaaagtcgggccttttcgttggcatcaacaagggtcatgtcgtcaccaagcgcgactgcctccccgcccgtgccaccgcaaggggaaatcaacgaagagggtgtctatggtcaggggcctgatcagagacgttgctgggtttgctccttatgagaagcgtatcactgagcttctgaaggttcgcaaggacaagcgtgccctgaagcttgctaagagaaagcttggaactcacaagagggc

SEQ ID NO: 66812 - DNA, 171 bp, Zea mays
  unsure (1)..(171): unsure at all n locations
gaagctcncctctccctccctccctctctctctctctcttcgccgtccgaagctccgcacccaatctaatcgacacctcaccgagatgggccgcaagttcttcgtcggtggcaactggaaatgcaatggaaccacagatcaggtcgagaagattgtcaaaaccctgattaa

SEQ ID NO: 66813 - DNA, 217 bp, Zea mays
gaccacatgaggaagatgaagaacaatgccattgtctgcaacattggccactttgacaatgacattgatatgctcggccttgagacctaccctggcgtcaagcgcatcaccatcaagccctagactgaccgctgggtgttccccgagaccaacactggcatcattgtccttgctgagggtcgcctgatgaaccttgggtgtgctactggccatccta

SEQ ID NO: 66814 - DNA, 340 bp, Zea mays
gttctcggcttctcgcgagtcgcgacagagagaggcggagttgcggagaatatgcagagcagcagcatgaagagggagatcagcgaggcccacgacaccattcgcttcggcatcaacgccggcgtcaaagccgacctcgccccgccgcacccgctccagtctaccatccaatcggagaccaagttctgggcggacaagaagaagttcgggacagatgccatatatggatccgccctcaacatccgcaaggatctcgatgcccaaatcctctccaggttccaaaggccccctggtgctttgccgtcatctctgcttggatacgagcactgacaggttccct

SEQ ID NO: 66815 - DNA, 264 bp, Zea mays
gggactgttcatattttctccctgagagtcagagttgctggagtggattcaagcaatgagcaacgcactcttgaaggtccacggatggatcaccagaactcttccagttctattgatcctcttattcaagcgaacactggatccaacgctagttcatcactgtcttttatgagagggatcctgccgaagtatttcagttcagagtggtcatttgctcagttccatttaccagaagtcactcgttacatagtagcctttggtgcc

SEQ ID NO: 66816 - DNA, 327 bp, Zea mays
cagcgcacgactgaggcaccagttcctgcactcactgctagctgctcacaccatagtagtaacagtccatcaccccaggcaccaccaatggctcccaaggttgcgctcttccttgccctcggcctcctcttcgctgccgccgcccatggctgcgaaccctactgtcctggcccagtcgtcacaacgccgacagtcgtgccgacgccatcgtcgcacagtcacgggcgctgccgatcgacgcgctcaagctcaaggtgtgcgccaacgtgctcggcctcgtcaaggtcggcctgccccaacacgaacaatgtgcccgctgctggaggg

SEQ ID NO: 66817 - DNA, 301 bp, Zea mays
gggttttcgcgccgccgccgccgcttcgtcgtctccgccgcagcgatgccgtcgcacaagaccttccggatcaagaagaagctggcgaagaagatgcgccagaaccgccccatcccctactggatccgcatgcgcacggacaacaccatcaggtacaacgccaagcgcaggcactggcgccgcaccaagctcggcttctgagcgtggggatcggccggctcccgcgtcggaattctagggtctctacctttcctttggttttatcgatgtctcttgtgtttctgtaagctagcaaacagtt

SEQ ID NO: 66818 - DNA, 358 bp, Zea mays
ctcgctccagccgcttcacagcgccgccgctcgcctctccgaccgccgcgagaatgccgttcaagaggttcgtggagatcgggcgcgtggccctggtgaactacggcaaagactatggccgcctcgtcgtcatcgtcgatgtggtcgaccagaacagggcacttgtggacgcccctgatatggtcaggtgccagattaacttcaaacggctctcacttactgacatctcgattgacatcgaacgcgttcccaagaagtcaatccgatcagagctatggaggaagctgatgtgaagacgaagtgggaaaacagctcatggggcaagaagctgattgtccagaagaggagggctgcgctc

SEQ ID NO: 66819 - DNA, 343 bp, Zea mays
atgaaataccaaggacgattggtgaagcaattccaatgaaggcaaccttttttataacatatacaatggttgatggttgggctggggtagctggtgagatattgagattgaagccactagtgatcttccacctgaaaaactttttcttggtcaagactgagaaagacagggaagaggcaatggaccctggaagtattggttttgactcaagcgaacctcaaattcagctgtatttcttacttggtctttctatgcggcagtgacaccatttatgctcccttttgtattggtattctttgggtttgcgtacgttgtataccgccaccagataataaatgtgtat

SEQ ID NO: 66820 - DNA, 354 bp, Zea mays
  unsure (1)..(354): unsure at all n locations
cncgcctccactacaccactcccaggcgccgcacaggtacgtcgccggcggcgatgacgacgcgcttcaagaagaaccgcaagaagcgcggccacgtgtccgccgggcacggacgcatcggcaagcaccggaagcatcccggaggtcgcggtaacgccggtggcatgcaccaccaccgcatcctcttcgacaagtaccatcccggctacttcggtaaggtcggcatgcgctacttccacaagctccgcaacaagttctactgcccgcggtcaacatcgagcgcctctggtcgatggtgcccgccgaaaaggcggcggaagcgtcggcgacaaggcccgcagatcacgtcacgca

SEQ ID NO: 66821 - DNA, 342 bp, Zea mays
cagcaaccactgctccgccgcctccgggaccgcggagcccgtggtggaggaggacgtggagagggaagatctcgccagatccaaggaggtggggacaagatggtgagctactcgtcgtcggtggttaacgtgtacccgctcgccaactacacgttcggcaccaaggagcccaagatggagaaggacacctccgtcgccgaccgcctcgcccgcatgaaggtcaactacatgaaagaaggaatgcgtaaagtgttgaagcaatcctattggtgcaagagcacaaccaccctcacatactgctcctgcaaatcggaaatacattctgcgaacttcctggtggac

SEQ ID NO: 66822 - DNA, 334 bp, Zea mays
tatgaaataccaaggacgattggtgaagcaattccaatgaaggcaaccttttttataacatatacaatggttgatggttgggctggggtagctggtgagatattgagattgaagccactagtgatcttccacctgaaaaactttttcttggtcaagactgagaaagacagggaagaggcaatggaccctggaagtattggttttgactcaagcgaacctcaaattcagctgtatttcttacttggcttgtctatgcggcagtgacaccatttatgctcccttttgtattggtattctttgggtttgcgtacgttgtataccgccaccagataat

SEQ ID NO: 66823 - DNA, 346 bp, Zea mays
cacgggtgtcaagaggctctaccagatgcaggagaccggcgccctcctcttccctgccattaacgtcaacgattccgtcaccaagagcaagtttgacaacctgtatggttgccgccactcactccctgatggtctgatgagggccaccgacgttatgatcgccggtaaggttgccgtggtctgcggatacggtgatgttggcaagggttgtgccgctgcactcaagcaggctggtgcccgtgtcattgtgacgagatcgaccccatctgcgccctccaggctctgatggagggtcttcaggtccttcccttggaggacgttgtctcggaagctgacatcttcgtga

SEQ ID NO: 66824 - DNA, 345 bp, Zea mays
gtcgtgcgctcgctacccctctccctcgaggcctttgccggcgaagagcgcccagtcgcccaccaggatgaagtttgttgctgcctacctgcttgctgtcctcgctgggaactccagcccctctgccgaggacttgacagccattctggagtcagttggctgtgaagttgacaatgaaaagatggaactccttctgtcccaactgagcggtaaggacattaccgagctcattgctgctggcagggagaagttgcttcagtcccatgtggcggtggcggtgtggctgttgcggcactgcccctgctgctggcggcgctcctgcagctgaggcgaagaaagaagaga

SEQ ID NO: 66825 - DNA, 345 bp, Zea mays
tgggttcgttgctgattccattggagcaacaattggtgcaactgctgcatttctgcttggcaggacgattgggaggccttatgttctttcgaaatgcaaagattaccctaagtttcaagcagtagctattgccatccaaagatctggcttcaagatcgtgttgctactaaggcttgtacctttacttccgttcaacatgttgaactacctgttatctgtcactcctgttggtgttggagaatacatgctggcttcttggtttggaatgatgccaatcactcttgctttggtgtacgttggaacaacactgaaagatctatcagatgtgacacatgggtggagtga

SEQ ID NO: 66826 - DNA, 341 bp, Zea mays
ctgcagtgctgcctccccctcgcccagcagcagggagcagccatgccaggggaccacggctccaagggcgacatctccttcgccggacgcttcacggccagcgccatcgcagcatgcttcgcagagatatgtaccatcccgctcgacacggccaaggtcaggctccagctgcagaagaacgtcgtcgccgccgccgcctccggggacgccgcgccagcgcttcccacgtaccgcggcctgctcggaactgccgccaccatcgctagggaggaaggggccgcagcgctctggaagggcatcgtcccgggcctccaccgacagtgcatctacggggggctccg

SEQ ID NO: 66827 - DNA, 335 bp, Zea mays
gatccgaagggcatggctctggtcaggttggcgtttcccgtgttcttcttcctcgcagcggcggagttcgcggcggggacgcggtcgccgtcggctttcgtacaaaacgccatctactccaaccgcatcaccatcttctccaagacttactgcccctactccatgcgtgctaagcacatatttcgagaccttaaggaagatccatatgttgttgaactagatacccgagtggatgggcgtgacatcaaagtgttctcctggacctagttgggcgtcgtactgtgccacaggtgtttgtcaatggacagcatattggtggctcagacgatacagta

SEQ ID NO: 66828 - DNA, 336 bp, Zea mays
cgcctgagaggaagtatagtgtctggataggagggtccatcctagcctcgctgagcactttccaacaggtatgttgtattgtttatattactttcagctgctgcattttatttctatgaactcgtattactttccaacaggtatgttgtattgtttatattactttcagctgctgcattttatttctatgaactcgtattatgatgaaacgaaataacttctgagttctgttatgatgtgccttgatttaccagatgtggatatctaaggaggagtacgatgagtctggcccggcaattgttcacaggaagtgcttctaggcttcgcaagttcctc

SEQ ID NO: 66829 - DNA, 336 bp, Zea mays
gtccatcaccccaggcaccaccaatggctcccaaggttgcgctcttccttgccctcggcctcctcttcgctgccgccgcccatggctgcgaaccctactgtcctggcccagtcgtcccaacgccgacagtcgtgccgacgccatcgtcgcacagtcacgggcgctgcccgatcgacgcgctcaagctcaaggtgtgcgccaacgtgctcggcctcgtcaaggtcggcctgccccaacacgaacatgctgcccgctgctggaggggttggtggacctcgacgccgcactatgcctctgcaccgccatcaaggccaatgtcctcgacatccacctcaa

SEQ ID NO: 66830 - DNA, 335 bp, Zea mays
  unsure (1)..(335): unsure at all n locations
gggtttcaattctgttggtttctatcagatgacaaagctggccataattccctgtactgttatactggagacccttttcttccggaagaaatttagccggaatatcaagctttcccttagtgtgctccttcttggtgttggtgttgcaactgtaactgatctgcaactcaacgttatgggatctgtactgtccctactggcaatcatcacaacctgcatcgctcagatcgtatccttttgattgacattactcactattttctttatgtggcatatctgtcacagtatccagaacgatttgcacacaacaaactttgcatttgccactanagcat

SEQ ID NO: 66831 - DNA, 342 bp, Zea mays
  unsure (1)..(342): unsure at all n locations
tgggtttcaattctgttggtttctatcagatgacaaagctggccataattccctgtactgttatactggagacccttttcttccggaagaaatttagccggaatatcaagctttcccttagtgtgctccttcttggtgttggtgttgcaactgtaactgatctgcaactcaacgttattcgatctgtactgtccctactggcaatcatcacaacctgcatcgctcagatcgtatccttttgattgtcattactcactattttttttatgtggcatatctgtcacagtatccagaacgatttgcacacaacaaactttgcatttgccactanagcatccttta

SEQ ID NO: 66832 - DNA, 332 bp, Zea mays
gtgaggttcaggaaatcatcgacatgtgtgattatgctgtggggctaagtcgccaactaaatggatccattataccatctgaacgaccaaaccatatgatgatggaggtgtggaatccccttggagttgtgggtgttataacggcatttaatttcccttgtgctgtgcttggttggaatgcttgcattgctttggtctgtggaaattgtgtcgtctggaaaggtgctccaacaactccactgatcatattgcaatgacaaaaatagtggctagtgtattggagaagaacaacttgccaggcgcaatttttacatctgtttgtgggggcactg

SEQ ID NO: 66833 - DNA, 335 bp, Zea mays
gaccgatcgagctagatctccaggactcacctccccaaccgtttgcctccgtctcgcgtgacttcattcccagctgccggcggcgacctccacgtggtgccattcgccggcaacacgcacccgcccaccaggatccaggtttgtgctgcgagagcgcctatccattcaccatgattaatttcgtgctcctgatcagccgccagggcaaggtgaggctcaccaagaggtattctccttacacccagaagagaggaccaaggtcattcgcgaactcagtggactcattcttacacgagggcccaaactctgcaattttgttgagtggagaggttaca

SEQ ID NO: 66834 - DNA, 335 bp, Zea mays
atccactgcggcctggacgcgtgcgagagacttgaccaagcagcagcagcagtgatggcgcctctgaagctgtacgggatgccgctgtcccccaacgtggtgcgcgtggccaccgtgctcaacgagaagggcctcgacttcgagatcgtccccgtcgacctcaccaccggcgcccacaagcagcccgacttcctcgccctcaaccctttcggccagatcccggctctcgtcgacggagacgaagtctcttcgagtcccgtgcgatcaaccggtacatcgccagcaagtacgcgtcggagggcacggacctgctcgccgcggcggtggtggacaag

SEQ ID NO: 66835 - DNA, 323 bp, Zea mays
gcgggagctgcaacgagtcgaagatcccaccagatcctgagtcaaaccagccatgacttaaatgagtgcacctggtccctgaatatcttggccatcaacaagccccagaacaagtgtgacgatctggaccggtttgtgatggtggcaaagacggtgcccgatgacgccaagcagctcaccacaaccatcaacaccaacgcagaggccctcttcagacccggccctggcagcttgcatctgaagatgggccggagagcatcatgaactcaacggagtacccacacggtggctcccagggacagctgctgcatcctggtgaccac

SEQ ID NO: 66836 - DNA, 335 bp, Zea mays
tttcaacccggaccaggaggacgcgtcggtgctgtggacggagagcaaggacgtgggcaagggcttccgctgcatccgcatggtcaacaacatccgcctcaacttcgacgccttccacggcgacaaggcccacggcggcgtccatgacggtaccgagatcgtgctctggaagtggtgcgagggcgacaaccagcgctggaagatcctcccttggtgaacgaacgaaagaaactactagctggtacctaataataattctgctggctgcggcgatcccaaaataaaagaggccgggtgcgatgcatctcggacttctcgagtggtgtttgcgtcaa

SEQ ID NO: 66837 - DNA, 333 bp, Zea mays
gctgatcgtcatgctgggaatattctagtgtgcaaggagagagaaggtggcaactacaagctgattccaattgatcatggttactgcttgccagagaagtttgaagattgtacatttgagtggctctactggccccaagcccgtgagccattcaatgatgaaaccattgaatacatcaaatcactcgatgctgaagaagacatcaagcttctcaagatccatgggtgggagctgcctccacggtgtgctcgtgtcctgcgcatcagcacaatgcttttgaagaaaggtgcatctcgtggcttcacgccctatgacatagggcgcatactatgc

SEQ ID NO: 66838 - DNA, 332 bp, Zea mays
cttgtagccaaggcgttctgcgacctggagcccatctactcatacgagggcacgtacgacatcaacagcctggtgaccggcagggaggtcaccgggatcgcgagcttcaggcccgccgcgccagcaaagcccggctgtgacgtgataacctgtgtccccgtgttgcagggaactggaggcgaataaatcatgatcaggtcgtcgtcgacgtcgccatcgaacaaactgagcacgttcctgaacccgcccggtcaacgttggctgctcacatggtgtaccgtagccgagtgcggatgggaacggattcctagatatatgtagtactatacgaa

SEQ ID NO: 66839 - DNA, 334 bp, Zea mays
cggctcgaggctatgtgacctatgcaacattacactgaacaaaaatgctgtctttggtgacagcagtgcattatcacctggcggtgtgcgcattggtacacctgctatgacctcaaggggtttggttgagaaggacttcgtgcagattgccgagtaccttcaccgagctgtgaccatctgcttgagcatccagtgcggagcatggcaagattctcaaggacttcaagaagggcttggtgcaaacaaggacatagagaacctgagggcggaggtcgagaagttcgccacttcatttgacatgcctggcttcagggtgtctgacatgaagtacaca

SEQ ID NO: 66840 - DNA, 340 bp, Zea mays
cgagcgattcggctcggaacaggtggagttttcaagctttaactattcttgccagtggaatatccaatggctactccaaaagttagatttctcacaaaaatttaccatcctaatattgacaagcttggtaggatatgcctcgacattcttaaggacaaatggagtccagctcttcagatacgtacagttctactgagcattcaggcacttctgagcgccccaaacccagatgatcctctctcaacaacattgcgaaacactggaaatccaacgaagctgaagctgttgagacagcgaaggagtggactcgcctgtacacaagtggggcatgacagccaat

SEQ ID NO: 66841 - DNA, 338 bp, Zea mays
  unsure (1)..(338): unsure at all n locations
gaacgttacttgcctgacncgtctggaccacaacagggctcttggccagatttctgagagacttaatgtccaagttagtgatgtgaagaatgttatcatctggggtaaccactcgtcctctcagtaccctgatgttaaccatgccacagtgaagacttccactggggagaagcctgttcgtgagcttgtctctgatgacgagtggcttaatggtgaattcatcacaactgtccaacagcgtggtgctgcaatcattaaagcgagaaagttctccagtgctctctcggctgctagctctgcttgtgaccacattcgtgattgggttcttggaacacctg

SEQ ID NO: 66842 - DNA, 331 bp, Zea mays
aacaaactctgaggggttggtcatccacgatggcacatggacgtacaagatccgcacggtcgacaccatcccatatcagctgaacgtatagctgatcaacagcgatcgtgaccagaagcgtgtccgctcatccatagcatccggcgagaactccgcttcctctagctgcctcggtacacagcgcaatgagtgtggcgatcagagttgctagcaacgaatcctcggtctgcactggtctagctcacacgccatcacgttcgagatggacgagccggcgacgatgcccatactcaaggagctctgcggcctggatattgttgagacgcactgg

SEQ ID NO: 66843 - DNA, 334 bp, Zea mays
tctccttccagtgtccgccgtcgtgcgctcgctacccctctccctcgaggcctttgccggcgaagagcgcccagtcgcccaccaggatgaagtttgttgctgcctatctgcttgctgtcctcgctgggaactccagcccctctgccgaggacttgacatccattctggagtcagttggctgtgaagttgacaatgaaaagatggaactccttctgtcccagctgagcggtaaggacattacgagctcattgccgccggcagggagaagtttgcttcagtcccatgtggcggtggcggtgtggctgtcgcggcactgcccctgctgctggcggcg

SEQ ID NO: 66844 - DNA, 328 bp, Zea mays
caacgccaaggcttgcgacgatttcgacggcaggcaccccttccgtgccaagcctggcgcgatgcccacgttcctcctcatcgaccgcggtgagtgcttatttgcgaagaaggtttggaatgcacaaaatgctggtgcctctgcagtacttgtagttgatgacaaggatgaaccattgataacaatggatttacctcgtgaagatgacgaggcttcaaagtatatacaaaacataaccattcttctgcattaatagatgaaaaatttggtgaccagttgaagaaggctgttaaagatggggaaatggttaatgttaatcttgattgga

SEQ ID NO: 66845 - DNA, 328 bp, Zea mays
attgccttgtcgatggccttgagtataacactaaatattattacaagattggaagcggaaattcagctcgagaattctggtttgaaacgcctccagcaattgatccagatgcatcatacacatttggcatcataggtgatctggggcaaacatttaattctctctcaactcttcaacattatgagaaaactggaggtcaaactgttctatttgttggggatttgtcgtatgctgatagtatgaacataatgatggcattcgttgggattcctggggtcgattcgttgagcacagtactgcataccagccatggatttggaatactgga

SEQ ID NO: 66846 - DNA, 331 bp, Zea mays
agcaaatgtgcagaagttgcagtatcttgcatttgcaagctggcttggaattgtgctttgtttgtcctggaacttcgttgctgtcatagtctgctggatcaaggagggagattcaaagttgtttttccttgcaacaatctatgctttgcttggaattcctctgtcatatttgatatggtacaggccactctaccgtgcaatgaggactaacagtgctttcagttttggatggttttcctgtgttacctgatccacattggtttttgcataattgctgccattgctccaccaattgtatttcatgggaaatcattaactggtattctggctg

SEQ ID NO: 66847 - DNA, 332 bp, Zea mays
gccctggctcaggcctgatgggaagacccaggtgacagtcgagtaccgcaatgagggtggtgccatggtccccatccgtgtccacaccgtcctcatctccacccagcacgacgagacagtgaccaatgatgagatcgctgctgacctgaaggagcatgtcatcaagcctgtcatccctgagcagtaccttgacgagaagaccatcttccaccttaacccatctggccgctttgtcattgtggacctcacggcgatgctggcctcactggccgcaagatcatcattgacacctacggtggctggggagcccatggtggtggcgctttctccgg

SEQ ID NO: 66848 - DNA, 338 bp, Zea mays
  unsure (1)..(338): unsure at all n locations
ccgtcgcatcccatcccactaccacccatctcgtcgtccgccgattcgatccggttcttccaacccaggggctgtgatggcgacgaagaggagcgtgggcaccctcggcgaggcggatctgaaggggaagaaggtgttcgtgcgcgccgacctcaacgtccctctcgacgacgcccagaagatcaccgacgacacccgcatccgcgcctccgtccccaccatcaagttcctcctcgagaaggcgccaaggtcatcctcgccagccacctgggtcgtccanaaggtgtcaccccaaagtacagcttgaagcctcttgttccacgcttgtctgagctctt

SEQ ID NO: 66849 - DNA, 327 bp, Zea mays
gcccggatcaaggtgcacgagctgcgggggaagagcaaggcggatctgcaagcgcagcttaaggagtttaagtcggagctctccctgctacgcgtaccaaggtcaccggcggggctcccaacaagctctccaagatcaaggttgtgcgcacctccatcgcgcgcgtgctgaccgtcatctcgcagaagcagaagtcggcgctgcgtgaggcgtacaagaagaagaagctgctcccgctcgacctcgccccaagaagacccgcgccatccgcaggcgcctcaccaagcaccagctctccttgaagaccgagagggaaagaagcgtgag

SEQ ID NO: 66850 - DNA, 331 bp, Zea mays
gctgagtcttctctaccacagagacaattaactggcgtctatgatttggttgctgtcttgacacacaagggaagaagtgcagactctggccactatgttggctgggttaagcaagatgatggtcagtcaactagtattacagctcatttactataacaactgtttcattttatacaggttagttactgaaattccatattaaccatcaggaaaatggatcgagtttgatgatgacaatccgaacattcgcaaggatgaagacattttgaaactttctggtggaggtgattggcacatggcctatatctgcttgtacaaagcccgcatggca

SEQ ID NO: 66851 - DNA, 337 bp, Zea mays
ttcctcctctccgactccaccgccgtcacgccatctcgccgggggcggaaccccgaccgcgagtatggggaacatcttcgtgaagaagcccaagatcactgacgtcgatagggccatcctcaccctcaagacgcagcgccgcaagctcgcccagtttcaacagcagcttgagaaggtaatcgaagcagaaaaggaagctgcacggcagttggttcaacagaagaagagagacagagctttgatgctctgaagaagaagaaagctcaggaagagctgttgaaacaagttgacacatggcaaatgaatgttgaacaacagctggcagatattgaactag

SEQ ID NO: 66852 - DNA, 330 bp, Zea mays
actttttggaaactgaatttatagttgggcccataccagtagatgatggaaatggaaaagaagtagcaactgaaattgttacaaacatggttacaaacaaaacattctacactgattccagtggacgtgatttcatcaaaaggataagagattatcgatcggagtggaagattgaagtgcaccagcctattgctggaaactattatcctgttaatcttggcatctatgtggaggatggcgcaaagagctgtctgtactggtagacaggtcaattggaggttccagtataaaggatggacaaatagagctaatgctacacaggaggctact

SEQ ID NO: 66853 - DNA, 330 bp, Zea mays
cgcctgataggaagtatagtgtctggatatgagggtctcttctagcctcgctgagcactttccaacaggtatgttgtattgtttatattactttcagctgctgcattttatttctatgaactcgtattactttccaacaggtatgttgtattgtttatattactttcagctgctgcattttatttctatgaactcgtattatgatgaaacgaaataacttctgagttctgttatgatggcccttgatttaccagatgtggatatctaaggaggagtacgatgagtctggcacggcaattgttcacaggaagtgcttctaggcttcgcaag

SEQ ID NO: 66854 - DNA, 330 bp, Zea mays
  unsure (1)..(330): unsure at all n locations
cgcctgagaggaagtatagtgtctggataggaggctccatcctttnctcgctgagctctttccaacaggtatgttgtattgtttatattactttcagctgctgcattttatttctatgaactcgtattactttccaacaggtatgttgtattgtttatattactttcagctgctgcattttatttctatgaactcgtattatgatgaaacgaaataacttctgagttctgttatgatggcccttgatttaccagatgtggatatctaaggaggagtacgatgagtctggcccggcaattgttcacaggaagtgcttctaggcttcgcaag

SEQ ID NO: 66855 - DNA, 329 bp, Zea mays
agaaccctctctgcgccgccgccgccgttgcagtcgcggccacatcgtcgcctatccatccccaccgctcccactgccacgattcacaagaggtgtcgagatgtctcagaacaacccctcccagctcctcccctcagagctgatcgatcggtgcatcgggtccaagatctgggtgatcatgaagggggacaaggagctcgttggcaccctctgcggctttgatgtctacgtcaatatgtgctggaggacgtcaccgagtatgaatacactgctgaagggcgccgcattacaaaacttgaccagatcctcctaaacggcaacaacatagc

SEQ ID NO: 66856 - DNA, 290 bp, Zea mays
ccgttgtcgtgctcacacatccaaaccttagtcgcgttcaggcaccaaggactcgatatgaagtcgagggcacggtccatcgacggcgactccaggctctcggtgaggaagaccaaggctgagaaggacccagacaagcccaagaggcctccgagcgcgttcttcgtcttcatggaggagttcaggcacgactacaatgagaagcaccccaatgtgcagcagtctccctgattggcaaggtggtggtgaccatggaagtccctgttgatgccgagaatgtccctacgtgt

SEQ ID NO: 66857 - DNA, 332 bp, Zea mays
actttttggaaactgaatttatagttgggcccataccagtagatgatggaaatggaaaagaagtagcaactgaaattgttacaaacatggttacaaacaaaacattctacactgattccagtggacgtgatttcatcaaaaggataagagattatcgatcggagtggaagattgaagtgcaccagcctattgctggaaactattatcctgttaatcttggcatctatgtggaggatgcagcaaagagctgtctgtactggtagacaggtcaattggaggttccagtataaaggatggacaaatagagctaatgctacacaggaggctactcc

SEQ ID NO: 66858 - DNA, 315 bp, Zea mays
cggcaatgttgaggccactggtgaggacttctctgttgagccagctgatgagaggaggcctttccgtgctctcttggatgttggccttattaggactacaactgggaaccgtgtctttggtgccctcaagggagctttggatggtggcctggatattcctcacagcgagaagaggtttgctggtttcaagaaggatgacaagcagctggatgctgatatccatcgcaagtacatctatggtggccatgttgctgactacatgaggaacctcgctgaagaggagccagagtagtaccagtctcacttcagtgagta

SEQ ID NO: 66859 - DNA, 352 bp, Zea mays
gggcaatgttgaggcactggtgaggacttctctgttgagccagctgatgagaggaggcctttccgtgctctcttggatgttggccttattaggactacaactgggaaccgtgtctttggtgccctcaagggagctttggatggtggcctggatattcctcacagcgagaagaggtttgctggtttcaagaaggatgacaagcagctggatgctgatatccatcgcaagtacatctatggtggccatgttgctgactacatgaggaacctcgctgaagaggagccagagaagtaccagtctcacttcagtgagtacattaagaagggaattgaggctgatgacatggaactct

SEQ ID NO: 66860 - DNA, 350 bp, Zea mays
ggggagagagagagagagaagagagagagaagagagagagagagagaggagtgggagacccgcgagaggctgccgtgtagggaccgtagactcagcgactgcgaaggagggataaggggatggccgggatcggaccgatcaggcaggactgggagccggtcgttgtgcggaagaaggcacccaccgccgccgccaagaaggatgagaaggccgtcaacgccgcgcgccgcgccgtgtgcggagatcgataccatgaagaagtacaacgctggtacgaacaaggcggcatccagcggtacatctctcaacaccaagcgcctcgacgacgacaccgaaaaactcgcccatga

SEQ ID NO: 66861 - DNA, 325 bp, Zea mays
  unsure (1)..(325): unsure at all n locations
cggaaggctgaaaaggcaatggcttggcgggcagtttttacatcggctgggtttgctccagtgccactcagcaaccttgcagaagcacaagctgactgcctcttgaagcgggtgcaggtccgaggattccatgtggagaagtgtggaatgggtctagcactctactggcagcggggcgagctcgtgtctgtctcggcgtggcggtgctgatcatagcaaccacacccatcaaccgtcgtcgtcgtcgcgcctacactattcgcaggcatgtttaactccggtaatatgcgntttatcttgcaaacattgcanagaaactattgtc

SEQ ID NO: 66862 - DNA, 342 bp, Zea mays
caacctcctctgctctcacccacctcccggtccggcagcagagagcgggggtgcagagagatcgagatccggaggccgcgagtgggagcgccaccaccagcgactgcggcaatggcgggcacggtgacggtcccggggtcgtcgaccccctccacgccgctgctcaaggacgagctcgacatcgtgatcccgacgatccgcaacctcgacttcctggagatgtggcggcccttcttccagccctaccacctcatcatcgtgcaggacggcgacccgaccaagaccatcaaggtgcccgagggcttcgactacgagctctacaaccgcaacgacatcaacgca

SEQ ID NO: 66863 - DNA, 352 bp, Zea mays
ggagaagggccagctcgtgcctgatgagattgtcgttaatatggtgaaggaacgccttcggcaaccagacgctcaagaaaatggttggcttttggacgggtacccaagaagctattcacaggccatggccttggaaactcttgaaatccggcctgatactttcattctgttagatgttccagatgaactccttgttgaaagggtggttggaaggcggcttgatcctgtaacagggaaaatatatcatttgaagtattctccgccagagaatgaagaaatcgcttcaaggcttacacaaagatttgacgatacagaagaaaaggttaagttgagggctggagacttattacca

SEQ ID NO: 66864 - DNA, 161 bp, Zea mays
ctattctagatcgcgagcggccatgtccttttggctgtttgtttggtttatttttgagttcatgcggtctttatttatttccatgtacgctgctaaaaaaaaaaaaaaaaaaaaaaaaaaaaaaaaaaaaaaaaaaaaaaaaaaggggggccccccttata

SEQ ID NO: 66865 - DNA, 273 bp, Zea mays
attagaagtttctttgagcatgctgaagaagctgaggaagaggatgaagatgatgtagtggacagagacagcaatgaccctgatggtgatatcgctcatccacaaaagcatgctaagagccctgaacttgcaagagaatttcttctggatgctgctgcagtgatcttcaaagaacaggtcgagaaggctttcagagaaggtacagcgcggcaaaatgcacatagtgtttttgtgtcccttgctctaaaactgttagaagaacgagttcatgtt

SEQ ID NO: 66866 - DNA, 343 bp, Zea mays
  unsure (1)..(343): unsure at all n locations
cggcctctccgactctgggttcattcgcctgcactgcaacccatctcggaaccctccctcgcctccctcgcgttcagtttgatccaggacgaagggaacggtgagccgccatggtgaaggacagcgcgtactacgacgtcctggagatcagcactgacgcctccatggccgagatcaagaaggcctattacctcaaggccaagctggtgcacccggacaagaatccgagcaatcctgatgctgcgcgcaagtttcaggaactaggcgaactgatcaggtcctaagtgatccactgaaaaaggagtcttacgataagtatgganaggaaggacttccacaagat

SEQ ID NO: 66867 - DNA, 352 bp, Zea mays
  unsure (1)..(352): unsure at all n locations
ctcnctttcagtgatctatcggatgcttgagtcagatgcagcaaaaggtgtcctctactttaggcaatctttgctgctccttaggttgaactgtcccgaggcagcgatgcgcagtttgcaattggcaaggcatcatgcagcaactgagcatgaacgactagtatatgaggggtggctcttatatgacacggggcactatggggaggccctacaaaaagcggaagaatctatttccattcaaagatcatttgaagctttctttctgaaagcctatgttttggctgattcaggagttgatccttcttattctgcgacagttatctcacttcttgaagatgcattgaaatgcctt

SEQ ID NO: 66868 - DNA, 358 bp, Zea mays
  unsure (1)..(358): unsure at all n locations
gagtcgngggaaatgacgccgggccacgctagcctagggaaggcttggaactccaggacggcccgcgaggtggtctcccttggccgagagctgctgggtgggaacgggattttggccgacttccttgtagccaaggcgttctgcgacctggagcccatctactcgtacgagggcacgtacgacatcaacagcctggtgaccggcagggaggtcaccgggatcgcgagcttcaggcccgccgcgccacgaaagcccggctgtgacgtgataacctgtgtccccgtgttgcagggaactggaggcgaataaatcatgatcaggtcgtcgtcgtcgtcgccatcgaacaaactgagcacgt

SEQ ID NO: 66869 - DNA, 363 bp, Zea mays
tgttttctgtagccaagctggcgcaggcccaagggtatcgactcccgcgtcaggcgtaagttcaagggatgcacttgatgccaacattggatatggctccgacaagaagaccaggcactaccttcccaacaagttcaaaaagtttgttgttcacaatgtctccgagctggagctgctgctgatgcacaacaggacttactgcgctgagattgcccacaacgtgtccacccgcaagcgcaaggagattgtcgagcgtgctgcgcaaatggacatcgtggtcaccaacaagcttgccaggctccgcagccaagaggacgagtgaaatgttgggtagttttgattgtgctctgctggtgttgaaga

SEQ ID NO: 66870 - DNA, 336 bp, Zea mays
cgataactcatctgtcatgattgacccagaatgcattgaaacactctgttctcaccttgaagttccccacaccgactttaggattctaatgttagcatggaaaatgggctgtgagaagcaaggttattttaccttggatgaatggagagctggtttgaaagctcttcgagcagacagcatcagtaaactgaagaaagcatttcctgaactggttcaagaggttacaaggccgtcaaatttccaggatttctacatatatgcatttcgttattgcctcacagaggataagaagaagtgtatagaaataccagttgcttgtgagttgctgaatctagt

SEQ ID NO: 66871 - DNA, 344 bp, Zea mays
gtcgtgcgctcgctacccctctccctcgaggcctttgccggcgaagagcgcccagtcgcccaccaggatgaagtttgttgctgcctacctgcttgctgtcctcgctgggaactccagcccctctgccgaggacttgacagccattctggagtcagttggctgtgaagttgacaatgaaaagatggaactccttctgtcccaactgagcggtaaggacattaccgagctcattgctgctggcagggagaagtttgcttcagtcccatgtggcggtggcggtgtggctgttgcggcactgcccctgctgctggcggcgctcctgcagctgaggcgaagaaagaaga

SEQ ID NO: 66872 - DNA, 335 bp, Zea mays
  unsure (1)..(335): unsure at all n locations
ggcgatctcgtacccgacccttgctgctgtgccccacatgttcatcaatgggtacaagaatgtgcttgctgttgctgtcgagacagactactcatacccacatgctgacaagatcaaggagtacctcaaggacccaagcaagtttgctgttgccgccccggttgctgctggggactctggcgctgcagctgctcccaaggaagaagagaaggctgcggagcctgaagaggagtcggacgaggaaatgggcttcagcctcttcgacgactagagctgctgttttcgtcaaactgctgcaagttttggcttnttttatcatctacaagtactgtttc

SEQ ID NO: 66873 - DNA, 345 bp, Zea mays
  unsure (1)..(345): unsure at all n locations
atcctgatgaaccatctcaaaccttgtatgacaccatgatgcgccatcatncaccgatcactagagtggctggtgctggaacagattttgcagcatttgtccagcatataggagtcccgtcactcgacatgtcttatgggctgtttgaagaataccctgtttaccactcgttgtatgatgattatgtttgggtggagaggtttggagaccccttgttccacaggcatgttgcagtggccagcgtttggggtctgattgcactgaaacttgctgacgacgagatcatacccttcaattacgtctcttatgcctccgaactggaggagtgcnacaaagatatcgtag

SEQ ID NO: 66874 - DNA, 348 bp, Zea mays
gcgctcgctacccctctccctcgaggcctttgccggcgaagagcgcccagtcgcccaccaggatgaagtttgttgctgcagacctgcttgctgtcctcgctgggaactccagcccctctgccgaggacttgacagccattctggagtcagttggctgtgaagttgacaatgaaaagatggaactccttctgtcccaactgagcggtaaggacattaccgagctcattgctgctggcagggagaagtttgcttcagtcccatgtggcggtggcggtgtggctgttgcggcactgcccctgctgctggcggcgctcctgcagctgaggcgaagaaagaagagaaggtgga

SEQ ID NO: 66875 - DNA, 331 bp, Zea mays
  unsure (1)..(331): unsure at all n locations
caaaacganagaagaatatggacacagtgaagtggtggaatattattgcaatcctagatttctaatgaagggacctaatacaattcagtgtgttgatggagagtggacaactttaccagtgtgtattgtggaggagagtacctgtggagatatacctgaacttgaacatggctgggcccagctttcttcccctccttattactatggagattcagtggaattcaattgctcagaatcatttacaatgattggacacagatcaattacgtgtattcatggagtatggacccaacttccccagtgtgtggcaatagataaacttaagaagtgc

SEQ ID NO: 66876 - DNA, 337 bp, Zea mays
aagaggaagacgttttccaaagtctgagcttgacacatacttagaggaagaacttgtgagaatagatgatagattctgaattctaaattggtggaggacaaatgcaaacaaatacccggtgctttcagctatggcgcgtgattttttagcaatacctttgagcactgttccttcggagtttgcgttcagcgctggtggtcgtattcttgctgataatcgaagcacaatgacaccagaaacacttgaatgctttgtatgctgtaaggattggttgtatgcatactcaaatattcgagcttagttgatctgacttccatcagacatgttcaacagtacg

SEQ ID NO: 66877 - DNA, 328 bp, Zea mays
ggtcattcccactgccaggagggtcatctatgcctctcagctcacggccaagccaaggctgctggagccagtctacctggtggagatccaggccccagaaaatgcacttggtggtatctacggtgttctgaaccagaagagaggtcatgtctttgaggagatgcagaggccgggtaccccgctctacaacatcaaggctttcctccctgtcatcgagtcctttggtttctccagccaactgagggccgcaacctctggtcaggcgttccccagtgtgtctttgaccattgggacatgagggctcagatctttggaggcggctccaggc

SEQ ID NO: 66878 - DNA, 341 bp, Zea mays
ggagaagggccagctcgtgcctgatgagattgtcgttaatatggtgaaggaacgccttcggcaaccagacgctcaagaaaatggttggcttttggacgggtacccaagaagctattcacaggccatggccttggaaactcttgaaatccggcctgatactttcattctgttagatgttccagatgaactccttgttgaaagggtggttggaaggcggcttgatcctgtaacagggaaaatatatcatttgaagtattctccgccagagaatgaagaaatcgcttcaaggcttacacaaagatttgacgatacagaagaaaaggttaagttgaggctggaga

SEQ ID NO: 66879 - DNA, 335 bp, Zea mays
ctcacatgacccttcgaggtcctggaccagaggggagtgggcgagctggtgaagcttgctacagagaggggccgcaaagctaggcctaacttgaaggtgggcatttgtggagaacacggtggagagccttcctctgtggccttcttcgcgaaggctgggctggattacgtttcttgctcccctttcagggttccgattgctaggctagctgcagctcaggtgcttgtctgaggctgcctcctcattggcaaccggattgcctgctgctggtggatgtggtgatcaacagtattattacagagccatgctatgtgaacattactagtagcagtgct

SEQ ID NO: 66880 - DNA, 331 bp, Zea mays
aaatattgatgagattcctggagcggaaggacttgttgtcagagttgtttcatcagtggataagaagctggaggttaaaccacgttttttagaaatttttcaagaagacaactaccctacagagttcccttacaagtccaaggctgttctcttgttccagaaaatagaaggtgtggaagtatgtctatttggaatgtatgttcaagaatttggtgctgaatgctctttcccgaaccagcgtcgtgtttatttgtcatacttggattctgttaagtacttcagacctgagattaaaacagtatctggagaagccttgcgtacatttgtgtat

SEQ ID NO: 66881 - DNA, 341 bp, Zea mays
gcttatgggtcgctatagtggatttattgccatgtatgctactcttgcaagcagagatgtggactgctgtttgattcctgagtcacccttttatttggaaggggagggtggactatttgagtatatagataggaggttgaaggagaacaatcacatggttattgttgtcgcggagggagcaggacaggatcttattgctcaaagtatacctgctgcagatcagcaagatgcatctggaaataagctgcttcttgatgttggtctctggttgactcacaagattaaggattattgcaagagcaagaagatggagatgactattaaatacatagatccaactt

SEQ ID NO: 66882 - DNA, 342 bp, Zea mays
caaatcgaaagctcggcgttgccctgcctcgagctcgaaggactttgtccctttacgtcgttgtccagctcctcgcatattgtggcctggtgcagattggagatccgcccggacttggatcgagtcctcctgtctttggacattcattggagtgctccattcattgaggcagcatgcctaagataaagacaagccgtgtcaagtatcctgaaggatgggagcttattgaaccaacaatccgtgagttggatgccaaaatgagagaagctgaaaatgatccacatgatgggaagagaaagtgtgaactctctggcctattttccgcatttctcatcaaaggag

SEQ ID NO: 66883 - DNA, 340 bp, Zea mays
ccgccaagcacttcgagtacatgttctacgtcgacttccaggcgtccctcgccgagccccgcgcgcagaacgcgctggccgaggtccaggagtacacgtccttcctccgggtgctcgggagctaccccatggacatgacgcccatgaccgccggctcttcctcgtccgatccctcgtcgtcatgaattgccctcctggatgctggagctccgaggagaagtcgccgagtagagacgttgggtttctgcttatgtcgtcctactcgcccgcccctcgctgcggctggagtaattaattttgagtttactttaatctttcgtggtaatacgtgtaattgttc

SEQ ID NO: 66884 - DNA, 339 bp, Zea mays
  unsure (1)..(339): unsure at all n locations
tgagagaattgccaagtcacctacaaaaggaaacatatcatactaacagtggacctctctgccaaaaccatggaagccagaagaaattgaggggccaatattcaacattctaaaagataataatttccaacccagaattttatacctggccaaactaagcttcaaaatcaaaggagaaataagattcttttcaaacaagtgaatggttaggaaatttatcaacacaaggcctgccttgcaagagctcctgaagaaagcactacgtttggaanagaaagaccattaccagccactacgaaaacacactgaagtacacaggccagaacactatgaagcatc

SEQ ID NO: 66885 - DNA, 341 bp, Zea mays
ccaggttgctcctcatttccactttccactgcgcctccgctgcccatcgccgtccccgaccgcagcgcaggactgaggatgagtgaagaggataaggctgctgcttctgctgagcagcctaagagggcccctaagctcaatgaaaggatcctctcctctctgtccaggaggtccgtagctgctcatccatggcatgatctcgagatcggtcctggtgctcctgctgtattcaatgttgttgttgagatcacaaagggaagcaaagtcatatacgagcttgacaagaaaactggactgattaaggttgatcgagtcctttactcatcagttgtatacctcac

SEQ ID NO: 66886 - DNA, 332 bp, Zea mays
  unsure (1)..(332): unsure at all n locations
ggggagagtcgaggagagaagagagagaggagagagagagatagagacgagtgggatacgcgcgacatgctgccgtgtatggagtgtacactcagtgactactgaatgagngataaggggatggccgggatcggagcgatcaggcaggtctgggagccggtcgttgtgcggaagaaggcacccaccggcgccgccaagaaggatgagaaggccgtcaacgccgcgcgccgcgccggtgcggagatcgataccatgaagatgtacaacgctggtacgaacaaggcggcatccagcggtatatctctcaacaccaagcgtctcgacgacgacac

SEQ ID NO: 66887 - DNA, 340 bp, Zea mays
cgaaatatctgagatcgagtgaagctagcttttcatcgatatggcgcttgtactgcatgctggcagtagtaacaaaaatgcattcaaagcactaattgccgcggattacagcggcatcaaggttgagttggtaaaagactttcaaatgggggtttccaacaaaacaccagagttcctcaagatgaaccctattgggaaggttcctgtcctggagacacctgatggtcctgtctttgagagcaatgcaattgcaagatatgttactcgcttgaaggctaacaacccactttacggatcttcactgattgattatgcccatattgagcagtggatggacttt

SEQ ID NO: 66888 - DNA, 303 bp, Zea mays
ccacgttcacggtagcgagagttatcgtcgtcggcggcgaagatggtgtcgctgaagctgcagaagcggctcgccgcgagcgtcctcaagtgtgggaaaggcaaagtctggcttgaccccaatgaagtcagcgagatctccatggctaactcccgccagaacatccggaagttggttaaggatgggtttatcatcaggaagcctcagaaggttcactctaggtcccgtgcaagaagggcacatgaggccaagcagaagggaaggcactctggatatggcaagctgcaggggtaccagggagct

SEQ ID NO: 66889 - DNA, 341 bp, Zea mays
tggggagagagagagagagaagagagagagaagagagagagagagagaggagtgggagacccgcgagaggctgccgtgtagggaccgtagactcagcgactgcgaaggagggataaggggatggccgggatcggaccgatcaggcaggactgggagccggtcgttgtgcggaagaaggcacccaccgccgccgccaagaaggatgagaaggccgtcaacgccgcgcgccgcgccgtgtgcggagatcgataccatgaagaagtacaacgctggtacgaacaaggcggcatccagcggtacatctctcaacaccaagcgcctcgacgacgacaccgaacact

SEQ ID NO: 66890 - DNA, 333 bp, Zea mays
ctatgtgcaatctcacattcagatcaatgagtaccgagatcgttttattttgcctacagtgacaaagaagtatgggagacctattaccacctgtataaaggttctcgatatgactggtctgaaattgtcagcactacaccaaatgaagattgtgactgcaatatctacagttgatgatttgaattaccctgaaaagactgagacctattatatagtaaacgctccatacatattttctgcatgttggaaggtcgtgaagcctctgttgcaagagagaacaagggagaaagttccatgtgtgcgtggctgcgggagagacgagcttctacagat

SEQ ID NO: 66891 - DNA, 331 bp, Zea mays
gagaaaagtaactgtcgaggttcagaagtacatgtctggaaatggtatcgaaataagagagtatgaaactgttcaatcagatgcaagtttgcttgcatctggcaagctacaaagttctgtacatgtggaaaagtatatggatgaggtggagagttcaaaaatttggattgattctggctcatgttgccttgcactctactcaaaattgattccacatcaagttttgacgcttcaatacacgcattgcccttccaaaggctgttaagaaccccacagaactggatggattgaggaaggcgcatattcgagatggtgccgctgttgtacagta

SEQ ID NO: 66892 - DNA, 319 bp, Zea mays
ctcgctcccagctcgtgttccgcttcttgcagccgtcgccgcgaacgctccagagaacttccgtcaacatggggaagacacgtggtatgggagccgggcgcaactcaagacccaccgcaggaaccagcggtgggctgacaaggcatacaagaagagccatttgggcaatgagtggaagaaacccttcgctgggtcatcccatgccaagggcattgtcctggagaagattggtattgaggccaagcagcccaactccgctatccgtaagtgtgctcgtgttcagcttgttaagaatggcaagaagattgctgccttcgtg

SEQ ID NO: 66893 - DNA, 320 bp, Zea mays
tctcgagccgaatcggctcgagtgcagcgccgccagacactccgtaatctgtaccccaagcaacggcgcggcggcggcggctaccatggcagtcgggaagaacaagaggatctccaagggaaagaagggtggtaagaaaaagaccgtcgatcccttctctaagaaggactggtatgacatcaaggccccatcggtcttcagtgtgcgcaacattgggaagactctcgtgtccaggacacagggtaccaggattgcctctgatggtctgaagcacagagtctttgaggtttgtctagctgatcttcagggtgacgaggatc

SEQ ID NO: 66894 - DNA, 337 bp, Zea mays
cgagagattggagggaggccctgcccaaggcaagagaaaccgcggcgcgcggagagggaggaagggcagacgcagacgcagacgggcgaacaagatgagggagatcatcagcatccacatcggccaggccgggatccaggtcggcaacgcctgctgggagctctactgcctcgagcacggcatcgagcacgatggcaccatgcccagtgattcctcggttggcgtcgcacatgatgccttcaacacgttcttcagcgagactggttccggcaagcatgtgcccagggccatcttcgtcgaccttgagcccactgtcatcgacgaggttcgcactggc

SEQ ID NO: 66895 - DNA, 337 bp, Zea mays
catcccgtcgcatcccatcccactaccacccatctcgtcgtccgccgattcgatccggttcttccaacccaggggctgtgatggcgacgaagaggagcgtgggcaccctcggcgaggcggatctgaaggggaagaaggtgttcgtgcgcgccgacctcaacgtccctctcgacgacgcccagaagatcaccgacgacacccgcatccgcgcctccgtccccaccatcaagttcctcctcgagaagggcgccaaggtcatcctcgccagccacctgggtcgtccaaaaggtgtcaccccaaagtacagcttgaagcctcttgttccacgcttgtctga

SEQ ID NO: 66896 - DNA, 334 bp, Zea mays
tgtgtggatggttggtttgcaaggaagttcaatcaagcatcaacctttggagctgtgttagacatggttacagatagggttagcactgcttgtttgttggcccttctctcccagttttacagacctggtttagtcttcttgatattgcttggattgtatattacgagccactggtttcaaatgtacagttctttcttgtcaggtaagactagccacaaggatgtaaaacacacaggcaattggcttctgaaattatattatgggtacaggccattcatggccttctgctgtgtttcttgtgaggttttatatattttcctgtttctctttgctg

SEQ ID NO: 66897 - DNA, 348 bp, Zea mays
gccgccacagcagaagccgccaatgccgcaacagcaaagcatggacattgtcatggtgccggccgagacgacgccgcacgccgacatcccggtgcacgaggggtccagtggcggcgcggcgtcctcccggtggcccaaggcggaggttcacgcgctgatacagctgcggagcaaccttgacacccggtaccaggaggttgggcccaaggggcccctctgggaggagatctccgccggcatgaggcggatgggttacaaccggaacgcgaagcgtgcaaggaaaagtgggagaacatcacaagtacttcaagaaggtgaaggagagcaacaacagccggatcgtctttc

SEQ ID NO: 66898 - DNA, 190 bp, Zea mays
  unsure (1)..(190): unsure at all n locations
gtgcatctggcatgaaagctactatgtttgcagcacagtcaattcaattgggtatcaatgatattgttgtggctggtggcatgganagcatgtccaatgccccaaagtacattgctgaagctaggaaggggtctcgttttggtcatgacacacttgtggatgccacgcttaggtatgggcttggggatac

SEQ ID NO: 66899 - DNA, 266 bp, Zea mays
ctcacgtccagaacctcatcaagggggtcaccaagggctaccgctacaagatgaggtttgtctacgcccatttccccatcaacgcgtccatcaccaactccaacaccgccatcgagataaggaacttcctcggcgagaagaaggtcagaaaggtggacatgcttgacggcgtgaccatcctccgctccgagaacaacaaggacgagcttattctcgatggcaacgacgtcgagttagtctctcgctccgccgccctcatcaaccag

SEQ ID NO: 66900 - DNA, 188 bp, Zea mays
ctcaactcacgaaaaggagcgtctgaagatgcgtactaaaatagagcaaatggagaaagctaatcttgaacccagcacgtggaccatgcagggagaggttactgcttctaggaggcccaaaaacagtgccctagaagtggaccttgattttgagcacaatgtaagccctgcccctgtaatgagcgagg

SEQ ID NO: 66901 - DNA, 301 bp, Zea mays
aggtgaccatgtcatcattggccagtgcaggcccctgtcaaaaactgtgaggtacaatgtcgttaaagtcattccagctggatccgcagctgctggaaagaaggccttcacagcagcctgagtttatagactatgttccatgagtagcctatggattgaggcctttttaattcaaaagaaatctctcttctaggctggtgcttttcgacacataattggagattgttccaatgtccgtgcaatcatctgaacatgttactacttattgtaccttgtcgtgcaaagttttgctaagatctct

SEQ ID NO: 66902 - DNA, 329 bp, Zea mays
atggaagaaggggagtctcagaggcaagggaggatcttgcagcactggagaaggattatgaggaagtcggagctgaagttgaagatgaggacgaggaagctgagtattgagtcatcgatctggatgcatggttattttcctttggtgtcagtcaaccaggcgtgcttgagttgcatggttgtacctcccatttattccatgtttgctattgcattacacctgttcatggttggcatagtagaagtgtgaagattggttgaactggtatgatggtttcagatcaaataaattatgttttcaaaatgtcaaaaaaaaaaaaaaggggcggc

SEQ ID NO: 66903 - DNA, 177 bp, Zea mays
ccgcctctctcaatctgataccgcagatccgtcgtccggtgagtggaagccgcacgaacccatggcctccggcgagcttgcctgcacctacgccgctctcatcctcagcgacgatggcatcgccatcaccgccgagaagatcgccacgatcgtgaaggcggccaacatcaaggtcga

SEQ ID NO: 66904 - DNA, 356 bp, Zea mays
ctaccgtgtcgtccatggcatcgatgtattcgacacaagttcaacattgtctcccctggagcagacatgagtgattactacccgtatacggaaacccgacaagagactcactgccttccatcctgaaatcgatgagctcatctacagcgacgtcgagaactccgagcacaagttcgtgctgaaggacaagaagaagccgatcatcttctcgatagcgcgactcgaccgcgtgaagagacatgacaggcctggtcgagatgtacggcaagaacgcgcgcctgagggagctggcgaacctcgtgatcgttgccggtgaccacggcaaggagtccaaggacagggaggagcaggcggag

SEQ ID NO: 66905 - DNA, 290 bp, Zea mays
tggggcggcgtgccaccgggggtccgacgagttcaagccattcatcaggcgcctccccgagttcaagttctggtatgccatcacaaaagcttttgttatagcttttgtgatgactttcttctcagtgtttgacgttcctgtcttctggcctatactcctctgctactggattgttctctttgtccttacaatgaagcgccagattgtacatatgatcaaatacaaatatgtgcctttcagtatcgggaagcagaaatatggtgggaagaagagtgccgtgagcccgagtt

SEQ ID NO: 66906 - DNA, 298 bp, Zea mays
cttctgaaaatgttgcccatcgatatggtgtaaccaggcaagagcaagatcaggccgccgctgagtctcataggagagctgctgcagccacggcctctggaaaattcaaggatgagatcgtcccggtcccaacaaagatcgttgatcctaaaactggagaggagaaggaagttgtatatcagttgatgatgggattaggccagggaccacagcatctggattggcgaaactgaaaccagttttaaaaaggatggaatacaactgcaggcaattccagtcaagtgagtgatggtgctgg

SEQ ID NO: 66907 - DNA, 282 bp, Zea mays
gcttatgggtcgctatagtggatttattgccatgtatgctactcttgcaagcagagatgtggactgctgtttgattcctgagtcacccttttatttggaaggggagggtggactatttgagtatatagataggaggttgagggagaactctcacatggatagtgtcgccgcgggagcagcacaagatcttcttgctcaaagtatacctgctgcagatcagccagatgcatctggcaataagctgcttcttgatgttggtctctggttgactcacaagattaa

SEQ ID NO: 66908 - DNA, 332 bp, Zea mays
gacctgctccctcacaccaccgagcccatggcggaccagctcaccgacgaccagatcgccgagttcaaggaggccttcagcctcttcgacaaggacggggatggttgcatcacgaccaaggagctgggcactgtcatgcgctcgctggggcaaaatcctacagaggctgagctccaggacatgatcaacgaggtcgatgctgatggcaacggcaccatcgatttcccagagtttctcaaccttatggctcgcaagatgaaggacaccgactctgaggaagagctcaaggaggccttccgtgtgtttgacaaggaccagaacggcttcatctc

SEQ ID NO: 66909 - DNA, 347 bp, Zea mays
atggcctaatgaccgcactgtggttgttagcacagctcatgggctgaagttcacgcagtcaaagattgactaccatgaccaaaacatcaaagacatggtttgccagtatgctaatccaccgatcagtgtgaaggctgactttggttctgtgatggatgttctccagaaaaatctcaatggtaagatataaagttatatgattaattaaccctccaaactgttttttttttgttttttcgttccaggaattttattcctgagtctttcaacttgtttggtgaacatggtatggtgctaaaatctatacctaataccttgtagtactagttctggaggctcttttggtt

SEQ ID NO: 66910 - DNA, 340 bp, Zea mays
agccagtgccgcacccagaccagatctccgcgacatatcagtcgttcgtccagctaactgcactgcactgcactgcacgcaatggccaccacggcgaccgaggcggccaaggctgcaccggcgcaggagcagcaggccaacggcaacggcaacggcgagcagaagacgcgccactccgaggtcggccacaagagcctgctcaagagcgacgacctgtaccagtacatcctggacacgagcgtgtacccgcgggagccggagcatgaaggagctgcgcgagatcatcgccaagcacccatggaacctgatgaccactccgccgacgagggccagttcctca

SEQ ID NO: 66911 - DNA, 349 bp, Zea mays
  unsure (1)..(349): unsure at all n locations
caagagcacgcagtagtgcagcagcactgaagcactacttcctgcactcactgtgctagctgctcaaaccgtagtagtaacagtccatcaccatcaccatcaccaccaatggctcccaaggttgcgctcttccttgccctaagcctcctgttcgctgccaccgcgcatggctgcgaaccctactgttccggcccagtcgtcccaacaccaccagtcgtgccgactccgtcgtcgcatagccacgggcgctgcccgatcgacgcgctcaagctcaaggtgtgcgccatgtcttgggccctcgtcaagggtcggcctaccgcaatacgagcaatgctgnccattgctggag

SEQ ID NO: 66912 - DNA, 282 bp, Zea mays
ccgccgccgtcgccgcctcctctccccagcacccggagctcgcccgaccgccgctcaccatgatcatccccaagaagaaccgcaatgagatctgcaagtacctcttcaaggagggcgtgctgtatgccaagaaggactacaacctggcgaagacccgcagatcgatgtgcccaacctccaggtgatcaagctcatgcagagctttaagtccaaggagtatgttagggagaccttctcctggcagtactactactggtatctcaccaacgatgtcattgacta

SEQ ID NO: 66913 - DNA, 330 bp, Zea mays
  unsure (1)..(330): unsure at all n locations
cggggctctcttcgtcgtgcggcaactgcgcgaccgccgacgcccgacggcaggtgccccaggtcttcgtcgaccccttcgcaaggcctcggttccatcattcgccggaggccnagcccgtcaacaggacttgatctactactcactagcggtgtagaggcgaagagaagaacttgaccatgagcagcataggcacaggttacgatttgtctgtcacgactttctccccagatggtcgtgtcttccaggtcgagtatgccaccaaggccgtcgacaacagcgggactgttgttgggatcaagtgcaagatggcattgtcctgggtgtcga

SEQ ID NO: 66914 - DNA, 331 bp, Zea mays
ctccgatccccaattcctccttcggatctcgcattcagcgcatcgcaggtgtgaaggaagggggacgcggaggaagatggggctcgcgttcgggaagctcttcagccggctcttcgccaagaaggagatgcggatcctcatggtcggcctcgacgccgccggtaaaacaacatcctctacaagctcaagctccgcgagatcgtcaccaccatccccaccatcggtttcaatgttgaaactgttgagtacaagaacattagcttcactgtctgggatgtcgggggtcaggacaagatcagacctctttggaggcattacttccagaacacca

SEQ ID NO: 66915 - DNA, 329 bp, Zea mays
ggcatggagagatatatgtgacagctgcaaagaagatcatagacaagggctctgctatacactaagaaggagactgagaggcttcaccgcatgctggagaagtcaatcagtccttccaaagctgatgaattcatcgttaagaagaacattctttcgatattctcttcgtgaaggtgatgatccacagccacggcctgccagtgacttgaactgatagcgaaccaccactttacggaaaacagaacaaatcggatgatgaaaagagaaaggtggtagtgaagtccagtagtggcagagctacttcttgcacgtagatctcttttgcattt

SEQ ID NO: 66916 - DNA, 282 bp, Zea mays
cgagctccgatagccgcagcatcaggcgcggcccccctcgcgtgtgaccgagatggcgctcgccgaatcaggggacgttgattacccagcttcaagatcgtcatcgtcggcgatggtggaactggtaaaactacatttgtgaagaggcatctcactggagagtttgagaagaaatatgaaccaaccattggtgtggaagttcatccgtggaattcaccctctatctggggtaagctcaggctctactgctgataccgcacggcaagagaagtttggtggcct

SEQ ID NO: 66917 - DNA, 332 bp, Zea mays
cttgaaaggggagagagagagagagaagagagagagaagagagagagagagagaggagtgggagacgcgcgagaggctgccgtgtagggaccgtagactcagcgactgcgaaggagggataaggggatggccgggatcggaccgttcagcacagactctgagaccctctctgtgcgcaagaaggcaccaccgccgccgccaagaaggatgataaggccgtcaacgccgcgcgccgcgccggtgcggagatcgataccatgaagaagtacaacgctggtacgaacaacgcggcatcgagcggtacatcctcaacacaaagcgctcgacgacga

SEQ ID NO: 66918 - DNA, 328 bp, Zea mays
caaacgcgtcgcatccgctccacaggatcctctgcgccgagtcaaaggtcttctacctcaagatgaagggtgactaccacaggtaccttgctgagttcaagtcaggtgcagagaggaaggatgctgcggagagcaccatgaatgcctacaaagctgttcaggatatggcttgctgatctggcgccaaaccacaccatcaggctcgggcttgctctcaacttctcagtgttctactacgagatcctcaactcccctgaccgtgcttgcaaccttgcaaagcaggcctttgatgaggcaatctccgaactagacagcctgggagaggagt

SEQ ID NO: 66919 - DNA, 365 bp, Zea mays
ttctggatagtacgaagcgaccgaatccgctcgaggagctgatcactcccatcaccgagcccatggcggaccagctcaccgacgaccagatcgccgagttcaaggaggccttcagcctcctcgacaaggacggggatggttgcatcacgaccgaggagctgggcactgtcatgcgctcgctggggcaaaatcctacagaggctgagctccaggacatgatcaacgaggtcgatgctgatggcaacggcaccatcgatttcccagagtttctcaaccttatggctcgcaagatgaaggacaccgactctgaggaagagctcaaggaggccttccgtgtgtttgacaaggaccagaacggttcatct

SEQ ID NO: 66920 - DNA, 327 bp, Zea mays
aatttaacaaattagcagaggagggaaaattagatcctgttgttggaaggcagccacaaattgagcgtgtggtacaaattttaggcagacgaaccaagaacaatccctgcttgattggagagcctggtgttggaaaaactgcaattgctgaaggacttgctcagcgcatttctacaggcgatgtacctgaaacaatagaagggaaaaaggtcataacccttgacatgggacttcttgtttctggcacaaagtaccgtggagaattcgaagaaagattaaagaagctgatggaggaaataaagcaaagtgatgagataatactcttta

SEQ ID NO: 66921 - DNA, 324 bp, Zea mays
  unsure (1)..(324): unsure at all n locations
tgcagatagcgctctccttcatccgctcactgtcgtccctttctccgttcagtnataatgcagacgtgtgcaatgtccttgccatggcaatcgttatcaaagaggatcttcagctctttgaccaccccttttcaaacagaagcgcttttaatggactgtgggcagtaccattcaccttcggtgttgcagtcttctgtttcgaaggattcagcatgacccttgcactagaagcgtcgatggcagaccggagaaagttccgctcggtgctttcccaagcagttgccgccattatagccgtgtatgtctgttttggagtttgtgggt

SEQ ID NO: 66922 - DNA, 324 bp, Zea mays
  unsure (1)..(324): unsure at all n locations
gaagacccaccgcatccgaatggcgcactcgctggtggtccactacggcctccaccgcctcctcgagctttcncgcactcccccggcctctgaggccgacatccgccgcttccactccgacgactacgtcgctttcctcgcgtccgccaacggaaacccgggtgtcctcgacccgcgcgccattaagcgctttaacgtcggtgaggactgccccgtgttcgacggtctcttccccttctgccaggcctccgctgggggaagcatcggcgccgccgtcaagcttaaccgcggggacgccgacatcaccgtcaactgggcgggcgg

SEQ ID NO: 66923 - DNA, 279 bp, Zea mays
ggagggccaagggcgccgtcgccgaggtcaaggaccagggcagctgcgggactgttgggctttctcaacaatagcagctgtggaaggcatcaaccagattgttacaggcgacttgatctccttgtctgaacaagagcttgtcgactgtgacacttcgtacaatcaggggtgcaatggaggtctgatggactatgcatttgagttcatcatcaacatggcggaatcgacaccgagaaggattacccttacaagggcacggacggacggtgtgatgtcaac

SEQ ID NO: 66924 - DNA, 332 bp, Zea mays
ctgatttctacgagaattgccggggattagaacttgctaggaattttcagtttcccactctgagggagccaccacaaacatttcttgctactatggaggactatgtgaaggaggctccacgcatggtcccagttcgagaacccctggaacttcctgagaggctgcttcttacatacaaacctgaagaatcagaggaaattcttgagcctgctcctgttgaagaggaaaaagtaccagttgaagaacctgttcttgtaccacctgttactgaagttgtttcacctcctcccaaggctgaggtgcccgatactggtgacttactgggcttagat

SEQ ID NO: 66925 - DNA, 328 bp, Zea mays
gtctcgccaagtcgccatgatgcagcagcccccgccgcagccgccgcagcagccgcccccgctgcggcggacgaggtcaggacgctctggatcggggacctgcaatactggatggacgagaactacgtcttcgggtgcttttcgaacactggggaggttcaaaatgtgaagctcatccgtgacaagaattcagggcagcttcaaggttatggttttgttgagtttacaagccgtgcagctgcagaacgagttcttcagacatacaatggacaaatgatgccaaatgttgacttgacatttcggctgaattgggccagtgctggtgaaa

SEQ ID NO: 66926 - DNA, 218 bp, Zea mays
ctcagctcccatatccgctcccctacctctccagcatcctcccgtccacgtcgtctcgtctccgctcctcacctcgccagccatgggcaagatcaagatcggaatcaacggtttcggaaggatcggcaggctcttggcaagggtcgccctgcagagcgaggatgtcgagctcgtcgccgtcaacgaccccttcatcaccacggattacatgacgtaca

SEQ ID NO: 66927 - DNA, 325 bp, Zea mays
gctcccatatccgctcccctacctctccagcatcctcccgtctccgtcgtctcgtctccgctcctcacctcgccatacatgggcaagatcaagatcggaatcaacggtttcggaaggatcggcaggctcgtggccagggtcgccctgcagagcgaggatgtcgagctcgtcgccgtcaacgaccccttcatcaccacggattacatgacgtacatgttcaagtacgacaccgtgcacggccaatggaagcacagcgacatcgccctcaaggactccaagacgcttctcttcggcgagaaccggtcaccgtctttggcatcaggaa

SEQ ID NO: 66928 - DNA, 329 bp, Zea mays
caaagacactccacaagaaaagaagcggacccagtctccatctctcagaagagaaactgggaaagaaagcaggaagtctcaatcaccatctcctaagaatgagtcagccagaggccggaaaaaatcccgttctcagtccccaaaaaaggatattgcaagagaaaggaggcaatctcagtctcggtctccaaaaagggatactactagggaaagcagaagatctgaatcactgtccccaagaagagaaacttctagagagaacaaaagatctcagccaagagtgaaagattcttccccaggagaaaaatccaggtcccagagcagagaac

SEQ ID NO: 66929 - DNA, 225 bp, Zea mays
gttctagatcgcgagctggctgccatacataggtattgtgtggtgtgtgtgagagagcgagaaacagtgttcttcagtttgctatctctctctgcatgtttggcgtcagtctttgtgctcatgtacgtacgtgtgtctacctgcatgttggttgatccgattgcatctgctgtaaccatatattaattggtccacgatgatatgatttgatactatatatatact

SEQ ID NO: 66930 - DNA, 286 bp, Zea mays
cggctcgagggccatgcagcagcagcatgaagctgagcttgcagctgccgctgcgcaaccactccctgatgacgatgatgacctgatcgaatagatgttccatggcccttgttgatgcgagggggagagcttttattacaaatccgtggtggttcagttcttgtcaggcctagccgtacgtgatttttctgttatgtaacctgctgttgacgagggtttttggtgatccttgattttggtaatacatcgctattgtcaggcaaaacataatgaaaaaaaaaaatga

SEQ ID NO: 66931 - DNA, 322 bp, Zea mays
tagccggcgcgccgtcaccgtatcctcagatcagcggcgagcagaaaccacaccactctactgacgcccgacgagccatgggtaaggagaagactcacatcaacattgtggtcattggccatgtcgactctggcaagtcgaccaccactggccacctgatctacaagcttggaggtattgacaagcgagtgattgagaggttcgagaaagaggctgccgagatgaacaagcggtcattcaagtatgcgtgggtgcttgacaagctcaaggctgagcgtgagagaggtattacaattgatattgccctgtggaagttcgagac

SEQ ID NO: 66932 - DNA, 328 bp, Zea mays
  unsure (1)..(328): unsure at all n locations
caaggaccttcggcgcccgttcaggatccacatcttcccgagcgagttcttggttgacctcttcccccttcggaccacctccaaggctcttggtgtagcttgccactctcaccaatcaagttttcatgtctgatctcgacattcagatcccaactgccttcgatcccttcgctgaggccaatgctggggactctggtgcggcagcagggtcaaaggactacgttcacgtgcgcatccagcagcgtaatggtcgcaagagcctgactaccgtccagggattgaagaaggagttcagctacagcaagatcctcanagatctcaagaaaga

SEQ ID NO: 66933 - DNA, 327 bp, Zea mays
cgcgcggagtcgcctcgccgtccgctggcgccgcgtgcagggccgcgggcaaggggaaggaggtgctcagcggggtcgtgttccagcccttcgaagagatcaagggggagctcgccctcgtgccccagtccccagacaagtcgctcgcgcgccacaagttcgtcgatgactgcgaggccgccctcaacgagcagatcaacgtggagtacaacgcctcgtatgcataccactccctcttcgcctatttcgaccgcgacaacgtggctctcaaaggatttgccaagttcttcaaggaatccagcgacgaggagagggagcacgctgaaa

SEQ ID NO: 66934 - DNA, 329 bp, Zea mays
caagaggcggaaagggaggagcgtggagcggcgaattattgtttgtttccccaagatgtcttctccaagcaagcgccgggagatggacctcatgaagctgatgatgagcgactacaaggtggagatggtgaacgatgggatgcaggagttctttgttgaatttcgtgggcctaacgaaagcatttatcaaggaggtgtatggaaggttagagtagaattgccagacgcatatccttacaaatccccatcgatcggtttcatcaataagatatatcacccaaatgtcgatgaaatgtctggttcagtctgtttggatgtcatcaaccaga

SEQ ID NO: 66935 - DNA, 322 bp, Zea mays
aaaatattgatgagattcctggagcggaaggacttgttgtcagagttgtttcatcagtggataagaagctggaggttaaaccacgttttttagaaatttttcaagaagacaactaccctacagagttcccttacaagtccaaggctgttctcttgttccagaaaatagaaggtgtggaagtatgtctatttggaatgtatgttcaagaatttggtgctgaatgctctttcccgaaccagcgtcgtgtttatttgtcatacttggattctgttaagtacttcagacctgagattaaaacagtatctggagaagccttgcgtac

SEQ ID NO: 66936 - DNA, 319 bp, Zea mays
cagatctcagtcacctgcgccgccgcttcgttcgtgtggaggggagaagagaggaaatggcggcgaccgagggcgtgctcctggggatgggcaaccccctcctcgacatctccgccgtcgtcgatgacgccttcctgacaaagtatgacatcaagctgaacaatgctattctcgctgaggagaagcacttgcctatgtatgacgagttggctagcaagagcaatgttgaatatattgccggaggagccacccagaactctatcagggttgcccaatggatgcttcaaactcctggtgcaacaagttacatgggatgcat

SEQ ID NO: 66937 - DNA, 327 bp, Zea mays
gctgtattttactgctatcacagcttctctacaggaagtacagtggaaacttccttgttaaccttcttgggaagtggaaggagtctgaatactctggccattctattcctgttggtggtcttgcttactatgtaactgccccatcaagtttggctgatgtccttgcaaatccattccatgcactgttttatgtggtcttcatgctgtcagcctgtgctctgttctcaaagacatggattgaagtttctggttcatcagcaaaggatgttgctaagcagctcaaggaacaacaaatggtgatgccaggccatcgtgagtcgaacttgc

SEQ ID NO: 66938 - DNA, 315 bp, Zea mays
gctgagtcttctctaccaaagaaacaattaactggcgtctatgatttggttgctgtcttgacacacaagggaagaagtgcagactctggccactatgttggctgggttaagcaagatgatggtcagtcaactagtattacagctcatttactataacaactgtttcattttatacaggttagttactgaaattccatattaaccatcaggaaaatggatcgagtttgatgatgacaatccgaacattcgcaaggatgaagacattttgaaactttctggtggaggtgattggcacatggcttatatctgcttgta

SEQ ID NO: 66939 - DNA, 317 bp, Zea mays
ctcgagccgcaagcaacacaccttgtcaccactgagatgcgcagaactgaaaaattcttcgcagctgcttcggctggcaggtggatactgaagcctgattacttgactgctagcaatgaggctggcaagttcttagaggaagagccatttgagtggcacggtgaaggccttaatatcggtgatacgatcagcttggatgctccaaggaagtggcgccactgcggcagcgtactggctatggcgctttctatgggatgcaggtcatcatatatggggaatgcattgctccaacactggacacgttaaaacgcgcgatc

SEQ ID NO: 66940 - DNA, 318 bp, Zea mays
ggaaatggcttatattcctttggatgaagatatgaaggtaaaagggaaggcagccattgatgttgtttgcaacccactgggcaagtccggcggtgcacttatccaacaattcatgatcctgacgttcggatccctggcgaattcaactccataccttgggggcatactgctggtcatcgttctcgcgtggctaggcgcggcgagctcattggacaagcagttctcgagcttggctaaggaggatctgaagaaggataaggctgcccgagagaaagtagaaccctcgctgctcaaggcgcctgcagagggcagtgatga

SEQ ID NO: 66941 - DNA, 319 bp, Zea mays
ggatcagcccgtcgatcgatcatggcgtcgtcgagctcggctgctactaccagtggtgacagtcagggtctcaaggctcgagatgcctgcatcgtcggcgtcgcccgcacgcccatcggcgcacttctcgggtcgctgtcgtccctccccgccaccaagctcggctccatcgccatccagggtgctctcaagagggcgaaggtcgacccggcgctcgtgcaggaggttttcatgggcaacgtcctcagcgccaacctcggccaggctccggcaaggcaggcagcccttggcgccggcttgcccaactccgtgccatgta

SEQ ID NO: 66942 - DNA, 322 bp, Zea mays
catctccaacgcagcaagcagacagaaggacaggcaggcagcgagtgcaaacaaccgcgagagcgatcagcgatgggctccttcttctcgaccttagtgacgccccctccgcccgccgccgacgacccgaactgcgccgtggtggccgcgcactccaaggccacctacgacgagcagtgggcggcccacaagagcagcagcaagctgatggtgatcgacttctcggcgtcctggtgcgggccctgccgcttcatcgagccggccttcaaggagctggcctcccgcttcaccgatgccatcttcatcaaggtcgacgtcgacg

SEQ ID NO: 66943 - DNA, 326 bp, Zea mays
caattaggtcacatacacacatcccggctgcctccctaggtagcagcttctacaatggaggcatccaacaagctcgcagtcttgctcctgtggctggtcatggcagctaccactgccgtgcacccttcctactccgagaactcgcctcaagactacctcactccccaaaacagcgcccgtgccgccgtcggtgttggcccggtgatctggagcacgaagctgcagcagttcgcggagaagtacgccgcacagagggccagcgactgccgtctccagcactcgggcgggccctacggggagaacatcttctgggggtccgccggctt

SEQ ID NO: 66944 - DNA, 328 bp, Zea mays
  unsure (1)..(328): unsure at all n locations
ctacaactgcgacggccacaccttcaactacctcgtcgaggacggattcacgtattgtgtagttgctgttgaatcagttgggcgacaaatcgccatagctttcctggacagagttaaggaagacttcaccagaaagtatggaggcgggaaagcagctactgctgcagcgaacagcttgaacagggagtttggatcaaagcttaaagagcacatgcagtactgtgtggcccaccctgatgaggctagcaagcttgccaaggtgaaggctcaagtctccgaagtcanaggagtgatgatggcatacattgagaaggttcttgaccgtggc

SEQ ID NO: 66945 - DNA, 312 bp, Zea mays
cagaagagcggcggcgcggacggacaaggagcaggcggaagaggagttgtgccaaggcacaatgggtatctcgcgtgactcgatgcacaagcgccgagccaccggtggaaagcagaaggcctggaggaagaagcgaaagtatgagcttggtcgccagccagccaacaccaagttgtcaagcaataagacagttaggagggtccgtgttcgtggaggtaatgtgaaatggagggctcttcgccttgatactggtaactactcatggggaagtgaagctgttacccgcaagacccgtatcctcgacgtggtcta

SEQ ID NO: 66946 - DNA, 326 bp, Zea mays
ctgctacccacttacacctgatgttttgatttcttctcagagataatggacgccggcgccgccgctgctgccactgccatctaccctctgcaccgatgcaaaaccatacacctggtgaggcatgcccaaggtgtccacaacgtggaaggcgacacggatcacagcgcctacatgaaacccgacttcttcgacgcgcgcatcactcccttgggctggaaccaggttgacctcctgcgagagcatgtgaaggaatctgggcttgcggaaaagattgagctggttatttgttctcctttgtcgaggaccatgcagactgcagtgggagt

SEQ ID NO: 66947 - DNA, 311 bp, Zea mays
gagaagtctttaggtggggtcaaagatggtgtcgctgaagttgcaaaagcgccttgccgcgagctacctcaagtgtgggaaaggcaaggtgtggcttgacccaaatgaagttagtgagatctccatggcaaactcccgccagaatatccggaagttggttaaggatgggtttatcatcaagaagcctcataagatccactctagatcccgtgcaagaagggcacatgacgccaagcaaaagggacgccactcaggatatggtaagcgtaggggtaccagggaggctaggctacccaccaaggttctgtgga

SEQ ID NO: 66948 - DNA, 314 bp, Zea mays
tcgaccccttgaatttaactgccatggcatccctgccttgccactgtgcctttggcacaatataaagctgaacgggggatcttacccattcttaaacgaattagagcatgtcttcaataaggttggtatcaaggattcgcagtctgttcttgttcggataactggatgccctaatggatgctctagaccatatatggcagatcttggtttcgttggtgatggcccaaaaagttaccagatctggctgggtggaacaccaaaccagagtacgctagcagaatcatttatggacaaggtgaagcttgatgacatcg

SEQ ID NO: 66949 - DNA, 308 bp, Zea mays
ctggtcacaaggacgtccttgaaggtgatccttatctgaagcagcgtctgcggctgcgtgagtcctacatcaccactctgaacgtgtgccaggcctacaccctgaagcggatacgcgacccgagcttccaggtgagcccgcagccgcccctgtccaaggagttcaccgacgagagtcagccggcggagctggtgcagctgaaccagcagagcgagtacgctccaggcctggaggacaccctcatcctgaccatgaagggcatcgccgccggcatgcagaacaccggctaggccaagatcttcggtgtg

SEQ ID NO: 66950 - DNA, 315 bp, Zea mays
gagagcgtgtggatttgggggagcttcttcactggagagtggagagctccggtagcgaggcgaaggaaggaagagggaggaggggaatcagagaggtctccccgatggcggactggggccccgtgatcgtagcgacggtgctgttcgtggtcctcacgccggggctgctctgcacgctgccgggccggggccgcgtcgcagagttcggcagcatgcacaccagcggcctggccatcctcgtccacgccgtcctctacttcgcgctcatcaccatcttcctcatcgccatcggcatccacgtttacgcgggctagt

SEQ ID NO: 66951 - DNA, 317 bp, Zea mays
cggacgggaagcacctccaatcccctcgcccccacggaccctcgccgccggggaagcgccgctcgctcaggaggacagccatggcgccggagccggaggatgatattatgaacgagaagaatccccgcccgctcgacgaggacgacatcgcgctcctcaaaacctatgggcttgggccgtactcgactagcattaagaaggtcgagaaggagatcaaggaaatggccaagaaaatcaatgacctttgtggtataaaggagtctgatacagggttggctccacctagccagtgggatttggtttcagataaacagatg

SEQ ID NO: 66952 - DNA, 237 bp, Zea mays
cgcaaaacaccaacacgtcttctctccggttgcgaggagggtataggatttcgccgcggcgagatgtcggcgtacgacgaggtggagatcgaggacatggagtggaacgcggagctgaaggcgtacacgtacccgtgcccctgcggcgacctcttccagatcacgctcgacgatctccgcatcgggtgagagattgcgcgctgcacgtcgtgttctctcttcctcaccgtcgtttac

SEQ ID NO: 66953 - DNA, 135 bp, Zea mays
caaggcttacttacaagaatgttcctacgtggcatagggacctgtgcacggtctgtgaaaacatccccattgtcctctgcggtaataaggttgatgtgaagaacaggcaggtcaaagccaagcaggttactttcc

SEQ ID NO: 66954 - DNA, 163 bp, Zea mays
gtgtaggaccttgaccagctcttactacagaggggcacatgggatcattatggtgtatgatgtcagtcgacgagagacgttcaccaatctttctgatatatgggccaaggacattgacctgtattcaaccaaccaggactgtgtaaagatgcttgttggaaat

SEQ ID NO: 66955 - DNA, 152 bp, Zea mays
ctcgccagcaccgccgcatcaccgaagttcgcaaagatggcggtgccgctgctgacgcagaagatcgtgaagaagagggtcaagcagttcaagaggccccatcttgatcgatacaagtgccttaagccaagctggcgcaggcccaagggtat

SEQ ID NO: 66956 - DNA, 265 bp, Zea mays
agtcgagacctcgcccgcccaaatacaaaagcctcagatctcagtgaccagcgccgccgcttcgttcgtgtcgaatagagaagagaggaaatggcggcgagcgagggcgtgctcctggggatgggcaaccccctcctcgacatctccgccgttgtcgatgacgccttcctggcaaagtatgacatcaagctgaacaatgccattctcgctgaggagaagcactcgcctatgtatgatgagttggctagcaacagcaatgttgaat

SEQ ID NO: 66957 - DNA, 214 bp, Zea mays
gtggccggccggcttgacaaaacagaacgtgttcgaggcagccatcgagacctcatatctggtgctggagtccgccatggccgagctcatgaaccacaggcgcgtcatgaagaagctgcaagcggaggtacgggcgtacggagcggagaagaagctggacatgatcagggaggacgacctgagcagcctgccgtacctacaggcgtccatgaag

SEQ ID NO: 66958 - DNA, 348 bp, Zea mays
gggttttcgcgccgccgccgccgccgccgccgcagccgcaacaatgccgtcgcacaagaccttccggatcaagaagaagctggcgaagaagatgcgccagaaccgccccatcccctactggatccgcatgcgcactgacaataccatcaggtacaacgccaagcgcaggcactggcgccgcaccaagctcggcttctgagcgtcgggattggccggctgctgcgtcggaaggctagggtctaagagctatcttccttctgttttatcaatgtgtcagtttttctgtaagctagcaagtgttgctatgacgcttttattaagattctggtgagcggtgatgttaagaga

SEQ ID NO: 66959 - DNA, 138 bp, Zea mays
  unsure (1)..(138): unsure at all n locations
tggaaaccaatggatgaagttttgacaatcaagaacacggagatcgcgaagacnttgtcccttccaccagtaaagctccattgcagcatgcttgccgaggatgcgattaaagctgctgtaaaagactacgaagccaag

SEQ ID NO: 66960 - DNA, 258 bp, Zea mays
  unsure (1)..(258): unsure at all n locations
cttcctgcccatctatcgcttggacacctctgcaagggagcacatggctctcgagaaggccaaggagatcatcgcgtcctccccggtcgacctagctctccgaaaggccaaggagaccgtcgcctcccaccccgtcgtcgtcttcagcagaacttactgtcctttctgcacccgagtgaaacaattgctagcaaagttgggggcaagttacaaggctattgagttggatgtgganagtgatggcgctgagctgcagtc

SEQ ID NO: 66961 - DNA, 192 bp, Zea mays
tccattctcagccgccgccaatcccttcccgtgctccgcaaccgctgagtgagaagaagagatggccggcaatggcgatggcccggctatcggcatcgatctcggcacgacgtactcttgcgtcggcgtgtagcagcacgatcgcgtcgagatcattgccagcgaccagggtaaccgcaccacgccctcgta

SEQ ID NO: 66962 - DNA, 276 bp, Zea mays
ccgacatggaaagccgtgttgcaagaaggggaattccgctgcgagatccgtgaacggttcagagatggcacagacggtgttcaccccctctttggaagcgatgaagcatgtcaaggcagagaacggagtcattctcaccaagcccttccttgatgtctgcaagcaaatattgcctgtcctcgataaatttggaggtgctatggcaattgtaaagagtgatatcggcggcaatatcacaagactggaaaacaagtatacttcagaaccatcaaagta

SEQ ID NO: 66963 - DNA, 176 bp, Zea mays
ctgggtttggctcccgtctcaagaggaacgtcttccgtggctcctggatgccaagaggtgatgctctgaagaagcttgaggaaaagggtgtagctattcgttttgttattggtcggagtgcaaatcgaggtgatagcttggaccgtaatattgatgatgaaaatcggcagacaaag

SEQ ID NO: 66964 - DNA, 174 bp, Zea mays
cgcttgcgtttccttctctccgcttccaagatctgcgaagcgagggcgtggaggttcggctggtaacaagttccggatgtcactgggtctaccagtggcagctactgtgaactgtgccgataacactggagccaagaacctgtacatcatttctgtgaacggaatcaagggtcg

SEQ ID NO: 66965 - DNA, 188 bp, Zea mays
ggaagttgatggtgtgaaagtccttcaactcgaaaccgcagctggtgcagctattcggttcttcgacaaagcgattggaattaatgttccccgctcaaggtttctcccagtgaaggctacatctgatctgttgcttgtgcagtctgatctttacaccttggttgatggctttgtcatccgcaacccat

SEQ ID NO: 66966 - DNA, 214 bp, Zea mays
cgcatcctctcatcagcttccttccacattcgtctcgagatctcgccccgtcgccatggacgcgatcgacagcgtggtggatcccctccgcgacttcgccaaggacagcgtccgcctcgtcaagcgctgccacaagcccgaccgcaaggagttcaccaaggtggcggcgcggacggcgatcgggttcgtcgtcatgggcttcgtcggcttcttc

SEQ ID NO: 66967 - DNA, 338 bp, Zea mays
ccaaggaccttcggcgcccgttcaggatccacatcttcccgagcgagttcttggttgacctcttcctcttcggaccacctccaaggctcttggtgtagcttgccactctcaccaatcaagttttcatgtctgatctcgacattcagatcccaactgccttcgatcccttcgctgaggccaatgctggggactctggtgcggcagcagggtcaaaggactacgtacacgtgcgcatccagcagcgtaatggtcgcaagagcctgactaccgtccagggattgaagaaggagttcagctacagcaagatcctcaaagatctcaagaaagagttctgctgc

SEQ ID NO: 66968 - DNA, 259 bp, Zea mays
ctcctgagcactttctcctcgtacccgacaagccaatcgaagccgagatacggccatggactccaccggcaccggagcagggggtaaggggaagaagggagcggccgggcgcaaggtcggcgggccaaggaagaagtcggtgtcgaggtccgtgaaggccgggctccagttccccgtcggccgcatcgggcgctacttgaagaagggccgctacgcgcagctgtccggcaccggcgcccccgtctacctcgccgctgtc

SEQ ID NO: 66969 - DNA, 187 bp, Zea mays
ggaaaaccaatggatgaagttttgacaatcaagaacacggagatcgcgaagacttgtcccttccaccagtaaagctccattgcagcatgcttgccgaggatgcgattaaagctgctgtaaaagactacgaagccaagaagtcgaagatggggcagcagggtgaagacagcccttcagaggaggctgc

SEQ ID NO: 66970 - DNA, 276 bp, Zea mays
gccggcgaggccccaagctggcgcggtacaacaagaagcccaccatcacgtcccgcgagatccagacctccgtgcgcctagtcctccccggagagctcgccaagcacgccgtctccgagggaaccaaggccgtcaccaagttcaccagcaactgagcgcgctgcgggatccgcggatctgttagaagggttctttgctgtgtcatgtcgccagtcccccgacctacccgcctagtagctagcttgcctgctctatacatccggcgcgccggattgt

SEQ ID NO: 66971 - DNA, 184 bp, Zea mays
caggaaccaccgtggtctgcgtcactactggggcctccgtgttcgtggccagcacaccaagaccactggcaggcgtggaaaaactgttggtgtctccaagaagcgataagctacatatctatcgacaaatctcagatgtactagtgttggttcatgttcaaactgtcttgatgaagggtttctg

SEQ ID NO: 66972 - DNA, 257 bp, Zea mays
  unsure (1)..(257): unsure at all n locations
agagcgtcgtcacaactggccgcaagatcattggcgccactaaccccctggcttctgagcccggcaccatccgtggcgactttgctgtcgacattggcaggaatgtcattcatggaagtgacagcattgagagtgctaataaggagattgccctgtggttccccgagggccctgctgattggcagagcagccagcacccctggatctacgagaagtanacatggagagtttcacatcgaaccttgagagccagagga

SEQ ID NO: 66973 - DNA, 234 bp, Zea mays
cgcacacaccgcccgtccccgatctccgatcgcctcgtcgatccaaagatgcagatcttcgtcaagaccctcactggaaagactatcaccctcgaggtggagtcttctgacaccattgacaacgcataggccaagatccaggacaaggagggcatccccccggaccagcagcggctcatctttgctggcaagcagctcgaggacgggcgcacacttgccgactacaacatccag

SEQ ID NO: 66974 - DNA, 216 bp, Zea mays
cgtgtttgagactagcggaccgaccttgaagttgaagttgaaaaggtcggcctgcgcggcgatggatgtcaagtgccggcgtctggaggggaaggtggccatcgtgacggcgtccacgatggggatcgacctcgccatcgccgagcgcctcggtctggagggcgccgccgtcgtcatctcctcccgcaagcagaagaacgtgaacgatgcggtgga

SEQ ID NO: 66975 - DNA, 230 bp, Zea mays
gccttcgcctctcagtttgtctattgctgcaacaagttggggctggaccgttctaaagtaaatgtaaatggaggcgcgattgcccttggacaccctctgggtgcaacaggtgcccggtgtgtggctactcttctaaatgaaatgaagcgccggggcagagactgcagatttggtgttgtcaccatgtgtatcggatctggaatgggggcagcagctgtgttcgagcgggg

SEQ ID NO: 66976 - DNA, 334 bp, Zea mays
gtcacgcagcaacgccgagggagagcgaggagagacagatacagatcgcgcgctcagatgtcgtcggactcctcgtcgtgggcgcgcgccctggtgcagatctcgccctacaccttctccgccatcggcatcgccgtctccatcggcgtctcggtcctcggcgcggcatggggtatcttcatacggagagcagcctcatcggggccgccatcaaggcgcccaggatcacatctaagaacctcatcagtgtcatcttctgtgaggctgttgcaatttatggtgtaattgtggcaatcatcctccagacaaagcttgaaagtgtgccaacatccca

SEQ ID NO: 66977 - DNA, 198 bp, Zea mays
gctggtatggaagcaagtggaacaagcaacatgaaattctctctgaatggttgtgttatcattggcacccttgatggagctaatgttgaaataagagaggaggttggagaagataatttcttccttttcggtgccagagccgatgaagttgctgggctgaggaaggatagagaaaatggtctgttcaaccagacccac

SEQ ID NO: 66978 - DNA, 294 bp, Zea mays
  unsure (1)..(294): unsure at all n locations
gcttncctcgaggccaaccccgacgtcatgaaccagttcatgtggggactgggggtcccgaggacttggggttctgcgacgtgtacggcctcgatgacgagttgctcgccatggtgccccagccggtgctcgcggtcctacttctctacccccaggaccggagcaaggagtcccaagcttcgctacctcgtcggtggagaccaaggagcccagcaagaacgtatatttcacagagcaaactgttgggaatgcctgcgccattggtgatattttcacaccactggggaatgctac

SEQ ID NO: 66979 - DNA, 319 bp, Zea mays
gatctccgatcccctcgtcgatccaaagatgcagatcttcgtcaagaccctcactggaaagactatcaccctcgaggtggagtcttctgacaccattgacaacgtcaaggccaagatccaggacaaggagggcatccccccggaccagcagcggctcatctttgctggcaagcagctcgaggagggcgcacacttgccgactacaacttccgaacgggagagcacactccaccctgttctccgcctcaggggaggcatgcagatcttcgtcaagaccctcactggaagactaatcacctcgaggtggagtcttctgaca

SEQ ID NO: 66980 - DNA, 179 bp, Zea mays
cctagctcccgcaactgccgccgccactcccacgctcgcagccatgccgcccaagctcgacccgtcgcaagtggtggaggtgttcgtccgtgtgaccggcggcgaggtcgtcgcatgtcttcgctggcccccaagatcggcccgctcggtctttcccccaagtagatcgtagaggtcat

SEQ ID NO: 66981 - DNA, 336 bp, Zea mays
cgcgcggaggggaggggaggagaggaggatggctgcagccgcggggaggaaggtggcggtcgccgccgtgcagttcgcctgcaccgacgtcgaggcggagaacgtcgccaccgccgagaggttgattagagaagcacacaagaaaggtgcaaagattgtactcgttcaggaattgtttgagggcactatttctgccaagctcaaagactggatttctttcggcgcgctaagccttacaaaggcaatccaactattataaggatgcaacagcttgcaaaggagctggaagttgtcatacctgtcagttttttcgaagaagcaaacaatgcacattat

SEQ ID NO: 66982 - DNA, 337 bp, Zea mays
cctctcagggattccgcgcgacaaagtcaggcgtagaggctccaggaggaggagggaggcgcacagggcgggtgggggagatgttcctctgggactggttctacggggtgctggcctccctcggcctgtggcagaaggaggccaagatcctcttccttggcctcgacaacgccggcaagacacgctgctccacatgctcaaggacgagcggttggtgcagcaccagccgacgcagcacccgacgtcggaggagctcagcatcggcaagatcaagttcaaggccttcgacctcgagtgccaccagatcgcgcgctcgcgtgtggaaggattactacgc

SEQ ID NO: 66983 - DNA, 213 bp, Zea mays
ggttggtgtacgagggcgccaatgtgggagatgagttcgtggagacggagtactacaaggacctcggcggcgtcggcgagcagcaccacacgaccggaacgggcttcatcaagatggacaaagctaaaggcgcccccttcaaactgtctgaagatcccaatgcagaggagcgacatgcttttgcaggggaaacctgctaccaacgagtggatc

SEQ ID NO: 66984 - DNA, 328 bp, Zea mays
ctgggtttggctcccgtctcaagaggaacgtcttccgtggctcatggatgccaagaggtgatgctctgaagaagcttgaggaaaagggtgtagctattcgttttgttattggtcggagtgcaaatcgaggtgatagcttggaccgtaatattgatgatgaaaatcggcagacaaaggcttcttgattcttgaaagtcatgaagaggctgcagaagaattaccgagcaaagcaaaaattttcttcagtgctgcagttgaagcctgggatgcagaattttatgtcaaagttgaagataacattaatcttgacttagctgggttaattgag

SEQ ID NO: 66985 - DNA, 151 bp, Zea mays
ctttgagaaacctttcctgtacctcgcaaggaagctggctggtgatccgaaccttcactttgttgaagctgttgctcttaagcctccggaagttaccatcgacatggctatgcagcagcagcatgaagctgagcttgctgcagcatctgca

SEQ ID NO: 66986 - DNA, 330 bp, Zea mays
tgaccgatcgagctagatctccaggactcacctccccaaccgtttgcatccgtctcgcgtgacttcattcccagcgcccggcggcgacctccacgtggtgccattcgccggcaacgagcacccgcccaccaggatccaggtttgtgctgcgagagcgcctatccattcaccatgattatttcgtgctcctgatcagccgccagggcaaggtgaggctcaccaagtggtattctccttacacccagaaagagaggaccaaggtcattcgcgaactcagtggactcattcttacacgagggcacatactctgcaattttgttgagtggagag

SEQ ID NO: 66987 - DNA, 325 bp, Zea mays
caccaccgcacgcctcccactcgccgtctccgctcgcctcccaaacccaagcagagaacactagcgttccctcaccagggcgtccatcccagcagccatggcgatggcgtacaagatggcgacggaggggatgaacgtgaaggaggagtgccagcgctggttcatggagatgaagtgaagaaggtgcaccgcttcgtggtgtacaagatcgacgagcggtcgcgcgccgtgctggtggacaaggtgggcggccccggggaagggtacgaggagctcgtggccgcgctgcccggcgacgactgccgctacgccgtcttcgacttcg

SEQ ID NO: 66988 - DNA, 324 bp, Zea mays
  unsure (1)..(324): unsure at all n locations
gtcncgcagcaacgccgagggagagcgaggagagacagatacagcgcgcgcgctcagatgtcgtcggactcctcgtcgtgggcgcgcgccctggtgcagatctcgccctacaccttctccgccatcggcatcgccgtctccatcggcgtctcggtcctcggcgcggcatggggtacttcatcacggagagcagcctcatcggggccgccatcaaggcgcccaggatcacatctaagaacctcatcagtgtcatcttctgtgaggctgttgcaatttatggtgtaattgtggcaatcatcctccagacaaagcttgaaagtgtgc

SEQ ID NO: 66989 - DNA, 323 bp, Zea mays
ggaactcggggaggtgagcagaggtggtggtgagtccgcctttcgtttttctgcagcaggtcaaggggctgctgcggctggacttcgccgtcgcagcgcagaactgctgggtgcgcaagggcggcgccttcaccggcgagatcagtgctgagatgctggtaaacctgcaggtgcctgggtcattttgggacattctgagcgcagagctctgttgggtgaatccagtgattttgttgctgataaagttgcatatgcactcactcaaggtctcaaggtaattgcttgcattggtgagacccttgagcagagagaggcaggaacaa

SEQ ID NO: 66990 - DNA, 326 bp, Zea mays
ccggaacagagcgaggcgacgccgaggcacctcatctccggcgaagggaaatggcgaccgttccaggggatctgatctggcagattgtgaggaagaacaactccttcctggtgaagcagtttggcaacggcaatgccaaggtgcagttcaccaaggagcccaacaacctctacaattacactcctacaagtactctggcttagcaaacaagaaaactgtaacgatccagccagctgctggaaaggactcggctgtggtcctctctactaccaagaccaagaagcagaacacacccgcgaagctcagccacaagtctgtgatgcgca

SEQ ID NO: 66991 - DNA, 329 bp, Zea mays
ggattccgcgcgacaaagtcaggcgtagaggctccaggaggaggagggaggcgcagcagggcgggtgggggagatgttcctctgggactggttctacggggtgctggcctccctcggcctgtggcagaaggaggccaagatcctcttccttggcctcgacaacgccggcaagaccgctgctccacatgctcaaggacgagcggttggtgcagcaccagccgacgcagcacccgacgtcggaggagctcagcatcggcaagatcaagttcaaggcgttcgaccacggcggccaccagatcgcgcgccagcgtgtggaaggattactacgc

SEQ ID NO: 66992 - DNA, 326 bp, Zea mays
cggctcgaggtatcgcgtccgcctcagcccgccgcaaggagaggtaagttcaggagacatcttcgagaagctgaaatggctcctaaagctgctcctgccaagaagggtgatgccaagacccaggccttgaaggttgccaaggctgtgaagtctggggcagccaagaagaagacgagaagatccgcacgtctgtgacatttcaccgccccacgaccctgaagaaggctagggaccccaagtacccacgaatcagcactaccggtaggaacaagcttgatcagtaccaaattctcaagtacccccttaccacagaatcagcgatgaag

SEQ ID NO: 66993 - DNA, 324 bp, Zea mays
cgcaaccccgcgggtcgcgggatcaaggagccagagagcgggaccagcgagcgttccgccagagatcgagaccgtagctagggtttgaggcgccgggctgcggtggacgagatgtcggcgccggcgaggaagcggctgatgcgggacttcaggcgcctgcagcaggacccgccgccgggatcagcggtcgcgccgcacgacaacaacatcatgctctggaacgccgtcatattcgggccggatgatacgccgtgggacggtggcacgttcaagcttaccttgcagtttacagaagattacccaaacaagccaccaactgttcga

SEQ ID NO: 66994 - DNA, 327 bp, Zea mays
gccggcgaggcgccaagctggcgcggtacaacaagaagcccaccatcacgtcccgcgagatccagacctccgtgcgcctagtcctccccggagagctcgccaagcacgccgtctccgagggaaccaaggccgtcaccaagttcaccagcaactgagcgcgctgcgggatccgcgatctgttagaagggttctttgctgtgtcctttccccagtcccccaccctacccgcctagtagctagcttgcctgctctataaatccggcgcgccggattgtaatggtcctcttagatttgatgtccctgttgtggaatatagttgtatctctc

SEQ ID NO: 66995 - DNA, 326 bp, Zea mays
cacttcacagtcaatatgtcaaaggtagagacaggtcttcatgtgtgagaaagtatagcgagagcagatcatctttagattatgcttcagacagtgagcagtcaagtgttcaggccacacagtcagcccaggaaaaagagatgcagggccaaatggacagaacacataatagacagacaaatacagaggtgaagacaaatccaagtctgaacgggaatgccctcattcaaaaaaaagaactttggaagagaatctttctgatcaccttagatatggcagtaagcccaaaaggtagattatgctggtcagtaatgggacctgagtca

SEQ ID NO: 66996 - DNA, 326 bp, Zea mays
gctaggggtgttatgcttggtgcagaccagcctgttattctgcacatgcttgacattccgccagcagctgaagcccttaatggtgtcaagatggagttggttgatgctgcgtttcctcttctgaagggagttgttgctacaactgatgttgtggaagctgcactggggtcaatgggccgtcatggttggtggattccccaggaaggagggaatggaaaggaaagatgttatgtcgaaaaatgtttcaatctacaaatcccaagcatctgcccttgaagcccatgcagctcccaactgcaaggttctggtggttgccaaccagcaaa

SEQ ID NO: 66997 - DNA, 263 bp, Zea mays
ttttgaatattgtgatgtggttaccacaaccacgcacaagtccctcagagggccaagggctggcatgatcttctacaggaaaggccctaagccccccaagaagggccagcctgagggtgctgtttatgattacgaagacaagatcaactttgcagtgttcccatctctccaaggtggctcacaaccaccagattgctgcacttgctgttgctctacagcaaactatgtcgcctggcttgatgtcctatgcagtgcaagtgccg

SEQ ID NO: 66998 - DNA, 191 bp, Zea mays
aacaaggaggctccaaaggaggcccccaagccaaaggtggttgaggcaccagcagaagaggaagcaccaaagccaaagccaaagaatcctcttgacttgctgccaccaagcaagatggtccttgatgactggaagaggctatactcaaacacaaagactaacttccgggaggttgccatcaaaggtctggg

SEQ ID NO: 66999 - DNA, 324 bp, Zea mays
cggctcgagggaaaccctagccgccatatctcacgatccagtcgagcaccaagccgagggaaggtgaggagcgatggcgcgcggcgtggtgtcggcgaagggcggcgcggtcgcgggcaagaagaaggggtcggtttccttcacgatcgactgcaccaagccagtggaggacagatcatggaggtcgcctcgctcgagaagttcctgcaggagcgcatcaaggtcgccggcggcaaggctggcaacctcggcgactccgtcaccatctctcgcgagaagaccaaggtcaccgtcacctctgacggacgcttctccaagaggtac

SEQ ID NO: 67000 - DNA, 258 bp, Zea mays
cggcattgcagttgccgctcttggtatgctgagcacaatcgcaactggtcttgctattttatgcttatggtcccatcagtgacaatgctggtggtattgctgagtcggctggaatgagccacagaatccgtgagagaactgatgctcttgatgctgctggcaacacaactctgctattggaaaggggtttgccattggttcagctgctcttgtgtccctggcgctttttggtgcctttgtcagcagagctggattgaa

SEQ ID NO: 67001 - DNA, 185 bp, Zea mays
  unsure (1)..(185): unsure at all n locations
cggcattgcagttgccgctcttggtatgctgagcacaatcgcaactggtcttgctattgatgcttatggtcccatcagtgacaatgctggtggtattgctgagatggctggaatgagccacagaatccgtgagagaactgatgctcttgatgctgctggcaacacaacgctgctattgganaggg

SEQ ID NO: 67002 - DNA, 321 bp, Zea mays
gttggaggcacctgccacagccatgcgacgaaggatctatatgattccatcgcagctgggaattaccctgaatggaagctctacatccagactattgatcttgaccatgaggataagtttgactttgacccgctcgatgtcaccaagacctggcctgaggatatcatccgctgcagcccgttggacggatggtcctgaacaagaacgtcgacaacttctttgcagagaatgaacagattgctttctgcccagcgattattgttcctggaattcactattctgatgataagctgctccagacgagaatcttctcctatgctg

SEQ ID NO: 67003 - DNA, 320 bp, Zea mays
aggcaattgaggctgctaaagctgccaagaaagcacctgatgcattctatgcgctccgtctccttgaatcaactggaattgttgtggttcctggatctggatttggccaagttcctggaacatggcacgtcagatgcacgatcctgccgcaggaagataaaatcccccggtgatcacccgcttcaaggctttccatgaggcgttcatggctgagtaccgtgactgaactgttacagtggctgagtaccaccgtgtagaccgaaacaaaataaagctcccccctctctctgtgtctgtgcgtgtgtgtgaactgatctctg

SEQ ID NO: 67004 - DNA, 324 bp, Zea mays
gtgaagaacaggcaggtcaaagccaagcaggttactttccacaggaagaagaatctgcagtactatgaaatttctgccaagagcaactacaactttgagaaacctttcctgtaccttgcaaggaagctggctggtgatccgaaccttcactttgttgaagctgttgctctaagcctccggaagttaccatcgacatggctatgcagcagcagcatgaagctgagcttgctgcagcagctgcacaacctcttcctgatgacgatgatgatctgattgagtagaaaggatcatgagtcttggacttgagcaggagttgtgccttgc

SEQ ID NO: 67005 - DNA, 324 bp, Zea mays
cgagcgatcatcaaggctcgtggcctaggccaatggcccacattgcacttggtgggtgcgttggcttaccatctccccaagtgggagagtggacgtcataatttgtgatagagggggtatgcgttcgcgcggccctgccaaatctaaaaatattaattttggtccttgggccggttgctgtgcgcatgatgtcgcgcggccccttacaaatcggaaaatattacttttggtccttgggtgcgcaggttgctatgctatgcgtgtgtttcgaaggaaatacttgtaatcgaaattttcataagcgtttacttttggtaccctgtt

SEQ ID NO: 67006 - DNA, 176 bp, Zea mays
gcgccatcttcctggaccgcatcaagaaggcctacgacaggaacccgggcctcgccagcctgctcgtagaccccgagttcgcgcaggagatcatggacaggcaggcagcgtggcgcagggtggtgtgcctcgccatcaacaacggcgtcacaccccgggaatgtccgctagcctgg

SEQ ID NO: 67007 - DNA, 168 bp, Zea mays
cggctcgaggctatgtgacctatgcaacattacactgaacaaaaatgctgtctttggtgacagcagtgcattatcacctggcggtgtgcgcattggtacacctgctatgacctcaaggggtttggttgagaaggacttcgtgcagattgccgagtaccttcaccgagc

SEQ ID NO: 67008 - DNA, 169 bp, Zea mays
tctagatcgcgagcggccgcccgcgatctagtgagaagccaggatccaaactccataagaaggaaacttgtgaggctgttaccatcattgaaacccctcctcttgtcattgttgggctcgtggcatatgtgaagactcctcgtggcctccgcacactcaactctgtttg

SEQ ID NO: 67009 - DNA, 162 bp, Zea mays
gaaatgttgaaggtatttaacagaggatatatttaagaagccagttattgtctataactatccgaaaggaataaaggcattttatatgagactcaatgatgatgacaagacggtggctgcaatggatgttcttgtgcctaaggttggtgaattgattggtgg

SEQ ID NO: 67010 - DNA, 165 bp, Zea mays
ctgatctcgacattcagatcgcaactgccttcggtacgctagttgaaattgttttcttctagttcagctgtcgtctttcggctgtgatgcctggaacacgaacacgtgcggttcattctaactaatctgcattcacacgtacatacagatcccttcgctgaggca

SEQ ID NO: 67011 - DNA, 168 bp, Zea mays
tgtttatcatcaggaagcctcagaaggttcactctaggtcgcgtgcaagaagggcacatgaggccaagcagaagggaaggcactctggatatggcaagcgcaggggtaccagggaggctaggctccccaccaagattctgtggatgaggaggatgcgtgttctgaggc

SEQ ID NO: 67012 - DNA, 164 bp, Zea mays
ctttcgccgccgcctctctccttctcgagcaggaggcggacaaggtaagcagcaatcgcaggaaccctagcgccgccgcacccgcaggaatgggtatcgacctcgtcgccggtgggaggaataagaagaccaagcgcactgcgcccaagtctgacgatgtctac

SEQ ID NO: 67013 - DNA, 162 bp, Zea mays
tcaaagaagaaggcgaacttcctttctgctgatgactttgagccagcacttatcccatccaagaccattcctgaccctgatgacaagaagccggaggactgggatgagagagctaaaatcgctgatccagatgcagtgaagcctgatgattgggatgaggat

SEQ ID NO: 67014 - DNA, 164 bp, Zea mays
aacggggatatctggacatcagagacactgtacagtgcgtggagctagcaatagccaacccagccaaacctggcgagttcagagtcttcaaccagttcaccgagcagttctctgtcaatgagctagccaaactggtgactgcggcaggagcgaaacttgggctt

SEQ ID NO: 67015 - DNA, 176 bp, Zea mays
ctaccgtgtcgtccatggcatcgatgttttcgatcccaagttcaacattgtctcccctggagcagacatgagtgtttactacacgtatacggagaccgacaagagactcactgccttccatcctgagatcgaggagctcatctacagcgacgtcgagaactccgagcacaagttcg

SEQ ID NO: 67016 - DNA, 159 bp, Zea mays
gtaatggacgaggtctatgacatggagctctacgagtggaccaaggtggacatctctgatgaggcccagaaggagcgtgtcaatgcgatgattgaggaccaggagccctttgagggcgaggccttgcttgacgcgaaatgcttcaagtgagtgtgcttg

SEQ ID NO: 67017 - DNA, 172 bp, Zea mays
ctcgcttcaagctcatcatctcgcacagtggcagtcgcctgagatcacagcgacaatagtgaaggcagtagctgtcctcgccggcactgatgtcaagggcaccatcttcttttcacatgaggaggatggtccgaccaccgtgactggaagtatctctgacctcaagccaggg

SEQ ID NO: 67018 - DNA, 157 bp, Zea mays
tctccttccagtgtccgccgtcgtgcgctcgctacccctctccctcgaggcctttgccggcgaagagcgcccagtcgcccaccaggatgaagtttgttgctgcctatctgcttgctgtcctcgctgggaactccagcacctctgccgaggacttgac

SEQ ID NO: 67019 - DNA, 150 bp, Zea mays
gcggcgctagaggtttcctcgcccgcaacgcgatgccgaagaacaagggaaagggaggcaagaaccggaagcggtgcaagaacgaggcggacgacgagaagcgggagcaggtgttcaaggaggacgggcaggagtacgcgcaggtaacgc

SEQ ID NO: 67020 - DNA, 159 bp, Zea mays
tgctgctctcaacctccatcgtctccgtcatcctcgcaggcgcagagtacacggggccgtctatgaacccagctaatgcatttgggctgggcatatgttaacaattggcacaacacatgggagcagctgtatgtgtactggatatgcccctttattggg

SEQ ID NO: 67021 - DNA, 155 bp, Zea mays
ggccaattagccagcaaaagtttgcctcaaatgtcattgagaagtgcttagcctttggaaatcctgtagaacgtcaggttctgattggtgagatgcttggatccactagcgaaagcgaacctcttgaggtaatgatgaaagaccagtttgcaaac

SEQ ID NO: 67022 - DNA, 156 bp, Zea mays
  unsure (1)..(156): unsure at all n locations
ggctgattgatttcacaggatggacagtgtcncatgcttcgccgataaagacttgtagagaaactgcaaatatactgcaaaatcattttcctgaaaggctggccattggatttctatttaatccccccaaagtatttgaagctttttataaggtca

SEQ ID NO: 67023 - DNA, 73 bp, Zea mays
gtgtaggaccttgaccagctcttactacagaggggcacaggggatcattatagtgtatgatgtcaggcgacga

SEQ ID NO: 67024 - DNA, 328 bp, Zea mays
cacggttatcggtgaggcgagccgcgagtggaactgtggaagcgtcgagcttttttcttctttgtcttgctgcgcaagcagaagggagacgagaggagggcggcgatggcgaagaggctgctcccgtcgctgaaccgggtgctggtggagaagctggtgcagcccaagaagaccgccggcggcatcctcctcccggaaacatccaagcagctgaatgctgctaaagtggtggctgttggccctggtgagcgcgacaaggcaggcaatctgatcccagttgctctgatggaaggcgacactgtgcttctgcccgagtatggtggatctg

SEQ ID NO: 67025 - DNA, 176 bp, Zea mays
cttccatctgcctttgatccgtttgctgaggcacatgctgaggactctggtgctagtcctggaacgaaggattatgtgcatgtgcgcatccagcagcgcaacggcagaaagagtctgactacagtccagggtctgaagaaggagttcagctataacaagatcctcaaggatctgat

SEQ ID NO: 67026 - DNA, 186 bp, Zea mays
ctccacggcatcttcgaggccgcgagcttcggcgggaccaacatcgacccgacggcgtgggaggacaagaagtgcaccggcgagtctacgttccctgcgcaggtgcgggtggcaacgaggaagatctacgacccgctggaggaggacgccttccgccccatcctgcaccactacgacgggcccaag

SEQ ID NO: 67027 - DNA, 153 bp, Zea mays
gatctccgatccgctcgtcgatccaaagatgcagatctgcgtcaagaccctcactggacagactatcagccgcgaggtggagtcttctgacaccagtgacaacgtcaaggccaagatccagaacaaggagggcatcccccggaccagcagcgg

SEQ ID NO: 67028 - DNA, 125 bp, Zea mays
gtgcgtcaaggcggcgttcccgatgcgatgctcgcctacaacctctcgccgtccttcaactgggacgcgtctgggatgacagacgccgagatggccgccgtcatcgcgagcgtcgcgcgcctcgg

SEQ ID NO: 67029 - DNA, 182 bp, Zea mays
ggagctctttgtcgcagccgagggcatgtacacgggccagttcgtctactgcggtcgccgcgccaccctctccatcggcaacgtgctgcccctccgcgggatccctgagggtaccgtcgtctgcaacgtcgagcaccacgtcggtgaccgcggtgtcttcgccagggcctctgaggactacg

SEQ ID NO: 67030 - DNA, 256 bp, Zea mays
gttggaacctccgggtcgacattcttgggcctggatgacaacaggttgtgtagatgggatatgcgcgacgccagaggccgggtgcagacaatcggtagctcatcagactcaccagtgctgaactagtcacagggtcatcagttctcgcggggcaccaatttccagtgctttgcaagtactggggatggttcaatcgttgttggttctgtggatggcaagatcagactctattctaagagctcgatgcgtatggcga

SEQ ID NO: 67031 - DNA, 155 bp, Zea mays
catgaatggtgacattcgtcacctcagggacactggcatgtcaaccttcattctcactacgtaacttgatgctgctcctgcagcagttagacgatgagggcacgtacacaagtgtcacatgcgttctcagagtgcattcggaaagccacggtggt

SEQ ID NO: 67032 - DNA, 150 bp, Zea mays
tgtgacctcgctcagccgcgtcgcgtcgcatcctacgatccaaagctctctctgctcgcagccatggtgaagaactacacgaacgtcagtgccgagtacagctaggctgtggagaaggccaggcgcaagctccgagccctcatcgccgag

SEQ ID NO: 67033 - DNA, 110 bp, Zea mays
cactgatataaggagcgtttgcacagaagccgggatgtacgccattcgtgcccgcatgaaaacggtgacagaaaaggatgttctcaatgctgtcaacaaggtcatcaagg

SEQ ID NO: 67034 - DNA, 181 bp, Zea mays
cggctcgagtgcgccgcgacgtccctcgccttcgccgccgaatccgagactccgatctcgagttagccgcagcgcacagagcaggcccgactctcggcccgatccgcgctctcctctccgtcgcttcagtcatggcaggaatggcacctgagggttctcagttcgatgctaagcactatga

SEQ ID NO: 67035 - DNA, 336 bp, Zea mays
cgccggaccagcagcgcctcatcttcgccggcaagcagctcgaggatggccgcaccctcgccgagctacaaccatccagaacggaggtcgacgctgcagctgggtgctccgcctcacgggaggcgccaagaagcgcaagaagaagacgtacaccaagcccaagcagatcaagcacaagcacacgatggtgaagctcgccgtgctccagttctacaaggttgacgacgccatcggcaaggtcacccgcctccgcaaggagtgccccaacgccgaatacggcgcgggggtcttcatggccaccactgtcgacgcgatactgcggtaagtgtggcctca

SEQ ID NO: 67036 - DNA, 192 bp, Zea mays
atccgccgccgcagccatccgcgtgttctcttcggtgcagttctcgagtgtccaagatgaaggtagtagctgcctatctgcttgctgttctgaggtggaaacacttccccgactgctgatgatgttaagagcattctggaatcagttggtgctgaagctgatgaagaaaaactagagttcctgctcacagaa

SEQ ID NO: 67037 - DNA, 200 bp, Zea mays
gtcccgccaagaagaaggcggtggtaacgaacccgctcttcgagaagaggccgaagcagtttgagatcggcggcgcgcttccgcccaagaaggacctccaccgcttcgtcaagtggccaaggtcgtgcgcatccagcgccatcgccgcatcctcaagcagcgcctcaaggtgcccccagcgcgtcaccagttcacacgta

SEQ ID NO: 67038 - DNA, 141 bp, Zea mays
cagggatatgacacagtggttggagagcgtggagcccagttatcaggagtgcagaagcagcgagtggcgatcgaccgtgcaattgtgaaggacctaggatcctgttctggacgaagcgactagtgcgctggatgctgagtc

SEQ ID NO: 67039 - DNA, 339 bp, Zea mays
cgaaagcaaattcactgccgatgcactgcaaacgttgacctacaaactgtgctacacgtatgtgcgatgcactcgatcagtctctatagttcccccggcgtactatgcacacctggcggccttccgtgcgcgccactacatggacgatgacctctccgaccaggggtcgtcttcagtggcgagctctcgcatgaaagatggcgctgttccggtgaagcagctgccgaaagtgatggagagtgtcaagcagttcatgttctactgctgaaggtggcctttgcaggaaggaccgtcatcgacacttttgatgccatgacatgaatcgagtattctgggttg

SEQ ID NO: 67040 - DNA, 281 bp, Zea mays
ccgcacctctctccatctccctgagcctccgccttcttcttgatccagccaagccagggatcaccatgtcggactcggaggagcaccacgtcgaatcgaaggccgacgccggagcgtccaagacctacccgcagcaggctggcaccgtccgtaagaacggcttcatcgtcatgaagaaccgcccctgcaaggttgtggaggtttctacctcagagactggtaagcatggtcatgccaaatgccactttgttgccatagatatattcagcgggaaaagctcg

SEQ ID NO: 67041 - DNA, 334 bp, Zea mays
agacgctggagcaggcgttcagggagtgctccagggggaaaccttcttcggcggcgacgcgtcgggctcgtggacatcgcgctcgggagcgtcgtggtgtaggatcagggtagtggacgaggcagccggcgtaaagcttctagacgaggccaggttcccggccttgacgagcgtgggcggacgcttcttagcggtggacgccgtgagggaggtgatgccggacgctggaaggctattagagcactacaaggggtttctcgcgaaacgggcttcaccttcacctactggttactgatcgctgtaacagcagctcagtgtcctgtactttctgtcg

SEQ ID NO: 67042 - DNA, 362 bp, Zea mays
atctataccctatacgtaactcggaatcggtcgagtccaccgcgctcctcagcgccagctccggcgatatgtcacgcttcggtcgatccggtccgccgccgccgatccgcgacacatattcactcctcgtcctcaacatcaccttccgcacgactgctgatgacctcttcccgctcttcgacaagtacggcgagattgtcgacatctacatcccaaggtccgcaggactggtgactcgcgcggattcgcgttcgtgaggtacaagtacgaggacgaggcacagatggcagttgataggctcgatgggagattggtagacgggagggagatcatggtgcagtttgccaagtacggtccaaatg

SEQ ID NO: 67043 - DNA, 327 bp, Zea mays
cagaagagcggcggcgcggacggacaaggagcaggcggaagaggagttgtgccaaggcacaatgggtatctcgcgtgactcgatgcacaagcgccgagccaccggtggaaagcagaaggcctggaggaagaagcgaaagtatgagcttggtcgccagccagccaacaccaagttgtcaagcaataagaagttaggagggtccgtgttcgtggaggtaatgtgaaatggagggctcttcgccttgatactggtaactactcatggggaagtgaactgttaccgcaagaccgtatcctcgacgggctacaagcgcaaacatgacttgtg

SEQ ID NO: 67044 - DNA, 353 bp, Zea mays
aagacattcagcggcaaggatgtggtaattgttgctacacggaggattgtggaggccacccaagaagggttcagctgttctgcgccctcgcaccaggactctgactgctgttcacgatggcatcttggaggatgttgtctacccagctgagattgtggggaagcgtgtcagataccgtctggatggttcaagattatcaactttttcttggacccaaaggagaggaacaacactgaatacaagctggagacctgcactgcggtctaccgcaggctgtgtgggaaagatgtggtctttgagtaccctatgaccgaaaatgcataaatatgatgccctctggatatctccactct

SEQ ID NO: 67045 - DNA, 339 bp, Zea mays
gatcactctactccaaccactccgcgggatcgtaccttacccagccttcttcctcgtcgccggctcgccatgtcggcggcgttcaaggcgttcctgaatagcccagtgggccccaagacgacccacttctggggacccgtctcgaactggggcatcatcctcgcgagcgtggctgacacgaaaaatgcctctgagatgatatccggccctaaaccatagtctgaccgaacaagcatgctcctgcttcggccgtacaatactacaatgtactcggttgtaccacaaaggcaatatttgatgcatgtacgtaacgtgaaaaaagcctcggttatacatgtt

SEQ ID NO: 67046 - DNA, 379 bp, Zea mays
tagtctgcgatcgctcgagatgaggtacagcaaagctgtgggacttgcgtcagagaggtgcaatacaaactcttcccgacaaataccagatcacagccgttagcttctcagaggcagcagataaggtattcactggtggcctggacaacgatgtcaagtggtgggatcttcgcaagaatgaaacgacagaatatctcaaaggacatcaggactgatatctgggatgcagcttagccctgatgggtcttacctcctgaccaatgcaatggacaatgagctcaagatctgggatctgcgcccttacgcaccagagaaccggaacatcaagactcttacaggtcaccagcataactttgagaagaacctactgagtgtagct

SEQ ID NO: 67047 - DNA, 355 bp, Zea mays
atgatggtacagcaaagctgtgggacttgcgtcagagaggtgcaatacaaactcttcccgacaaataccagatcacagccgttagcttctcagaggcagcagataaggtattcactggtggcctggacaacgatgtcaagtggtgggatcttcgcaagaatgaaacgacagaatatctcaaaggacatcaggcatgatcactgggatgcagcttagccctgatgggtcttacctcctgaccaatgcaatggacaatgagctcaagatctgggatctgcgcccttacgcaccagagaaccggaacatcaagactcttacaggtcaccagcataactttgagaagacctactgaagt

SEQ ID NO: 67048 - DNA, 352 bp, Zea mays
gatcactctactccaaccactccgcgggatcgtaccttacccagccttcttcctcgtcgccggctcgccatgtcggcggcgttcaaggcgttcctgaatagcccagtgggccccaagacgacccacttctggggacccgtctcgaactggggcatcatcctcgcgagcgtggctgacacgaaaaagcctctgagatgatatccggccctaaaccatagtctgaccgaacaagcatgctcctgcttcggccgtacaatactacaatgtactcggttgtaccacaaaggcaatatctgatgcatgtacgtaacgtgataaaagcctcggttatacatgttgtaggttcatctgc

SEQ ID NO: 67049 - DNA, 323 bp, Zea mays
aagagattcagcggcaaggatgtggtaattgttgctacacggaggattgtgaggccacccaagaagggttcagctgttctgcgccctcgcaccctgactctgactgctgttcacgatggcatcttggaggatgttgtctacccagctgagattgtggggaagcgtgtcagataccgtctggatggttcaagattatcaagattttcttggacccaaaggagaggaacaacactgcatacaagctggagacctgcactgcggtctaccgcagctgtgtgggagagtgtggctttgagtacctatgacgatatgcataatatgtg

SEQ ID NO: 67050 - DNA, 351 bp, Zea mays
gtttaccattcctccccaaaacacatcctgcgatcctcgaagcctccgccgagcatcgatcatgtcggcctactgcggcaagtacgcggatgagctcatcaagaatgctgcctacatcggcacccctggcaagggtatccttgctgctgatgagtcaactggcaccattggcaagcgcctttccagcataatgtcgagaacgtggaggagaaccggcgggctctccgtgagctcctgttctgctgccctggtgccctccagtacatcagcggtgtgatcctcttcgaggagaccctctaccagaagaccaaggatggcaagccttttgtcgatgtcctcaaggagggaggc

SEQ ID NO: 67051 - DNA, 350 bp, Zea mays
aggacatcgacgcagggatgaagctgggcacgaaccacccgatgggccctctgcagctcgccgacttcatcggcctggacgtctgcctctcagtacttcgggtactccacagcggcctgggagatagcaagtacagcccctgccctctcctcgttcagtacgtcgatgctggccggcttgggaagaaggtggagtaggcgtgtattcgtatgggcacaggccttcgtccgtcaggccgaagtcgtctctgtaggcgtgagagcaaactgttgggcgaataaaaccaggtgcgtgttgcaattgcacgtcagagaaaaagggagcacagcctagttcagaggtactcagtc

SEQ ID NO: 67052 - DNA, 349 bp, Zea mays
ggcgcagagaatccccaagcaaacaaacagggtagaggtagagggagaggagaggagaggagaggagaggagaggttgggtctgggacaccatggctccgatgaagctgtacggggcggtgatgtcgtggaacgtgacgaggtgcgcaacggcgctggaggaggctggctccgactacgagatcgtcccatcaacttcgccaccgccgagcacaagagccccgagcacctcgtccgcaacccgtttggtcaggttccagctctgcaggatggtgacttgtacctcttcgaatcacgcgcaatctgcaagtacgctgctcgcaaaaacaagccagagctgttgagggaag

SEQ ID NO: 67053 - DNA, 345 bp, Zea mays
cttcttgttaggcaaggcaaaagcagaagcagaaagagaaaggtcttgttgccgatggggagctcagggttctcgtggacgcttccggaccaccccaagctccccaaggggaaaccggtggctgtcgtcgtgctggacggatggggcgaggccaaccccgaccagtacaactgcatccatgtcgctcgactcctgtcatggactcgctaaagaatggcgctcctgagaaatggagactagtgaaggctcatggaacagctgtgggcctcccatctgatgatgacatgggcaacagtgaagttggtcacaatgcacttggtgctggtcgaatatcgccaaggtgct

SEQ ID NO: 67054 - DNA, 353 bp, Zea mays
gaataaattcagatccacatgacataatggcagaggtctacaaaaatggtcctgtagaagttgctttcacagtttacgaggatttcgcacactacaaatctggagtgtacaagcacatcaccggtggcattatgggtggccatgccgtcaagttgattggatggggaaccagtgatgctggagaagattatggcttctggcaaatcagtggaatagaggctggggcgatgatggatacttcaagatcataaggggcaaaaatgaatgtggcatcgaggagggcgttgttgctggaatgccatccacaaagaatatggttccaaacttcggcggtgcgattggaagagctatag

SEQ ID NO: 67055 - DNA, 388 bp, Zea mays
agctcctcaagcgcaagtacggctcgagcggctcgaggacaacccgtcagcccctctcgtttttcatccgccttcgcctccaaccgcgtgcgctccacgcctcctccaggaaagcgagagcttctgcataagaacaacaaatcaaaagcgtgatcagctcggtgccaacaaaacctcaacaaccaagtttcatgtctgatctcgacgtccagcttccattgcctttgatccgtttgctgaggcaaatgctgaggactctggtgctggtcctggaacgaaggattatgtgcatgtgcgcatccagcagcgcaacggcagaaagagtctgactacagtcgagggtcctgaagaggagctcagctataacaagatcctcaaggatctgaag

SEQ ID NO: 67056 - DNA, 287 bp, Zea mays
ctgctcgagggaaggttgatatgcttgcaggtgtgaccatcttgcgttcagagaaggtcaaggatgaacttgatcttgaaagcaatgatattaaggttgtactctcgctccgctgatctcataaaccagaaatgccatgtcaagaagaaggatatccggaagttcttggacggtatctatagtgagacaaaggccccatctctgatgagcaatgagctgctctttgttcctgagctagcaaaatccgtgttaagctgtggccagtagactgtgtgcagagtggatgt

SEQ ID NO: 67057 - DNA, 347 bp, Zea mays
ataagattcactttgtcgctggtgacatagtgaaggttggtgaaactttactgaaaatggttgtgggtgacagccaaattgtttccccagataatatagttccatccgctggtaagtcccttggagtagagtctgcagttttctcaagtgaaggcaatgttcctggtggaaatctctctacacagctgttaggcatctagcaaagcagtatgggatcagcataaatgaaattgttgggacagggaaagatggtagggttttgaaagaagatgtgttgaattatgctgtcagcaaaggtgtttgcaaacaacaatcgttagcttcggaagggaacattggtcaagttg

SEQ ID NO: 67058 - DNA, 336 bp, Zea mays
ggccaattagccagcaaaagtttgcctcaaatgtcattgagaagtgcttagcctttggaaatcctgtagaacgtcaggttctgattggtgagatgcttggatccactagcgaaagcgaacctcttgaggtaatgatgaaagaccagtttgcaaactatgtggtgcagaaggtgctagaaactttgacgatcagcagagggagatgatcctaacaaggataaagacacacctgaacacactcaagaagtacacatacgggaagcacatagtagcgcgtgtagagaagcttgttgctgctggagagaagcgccttgggcttcaaccagcatgcacgcg

SEQ ID NO: 67059 - DNA, 312 bp, Zea mays
aaggagggccttcggctccacccacccttgccgctcctgctcccacgggagtgccggagctcgtgccaggtccaggggttcgacgtgccggcgggcagatcgtgttcgtgaacgcgtgggcgatcgctagggaccccagccactgggacaggcctgaggagttcgtgcctgagagatttgaagcagcagcgtcgacttcaaggggacggacttcgactacctaccgttcggggcaggacgaaggatgtgcccgggcatggcgtttgggctcgtgagcatggagcttgcgctcgctagcctcctctaccattt

SEQ ID NO: 67060 - DNA, 343 bp, Zea mays
gaataaattcagatccacatgacataatggcagaggtctacaaaaatggtcctgtagaagttgctttcacagtttacgaggatttcgcacactacaaatctggagtgtacaagcacatcaccggtggcattatgggtggccatgccgtcaagttgattggatggggaaccagtgatgctgagaagattactggcttctggcaaatcagtggaatagaggctggggcgatgatggatacttcaagatcataaggggcaaaaatgaatgtggcatcgaggagggcgttgttgctggaatgccatcgacaaagaatatggttcaagacttcggcggtgcgttggga

SEQ ID NO: 67061 - DNA, 331 bp, Zea mays
tcctcgccgaggggagcaccacaagaaggacggcggggagcacaaggaaggcatcgtggagaagatcaaggacaagatcaccggcgagcacggcgacaagtccggcgaccacaaggagaagaaggacaagaagaagaaggataagaagaagcacggcgagggccacgaccacgacggcgccacagtagcagcagcagcgacagcgactgagatctggtgtcgcagcacaggtgcaacacaagtatgcttgctggatggaggattcataccagctgatgctgatgtagtgtttcactggtgtcatgcatgcatgtatcgtgctattataatc

SEQ ID NO: 67062 - DNA, 309 bp, Zea mays
gtccagggcaagagcatcgaggactgcgtgacggctggttgctacgccgccaatgttatcatccagcgcccaggttgtacctacccagagaagcctgacttcaactagtgcaatactcaggcacgttacgagcggttcggcgtgtacactcccctgtatcctttccggtccggccaatttttgtcgccgtgatatttgttcagcaactatggacgacgtcgcctctgttctgtacgaggcatggtttgccatcattattctgttagcttcggcgatgcttgcaatgcgacgagaatgcgttggaaccat

SEQ ID NO: 67063 - DNA, 339 bp, Zea mays
gatcctgttgtgcagaggcaacggtttgaggaacaactaaaggaccgtcaatctggtgatgacgaagctatggctttggacgaaacattctgtactgcccttgagtatggtttggcaccaacaggtggttggggcttgggaattgatcgcctcacgatgttgctaacagattctagaacattaaggaagtacttctattcccggctatgaagcctcaagagtagtaatccacagccaaaagccacaaaaggctcaaagcaaacatgatgctacataggctggaggatacatcaaagttggacctgttgtgaattatactgtattttgctcttgtgcgtg

SEQ ID NO: 67064 - DNA, 341 bp, Zea mays
cgagaagagcggcggcgcgggcggacaaggagcaggcggaggaggagctgtgccaagccacaatgggtatctcacgcgactcgatgcacaagcgccgtgccaccggtggaaagcagaaggcctggaggtagaagcgaaagtatgagcttggtcgccagccggccaacaccaagttgcaagcaataagacagtgaggagggtccgtgttcgtggaggtaacgtgaagtggagggctcttcgccttgatactggtaactactcatggggaagtgaagctgttacccgcaagacgcgtatcctcgacgtggtctacaatgcatcaaacaatgagcttgtgagga

SEQ ID NO: 67065 - DNA, 343 bp, Zea mays
accagatatgctggttatgggaaaaggtaaaatcaacagaagacagagattttcaaagattcctggacaacgtgcaatacaaaacaagtgggatattacgttatgagcgtgtctttggtgaaggttttgtgagcactggtggaatcgagactacaaaggaattagtgggcatgctcgatcttaaaccgccagaaagtacttgatgtcggatgtggaattggaggcggcgacttttacatggctgcaaactatgatgtccatgttcttggtattgatctttcggtgaacatggtttcatttgcaattgaacgtgccattggacgcaagtgctctgttgaattcg

SEQ ID NO: 67066 - DNA, 338 bp, Zea mays
ttgctgaattccaccagatagagggacttatctgtgattatggtttgacacttggtactctgattggtgtattggaggatttcttctcaagtctaggcatgtccaagctgcgtttcaagcctgcctacaatccatatactgaacccagcatggaaattttcagttaccatgatggtttgaaaatgggtggaagttggtaattcaggcatgttcaggccagagatgttgcttcccatgggactgccagaaggtgttaatgttattgcatggggtctttcacttgaaaggccaacgatgatcctttatggtatcgacaacataagggacctgtttggacc

SEQ ID NO: 67067 - DNA, 341 bp, Zea mays
  unsure (1)..(341): unsure at all n locations
gtgaaagtggtgttgatcaactggtggaaatcataaagattttgggtactccaacaagagaggaaatcaggtgcatgaatccaaattattctgaattcaagttccctcagataaaagcccatccatggcacaagctttttggtaagcgcatgccacctgaagctgttgatctcgtgtcaaggacttcagtactcaccaaacctgcgctgcactgctgttgatgcttgtgcccatccattctttgatgagctgcgggaccccaaggtctgcttgccaagtggacgaccgctgccagcgctgttcgacttcacagcagccgaactcgaagggctcncaatcga

SEQ ID NO: 67068 - DNA, 341 bp, Zea mays
gtaccttgcaaggaagctggctggtgatccgaaccttcactttgttgaagctgttgctcttaagcctccggaagttaccatcgacatggctatgcagcagcagcatgaagctgagcttgctgcagcagctgcacaacctcttcctgatgacgatgatgatctgattgagtagaaaggatcatagtcttggacttgagcaggagttgtgccttgcacgatttaagttgttctagggtggactctctcttgagttatcattgtctggatcatttttttctccttggacttgttgcaacttttgagtgtggaaatggattggaatagtcgccatgaatttgctg

SEQ ID NO: 67069 - DNA, 342 bp, Zea mays
gagaatgtggcgagggagatcataaaccaccgctcgttgcggcaccccaacatcatccgcttcaaggaggtcgtgctcacgcccacgcacctcgctatcgtcatggagtacgccgccgtcggggagcttttcgacaggatctgcagcgccgggaggttcagcgaggacgaggcgaggtattttccagcagcttatctgcggtgtcagctactgccacttcatgcaaatttgtcaccgggacttgaagctggagaacacgctgttggatggcagcccggcgccgcgcctaaagatctgcgactttggctactctaagtcatcgctgctgcactcaaagcttaa

SEQ ID NO: 67070 - DNA, 337 bp, Zea mays
ccaaccgcgtgcgctccacgcctcctccaggaaagcgagagctactgcataagaacaacaaatcaaaagcgtgatcagctcggtgccaacaaaacctcaacaaccaagtttcatgtctgatctcgacgtccagcttccatctgcctttgatccgtttgctgaggcaaatgctgaggactcgtgctggtcctggaacgaaggattatgtgcatgtgcgcatccagcagcgcaacggcagaaagagtctgactacagtccagggtctgaagaaggagttcagctataacaagatcctcaaggatctgaagaaggaattctgctgcaatggtactgtagt

SEQ ID NO: 67071 - DNA, 340 bp, Zea mays
gataaaattggaacgatacagagaagattagcatggcccctgcgcaaggatgacacgcacaaatcgagaaatggtccaaatttttgtcaaggggactcaatttgatcttgtggaatatctacaacgagaaaggcaagggtctgctcgtctagagaattttgcttctgcactcgaactgattgacaaaagctccaaatggatacactgcaaagtcgacttgatgcagagttccttctagctcatatgtgttcagtcaagtttaaggaatggatcgtggtgctagctactttattgcggcgtgcagaggttttggtggatctctttaggcatgatttgcgat

SEQ ID NO: 67072 - DNA, 346 bp, Zea mays
gttggaggcacctgccacagccatgcgacgaaggatctatatgattccatcgcagctgggaattaccctgaatggaagctctacatccagactattgatcttgaccatgaggataagtttgactttgacacgctcgatgtcaccaagacctggcctgaggatatcatcccgctgcagcccgttggacatggtcctgaacaagaacgtcgacaacttctttgcagagaatgaacagattcctttctgcccaccgattatagttcctggacttcagcattctgatgataagctgctccagacgagaatctgctcctatgctgatacccagaggcaccgccttggtcca

SEQ ID NO: 67073 - DNA, 334 bp, Zea mays
agagcgtcgtcacaactggccgcaagatcattggcgccactaaccccctggcttctgagcccggcaccatccgtggcgactttgctgtcgacattggcaggaatgtcattcatggaagtgacagcattgagagtgctaataaggagattgccctgtggttccccgagggccctgctgattgcagagcagccagcaccactggatctacgagaagtaaacatggaaagtttcacatcaaaccttgagagccagaggaaaaatgtcaccatttgtgctttagcaatgttttcgagaagattatgatctgtatcttggaaccttatttcaatggacc

SEQ ID NO: 67074 - DNA, 338 bp, Zea mays
  unsure (1)..(338): unsure at all n locations
gtcncggtcccaacaaagatcgttgatcctaaaactggagaggagaaggaagttgtgatatcagttgatgatgggattaggccagggaccacagcatctggattggcgaaactgaaaccagtttttaaaaaggatggaactacaactgcaggcaattccagtcaagtgagtgatggtgcgagctgttcttctcatgaaaagatctgtggctctgaagaaagggctgcccattcttggtattttcaggagctttgcagctgttggagtggatccagctgttatgggcgttggtcctgctgtggccattcctgctgctgtgaagtctgcaggccttgaga

SEQ ID NO: 67075 - DNA, 337 bp, Zea mays
gagagaaggaatccgatccatccaagccaagccaaggcagagaagaagaagaagaggaggaagaagaagcatcggcagcatgtcggaggggactgccaactgcgtggacatcctgatcgccatcatcctgcctccgctgggggtgttcctcaagtacgggtgcggccacgagttctggactgcctcctcctcaccttcctcggctacatccccggcatcatctacgccatctacgccatcaccaagaacaactagctagtcatccttgccgacgacgatccatgtctctgtatctgcgtctgttcataatgctgatgccgacttgtgctgtatgtag

SEQ ID NO: 67076 - DNA, 332 bp, Zea mays
ggaacagagcgaggcgacgccgcggcacctcttctccggcgaagggaaatggcaaccgttccaggggatctgatctggcaggttgtgaggaagaacaactccttccttgtgaagcagttcggcaacggcaatgccaaggtgcagttcaccaaggagccgaacaacctctacaacatactccttcaaacactcgggtttggcgaacaagaagactgtgacgatccagccagctgcaaaggactcggctgtggtcctctctactaccaagaccaagaagcagaacgcacctgcgaagctcagccacaagtctgtgatgcgcaaggagttccgca

SEQ ID NO: 67077 - DNA, 295 bp, Zea mays
  unsure (1)..(295): unsure at all n locations
cgcgacacaaccagaccaccaaacacgtcccagccccctctcgcagtcgccgcaatggagagcaccttcatcatgatcacccctgacggcctccagaggggcctcattggtgagatcatcagccgtcttgagaagaagggcttctacctcaaggccttgacgcttgtcaacgtggacgtcgtttgccgagacgcactacgccgatctcgcctccaagcccttcttccagggcctcgttgactacatcatctctcgcnctgtcgtggccatggtctgggaggcgaagagggtcgtc

SEQ ID NO: 67078 - DNA, 338 bp, Zea mays
caacagcatcatggcgctcaccacgagcactaacaaccaagccttgcatgacgctcagctagagctctggcacacatcctttgcttgcatcaagtccatggctctcaagactgcagtggaccttggcatagccgacgccatccacagccacggtagcagggccaccctgccccagatagttcagggccgcgctcacaccgtccaagatcccctgcctgcgtcgcctcatgcgggtgctcacagccgccggcatctttcagtcggcgcccacggctcgccggacgacagcggcggcgagctcgtcttatggactcacaccggcgtctcagctcttggtt

SEQ ID NO: 67079 - DNA, 312 bp, Zea mays
ataaggatattttcttgggcgttcttcggcttcattgtcacaaggttcgagttcgtcaccgtctagtacgactgtgcgagggaggaagaggcgaggagaagatgcagatcttcgtgaagaccctgacggggaagaccatcaccctcgaggtggagagcagcgacaccgtcgacaacgtcaaggcaaatccaggacaaggcagggattcccccagatcaacagcgactgatattcgctggcaagcagctggaggatggacgcacgctggctgactacaacatccaaaatgagtcaactcttcatatggtcctc

SEQ ID NO: 67080 - DNA, 347 bp, Zea mays
gtgagagtggtgttgatcaactggtggaaatcataaagattttgggtactccaacaagagaggaaatcaggtgcatgaatccaaattattctgaattcaagttccctcagataaaagcccatccatggcacaagctttttggtaagcgcatgccacctgaagctgttgatctcgtgtcaaggctaccagtactcaccaaacctgcgctgcactgctgttgatgcttgtgcccatccattctttgatgagctgcgggaccccaaggtctgcttgccaagtggacgaccgctgccagcgctgttcgacttcacagcagccgaactcgaagggctcccaatcgagcttgt

SEQ ID NO: 67081 - DNA, 331 bp, Zea mays
gtctcggtcccaacaaagatcgttgatcctaaaactggagaggagaaggaagttgtgatatcagttgatgatgggattaggccagggaccacagcatctggattggcgaaactgaaaccagtttttaaaaaggatggaactacaactgcaggcaattccagtcaagtgagtgatggctggagctgttcttctcatgaaaagatctgtggctctgaagaaagggctgcccattcttggtattttcaggagctttgcagctgttggagtggatccagctgttatgggcgttggtcctgctgtggccattcctgctgctgtgaagtctgcaggc

SEQ ID NO: 67082 - DNA, 332 bp, Zea mays
gagagaaggaatccgatccatccaagccaagccaaggcagagaagaagaagaagaggaggaagaagaagcatcggcagcatgtcggaggggactgccaactgcgtggacatcctgatcgccatcatcctgcctccgctgggggtgttcctcaagtacgggtgcggccacgagttcgatctgcctcctcctcaccttcctcggctacatccccggcatcatctacgccatctacgccatcaccaagaacaactagctagtcatccttgccgacgacgatccatgtctctgtatctgcgtctgttcatatgcctgatgccgacttgtgctgtat

SEQ ID NO: 67083 - DNA, 344 bp, Zea mays
aaggagggccttcggctccacccacccttgccgctcctgctcccacgggagtgccggagctcgtgccaggtccaggggttcgacgtgccggcgggcacgatcgtgttcgtgaacgcgtgggcgatcgctagggaccccagccactgggacaggcctgaggagttcgtgcctgagagatttaagcagcagcgtcgacttcaaggggacggacttcgactacctaccgttcggggcaggacgaaggatgtgcccgggcatggcgtttgggctcgtgagcatggagcttgcgctcgctagcctcctctaccattttgactgggagctgccgcctgggatgacggccg

SEQ ID NO: 67084 - DNA, 334 bp, Zea mays
  unsure (1)..(334): unsure at all n locations
aatcnccaaagcctccgacccccttcctctctccctccgccgccgctgcgcacgcagggaacaagcgacatgggcgtctacacctttgtgtgccgcaacaacggcggcgagtggaccgccaagcagcactccggcgagatcgaggcttccgccgctaccccatacgagctgcagccgcctcgtcgctgccgcctccgcggccgactctgactacggcgtccagtcgtccttctccatggtcacccccagctccgccgtgttccaggtgatcgtcggtgctgtcggtggtggtgcaatgatggtgagcggaggtggcggcggcggtgctgctgca

SEQ ID NO: 67085 - DNA, 334 bp, Zea mays
gcctcgtgtggccgtcgtctcccgttcggaacgccaagcccccctccggcgaaatggcccccaagcgaggtggcagggcgccggtgccggccaagaagaagacggataaagtgacgaaccctctgtttgagaagaggccgaagcagttcggcatcggcggcgcgttgccgcccagaatgacctgcaccggttcgtcaagtggcccaaggtcgtgcgtatccagcgccacgccgcatcctcaagcagcgcctcaaggtaccaccggcgctcaaccagttcacccgcaccctcgataagaacctcgctacgaacctgtttaagatgcttctcaagt

SEQ ID NO: 67086 - DNA, 326 bp, Zea mays
ccgcctccgacatcctactttcgtcctcacgagtgaccgataatccgccggcgctaagatgttggtttatcaagatctcctatctggcgacgagctcctgtcggattcattcacctacaaggagctcgagaacggcgtcctgtgggaggtcgagggaaagtgggtcacccagtcctgttgatgtagacattggtgccaatccatccgccgagggtggtgaggacgaaagcgttgatgacacagccgtgaaggtggttgatattgttgacacattccgtctacaggagcaacctccttttgacaagaaatcatttgtctcttacatt

SEQ ID NO: 67087 - DNA, 281 bp, Zea mays
cggctcgagaaacacttgcgccgccactgcctcacaggtaaggccgccatggtctccggttcaggcgtgtgcgcgaagcatcactagtggacgcgcgccaccacatgctaggccgtctctcctcgatcatagccaaggagctgctcaatgggcagaaggtggtcgtcgtccgccgaggagatctgcatgtctggcggcctcgtcgtcagaagatgaagtacctccgcttcctccgcaagcggatgaacaccaagccgtcccatggggccatccacttccgc

SEQ ID NO: 67088 - DNA, 328 bp, Zea mays
ctggacaccgtgactttatcaagaacatgatcactggtacctcccaggctgactgtgctgtccttatcattgactccaccactggtggttttgaggctggtatctccaaggatggccagacacgtgagcatgctctccttgcgttcacacttggagtgaagcagatgatttctgctgcaacaagatggatgcaaccactcccaaatactccaaggcacgttatgatgagattgtgaaggaagtctcatcttacctcaagaaagttgggtacaaccctgataagattgcatgtgtcccatctctggttttgagggtgcaacatgattga

SEQ ID NO: 67089 - DNA, 308 bp, Zea mays
gttaaggatgctaaatttcctgatttagaggttattcgcatgttgtgggatgtgctcatggaggctgttcagtggtctgggaagaaccagcagcaaaattccaatgcagcacttaggcaggtgaaagcttggactgagcttttgaatgctttttgcacgagtggcagactaactggaacttatacacaaagttcagacacagtgctatgaggatgctaagctgatgaagctgtttccggaaatcataagaacactgtatgaccaagatgtcctagctgaagatactatagtcctttggttccgtaaag

SEQ ID NO: 67090 - DNA, 328 bp, Zea mays
atcgtattggtcgtagtggtcgttttggtaggaagggtgttgccatcaactttgtgacccgcgacgacgaacgtatgctgtttgacattcagaagttctacaacgtgttgattgaggagctgcctgccaatgttgctgaccttctgtgatcaatttgaagaaaaaacaaacaaaaaagggtggtgagggaacctggtaaggattggttttgtcgaaataccgtgggagagggggtgataccgacggtggggggtttctatgttgaagtcgtggtcatggacaatttgtgatgttttctcctttatgccatgttttggaatttttgtag

SEQ ID NO: 67091 - DNA, 324 bp, Zea mays
cggggctctcttcgtcgtgcggcaactgcgcgaccgccgacgcccgacggcaggtgccccaggtcttcgtcgaccccttcgcaaggcctcggttccatccttcgacggaggcaccgcccgtcaacaggacttgatctactactcactagcggtgtagatgcgaagaggaacttgaccatgagcagcataggcacaggttacgatgtgtctgtcacgactttctcaccagatggtcgtgtcttccacgtcgagtatgccaccaaggccgtcgacaacagcgggactgttgttcggatcaagtgcaaagatggcattgtcctgggt

SEQ ID NO: 67092 - DNA, 311 bp, Zea mays
agatgctgttgttaatgcattggacaatgtcacggcaaggatgtacattgactccagatgtgtatatttccagaagccacttcttgaatcaggtactctgggtgccaagtgcaacacacagatggtcattcctcacctaacagagaactatggggcatccagagatccacgaaaagcaggcacctatgtgcactgtacattcgtttcctcacaacattgatcactgcctgacatgggctagatctgagtttgaaggtctacttgagaagactcccactgaagtaaacgctttcctgtcgaaccctggtgga

SEQ ID NO: 67093 - DNA, 330 bp, Zea mays
gtggacggccggctttacaaaacagaacgtgttcgaggcagccatcgagacctcatatctggtgctggagtccgccatggccgagctcatgaaccacaggcgcgtcatgaagaagctgcaacggaggtacgggcgtacggagcggagaagaagctggacatgatcagggagacgacctgagcagcctgccgtacctaaaggcgtccatgaaggaagcgctgcggctgcacccaccggtgcccctgctgctgccgcactactccaccgccgactgccagatcgacgggtaccacatcaccgccaacacgcgcgtcctcgtgaacggctggg

SEQ ID NO: 67094 - DNA, 334 bp, Zea mays
gtttggttgctcgctggagtttgtgaccaacaagtctcaggagggatcccagttctgtagaggatttggtggcattggtggcatgttgcgctaccagctggatatccgttcttttgatgagctttctgatgatgacgatgtgtatgatgactctgactagcaatcagccaatcatgccagtgctggcccatggaaggacgcaacagctcgacctcgccatacctacgcaggagcacacgaaaagcaactatccaaggattaatgggcatgggccagcgtcatcctcttcaagaggagcttaagactaagatgatcttgagtcacaatcatggga

SEQ ID NO: 67095 - DNA, 292 bp, Zea mays
  unsure (1)..(292): unsure at all n locations
gcgaaggcgaccctccctccttcgctccttccgcgccgcctcccggccgtcgccgccatggtgaagtactcgcaggagccgggcaaccctaccaagtcggctaaggccatgggcagggatctgagggtccacttcaagaacacaagggagacagcctttgcgcttcgggatgtctttgaccaaggctaagcgataccttgaggatgttattgctcacaagcaggcaattcccttccggagatactgntggggtgttggtcgcacgcgcaagctaagtcgcgccactccaatg

SEQ ID NO: 67096 - DNA, 325 bp, Zea mays
gaagggacgaccgagcggagtctagactcgagagcaacctcgacctcccggatctctctcccacccacgcctcgtcggcgccgtcgtctgctgcagcgatggcctcccccgacctgctcttcaatctgcggaacctcttctacctgggcgcctaccaggcagccatcaaacagcgacgtcccgggcctcgacgccgacgccgccgctgagcgcgacgccatcgtcttccgctcctacatcgccctcggctcctaccagctggtgatcagcgagatcgactcgtcagccgctacctcgctgcaggccgtgaagctgctcgcgctgt

SEQ ID NO: 67097 - DNA, 320 bp, Zea mays
cggataggtagcaccggagcaggtagaacgctgcacaatccccttcgccgccgccaagatggtgaacgttcctaagaccaagaagacgtactgcaagaacaaagagtgcaagatgcacacactccacaaggtgactcagtataagaagggcaaggatagcctgtctccagggaaagcgccgttatgaccgcaagcagtcaggatatggtggtcagaccaagcctgtcttccacaagaaggccaagaccaccaagaagattgttctgaagctgcagtgccagagctgcaagcactactcacagcacgccatcaagagatgc

SEQ ID NO: 67098 - DNA, 317 bp, Zea mays
  unsure (1)..(317): unsure at all n locations
cgatcccgcgcgacgacgcggcgacgagatcaacaccgtggacctctcccacaaaaagctgacgggcgacccctcccacctgttcgctgccggccggcccatcggcaaggtggacctgtcgtggaactacctcgacttcgacctgagccagatagtgttcccgccagatgacgtacctggacctgtcccacaacctcatccggggcaccgtgccgctgtcgctggagcggctgtcagttgnnaagaagctggacctgagctacaaccgcctgtgcgggccgctccccaaggggcacggcgtcatcaagcacgggtgc

SEQ ID NO: 67099 - DNA, 314 bp, Zea mays
tccacccgccgctcctcaagccccaagctccggcgatatgtcacgcttcggtcgatccggtccgccgccgccgatccgcgacacatattcactcctcgtcctcaacatcaccttccgcacgactgctgatgacctcttcccgctcttcgacaagtacggcgagattgtcgacatctacatccctagggaccgcaggactggcgactcgcgcggattcgcgttcgtgaggtacaagtacgaggacgaggcacagaaggcagttgataggctcgatgggagattggtagacgggagggagatcatggtgcagtttg

SEQ ID NO: 67100 - DNA, 353 bp, Zea mays
gccaaattgtttccccagataaatagttccatccgctggtaagtcccttggagtagagtctgcagttttctcaagtgaaggcaatgttcctggtggaaatctctctacaccagctgttaggcatctagcaaagcagtatgggatcagcataaatgaaattgttgggacagggaaagatggtagggttttgaaagaagatgtgttgaattatgctgtcagcaaaggtgtttgcaaacaacaatcgttagcttcggaagggaacattggtcaagttgagttactagaggaagggaaagcattactcgatgaggacttctatgaagataagacaaccttctcaggggataccagag

SEQ ID NO: 67101 - DNA, 338 bp, Zea mays
cacccaatgagcttacaccagatgaaatcaggcgttttgcaaggcttgatatcgaccctgagtccattacatggagacgggtgatggatgtcaatgatcgtttcctgagaaaaattactgttggacagggccctgaagaaaaaggtatggtgagagaaacaggctttgacatatcagtagctagtgagataatggctgtattagctcttacaacttcccttgctgacatgagagaaaggcttggaagaatggtgatagggaacagcaagtcaggtgagccgataactgctgatgatcttggtgttggaggtgcattgactgtcttaatgaaagtgcta

SEQ ID NO: 67102 - DNA, 351 bp, Zea mays
agctgctgtttctgcacttcaaaaccagccaattgtcaatgctgtcattgatggtgatgacatcatatacagagactacgtagacatcagtgttgctgttggcacttccaagggccttgtggttcctgttatccgagatgctgataccatgaactttgctgacattgagaaagggataaacaaccttgcaaagaaagcaactgagggggcgctctcaattgatgacatggcaggaggaacattcaccatctccaacggtggtgtctatggaagcctcctcagcacacctatcatcaaccctccacagtcgtctattctggggatgcattccattgtgcaacgccctgtggt

SEQ ID NO: 67103 - DNA, 347 bp, Zea mays
tcttgaataggggcatatcggagtttgtagtgatggcggcggacacagagcctctcgagatcctgctccacctccccttgttagctgaggataagaacgtgccatatgtgtttgttccatcgaagcaagctcttggccgtgcttgtggtgtgacaagaccggttattgcttgctcagtgaccagtaatgagggtagccagctgaaactacagatacagggtctcaaggactccattgagaagcttctcatctgatctgccgaagacctttcagtgtgatgggcctcatcgacacttttttcagaggcttggactggtgatggtgtcttgtttactttgcgcttttca

SEQ ID NO: 67104 - DNA, 310 bp, Zea mays
ctcaaggtcgtgctgcccgactgtgtccacatgctctgcatgcggtgctttgaggattggaacgcgaaatcgtactcctgccccttctgtcgcgcctgcctggaagaggtgaagccgggcagcctgtggatatacaccgacgacagcgacgtggtggacatggataccttgactagggagaacatcaggcggctgttcatgtacataaataagctgccacttgtagtcctacatgtagttgaccttgacgtttacaagtaccgcatcaagtaaaatgcaactgatccttccttggtgatgtgccattgtt

SEQ ID NO: 67105 - DNA, 343 bp, Zea mays
aagagtgtgggcagtgctgcgctcaagatggtggaggaagttcgtcggcagttcaacaacatccctgggctcatggaaggcaccacaaagcctgactacgcaacttgtgtcaagatctcaacggatgcatccatcaaggagatgatccccccaggtgctcttgttatgctcacaccactgatcgttgggattctatttggggttgagaccctctctggagtccttgctggtgcccttgtctctggtgttcagattgccattctgcatccaacatggtggtgcctgggacaagccaagaagtacatgaggctggagttcagacatgcccaggaccttggcccaa

SEQ ID NO: 67106 - DNA, 333 bp, Zea mays
agataataaggcataaatacaactgtgaacgggttgctggtcttgataaacacgatggaatatttttaattggagaactttgcttatacattattgagaacttctacattgatgattccaattgcatttgcgaaaagggcagtgaagatgagctctctgtcattgatcaagctttaggtgtgaacaaggatataatgggaggcagtgaatctcagttaaagtcacctaccacttggggtgggacagcaaaggtcttgcttggtggcagatcatgggcatataatggaggtgcttggggtaaggagaactttgcaacagtagcaactgcctcat

SEQ ID NO: 67107 - DNA, 345 bp, Zea mays
cggctcgagggaagagttcgatgcaacccggtggcttgatagatctctcatacgtctttgttcaagatttggggattaccggaaggatgatccctcttcatttagcctgcattcaaatttctcattgttccctcagtttatgtttaatcttcggcgttcacaatttgttcaggttttcaataacagtccagatgagacagcttatttcaggatgttactcaatcgtgagagtatcactaactcggttgccatgatccagccttccttgatatcattttcttttgattcacctccatctccggtatttctagatgtggcatcaatagcagcagatcgtatactgct

SEQ ID NO: 67108 - DNA, 346 bp, Zea mays
ctcagtacactgtattatggagagtttgacagtcgaggccctggtgcaaaccacacagcaagggttgagtggagcagtcagacaccagaacagtatgtcaaacacttttcaaccgagaacttcattcagggccatcaatggattgcgtactaactacagtgtaaattgttgttcttggatcagtgacttattggcacctaaagactgtctctagtaaactatgcagaataggagatacggaactatatatgacactgagaggagtttgaaataaggaatgtgatagaggatgagatagtgaatctgctggagatagcctaacagcacgatagtgaaaattttctgg

SEQ ID NO: 67109 - DNA, 90 bp, Zea mays
atttaacttatctgctgccgtcctgtaacgaattcgctaagttttagttcttttgtgctttgttaagaatataaacaatgaggtttcaat

SEQ ID NO: 67110 - DNA, 342 bp, Zea mays
ctgactctcacgcgactagggttctgtgcgtccacttccccgtcagcgcaatggaggtcgggggtcaagaagtgaagccaggagccacggtttcttgcaaagttggtgatggcttggttatccacctttcacaggctgcactgggggaatcaaagaaagcgagtgagaatgccattttgtctgttaatattgatgataagaaactagtgcttggaaccttatcagttgagttgcatcctcagatctcttgtgatcttgtatttgataaggattttgagctaccacacaattcaaaaacacgtagcgttttcttccgtggctacaagcgcctgttcctctgtt

SEQ ID NO: 67111 - DNA, 342 bp, Zea mays
cagcccccaaggccccaactacccccagtctcggaagagaactatccagaagcgcaagactccaaagccgtcgccttcctatccatcccttcctcgccacgggggtcgcctgagatcacataaacaatggtgaaggctgttgctgtgcttggcagcagcgatggtgtcaagggcaccatctttttcacccaagtgggagatggccctaccactgtcaccggaagtgtctctggcctcaagcctggcctccatgggtttcatgtgcatgcgcttggtgacaccacaatggctgcatgtcaactggaccacactacaatcctgcgagcaaggtacatggagcac

SEQ ID NO: 67112 - DNA, 340 bp, Zea mays
  unsure (1)..(340): unsure at all n locations
cggctcgagcgccggcgagcccctcctcctccacgacacgcgcttccccggctatcatggattctgatccatcatcacagaacccaacagatatgactgcatttgtccagaacctccttggacagatgcaaacaaggttcgagtccatgtcgcagaacattgtgtcaaagatagatgaaatgggaaccaagattgatgagctcgagcagagcatcaacgatctcaaagctgagatgggcactgagacgccggtcaagaagcctgatgagccanagcatgctgactctgcctaacttgggtgtaaccagagattttgtgtgaagattgatgtggtgtgaca

SEQ ID NO: 67113 - DNA, 346 bp, Zea mays
gtctgcagcccccaactacccccagcctcggaaggaaccttccagaagcgcaagactctaaaggccgtcgccttcccattcttcctcgccgcgggggtcgcctgagatcacataaacaatggtgaaggctgttgctgtgcttggtagcagcgatggtgtcaagggcaccatctttttcaccccagagggagatggccctaccgctgtcaccggaagtgtctctggcctcaagcctggcctccatgggttccatgtacatgcacttggtgacaccaccaatggatgcatgtcaactggaccacactacaatcctgcgagcaaggagcatggggcaccagaagatgag

SEQ ID NO: 67114 - DNA, 333 bp, Zea mays
gcggcggcggctcgcaggagcaggagcaggatcaggcccaggggacctgcgacctgtacaagggccgctgggtgtacgacgagtcccgcgcgcctctgtacaaggagtccgagtgcagcttcctcacggagcaggtcacctgcacgcgcaacggccgccgcgacgacgactaccagaagtggcgctggcagcccgacggctgcgacctccccagatttgaggctaagttgcttctggagaagctaaggaacaaaaggctgatgtttgtgggtgattctctgaatcggaaccagtgggagtccatggtgtgcctggtccagtcagaggcaccat

SEQ ID NO: 67115 - DNA, 340 bp, Zea mays
  unsure (1)..(340): unsure at all n locations
cgcggcggcggctcgcaggagcaggagcaggatcaggcccaggggacctgcgacctgtacaagggccgctgggtgtacgacgagtcccgcgcgcctctgtacaaggagtccgagtgcagcttcctcacggagcaggtcacctgcacgcgcaacggccgccgcgacgacgactaccagaagtggtgctggcagcccgacggctgcgacctccccagatttgaggctaagttgcttctggagaagctaaggaacaaaaggctgatgtttgtgggtgattctctgaatcgganccagtgggagtccatggtgtgcctggtccagtcagaggcaccatgggaca

SEQ ID NO: 67116 - DNA, 338 bp, Zea mays
cgatcgggtttgatcgaggcgtcgaagaggatcctgaaggagttgaaggacctgcagaaggacccgcccacctcatgcagcgcaggtcctgttggtgaggacatgttccattggcaagcgaccatcatggggccttcggacagcccatttgcaggtggggtattcttggtgaacattcacttcccaccggattaccctttcaagccaccaaaggtgtctttccgcaccaaggttttccacccgaacatcaacagcaacggcagcatttgccttgacattcttaaggaacagtggagccctgctttaactatctcataggttctcctgtcaatctgctc

SEQ ID NO: 67117 - DNA, 304 bp, Zea mays
ggcgcgggcgcggaggtgactgcgggtggcgtcttctgcgacatcctgcggctggcgtcttaccttggcgctccttcttagagcttccacttacagttgtcaatttgaagaggcagatggacagtgccctgcatgatgcctccgtgtttaggcttattatggacttgctcaaagttgttctgaataagtgccaggaaataaggcctctatcttatttaggcctctatcttcggggtagctgactaagtgttgttattgctacggaatccagaattctgtgaattgacatgaattgtacccgatg

SEQ ID NO: 67118 - DNA, 281 bp, Zea mays
atgcctccgacatcctactttcgtcctcacgagtgaccgataatccgccggcgctaagatgttggtttatcaagatctcctatctggcgacgagctcctgtcggattcattcacctacaaggagctcgagaacagcgtcctgtgggacgtcgagggaaagtgcggtcaccaaggtcctgttgatgtagacattggtgccaatccatccgccgaaggtcgtgaggacgatagcgttgatgacacaccgtgaaagtggtccatatgatgacacattcgtctac

SEQ ID NO: 67119 - DNA, 341 bp, Zea mays
tctcgagccgattcggctcgagaacaggtggagttttcaagcttgaactattcttgcctgagagttatccaatggctgccccactagttagatttctcacaaaaatttaccatcctaatattgacaagcttggtaggatatgcctcgacattcttaaggacaaatggagtccagctcttcagatacgaacagttctactgagcattcaggcacttctgagcgccccaaacccagatgatcctctctcagacaacattgcgaaacactggaaatccaacgaagctgaagctgttgagacagcgaaggagtggactcgcctgtacacaagtggggcatgacag

SEQ ID NO: 67120 - DNA, 338 bp, Zea mays
  unsure (1)..(338): unsure at all n locations
cggctcgagggtgtcattgccaccggcaagttctcaaatatcctgaaattctttgttaaggaggatgatccatccacgggtgaagctgaagatgatggtgtcgaggatgagtaccagcttgaagatcttgaaatcgtttctgctgattatatgttgaaggtgggagtatctaacttccgaaatgcctgggaaaacatggatccagagactgagcgagttgacgagtatgggcttggagtaagggagagtttggctgaggctgtaagtgctgttataagcatccttggcatgcagccttgtgagggaactgacgtggtcncaagcaattcaaggtcgca

SEQ ID NO: 67121 - DNA, 329 bp, Zea mays
cctactttcattgcaggctggtgactctactccagaggagcttgccaccgctacccaggtccagggtgactacatgccatttactcgtggtgagaaacgttcagttgaggttgtgaaggtcacagatgagatgaagtcatttgctgcctatggcaagctccgccttgagcggatgaacaagatacatcttgttgtccgccagaagaaggcagctgaggcagagaaggaagataagaagtgaagcggttgaagatagtacctattttgttctattcagtcattagtgaatgctactacttaaagtgcttgttctatgtcttttttgcggt

SEQ ID NO: 67122 - DNA, 337 bp, Zea mays
  unsure (1)..(337): unsure at all n locations
cattagaaatcccagattctctaaacctcacgcacagcaccagcaacagtcagcatattcaacgtcacctccagttcagccctgaaccctctgcaatgaccgagtcttcatttggtgtgagttctgatgttgtcaccgcaacaactacatcagaacgtagccattctcgacatcctaagaaatgcaggttcatgggatgttccaaaggtgcaagaggcgcatcaggattgtgtattgcccatggaggtgggcagagatgtcataaacctggatgccataaaggagccgagagcagctctgncatactgcaagcccacggtggcggtcgtcggtgtga

SEQ ID NO: 67123 - DNA, 320 bp, Zea mays
  unsure (1)..(320): unsure at all n locations
ctcatgtagatgcgactacacaccatagtcgagatacaaatgggcgtcacgggtgtggaagagaagaggtacaaactcatggactgagtgagtacataggagcagctacttgggtgtgtcatacatcgagtacacataacacagaagcgtttgcccttctctctctctccacacggtgttcagtgtaattgctctggaaaagagacatgttgaacattgtaaaggaaaaactaataagggactgtaaaagtggcatgcgtactgtaacggataagngatacagactggggtgctcaatgcttattcagagcatattcgtc

SEQ ID NO: 67124 - DNA, 339 bp, Zea mays
aaggttcttgctgaagacaaccaatatgatatagtgagattctgtacaaatgacggccttgttcttctagctgatgaggtatatcaagagaacatctatgttgacaacaagaaatttaactctttcaagaagattgcaagatccatgggatacggcgaggatgatctccctctagtatcatttaagtctgtctccaaaggatactatggagagtgtggtagaagatgaggttacatggagattactggcttcagtgctccggtaagagagcagatctacaaggtagcttcagtgaacctgtgctccaatatcactggtcaaatccttgcgagcatcgtc

SEQ ID NO: 67125 - DNA, 323 bp, Zea mays
atgcctccgacatcctactttcgtcctcacgagtgaccgataatccgccggcgctaagatgttggtttatcaagatctcctatctggcgacgagctcctgtcggattcattcacctacaaggagctcgagaacggcgtcctgtgggaggtcgagggaaagtgggtcacccaaggtcctgttgatgtagacattggtgccaatccatccgccgagggtggtgaggacgaaagcgttgatgacacagccgtgaaggtggttgatattgttgacacattccgtctacaggagcaactccttttgacaagaatcacttgtctcttac

SEQ ID NO: 67126 - DNA, 329 bp, Zea mays
gccgtcgtgcgctcgctacgcctcaccctcgaggcctttgccggcgaagagcgctcagtcgtccaccaggatgacgtatgttgctgcctatctgcttgctgtcctcgcagggaactccagcccctctgccgaggacttgacatccattctggagtcagctggctgtgaagttgacaatgattagatggaactccttctgtcccagctgagcggtaaggatattatcgaactcattgccgccggcagggagaagattgcttcagtcccatgtggcgctcgcagtgtggctgtcgcggcagctgcgcctgctgctggcggcggcgtcgctc

SEQ ID NO: 67127 - DNA, 336 bp, Zea mays
ctactttccactccgcctccgctgccgatcgccgtccccgaccgcagtgcaggtgaggatccaaccccaacaaacttccaggcgacggactgaggatgagtgaagaggataaggctgctgcttctgctgagcagcctaagagggcccctaagctcaatgaaaggatcctctcctctctgtccaggaggtccgtagctgctcatccatggcatgatctcgagatcggtcctggtgctcctgctgtattcaatgttgttgttgagatcacaaagggaagcaaagtcaaatacgagcttgacaagataactggactgattaaggttgatcgagtccttt

SEQ ID NO: 67128 - DNA, 337 bp, Zea mays
agcgaggcgacgccgaggcacctcatctccggcgaagggaaatggcgaccgttccaggggatctgatctggcagattgtgaggaagaacaactccttcctggtgaagcagtttggcaacggcaatgccaaggtgcagttcaccaaggagcccaacaacctctacaatgtacactcctacaagtactctggcttagcaaacaagaaaactgtaacgatccagccagctgctggaaaggactcggctgtggtcctctctactaccaagaccaagaagcagaacacacccgcgaagctcagccacaagtctgtaatgcgcaaggagttccgcaagatggc

SEQ ID NO: 67129 - DNA, 334 bp, Zea mays
gctgactggcacagtcacaatcctcaactggtccttcgtccggaatgaccagccgaggtttgagacttgctaccagatcgctcttgcgatcaagaaggaagtcgaggatcttgaggctggtggtattcaggttatccaaatcgacgaggctgcactgagagaagggctgccgctccgcaaggctgagcatgcattctacttggactgggctgtccactccttcagaattaccaactgcgagatccaggacaccacccagatccacacccacatgtgctactccaacttcaacgacatcatccactcgatcatcgacatggacgcggacgtgatc

SEQ ID NO: 67130 - DNA, 326 bp, Zea mays
gctcgtctgacacagatggcaaagtacttcacagcatacaggatagaccacatcttgggtttctttaggatatgggagcttccagatcatgctgcaacaggtttagttgggaaatttagaccttccatccctcttagtcaggaggagcttctaagtgaaggtctatgggattttaatcggatgagccaaccatacattcgtcaggaaatactggaggagaagtttggatcctcttggacagtcattgcagccaattttctaaatgagtaccagaagcagtgttatgagtttaaagaagattgcaacacagagaaaaagattattgt

SEQ ID NO: 67131 - DNA, 337 bp, Zea mays
gatctccgatcccctcgtcgatccaaagatgcagatcttcgtcaagaccctcactggaaagactatcaccctcgaggtggagtcttctgacaccattgacaacgtcaaggccaagatccaggacaaggagggcatccccccggaccagcagcggctcatctttgctggcaagcagctcgaggacgggcgcacacttgccgactacaacatccagaaggagagcatctccaccttgtgctccgcctcaggggaggcatgcagatcttcgtcaagacactcactggcaagactatcaccctcgaggtggagtcttctgacaccatcgactacgtcaagg

SEQ ID NO: 67132 - DNA, 318 bp, Zea mays
tcggcttgcttgattgttccaggtattcgcagtcgaccgtgtcctcggagcacgatgaaggttgttgctgcctacctgcttgctgtcctcgctgggaatgccagcccctccgctgaggatttgactggcattctggagtcagttggctgtgaagttgacaatgaaaggatggaactgctgctgtcccaactgagcggtaaggacatcaccgagctcattgccgcgggcagagagaagtttgcttcagtcccatgtggcggcggcggtgtggctgttgcggcaagtgcacctgctgctggcggactgctcctgcagctg

SEQ ID NO: 67133 - DNA, 333 bp, Zea mays
agcgaggcgacgccgaggcacctcatctccggcgaagggaaatggcgaccgttccaggggatctgatctggcagattgtgaggaagaacaactccttcctggtgaagcagtttggcaacggcaatgccaaggtgcagttcaccaaggagcccaacaacctctacaatgtacactcctacaagtactctggcttagcaaacaagaaaactgtaacgatccagccagctgctggaaaggactcggctgtggtcctctctactaccaagaccaagaagcagaacacacccgcgaagctcagccacaagtctgtaatgcgcaaggagttccgcaaga

SEQ ID NO: 67134 - DNA, 318 bp, Zea mays
  unsure (1)..(318): unsure at all n locations
tcggcttgcttgattgttccaggtattcgcagtcgaccgtgtcctcggagcacgatgaaggttgttgctgcctacctgcttgctgtcctcgctgggaatgccagcccctccgctgaggatttgactggcattctggagtcagttggctgtgaagttgacaatgataggatggaactgctgctgtcccaactgagcggtaaggacatcaccgagctcattgccgcgggcagagagaagtttgcttcagtcncatgtggcggcggcggtgtggctgttgcggcaggtgcacctgctgctggcggactgctctgctactga

SEQ ID NO: 67135 - DNA, 142 bp, Zea mays
agaggacgaggcaaaggaggttggtcctcaggcgctggacttgaagcttccgttcggtgagatggatgttctccgggagaacttggagctgatcaagaggcagctgggccttgagcaagtcgaggtgctctccgcgtccgac

SEQ ID NO: 67136 - DNA, 137 bp, Zea mays
atccgcgcctatacatatcatctctctcagctcctccgactccgcctccgaatgatccatccaagacagggatcgccatgtcggactcggaggagcaccactacgaatcgaaggccgacgctaggggcgtccaagac

SEQ ID NO: 67137 - DNA, 144 bp, Zea mays
gcctgctcatactgcttgccctcgccgtatcgtccacccgcaacgcacaggaggattccatggccgacaacaccgggacgttggcgggcggcatcaaggacgtgccggggaacgagaacgaccttcacctccaggaactcgccc

SEQ ID NO: 67138 - DNA, 142 bp, Zea mays
atttgaatattgtgatgtggttaccacaaccacgcacaagtccctcagagggccaagggctggcatgatcttctacaggaaaggccctaagccccccaagaagggccagcctgagggtgctgtttatgattacgaagacaag

SEQ ID NO: 67139 - DNA, 137 bp, Zea mays
atgagagcaccctccacctggtgctccgcctcaggggtggtatgcagatttttgtgaagacagtgactggcaagaccatcaccgtggaggtggagtcgtctgacacaatcgataatgtcaaagccaagatccaggac

SEQ ID NO: 67140 - DNA, 140 bp, Zea mays
gacgaaattgctgatttactagagcttcatgatgtaattgatcttgtcattccaagaggcagcaataagctggtttcacaaatcaggacatcaactaagatccctgttcttggtcatgctgatggtatctgtcatgtata

SEQ ID NO: 67141 - DNA, 134 bp, Zea mays
tggcgatctcgtacccgacccttgctgctgtgctccacatgttcatcaatgggtacaagaatgtgcttgctgttgctgtcgagacagactactcatacccacatgctgacaagatcaaggagtacctcaaggac

SEQ ID NO: 67142 - DNA, 141 bp, Zea mays
ctttccacgtgcttctccgccgtcgaggccgcgtcacagtgcgacaagactccgactcagatggccagccgctgggtccggcccgaggtgtaaccgctgttcgcggcgacgggcgtggccgtcggcatctacaggtttcag

SEQ ID NO: 67143 - DNA, 128 bp, Zea mays
cctactttcattgcaggctggtgactctactccagaggagcttgccaccgctacccaggtccagggtgactacatgccatttactcgtggtgagaaacgttcagttgaggttatgaaggtcacagatg

SEQ ID NO: 67144 - DNA, 131 bp, Zea mays
gtcgatgctgctcttcgcaagatacgagacacatcagagtttgtccaatctgttgcatcagagcatcttaagacgccattaggcgaacgtgtgacaggtaataaaaacaagtccaccactgagttatgggt

SEQ ID NO: 67145 - DNA, 132 bp, Zea mays
caatcaatcatccactggtttggtacaagaccaagttcacacctcctgcaggtgatgatcctgtcgcgattgacttcacgggaatggggacaggtgaagcatgggtgaatggacagagcattggtcgatact

SEQ ID NO: 67146 - DNA, 135 bp, Zea mays
ccaggttgctcctcatttccactttccactgcggctccgctgcccatcgccgtccccgaccgcagcgcaggactgaggatgagtgaagaggataaggctgctgcttctgctgagcagcctaagagggcccctaag

SEQ ID NO: 67147 - DNA, 131 bp, Zea mays
gccgaagtcaattcctcatcgtcagatttttggattttagtggctgctttaaaggcgtttattgcaaaggagggcaacggtgagctacctctggagggaacaatacctgatatgacttcccttactgagta

SEQ ID NO: 67148 - DNA, 125 bp, Zea mays
tagattcttgctgacgacaaccaatatgatatagtaacattctgtacaaatgacggacttgttcttctagctgatgacgtatatcaagagaacatctatattgactacaagaaatttaactcttt

SEQ ID NO: 67149 - DNA, 126 bp, Zea mays
tgggcgtcaaggcggcgtgcccgaggcgatgctcgcctacaacctctcgccgtccttcaactgggacgcgtctgggatgacggacgccgagatggccgccttcatcccgagcgtcgcgcgcctcgg

SEQ ID NO: 67150 - DNA, 128 bp, Zea mays
atgcaattgatgctactaaagctgccaagaaagcacctgatgcattctatgcgctccgtctccttgaatcaactggaattgttgtagttcctggatctggatttggccaagttcctggaacatggcac

SEQ ID NO: 67151 - DNA, 130 bp, Zea mays
ttccctgacacgcgtgcccgcgtcctcggcaacaagtcggactacctcccgcccatcctcaccacataggctgcaggctgcaggcagcgccatggcttctctcctgtctggcctcagcttggtgcccctc

SEQ ID NO: 67152 - DNA, 131 bp, Zea mays
  unsure (1)..(131): unsure at all n locations
agganaaatatcaccaaaccctagctcccgatctcgatggcgaaccctcgcgtcttcttcgacatgaccgtcggcggcgccccggcgggccggatcgtgatggagctgtacgccaacgaggtgcccaagac

SEQ ID NO: 67153 - DNA, 173 bp, Zea mays
gaagaagattcctctttaccagcacatcgcaaatcttgctgggaacaaaactctggtgctccctgtacctgcctttaatgtgattaatggacggtcacatgctggaaacaagcttgccatgcaggagttcatgatcctcccaactggtgcctcctcgttcaaggaggccatga

SEQ ID NO: 67154 - DNA, 362 bp, Zea mays
gtgaagttcaagagaaggcgcgctggcaagacagactacagggccaggataaggctgattaaccaagacaaaacaagtacaatacacccaaatacagatttgttgtgcgatttaccaacaaggacatcacagcacaaatcatatctgctagtatagcaggtgatatggttcttgcttctgcttactcgcatgagttgccacgatatggtctcgaagttggtctgaccacctatgcagctgcctactgcactggccttctgttggctcgccgtgtgctcaagacccgtggtttagataaggaatatgagggcaatgttgaggccactggtgaggacttctctgttgagccagctgatgagagg

SEQ ID NO: 67155 - DNA, 362 bp, Zea mays
taaggccgtcgccttcccattcttcctcgccgcgggggtcgactgagatcacataaacaatggtgaaggctgttgctgtgcttggtagcagcgatggtgtcaagggcaccatctttttcacccaagagggagatggccctaccgctgtcaccggaagtgtctctggcctcaagcctggcctccatgggttccatgtacatgcacttggtgacaccaccaatggatgcatgtcaactggaccacactacaatcctgcgagcaaggagcatggggcaccagaagatgagaaccgccatgctggtgatcttggaaacgtgacagctggagcaaatggtgttgctaatatcaatgtcactgacagc

SEQ ID NO: 67156 - DNA, 308 bp, Zea mays
ctttgaggctactctttccttgcaagatcagcttaaagaatctcaagttgctctcttggtggagcaggagaaggcggaggcggctgtaaaagaggctgacgtcgccaaagcagcatgggcatgccgtatctgcctgaatgctgaggtcaacatgaccatcataccatgcggtcatgtcctatgtaaccgatgctcaagttcggtttcgcggtgcccattttgccggacgcaggtggccagaatgatgaaaatattcaggccataaaaaacattgaaggacgtttggtctgactaaccgcttcagcttg

SEQ ID NO: 67157 - DNA, 355 bp, Zea mays
cgcggctgacaacgccgggatgttggcaggcggcatcaaggacgtgccggcgaacgagaacgacctccagctccaggagctcgcgcgcttcgccgtcaatgagcacaaccaaaaggccaatgctcttctggggttcgagaagcttgtgaaggccaagacacaagtggttgctggcacgatgtactatctcactattgaagtgaaggatggcgaagtcaataagctctatgaagctaaggtctgggagaagccatgggagaacttcaagcagctgcaggaattcaagcctgttgaagagggtgctagcgcctaaggatctgtcgtctccctgtgacatttgctgcctgaagcgcaa

SEQ ID NO: 67158 - DNA, 281 bp, Zea mays
agctgatgcaaggtcattggtttcccaagcaaggaacgaagcagctgagtttcgtttcaaatggggctatgagatgccagttgatgtgttagcaaaatggattgctgacaaagctcaagtttacacgcaacatgcatacatgagaccccttggagtagttgctatggtcttgggctacgacggaagagaaaatgcacaactattcaaatgcgaccctgcgggtcatttctttggacatagggaactagtccggggctcaggggcaggaagcataaattttt

SEQ ID NO: 67159 - DNA, 221 bp, Zea mays
tgcagcacgcagtcgcttgcgcgcacagcacttcgcaccgccgccccatcccatcgccgccagcggctgctcgatccgatggctcacacgaagaagtcgaagaagagcacagagagcatcaacaacaagctgcagctggtgatgaagagcggcaagtacaccctgggctacaagaccgtcctcaagacgctgcgcaactccaagggaaagctgatcatcat

SEQ ID NO: 67160 - DNA, 309 bp, Zea mays
tgaatattgtagaacacgttaacacaattgctccaaggttccaggagggaatcaaggccttctcaggcagcccaattgttggggagatacgcggtctgggactgatacttggaactgaatttgtcgacaacaaatctccaaatgatccatttccagctgaatggggtgttggttcgatatttggcgcggagtgcgagatacgtgggatgctcatcagggtggctggggacagcatcatgctgtcacccccgctgatcatgactcccgatcgagtcgatgagatcataagcaaattcggcgatgctctga

SEQ ID NO: 67161 - DNA, 186 bp, Zea mays
cacttccatgtccttcgtatcaacaagatgctttcgtgtgctggggctgataggctccagactggaatgaggggtgctttggcagcctcagggcactgtgctagggtgacattggcaggtatccttctgtcgacgaagacacatgctgacatgcagtgagcctggacgcgcagtcagtccctgcgc

SEQ ID NO: 67162 - DNA, 196 bp, Zea mays
ctgcaggacactacgctgggctcactgctctcagcgcttatgcagcactgcgagcccccacagcggcgctacccgctcgagaagggcgttcctccaccgtggtggcctaccggcgacgaggagtggtggccggaactcggcattcccaaggaccagggcccacccccgtacaagaagcctcatgaccttaagaggg

SEQ ID NO: 67163 - DNA, 183 bp, Zea mays
ggcggctctggcgatgctcaagacgtacgagggcgtaccgccgccgtacgacaagactaagcgcctggtcatccctgacgctcttaaggttctgaggctgcaaccaggacacaagtactgcctccttggtgagctttctaaggaggtcggatggaactaccatgacaccatcagggagcttga

SEQ ID NO: 67164 - DNA, 179 bp, Zea mays
cgaagaaagaagagaaggtggaggagaaggaagagagcgacgatgacatgggcttcagcctcttcgactgagctgtgtgggctatcatcacatcagagtagtttgttttgttttgacttttgagtcgtggaaccagaggaaaatcgtaatcgttgcttggactttaacctcgttttatg

SEQ ID NO: 67165 - DNA, 193 bp, Zea mays
aatccagatgcgcaaacatcgaatcgtctcgctagtggctgccctactcgtgctgcttgcactcgccgccgtttcctccacgcgcagcgacaaaaggagtccgcggctgacaacgccgggatgttggcaggcggcatcaaggacgtgccggcgaacgagaacgacctccagctccaggagctcgcgcgcttcg

SEQ ID NO: 67166 - DNA, 239 bp, Zea mays
  unsure (1)..(239): unsure at all n locations
cggctcgagcacacaattaggtcacatacacacttcacggctgcctccctaggtagcagcttctacaatggaggcatccaacaagctcgcagtcttgctcctgtggctggtcatggcagctgccactgccgtgcacccttcctactctgangattcgcctcaagactacctcactccccaaaacagcgcccgatgcgccgtcggtgttggcccggtagactggagcacgagctgcagca

SEQ ID NO: 67167 - DNA, 193 bp, Zea mays
cacgccgccgccatcgcacgcccgcatccgcatccgctatgggtgcgtacaagtacgtctcggagctatggcggaggaagcagtccgatgtgatgcggttcgtgcagcgcgtgcgctgctgcggcgtacaggcagcagccggccatcgtccgcctcacaaggcccactcgtcctgacaaggcgcgacgcctcg

SEQ ID NO: 67168 - DNA, 178 bp, Zea mays
gtcgtgggatctcagccaccgccgctagaagaagagctcggcgattcccaggtcccgcgagaatatgccgaagcagatccatgagattaaggacttcctcctcaccgcgaggaggaaggatgcccgctcagtgaagatcaagaggagtaaggatgttgtcaagttcaaggtgcgctgc

SEQ ID NO: 67169 - DNA, 268 bp, Zea mays
ctcgagccgaatcggctcgagccctgacgcgcgcgctcagggccgggaccgtctgggtgaactgcttcgacgtcttcgatgctactgattccgtttagtgggtacaagatgagcggcatcgggagggagaagggcgttgacagcctgaagaactacctgcaggtgaaggcggtcgtcaccccaatcaagaacgccgcgtggttgtagacgctgcaagtgtggccttgtgcacgagaaccacgtatattcatttcctggtcacatcccg

SEQ ID NO: 67170 - DNA, 179 bp, Zea mays
ctggcttgagctggcttttgctatagcgtgcaaggggttgctgggtgtcgtacctacctgacttatcattatctgtggttacattctggaccctgtattttctatgctttcatgtctctctactttctagtattgctgatcaataagttggtttggaatggttgaaaaaaaaaacaaaa

SEQ ID NO: 67171 - DNA, 193 bp, Zea mays
gtcgtgtgatcccagacaccgccgctagatgacgagctcggcgattctcaggtcccgtgagaatatgctgaagcagatctcatgagattagggacttcatcctcaccgcgaagaggaagtgatgcgcgctcagtgaagatctagaggagtaaggatgttgtccagttcaatgtgcgctgctccaaatacttgt

SEQ ID NO: 67172 - DNA, 314 bp, Zea mays
gtcacttccaacactgtatgctgatcaaacttgccgagacatttgctgaggcagagtgtgcaacaaaggttgtaggtgttcctgtaactttaaatggggaccttaagaaccagtttgttgagacaaccgttggctttgacaccatatgcaaggtgaacgcacaacttatcagcaatgtatgcactgatgctctatctgctgagaagtattactactttattcgcctgatgggacgcaagcttctcatgtggcattggaatgtgctcttcaatcacatccagacatggttatcctaggagaggaagtggctgctt

SEQ ID NO: 67173 - DNA, 348 bp, Zea mays
caagaagggtgaaaaggtgggctcgtccgagtctgccctgctcgccaagctgggtatccgccccttctcgtacggcctccaggtcaccagtgtctacgaggatgggtccgtgttcagccctgaggtgcttgacctttccgaggaggacctgattgagaagtttgccactggtgtctccatggttgcctccctgtcactggcgatctcgtacccgacccttgctgctgtgccccacatgttcatcaatgggtacaagaatgtgcttgctgttgctgtcgagacagactactcgtacccacatgctgacaagatcaaggagtacctcaaggacccaagcaagtttgctgt

SEQ ID NO: 67174 - DNA, 315 bp, Zea mays
catccttgacgcagccgagactgccggtgtggagttgccatactcgtgccgtgctggggcttgctccacctgtgccggcaaaatcgagtctggttcggttgaccagtcggatgggtccttccttgatgacgggcagcaggaggaaggttatgtgctgacatgcgtctcctacccaaagtccgactgcgtcatccacacccacaaggaaggcgacctgtactagggctagggctttccaatttggcgagggacaaaaaatgctctcgagtggtgtgttgtcaagcaaagctcctccatctggccctacccgttgtg

SEQ ID NO: 67175 - DNA, 346 bp, Zea mays
ctctgacgctcttaaggtcctgaggctgcaacctggacacaagtactgcctccttggtgagctttctaaggaggtcggatggaactaccatgacaccatcagggagcttgaggagaagaggaaggagaaggctaaggtggcctatgagaggaggaagcagctggccaagctgcgcctaaaggctgaggttacagcggaggagaagttagggtcccagctggacattcttactccgatcaagtactgaatttgtggaacatctgatccatcgttttaaaagttgtgacagtataatcttgagtgctattccgaacacattttttagccggtgaatgtattgtttgtt

SEQ ID NO: 67176 - DNA, 342 bp, Zea mays
atccgcacctttgcttgcagtgagacagttaaatttggccatgtcacatttttctggaacggtaaccgttcgggatactttgatgcaactaaggaggagtatgtagaagtacctagtgacagtggtattacattcaatgttgcacccaatatgaacgcgcttgaaattgctgagaaagccagggatgctctcctaagtggaaagtttgaccaggtacgtgtcaacctgccaaatggtgacatggttggtcacactggtgatattgaggccaccgtagttgcttgcaaggcagctgatgaagctgttaagattattttggatgctgtcgagcaagttggtggt

SEQ ID NO: 67177 - DNA, 195 bp, Zea mays
caacgagtggggctacagcgaccgcgtcgtcgacctgatccgccacatgttcaagactctcttagctacagatatgtctgcctccctatcgtgggtcgtccccaatgctctttggtcgcttgcatctttgctgcttgtctatgctgtgactaaatgtgaacggtgcccctggacgctggatccatgctggttttg

SEQ ID NO: 67178 - DNA, 290 bp, Zea mays
ggcataccaagggtttgccagtggtgatccagagagagatgccaaggcaatccgaattttccttgaagatggacaccaaattggatgtgctcagtcatacgcaaagaacatgggactttatggacaaagagcaggatgcctgagtattttgtgtgaggatgagatgcaagcagttgctgtcaagagccaaatgcaacagatcgcaagaccaatgtacagcaacccacctgttcatggtgcactggttgtctctataatcctcagtgatccagaattgaagagttgtggtt

SEQ ID NO: 67179 - DNA, 347 bp, Zea mays
  unsure (1)..(347): unsure at all n locations
gtggacgtggacgaatgaaggaagtcaccgcggcctacgaggtcgaggcgatgccgaccttccacttcgtcaagaacggcaagacggtcgcgaccatcgtgggtgccaggaaggacgagctcctggcccagatcgagaagcatgccgcgcctgcgcctgcgtctgcgtctgcctaaaggagatcagtcgtcgccgtcaataagggccagcacgtatggctgtaaatgttgtcattatcagttctggctttgtcgtttgtgggcgattgtgaactagtagtatgtttgtttctatccgagccggagcantacttaaccatggatacttgttgtgagttcgtttctgtt

SEQ ID NO: 67180 - DNA, 174 bp, Zea mays
cgggaactgctcattccggggcctactgtcttcaccagacggatctaaagtatttgagacggcaagaagtggaccgtactctttcgacgacatggtcgagatgggcaaagacgctggccacgagctgaaggcgaaggctgggcctggcttcttcgatagccttcaatgaacaga

SEQ ID NO: 67181 - DNA, 344 bp, Zea mays
  unsure (1)..(344): unsure at all n locations
tgtgaagttgacaatgaaaggatggaactcctgctgtcccaactgagcggtaaggacatcaccgagctcattgccgcgggcagggagaagtttgcttcagtcccatgtggtggcggtggtgtcgctgttgcggcagcttcacctgctgcttccggactgctcctacagctgaggcaaagaaagaagagaaggtggaagagaaggaagaaagcgatgatgatatgggcttcagcctcttcgatagngctgcacagtcatcacagtattgtttcgggcagtgaaaccagaggaaaaccagagtcatgtttagattttaacttgttttatgttggacagtactgcta

SEQ ID NO: 67182 - DNA, 275 bp, Zea mays
  unsure (1)..(275): unsure at all n locations
canagttggaagggctggacgttttggcacgaagggacttgcaattacctttgtttcctctgcttcggattctgatgttcttaaccaggtgcaagaaaggtttgaggtagacataaaggaactgcctgagcaaattgacacctcgacctacatgccatcataaatgggaaggacaactgagaagagaggaggataggggagtgagcagccgtctgggagatggttacctttgaactatccgatctggaggatttgatttgcctcctttgtgtact

SEQ ID NO: 67183 - DNA, 231 bp, Zea mays
cgaagaaagaagagaaggtggaggagaaggaagagagcgacgatgacatgggcttcagcctcttcgactgagctgtgtgggcagtcatcacatcagagtagtttgttttgttttgacttttgagtcgtggaccagaggaaaatcgtagtcgttgcttggactttaacctcgtttatgttggaactattgaaagtcctactgcttaattggatcaccgagcgaatgctcaaa

SEQ ID NO: 67184 - DNA, 199 bp, Zea mays
gctccgggcgcgcatcgcgtcagcctcaaaggcctcacctacgcatactccgaggagaacctcgacgacaagagcgagcttctcctcagctccaaccccgtgctcaagaaggtgcccgtgctcatccaccacggcaagcccgtttgcgagtcccagatcatcgtgcagtacgtcgacgaggctttccccgccgccgcac

SEQ ID NO: 67185 - DNA, 298 bp, Zea mays
cgaagaaagaagagaaggtggaggagaaggaagagagcgacgatgacatgggcttcagcctcttcgactgagctgtgtgggcagtcatcacatcagagtagtttgttttgttttgacttttgagtcgtggaaccagaggaaaatcgtagttgttgcttggactttaacctcgttttatgttggaaactagtttgaaaggctcctactgtctttatatttggtaattcagccgtaggtcgacattgcctccaaaaaaaaaaaggtaaaagagaacaacaaaaaaaaggggggggccccc

SEQ ID NO: 67186 - DNA, 330 bp, Zea mays
cgcacaccagcacctgccctcctcgccgtcgccgcctccctccgcgcgaccgatctaccctccgccgccaccatgtcgctgatcgccggggaggacttccagcatatcctgcgtttgctgaacaccaacgtggatgggaagcagaagatcatgttcgccatgacctcaatcaagggtgtcgggcgccgcttctccaacatcgtctgcaagaaggccgacatcgacatgaacaagagggccggcgagctgacgcctgatgagctggagcgcctgatgacggtcgtggccaaccctaggcagttcaaggtgccggactggttcctcaacagg

SEQ ID NO: 67187 - DNA, 339 bp, Zea mays
cttcaaagtacaacaagttgatacaactggcgcaggtgacgcgttcgttggtgctctgctccaaaggatcgttaaagatccatcctcgctacaagatgagaagaagcttgtggagtcgattaaattcgctaacgcgtgcggagcgtccaccaccacgaagaagggggcgatcccgtcgctgcccaccgaagcggaggtcttgcagctaatagagaaggcttagatcatcatcgtcctgtacgccatggttttcaccagcttctacttcttcgaattgtattggattctgatatggaacagaagaagaagcggctgccccatcttaccagccctttttgt

SEQ ID NO: 67188 - DNA, 153 bp, Zea mays
cgccgactcgctcggacacccaaaggtcagccaggagctcaggtccatctggatagacctctcgcaatgcgacgcgtcgctggggatgagatccaccggctcacatgagcaacatgtgatgcatcatgcttgtgctgaataatgagacgcatg

SEQ ID NO: 67189 - DNA, 333 bp, Zea mays
gccattggcacaaagtcagtgagtatgcagaaagtgtggcatctaattcaggcattggttggggaagggttgactcatcgaaatgtttcaagaaaaatgtcactagtggtaggtgcaaggcaccatcttgagtggggtcatgaaaagtacatacttgagaccatcaacagccatccagctcttgctgcccttggtggatctgttggcaatcttcagaagatccgagcatttcttcgggtaaggctgcgggatcaaggtgtgctagactttgacgcaaccgatctacgcagacagcctccagtggatacaacctggcagcagatttacttctgc

SEQ ID NO: 67190 - DNA, 274 bp, Zea mays
caggtacgacgtcggccatctcatcccggcgggttatgatgttgccgcccacggcaacgactacgccgtctgggagaaagccggcgccgaacaagtgactcgagcataatagagtgctcgagataccgatttgattctcagtacaatgtacacgggactgcattgataaaataagtggtttctcctctaataagtaagggagcgcaaaagggcaattggagccatgcatatgtaaccttaaaatattgttgagtaaaatataaaggtgaacgct

SEQ ID NO: 67191 - DNA, 313 bp, Zea mays
cgacatcgtcccttcgtccccacgagcaaccgataatccgccggcgttgagatgttggtttatcaggatctcctatctggcgacgagctcctgtcggattcattcacctacaaggagctcgagaacggcgtcctgtgggaggtcgagggaaagtgggtcacccaaggtcctgttgatgtggacattggtgccaatccatccgccgagggtggtgaggacgaaagcgttgatgacacagctgtgaaggtggttgatattgttgacacattccgtctacaggagcaacctccttttgacaagaaatcatttgtgt

SEQ ID NO: 67192 - DNA, 332 bp, Zea mays
gctcgactacatccttggcaagaacccattgaagatgagctacgttgtgggtttcggaaacaagtaatcgaagcgccctcatcacagaggcgcgtcgatacctcacaacggcgtcaagtatgggtgcaaaggaggttacaagtggagggacacaaagacggcaaaccctaacagccttgtcggagcaatggtggctggccccgacaggcgtgatggctacaaagatgtccgcacgaactacaactacacggagcctactctcgcagcgaatgctggtctggttgcagcgtgatctctataccgatatcaaaccggacggtcggctcgataag

SEQ ID NO: 67193 - DNA, 339 bp, Zea mays
  unsure (1)..(339): unsure at all n locations
gcaatggcagctaaaaaaggatgcacaccatcacagctagcattggcatgggttcaccatcagggaaacgatgtttgccccatacctggaacaacaaaaatcgagaacttcaaccagaacgtgggggcgctttctgtgaagttgacaccagatgagctggccgaactcgagtcctgtgctgctgcaggtgaaatcttgggtgaccgttatcctcaaatggccaacacctggaaggactctgagaccccgccattgtcttcttggaaatctgagtagccaatctggtgtctcttcaattctgccaccgtcacattggtgtatctccanattgtcggactg

SEQ ID NO: 67194 - DNA, 334 bp, Zea mays
agctgagacagtggacggcggctatgtccttaatgggaataagatgtggtgcaccaatggcccgtctgctcagacactggttgtttacgcaaaaacagatctagctgcagggtccaaaggaataactgcattcataatcgagaaagggatgcccgggttcagtactgctcagaagttggacaaacttggcatgagaggacgcgacacgtgtgagcttgtttttgagaactgctttgtgccatgcgaaaatgtcctcggtgaagaaggcaaaggtgtttatgtcatgatgtcagggcttgatctggaaaggcttgtattagctgcgggccctatt

SEQ ID NO: 67195 - DNA, 324 bp, Zea mays
ggatcctgttcgctgcccctttgaacaagtaatctctaccctcttaacatttgtaacaacatttcgaaaagcacatgaggagaacctgaagcaagctgagcttgagaagaaaaaagctgaaaaagaggcagaagcagagaaggccaagaacgcacaattaactggcaaaaatgactctaaaccatcaaatccaagacggcaagctaaacaaaccttagagaggacaaggtctgcaagcagacgaggaagagatgttgggtgataaccgaatggtcagtatttctgtgcttctgatcgtcgcgagctatggacgaccgctgggca

SEQ ID NO: 67196 - DNA, 327 bp, Zea mays
ctcctccagttcataggcacagcagcagaaagcgccaggagcttaagaacatggcgaacaggggcttgcatctggctctgtccctcgtccttctcgggccgtcgtccaatttggcagccgggcagatcctgttccagggcttcaactgggcgtcgtggaagcagaacgggggatggtacaacttcctgatgggccaggtggacgacatcgccgaggccggcatcacgcacgtctggctccctccggcgtcacactctctcgccgagcaaggctacctgccggggcgcctgtacgaccttgacgcgtccaagtacggcaacgaggcgc

SEQ ID NO: 67197 - DNA, 326 bp, Zea mays
cccatatccgctcccctacctctccagcatcctcccgtctccgtcgtctcgtctccgctcctcacctcgccagccatgggcaagatcaagatcggaatcaacggtttcggaaggatcggcaggctcgtggccagggtcgccctgcagagcgaggatgtcgagctcgtcgccgtcaacgaccccttcatcaccacggattacatgacgtacatgttcaagtacgacaccgtgcacggccaatggaagcacagcgacatcgccctcaaggactccaagacgcttctcttcggcgagaagcggtcaccgtctttggcatcaggaacccg

SEQ ID NO: 67198 - DNA, 323 bp, Zea mays
cttttgctcccaagccatcttctggacctcacaagtctagggcgtgcctgccactgatcctcatcatcaggaacaggctcaagtatgctcttacataccgtgaggtcatttccatcctgatgcaacgccatgtacttgttgatggcaaggtcaggacagacaagacctaccctgctgggttcatggatgtcatttccatccccaagaccaatgagaactacaggctgctgtacgataccaagggccgcttccgccttcacccaatcagggatgaggatgctaagttcaagctttgcaaggttaggtctgttcagtttgggcag

SEQ ID NO: 67199 - DNA, 315 bp, Zea mays
cgggaactgctcattccggggcctactgtcttcaccagacggatctaaagtatttgagacggcaagaagtggaccgtactctttcgacgacatggtcgagatgggcaaagacgctggccacgagctgaaggcgaaggctgggcctggcttcttcgatagccttcaatgaacagaatgtgcggccatgcgcgatttcagttggcaccctttcggttgaaaacgagggccaaagtaggttgttcaggggcttgtttgtgatacttctgagtttctcctactactaggtcctgctagagccttgtactaccactcatg

SEQ ID NO: 67200 - DNA, 331 bp, Zea mays
ggcggaggtaaggcgaaggagtagcagcagcaggcggcgccgagtagcggctccccatctcgagcttgccaccatggccagaggattgaagaagcatttgaagaggctcaatgcccccaagcattggatgctggacaagcttggcggagcttttgctcccaagccatcttctggacctcacaagtctagggagtgcctgccactgatcctcatcatcaggaacaggctcaagtatgctcttacataccgtgaggtcatttccatcctgatgcaacgccatgtacttgttgatggcaaggtcaggacagactagactaccctgctgggttca

SEQ ID NO: 67201 - DNA, 332 bp, Zea mays
cccacctgctcgcctctcgcgcatcctaccaggagggtgggagacccaggcagcggaggtgtgcgaactcgcttcgcaccacgcgctgcggcctgcgggggagagatcgaggcctgagctagggtctggtggcggagatgtcgacgccggcgaggaagcgcctgatgcgggacttcaagcgccttacagcaggacccgcccgccggcatcagcggcgcgccgtacgacaacaatatcatgctctggaacgccgtcatattcgggccggatgacacgccgtgggatggaggcagttcaagctgactctgcaatttacagaagattaccccaac

SEQ ID NO: 67202 - DNA, 325 bp, Zea mays
gacatggccaaaaagtggaacattgttggagttgatttgattagtggtgtcacatgtgatgctccatatgaatggttggacaagactgactcagaatgggagttcaagagggatcagtcaagtgaaacttttcatgtggttgcctatgactttggtatcaaacataatattctgagacgattgacatcatatggatgcaaaataacagttgttccagccaattggcctgcctcagaggtactcaatttgaagcctaatggtgttctgtttagcaatggtcctggagatccagctgcagttccctatgctgtgaagacagtacaag

SEQ ID NO: 67203 - DNA, 322 bp, Zea mays
cagggttggaagggctggacgttttggcacgaagggacttgcaattacctttgtttcctctacttcggattctgatgttcttaaccaggtgcaagaaaggtttgaggtagacataaaggaactgcctgagcaaattgacacctcgacctagctgccatcataaatgggaaggacaactgagaagagaggaggataggggagtgagcagccgtctggagatggttacctttgaactatccgatctggaggatttgatttgcctcctttgtgtactttaaaaagggcagccaggatgatgatctgtattttaagacaatgctgt

SEQ ID NO: 67204 - DNA, 316 bp, Zea mays
tcgagcgattcggctcaggccaattgaagagtctctgaaagtatttgaagccatgaggcgtgggttgattgcagagggtgcagcaactctccgtatgaagcaggatatgcaagatgagaccaaaaatatgtctgacttaatagcatatagaataaaattcacccgccatccacatgctggcgacaagtggtgtgtctatccgagctatgactacgctcattgcatggtggattctcttgaaaacatcacacattcgctgtgcacacttgagtttgacatacgtcgcccttcatactactggctacttgttgccttg

SEQ ID NO: 67205 - DNA, 335 bp, Zea mays
gttcctgtccgatatagtggccgcacacaaggagaaggggggtggcgacgcagaggaggatgaggacttcttggatgtcttgcttcggctgcgggaagaaggcgcagatgggctcgagctcacagacgatcgcatcaaagctaccgtcaaggacatgatagcggctgcaactgaaacatcgtcccaaacgctggaatggaccatggccgaactcattgccaacccgcgggtgatgagcaagctccaaggcgagatagcgcgagtcgtcagcgccgatcagacgaccatcgctgaaccggacctgaacaacatggagtacctgagggcagtgttca

SEQ ID NO: 67206 - DNA, 324 bp, Zea mays
  unsure (1)..(324): unsure at all n locations
ggcggctctggcgaggctcaagacgtacgagggcgtaccgccgccgtacgacaagactaagcgcctggtcatccctgacgctcttaaggttctgaggctgcaaccaggacacaagtactgcctccttggggagctttctaaggaggtcaatcatanataccatgacaccatcagggagcttgaggagaagaggaaggagaaggccaaggtggcctatgagaggaggaagcagctggccaagctgcgcctaaaggctgaggctacaccgaggaaaagctaggtcacagctggacattcttactccgtcaatctgatctgtggttc

SEQ ID NO: 67207 - DNA, 291 bp, Zea mays
cgaagaaagaagagaaggtggaggagaaggaagagagcgacgatgacatgggcttcagcctcttcgactgagctgtgtgggcagtcatcacatcagagtagtttgttttgttttgacttttgagtcgtggaaccagaggaaaatcgtagtcgttgcttggactttaacctcgtttttagttggaaactagtttgaaaggctcctactgtctttatatttggtaattcagccgtaggtcgacattgcctccaaaaaaaaaaaaaaagaaaggataaaaataaaaggaggggg

SEQ ID NO: 67208 - DNA, 325 bp, Zea mays
tgtgaacggcacttgcacatgggtaagccgatcctaagggacgggggaaacccggcagatagcgcgatcacgcgcgtcacccgaaagggaatcgggttaagatttcccgagccgggacgtggcgcctgttgccgtcccaaaccgccgccacgttccaggccacaagctaccctctgttcggcgcgctgagcggtctggacgagagcaccatcgcctcgctgcccaagacgcagagggagcccctctccttcttcgggagcgacttcgtgaccccgaagcaggagaaccagacgctgcgccccttcttcgacgagtggccaagtcg

SEQ ID NO: 67209 - DNA, 182 bp, Zea mays
cagattgacatcaaacgcgttcccaagaagtcaaccctgatcaaggctatggaggaagctgatgtgaagacgaagtgggaaaacagctcatggggcaagaagctgattgtccagaagaggagggctgcgctcagtgacttgacagttcatcgctctgcaagatcagaggggtggctatcagc

SEQ ID NO: 67210 - DNA, 319 bp, Zea mays
tgccagcgggagaactttggttgttgaggagatcttaacgatagatataaaacctggatggaagaaagggacaaaaataacatttcctgaaaagggtaatgaggctcctcatataattcctgcagatattgttttcataattgatgagaaaccccatgatgtattcacaagagatggtaatgatctggttatgactcagaagattactttggctgaagccttgacagaatgtactgttaatataacaacattagatggtcggaatctgacagtgcagataaataatatcatctaccctggctatgaggaggttgttccc

SEQ ID NO: 67211 - DNA, 325 bp, Zea mays
ctaagatcaagtgtagtatctgttcttatcagtttaatatctgatatgtggaccatgtgttcactttgatattaaatttattttttgtgggggagggctcgctacagtggcttgctactggggccctcaagcgtcgctcggccgttgcactataggctgagcctggcgcgccgcaaccaatgcaatttcagctttaagtatgtctttagactatacgaaatgtatggttccatatcaataaatttggtcgtaagtactgaagaagctaatatcgcccatatttagtcatcaagcagcatgccggtctagcagcatgtccctgtgc

SEQ ID NO: 67212 - DNA, 318 bp, Zea mays
gtaacaaggctgaaggagcaatgtaccttttccctcagatccatctgccacataaggcaattgaggctgctaaagctgccaagaaagcacctgatgcattctatgcgctccgtctccttgaatcaactggaattgttgtggttcctagatctggatttggccaagttcctggaacatggcacgtcagatgcacgatcctgccgcaggaagataaaatccccgcggtgatcacccgcttcaaggctttccatgaggcgttcatggctgagtaccgtgactgaactgttacagtggctgagtaccacgtgtagacgaaac

SEQ ID NO: 67213 - DNA, 310 bp, Zea mays
cccaggctgactgtgctgtccttatcattgactccaccactggtggttttgaggctggtatctccaaggatggccagacccgtgaacatgctctccttgcgttcacccttggagtgaagcagatgatttgctgctgcaacaagatggatgcaaccactcccaaatactccaaggcacgttatgaagagattgtgaaggaagtctcatcctacctcaagaaagttgggtacaaccctgataagattgcctttgttcccatttctggttttgagggtgacaacatgattgagaggtccaccaaccttgactg

SEQ ID NO: 67214 - DNA, 312 bp, Zea mays
accatgtattcggcagaggctcggaaggaaagcagaggagctcatgctcgtgaggatttcacgacaagagatgacgagaagtggatgaagcactcactggggtactgggaaaacgagaaggttcgattggcatacaggccagtgcacatgaacacattagacgatgaagtagagtccttcccgccgaaagctcgtgtctattgatcgattcaagcctcacaccctcgggaattccgtgtaaggtgttaataaagcagatgggcgttcctggctgagaacatgatctgaactcgtgaccgcctttttctgtgg

SEQ ID NO: 67215 - DNA, 314 bp, Zea mays
gcgccttcccctccgctccccagtcccacccgcaccctagccctcagcaaaccctaaccgctcgtcgccatgaaggacacctcgttcaaggccaccggcgccaagcgcaagaaggtcggcggcgccaagcgcaggctcacccccttcttcgcgtttttggctgagtttaggccgcagtacctggagaagcaccctgagctcaagggcgtaaaggaggtgagcaaggcggctggggagaagtggcgctctatgtcggatgaggagaaggcgaagtatggcagtagcaagaagcaggatggcaaagcaagcaagaa

SEQ ID NO: 67216 - DNA, 340 bp, Zea mays
agcctcggcttcttcctcccctccctgaccgctgccgcgacctctcggcgaaaccctaacctaccttagaccccgccgccgccgccgcccaagggagagagagacttgcacatcaaagggcgtccgatggggaagaagaagaagcgcgtcgataaggtcttctgctactactgcgaccgcgagttcgacgacgagaagatcctcgtccagcaccagaaggccaagcacttcaagtgccacgtatgccacaagaagctctccaccgcctctggcatggccatacacgtcctccaggtccacaaggagtccgtgaccaaggttcctaatgcaaagcctgata

SEQ ID NO: 67217 - DNA, 334 bp, Zea mays
gttggccgaagaagaggagaagcgaacaagcaggcttcgagaacaagggggagggggaggaccaagcgaaagggggaactagagcaagatgggcggcgaactgctgcttgcgctcctcctcgtctctgctgctgccgcccctcaggtacttggagttggcaatggagacaatcacatgagaatcatccaggaggacatcattgagacagtcaacaaccatcccagtgctgggtggacagcctcacgtaatccttacttttcaaactataccattgcgcaatttaagcacatacttggagtgaaaccagcaccacagaatgcactaagcaatgtt

SEQ ID NO: 67218 - DNA, 327 bp, Zea mays
gtgccgcgccggccgtcgtgccgggggtctcgttcgcgcccgtcgggtgctggacatgttcaacgccgggggcgccgttgaggagtgcgacgtgatcagcgatgctggcggcaaggccatggctctcagggttcgcgggtgcggtcggttctgccgttactgctcgcgggagccggcgaggtgcctattggactcggcggaagtggagttcagctacgatatcgacactggcctcgtgtccgtcgacttgctggtgccggagcaggagctatacctttggacgctggagattatgatctaggtcgtgatgctgtgcgccgacgccaa

SEQ ID NO: 67219 - DNA, 346 bp, Zea mays
ccgcgcggcgctggacgccaaggggtacagcgacgtggagatcgtcatcgccgagaccgggtggccgtacaagggtgacgccgacgaggccggcgacacggtggacaacgccaaggcctacaacagcaacctcgtggcgcacctcaagtcccaggaccgccacgccgcggacgccaggcaagtcagtggacacgtacatcttcgcgctctacgacgaggacctcaaggggggcccggagtccgagcgctccttcgggctgtacaagactgacctgacggcgaactacgacgtcgggctcgcaaaagacaacggcacggcggcccccgacagcttgactccggttcc

SEQ ID NO: 67220 - DNA, 334 bp, Zea mays
  unsure (1)..(334): unsure at all n locations
ctcggcagtggaaaccttagggaagctgtgaggttgcctcctggagaggatatcaatgaatggcttgctgtcaataccgtggatttctttaaccaagttaatatgctgtatggcacgctcacagaattctgcacacctgagagctgcccgtcaatgacagctggcccaaagtttatgcaggtatgagtacagatgggctgatggtgtgcagataaagaaacacatagaggtatcagcaccaaaatatatggagtatctgatggattggattgaaggccagcttgacgatgaatccatatttcctcanaacttggcacaccatcccaccaacttc

SEQ ID NO: 67221 - DNA, 303 bp, Zea mays
catcggtcttccgtgctcaccttcgagagatcaagttgctgcagcggtagtccccaaccatcattatgcagaacgaggagggtaagacggtggacctctacgtccccaggaagtgctcggccacgaataggatcatcactgccaaggatcatgcctctctccagatcaacattggccacttggatgcgaatggcctgtacgatggtcacttcaccacgcttgctctctctgggtttgtccgtgctcagggtgatgctgacagttcgttggacaggctgtggcagaagaagaaggctgagatca

SEQ ID NO: 67222 - DNA, 324 bp, Zea mays
gcggctactttgatgtgagggaccaagatgatcagtggatccgtgtagcggtaaagaaagggggcatgatcgttttgcctgcaggaatgtatcacttctttacgttggatagtgacaactacatcaaggcaatgcgtctatttgtgggcgtgactgtctggacaccatacaatcgtccgcatgaccatctcccggctaggaaggagtacgtcgagaaaatcatcaaccgaggtggaaacaagcggtcgaagctcgttgagcgtgtccactctacatgtcctcctgccgtctcagcctcttgtgttttacactctacaactccta

SEQ ID NO: 67223 - DNA, 324 bp, Zea mays
ccaagttcaagcgccagggcctcaatgttgttcatgttgtcgccctctcaggtggtcacaccattggtatgtctcggtgcactagtttccggcagaggctatacaaccagacaggcaatggcattgctgacagcacactggatgtatcctacgccgcaaagctgaggcagggatgcccccgctctggtggtgacaacaacctcttccccttggacttcatcacccctgccaagtttgacaatttttactacaagaacctcctggccggcaagggccttctaagctctgatgagattctgttaaccaagagcgctgagacagcgg

SEQ ID NO: 67224 - DNA, 333 bp, Zea mays
ccgacatcctactttcgtcctcacgagtgaccgataatccgccggcgctaagatgttggtttatcaagatctcctatctggcgacgagctcctgtcggattcattcacctacaaggagctcgagaacggcgtcctgtgggaggtcgagggaaagtgggtcacccaaggtcctgttgatgtagacattggtgccaatccatccgccgagggtggtgaggacgaaagcgttgatgacacagccgtgaaggtggtagatattgttgacacattccgtctacaggagcaacctccttttgacaagatatcatttgtctcttacattaaaaaatacat

SEQ ID NO: 67225 - DNA, 331 bp, Zea mays
ggcggctctggcgaggctcaagacgtacgatggcgtaccgccgccgtacgacaagactaagcgcctggtcatccctgacgctcttaaggttctgaggctgcaaccaggacacaagtactgcctccttggggagctttctaaggaggtcgggcggaactaccatgacaccatcagggagcttgaggagaagaggaaggagaaggccaaggtggcctatgagaggaggaagcagctggccaagctgcgcctaaaggctgaggctacagccgaggaaaagctagggtcacagctggacattcttactccgatcaagtactgaatctgtggtttc

SEQ ID NO: 67226 - DNA, 338 bp, Zea mays
  unsure (1)..(338): unsure at all n locations
caccgctcgaggagccgccgccgccgccgtttcgcgcaccgtaccctagccctcgtcagcgacggcttcgagctcatccagccatgacgttcaagcggaggaatggcggacgcaacaagcacgggcgcggccacgtcaagtacatccgctgctccaactgcgccaagtgctgccccaaggataaggctatcaagcggttcttggtgaggaacattgttgagacaggctgccgtgagagatgtgcaggaggcctgtgtacatgatggatatgttctacccanattgtatgcaaaggttcatcactgtgtctcatgtgcaatccatgcgcacattgtccg

SEQ ID NO: 67227 - DNA, 273 bp, Zea mays
cgcgccgccgccgccgccgaaacagcacatcgctctctcgatctcagccatggcggaggtggagcagccccaggacgcggtgaagctcttcaaccgctggaccttcgacgatgtccaggtgaacgatatctcgctgaacgactacctggctgtgattgcggcgaagacgcaacattcctgccgcactccgcggggcgctactccaagaagcggttccgcagagcgcagtgcgctatcgtcgagcgcctcaaaactcgctcatgatgcagggcg

SEQ ID NO: 67228 - DNA, 320 bp, Zea mays
gagaaagggtggaagatccacaaggatataagctgcagaagtgtgcactggacggtttcagatattgctctctcacctgaccaacgattccttgcctatgcaagtctgacacctattgttcacattgtgaatgttcagaatgctggaaagtcatcacatgctaatattactgaaattcatgagggattggatttaaccggtggtgatgaggatgaggactttggaatattttctgttaaattctccaaagatggtaaagaagttgttgttgggaacaatgaaaagtcaatatatgtttatgacctttcagcaaataaagt

SEQ ID NO: 67229 - DNA, 320 bp, Zea mays
cctcaacagagagcttcaattgcatattttggagctggcagatattttagttgagagaccatctcaatatgctcgtagggtggaagatatcacactcatattcaagaacttgcatcatcttctcaattccctacgacctcatcaggcaagagccacattgattcacatgcttgagagccaaattcagcgccgcaaggaagcaattgaagatataaagcagaggagagtggaagcgcagaagctgcacggggaatcactgcatatcttggatgcaagccaagctaactaggctgacgccgagttggctggttcaagactgg

SEQ ID NO: 67230 - DNA, 241 bp, Zea mays
ctctctctctcgtggcgacgactgggcgacctccctgcccccgccgctctacgccaggtgcccagatcttcgtcgggcccttcgccgaagagcagccaacaggttgccggtctgcgagttgaatcatggcggacacttggcttcgatcttcggcactgagaaggacatggtcaactgccctttttacttcaagattggggcctgtcgtcatggggatcgctgctctcgtctacacaacata

SEQ ID NO: 67231 - DNA, 198 bp, Zea mays
gcgtgcgccgccggggacagcgccgcctaccagaggtcctcctccttcggggacgatgtcgtcgtcgtcgctgcctacaggacgccgatatgcaaggccaagcgaggaggcttcaacgacacctacccagaggacctcctcactgttgttctcaaggctgttctagacaacataagaatttttccagctgacatcggt

SEQ ID NO: 67232 - DNA, 250 bp, Zea mays
cgaagaaagaagagaaggtggaggagaaggaagagagcgacgatgacatgggcttcagcctcttcgactgagctgtgtgggcagtcatcacatcagagtagtttgttttgttttgacttttgagtcgtggaaccagaggataatcgtagtcgttgcttggactttaacctcgttttatgttggaaactagtttgaaaggctcctactgtctttatatttggtaattcagccgtaggtcgacattgcctcc

SEQ ID NO: 67233 - DNA, 292 bp, Zea mays
cgaagaaagaagagaaggtggaggagaaggaagagagcgacgatgacatgggcttcagcctcttcgactgagctgtgtgggcagtcatcacatcagagtagtttgttttgttttgacttttgagtcgtggaaccagaggaaaatcgtagtcgttgcttggactttaacctcgttttatgttggaaactagtttgaaaggctcctactgtctttatatttggtaattcagccgtaggtcgacattgcctccaaaaaaaaaaaaaaaaaaaaaaaaaaaaaaaaaaaagggggg

SEQ ID NO: 67234 - DNA, 324 bp, Zea mays
agcagcttaagttccctgttaagccagctgatatcaagaaaagaatagagagcttaatagaccgggagtacctggagcgggacaggagtaacccccagatctacaactatctggcttgacagagctttggaggatcattaaagagaccgctcactttattatcagaaaagacactgtaaattggtttgttttccagttccttgttctttcctgtttttcttctctgggagggagttgtaactgttgcaacgtgtctgtatacgagaacgtttttttttcagtatcagtataaaatgtataagcataatgcatgtatctgtttac

SEQ ID NO: 67235 - DNA, 321 bp, Zea mays
cggcgctaacccggacgttgttatggaacagatcaagacgcagctcgcacaggcttacgcgcaggagtttctcgagaccgtcgggaacaagtgctttgaaaagtgcgtgaccaagccaggatcaagcttgagtggaagcgagagcagctgcatatcacgttgtgttgacacctacattgaggccactggtattgtcagccgcgcattgttcacttcccagcgctaagatcacatgaataaggagatggtttcgaagatcgctcgtgagagtaatgtcgccatgagttttttgacttgtcggaatacaatgacatttgatgc

SEQ ID NO: 67236 - DNA, 319 bp, Zea mays
gctgattgagtgtattatgggtaaagttgctgctcagatggggaaggaaggcgatgccactccattcacggatgtgactgtggataacatcagcaaagctcttcataaatgtaattatcaaatgcgtggatttgagacaatgtacaatggtcacactggaagaaaactgactgcgatgattttcctgggccccacatattaccaaagactcaagcacatggtggatgacaagatacattcgagaggacgtggtcctgtgcagatactcacccggcaaccagcagaggggcggtctcgtgatggtggtctccgctttgga

SEQ ID NO: 67237 - DNA, 308 bp, Zea mays
caatattctcattctcgaattatacttacaaagattgttgctttcatcacgattctagatgatacccttgactcacatgctaattcttatgagagtatgcaacttgcagaagcagtcgaaaggtgggatgaaagtgcagtctcactactcccagaatacatgaaggatttctacatgtatttgttgaagacattttcatcgtttgagaatgagttaggaccagacaagagctaccgagtgttctacttaaaagaagcggtgaagaaattagttcgggaatataccacggaaataaaatggcgtgatga

SEQ ID NO: 67238 - DNA, 311 bp, Zea mays
atgagtacccaactggtcgtctcctgagagatgcaaaattgtttgagattggtgctggtactagcgagataagaagaatgataattggccgtgagctcttcaaagaggactgatacttctattttgcaagccagataccagtgcatattgttaactgggggaggtgagcgagatttagatatttagcaaattacccctgtggttcaatgcttttgtataactgcagacatacatcaaataaagttcacttccttgtacttgctgcttgcagtggctcatttttcctgccaataaaggtttttgttatgact

SEQ ID NO: 67239 - DNA, 322 bp, Zea mays
caactcactagtactcagccgccgcaatcagggacaggtagctcgagcgcgcgctccacctgctccgacgcgatgcgggccaagtggaagaagaagaggatgcggaggctcaagaggaagcgccggaaaatgaggcagagatctaagtaggcgcatcttgtgaccgaggatggcgagcttctcctgcaccatggctgagacgcgttgggatgattgtctccctttgtagacgtgctttgctgtagacgtaggcgatgtaaaccgtcctttttgattaattctagtatgttctgagactgggtttatattgtaatttgaggat

SEQ ID NO: 67240 - DNA, 316 bp, Zea mays
gaagcctgaacagtcaagcattcctctcacagtcactatatccaagggtgacggtcctgttcttgaattcacctgcactgcctatcctgacgaggtcattatcgactccatgtctgtgacacaacaatcaggggatgatgaacgttctctgattgcatatgagggtcctgatttcaatgaccttgatgagaacctgcagagtgaattccacaggtacctggatctgcgtggcatttcacccaggaccacaaatttcttgcacctgtacatgatcaacaaggacagccgtgagtacctgctctggctgagaaagctg

SEQ ID NO: 67241 - DNA, 317 bp, Zea mays
gccttccacggcgacaaggaccacggcggcgtgcgcgacggcaccaacatcgtgctctggaagtggtgcgagggcgacaaccagcgctggaagatcgtcccctggtaaatgtgctgttctgtggctgcactggtcatcaccatgatctggagctttgaaggcatagccacctgtggtcagcagctgctgccgtgttgctagaataaagttggtggcgatcgatcgatcgatctttggtgatgggtgtccctccctgtgtgtttgtgtttagttccagtcgtttgtgaggaagtcagttatgtttgagtgagaggggt

SEQ ID NO: 67242 - DNA, 312 bp, Zea mays
ctgtgctctgttctcaaagacatggattgaagtttctggttcatcagcaaaggatgttgctaagcagctcaaggaacaacaaatggtgatgccaggccatcgtgagtcgaacttgcagaaggaacttaaccgatacatccccactgccgctgcatttggtggtgtatgcattggcgcattgaccgtcctggctgatttcatgggtgcgattggttcaggaactggcatattgctcgctgtgacaatcatataccaatacttcgaaacctttgagaaggaaagggcgactgagcttggtttctttggtttttg

SEQ ID NO: 67243 - DNA, 311 bp, Zea mays
accggttgcgatccgccgccatcgcttcaagcagcgaaccctagccgccctcagccacggattgcagatctcccagccatgacgttcaagcggaggaacggcggaaccaacaagcacgggcgcggccacgtcaagtacatacgctgctccaactgcgccaagtgctgtccaaaggataaggctatcaagcggttcttggtgaggaacattgttgagcaggctgctgtgagggacgtgcaggaggcttgtgtgcatgatggatatgttcttcccaaattgtacgcaaaggttcatcactgtgtctcatgcgc

SEQ ID NO: 67244 - DNA, 318 bp, Zea mays
acccgtcccccattccacccgccgccgccgacgcgccgcgcctgttcaagatgaatgtggagaagctcaagaagatggcgggtgctgtgcgcactggaggaaagggcagcatgcgcaggaagaagaaggcagtccacaagaccgcaaccaccgatgacaagcggcttcagagcacgttgaaaagaattggagtgaacactattcctggtattgaggaggtcaacatcttcaaggatgatattgttatccaattccagaaccctaaagtgcaagcatccattcctgcaaatacatgggtagtcagtggagtaccccaga

SEQ ID NO: 67245 - DNA, 317 bp, Zea mays
ctcgagccgcacccgccgccgcatcagccatcagccatggcgatggccgctcgcctcgtcgcgcgctccagtcagctacattcggttcaagcagcttttgcgaatggaggtgccactcaagttcgctcctttgccaaggatgcagctccagctgaccgtcctcctgttggtggggatgatctcctgaagggcatattctttgaggtaaagaagaagtttgagacagctctcggcgtccttaaaaaggataagatcactattgatccagatgacccagcggcagtttctcaatatgctcaagtcatgaagactgtaag

SEQ ID NO: 67246 - DNA, 314 bp, Zea mays
cggtggagagccttcctctgttgccttcttcgcgaaggctgggctggattacgtttcttgctcccctttcagggttccgattgctaggctagctgcagctcaggtgcttgtctgaggctgcctcctcattggcaaccggattgcctgctgctggtggatgtggtgatcaacagtattattacagagccatgctatgtgaacattactagtagcagtgctcataaaagctacaatcccatgtcctttttttccccagtcatgtaaaacttccaaactgctccatggttcaaaatctgttcttcaatacatcatca

SEQ ID NO: 67247 - DNA, 319 bp, Zea mays
cggtggagagccttcctctgttgccttcttcgcgaaggctgggctggattacgtttcttgctcccctttcagggttccgattgctaggctagctgcagctcaggtgcttgtctgaggctgcctcctcattggcaaccggattgcctgctgctggtggatgtggtgatcaacagtattattacagagccatgctatgtgaacattactagtagcagtgctcataaaagctacaatcccatgtcctttttttccccagtcatgtaaaacttccaaactgctccatggttcaaaactctgttcttcaatacatcatcaatta

SEQ ID NO: 67248 - DNA, 324 bp, Zea mays
tgcccattcactatgggtcgaaccgtctgaactatttcacagtctcgtcacctatcgcaacacagctccctcatgctgatggagctgcctactctctgaagatggacaagaaggacgcgtgtgccatcacatactttggggacggtgggacaagtgagggagacttccatgcagcgctcaacttcgcggctgttatggaggcgccggtgatcttcttctgccgcaacaatggctgggccatcagcactccgactactgaacaattcagaagtgatggggttgtcatccgtggccaggcttatgggatccgtggcatccgagtag

SEQ ID NO: 67249 - DNA, 324 bp, Zea mays
cggacaagcgcgaccaggttcggcgggagcatgtctacaagatgaaggagcggtgcgagcgcactaaggcggcgtggagcctccctctgcgcccctacggcttctggaccttcgaccgcttcaactcgcagctctcctgggatccccagatcagccaggccgccggccgtcgggacccctacgacgacctcatcgcccgccactctggctcgccgccgtcttcctgaacacccgttccgatccttgcccagaaggtctacttgggcatcaataagaaactctttcccctcaaactgattgtggttccatcctcttctgtctgga

SEQ ID NO: 67250 - DNA, 350 bp, Zea mays
agatgttcgacggcttcaatctccgcttccgccaccagagcgccacccttggctgcgccatgactttctccatctacctgcccccgtcaccggcgtccaaccttcccgtgctgtactggctctcgggtctcacctgcaccgacgagaatttcatcataaagtccggcgcccagcgcgccgccgctgccacggcatcgccctcgtggcacctgacacctccccacgtgggttaaatatctgaaggagagtcagacagctatgattttggtgtgggtgcgggttttatttgaatgccacaaatgaaaagtggacaaactggcgcatgtatgactacattgtgaaggaacttc

SEQ ID NO: 67251 - DNA, 347 bp, Zea mays
atttgaataggttggaaatcatcaacaaatgcttttccaaaaggacagtcgaagaaattatatccgctcttgaagtagaggcctcaaattcggcagatgaatgggctgctacaacaatccagtccttgaagaaggcttctcctaccagtctgaaaatctctctgagatcgataagagaagggaggaacaaactgttggggagtgcttgcagcgggaatatagaatggtctgccatgtcatgcgtggtgacttcagcagagacttctttgagggatgcagggctatattgctggataaagaccgaaacccacagtggatgcctccaaggttggaacaagtgcatgacg

SEQ ID NO: 67252 - DNA, 342 bp, Zea mays
tggcggctctggcgaggctcaagatgtacgatggcgtaccgccgccgtacgacaagactaagcgcctggtcatccctgacgctcttaaggttctgaggctgcaaccaggacacaagtactgcctccttggggagctttctaaggaggtcggatggaactaccatgacaccatcagggagcttgggagaagaggtaggagaaggccaaggtggcctatgagaggaggaagcagctggccaagctgcgcctaaaggctgaggctacagccgaggaaaagctagggtcacagctggacattcttacactgatcaagtactgaatctgtggtttcgtgcctatcag

SEQ ID NO: 67253 - DNA, 374 bp, Zea mays
ctatacgcgtacgaactcggaattggtcgagatcgaccgtgcgcctctacatttcttctctctctgctcctccgcctccgcctgatccatccaagacagggatcgccatgtcggactcggaggagcaccacttcgaatcgaaggccgacgctggggcgtccaagacctacccgcagcaggctggcaccgtccgtaagaacggcttcatcgtctcaagaaccgtccctgcaaggttgtggaggtttctacctccaagactggtaagcatggccacgccaaatgccactttgtcgccatagacatattcaatgggcaaaagcgtgaagatattgttccttcatcacacaactgtgacattccgcatgtgaaccgta

SEQ ID NO: 67254 - DNA, 342 bp, Zea mays
gaggaagcgaagacccatttccccgagcgcaagagtaccatggcggcggcggcagttctacgcgccgccctcacgggaagcttggcgtcgacgatgcccccgagctgcatctgaatcgcatccgcatcagcctctcatccaagttcgtcaagaacctggagaaagtttgtgcggatttggtaaaggagccaaggataagcatctgagggttaaggggcctgtcaggatcgctactaaggttctccacatcaccacccgcaaatcgccttgcggtgcaggaacaaacacatgggaccggtttgagttccgcatccataagatcgtgatcgacctgatcagctc

SEQ ID NO: 67255 - DNA, 336 bp, Zea mays
cacggatgcaaactcacagaaaggcaaacaaacagcaaagacctcagggtttgaattgtgctcttgataagccccttgaagctgctacagctgaaaacgctccatacaaaacaattgatgtttttcaggaactctacaaagaatctggagttcttggcttctggaaaggggtaattccggtcttatcatggttagcaatcccgcaattcagttcatgctatatgagactcttctgaagaaattgaagaagagacgagcctctaattttaagggagctgatggattgactgctcttgaaatttttcttcttggtgctgttgcgaaacttggtgcaac

SEQ ID NO: 67256 - DNA, 341 bp, Zea mays
gtccgcattggcgcgctacaatgacctcgaggggtctactggagaaggatttcgagcagattggggagttcctccaccaggcacggtccatctgcctgaacatccagaaggagtacggcaagctcctcaaggacttcaacaagggcctggtgaacaacaaggacatcgagaacctcaagccccctctgcagaagtttgccgactccttcgacatgcctgggttcacgcttgagagcatgaaatacaaggagtagatatgcctctttcatgcgcggcaaggtcctcctgtaccgatgtctttccttgtggtggcgcagggtgcgatggcactgcattgccgc

SEQ ID NO: 67257 - DNA, 338 bp, Zea mays
aaaccccgtttccacaacgtcaccgcactgccgtcatgccgaccgtaagcgtgaaatggcagaaggagctcattccaggtatagagattgatactagccagcctccgattgttttcaagactcagttgtacacactaactggtgtgccacctgaacgccaaaaaattatggtgaagggagaatattgaaggacgatgcagattggtctactttgggagtgaaagatggccaaaagttgatgatgataggcacggctgatgagattgtgaaagctccggagaaaggtccagtgtttgttgaggatctaccagaagaagagcaagtgattgcactgggtc

SEQ ID NO: 67258 - DNA, 305 bp, Zea mays
gccgtatctgaggtctgacttcgaaggcattttccgtgctatggatggactcccggtgaccatccgactcttggaccctcccctccacgagttccttccagaagggaatctccctgacactgtaagtgaattatgtgctgagacgggagccaaccaggaggatgccctcgcgcgaattaagagctttcagaagtaaacccgatgcttggcttccgtgggtgcaggcttggtatatcgtaccctgaattgacagagatgcaagcccgggccatttttgcagctgctatagcaatgaccaaccaggg

SEQ ID NO: 67259 - DNA, 308 bp, Zea mays
gccgctgccgctgccgtttcgcgcaccgcttctcctttaccgtcagcggcggcttcgagatcctccagccagaacgttcaagcggaggaatgagcgacgcaacaagcacgggcactgccacgtcaagtacatccgctgctccaactgcgccaagtgctgcctcaaggataaggctatcagcggttcttggtgaggaagattgttgaggcatgctgccgtgagagctgtgacagaggcctgtgtacatgatggatatgctctacccagattgtatgcacaggttcaccactgggtctcgtgcgcaatcc

SEQ ID NO: 67260 - DNA, 328 bp, Zea mays
  unsure (1)..(328): unsure at all n locations
tgatgcagcagccaaaacctacctagccgccgccgcatgcncccccatcgctgccaagatgcagatctttgtgaagactctgacggggaagaccatcactttagaggtggagtcctcggaaaccattgacaatgtgaaggccaagatccaggacaaggagggcatccccccggaccagcagggctcacctaaaccggcaagcagctcgaggacggtcgcaccctcgccgactacaacattcagaaggagtccaccctccacctggtgctccgcctccgcggtggcgcaagaagcgtaagaagaagacgtacaccaagccaaagaagat

SEQ ID NO: 67261 - DNA, 332 bp, Zea mays
gtggaagcgaagacccatttccgcgagcgcaagagtaccatggcggcggcggcagtttatggcggcctcaaggggaagcttggcgtcgaggatgcccccgagctgcagctgaatcgcatccgcatcaccctctcatccaagaacgtcaagaacctggagaaagtttgtgcttattggtaaagggagccaaggataagcatctgagggttaaggggcctgtcaggatccctactaaggttctccacatcactacccgcaaatgcccttgcggtgaaggaacaaacacatgggaccggtttgagttccgcatccataagatggtgatcgacctg

SEQ ID NO: 67262 - DNA, 335 bp, Zea mays
gctagagaagtttggtggcctcagggatggatactatatccatggccagtgtgcgatcatcatgtttgatgtaacctcaaggcttacttacaagaatgttcctacgtggcatagggacctgtgcagggtctgtgaaaacatccccattgtcctctgcggtaataaggttgatgtaagaacaggcaggtcaatcccaagcaggttactttccacaggaagaagaatctgcagtactatgaaatttctgccaagagcaactacaactttgagaaacctttcctgtaccttgcaaggaagctggctggtgatccgaaccttcactttgttgaagctgt

SEQ ID NO: 67263 - DNA, 330 bp, Zea mays
cggctcgtatccttggtgctgctcagcatcgtcgaccactacaaccgcgtcgcccgcgacacacgcaagcgcgtcgtcggcgtcctcctcggcacctcatcccgcgggtcacgtcgatgtcaccaactcctacgccgtgccgtttgaggaggatgacaaggatcctaggatcggttccttgaccacaattaccacacctcaatgttctccatgttcaagaggattaatgccaaggagcatgttgttggctggtacagcactggcccaaaactaagggagaacgacttggatgtccatgcattattcaacagttatgttcctaatccagtc

SEQ ID NO: 67264 - DNA, 282 bp, Zea mays
agccggtcagctatgacgccgggaagctcggccgccggatccggcgtcgtcgttcctcggaacttcaggctcctagaagagcttgaacgtggagagaagggcattggagatgggacagtaagctatggaatggatgacgcagatgacatctacatgcgatcatggactggcactatattggccctcataataccgtccatgagggtcgcatctaccagctgaagttgttctgcgacaaggactacgctgagaagccacatcagttcgatttcattcaagaat

SEQ ID NO: 67265 - DNA, 338 bp, Zea mays
acagcaagtatggagtttccgggtatccaacaatccaatggttcccgaaaggatccttggagcccaaaaagtatgaaggacaacgcactgcagaagcccttgctgaatttctcaatactgaaggaggcacaaatgtaaagctggcaaccattccttcaagtgttgtggttctcacccagagacctttgactcaattgtccttgatgaaaccaaagatgtccttgttgagctctatgcaccatggtgtggtcactgcaagagtcttgcaccgacgtatgagaaggtggcttctggtttcaagttggatgaaggagttgttattgctaaccttgacgctg

SEQ ID NO: 67266 - DNA, 317 bp, Zea mays
atcgatcgcccggaaactgacctctaccgatgtctggagccggcgaggaggataagaagcccgcggagggcggcgcccacatcaaccttaaggtcaagggacaggatggcaatgaggtgttctttcgcataaagaggtccacccagctgaagaagctgatgaacgcctattgctccgccagtttgcggacatgaatgctattgcattcctgtttgatggccgcagcttcgcggcgagcagacccctgatgagctggagatggaggacggcgacgagatcgacgccatgcttcaccagactcggagcagcgttcctag

SEQ ID NO: 67267 - DNA, 327 bp, Zea mays
gctcccgatcaccggcgggttcgcgctattcagcatggctgctgccttctccgccacctccgtccacgacttcaccgtcaaggatgctagcgggaaagatgtggaccttagcacctataagtggaaggttctgctcatagtcaatgttgcatctcagtgtggcttaaccaattcaactacacagagctcagccagttgtatgagaagtacaaggaccagggttttgagatccttgcattctcatgcaaccagttcggtgggcacgagcctgtcactaatgaggagattgtccagtgtagctatactcgcttcaaggctgagtatcca

SEQ ID NO: 67268 - DNA, 329 bp, Zea mays
gttttcgccaacaagcaagatcttcctaatgccatgaatgctgctgagatcactgacaagcttggattacactccctgcggcagcgacactggtacatccagagcacttgtgccacaactggcgagggtctgtacgagggcctggactggctgtccagcaacatttcgagcaggcttgcacatcaaatgcgaactgactaggagctccggatgtatcatggaaacttaggacagaatcgcctctacaacctgttaggtgtcttctaccggcacaatatattttttgtttggaatatgtaatgatgttacggttcaacgtttattctacc

SEQ ID NO: 67269 - DNA, 316 bp, Zea mays
aagaaggctaatgctcttctggggttcgagcagcttgtgaaggccaagacacaagtggtcgctggcacgatgtactatctcactattgaagtgaaggatggcgatgtcaagaagctctacgaagctaaggtctgggagacttcatgggagaacttcaaggagctgcaggaatcaagcctgttgaagagtgtgctagcgcctaaggatctctccttcaccatgtgcgagcctgaagctcaaagcaaagttgcagaataaggagccgcctcacaacatgctagcacatgctcccttgtgtaatttcataagactacaa

SEQ ID NO: 67270 - DNA, 331 bp, Zea mays
gtccaaaccctacggccgccgtcagcatcaagctccccgaccaaaccctactcgtaccccgccgccgccgcagccgcagccgcggccacaccatcaagcagaactagcagccatgccgcccaaattggacccctctcaggtggtggaggtcttcgtccgcgtgacgggagggaggtcgcaactacgtcgtcgctggcccccaagatcggcccgctcggtctctccccgaagaagatcggcgaggacatcgccaaggagaccgccaaggactggaagggcctccgcgtcaccgtcaagctcaccgtgcagaaccggcaggccaaggtctccg

SEQ ID NO: 67271 - DNA, 292 bp, Zea mays
aaagctcctccagttagaatcgacagccaagcaaaatatggtgctctggcccaaggtgatggcgccatttacttgcgctttccacacaaaggttatagagagaaaatatgggaccatgcagcaggctcaattgtcgtgacagacactggaggcatagtgacagatgctggggaaacgacttggatttctccaaagggagatttctcgatctcgacacaggcatcatcgcaaccaccaagagttgatagcgtcgctcctgacagcttgtcaagaggctattaaagagacgaac

SEQ ID NO: 67272 - DNA, 302 bp, Zea mays
cgccacaacaatatcgcattgacacatcgttcatcggatccagtcttctcccgggatctcctccggctataaatttccggccccaattcacccaatccagatgcgcaaacatcgaatcgtctcgctcgtggctgccctactcgtgctgcttgccctcgccgccgtttcgccacgcgcaggcacaaaaggagtccgtggctgacaacgccgggatgttggcaggcggcatcaaggacgtgccggcgaacgagaacgacctccagctccaggagctcgcgtgcttcgccgtcaatgagcacaac

SEQ ID NO: 67273 - DNA, 384 bp, Zea mays
  unsure (1)..(384): unsure at all n locations
ataacaccacagtcggaatcggctcgagacggcggaaagtcctaatcagcgactactgtaagaatccttcacatacaagacaagcctgctctgttcagaagcttcttcaaatggctaaagcccggcggcaaagtcctaatcagcgactactgtaagaatcctggaaaaccatcagaagaatttgctgcgtacattaagcagagaggctatgaccttcacgacgtgaaggcttatggacagatgctgaaggatgctggttttcataatgtcatcgcggaagatcgcactgagcagttcttgaatgttctacagagggagatagggtgagttgaanagaacaaagacgctttccctggcagacttcacccaggaggactatgacga

SEQ ID NO: 67274 - DNA, 357 bp, Zea mays
  unsure (1)..(357): unsure at all n locations
ccccancgatcgctcctctccactttccacattccagttccaacacgcctccgctgcaggtcgccgactccgaaactccgacagtccgaccacaaggtcttgtgcgggatccacagaaggatgagtgaagaggataagactgctgcttctgctgagcagccgaagagggcccctaagctcaatgaaaggatcctctcttctctgtccaggaggtccgtagctgctcatccatggcatgatcttgagatcggtcctgatgctcctgctgttttcaatgttgttgttgagatcacaaagggaagcaaagttaaatatgagcttgacaagaaaactggactgattaaggttgatcgagtc

SEQ ID NO: 67275 - DNA, 355 bp, Zea mays
tctaatgcattggacaaagttgaatctgagattaaagctattgtagaggcttccaagaagagcccgttgttttctcaattcataaaggacttgtcagttccaaaagcgaccagggtgaaggctatagccgaaatatttgtaacatctgaaaacccagcgtcagcaaatatttcttggctgtcctggcggacaatggcaggctgaaatatattgaacgcattgcggagagatttgttgatttgactatggaacataagggggagatgaaggttgtggtcaggacagttatttcactcaccaaggaggaggagaaagaactcaaggaaaccttgcaggatatccttggggaaaacaa

SEQ ID NO: 67276 - DNA, 353 bp, Zea mays
cagccgcgtcgcgtcgcatcctacgatccaaagctctctctgctcgcagccatggcgaagaactaccataccgtgagcgccgagtacagcgaggctgtggagaaggccaggcgcaagctccgagccctcatcgccgagaagagctgcgccccgctcatgctccgtctcgcgtggcactccgcggggacgttcgacgtgtcgtcgaggaccggcggtccattcggcacgatgaagcatcagtcggaattggctcacggcgctaacgcggggctggacatcgcggtgcggctgctcgagcccatcaaggaggagttcccaatcctctcttacgccgatttctaccagctcgcggg

SEQ ID NO: 67277 - DNA, 367 bp, Zea mays
cgtagtatgtcggaatcggctcagatcttggatcaccttttcagagagagaaggcaagtggtcatttcgaagaagccgaggagagggaacctggaatcaagaaaaccttcagctctcctgtgtaggaggaaagttaacgaacagtgtagtaactgttcagctttgtgtttattcagttgttttgctgcttgaggttattcgtttctaggtgggggttggaatcttttcgccataaacctctcagtggcataaataagatggtttgcataagagtacttcatggataccgtaagggctactactgaaagagaaatgtttaagcagcatggtatgtgagcaactagtgataattatccatctttttttt

SEQ ID NO: 67278 - DNA, 352 bp, Zea mays
ctgcgcctctacatttcttctctctctggtcctccgcctccgcctgatccatccaagacagggatcgccatgtcggactcggaggagcaccacttcgaatcgaaggccgacgctggggcgtccaagacctacccgcagcaggctggcaccgtccgtaagaacggcttcatcgtcatcaagaaccgtccctgcaaggttgtggaggtttctacctccaagactggtaagcatggccacgccaaatgccactttgtcgccatagacatattcaatgggaaaaagcttgaagatattgttccttcatcacacaactgtgacattccgcatgtgaaccgtactgagtatcagctga

SEQ ID NO: 67279 - DNA, 331 bp, Zea mays
tcgatcgggtccagatggccaccatatcgctattgggctcaactcatccgatatccagctctgggacaccagctccaaccgactgttgatgggaccactgtcctcgtgaatggtcacaagctcagacgtggatccactggaggcatcccacaggtataccgtgtcgcccagagcaatggatagcacgttgttgctcccccagtcaagcaggttgaggtagtagtcgtcaacaagctctggtgcgtccagaatcctctctgcagactggggaatatgtcgacactgcttgaccagcttggcatgcggctcgagcggctcgagtagatcgcga

SEQ ID NO: 67280 - DNA, 355 bp, Zea mays
  unsure (1)..(355): unsure at all n locations
tctcggccgcgccaacgtctccaaggcggagttgaaggagaggcttgccaagatgtacgaggtgaaggaccccaacaccatcttcgtcttcaagttccgcacncacttcggtggaggcaagtccactggcttcggcctcatctacgataacctcgagtctgccaagaagttcgagcccaaataccgcctcatcaggaatggtcttgctactaaggttgagaagtcccgcaagcaaatgaaagagcggaagaacagggccaagaagatccgtggtgtcaagaagaccaaggctggtgacgccaagaagaagtaaacagtcatttatatttctgtattactgtcctgaactctgggt

SEQ ID NO: 67281 - DNA, 347 bp, Zea mays
  unsure (1)..(347): unsure at all n locations
gtcctccgaattagtccttcctgcagtgtcctcgccgacagggaaagccgtgttgcaagaaggggaattccgctgcgagatccgtgaacggttcagagatggcacagacggtgttcaccccctctttggaagcgatgaagcatgtcaaggcagagaacggagtcattctcaccaagcccttccttgatgtctgcaagcaaatattgcctgtcctcgataaatttggaggtgctatggcaattgtaaagagtgatatcggcggcaatatcacaagactgganaacaagtatacttcagaaccatcanagtatgaacacttgtacagcaggttcaggaagagttcaaac

SEQ ID NO: 67282 - DNA, 133 bp, Zea mays
aatacgagtacaatcctaaaaccatctgcttcagctagccccaagtttagtcggacgatcattcactgaagtagtaatggcctccgtcaacagctggaccaccgagatcgcgtcgccggtggctccgcagcgc

SEQ ID NO: 67283 - DNA, 350 bp, Zea mays
  unsure (1)..(350): unsure at all n locations
gcttgttctcttcggttcagttctcgagtttccaggatgaaggtaatagctgcctatctgcttgctgttctgggtggaaacacttccccgactgctgatgatgttaagagcattctggaatcagttggtgctgaagctgatgaagaaaaactagagttcctgctcacagaactcaaagacaaggacataacagaagtgattgcagctggaagggaaaggttatcctctgtgccttcaggtggtggtgcaattgacatgggagctccagcagctgtagctggcggtggcgcacacctgctgaagaggcanagaaggaagataaggttgaagagaaggaagagtctgatgaa

SEQ ID NO: 67284 - DNA, 348 bp, Zea mays
gcacccttcaccttgttctccgcctcaggggtggtatgcagatctttgtgaagaccctgatcggaaaaaccataaccctggaggttgagagctcggacaccatcgacaatgtgaaggcgaagatccaggacaaggagggcatccccccggaccagcagcgtctgatcttcgccggcaaacagctggaggatggccgcaccctagcagactacaacatccaaaaggagagcaccctccaccttgtgctccgtctccgtggtggtcagtaagtcatgggtcgtttaagctgccgatgtgcctgcgtcgtctggtgcactctccatatggaggttgtcgaagtatctgctg

SEQ ID NO: 67285 - DNA, 345 bp, Zea mays
gcgagatcaacggctacaccatcccggcggcacgcgcgtcatcgtcaacgcgtgggcgctcgccagggacccgacgtgctgggacaaggccgaggagttcttcccggagcgcttcctggaacaaggccgcgacgccgaggtcgacatgtacggcaaggacatccggttcgtgccgttcggggctgggcgcaggatctgcgcgggggccacgttcgccatcgccaccgtcgagatcatgctcgcgaacctcatctaccatttcgactgggagatgcccgccgagatggagcgcaccggggccaaggtggacatgtccgatcagttcgggatgacgcttcgccggac

SEQ ID NO: 67286 - DNA, 339 bp, Zea mays
gcgtcgagctttacgccgagaaggtcgtcaaccgtgggctctgtgccatcgcgcaggccgagtccctccgttacaagctcctcggaggccttgccgtccgcagggcttgctatggtgttcttcgttatgttatggagagtggtgccaagggttgtgaggtgattgtgagtggaaagctcagggcccaaagagtcaagtccatgaagttcaaggatggctacatgatctcatctggtcagccagtgaacgagtacattgactcggctgtgagacacgttcttctcagacagggtgttctcggtatcaaggtgaagatcatgcttgactgggacccgaagg

SEQ ID NO: 67287 - DNA, 376 bp, Zea mays
  unsure (1)..(376): unsure at all n locations
gcgatcgagcgagtaagtcggaattctgctctgagccgccgccgctgcagtgtccatagccaccgcaggagactgagatggggggttttgtcaagacccacaagaccaatgcgtacttcaagcgtttccaggtgaagttcaagagaaggcgcgnctggaagacagactacagggccaggataaggctgattaaccaagacaaaaacaagtacaatacacccaaatacagatttgttgtgcgatttaccaacaaggacatcacagcacaaatcatctctgctagtatagcaggtgatatggttcttgcttctgcttactcgcatgagcttgccacgatatggtcttgaagttggtctgaccaactatgcagctgcct

SEQ ID NO: 67288 - DNA, 338 bp, Zea mays
  unsure (1)..(338): unsure at all n locations
tcagaaccgaaaccttaaccttattcggcgactatggcggcggcaccggcaggcggcggccctcgggcattgtcccagcgggagcaggacatccagatgatgctcgccgccgatgtccacctcggcaccaagaactgcgactacgangtggagcgctacgtgtacaagcgccgcactgatggtatctacattattaaccttggaaagacctgggacaagcttcagtatgccgccagggtcatcgttgccattgagaatccgcaggacattatcgtgcagtctgctaggccctatggccagagggctgtcctcaagtttgcgcagtacactggtgccca

SEQ ID NO: 67289 - DNA, 343 bp, Zea mays
aggcactgggggcattactatcaagaaaaccggcatgtctcttgattattcggtgtctacgatagagccaatgactccagggcaatgcaacatggtggtggagaggctcggcgattacctgatcgagcagggcttctaaaagttcgtcatgttctgttttggtcatttgggcaccaaagtttgcgcctcatttggttctgtaatccgtgagctcgtgcatgtacttggcgtattgcatgcagtgaataatttagcttgggtttgtttgttgggggcagtgttggggacggatttggattggggtttatgcttggcatcgcgtcgtatcgaaactcagctgctg

SEQ ID NO: 67290 - DNA, 329 bp, Zea mays
catcgaccgctcttccgcgcgccatgtctgggaggaagaagacgcgggagcccaaggaggacgaacgtgacgcttggccccgctgtccgcgagggagaacacgtctttggcgttgcgcacatcttcgcctccttcaacgacactttcatccatgtgacggatctgtctggaagggagacgctcgtccgcatcactggtggcatgaaggttaaagctgatcgtgatgagtcctcgccttatgctgctatgcttgcctcacaggatgtcgcgcaaagatgcaaggagcttggaattactgcattgcacattaagctccgtgctactggtgg

SEQ ID NO: 67291 - DNA, 330 bp, Zea mays
ctcgaattacgattcccaatccagcaaaccctaccagccttttgcaaactcagagagggacccgatggcacccaaggcggagaagaagccggcggcgaagaagcccgcagaggaggagcccgcggccccggcggagaaggcccccgctgggaagaagccgaagggggagaagcggctcccggcgggaaaatccgccggcaaggaaggcggtgttgacaagaaggggcggaagaaggccaagaagagcgtggagacgtacaagatctacatcttcaaggtgctgaagcaggtgcacccggacatcggcatctcctccaagccatgtccatc

SEQ ID NO: 67292 - DNA, 332 bp, Zea mays
  unsure (1)..(332): unsure at all n locations
gttctgngtccgatggctgatttggttgtgaaagttttgcttgaagacggttctcaggtggacgcatggcagcctttcatggttatggaagcaatgaagatggagcatgttgtgaaggcgcctcgtgccggatacgtgatagacctgaaggttactgcaggccaacaagtttttgactccagtgtccttttcacaatcaaggacagctctgcanactgagatggagcgatcactgccctagagtagttgcactgcaactgcatcaagcacccagcggatgctcgtccagatagagaagcgaaggaaataaactgctgggttcgtctgcgggc

SEQ ID NO: 67293 - DNA, 333 bp, Zea mays
  unsure (1)..(333): unsure at all n locations
cggggcggagcggaggtgagccgcgccgacttccccgacggcttcgtcttcggcgtcgctacctcagcgtaccagattgaaggagcgagaaggganggaggcaaaggagacagcatatgggatgtatttacagatgacaaagaacatgtcttagacagaagcaatggagaaattgcaggtgatcactatcatcgatacaaggaagacattgagctcatggcaagtctaggttttagcgcatacagattttctatatcttgggcgcgtatatttcctgatggcttggggagacatgtcaatgatcaaggagtcgccttctataatgacctcatc

SEQ ID NO: 67294 - DNA, 344 bp, Zea mays
ttgcaatcacaacgaacagaagctctcgatctcaccgacaccgaggaagaagagatcaatggcgtccgagcagggagtcgtgatcgcgtgccacagcaaggctgagttcgacgcccacatgaccaaggcccaggaagccggcaagctggtggtcatcgacttcactgccgcctggtgcggtccatgccgcgccatcgccccactgttcgtcgaacacgccaagaagttcactcaggtcgtcttcctgaaggtggacgtggacgaagtgaaggaagtcaccgcggcctacgaggtcgaggcgatgccgaccttccacttcgtcaagaacggcaagacggtcgcga

SEQ ID NO: 67295 - DNA, 230 bp, Zea mays
  unsure (1)..(230): unsure at all n locations
ttatgacacacaggagcgtgatccaattgaaagggttaggaagctcatgttggtccatgagttcgcaacggcccaagagctaaaggacatggagaaggagatcaggaagcaagtcgagctgccattgctaaagcgaggagtgtcactcctgatccactgagtctcacaatgttagttatgactcgttgatcgttgtgagcangagagtagacgtctcgagctgcacaaaa

SEQ ID NO: 67296 - DNA, 333 bp, Zea mays
  unsure (1)..(333): unsure at all n locations
cgcatgttggaacgaagaggtatgatgctcattcaggaggggagcgtgagattcaaagaactatgttggagctgctgaatcagctagatggttttgactcacgtggagatgttaaagtcattctagcaacaaaccgcattgaaagtcttgatccagccttgcttcggccaggccgtatagaccggaagattgaatttcctctaccagatattanaactagacgacgcatcttccagatacacacatcgaaaatgacattagctgatgatgtgaacttggaagagtttgttatgaccanagacgagttttcgggtgctgatattaaggcaatct

SEQ ID NO: 67297 - DNA, 359 bp, Zea mays
cacaagcagaagttgcggttgtacttttcttcctccgccgtcggctcagatctctgcgtgcgggctagcgatggcgtcgttctcggaggctcccccagggaacccgaaggcgggcgagaagatcttcaagaccaagtgcgcgcagtgccacacagtcgagaagggcgccggccacaagcaaggtccaaacttgaatggtctttttgggaggcagtcgggtaccaccacaggctactcctattccgcgggaaacaaaaacaaggctgtgatctgggaggagaacatctgtatgactacctgcttaaccctaagaagtacattcctggaaccagatggtcttcctgggctgaagaaccgca

SEQ ID NO: 67298 - DNA, 334 bp, Zea mays
gtgatccatacttcgacccggtcggttgcaagcatcctggatgcgaacctgcttatcctacaccaaagtgtgaaaagaaatgcaaggagcagaaccaagtttggcaggaaaagaagcatttcagcattgatgcgtacagaataaattcagatccacatgacataatggcagaggtctacaaaaatggtcctgtagaagttgctttcacagtttacgaggatttcgcacactacaaatctggagtgtacaagcacatcaccggtggcattatgggtggccatgccgtcaagttgattggatggggaccagtgatgctggagaggttactggttct

SEQ ID NO: 67299 - DNA, 273 bp, Zea mays
cgacctgatgagggcggttgttcctgttttcccctcatctgagtccaaaaatgtcagggaagggagattgaagggggagcgcaccctggcgagctacaatgtgctccatctgagttttcatgctattcgataaaatggtgtggtgcactccttttctgagtatatctcttgtacattattagatcctgatcaacttcatgggctttttgcgttgacttgacacatggggaatgtcaagcgagttaggaagtgatgcactgatgcgtctatata

SEQ ID NO: 67300 - DNA, 253 bp, Zea mays
  unsure (1)..(253): unsure at all n locations
gtcncctcctcgcgtctcaagggatagcagggtgcagcggctcgaagctggaggaagcggacgggttcgccatggggtctgcaggatcctcgggtccagttgtcaatcccagaaactttaggctgctagaagaactagaacgtggtgagaagggcattggtgatggaactgtgagctatgggatggacgattgtgatgacatatttatgcggtcctggacaggaactatcattggtcctcccaacactgttca

SEQ ID NO: 67301 - DNA, 342 bp, Zea mays
taggggagttcgcggcggggacgcggtcgccgtcggctttcgtacaaaacgccatctactccaaccgcatcaccatcttctccaagacttactgcccctactccatgcgtgctaagcacatatttcgagaccttaaggaagatccatatgttgttgaactagatacccgagtggatgggcgtgacattcaaagtgttctcctggacctagttgggcgtcgtactgtgccacaggtgtttgtcaatggacagcatattggtggctcagacgatacagtaaatgcgctttcaaatggacagctccagaaacttctcgggaagagtcagtcacaatgatgggtcg

SEQ ID NO: 67302 - DNA, 353 bp, Zea mays
atcgttcaaggcctcccgatcgacgagctctcaaggaagaagatggatgccactgcccaagagctgtcggaagagaagtcgcttgcttactcatgcctcgagtaaattataccacacacccagagagcaattgctaccccctgtgttttgaataaaagaaactccagctccgtccatagattctcactcagaactgctgcacgtcgctgtgcaggcgtgttgctggcttcgcccagcgtgtacgagactacgagggcttgtagccctttttggcctgatgacttgcgagacatttattgaaaaaaacttgcaattgtaccggttgacgatgaaagtggtagtgtagttttgtt

SEQ ID NO: 67303 - DNA, 336 bp, Zea mays
tgtgggcgcctcatgagctgggtctatgcttggcttgttgttcatcagatgggaacatttcagtcttcactgctcgttctgatggaggttgggataccacgcgtattgatcaggcgcatccggttggtgtgacctcagtttcttgggctcctgcaatggcaccgggagctctaatcagcgcggggtcttctggtcagtttgagtatgttcagaaactcgcttccggtggctgtgacaacacggtgaaggtgtggaagctcaacaacggcagttggcggatggactgtttccccgccctacagatgcacaaggactgggtgagagacgtcgcgtggg

SEQ ID NO: 67304 - DNA, 251 bp, Zea mays
cgtgaacccgccgccgacgcagcagcaggagacgcgccaaggagagcccgcaaggaggcgactatgagggccaagtggaagaagaagcgcatgaggaggctgaagaggaagcgccgaaagatgaggcagagatccaagtaggctgatggggattgtggatggtggtgtcggcatagttgtgttacgtttcttcgatgcgtgagttcatggagagatgtcacatcctagttcgtcgtaaccgtttgcaatgg

SEQ ID NO: 67305 - DNA, 347 bp, Zea mays
taggggagttcgcggcggggacgcggtcgccgtcggctttcgtacaaaacgccatctactccaaccgcatcaccatcttctccaagacttactgcccctactccatgcgtgctaagcacatatttcgagaccttaaggaagatccatatgttgttgaactagatacccgagtggatgggcgtgacattcaaagtgttctcctggacctagttgggcgtcgtactgtgccacaggtgtttgtcaatggacagcatattggtggctcagacgatacagtaaatgcgctttcaaatggacagctccagaaacttctcgggaagagtcagtcacaatgatgggtcgctgga

SEQ ID NO: 67306 - DNA, 285 bp, Zea mays
caatcctcttcaccgagttctcctcaaccaaattcaaggtcacagcggcgaacctctcggctatcatgtctggccgcggcaagggcgggaagggtctgggcaagggcggcgccaagcgccaccgcaaggtgctgcgcgacaacatccaggcatcacaagccggcgattccagttggcgagagggcgcgtcacgcatctccggtcatctacagaaccgggcgtccagactcctcgaacgtcatcgcgagcgtactaacgacagccgcgcagctgcacgcaggagtg

SEQ ID NO: 67307 - DNA, 184 bp, Zea mays
  unsure (1)..(184): unsure at all n locations
ccttgattctgacaaattggctgcattctctgctgcatacgcagaacttgaatctgtactttctggattgaatgtgcgggttgagacttactttgctgatgttcctgctgagtccgccaagaccctaacagcgctgangcgggtgactgcgtatggttttgatcttgtccgtggaacccaaact

SEQ ID NO: 67308 - DNA, 342 bp, Zea mays
ctcgtaccacggaccctcgccgccggggaaccgccgctcgctcaggaggacagccatggcgccggagccggaggatgatattatgaacgagaagaatccccgcccgctcgacgaggacgacatcgcgctcctcaaaacctatgggcttgggccgtactcgactagcattaagaaggtcgagaaggagatcaaggaaatggccaagaaaatcaatgacctttgtggtataaaggagtctgatacagggttggctccacctagccagtgggatttggtttcagataaacagatgatgcaagaagaacaaccgttacaagtggcaaggtgtacaaagatcataag

SEQ ID NO: 67309 - DNA, 344 bp, Zea mays
cgtgatctcaacccaaggcgtgcctccgctccggtcacccgtcgctccacgcaaccatgtcgacgaggaagaccagggagcccaaggaggagaacgtcacccttggacccactgtccgtgaaggagagtatgtctttggtgtcgctcacatctttgcatccttcaatgacaccttcattcatatcactgatttgtctgggagggaaactctggttcggatcaccggtggcatgaaggtgaaggctgaccgtgacgagtcgtcaccttacgctgctatgcttgctgctcaagacgtcgcacagcgctgcaaggagcttggcattactgcactgcacattaagctt

SEQ ID NO: 67310 - DNA, 348 bp, Zea mays
  unsure (1)..(348): unsure at all n locations
agggtttgctgctctccgaccccgagctccgaaggccgcagcatcaggcgaggcncccctcgcgtgtgaccgagatggcgctgccgaatcaggggaccgttgattaccccagcttcaagctcgtcatcgtcggcgatggtggaactggtaaaactagctttgtgaagaggcatctcactggagagtttgagaagaaatatgaaccaaccattggtgtggaagttcatccgttggatttcaccactaactgtggtaagatcaggttctactgctgggataccgcagggcaagagaagtttggtggcctcagggatngatactatatccatggccagtgtcagatcatca

SEQ ID NO: 67311 - DNA, 344 bp, Zea mays
gcaccttcaccttgttctccgcctcaggggtggtatgcagatctttgtgaagaccctgactggaaaaaccataaccctggaggttgagagctcggacaccatcgacaatgtgaaggcgaagatccaggacaaggagggcatccccccggaccagcagcgtctgatcttcgccggcaaacagctggaggatggccgcaccctagcagactacaacatccaaaaggagagcaccctccaccttgtgctccgtctccgtggtggtcagtaagtcatgggtcgtttaagctgccgatgtgcctgcgtcgtctggtgccctctcaatatggaggttgtcgaatatctgc

SEQ ID NO: 67312 - DNA, 132 bp, Zea mays
acttgttgagctcgtgaaacacaagcccaaggcaacaaaagagcaactgatagctgttatggatgattcctcagcttctgtagagaagtgctgcaaggctgacgataaggagacctgctttgccgaggagtt

SEQ ID NO: 67313 - DNA, 345 bp, Zea mays
  unsure (1)..(345): unsure at all n locations
ggcgattccatttctaccccgagacctccagccgtccgcccctgaaccctcagccttctccgtcccgcctcggcactcgacggccgccggcacacaccgcgcagtctcgagacaggaaccggaggaacgaggatggaggatgactcgccgctgacgaagacgatgaagggtgcggtgacaggactcgccgcggggaccatctggggcaccgtcgtcgccacctggtacgacgtgccccgtgtggagcgccacgtcgcgctccctggccttatccggacgctcaagatgtgcggcacctacgggnngcactnntcgcacatcgggggcctctacatcggcgtcgag

SEQ ID NO: 67314 - DNA, 287 bp, Zea mays
aaatcatccaaattaatctaacaacgaacgacaactccacgcagagcaacaatggcgccgccacagcatcatcggccagtacgtcggccgcgagcgcgaccaccaggccgtcatcgacgagaacctcgacaggctgaggaaggtgctgccagcgtacgaggcgaggctgtccgtctgcaagtacctggccggggacgacatcagcgccgccgacctctgccacttcggcttcatgcgctacttcatggccacggagtacgccggcttggtggacgcgtacccgcacg

SEQ ID NO: 67315 - DNA, 319 bp, Zea mays
cgcattcgatccaactcctgagcactttctcctcgtccccgacaagccaatcgaagccgagatacggccatggactccaccggcaccggagcagggggtaaggggaagaagggagcggccgggcgcaaggtcggcgggccaaggaagaagtcggtgtcgaggtccgtgaaggccgggctccagttccccgtcggccgcatcgggcgctacttgaagaagggccgctacgcgcagcgtgtcggcaccggcgcccccgtctacctcgccgctgtcctcgaatacctcgccgctgaggttctggagctcgctggtaatgctg

SEQ ID NO: 67316 - DNA, 270 bp, Zea mays
cgcttcgtaactctgaatcggctcgagggaacatggctcgcacgcagcaggcatagcagtagtggcgaccgccgtggtggccttggtgctgctggcggcggcggcgaccacggaggcggccacctgaagacgatccatatctatcccgccgtacgtcggcgcccgcggatcggcgtgtcatgaccatatctagctacctacgcatgatcgtcacgacttgcatgtctactactgctacgtgtaccactactgaatcgaaaactctccgcg

SEQ ID NO: 67317 - DNA, 351 bp, Zea mays
gtcccatgacctatccaatcggtgaccccgaggcaccacacctcagctcccgctgctgccctcttaatttcttccttcggcttcgccatgcgtccgttcagacgttcagtctttattggccgacaccaacatcttgctgcaggtagagctgctcgctccggccgtgacgggcaccaagaacgtcctgaaggcgtgctcggaggccaaggtgaagagggtcgtcgtggtgtcgtcggtggccgccgtgatggtgaaccctggctggccccagaacgaggccatggacgaggcttgttggtccgacgtcgaattctgcagaaccactcagaactggtactgtctctccaagac

SEQ ID NO: 67318 - DNA, 340 bp, Zea mays
ctctcgacaatggcactccaggcagcctacgagtacctgcagcaggccgtcggccatggcgcgtggtcgtccacgcagacgctgacgctgctgctcatcgccgtacccaccgtactactgctgctagcgtccctcgccaagagcacgtcgtcgtccggtaggggcaagccgccgctccctccctcgccgctgggcaccctccccatcgtggggcacctacaccacatcgggccccagacccacatctcgctccaggagctggtggccaagtacgggcacaacgggttcctgttcctccgcgccggcgccgtgcccaccctgatcgtgtcgtcgcccagcg

SEQ ID NO: 67319 - DNA, 338 bp, Zea mays
ctcggttgcttctgcatttgctggttatcaggaagctgtgcaagacagggatcacaaattcttgacaaaagcagtggaagaagcatatcgaggagtcgattgcggtgacggaggtccattcggagcagttgtcgtctgtaatgacgaagtagtagtcagctgccataacatggttctgaagcacactgaccctactgcgcatgctgaagtaactgcaattagagaggcttgcaaaaagcttgggaaaattgagctctcagactgcgaaatttacgcgtcctgcgagccatgcccaatgtgctttggtgcagttcatctctcccgaatcaagaggctgg

SEQ ID NO: 67320 - DNA, 300 bp, Zea mays
acttcatcacaatggcccttgtaaggtgatggctacttgaattttattggaaatgagtttggtcacacagaatggattgactttccaagagaagggaacaactggagctatgataaatgcagacgacagtggagccttgtggacactgatcacttgcggtacaagtacatgaatgcgtttgaccaagcgatgaatgcgctcgatgagagattttccttcctttcgtcgtcaaagcagatcgtcagcgacatgaacgatgaggaaaaggttattgtctttgaacgtggagaattagttttt

SEQ ID NO: 67321 - DNA, 334 bp, Zea mays
acatgttcaagtggacgacacttctgatcccgctcaccaccatcctgatcatcaacctggtcggcgttgttgccggcatctcctacgccatcaacagcgggtaccagtcgtggagtccgctcttcggcaagctcttcttcgccttctggttgatcgttcacctgtacccgttcctcaagggtctcatgggtcggcagaaccgcaccccgaccatcgtggttgtctgggcgatcctgctggcgtcgttcttctccttgctgtgggttcgcatcgatccgttcaccacccgcgtcactggcccggatactcgaacgtgtggcatcaactgctaggg

SEQ ID NO: 67322 - DNA, 341 bp, Zea mays
gccagcccattaaccctcgttcctgtcgcgcagcacgacctccacttccacatctcccccggcgtcggcgcggtcagttgaaccatggcggactccaaggccacctcggcggtcaccctccgcacccgcaagttcatgaccatccgcctcctggcccgcaagcaattcgtgcttgaggtgatccaccccggccgcgccaacgtctccaaggcggagttgaaggagaggcttgccaaggcgtacgaggtgaaggaccccaacaccatctttgtcttcaagttccgcacccacttcggaggaggaaagtccactggtttcggcctcatctacgacaacctcga

SEQ ID NO: 67323 - DNA, 315 bp, Zea mays
ggccaatccgaaatctcgagctttcgcgccggcgaccacagcaaagaggaggccacagcacgacagcgccccagggtacctactctcgtcgcagcggcagcagtgaggggaagatgtcgtcggtgttcagcggcgatgagaccgcccccttcttcggcttccttggcgccgccgccgctctcgttttctcatgcatgggggcggcgtacgggacggccaagagtggcgtcggcgtggcgtccatgggtgtcatgcgcccagagctcgtcatgaagtccatcgtgcccgtggtcatggctggtgtgctcggtatct

SEQ ID NO: 67324 - DNA, 335 bp, Zea mays
atcggttacctgaagaaaggcctgaatccaccgtcggtgacaagcctgcaattctcaccgctgctactgatgctcgcgctcaagactgggatcatcaccggcgtcattgccctcgccgaagcatcgccgtggggaggagcttcgccatgttcaagaactaccacatcgacggcaacaaggagatgatcgcgatcgggacgatgaacgtcctgggctcgctcacgtcgtactacctgaccacggggcccttctcgcgctccgccgtgaactacaacgccgggtgcaggacggccatgtcgaacgtggtcatgtcgctggcggtgatggtcacgctg

SEQ ID NO: 67325 - DNA, 347 bp, Zea mays
tgtgatcaaattttgattgtggcaaacacacatatttattgggaccacaatggatcgatgtaaagttggctcaggcaaaatatcttctttcgagagtatctcagtttgagcaactcatctcaaataaatataattgtaaaccttcagtgatcatctctggtgacttcaattcgacacctggtgacaaggtatacaattaccttttatctgccaacctaggatctacggacgaagctccaatcaagttacgcagcctttatgctgcgaatggaggggagccagagtacacaaactacactcctggttttaccggaacactggactacatattcttgtcgatggtagtt

SEQ ID NO: 67326 - DNA, 335 bp, Zea mays
ctcctccagagctcgtcgccaccggccaccgccaccctcgatcagccgtccgtcgaggtaaggtcagcatggtgagggtcagtgtgctcaacgatgcgctcaagtccatgtacaacgctgagaagatcggcaagaggcaggtcatgatcaggccgtcgtccaaggtcatcatcaagttcctgacgtgcatgcagcgccacggctacattggagagttcgagtacgttgatgaccaccgatcgggcaagatcgtggtcgaactcaacgggaggctgaacaagtgcggcgtcatcagccctcgctttgatatcggcgtgaagacattgagggtggac

SEQ ID NO: 67327 - DNA, 326 bp, Zea mays
agttcttaaaaacgatcataagtttcggcaggtaactcaagaacagaagggagaagtccaacactatgggctatcaatttactcgtgggatgaatttctgtccctggcggctgaccaagaatttgatcttccagtcaaggagacggcagacatatgcactataatgtatactaactggaactactggtgacccaaaaggagtactgatatcaaatgctagcattatttgtctcattgcaggtgtggaccggttgcttaactatgtaaacgaagagttggcagacagcgacgtttacatgtcttaccttcctcttgccacatctttg

SEQ ID NO: 67328 - DNA, 219 bp, Zea mays
gcctgtactacactgatccatctggtacatttggcaatgcaacgcaaaggcaattggtacaggttctgagggagctgatagttccttgcaggaacagtacaacaaggaattgaccctccaggaggcggagaccatagccctttctatcctgaagcaggttatggaagagaaggtgaccccaaacaacgtcgatattgccaaggttgcccccaagtacca

SEQ ID NO: 67329 - DNA, 218 bp, Zea mays
  unsure (1)..(218): unsure at all n locations
tgagcgccattactacacacgctatgactatgagatgttgatgcaggggctgctaaggagcttatggcaaacctagtaagcatgcagtcatcactttctgatgttaacaagttgtttncaggagatcggtctgatgtttctgatgtagttgcagctgacgagtttgagtacaaggatcctgttgatggctctgtgtccaagcaccagggcatccgata

SEQ ID NO: 67330 - DNA, 314 bp, Zea mays
  unsure (1)..(314): unsure at all n locations
ctgaaagagagatggagtttaaggagaaatttgaaaaaatgttcaagaggtagctgagaagcaccaaaacacaaacttgtatttgaagaacttagaggagaacattgatgatgagaaaatacgtgaactctttgctgagtatggcaatattacttcctgcaaggttatgcgggattcgaatggtgtcagcagaggttctggatttgttgctttcaaatctgctgaagatgctaaccgagctcttacggagatgaatggcaaaatggttggaagcaacccctttatgtagctcttgcgcacgtnaaagaagacag

SEQ ID NO: 67331 - DNA, 329 bp, Zea mays
  unsure (1)..(329): unsure at all n locations
tgcagatcctgcagacggaggccaccactctctccgccagctcacgcttcttcagcgggactcgcngagatcgcgacgcagaacaacgagctcaagttccggctgcaggccatggagcagcaggcgcactgcgtgacgcattgaatgaggcactgacagccgaggtccaacgcctgaagctcgcgactccagagctcggggattcttgctcgtccagcaacctagctcagcagatccaaatcagcgttcaggaccagatgtttcaactgcatcagcagcaggcaacgcctataccgttctaccagctgcagcaggcgcacgaatggcgc

SEQ ID NO: 67332 - DNA, 311 bp, Zea mays
ctcctccagagctcgtcgccaccggccaccgccaccctcgatcagccgtccgtcgaggtaaggtcagcatggtgagggtcagtgtgctcaacgatgcgctcaagtccatgtacaacgctgagaagatcggcaagaggcaggtcatgatcaggccgtcgtccaaggtcatcatcaagttcctgacagacatgcagcgccacggctacattggagagttcgagtacgttgatgaccaccgatcgggcaagatcgtggtcgaactcaacgggaggctgaacaagtgcggcgtcatcagccctcgctttgatatc

SEQ ID NO: 67333 - DNA, 337 bp, Zea mays
cttccagaacacccagggtcttatctttgttgtggacagcaataccgtgaccgtgttgttgaagccagagatgagctccacaggatgctgaacgaggatgagctacgtgatgctgtgctgcttgtttttgccgacaagcaagatcttatgaaatgccatgaatgctgctgagattactgacaagcttggattacactccctgcgccagcgacactggtacatccagagcacttgtgccacaactggcgagggtctgtatgaaggcctggactggctgtccagcaacattgcgagcaaggcttgaggcctaccttgaatgtcaaccggaactgactag

SEQ ID NO: 67334 - DNA, 313 bp, Zea mays
cttctagaggaccgagggtcttatctttgttgtatacagcaagaccgtgaccgtgttgtagatacagaattgtgctccacatgatgctgaacgaggatgagctacgtgatgctgtgctgcttgtgtttgccaacaagcaagatcttcccaatgccatgaatgctgctgagattactgacaagattggattacactccctgcgccaggcacactggtacatccagagcacttgtgccacaactggcgagggtctgtatgaaggcctggactggctgtccagcaacattgcgagcaaggcttgaggcctaccttg

SEQ ID NO: 67335 - DNA, 339 bp, Zea mays
tgacagttccttctcaagggatgaggaatcttgaggttgaggcaacgaattttctcagtgtatcgtgaccagtactattaaggtggcatctcatctgtttacatttgggaggatgaagataatgggtttatcgcatgcttcttaattaagaaagatggacaaggaaaaagagggtacatgcagattggttcatgggatgctattcatgttgttcaggttggtcctgaagaagaagttttgacacattactgcttgaacagcactgtgatgctctcattgacaacagacaacaagcagtctggaaccttcaacctgtctggatccattagggcagatgag

SEQ ID NO: 67336 - DNA, 261 bp, Zea mays
gtgggcgcctcatgagctgggtctatgcttggctttggttcatcagatgggaacatttcagtcttcactgctcgttctgatggaggttgggataccacgcgtattgatcaggcgcatccggttggtgtgacctcagtttcttgggctcctgcaatggcaccgggagctctaatcagcgcggggtcttctggtcagtttgagtatgttcagaaactcgcttccggtggctgtgacaacacggtgaaggtgtggaagctcaac

SEQ ID NO: 67337 - DNA, 320 bp, Zea mays
ggcatctgctatgttccgtgggaagatgagcacaaggaagtggatgaacagatgctgaacgtgcagaacaagaactcttcctacttcgtggagtggatccccaacaacgtgaagtcgagtgtgtgtgacattccaccaattggcctgaagatgtcctccacattcgttggcaactcaacctccatccaagagatgttccgccgcgtcagcgagcagttcacggccatgttcaggaggaaggctttcttgcactggtacacaggcgagggtatggatgagatggagttcaccgaggcagagagtaacatgaacgacctggt

SEQ ID NO: 67338 - DNA, 229 bp, Zea mays
tagggttgggaaatgcgtggagattggtcttccatgcttatcctattagtcgcgctttcccagtatctcaagcacgtgcatattcgtcatgttcctgttaccgagaggttctcattgctgatgtgcatcactcttgtatgggtatatgcccacatcctcacagcaagtggtgcatacaagcacaatttaattgtcacccagatcaactgtcggacagaccgtgccaatc

SEQ ID NO: 67339 - DNA, 336 bp, Zea mays
  unsure (1)..(336): unsure at all n locations
cggctcgagcacacaattaggtcacatacacacttcccgctgcctccctaggtagcagcttctacaatggaggcatccaacaagctcgcagtcttgctcctgtggctggtcatggcagctgccactgccgtgcacccttcctactctgagaattcgcctcaagactacctcactctccaaaacagcgcccgtgccgccgtcggtgttggcccggtgacctggagcacgatgctgcagctgttcggcagtanagtannccgnacagagggccggcgactgccgtctccagcactcgggcgggccctacggtgagaacatcttctggggtcgccggct

SEQ ID NO: 67340 - DNA, 322 bp, Zea mays
gaattttgatcctaatgcatgtggttgggctatgataatgaacatgtttgatctggaagaatggaagaagaaagacatttctggaatttaccacaaatggcagaacatgaacgagaacaggctgctctggaaactggggacattgccaccagggcttctaactttttacaagctgacacaccctctggacaaatcatggcatgtgcttggcttagggtacaatccaaccattgagcgctcagagatagacaatgctgctgtcatccactacaatggtaacatgaagccctggctgaaaattgcaatgataaagtatcggcct

SEQ ID NO: 67341 - DNA, 270 bp, Zea mays
tattaacacatttaatgccacactcacagttgatatatatgtccaagttcttcaagctgatggtggaacaaggtcagcttgcataaatgctgcaacactagctcttgcagatgctgggattccaatgcgagacattgccacatcatgtagtgctggttatctgtgttctactcctttgctcgatgtgaattacctcgaagacagtgctgggggttccgatgtcactgttggcattcttgcaaagatggacaaagtgactgtgcttcagat

SEQ ID NO: 67342 - DNA, 260 bp, Zea mays
ctgcgactgcaacacctgcaagtgcggcaccagctcggctgctcctgctgcagctgcaactgagctggcccggcccggcgatggcgcacgagagtcgagaggaggaggacgacgacgaggcgtataaatataatagcggcgatccagtaaataagatcctgtcaactgcacccgccattatccatggtcgctcgctcctcgcctgcgtctcctggtcctggggttcgtctgaacgtcctcgcggcttcacgacggcgatg

SEQ ID NO: 67343 - DNA, 348 bp, Zea mays
  unsure (1)..(348): unsure at all n locations
attctatccaggattctagggttcgttcgcctcgtctcgcgatggacaagggcagcgtcgtcgtgcccccggctcctgccgccgccgccgcgaagaaggccaagcgcttcgagatcaagaagtggaacgccgtctctctctgggcctgggacatcgtggtggacaactgcgccatctgccgcaaccacatcatggacctttgcatcgagtgccaggcgaaccaggcgagcgccaccagcgaggagtgcaccgtcgcttggggaatttgcaaccatgcattccacttccactgtatcagccgttggctanagcaccgtcaagtgtgccctcttgacaacagtgagtggg

SEQ ID NO: 67344 - DNA, 325 bp, Zea mays
  unsure (1)..(325): unsure at all n locations
aacacagacagagccatgagcaacattgaatcttctccagagggtttcaacatgctccgtcgcatgtatgacactgttcaagagccttttctgaatgcgacaacaatgggtagcgagggtgatcgaaattcgaatccatttgctgcacttctaggaaatcaggggtctaaccaagcaagagactcagctgcaaatggaacaactacagcttcagacaccacatcaggggctccagctccaaatactaatccacttccgaatccttggggtccanatgctggatctgcccaaggagcagcaagatcccctcctgctaccaacacta

SEQ ID NO: 67345 - DNA, 345 bp, Zea mays
tatcaagtactacacggaatgctttgggatgaaactgctgaggaaaagggatgttcctgatgagaagtacaccaatgccttccttggctttgggccacagaacaccaactttgcagttgaattgacatacaactatggcgttgacaagtatgacattggaacgggctttgggcatttcgcaattgctaatgatgatgtgtacaagttagctgagaatatcaaatccaagggtggtaagatcacccgcgaacctggtcctgtcaagggaggatccactgttattgccttcgcacaggatcctgatggctacatgtttgagcttatccagagggctgacacactgag

SEQ ID NO: 67346 - DNA, 333 bp, Zea mays
  unsure (1)..(333): unsure at all n locations
gttcttgctgtgaagcaagcgtgcaaatttgcaaaagatcatgctgtcgcaaatggcccaattgtccttgagatggatacctacagataccatggccactctatgtcagatccaggaagcacttaccgcaccagggatgagatttcaggtgtcaggcaggaacgggatccaattgaaagggttagaaagttgcttttgactcatgacctggcaaatgctgctgagctcaagaatatggagaaagacatcaggaaacaagtagatgacgctattgctanagcanaggaaagttctatgcctgatacttctgaactcttcacaaatgtttataag

SEQ ID NO: 67347 - DNA, 312 bp, Zea mays
tctccctcagatcctccctaagattgccatggcggaccagctcaccgacgaccagatcgccgagttcaaggaagcattcagcctcttcgacaaggacggcgacggctgcatcaccaccaaggaacttggaactgtgatgcgctcgttggggcagaaccctactgaggctgagcttcaggacatgatcaacgaggttgatgctgatggcaatggaaccatcgacttccctgagtttctcaacctgatggcacgcaagatgaaggacacagactctgaggaggagctcaaggaggccttccgcgtgttcgacaa

SEQ ID NO: 67348 - DNA, 342 bp, Zea mays
aaggacctcgccttcgacgaggccgcctgctccgggcattgccacgcctacgccgcggcgggcgcgtctaaggtgaagaaggtggactcgatccggcagtcgctgcgcatgcgcgggttccggtgcaacctcgtgtacacgcgcgcgtgcacgcgcctcaacgtcatcccgctctcggcgtcgcggccacgtgcgctaaggtacctgtcgatacaatggggcatcgacctgtccaaggtgtccgtgctcgtgggcgacaagggcgacaccgaccgcgaacggctgctccctggcctacacagaacgctggtcctgccggagctagtttgctacggcagcgag

SEQ ID NO: 67349 - DNA, 334 bp, Zea mays
  unsure (1)..(334): unsure at all n locations
gtaaaatggtaccacatcctgatgaaccatctcaaaccttgtatgacaccatgatgcgccatcatccaccgatcactagagtggctggtgctggaacagattttgcagcatttgtcgagcatataggagtcccgtcactcgacatgtcttacgggctgtttgaagaataccctgtttaccactcgttgtatgatgattatgtttaggtggagaggtctggagancccttgttccacaggcatgttgcagtggccagcgtttggggtctgattgcactgaaacttgctgacgacgagatcatacgcttcaattacgtctcttatgcctccgaact

SEQ ID NO: 67350 - DNA, 351 bp, Zea mays
  unsure (1)..(351): unsure at all n locations
ctccaaggcnccaactacccccagtctcggacgacaactatccagaagcgcaagactccaaagccgtcgccttcctatccatcccttcctcgccgcgagggtcgcctgagatcacataaacaatggtgaaggctgttgctgtgcttggtagcggcgatggtgtcaagggcaccatcttcttcacccaagagggagatggccctaccactgtcaccggaagtgtctctggcctcaagcctggcctccatgggttccatgtgcatgcacttggtgacaccaccaatggctgcatgtcaactggaccacactacaatcctgcgagcaaggaacatggagcaccagaagatgaga

SEQ ID NO: 67351 - DNA, 345 bp, Zea mays
ggcggctccatccccacccgcgctctctccacggctgtcgcacctgcggcggtggcctcggaggaggacgaggcggccgtcaccgtcaagggcgtgcgcatctcgggccgcccgctctacatggacatgcaggcgacgacccccgtcgacccgcgtgtcctcgacgccatgctccccttctatctctctcgctacgggaaccctcactcccgtacccacctctacggctgggagtccgacgccgccgtagaggacgctcgcgcccgcgtcgcctcactcgtcggcgccgacccgcgcgagatcttcttcacctcgggcgccaccgagtgcaacaacatcgccgtc

SEQ ID NO: 67352 - DNA, 348 bp, Zea mays
aggaagtctacttcagggatatatggccctcgacagaagaaattgcgcaggttgtccaatccagtgtgctgcctgacatgttcaagggcacctatgaggctatcacaaaaggcaacccaatgtggaaccagctaactgtcccagaagcatcactctactcatgggattccaaatccacttacattcatgagcccccttactttaaggacatgaccatgtccccacctggcccctctacagtgaaagatgcctactgcttgctgaacttcggggacagcattactacagatcacatttcacctgcaggaagcatacacaaagacagtcctgctgccaagtatttgatgg

SEQ ID NO: 67353 - DNA, 254 bp, Zea mays
ataccttaaaagcatggtggcaggctcattctaagtggccgtacacaaccgaggaagacaaggctcgactggtgcaggaaacagggctacaactgaagcagatcaataactggtttatcaaccagcgtaactggaactggcacaacaattcggcgtcatcctcgtcggacaaaagcaagagaaaaaggaacactgcaggtgatgggaacgcagaaccagcctggtagggcatggtcggggaacgagtttatgta

SEQ ID NO: 67354 - DNA, 343 bp, Zea mays
cccaaggtggcacgagcagctgcagtgctggtgcctcaatttcaggggcagggtgacagtcgcatctgtgaacaacttccagctcgttgctgccacgcagcccgctgctggagcaccaaccccatcacaggctaccccagtgccgccgcccgagcacgagaaggtgatcctgcaatttgggaaggtggctaaggacatgttcaccatggactaccgttacccactgtcagccttccaggccttcgcgatctgcctgagcagcttcgacaccaagctggcctgcgaatgaagccaccagtcatggctcaaagtcaaggacgatctgtctgtttcacgaagacgg

SEQ ID NO: 67355 - DNA, 229 bp, Zea mays
gcagcttgtagagattgagaaggttgttctacaccctaactactcccaggtagatattgggctcatcaaactcaaacagaaggtgtctgttaatgagagagtgatgcccatctgcctaccttcaaaggattatgcagaagtagggcgtgtgggttatgtttctggctgggggcgaaatgccaattttaaatttactgaccatctgaggtatgtcatgctgctctgtgct

SEQ ID NO: 67356 - DNA, 287 bp, Zea mays
tacctgcagccctccatccacgaactcccgttctccatttccagccatggcggtgtcgatcgagctcaccaaggagtacggctacgtcgtgctggtgctggtggcctatgtcttcctcaacctttggatgggcttccaggtcggcaaggcccgcagaaagtacaaggtgttctaccccaccatgtacgccatcgagtcggagaacaaggacgccaagctcttcaactgcgtgcagagggggcaccagaactctctagagtggatgcccgttttcttcgtcatactgc

SEQ ID NO: 67357 - DNA, 315 bp, Zea mays
aacatctttctcaagtttgtgaatgactgccgccaaattggtattacttgtcccattgttcctggcataatgccaataaataactacaaaggtttcctgcgcatgactgggttctgcaaaactaagataccttctgagatcactgctgcactagatcctatcaaagacaatgaggaggctgttagacaatatggaatccaccttggaactgagatgtgcaagaaaattcttgctactggcattaagactttgcacctttacacactagacatggacaagtctgctataggaattttgatgaatcttggattaatt

SEQ ID NO: 67358 - DNA, 338 bp, Zea mays
  unsure (1)..(338): unsure at all n locations
caagattcaaacaatggcgtccatctcctcctccaaggtgctcgcacttggtgcgctcatcttctccttccttgtcacgtatgcctcgtgcgctagaccggtcaacttcacagcctcagacttcaccgccgatcccaactgggaggctgccagagccacctggtacggcgcgcccaccgtcgccggccctgacgacgatggtggcgcgtgcgggttcaagaacgtgaacctgccgcccttctccgccatgacgtcgtgcggcaaccagcccctgttcaaagacggcaagggatgtggctcctgctagcaaatacgatngcagatactacctgcctgct

SEQ ID NO: 67359 - DNA, 340 bp, Zea mays
aagcttgttgccatcaagctgattgttccatccaaagaatttgctgagaagcactaccatgatctcaaggaaaggcctttcttcagtgggttgtgtgattttctcagctctggccctgtgcttgcaatggtttgggaaggagagggtgtcatcaagtatgggagaaaactaattggtgccacagacccacagaaatctgaaccaggaaccatcatgggtgatcttgccattgttgttggaagaaacatcattcatggaagtgatggcccagagacagcgaaggatgagatcgctttatggtttgaacccaaggagctggtctcttacaccagcaatgcgg

SEQ ID NO: 67360 - DNA, 334 bp, Zea mays
aggctcgaggtctcaacgacacgatggagaatctactggcatctgtggacaagaacgaggcggaagtatcaccatcaacactatatgccattgcctgtgtcatggagggggtgccgttcatcaatgggagcccccagaacacctttgtgcctgggctgattgatcttgctataaaaaacaactgcttgattggtggtgacgacttcaagagtggacagaccaagatgaaatctgtcttggtcgatttccttgttggtgctggaataaaagccactcaatcgtgagctacaaccacttgggaaacaacgatggcatgaactgtctgccctcaaac

SEQ ID NO: 67361 - DNA, 320 bp, Zea mays
  unsure (1)..(320): unsure at all n locations
ccgacatcgtcncttcgtcnccacgagcaaccgataatccgccggcgttgagatgttggtttatcaggatctcctatctggcgacgagctcctgtcggattcattcacctacaaggagctcgagaacggcgtcctgtgggacgtcgagggagagtgggtcacccaaggtcctgttgatgtggacattggtgccaatccatccgccgagggtggtgaggacgatagcgttgatgacacagctgtgaaggtggttgatattgctgacacattccgtctacaggagcaactacttttgacaagaaatcattgtgtctacatca

SEQ ID NO: 67362 - DNA, 335 bp, Zea mays
caggagcatactgaaagatgctggaatctcatcagacaataagttcacttctattgctcttagcaacttctttgctggtgctgctgccggatgtacaaccctggtcctcatctatccgctcgacattgctcacactcgtcttgcagctgatatcgggcgtacagacacccgccagttcagaggcatccgccacttcatccagaccatctacaagaaaaacggcatcagaggcatatacaggggattaccagcatcgctccacgggatggtcgttcaccggggcctgtactttggcggcttcgacactgcgaaggatgtcctggtgcctttggagt

SEQ ID NO: 67363 - DNA, 304 bp, Zea mays
  unsure (1)..(304): unsure at all n locations
ctcgtcnccgtccagtccacctttccctcttcctctccgactccgccgccggcggaaccccaaccggcgaggatggggaacatcttcgtgaagaagcccaagattaccgaagtggacagggccatcctcaccctcaagacgcagcgccgcaagctcgcccagttccagcagcagcttgagaaggtaattgaagcagaaaaggaagctgcacggcagttggttcaacagacgaagagagacagagctttgattgcactgaggaagcagaaagctcaggaagagctgttgaaacaagttgacacat

SEQ ID NO: 67364 - DNA, 224 bp, Zea mays
catgcagatttcacgaaagcaaaggagaaggtgatgtacaagaagaaggaaggtgttccggatggtctctacatgtagtagacgtctcctgccttgtcagaacaagttatcctcgtctctctcgtcatgggagatttgattgccacggcacttgatgcacacctataagtggtctgagaacgtgtattatgctttgattggttcaagtaaaatttctcttggag

SEQ ID NO: 67365 - DNA, 344 bp, Zea mays
  unsure (1)..(344): unsure at all n locations
cggctcgagcggctcgagggagacatggtttatccggacaaaaatagcattgttcataggctggaggtgattgctaaatgcttcagccatgacacagttgaagagattgttgatgccttggaaagtgaagcagccagctcaaatgaagaatggtgtatcttggcgctgaaacgattgaaagaggcctctccgttagctttgaaggtctcactgcgatcgatacgcgagggtagatatcagacacttgatgagtgccttgtccgtgagtaccgcatgtccatgaagtggatctcanagcaattttctcatgaatctgcgaggagatcagagcacgactagtcgac

SEQ ID NO: 67366 - DNA, 331 bp, Zea mays
  unsure (1)..(331): unsure at all n locations
tgcgacgagaaggagcaggcgngggggaggcggtcgtcgggcgagatgagcgactccgtctgccccgactgcaagaagcatacggaggtggcgttcgaccactcggcgggggacatggtgtgcaccgagtgcggcctcgtcctcgaggcgcactccgtcgacgagacctccgagtggcgcaccgtcgcgaacgagtccaacgacaacgaccccgtccgtgtcggcggccccacaaacccgctcctcactgatggcggcctctccaccgtcatcgccaagcccaacggcgcgccaggcgacttcctatcgtcctcactcggcaagttgcaga

SEQ ID NO: 67367 - DNA, 345 bp, Zea mays
cgagaagccgaagaaaattcgaagacgaggagcagctacactgcggacggacttcgggcatggagggccagttccaggttagcaaggaggaggtcatccaagcatggtacatggacgacagtgaagaggaccagaagcttcctcatcatcgcgagcccaaagaattcatccctctcgacaaactttccgaactaggaatattaagctggcgcctaaatgctgatgattgggagaatgatgagaacctcaagaaaattcgtgaagccaggggttactcttacatggacatttgtgatgtgtgcccagagaaatagccaattacgaggctaagataaagaatttctt

SEQ ID NO: 67368 - DNA, 228 bp, Zea mays
  unsure (1)..(228): unsure at all n locations
gagatccagaaaggtgcctcgtctgttgaaggtgttgaagctaaaacatggcaggtccctgaaaccctccctgaggaagtgcttagaaagatgggcgcaccccctaagcctgacgtgccagtcatcacgccgcaagaactcgcagnagccgacggaatcctcttcggagttccaacgaggttcggaatgatggcagcgcagatgaaggcgttcttcgatgccactggt

SEQ ID NO: 67369 - DNA, 232 bp, Zea mays
gctggagcgtagtaagtcggaatggcggtcgagcgtcgtagtcgctacttcgcctccgatcgtcgacgacgacgcatccacccgagcccttctccgcgatataggcgtcgccgcactgccgcagctccggctatgtcaatcttcgagtacaatgggtccgccgtggtggcgatagtggggaagaactgcttcgcgattgccaacgaccggcggctcggcgtgcaacttcaga

SEQ ID NO: 67370 - DNA, 349 bp, Zea mays
  unsure (1)..(349): unsure at all n locations
atcggcaaggccaatcncgagcggtggtgcgaaacctcgagcgctcgcgccggtgaccataacaaagaggaagccgcggtagcacgggtagcggcagcagtaagggggagatgtcgtcggcgttcagcggcgatgagaccgcccctttcttcggcttccttagcgcctccgctgcgctcgtcttctcatgcatgggggcggcgtacgggacagccaagagtggcgtcggcgtggcgtccatgggtgtcatgcgcccagagctcgtcatgaagtccatcgtgcccgtggtcatggctggtgtgctcggtatctacgtgctcatcatcgccgtcatcatcagcactgggat

SEQ ID NO: 67371 - DNA, 330 bp, Zea mays
  unsure (1)..(330): unsure at all n locations
caagtctaagcgcaaccgcccagtgaccttatcgaagaccaagaagaagccaggtttggagcgcaagggcaaagtagtcgccgagataaaagatgccgtggacaagtacagcagcgcctatgtttttacctacgataacatgaggaatcagaagctcaaggacctcagggagcagctcaagtcttctagcaggatatttctcgctgggaagaaggttatgcagatagcgctggggcgttcagctgctgatgaagctaagacaggctccacaaactttcanagttccttcaggcaatctagtctgttattcacaatcttccgagggatgat

SEQ ID NO: 67372 - DNA, 349 bp, Zea mays
catgatctgaaacttggaaatggaacatcacttcttatatttacaagtataatatcatatttgcctgcatcatttcgggaggacagttgcgcagcatttcaagatgggaattatgttggacttctcacaatcatattgtcattcttactattagtccttgggattgtctatgttcaagaagctgagcgcaaaatacgcctcaattatgcttctcgttacagcagtcgaactggggaacttcagcgatctgcatatttaccatttaaggtcaacagttctggagtcatgcctatcatattgtctacatcttcactggctttgcctggtactttggcacggttttctggtt

SEQ ID NO: 67373 - DNA, 339 bp, Zea mays
attaaggtcttcgccgcggtgccgtcgaagcctggcgctgagtttcctaatgccgcccgctggtacgagaccgtctctgcggctgtagcctcaagattccctggtaaggctgttggtgtaaatctgcctgcgggatcagctcctgcggcagctgctcctgcggatgaggctgaggatgatgatgaccttgatctttttggtgatgaaactgaggaggacaagaaggcagctgatgagcgtgccgccgctgccaaagcctcttctaaaaagaaagaaagtggtaaatcctccgtccttatggatgtcaaccatgggacgatgagactgatatgaagaagc

SEQ ID NO: 67374 - DNA, 342 bp, Zea mays
tggcaacaagactggaccgattaacttggggaacccaggtgaattcaccatgctggaacttgctgagaatgtgaaggagttgatcaacccagatgtgacagtgacgatgaccgagaacactcctgatgatccccgccagaggaagccggacatcacaaaggcgaaggaagttctgggatgggagcccaagatcgtcctgcgggacggcttggtgctcatggaggatgatttccgggagcgcctgaccgtgcccaagaaaaccaaggcctaaattgccctgcagttggggaagtatatccacacgagggaacatactcatagtcgggctcgtcattatttgtg

SEQ ID NO: 67375 - DNA, 334 bp, Zea mays
  unsure (1)..(334): unsure at all n locations
gtctgtcgctgaggagagagctggacgtaagcttggtggactgagggttcttaactcctactgggtgaatgaggatagtacctacaagtactttgagatcatccttgtggacgttgcccacaaagccatgcaaaccgacccgaggatcaactggctatgcaaccctgtgcacaagcaccgtgagctccgtggcctcacctcagcaggcaagaagtaccgtggtctgcgtggcaagggccacacccaccactagaacaggccctcaaggagagccacctggaagcgcaaccagaccctctcnctacgccgctaccgctgcacaactcgtcgggtg

SEQ ID NO: 67376 - DNA, 342 bp, Zea mays
gcaagctcaaaccaaaaattcaagagtgggctcaatggcattcaggtggaactgcaggctactgatgcaagtgaaatcagccttgatgagatcaaggatcgggctcgctaggcatcatcatgatcatgcatcatggacttggcctactactgtggatttgtatgccattatagacttggtgctgtgaaagactgcttgatgatttgcgggtttgttgctgtgtaaaaaaaggtcccatggctcccagaagaccatgaaggttcggatctatcatgtaattccttgttatctgctcattatgtatggactatggacatgtgttgcgctgttcaacttactact

SEQ ID NO: 67377 - DNA, 277 bp, Zea mays
tgaactctctgctccttcatttgtgagttcttccgtgatgcccaagagaaggtcctcccgtatgctgactacatcgtcggcaacgaaactgaggcaaagatctttgccaaagtcagaggatgggagactgagaatattgaggagattgctttgaagatctctcaacttcctttggcttcaggcaagcaaaagaggattgctgtgattactcaaggtgctgatccagtggttgttgctgaggatgggacggtgaaacgttccctgtgatcctattgcc

SEQ ID NO: 67378 - DNA, 268 bp, Zea mays
tgtgttatccttataccagaaggcctgattgatttcatcccagaggttcaaaaactcatcgcggaattgaatgaaattttggcacatgatgttgttgatgaggcagggagctggaaaagcaagcttcagcctgaatcaagggagctgtttgagtttttgcccaatactattcaggagcaacttatgcttgaaagggatccccatggcaatgttcaggtcgacaaaattgaaaccgagaaaatgctcattagcatggtggaactgaact

SEQ ID NO: 67379 - DNA, 273 bp, Zea mays
gtctcgcgtccgcctcagcccgccgcaaggagagttcaggagacatcttcgagaagctgaaatggctcctaaagctgctcctgccaagaagggtgatgccaagacccaggccttgaaggttgccaaggctgtgaagtctggggaagccaagaagatgaccaagaagatccgcacgtctgtgacatttcaccgcccaacgaccctgaagaaggctagggaccccaagtacccacgaatcagcactaccggaaggaacaagcttgatcagtacca

SEQ ID NO: 67380 - DNA, 334 bp, Zea mays
caacggcgaggcggctgctggaggagaccttcacgagtgaggcagaggcggaggcgctaccgagcttgccctcggggttctacgacgccttcgtcctgaggggaatccgcgtcgtccaggccctccagcccggcacactcctctgccacttcaacgtgccctccagactactcaactcgggcggcttcctgcacggcggcgcaaccgcctccctcgtggatctggttgcctccgccgccttcgccactgccgggctacgcaccaggggctcaccccttgagatgaacatctcctaccttgatgctgcttttgctagatgagagattgatatcga

SEQ ID NO: 67381 - DNA, 238 bp, Zea mays
cagtgcgcaggggtcttgagagaagaaccacactcgagcgtgccgcgcgcgcgacctccttgaaccactgccggcgcggcggcatatggccttaaaggcggtggctgctgctacgtacgctgccgtagagtctcggtcgccgcgatagctctagctagtcgtttatgtgttgtgctttgtgtgtgcatgcttgtgtctgggggcatgcagtgcagtgccgtactatatgctgtatgcg

SEQ ID NO: 67382 - DNA, 223 bp, Zea mays
atccgcgcctctacatttcttctctctctgctcctccgcctccgcctccgcctgatccatccaagacagggatcgccatgtcggactcggaggagcaccacttcgaatcgaaggccgacgctggggcgtccaagacctacccgcagcaggctggcaccgtccgtaagaacggcttcatcgtcatcaagaaccgtccctgcaaggttgtggaggtttctacctc

SEQ ID NO: 67383 - DNA, 313 bp, Zea mays
tcgagaatatgctgcggatgagaaggctttctttgatgactacaaagaggcccacctcaagctctccgaactggggtttgctgatgcttaaatagaccctatcttggagtgatacattctgctgcctgtatggacatcatgtggtcttttgcatctggagtcaatgtgaacaagcagattgtcgtattgtctttctcgtaataaatttgtcgatgttgagcccttaggctgttgttggtacattggtacttcgtcgatgcttgaattgggaccctttgtccgttttcctagactctgatgctgtatgcaactg

SEQ ID NO: 67384 - DNA, 315 bp, Zea mays
acttcgctgaggaagcccgcacccctgcccggatccgatggccaacagcaacctcccgcggcggatcatcaaggagactcagcggctgctcagcgagccagcaccggggatcagcgcgtcgccctcggaggagaacatgcgctacttcaacgatatgatccttgggccggcgcagtcgccctatgaaggtggagtttttaagcttgaactctttttacctgaggaatatccaatggctgccccaaaggttaggtttctgacaaagatttatcatcccaacatcgacaagcttggtaggatatgcctcgacattct

SEQ ID NO: 67385 - DNA, 321 bp, Zea mays
tgaggaggcgttcaacataaccgtcgacgaaacaagcgcacaggacatcgcgacggtgcaggacgctgcagacctcatcgagaaactcatgctggaagcgcctccaaaggttgtctagatcgatccatcagtcttgcgattggcgacttggcgttttatgctaaattgttcatgttacccaatttgttctttattgatggttcaagatcagatttttgtatggatgttgctgaggtatacattagatgctccacaggctgcatggagcagatgaagacgatgtattccacttcccatttgcatgtcgtacttccatagaga

SEQ ID NO: 67386 - DNA, 330 bp, Zea mays
ggctcctcccatttcgtcggcttcgtttgtcgtcgtcgtaagctgcagctagtgtggactggagatccaccactccaccagtccggtccatctgctggacctcgattggtttcttcttacctaggaacatccggggatgtcgactcctgcgaggaagaggctgatgagggatttcaagcggttgatgcaggaacctccggccggcataagtggcgccccgcaggataacaacataatactgtggaatgctgtcatatttggacctgatgataccccgtgggatggaggtacgtttaagctgactctccagtttaatgaagatatccaaac

SEQ ID NO: 67387 - DNA, 337 bp, Zea mays
cggcgccctcctcttccctgccattaacgtcaacgattccgtcaccaagagcaagtttgacaacctgtatggttgccgccactcactccctgatggtctgatgagggccaccgacgttatgatcgccggtaaggttgccgtggtctgcggatacggtgatgttggcaagggttgtgccgctgcactcaagcaggctggtgcccgtgtcattgtgaccgagatcgaccccatctgcgccctccaggctctgatggagggtcttcaggtccttcccttggaggacgttgtctcggaagctgacatcttcgtgaccaccactggcaacaaggatatcatc

SEQ ID NO: 67388 - DNA, 338 bp, Zea mays
  unsure (1)..(338): unsure at all n locations
ggctaaacggttgcaggaggcaaagaaggatcctgagaaggcaagcaaaattgcttgggatgtggccagaagacgtgctgctggtgagaaggtccatgatgaccccaagctgattaaggagagcttgaagaaggaggaaaagcggcagcagaagcatgctgcgcagtggaaggagaggcagaaaactgtagataagcagaggaaggacaagcagaagaaaaggacagagaacatccgggatcgggcacagcagaagaagatgcgcaagattgagaagcgtgagataaaacttatgcgcnctgggtttgaggggcggaaggatggttatgtcaacgagt

SEQ ID NO: 67389 - DNA, 337 bp, Zea mays
gaagcgagcgagcgagcagcagtaggcagcggcgcgggcgaggagcagaccagcacccagcagccctcgtcggggggcggcactgcagcttcaccagccgccgcctttccccgtctcctctgcctctgcctctccccctaacccccttccatttctccaccccaccccgctcccgcttccgcttcctcgccacttagttcgttccgcacccgcagccgcgtctgcgttcgcattgggggcacgcaatggagcagtacgagaaggtggagaagatcggggagggcacgtacggggtggtgtaaaggcgctggacaaggccacaacgagacgtcgcgct

SEQ ID NO: 67390 - DNA, 336 bp, Zea mays
attttatttccagcaaagaggggtagatcatgaaaaggcagttgccgccatgattggtggattctgcagatctgttttcgagcaccttccctatgaattcgcacaggaggtggacgcactcatgaacctgaaactcgagggatcagttggctaatttgttggctcagcgatttcgtgtaatactccatgacagccagttagctagaaaatccatgtgtacagcagtacgagaagaataaattacaggataactatacatttcctggctggttgtaatactgaatgttgatgatgtctatggcaattggcaacgaactatgaagatgtagcagttga

SEQ ID NO: 67391 - DNA, 279 bp, Zea mays
tgggaagatgactaaagatctggcgattcttgtccatggatcttccagcgtcacgagaagccattacctgaacaccgaggagttcatcgacgcagtcgctactgagctccgatcaagactgggagccaactgagcctacaagaaactttgcatggcgactttgaatgcttcgtcaccgtcaccgatctgctagtcgtcttttctgttatgaagaagtgaatgtgcgtcaccgcagtttcgatgcaagctaattatagatgtggtgtcacgtgagcgctc

SEQ ID NO: 67392 - DNA, 336 bp, Zea mays
  unsure (1)..(336): unsure at all n locations
gacgcagagaagctcacaaaggcccttttctcctttgcgactcgactagctcctgttatcatatttgtggacgaggttgacagcttacttggtgcaagaggtggtgcatttgagcatgaagcaacaagaaggatgcgcaatgaattcatggcagcttgggatggtctcaggtccaaagagaaccaacggatccttattcttggtgcaacaaatcgtccatttgatctggatgatgctgtgatacggcgtttacctagacggatatatgttgaccttccggatgcgcagaaccgaatgaaaattctaaagattttacttgcgaaggaanaactagaa

SEQ ID NO: 67393 - DNA, 335 bp, Zea mays
gtagaattgccagacgcatatccttacaaatccccatcgatcggtttcatcaataagatatatcacccaaatgtcgatgaaatgtctggttcagtctgtttggatgtcatcaaccagacttggagcccaatgtttgatcttgtcaatgtgttcgaggtcttccttccacaacttctgttatatcctaatccttctgatccattaaatggagatgcagctgcgttgatgatgcgtgatcgccctgcttacgaacaaaaagtgaaagagtactgtgaaaaatacgccaaaccaggggatgctggtgtcaccccagaagagcagtccagtgacgaaga

SEQ ID NO: 67394 - DNA, 331 bp, Zea mays
  unsure (1)..(331): unsure at all n locations
gctcgcccgagatggcgaacgcgagatcgggtgtcgctgtgaacgatgagtgcatgctgaagtttggcgagctgcagtcgaagaggctgcaccgcttcataactttcaagatggacgacaagttcaaggagatagttgtggaccaggtcggggatcgcgctaccagctacgatgacttcacaaacagcctccctgagaatgactgccgatacgcgatctatgatttcgactttgttactgcagaggatgtccagaagagcaggatcttctatatcctatggtcnccatcctccgccaaggtgaagagcaagatgctttatgcaagctcaaa

SEQ ID NO: 67395 - DNA, 318 bp, Zea mays
ctatgacacacaggagcgtgatccaattgaaagggttaggaagctcatgttggtccatgagttcgcaacggcccaagagctaaaggacatggagaaggagatcaggaagcaagtcgacgctgccattgctaaagcgaaggagtgtccactgcctgatccatctgagctcttcacaaatgtttatgttaatgactgcggtttggagtcgtttggtgtagacaggaaggaggtgaggaccgttcttccgtaggctggcaaacaaaaaaaaaaggttctactgatacaggcgagcgaagggatccctcctctgttacgtgt

SEQ ID NO: 67396 - DNA, 190 bp, Zea mays
tgtgcaattgccaccccaatgttttggataaaaaaagagactccaactccattcatagattctcactcagaactgctgcacgtcgcagtgcaggcgtgttgctggcttcgcccagcttctttttttgcctgtgatttgcacgacatttatatttattgaaatcttgcagaatcgcttgacgatgaaagtg

SEQ ID NO: 67397 - DNA, 340 bp, Zea mays
gccgagaaggacaaggggaagaaggccccaatctcacgctcctcccgcgccggcctccagttccctgttggacgtatccaccgtcagctgaagcagaggactcaggcaaatggtcgtgttggtgccaccgcagccgtctactccgctgccatcctggagtacttgactgccgaggttctggagctggctgggaatgctagcaaggatctgaaggtgaagcgtatcacccctcgccatttgcagctagccattcgtggagacgaggagctggacaccctcatcaagggcaccatcgcaggcggaggtgtcatcccgcacattcacaagtccctgatcaaca

SEQ ID NO: 67398 - DNA, 323 bp, Zea mays
gacgctgattccgttgtcacgctcaccgcgacaaggtactccattgacgcgctctttctaccgactatcacgaactggtatccttggtacgacgacgaagaggttaatcagtgcagtggcaccgctacatccatccatccatcttgacatttttttcttcactcccttcgtgctggaacctaactctgtgaaccttgattaggtcggtgggtggtgccaggtgtacgaggggctgacactggtgacggtccgaggcgcagggcacgaggttctcctgcaccggccgcggcagggcttgaagctgtcgagcactactgcggggt

SEQ ID NO: 67399 - DNA, 333 bp, Zea mays
gacctagaggatgaggcagacgatgacaaggcagacgatgacaaggccgactctgatgccgaggatgacaaggactctgaggagcacgacgagctctagatgatgagtatgatagaggtggccactgacattggtgccgttggcctggatttatcagctcttccattttgttctccttttctgttatcagaaactttaggacattgttaagaagctgagggacagtatgggtcgtagcgcttagtcatttttcccattaaaatcgatagcactgcaggaagatcttttcccacaattgttatatttcatcctgatgttagatgtcagctgtgt

SEQ ID NO: 67400 - DNA, 335 bp, Zea mays
cagccaaccgcatccagtccacccccatcaccctcgaccccgacaacctcgacccgatggcgcccaaggcggagaagcgcctgcccgcctcgaagtcctccggcaaggagggcggcgagaagaaggggaagaagaaggccaagaagagcgtggagacctacaaaatctacatcttcaaggtcctgaagcaggtgcaccccgacatcggcatctcctccaaggccatgtccatcatgaactccttcatcaacgacatcttcgagaagctcgccggcgaggccgctaagctcgcccggtacaacaagaagcccaccatcacctcccgcgagatccag

SEQ ID NO: 67401 - DNA, 334 bp, Zea mays
accaatacctgctgcagccaccctctgtaccgtgagtctgagcttatccaggagaactaccttggtgtgagatatgcagcacagaggaagctactggatgagctgggcatcccagcagaagatgccccagttgaccaattcacccctctgggccgaatgctttacaaggcaccatctgacgggaaacggggggagcatgagcttgactacctgctgttcatcgtccgggacgtgaaggtgcagccgaacccagatgaagtcgctgacgtgaagtacgtgaaccgcgacgagctcaaggagctcatccggaaggctgacgctggcgaggacgggg

SEQ ID NO: 67402 - DNA, 332 bp, Zea mays
cgtgtttgagactagcggaccgaccttgaagttgaagttgaaaaggtcggcctgcgcggcgatggatgtcaagtgccggcgtctggaggggaaggtggccatcgtgacggcgtccacgatggggatcagcctcgccatcgccgagcgcctcggtctggagggcgccgccgtcgtcatctcctcccgcaagcagaagaatgtgaacgaggcggtggaggggctcagggccaagggtatcaccgcggttggtgccgtctgccacgtctccgacgcacagcagcgcaagagcctcatcgagacggccgtcaagagctttgggcacatagatattc

SEQ ID NO: 67403 - DNA, 328 bp, Zea mays
gccgagaaggacaaggggaagacggccccaatctcacgctcctcccgcgccggcctccagttccctgttggacgtatccaccgtcagctgaagcagaggactcaggcaaatggtcgtgttggtgccaccgcagccgtctactccgctgccatcctggagtacttgactgccgaggttctggatctggctgggaatgctagcaaggatctgaaggtgaagcgtatcacccctcgccatttgcagctagccattcgtggagacgaggagctggacaccctcatcaagggcaccatcgcaggcggacgtgtcatctcgcacattcacaagt

SEQ ID NO: 67404 - DNA, 327 bp, Zea mays
gccgccaccacttgctcgccttcgccccttctgtctcccttcgtccgtagcagaccaggaacgcccaaggcgctagcgtctccaagatggtgctgcaaaacgacattgacttactcaatccatcggcagagcttgagaagctaaagcacaagaagaagcggctagtccagtcccccaactccttcatcaacgaataaagtgccagggctgtttcagcataaccactgtgttcagccactcccagactgtggttgtgtgcccaggctgccaaactgttcttgcaacctaccggtgggaaggccaggctcacgaggggtgctcttccgt

SEQ ID NO: 67405 - DNA, 327 bp, Zea mays
acgccgagaagacgcgagaggcagggaggaggtgagccaccggaagcggagacgtgagtagtcgaccaaccccgtcgatccggctgcggcgcggcgtgctagatcgctaccgaccatggtggtggaggagatcgccgagggggtgaagaacctcaccgttaccggagatgcggcggcttcaggcggagaggggcagaggaggggcggcggcggcagcagcaaccgcatccaggtgtccaacaccaagaagcccctcttcttctacgtcaacctcgccaagaggtatatgcaacagcacgacgatgtagagctatccgctcttgggat

SEQ ID NO: 67406 - DNA, 333 bp, Zea mays
aatggcatggctgacagcacactggatgtatcctacgccgcaaagctgaggcagggatgcccccgctctggtggtgacaacaacctcttccccttggacttcatcacccctgccaagtttgacaatttttactacaagaacctcctggccggcaagggccttctaagctctgatgagattctgttaaccaagagcgctgagacagcggccctcgtgaaggcatatgctgctgatgtcaatctcttctaccagcactttgcacagtctatggtgactatgggttacatctcgccactgacagggtcacaaggtgagatcaggcagaactgcagg

SEQ ID NO: 67407 - DNA, 327 bp, Zea mays
tgtgtgtgcggtcgattcgcttctgctgcagctagggcttagaggttttctgggcgcggagcggagcgcggcggcggctatggctgcggcggaggaggagatcgcggtgaaggagccgctggatctgatacgcctcagcctcgacgagcgcatctacgtcaagctccgatccgaccgaaagctgcgctgcaagctccatgcgtatgatcaacatttaaacatgatacttggagatgttgaagaggtcgtgacaactgttgagatagatgatgcaacatatgaagagattgtgcgcaccacgaaacgcactatcccctttctttttgt

SEQ ID NO: 67408 - DNA, 332 bp, Zea mays
gggtgcacgaaacgaacttcaacaaccggccgaactcgttcaaagtcctttctccgccccgcacctgtgtggcttattaccgtgtagacgaagcaggggctggacgacgtcttcacgcgaaagcagagacaggaaagacgtctccagcagagagcatcgacgtcaaagcttccagagctagtagcacagaagacaaggaggcaacggctggtggcaagaagggatggaagtttgcgcggcagccatccgatcaagataccaaatgaagccaggagtccttggtgaggactggactggctgccggcgccctgttagtagtcctgctctactgg

SEQ ID NO: 67409 - DNA, 322 bp, Zea mays
attaaggtcttcgccgcggtgccgtcgaagcctggcgctgagtttcctaatgccgcccgctggtacgagaccgtctctgcggctgtagcctcaagattcactggtaaggctgttggtgtaaatctgcctgctggatcagctcctgcggcagctgctcctgcggatgaggctgaggatgatgataggcttgatctttttggtgatgaaactgaggaggacaagaaggcagctgatgagcgtgccgccgctgccaaggcctcttctaaaaagaaagacagtggtaaatcctccgtccttatggatgtcaaccatgggacgatga

SEQ ID NO: 67410 - DNA, 320 bp, Zea mays
  unsure (1)..(320): unsure at all n locations
tcgctctacatttcttctctctctggtcctccgactactgctgatccatccnagacagggatcgcatgtcgactcgaggagcacacttcgaatcgaaggccgacgctggggcgtccaagacctacncgcagcaggctggcaccgtccgtaagaacggcttcatcgtcatccagaaccgtccctgcatagttgtggaggtttctacctccaagactggtaagcatggccacgccaaatgccactttgtcgccatagacatattcaatggtganacagcttgagatattgttccttcatcacacaactgtgacatgccgcat

SEQ ID NO: 67411 - DNA, 320 bp, Zea mays
cgacgacaacccgccgtgctaccgcaccctcaccttcgccgacttcaagcgcatctacagcgttgtcaagctgggctcgtcgctaaacctcaccacaaatctcaagaacgttcagaaggagctctgatcatccatcaaattttgtagcctccctcgaattggcggcgaggacctagctagctagctggcaagatgtagtctgtgtcatcactgtcatgttactgcccggacgtcatggtgatgataggaatgacggaataaaaatgaaatggcaaatatgcgtgtctggcgcacgcatattcttgctaagtacttacgtc

SEQ ID NO: 67412 - DNA, 291 bp, Zea mays
ccgagagctagacgcgaaggagatcagcagttcttcagctaggcaggaaggcacaggaaggaggagatggcgtcaaagaggattcagaaggagctcaaggatctgcagaaggagcctcccacctcgtgcagtgcaggtcctgttggtgcagacatattccactggcaagcaacaataatgggtccatctgatagcccatattctggtggagttttcctagtcacaatccattttcctcctgattatccttgcacaccaccaaaggtggcatgtcgtactaaggtgttccat

SEQ ID NO: 67413 - DNA, 318 bp, Zea mays
gccgagaaggacaaggggaagaaggccccaatctcacgctcctcccgcgccggcctccagttccctgttggacgtatccaccgtcagctgaagcagaggactcaggcaaatggtcgtgttggtgccaccgcagccgtctactccgctgccatcctggagtacttgactgccgaggttctggagctggctgggaatgctagcaaggatctgaaggtgaagcgtatcacccctcgccatttgcagctagccattcgtggagacgaggagctggacaccctcatcaagggcaccatcgcaggcggaggtgtcatcccgcac

SEQ ID NO: 67414 - DNA, 346 bp, Zea mays
ctaaaggcgaagagtacgccgccatcttcgacgtcctgggcggcggcatcttcaacgccgacggggagtcgtggcggcgccagcgagtgaaggcgcagatgctcatgaccggccctcggtttcgagccttcacggcgcggtgcagccgcgacaaggtggagaggagcctcctgcctttcctcgcccaccacgccgacgacgacggacgagcgcccccgtgcgacctgcacgacgtgttcctgaggctgacgttcgacatgacatgcactctcgtcttcggcgtcgaccctgggtgcctggcgttcggcttgcccgtggtccccttcgcgcgcgccatggacgacgc

SEQ ID NO: 67415 - DNA, 332 bp, Zea mays
ctcgagccgttcgaggcagccatcgagacctcatatctggtgctggagtccgccatggccgagctcatgaaccacaggcgcgtcatgaagaagctgcaagcggaggtacgggcgtacggagcggagaagaagctggacatgatcagggaggacgacctgagcagcctgccgtacctaaaggcgtccatgaaggaagcgctgcggctgcacccaccggggcccctgctgctgccgcactactccaccgccgactgccagatcgacgggtaccacatccccgccaacacgcgcgtcctcgtgaacggctgggccatcggcagagacccggcggt

SEQ ID NO: 67416 - DNA, 325 bp, Zea mays
gactgggccaaactcaatcattggcagagctgttgttgttcacgctgaccccgatgatcttggaaagggtggacacgagctcagcaagagcaccggaaacgctggcggccgtgttgcttgtgggatcatcggactccagggctgaactgaaacaaatggtcgctggacttcgggggcgcctgagagtgccgtcaccagcaggctagaataacatcccgaagacatcgtgaaataataataagagcgcctgatatgtgatcagtggtgtacttgccattaagcacctgtggcaaccgatgagctgaactgtgttggactgttggct

SEQ ID NO: 67417 - DNA, 317 bp, Zea mays
tatgattccatcgcagctgggaattaccctgaatggcagctctacatccagactattgatcttgaccatgaggataagtttgactttgacccgctcgatgtcaccaagacctggcctgaggatatcatcccgctgcagcccgttggacggatggtcctgaacaagaacgtcgacaacttctttgcagagaatgaacagattgctttctgcccagcgattattgttcctggaattcactattctgatgataagctgctccagacgagaatcttctcctatgctgatacccagaggcacgccttggtccacctatctga

SEQ ID NO: 67418 - DNA, 252 bp, Zea mays
cgttcaagaggttcgtggagatcgggcgcgtggcgctggtgaactacggcaaagactatggccgactcgtcgtcatcgtcgatgatggtcgaccacgtacaggcgcacttagttgacgcccctgatatggtcaggtgccagattaacttcaaacggctctcacttactgacatcaagattgacatcatacgcgttcccaagaagtcaaccctgatcaaagctatggaggatactgatgtgaagacgaattgg

SEQ ID NO: 67419 - DNA, 326 bp, Zea mays
ctcgcacaacggcacgattctcctcctccgtccgcgtactctcggtttcggcgatgtcggggcgcggcaagggcggcaaggggctgggcaagggcggcgccaagcgccaccgcaaggtgctgcgcgacaacatccagggcatcacgaagccggcgatccgtaggctggccaggaggggcggcgtcaagcgcatttctgggctcatctacgaggagacccgcggcgtgctcaagatcttcctcgagaacgtcatccgcgacgccgtcacctacaccgagcacgctcgccgcaagaccgtcaccgccatggatgtcgtctacgcgctc

SEQ ID NO: 67420 - DNA, 326 bp, Zea mays
ccagcatcctcccgtctccgtcgtctcgtctccgctcctcacctcgccagccatgggcaagatcaagatcggaatcaacggtttcggaaggatcggcaggctcgtggccagggtcgccctgcagagcgaggatgtcgagctcgtcgccgtcaacgaccccttcatcaccacggattacatgacgtacatgttcaagtacgacaccgtgcacggccaatggaagcacagcgacatcgccctcaaggactccaagacgcttctcttcggcgagaaccggtcacgtctttggcatcagaacccgaggagtcccgtggggtgagctggtg

SEQ ID NO: 67421 - DNA, 322 bp, Zea mays
  unsure (1)..(322): unsure at all n locations
tgtgtgtgcgttcgattcgcttctgctgcagctagggcttagaggttttctgggcgcggagcgggaggcggcggcggctatggctgcggcggaggaggagatcgcggtgaaggagccgctggatctgatacgcctcagcctcgacgagcgcatctacgtcaagctccgatccgaccgcgagctgcgcggcaagctccatgcgtatgatcaacatttaaacatgatacttggagatgttgaagaggtcgtgacaactgttgagatagatgatgaaacatatgaagaaattgtgcgcaccacganacgcactatcacctttctt

SEQ ID NO: 67422 - DNA, 302 bp, Zea mays
gagagagtgtgtgtgatcggtacaaggatcaccgctgtgcctgcgcgtgctgcttcaccgaatcgagtcagatcctgtccgaatccgagctaagggatggcaaccggtagtgaagcctcgaaggcagctgaggctgtggttgactggcataaacacgacagcaagacgatgctccatgcggtttaccgtgttcgggatctagaccgcacaatcaagtactacacggaatgctttgggatgaaactgctgacgagaacggatgttcctgatgagacgtacaccaatgccttccttggctttgg

SEQ ID NO: 67423 - DNA, 325 bp, Zea mays
gcagccacaggaaattcctttctttcagaataccacattttcaatccctgtaaatgatccacaccaggtttggaattctgacgagcacgaagatttgcaagttcttgtgatcatatcgagaccgcctgctaagatatttttatatgatgattggagcatgcctcatacagccgcggtactgaaattccccttcgtctgggatgaggactgcttcgaagcagcaaaagacgaactctaggtcacaagtgtttcctgcaatttatctgcttcatccatgatcctgctggtgctggactactacaattctcagcactagttgtaataa

SEQ ID NO: 67424 - DNA, 292 bp, Zea mays
cagggatcttcaggcagattttgcgaggcatacttgatttggaatctgaaccatggccaagtatctctgataatgctaaggatagagtccgtaagatgcttatccgcgatcctacaaagaggttcactgctcatgaggttttatgtcatcgcatggattgttgatgatgctgtcgcacctgataagcctattgattctgctgcgttgtcaacgctgaaaaacttctctgcaatgaacaagctcaagaagctggcattcagggtgattgctgcacatctatctgcggaggaga

SEQ ID NO: 67425 - DNA, 326 bp, Zea mays
ggatagtccaaagcgcatctctttcttgctcaattcgtccaggcgagacctgcaagatcacctacggctccggctcgatcgccgggttcttcagcgacgacgacgtgctggtcggggacctgaccgtcaaaaaccagaagttcatcgagacaacgcgcgaaagcagcgtaacgttcataatcggcaagttcgacggcatcctcggtctcggataccccgagatctccgtcggcaaggctcctccgatctggtaggtatatatatctcattgctcttgcaccgcgccggcggccggcccatcacatgtaggttgccaggcagagcat

SEQ ID NO: 67426 - DNA, 255 bp, Zea mays
cggctcgagccggccggttggaagccaggggagaggtccatgaagcccgaccccaagggaagcaaagagtacttcgcggccgtctagactcgccgtctttgacaagctttgctacgtttttgtcatggtgcccgctaagccccccggcagtaggttggagttttgcggactcgcgtttttacaaatctcggtgctctgaaccgagcgtagtagccccctttgctgttgtgcatcccgattgagtgctgttctttg

SEQ ID NO: 67427 - DNA, 318 bp, Zea mays
cagatatgagctcttatgcagatgcacttcgtgaggtttctgcagcccgagaagaggtgccaggtaggcgtggttatcctggatatatgtatactgatttggcaacaatatatgagcgtgctgggcgtattgaaggaagaacaggctccattacccagattcctattctaacaatgcctaacgatgatatcacacacccaactcctgacattactggatacattactgagggacagatatacattgataggcagctccataacagacagatttatccacctattactgtatatctgtccgcagtgatcctccaggaag

SEQ ID NO: 67428 - DNA, 353 bp, Zea mays
  unsure (1)..(353): unsure at all n locations
cggctcgacggaagatgttgatctcatgagaagcctaaattctgatgcataccgattttcaatctcctggtccaggaatctcacagatggcgaaggganaatctatgtcgaaggagtacaatattacaacaatcttatagactacatgattaagcaaggccttactccttacgccaaccttaaccactatgatcttccgcttgcgcttcagaagaagtaccaaggctggttaggcccaaaaattgtggacatatttgctgactatgctgatttttgtttcaagacttttggcaatcgagtcaagaactggttcacattaaatgagccaaggatagtagcattccttggttatg

SEQ ID NO: 67429 - DNA, 123 bp, Zea mays
  unsure (1)..(123): unsure at all n locations
tggtcgtnttggtaggaagggtgttgccatcaactttgtgacccgcgacgacgaacgtatgctgtttgacattcagaagttctacaacgtgttgattgaggagctgcctgacaatgttgctga

SEQ ID NO: 67430 - DNA, 267 bp, Zea mays
tcggagcgcacacacacacaaccagatctcgcccaaatccacccgtcggcacctccgcttcaagatgcagatctttgtgaaaaccctgactggcaagactatcaccctcgaggtggagtcgtctgacaccattgacaacgttaaggccaagatccaggacaaggagggcatccccccagaccagcagcggctcatctttgctggcaaacagctggaggacggccgcacccttgcggactacaacatccagagggagagcaccctcca

SEQ ID NO: 67431 - DNA, 344 bp, Zea mays
  unsure (1)..(344): unsure at all n locations
ccggataggtagcaccggagcaggtagaacgctgcacaatccccttcgccgccgccaagatggtgaacgttcctaagaccaagaagacgtactgcaagaacaaagagtgcaagaagcacacactccacaaggtgactcagtataagaagggcaaggatagcctgtctgcccnagggaagcgccgttatggtggtcagaccaagcctgtcttccacaagaaggccaagaccaccaagaagattgttctgaagctgcagtgccaaagctgcaagcactacttcacagacgccatcaagagtgcaagcatttgagatggtggagacaagaggcaaggcacatccttt

SEQ ID NO: 67432 - DNA, 311 bp, Zea mays
  unsure (1)..(311): unsure at all n locations
cttccctcnctcactctcnccgcgggccgccagaggcaatttcgacctcgattcgaccccgattcgtccgcccgcgaccgggattccctccgccaagcgcggatctgaacgctgcgctccgtgtcgccgctcgaatccgccatgaagggggccaactccaagggcgccgccaaggccgatgccaagctggcggtgaagagcaagggggcggagaagccgccaaggcaggaaagggaggccggcaggaccccacaagcctagagggctccagcgcttcttcgtgtcatggagaatttcgcagagttcaggag

SEQ ID NO: 67433 - DNA, 311 bp, Zea mays
gtgatctagcgtagtaactcggaatcggtcgagcccaattctaagcgagacggggcacaggaagaggagagcctaaaaccctaaccccccgaatcggatccggccgccggagcgcggaaccccaccccggccgccatggagatgggagggatgagcgacgctgagcggctgttcttcttcgagacggcctgcaagaactccgaggtcgcgtacgagcagaaccccaacgacgccgacaacctgacgcggtggggcggcgcgctgctggagctgtcgcaggtccgaaccgctccgacagcctcagcttcttg

SEQ ID NO: 67434 - DNA, 237 bp, Zea mays
tggtacaataatccacctttcaggatgcatcactttgctaggcatcccctggatcttgagttggaagagaatgatggattcagtgagaaacttcttaaactgttcattactcataagtttgatggaagctacttcatcgagacagaagatggcacttctggtttagatgtcaaagttgatcacaagggtgaccacgattttcgtgtgggatgttctggtctgcaaactgatgtgact

SEQ ID NO: 67435 - DNA, 337 bp, Zea mays
cacaaccgcatcctctcatcagcttccttccacattcgtctcgagatctcgccccgtcgccatggacgcgatcgacagcgtggtggatcccctccgcgacttcgccaaggacagcgtccgcctcgtcaagcgctgccacaagcccgaccgctaggagttcaccaaggtggcggcgcggacggcgatcgggttcgtcgtcatgggcttcgtcggcttcttcgttaagctcatcttcatccccatcaacaacatcatcgtcggttccggctaggcttacaggagtacagggcgactagcatgggagtagtgcaatacttttgggagcaatagatcacga

SEQ ID NO: 67436 - DNA, 318 bp, Zea mays
cggctcgaggcaacacgggagtagtgttgagtgccgaattgacatgaagaatctgattggcgaacatcttgtagaatctgtcaggaaaacttcagcacaactgttaatgcactcactgagcctattgatatatatagtgaatggattgatgagtgtgagcgtgtcaacactgttgaaggtgacgatgatgcgtgagcttgccccatgtgatgaaactgttacctacaatcgtaatgtaatgtgctggaatcctcgatgccatagcccatagtcagccaggcttggaataacgtatggctgactgatatgccagtaggc

SEQ ID NO: 67437 - DNA, 349 bp, Zea mays
ctctccctctctctctcttcgccgtccgaagctccgcaccccaatctaatcgacacctcaccgagatgggccgcaagttcttcgtcggtggcaactggaaatgcaatggaaccacagatcaggtcgagaagattgtcaaaaccctgaatgaaggacaggttcccccttcagatgttgtggaggtcgttgtcagccctccttatgtcttccttcctgtggtcaagagccagctgcgccaagagttccatgttgctgctcagaactgctgggtgaagaagggaggtgctttcactggtgaagtcagtgctgagatgctcgtcaaccttggtgttccctgggtcattcttgg

SEQ ID NO: 67438 - DNA, 307 bp, Zea mays
gagagaactcgctcgcgaaggctgaactcatggctcgcgtcttcgttgggaacctggatccgcgtgtcacggcgcgggagattgaggacgagttccgcacgtttggggttctgaagagtgtatgggttgctaggaaaccaccagggtttgccttcattgacttcgatgaccgcaggatgcacaagatgccattcgcgatttggatggtaagaatggttggagggttgagctgtcaaccaaagatggtggtggccgtggccgagaccgtaatggttctgatatgaagtgctatgagtgtggtgaagtt

SEQ ID NO: 67439 - DNA, 319 bp, Zea mays
ccaagactggtaagcatggccacgccaaatgccactttgtcgccatagacatattcaatgggaaaaagcttgaagatattgttccttcatcacacaactgtgacattccgcatgtgaaccgtactgagtatcagctgattgatatttctgaggatggatttgtgagccttcttacttcagataggcaacactaaggatgatcttagactcccaactgatgagactcttgtggcccagattaaggaagggttcgaaagcgggaaggatcttgttgtgactgtcaagtctgcgatgggggaggacagatctgcgcgctgaa

SEQ ID NO: 67440 - DNA, 312 bp, Zea mays
gtgcgcaaccggcgcacctgttcctggacgagctgggcgtggcgtacgacgaggccgaggactacgtggtcatcaagcacgccgcgctcttcacgtccacggtcatgagcctgctcctggcgcgccccaacgtcaagctgttcaacgccgtggccgtggaggacctcatcgtcaggggagtgcgcgtcggcggcgtcgtcaccaactgggcgctcgtgtccatgaaccacgacacgcagtcctgcatggaccccaacgtcatggaggccaaggtcgtggtcagctcctgcggccacgacgggcccttcggcg

SEQ ID NO: 67441 - DNA, 352 bp, Zea mays
ctcgtggggagcggcccgatccttgggctggctccggcccccgagtacaccttcctcatctacgccgcacccgttgggaactacttcaaggagggcctggcgcccatcaacctggtggtgcatgacgagttccaccgcgcgatgcccggcggcaccggcggggtcaagaccatcgccaactacgcgccggtgctgagggcgcagatggacgccaagagcaaggggttcacggacgtgctgtacctggactcggtccacaagcggtacctggaggaggtgtcgtcgtgcaacgtgttcgtcgtcaagggcggcgtggtcgccacgccggacaaccggggcaccatcctgccgg

SEQ ID NO: 67442 - DNA, 252 bp, Zea mays
ctgctgcagcgcctccgccgccgccgccgcatctaacgcagttccctccgccgcagcccgaggcaagatggttctccagaacgacattgatctgctcaacccgccggcagaactcgagaagctcaagcacaagaaaaagagactcgtccagtcgcccaactccttcttcatggatgttaagtgccaggggtgcttcagcataaccactgttttcagccactcccagactgttgttgtgtgccctggctgcaa

SEQ ID NO: 67443 - DNA, 259 bp, Zea mays
acggcatcagcaggcgcaagtgccccgtgggagacgctcgcgctgcggaccgtcgggctggtgcttgccatgctgctccagtgcttcgactgggatacggttgatggagctcaggttgacatgacggagagcggcgggctgaccatgccccgggccgtcccgttggaggccatgtgcaagcctcgtgcagctatgtgcgatgttcttcgggagctctaatattctggcacatcctaggttctcgctctataggtgaaag

SEQ ID NO: 67444 - DNA, 333 bp, Zea mays
  unsure (1)..(333): unsure at all n locations
agacgatgtgacatttacagctttggagtcgttctcctagaaacaataaacggaagggatcctgttgactatggacgcccaccaaacgaggtagatctagttgactgagtanaaatgatggatgccagcaggcggtcagaagaagtagtggatcccaccatagagacacgaccttcgacgagagctctaaagcgtgcacttttgacagctctgaggtgtgtggatccagattcagagaagagaccgaagatgggtcaagttgtccggatgctggaatcggatgatccaattcctcgaggggacagaagatctaagcaccaccgtggaaggagc

SEQ ID NO: 67445 - DNA, 287 bp, Zea mays
ctgatcttcagggtgacgaggatcaggcttacaggaaaatcaggctccgtgctgaagatgtgcaaggcaggaatgtgctcacaaacttctggggcatgaattttaccaccgataagctcagatctctagtaaagaagtggcagacattgattgaagcccatgttgatgtcaagacaaccgacaactacatgctgcgtttgttctgcattggttttaccaagaggcgcccaaaccaggtcaagagaacctgctatgctcaggcatcccagattcggcagattcgccgc

SEQ ID NO: 67446 - DNA, 344 bp, Zea mays
  unsure (1)..(344): unsure at all n locations
caacgctgtttgcaactgatttcttcgagataaaggctgtggatgaaatagagcctgctctcaagaaacagctcataatttccacaattgtgatgaccnttggcattgcactaatcagttggctggtcttccatacactttcactatnctcaactttggagtccagaagacagtgcaaagctggcaattgttcttgtgtgtggcggtggtctctgggtggcctagtcattggtttggtactgagtactacacagcaatgcctacaagcccggacnagatgtgcngattcctgngacntggagcnnctacnnatggcattttggnctgccttggggtaaaaaaca

SEQ ID NO: 67447 - DNA, 134 bp, Zea mays
caggtgggcgagtttggctggggcggcacatctgttagaagataacgcacgtgtcctaagatgagctcaacgagaacagaaatctcgtgtggcacaaaagggtaaaagctcgtttgattctgatttccacacaa

SEQ ID NO: 67448 - DNA, 358 bp, Zea mays
cttctcttcgacagaaaactagggatttgctcttggaatctctctacccgctgccgccgccgccggacagtgcaccgacgatacgacctcctccttcctccgatctggcctttttaatccgcggatcccgtacaagatgcttcccctctcgctcctcaagaccgcccaggggcacccaatgctcgtggagctgaagaatggtgagacgtacaacgggcatctggtcaattgcgacacgtggatgaacatccaccttagggaggttatttgcacctcaaaggatggtgacaagttttggaggatgccagagtgttacattcgtgggaacacgattaagtatcttcgagttcctgatgag

SEQ ID NO: 67449 - DNA, 238 bp, Zea mays
cgagtatatagccttggccgacaggcccgggtaatcttgggaaatttcatcgtgatgaggataggatcggaagaagctggtggtcgtgttcttctccctttttgggcgcgcgtgttgtgtgctgctgtgtctgtgtactccagctgtagctgctgctgtgcttagctgattgaagtttgaactgtagtgggtccacagtattatgcatgttttgtttggtgagacgtcagaacccatc

SEQ ID NO: 67450 - DNA, 291 bp, Zea mays
ccgtactgagtaccagctgattgatatatcagaggatggatttgtgagccttcttacttcagatggcaacactaaggatgatcttagactcccaactgatgagactcttgtggcccagatcaaggaagggtttgaaagcggcaaggatcttgttgtgactgtccagtctgctatgggggaggagcagatctgcgcgctgaaggatgttggccccaagtaacttacctgccttggaatactgtatctcaaaacctaaatcgaaaaaagaaatgtatacatgtgcctattgaa

SEQ ID NO: 67451 - DNA, 320 bp, Zea mays
tggacatcaaatgtaggtatagtggattggtgccgcagtgtgctattatcgtggccacaattagagctcttaaaatgcatggaggggggcctgaagtggtggctggaaagcctctggatcatgcatatgtgagcgaaaatgtggcccttgttgaagctggatgtattaatcttgctaaacaaatatcaaacacgaggagttatggagttaatgttgtagttgcaatcaacaaatttgcatcagatactgaggcagaaatgaaggcagtgcacagtgcagctatggctgctggtgcttttgacgctgttgtctgcacacac

SEQ ID NO: 67452 - DNA, 338 bp, Zea mays
gcagtcttatgggtcaaggtgcgtcaagcctccgatcatctacggtgacgtgagccgccccaaccccatgaccgttttctggtcgaagacggcgcagagcatgacgtctcgcccaatgaaggggatgctgactggcccagtcacaatcctcaactggtccttcgtccggaatgaccagccgaggtttgagacttgctaccagatcgctcttgcgatcaagaaggaagtcgaggatctcgaggctggtggtattcaggttatccaaatcgacgaggctgcactgagagaagggctgccgctccgcaaggctgagcatgcattctacttggactgggctg

SEQ ID NO: 67453 - DNA, 337 bp, Zea mays
tggcgcgttccggccggagatgaggggcggatcgagaccggccccggtcgtcctgtttctcctcgctgcgtccgggatctgcgcccaattcaccgcagtgctagctggtgatccacaaacatccaacgatgacaaggaggctgaagctcagccaaaggggggccataccggcaaaacagttttgttcgtcctcctaggagtggcggctgtcattctgttgtcatttgttattttcaagtattggcagaagaagaaaaggcaggaacagcatgcacgtctgctaaagctatttgaagaggatgacgacattgaggttgagcttggtcttcgagattga

SEQ ID NO: 67454 - DNA, 351 bp, Zea mays
  unsure (1)..(351): unsure at all n locations
taccgccgacaactctctctaccgtccgataccccaagcaccagcgcggcggcggcgaccatggctgtcggaaagaacaagaggatctccaagggaaagaagggtggcaagaanaagaccgtcgaccctttctctaagaaggattggtatgacatcaaggcaccgtcggtgttcagtgtgcgcaacatcgggaagactctcgtatccaggacacagggtaccaggattgcttctgagggtctgaagcacagagtctttgaggtttgcctagctgatcttcagggcgacgaggatcaagcttacaggaaaatcaggctccgtgctgaagatgtgcagggcaggaatgtgctc

SEQ ID NO: 67455 - DNA, 351 bp, Zea mays
ggtttaaggaagacattaattcgttgggcagctgagaaaaacaaagaaagtggacaaaaaatatttattgaggatgaagaatgctcatccacctactgcatttcatttaaagtgtccaatactgcagctgcacctcctgtgaaggagattaggaggacaatgagaatacaagcactgcgttgccatgttttgtacagccatgatggtagcaagttgaatgtaattcctgttttggcttctcgctcacaggctttaaggtatttgtatatccgatggggggtagagctgtcaaacatcaccgtgattgtcggtgagtgtggtgacacagattatgaaggactacttggaggc

SEQ ID NO: 67456 - DNA, 250 bp, Zea mays
tgatctgaaacttggaaatggaacatcacttcttatatttacaagtataatatcatatttgcctgcatcatttgggaggacagttgcgcaggcatttcaagatgggaattatgttggactgctcacaatcatattgtcattcttactattagtccttgggattgtctatgttcaagaagctgagcgcaaaatacccctcaattatgcttctcgttacagcagtcgaactggggaacttcaacgatctgca

SEQ ID NO: 67457 - DNA, 349 bp, Zea mays
gcgcaaccgaccgccgccgcggctgcggtgaccaccgctgagcaggctcaggatctcatcgacgccgctaggtatgacgacttggaggacatcgtcgccctgttctccgctggtgtctcgctggactccacagattcgcaaggccgcacagctcttcacatggcttctgtcaatggtcaccttgctatggtggaatacttgattcaaaatggagcgaatgttaatgccaccaacatggagaagaacacaccactccactgggcatgccttaatggacgtatagaggtaatcagggctttgatctcagcgggggctagcgtgagtgctctgaacagccacgagaaaacgc

SEQ ID NO: 67458 - DNA, 351 bp, Zea mays
cagcaaggctgagttcgacgcccacatgaccaaggcccaggaagccggcaagctggtggtcatcgacttcactgccgcctggtgcggtccatgccgcgccatcgccccactgttcgtcgaacacgccaagaagttcactcaggtcgtcttcctgaaggtggacgtggacgaagtgaaggaagtcaccgcggcctacgaggtcgaggcgatgccgaccttccacttcgtcaagaacggcaagacggtcgcgaccatcgtgggtgccaggaaggacgagctcctggcccagatcgagaagcatgccgcgcctgcgcctgcgtctgcgtctgcctaaaggagatcagtcgtcgc

SEQ ID NO: 67459 - DNA, 348 bp, Zea mays
ctcccgccgcctgtccctgcgctagtcgacactcgacaggctcggtttccgccctcctctcccaccgccgcgcaccgagaagatggggaagcggtggatccgctggatgccaacccggacgtcctgaaccagttcatatgggggctgggagtccacgaggaggatgtgcagttctgcgacgtctacggccttgacgatgagctgctcgctatggtgccccagcccgttctcgccgtcctcttcctctacccgctcacctccctggacgaggagaaagaagaatcaagtgtttctgctgccacatcgacctcagcgggcaaggaattgagcaagaaagtatactttacg

SEQ ID NO: 67460 - DNA, 348 bp, Zea mays
ccgctcctgagtcctgtccaccctgccaccgccgacgccgcgccgccgcagcaattgtcaccgtcgctatggcccgtatcaaggtgcacgagctccgggggaagagcaagacggacctgcaggcgcagctcaaggagctgaagtctgagctctccctcctccgcgtaccaaggtcaccggcggcgcacccaacaagctctccaagatcaaggtggtgcgcacctcgatcgcgcgcgtgctcacagtgatctcgcagaagcagaagtcggcgttgcgggaggcgtacaagaagaagaactgctccccctcgacctccgccctaagaagacccgtgccatccgccgccgt

SEQ ID NO: 67461 - DNA, 351 bp, Zea mays
ctcctgtgctgcgtccaccagcctcgtcgttaggacgtaaggtaagacacccaggggcgagccagtgagtacagagagtagccttacgtagcgaagctcagagcaagcgagggtacggtcaaggggggtgatggcactgtctcgacgtatggcggctcccgtcctcgtcctcatgctcctcctcgtagccacagagctggggacgaccaaggtggcggaggcgaggcactgcctgtcgcagagccaccggttcaagggcctgtgcatgagcagcaacaactgcgccaacgtgtgccagaccgagaacttccccggcggcgagtgcaaggcggagggcgccacgccaagtgc

SEQ ID NO: 67462 - DNA, 354 bp, Zea mays
gtaaattcgagcagcaaaatcatccttaaatatttcacaggagatcgcgagactgttgaaaacatactcagaaatatggtggatgttcgtgatgttgctgacgctcttcttctggcttacgaaaagccagaagcgtctggacgatacatctgcagttcacatgcaataaaagttgctgatatgataaacatactgaagaccttgtatccatcttacccttatcccagaaattttgtggaagatgatgtcaactctgtatacagctctgagaaactgcagaagctgcagtggagcttcaagcctatagaggaatcgctccgcgacactgttgaatcctacaaagcatttggcatc

SEQ ID NO: 67463 - DNA, 181 bp, Zea mays
cacaacggcacgattctcctcctccgtccgcgtagctctcggtttcggcgatgtcggggcgcggcaagggcggcaaggggctgggcaagggcggcccaagcgccaccgcaagtgctgcgcgacaacatccagggcatcacgaagccggcgatccgtaggctggcccaggaggggcggcgtc

SEQ ID NO: 67464 - DNA, 345 bp, Zea mays
tagggttttgctgctctccgaccccgagctccgaaggccgcagcatcaggcgcggccccctcgcgtgtgaccgagatggcgctgccgaatcaggggaccgttgattaccccagcttcaagctcgtcatcgtcggcgatggtggaactggtaaaactacatttgtgaagaggcatctcactggagagtttgagaagaaatatgaaccaaccattggtgtggaagttcatccgttggatttcaccactaactgtggtaagatcaggttctactgctgggataccgcagggcaagagaagtttggtggcctcagggatggatactatatccatggccagtgtgcgatc

SEQ ID NO: 67465 - DNA, 345 bp, Zea mays
ccgactccgccgccgcccgccgctccgcctcagcgcatagcccgccgcgacctcatcgatcaccttcaactttcaatcatggcggacgtcgatgtcgaaccggaggttgccgccggagctcccaagaagaggacgttccgcaagtacagctaccgcggcgtcgagctagatgcgcttctcgacatgtccacggacgacctcgtccagctcttccacgcgcgcgccaggagaaggttccagaggggtctgaagaggaagctcatggcgctcatcaagaagtgcgcaaggcgaacagagatgctcctgctggtgagaaccagagcagtcaagacacatctccgtaac

SEQ ID NO: 67466 - DNA, 349 bp, Zea mays
gcaacggaagcaagaacaccttgacgacctcacctcacaggtaaatcagctgaaggaccagaacaagcagctcagcatggcactgagtataaccagccaaaaccttgtggcagtgcaagcgcagaactctgttctgcagacccagaagatggagctggacagcaggctgggtgccctgacggagatcctctggtacatgaactcaagcaccagcaccagcactgctcctacaaatccagccatagcgaacgacttcacagcatggagcagagcctctgatattcttggtaggaacagctacagcgccatagagctgtaccaatgcttctagctctaagctctagctcta

SEQ ID NO: 67467 - DNA, 339 bp, Zea mays
gtccaaccctacggccgccgccagcatcaagctcaccgaccaaaccctactcgtaccccgccgccgccgcagccgcagtacgcggcacaccagcaagcagaactagcagccatgccgcccaaattggacccctctcaggtggaggaggtcttcgtccgcgtgacgggaggcgacgtcggcgcggcgtcgtcgctggcccccaagatcggcccgctcggtctctccccgaagaagatcggcgaggacatcgccaaggagaccgccaaggactggagaggcctccgcgtcaccgtcaagctcaccgtgcagaaccggcaggccaaggtctccgtcgtccct

SEQ ID NO: 67468 - DNA, 328 bp, Zea mays
aaagtggttacacaaagtggtcaaccgccccaatgtctacataaagatccctgctaccgccgaatgtgttcattccatccgtgaagttatcgctaatggcattagcgtcaacgtcacgcttattttctctattgcgagatacgaggctgtgattgatgcttaccttgatgggctagaggcttctggcttgagcgacttatctcgagttaccagtgtcgcatccttctttgtcagtcgagtcgacacccttatcgacaaaatgttgagaagatggaacacctgaggcattgccttgagagggaaggtgccgtcgcacagccaactagca

SEQ ID NO: 67469 - DNA, 312 bp, Zea mays
ctgctcgaggagcgattataaaagcgtatgaaaaaacagaccaagctattctgtcacatactccagatctgggacaaggtggctccactgctgtaaccgccattcttgtgaacggcaggaagttatgggtagctaatgttggcgattcaagagctgttcttttgaaaggtggtgagcccatacagatgtcgatagaccatgatccgaatgttgagccgcagtgtaatcgaaaatacgggtggttttgtttcaaatatgccaggagatgttcgccgagtatgtggtcagttggctgtctccagagttttggag

SEQ ID NO: 67470 - DNA, 314 bp, Zea mays
  unsure (1)..(314): unsure at all n locations
cccggccgcgccaacgtctccaaggcggagttgaaggagaggcttgccaagatgtacgaggtgaaggacnccaacaccatcttcgtcttcaagttccgcacccacttcggtggaggcaagtccactggcttcggcctcatctacgataacctcgagtctgccaagaagttcgagcccaaatatcgcctcatcaggaatggtcttgctactaaggttgagaagtcccgcaagcaaatgaaagagcggaagaacagggccaagaagatccgtggtgtcaagaagaccaggctggtgacgccaagaagagtaacagt

SEQ ID NO: 67471 - DNA, 278 bp, Zea mays
ttttctgcatcgagtactttcagtgatctgaaggttactggaattcttcctctgaaggaaggcaaccctcccaagttttctcagcgggctcgtttgctcactgctaactatcaagttgtttaacgcttgtaccgcgagtgttggtccacttgaatgctccaatagcagatgttattgccgtggacttatgcaagccatggcacgggagattattttgtgtttggaaaatttctttactatgcgcttctcattgttatagcatattgcacaatgttgtt

SEQ ID NO: 67472 - DNA, 331 bp, Zea mays
  unsure (1)..(331): unsure at all n locations
cgccaccacacgcggatcgaattaggctctccaagtctcccccccnctcctctcggcggcggctcaggtccctctacatctccggcgtggcgcttggcgtctgacctcaacaagcaagaaagcaaatggcaggcggcagggttgcgcatgccaccctcaagggcccgagtgtggtgaaggagatcttcattggactgaccctgggtctgatcgcgggaggcatgtggaagatgcaccactggaacgagcagaggaagactaggtccttctatgacatgcttgacaagggccagatcagcgttgtcgtcgaggagtaaagagttcttcccag

SEQ ID NO: 67473 - DNA, 287 bp, Zea mays
acgatgtactcatacaaagacgcagataggcgtcgggagtgggtcgctcatcttcaggctggtgcaggcattgttgccgacagtagcccagatgacgaacaacgtgaatgcgagaataaggctgctgcactagctcgggccatcgatcttgcagagtcagcttttgtagacaaagaatagtgtgctatggttatcgtttagttcttgttcatgtttcttttacccactttccgttaaaaaaagatgtcattagtgggtggagaaaagcataagactgttctctagag

SEQ ID NO: 67474 - DNA, 330 bp, Zea mays
ttggcgcactctagcaatggcttctgaggttgtccgccctagcgacgccgagctactagaggcacaagccgacatatggcggctcagctctcctacctcacgcacctgtcactgaggtgcgccgtggagcttggcatccccacggcgatctaccgccatggcggggctgcctcagccgctgagctggtcacggcgctgtctctcccctccactaagctgccgttcctgcggcgcctgctgcggatgctcgacgcgtcgggcgtgttcaccgtcgacaagcagagcacggaggaggagcggtaccgcatctcaccgtgtcctactcctggt

SEQ ID NO: 67475 - DNA, 344 bp, Zea mays
attcatcgaggccaagtcggacacatccatgttcatccaatggtgggacgacgacaccgtctaactcctttttcggccctctccgacttctgagctagatgtctacaccaacaccgactaggctagctgcgtcaacatgtgccggtcaacatctgactacattgtgtttttgggcactagactcatctcatggtactcaaagcggtagcccgtggtctcccactccaacacggaggccaagtatcgagatatggccaatgacgtggtcgggacgtccttgctctgttaacttcttcatgagctccacagccccatcgcccgcgccaccctcgtctcctgcgaca

SEQ ID NO: 67476 - DNA, 307 bp, Zea mays
cgccaccacacgcggatcgaattaggctctccgagtctccggttcgctcctctcggcggcggctcaggtcactctccatctccggcgtggcgcttggcgtctgacctcaacaagcaagaaagcaaatggcaggcggcagggttgcgcatgccaccctcaagggcccgagtgtggtgaaggagatcttcattggactgaccctgggtctgatcgcgggaggcatgtggaagatgcaccactggaacgagcagaggaagactaggtccttctatgacatgcttgacaagggccagatcagcgctgtcgt

SEQ ID NO: 67477 - DNA, 317 bp, Zea mays
gcaagtttttggcaagcagatgggcttgagcgatcaggacattgttgccctctctggtggccacaccttgggaaggtgccacaaagagcggtctggtttcgagggggcctggactacaaaccctttggtctttgacaactcttacttcaaggaacttctgagtggtgataaggagggtcttcttcagctcccaagtgacaaagccctgctgagcgaccctgttttccgccctcttgtcgagaaatatgctgtggatgagaaggctttctttgatgactacaaagaggcccacctcaagctctccgaactggggtatg

SEQ ID NO: 67478 - DNA, 320 bp, Zea mays
cgaggtgtaacttagctttactacacgatctgcaagagtaggcagccaaaatggagtccaaatgttgagcccctcggaaatcccacaaagggactggttcccctctgacttcaccttcggtgccgccacttcagcgtaccaaattgaaggtgcttggaatgaagatggaaagggggaaagcaactgggatcacttctgccacaatcatccggaaaggatactggacgggaaaaattcagacattggagcgaattcgtaccatatgtacaaaacggacgtcagattgctccaggaaatgggcatggacgcatatacgttct

SEQ ID NO: 67479 - DNA, 249 bp, Zea mays
cgatgctttagataggtatgcccaattttttatcaagccattgatgtcccagatgctacacttagggaaataaaagctgttgactctgaacatcagaaaaacctcttgtacaatccttggcgaatgagtcagcttcagaagcatctttgtgcagagaatcatccttatcataagtttagcactggaaattggaacacacttgaagttaaagcaaaggagaaaggattggacacaaggcttgagcttatt

SEQ ID NO: 67480 - DNA, 332 bp, Zea mays
cggctcgaggcatgggatacagcttttattgtcaaagcatattgatagactgacctggttcatgagttttctccaacactcaggaaggctcatgagttcataaaaagtttgcagatccctgaaaaccaatccgaccatgaaaattattaccgccatagatcaaagggttcatgggctcattcaacattagacaatggatggtctgtatctgattctacagcagaagcaattcagaataaagatggtacattttcaacatacgagcgtaagagcactgcatctttgttggaggttctcaaccttccgagactttctaaacatgttgttgatca

SEQ ID NO: 67481 - DNA, 340 bp, Zea mays
taccgcggtttggctttctcccctcttccgcaccgcttctcgctccggattccggattccctctgctctttccctaacgaaggtagccatggcggggagaggtaaggcgatcggctcaggcgccgccaagaaggccacgtccaggagctccaaggctggcctccagttccccgtgggaaggatcgccaggttcctcaaggccggcaagtatgccgagagagtcggcgccggcgcccctgtctacctcgctgccgtgctcgagtatcttgctgctgaggttcttgagctggccggcaatgcggcacgtgacaacaagaagactcgcatcgtaccgcgccac

SEQ ID NO: 67482 - DNA, 319 bp, Zea mays
gttaatgatctatctggaaaagctcgtctgttcttggtctatccagtggccattttagatgccgcatttgttgtttggatatttatttctttagctaagaccatcggtaaacttcaggcaagaaggttgatggccaaacttgacatttataggacatttgcaactgcattgattgtatctgttctggtgtccgttgggtggattggctatgagatttactccaaatcaacagatgtatttaacgaacgatggcagcatgcctggatcattcctgccttctggcatgtcctgtccttcttacttctttgtgtcatttgct

SEQ ID NO: 67483 - DNA, 334 bp, Zea mays
cggctcgagccgtcggctgacgcactcatgctcaagtggatcctgcacgactgggatgaggacaagtgcatcaagataatggagcgctgcaaggaagcgatcggtggcaaggaagcaggggggaaggtgattataatagacacggtgctcggatctcgggcagacgacgacgacgacgacaagacgtgcagggagacgtatgtgttggatctccacatactgagcttcgtgaacggggcggagcgggaggagcaggagtggaggaggatcttcctggcggctgggttccgtgactacaagatcacgcacacccgaggcatcccgtccatcatcg

SEQ ID NO: 67484 - DNA, 335 bp, Zea mays
  unsure (1)..(335): unsure at all n locations
gcagcgctccgccgccgccgccgcatctaacgcagttccctccgccgcagcccgaggcaagatggttctccagaacgacattgatctgctcaacccgccggcagaactcgagaagctcaagcacaagaaaaagagactcgtccagtcgcccaactccttcttcatggatgttaagtgccaggggtgcttcagcataaccactgttttcagccactcccagactgttgttgtgtgccctggctgccaaactgtcctctgncaaccccaggaggaaaggcaaggctcactgaggggtgctctttccgcagaagggagcctagagcggatgtggtctt

SEQ ID NO: 67485 - DNA, 332 bp, Zea mays
gtcctttcatttgctttggtctctaattaataattccaaataataagcccgcggatggacctctgtctgtctgtctgtaatttagtttccaagtttaggtagtgtttggttactagggactaatttttagtccctctattttattccactttagtttataaattgcaaaatatggaaactataactctattttagtttccatatttgacaatttagttactaaagtggaataaattggagggactaaaaattagtctctaaaaccaaacacccccttagtttgttgtggtaataattcctgtatcaattatgtcataaataaagctagggaa

SEQ ID NO: 67486 - DNA, 336 bp, Zea mays
  unsure (1)..(336): unsure at all n locations
gtgtgaagcagatgatttgctgctgcaacaagatggatgctactacacccaagtattcaaaggcccgttatgatgagattgtgaaggaagtctcttcctacctgaagaaggttggatacaaccctgataagatccacttcgttccaatctctggttttgaaggtgacaacatgattgagaggtccaccaaccttgactggtacaagggcccaaccctacttgaggctctggacttgatcaatgagccaaagaggccttcagacaagccctgcgtctcccccttcaggatgtgtacaagattggtggtattggaactgtcnctgttggacgtgttga

SEQ ID NO: 67487 - DNA, 333 bp, Zea mays
aagattgacatcaaacgcgttcccaagaagtcaaccctgatcaaggctatggaggaagctgatgtgaagacgaagtgggaaaacagctcatggggcaagaagctgattgtccagaagaggagggctgcgctcagtgactttgacaggttcaaggtcatgctggcaaggatcaagaggggtggtgctatcaggcaagagctcgccaagctgaagaaggcgtccacggcttaagtcccttttggtggatggcatgttagtttttggtttcatgttgcatcagcattttgttttgagtgttgtcaaagccagaattagtaatatgtttcatgtgta

SEQ ID NO: 67488 - DNA, 256 bp, Zea mays
cctatatccatgtactagaattattcagtttcactccacatcgtgatgttttatttttacttttgtcgtgctataacggatagcgctcctcgttggcgccactggcgggtggttctgcctctggtctggtgtgtttgtgtgtggtcacacttgccagccagcagaggcgcctgcttgtacctagattactgtttccattgtcgtcatcatcggctaacattgtcataatgtcagtttgggtaatgttagattaagt

SEQ ID NO: 67489 - DNA, 339 bp, Zea mays
  unsure (1)..(339): unsure at all n locations
gacaaatatccccagaccctaagctccgatctcgatggcgaaccctcgcgtcttcttcgacatgaccgtcggcggcgcaccggcgggccggatcgtgatggagctgtacgccaacgaggtgcncaagaccgcggagaacttccgcgcgctgtgcacgggcgagaagggcgtgggcaagtccgggaagccgctccactacaagggcatccaccttcaccgcgtcatccccgagttcatgtgccagggcggcgacttcacccgcggcaacggcaccggcggcgagtccatctacggcgagaagttcccgacgagaagtcgtgcgcagcaaccgcccccgtg

SEQ ID NO: 67490 - DNA, 329 bp, Zea mays
gccgccgcagttgtcttcggtcttccgtgctcaccttcgagagatcaagttgctgctgcggtagtccccaaccatcatcatgcagaacgaggagggtaagacggtggacctctacgtcgccaggaagtgctcggccacgaataggatcatcactgccaaggatcatgcctctgtccagatcaacattggccacttggatgcgaatggcctgtacgatggtcacttcaccacgtttgctctctctgggtttgtccgtgctcagggtgatgctgacagttcgttggacagatgtggcagaagaagaagctgagatcagcagtagtctttgc

SEQ ID NO: 67491 - DNA, 333 bp, Zea mays
gttgccgcttcctccaaagccactccaaacccccgcttccagaaccttctcgaaactctccgcctcctcctctactcgctccgatggcgaaggaaccgatgcgcgtgctcgtcactggcgccgcgggcaaattggatatgctcttgttcccatgattgctaggggagttatgcttggtgcagaccagcctgttattctgcacatgcttgatattccgccagcagctgaagcccttaatggtgttaagatggagttggttgatgctgcatttcctcttctgaagggagtcgttgcgacaactgatgttgtggaagcgtgcactggcgtgaatgt

SEQ ID NO: 67492 - DNA, 329 bp, Zea mays
ctctccgcttccaagatgtcgaagcgaggacgtggaggttctgatggtaacaagttccggatgtcactgggtctaccagtggcagccactgtgaactgtgctgataacactggagccaagaacctttacatcatttctgtgaagggaatcaaggggcgccttaacaggcttccttctgcctgtgttggtgacatgattatggcaactgtgaagaagggaaagcctgaccttaggaagaaggtgatgccagctgtcattgtgaggcagcgcaagcatggcgccgatagatggtgtctacatgtacttgaagacatgctggagtgttgtga

SEQ ID NO: 67493 - DNA, 307 bp, Zea mays
ctagggttttgctgctctccgaccccgagctccgaaggccgcagcatcaggcgcggcccccctcgcgtgtgaccgagatggcgctgccgaatcaggggaccgttgattaccccagcttcaagctcgtcatcgtcggcgatggtggaactggtaaaactacatttgtgaagaggcatctcactggagagtttgagaagaaatatgaaccaaccattggtgtggaagttcatccgttggatttcaccactaactgtggtaagatcaggttctactgctgggataccgcagggcaagagaagtctggtgg

SEQ ID NO: 67494 - DNA, 325 bp, Zea mays
tgcgacgtccctcgccttcgccgccgaatccgagactccgatctcgggttcaccgcagcgcacagagcagccccgactaccggcccgatccgcgctctcctctccgtcgcttcagtcatggcaggaatggcacctgagggttctcagttcgatgctaagcactatgattctaagatgcaggagctgctgagcaccggtgagactgaggagttcttcacttcatatgatgaagtttttgagagttttgatgatatgggcctccaagagaatcttctgagaggcatttatgcttatggtcttgagaagcatctgcaatcagcagaga

SEQ ID NO: 67495 - DNA, 303 bp, Zea mays
gggttttgctgctctccgaccccgagctccgaaggccgcagcatcaggcgcggcccccctcgcgtgtgaccgagatggcgctgccgaatcaggggaccgttgattaccccagcttcaagctcgtcatcgtcggcgatggtggaactggtaaaactacatttgtgaagaggcatctcactggagagtttgagaagaaatatgaaccaaccattggtgtggaagttcatccgttgagtttcaccactaactgtggtaagatcaggttctactgctgggataccgcagggcaagacgagtttggtg

SEQ ID NO: 67496 - DNA, 319 bp, Zea mays
attccttccttgttccttccccagctccgcaggctgctcatcgccctccctccgcgcccccgatccagatccagatccaggggcttgtcatggcatccagacgtatcctcaaggaattaaaggacttgcaaaaggaccctccaacatcatgcagtgcaggtcctgctggtgaggatatgttccactggcaggcaaccatcatgggtcctcctgatagtccatatgctggaggtgttttcttggtgaacattcatttcccgccagactaccccttcaagcctccaaaggtatcttttaagacgaagtcttccatccaaac

SEQ ID NO: 67497 - DNA, 335 bp, Zea mays
tctccctccgccgccactcccctcccattcaccgccaccgccaattccataccgtcctccgccacctctgctgagagcgagaagagatggcaggcaagggtgatgggccggcaatcggcatcgatctcggcacgacgtactcttgcgtcggcgtctggcagcacgaccgtgtcgagatcatcgccaacgaccagggtaaccgcaccacaccctcgtacgtcgccttcaccgactccgagcgcctcatcggagatgcggccaagaaccaggtcgccatgaaccccatcaacaccgtctttgatgccaagcgtctcattggcaggaggtttagtgat

SEQ ID NO: 67498 - DNA, 336 bp, Zea mays
ctccacttccacatctcccccggcgtcggcgcggtcagttgaaccatggcggactccaaggccacctcggcggtcaccctccgcacccgcaagttcatgaccaaccgcctcctggcccgcaagcaattcgtgcttgaggtgatccaccccggccgcgccaacgtctccaaggcggagttgaaggagaggcttgccaaggcgtacgaggtgaaggaccccaacaccatctttgtcttcaagttccgcacccatatcggaggaggaaagtccactggtttcggcctcatctacgacaacctcgaggctgccaagaagttcgagccgaaataccgcctc

SEQ ID NO: 67499 - DNA, 322 bp, Zea mays
  unsure (1)..(322): unsure at all n locations
cgaagatgaactgaggaaagcatttgcaaaatatggtgatcttgcctctgtcaaaattccttttgggaaacaatgtgggtttgttcaatttgtaaacagagttgatgctgaagaagcactgcatgggttgaatggatcaactattgggaagcaggcagttcgactttcctggggccgcagctctgcaagtaaacagtctaggggtgattctggccaccggcgcaatggcaactgcaacggcatgtactacgggacaccattctacggtggatatggctacgctcnccgattccgcacccaaacatgtacgccgcggcctacg

SEQ ID NO: 67500 - DNA, 330 bp, Zea mays
aaaacaagtgggatattacgttatgagcgtgtctttggtgaaggttttgtgagcactggtggaatcgagactacaaaggaatttgtgggcatgctcgatcttaaaccgggccagaaagtacttgatgtcggatgtggaattggaggcggcgacttttacatggctgcaaactatgatgtctatgttcttggtattgatctttcggtgaacatggtttcatttgcaattgaacgtgccattggacgcaagtgctctgttgaattcgaagttgctgattgcaccacaaaggattacccagaaaatagttttgacgtcatctacagccgtgac

SEQ ID NO: 67501 - DNA, 330 bp, Zea mays
gcggcggcgcgggcggacaaggagcaggcggaggaggagttgtgccaagccacaatgggtatctcgcgtgactcgatgcacaagcgccgagccaccggtggaaagcagaaggcctggaggaagaagcgaaagtatgagcttggtcgccagccagccaacaccaagttgtcaagcaataagacagtgaggagggtccgtgttcgtggaggtaatgtgaaatggagggctcttcgccttgatactggtaactactcatggggaagtgaagctgttacccgcaagacccgtatcctcgacgtggtctacaatgcatcaaacaatgagcttgtg

SEQ ID NO: 67502 - DNA, 333 bp, Zea mays
gccaccgatcgctcctctccactttccacattccagttccactccgcctccgctgccggtcgccgactccgaaactccgacagtccgaccacaaggtcttgtgcgggatccacagaaggatgagtgaagaggataagactgctgcttctgctgagcagccgaagagggcccctaagctcaatgaaaggatcctctcttctctgtccaggaggtccgtagctgctcatccatggcatgatcttgagatcggtcctgatgctcctgctgttttcaatgttgttgttgagatcacaaagggaagcaaagttaaatatgagcttgacaagaaaactg

SEQ ID NO: 67503 - DNA, 330 bp, Zea mays
caagagagagtaccaaattctcaaggagctcagtctgagaatgatcctaacaataccactatatttgttggtgggcttgaccccaatgtcactgaagataccctaaaacaagttttttctccttacggtgaagtcgtccatgttaagatccctgttgggaagagatgtggttttgttcagttcgttaccagaccttctgctgaacaagcgctgctaatgctgcaaggggccttgattggtgcacagaatgttcgactttcatggggtagaagcctgtcgaacaagcaggctcagcctcagcaggaatccaatcaatggggtgcggctgct

SEQ ID NO: 67504 - DNA, 173 bp, Zea mays
caatgttctaagtactcagccagtggtatttactggttgacctactgtagtttgcgtcggaatagatatgtttttttactcttcgtggggcagttttgtactggtggattcataaggactctgattatggtgcgttcggaacttataataataagcacatgaaattttgcttc

SEQ ID NO: 67505 - DNA, 334 bp, Zea mays
  unsure (1)..(334): unsure at all n locations
ctcctcgcgccgccgccgcgtctcctcctgtacaggtaagaaggagaggaagagggcgaaatggtgaagcacaacaacgtcatccccaacgggcacttcaagaagcactggcagaactatgtcaagacatggttcaaccagcccgcccgcaagcagagacgccgcattgctcgtcaaaagaaggctgtgaagatattcccccgcccgactgctggtcctctacgccccattgttcaatgccagactttaaagtacaacatgaagtcaagggctgggagaggctttacccttgaggagctgaaggctgctggcatcccanagaagcttgctccaa

SEQ ID NO: 67506 - DNA, 325 bp, Zea mays
cccagcttgaagcacagtgccaggaaacttgcaaagacacggtgcaaatccatgatatcactgggaaagattgtcaagacattgccaataagggagctaaacagagcgggctttactttattaaacctctgaaagctaaccagcaattcttagtctactgtgaaatcgatgggtctggaaatggatggactgtgtttcagaagagacttgatggcagtgtagatttcaagagaaactggattcaatataaagaaggatttggacatctgtctcctactggcacaacaggttttggctgggacatgagagattctttgatagcaca

SEQ ID NO: 67507 - DNA, 328 bp, Zea mays
agaaaaccttgtgccagaaatattctttggctaatttcgtaacgatgctttactatttatttccatgtgttccattgcagttgtcagttatattacataattaattacgatataggcaagcaagttgagtgtatatgcagagtaataaaatagaagtgcgtacccagttaaccaggatctgttcacttgctggcctggaggtatccactgctcttcttcctgtgatcaactccagtaggaaaaccccaaaactgtacacgtcggtcttgacagttagctggcctgttcttatgtattccggagcgcagtacccatacgttcccatcac

SEQ ID NO: 67508 - DNA, 257 bp, Zea mays
agatcaagatgatgccctttggcgccgggcggcggatttgcgccgggctcggcatcgccatgcttcacttggagtacttcgtcgccaacttggtcagggaattcgaatggaaagaggtggccggcgacgaggtggatttgtctgagacgcgcgagttcaccaccgtcatgaagaaaccgctccgcgcgcagctggtgcgcagaacaacttgtgtatgaatggcgattaatggcccatcaccgcgatctgtagagtcc

SEQ ID NO: 67509 - DNA, 309 bp, Zea mays
cacaaatcgactagggcgtctgagactctgctacacaggcacagaatcctctctgcgccgccgctgatgttgcagtcgcggccacatcgtcgcctatccatccccaccgctcccactgcaacgattcacaagacgtgtcgagatgtctcagaacaacacctctcagctactcgcctcagagctgatcgatcgttgcatcgggtccaagatctgggtgatcatgaaaggggataaggagctcgttggcaccctctgcggctttgatgtctacgtcaatatggtgctggaggacgtcaccgagtatgaata

SEQ ID NO: 67510 - DNA, 318 bp, Zea mays
acaatgggcacgcctacgcctgggggggaaacgagtacgggcagtgcggtgaggagcctgagaggaaggaggacgggacgagggcgctcaggagggacatcccgaccccacagcggtgcgcacccaagctcaaagtccggcaagtagctgctggagggacacattcagtggttttgactcaagaaggtcacgtttggacatggggacagccatggcctcctggtgatatcaagcaaatatcgacaccagtacgcgtgcaaggccttgagaaagtgacggtcattgctgtaagtgcattccataatttggcactcacag

SEQ ID NO: 67511 - DNA, 327 bp, Zea mays
ttccactccgacattcacgtgcagctgtcgggagcaggcaatggcgccggatctaagcgaactcgccgccgccgctccagcccgtggcgcctacctcgccggcgtcggtgtcgcggtcctcctcgctcgcctccttcctcccagtagccgagtcgtcctgcgtgcgagataactcattggtgagagacataagccaaatgccgcaaagcagctatgggattgaaggattgtcacatataacagttgctggtgcgctcaatcatgggatgaaggaggtggaagtgtggcttcagacaataagtccaggtcaaaggacgccaatccaca

SEQ ID NO: 67512 - DNA, 321 bp, Zea mays
  unsure (1)..(321): unsure at all n locations
ccattccttccccaactctgcaggctgctcgtcgccctccctccacgccggacgcgccccgatccagatccaggggcgtaacatggcatcaaaacgtatcctcaaggaattaaaggacctgcaaaaggaccctccaacgtcatgcagtgctggtcctgctggtgaggatatgttccactggcaggcaaccatcatgggtcctcctgatagtccatatgctggaggtgttttcttagtgaacattcatttccccccggactaccctttcaagcctccanaggtatcttttaagacgaagtcttccatccaaacatcaatagt

SEQ ID NO: 67513 - DNA, 331 bp, Zea mays
ctcgctttggatcgattggtttcgtaactggtgagggactgagggtctcggagtggattgatttgggattctgttcgaagatttgcggaggggggcaatggcgaccgcggggaaggtgatcaagtgcaaagctgcggtggcatgggaggccggcaagccactgtcgatcgaggaggtggaggtagcgcctccgcaggccatggaggtgcgcgtcaagatcctcttcacctcgctctgccacaccgacgtctacttctgggaggacaaggggcagactcccgtgttccctcggatctattggcacgaggctggaggtatcatagagagtgtt

SEQ ID NO: 67514 - DNA, 226 bp, Zea mays
caaggaagcagtgaagtatatcagcatgctgatcgaggccattttgtcgaagtattatagccgtagctcttttatgtaccttttcaggcagccttgcctctcgagacgtttccggcaccgatgttttaaatctggattatctatgttctgtactgaactactgtgttggactgtaagttcagctcgtaatacaatagctcttaagatatctgggcacttaatctgc

SEQ ID NO: 67515 - DNA, 327 bp, Zea mays
cacaaatcgactagggcgtctgagactctgagacacaggaacagaaccctctctgcgccgccgccgccgttgcagtcgcggccacatcgtcgcctatccatccccaccgctcccactgccacgattcacaagaggtgtcgagatgtctcagaacaacccctcccagctcctcccctcagagctgatcgatcggtgcatcgggtccaagatctgggtgatcatgaagggggacaaggagctcgttggcaccctctgcggctttgatgtctacgtcaatatggtgctggaggacgtcacgagtatgaatacactgctgaacggcgccgc

SEQ ID NO: 67516 - DNA, 314 bp, Zea mays
gtgaagtctgttgagatgcaccacgaggcgcttcaggaggctcttccgggtgacaatgttggcttcaacgtgaagaacgttgctgtcaaggatctcaagcgtgggtttgtggcctccaactccaaggatgaccctgccaaggaggctgccagcttcacctcccaggtcatcatcatgaaccaccctgggcagattggcaacggctatgccccagtgctggactgccacacctcccacattgctgtcaagtttgctgagctcattaccaagatcgacaggcggtctggcaaggagcttgagaaggagccaaagtt

SEQ ID NO: 67517 - DNA, 328 bp, Zea mays
gagcaaccgataatccgccggcgctgagatgttggtttatcaagacctcctatctggcgacgagctcctgtcggattcattcacctacaaggagctcgagaacggcgtcctgtgggaggtcgagggaaagtgggtcacccaaggtcctgttgatgtagacattggtgccaatccatccgccgagggtggtgaggatgaaagcgttgatgacacagccgtgaaggtggttgatattgttgacacattccgtctacaggagcaacctccttttgacaagaaatcatttgtctcttacataaagaaatacatcagagatctcactgctgtg

SEQ ID NO: 67518 - DNA, 327 bp, Zea mays
cgatacctaaccccgaccgccgcgccactactcccgtttcgtcctcgcggtattcgcggcgttttctcccactgctcgaaccgcgccgacgagcgacgacaagagctgctctattcttcaaaacaaatggcgaccgttccagttaacccaaaaccttttctgaacaacctgacaggaaagcctgttattgtcaaactcaagtggggtatggagtacaagggttatcttgcttctgtggactcatatatgaatctccagcttgccaacactgaggagtacattgatggtcaattctctggaaacctgggagagattctgatcaggtgc

SEQ ID NO: 67519 - DNA, 324 bp, Zea mays
acatgctagtcaggtaccgtggagctgcgacctctcaattttcatggttttggcagaagatatcactgcttggtggtctaagcttttgacatttgcttgtgagattatcattctatacgacagaggaagaattcaaagatattttttcaccatttggcaccgtagaggaagctcgacttatgagagaccaccaaactggaaggatgaagggatttggttttgtcaaatattcatcgcaagcagaggcagagaaagctgtcaaggcaatggatggcaggattctacgtggaagattgatctttgtggagatggcaaaggacacga

SEQ ID NO: 67520 - DNA, 298 bp, Zea mays
cggctcgagcggatatggccatggaagtggtgaaggatacggctctgggtctggctttggtggtggtgctgccggcggcggcggtggacatggtggcggtggtggtggtggccaaagtgggtctggctatggctctggttcaggatatggatcaggtgaatgatacggacaaggtggtgcacatggaggaggctatggaagcggtggtggcggttgtggcggcggtcgtcaaggtggtggtggctctggctatggatctggatccggctccggttatggaggcagcaacgacaacgga

SEQ ID NO: 67521 - DNA, 284 bp, Zea mays
agctcatgtaccatttcgactgggaagtcaccaatgagaacgaagacggtggcgggaaggtgagcatggacgagacgttcgggctgatgcttcgcaagaacgagccgctctaccttgttcctagggccgtctagctagctagttactgtgccgccgccgcctcctatcctagaatgcatgagtcttagacgtgtggcagtagtaattgcgtggggtgtagtaaaataataagcacgtgtgtcgagttgtaatggattcacattatgtgcattcgagacaggtcc

SEQ ID NO: 67522 - DNA, 320 bp, Zea mays
gatgttcaggccatgaaggcagtcgttggagaggaggcactctcgtctgaggatctgctttacttagagttccttgacaagtttgagaggaagtttgtgacacaaggagcatacgacacacggaacatcttccagtcactagatcttgcatggacattgctttggatcttccctcgcgaacttctccaccgtatcccggcgaagaccttggaccagtactatagcagagatgcctcccactgaatcactgatcgttgatcagtgttccaatagtttggcaagtgttgaatatattgaacagattggcttcatggtctttt

SEQ ID NO: 67523 - DNA, 321 bp, Zea mays
gcgggaaaaggctctgcaacgttgtccatggcatatgctggtgctgtttttgcagatgcatgtttgaagggtctgaatggagttccagacattgtagagtgctcttttgtgcaatcaactgtgacagagttgccattctttgcctccaaggttcggctcggcaagaatggagtggaggaagtgcttggtctgggtgagctcaacgagttcgagtaagaagggtctggaaaacctcaagggcgagctcaagtcttccatcgacaagggtatcaagtttgcccacgggaactaggcaccttgcccggcttctaacaattgatg

SEQ ID NO: 67524 - DNA, 290 bp, Zea mays
cttatgacgcccaagttgctggcctctattatgttgttaagccaaatgacactggttttcaggtaactatggttggcttcaatgacacaatgagaacccttttggagactgttattggaaaaattgcagagtttgaagttaaggctgaccgtttttctgtgataaaggaagctatgacaaaccagtatgagaatgtcaagtttcggcagccataccaacaagtcctatattattgttcgctgatactggaggaccaacatggcatgggatgaggatttctgcacttctca

SEQ ID NO: 67525 - DNA, 315 bp, Zea mays
  unsure (1)..(315): unsure at all n locations
ccatggcgacgcagcttcttctctgtttcctactcgccgcctccgcgccgctaatcgtcgccacggccaagaaatccggggacgtgtcggagctccagatcggcgtcaagtacaagccggaatcatgcagcattcaagctcacaaaggtgacaaggttaaagttcactaccgtggaaaacttactgatggaacggtttttgattcaagctatgaaagaggtgacccgattgaatctgaattgggcactggacaagtgatcanaggatgggatcagggtctcctgggaatgtgcgttggtgaaaagccggagttga

SEQ ID NO: 67526 - DNA, 347 bp, Zea mays
cggctcgaggaaggaattgttccactcaaaaaggacgggccagtccacgatgtgcagtggtcttcctctggctctgaaatttgctgtgggtttatggtgttatgccgcccaaggcaacaatattcaacaagaagtgcaaccctcttgttgagtttggtgaaggaccctacaatacgataagatggaaccccaaaggacgatttgttgtattagcaggttttggcaatttgcctggtgatatggcattctgggattattcagaaaaaaaattggtagcgaaaacaaaggcagaatgttctgtcacaagtgaatggtacactgatggtcgtcatttatgactgctacaa

SEQ ID NO: 67527 - DNA, 336 bp, Zea mays
tgtgtgaagcagatgatttgctgctgcaacaagatggatgctactacacccaagtattcaaaggcccgttatgatgagattgtgaaggaagtctcttcctacctgaagaaggttggatacaaccctgataagatccacttcgttccaatctctggttttgaaggtgacaacatgattgagaggtccaccaaccttgactggtacaagggcccaaccctacttgaggctctggacttgatcaatgagccaaagaggccttcagacaagcccctgcgtctcccccttcaggatgtgtacaagattggtggtattggaactgtccctgttggcgtgttg

SEQ ID NO: 67528 - DNA, 292 bp, Zea mays
ccacattccagttccactccgcctccgctgccggtcgccgactccgaaactccgacagtccgaccacaaggatccacagaaggatgagtgaagaggataaggctgctgcttctgctgagcagccgaagagggcccctaagctcaatgaaaggatcctctcttctctgtccaggaggtccgtagctgctcatccgtggcatgatcttgagatcggtcctgatgctcctgctgttttcaatgttgttgttgagatcacaaagggaggcaaagttaaatatgagctcgacaagaa

SEQ ID NO: 67529 - DNA, 333 bp, Zea mays
  unsure (1)..(333): unsure at all n locations
gcaagtcatacaattgcaagggttctctctgcagtatcttgatgtttgcctatagctggccccggatgatttgttctttcagccatcacgtttcaatccatgaacaaaccatcttcagtgttagttgtcattcaaacttgtgcgatctttctgtanagccaatcattcacgattgctaacgtatgtgctttctgtaaccaaattgaaatcagttctatggtattcatttgttcaaaatgtatatatatgcttctctgcaaccctatcgctacgatgaaatctggtggtgcttatagcaacaacctgaggcatagatctttgctgacaactccc

SEQ ID NO: 67530 - DNA, 318 bp, Zea mays
  unsure (1)..(318): unsure at all n locations
caagattcaaacaatggcgtccatctcctcctccaaggtgctcgcacttggtgcgctcatcttctccttccttgtcacgtatgcctcgtgcgctagaccggtcaacttcacagcctcagacttcaccgccgatcccaactgggaggctgccagagccacctggtacggcgcgcccaccggcgccggccctgacgacgatggtggcgcgtgcgggttcaagaacgtgaacctgccgcccttctccgccatgacgtcgtgcggcaaccagcccctgttcatagacggcaagggatgtggctcctgctaccanatacgatg

SEQ ID NO: 67531 - DNA, 327 bp, Zea mays
  unsure (1)..(327): unsure at all n locations
ggcaagtcccgcgtccgcgtctcccgcgtctggcgccgcacggccgcgtgcggggggcgacgtcatcgttgagtggaacgtcgccgtcagtatcgtctccacctgnctcccctcctacacctccagcgacaactccgccatcgtcgccacagattccatcaagaacaccgtgtatgtcaaggcganagagtgcacggaagtggtgtccatggaggaattcgccgtgattcttggaaggcatttcacctcgctgtaccctcaggtttcagaggccacggtgactatcgtggagcgcccatgggagcgtgtgactgtcgacggaagctc

SEQ ID NO: 67532 - DNA, 340 bp, Zea mays
tctcgagccgaatcggctcgaggccgcctgtcttgctgaagctgaactgctgatccgtcttgcaagctgtggtgtcatcctgcgttctgacccaagatgtatctccagtattacatcaacgagaagggtgacaaggtctacaccaccaagaaggagtcgcctcttggggtgccgacgcagtctgctcacccagctcgcttctcaccagatgacaagtactctcgccagcggtacctgttgaagaagagatttggacttctgccaacgcagaagccagcactgaagtactgaagcttcaactttccaaccatggatgtgcagtttgtgtcatgcttgatgc

SEQ ID NO: 67533 - DNA, 337 bp, Zea mays
  unsure (1)..(337): unsure at all n locations
ctcatgtcgaaggcgaaggtctacaccgacgtcaacgtcctgcgtcccaaggagtactgggactacgaggcgtcaccgtccatggggtgagcaggatgactatgaagttgtcaggaaagttggaagaggtaaatatagtgaggtctttgaaggcatcaatgttaacaacaatgagaaatgcatcattaagatccttaagcctgtcaagaaaaagaagatcanaagggagatcataatacttcagaatctctgtggaggtccanacattgtgaaattgcttgatattgtcagggatcagcattcaaagactcncagtttgatattgaattcgtcaaca

SEQ ID NO: 67534 - DNA, 333 bp, Zea mays
  unsure (1)..(333): unsure at all n locations
gtctctcggccaggtctccctctccccggctctccgccttcctcttccagtccccgcgcgcgagatcgccgccccgtgtggggcctagaatccgatggcctcgcgccgccgcaccctgctcaaggtcatcatcctcggcgatagtggggttgggaaaacttccttgatgaaccaatatgcgaacaagaagttcagcaatcagtacaaggctacgatcggcgcggatttcctcaccaaggaggtgcagttcgaggacaggctcttcactctgcanatatgggacactgctggccaggaaaggttcagagtctcggcgttgcattctaccgggag

SEQ ID NO: 67535 - DNA, 305 bp, Zea mays
  unsure (1)..(305): unsure at all n locations
gcattgttggtgtctacaacggcaagaccttcaaccaggttgagatcaagcctgagatgatcggccactaccttgctgagttctccatctcctataagccggtcaagcatggcaggcccggtatcggtgccacccactcctcgcggtttattcctctgaaatgagctgttacccggctctgcagtctcccaagagtacattggcaatgttcgttcagcttttctacttgttttgaacaagttaaatgcccaagatattttgttttgttccattccagctcaagaattcanagctaagcattgcac

SEQ ID NO: 67536 - DNA, 328 bp, Zea mays
tgacatcagaagtactcttgacaggcatatgattttgaagactactcttgttgagctaggaagggacttgggtctggaggaatgtgcattgtggatgccatctcgaagtggttcaagccttcagctttctcatactttgcaccaccagattactgttggatcatcggtgccaattaatctacctgtcatcaatcaagtgttcagtagcaaccgggcaattataataccccacacatctcctttggcgcggattcgacctcttacagggcgatatgttccaccagaagtggctgcagtccgtgtacctcttctccacctttcaacttcc

SEQ ID NO: 67537 - DNA, 251 bp, Zea mays
  unsure (1)..(251): unsure at all n locations
tgttaagaagcttggtctctggggtctcttcactagaggacttcctcttcgtatcgtcatgattggtacccttactggtgctcagtggggaatttacgatgcattcagagtgatggttggactcacaacaacgggaggtgttacacctgctccagcagcagaggctgaattgaaagcagtgcttgatttnttttttctgagttccctgagatcatatttggtagagtggaattgtatcagccagtcgagag

SEQ ID NO: 67538 - DNA, 81 bp, Zea mays
agcaggcgtcgacagtggtgccgagtgtcgacctcgccaaggtgcagcgcgcggtgtgcatgatctccaactccaccagcg

SEQ ID NO: 67539 - DNA, 272 bp, Zea mays
  unsure (1)..(272): unsure at all n locations
tgttaagaagcttggtctctggggtctcttcactagaggacttcctcttcgtatcgtcatgattggtaccttactggntgctcagtggggaattaacgatgcattcaaagtgatggttggactcccaacaacgggaggtgttacacctgccccagcagcagaggctgaattgaaagccagtgcttgattttttttttctgtgttccctgagatcatatttggtagagtggaattgtatcagccagtcgagagcttagttcccgaatcttttt

SEQ ID NO: 67540 - DNA, 335 bp, Zea mays
  unsure (1)..(335): unsure at all n locations
gtgagtatcagtgagggtaggttgtcggcaacacgtgaacaggctgattctgctcaagaggaagcatccgaatggaaacgcaaatatgacgttgctgttagtgaggccanaacagctctgcagagagcggcggtagcacaggaacacacaaataagacagtgcaagagagggaagatgctttgagggtagagcttgctaaccgactatctgagaaggaagagaaaattgcaagattacatgcanaacttagtcaaatggaaattcatgctacaagtttgatctcgaggcttgaggccactgaagcgaagtcgaagagccatgagctgattcgttg

SEQ ID NO: 67541 - DNA, 299 bp, Zea mays
acgaccataccctacctccaaattcccaattgtcaacctctcctcagagttcgagtgaccatgtcggggcgcggaaagggcgggaaggggctgggaaagggcggcgcgaagctcaccgcaaggtcctccgcgacaacatccagggcattacgaagccggcgatccggaggctggcgagaaggggcggcgtgaagcgcatctcggggctcatctacgaggagacccgcggcgtgctcaagatcttcctcgagaacgtcattcgcgacgctgtcacctacacggagcacgcccgcgtaaga

SEQ ID NO: 67542 - DNA, 283 bp, Zea mays
  unsure (1)..(283): unsure at all n locations
atcagatcaagaagaagggagagcacaagggactttcggcgcccgttcaggatccacatcttcccgagcgagtcttgggtgacctttcccccttcggaccacctccaggctcttggtgtaacttgcactctcaccaatcaggtttcatgtctgatctcgacattcagatcncactgccttcgatcccttcgctgaggcaatgnctggggactctgtgcggcacaggggtcaaggactacgtcagtgcgcatcagcagcgtaatgtcgcagagctgactacgtc

SEQ ID NO: 67543 - DNA, 331 bp, Zea mays
accaggcgccgacagtggtgccgggtgccgacctcgccaaggtgcagcgcgcggtgtgcatgatctccaactccaccagcgtcgttcgagcgtgtctcccgcatcaacagcaagttcgacctcatgtacgccaagcgcgcgttcgtgcactggtacgtcggcgagggcatggaggagggggagttctccgaggcacgcgaggacctggccgccctggagaaggactacgaggatgtcgccgcagagggcggcagtgatgacggtgacgaggaggaggaatactgatctgcttgcatgaatctgtttggctgtcgagccaagttgtgtgttg

SEQ ID NO: 67544 - DNA, 332 bp, Zea mays
gggtttcgtcgctccgccgccgccgaaacagcacatcgctctctcgatctcagccatggcggaggtggagcagccccaggacgcggtgaagctcttcaaccgctggaccttcgacgatgtccaggtgaacgatatctcgctgaacgactacctggctgtgactgcggcgaacacgcgacattcctgccgcactccgcggggcgctactccaagaagcggttccgcaaggcgcagtgcgccatcgtcgagcgcctcaccaactcgctcatgatgcacgggcgcaacaacggcaagaaggtcatggccgtccgcatcatgagcacaccctggag

SEQ ID NO: 67545 - DNA, 310 bp, Zea mays
gcttaactgcgacgtctgttctagcttcacccttccagacatgctggaggcccataaaaaatatggaggaatgggtactttactagtcaacaaggtatctgcagagtcagctaaccagtttggcgagttggtagctgatcctgaaacaaacgaactgctgcactatacggaaaagccagagacttttgtgagtgatctcataaattgtggagtatatatatttacccccaatatctttagcgccattgaggatgtcttaaaacagaaaaaagacagagcaaatttgcggcgtgtatctagctttgaagct

SEQ ID NO: 67546 - DNA, 322 bp, Zea mays
  unsure (1)..(322): unsure at all n locations
tatggcagcctgctaaagccttacatccaaccagttgtgactttgtggtacagggctccggaactactattaggagcaaaggagtattcgactgctatcgatatgtggtcattaggttgcataatggcagaactcttgtcaaaagagccactcttcactgggaagtctgagatagcccaacttgataagatatttagaatactcggcacacccaatgaggagcggtggcatggttgttccanattgcctggcttcanaggcaacttcgtaaagcgaccgtacaatagattaagggacaaattccagctgtatcttcacggga

SEQ ID NO: 67547 - DNA, 314 bp, Zea mays
  unsure (1)..(314): unsure at all n locations
gtgtcgtgtttgatggagttcatggaatttttaatgcagatgaatcaatgccttacccagataagtttaatgattcatattccagaacgaaagcggatgcagaaaagcttgtgatgagagctaatggtagggaagggcttcttacatgctgtatacgcccaagtagcatttttggccctggtgataagctaatggttccatctttggttgctgctgcaagggcagggaagtccaaatacattcttggtgatgggaacaactactatgatttcacctacgtgganaatgtggcatatggccatgtttgtgcagag

SEQ ID NO: 67548 - DNA, 329 bp, Zea mays
  unsure (1)..(329): unsure at all n locations
ctctccatctcgctgctcctccgccttcttcttgatccagccaagccagggatcgccatgtcggactcggaggagcaccacttcgaatcgaaggccgacgccggagcgtccaagacctacccgcagcaggctggcaccgtccgtaagaacggcttcatcgtcatcaagaaccgcgcctgcaaagttgtggaggtttctacctcaaagactggtaagcatggtcatgccatatgccactttgttgccatagatatattcaacgggaantagctcgaagatattgttccttcgtcacacaactgtgatattccgcatgtgtacgtactgag

SEQ ID NO: 67549 - DNA, 314 bp, Zea mays
  unsure (1)..(314): unsure at all n locations
cacgcctcacagggccggttgcgtaggagaaaggagaaaggaaggaggggaggcggtcgtcgggcgagatgagcgactccttctgccccgactgcaagaagcatacggaggtggcgttcgaacactcggcgggggacatggtgtgcaccgagtgcggcctcgtcctcgaggcgcactcngtcgacgagacctccgagtggcgcaccttcgcgaacgagtccaacgacaacgaccccgtccgtgtcggcggccccacaaacccgctcctcactgatggcggctctccaccgtcatcgccaagcccaacggcgcgc

SEQ ID NO: 67550 - DNA, 319 bp, Zea mays
tgcgcaacggcgctggaggaggctggctccgactacgagatcgtgcccatcaacttcgccaccgccgagcacaagagccccgagcacctcgtccgcaacccgtttggtcaggttccagctctgcaggatggtgacttgtacctcttcgaatcacgcgcaatctgcaagtacgctgctcgcaaaaacaagccagagctgttgagggaaggaaacctcgaggaggcagcaatggtggatgtttggatcgaggtggaggctaaccagtacaccgctgcactgaatcccatctcttccagtcctcacagtcgtgctgggggac

SEQ ID NO: 67551 - DNA, 303 bp, Zea mays
caagaatctcactgctgtgttggagccagagaaagcggatgagttcaaaaagggtgtcgagggtgcaaccaagtttctccttagcaagctgaaggaccttcaattttttgttggtgagagcatgaaggatgatgcgtccgtggtattcgcctattacaaggatggtgccactaatccgacattcctctatttctctcatggtcttaaggagatcaagtgctaggcttgcggcgagattagttacccatgttgggtactatctatgtactattgttatatccacaactatagttgtcctggttg

SEQ ID NO: 67552 - DNA, 308 bp, Zea mays
  unsure (1)..(308): unsure at all n locations
caagacctcctatctggcgacgagctcctgtcngatttcattcacctaccagggaggctcgagaacggcgtccctgtggganggtcngagggaaagttgggtcactcgaagggtcctgttgatgtagacatttggtgcaatccatncgacggaggtggtgnaggatgaagcgttgatgacacagccgtgaaggtggttgatattgttgacacattccgtctacaggagcaacctccttttgacaaagaatcanttgtctctttacataaaaaatacattcagaatctcactgctgtgttggagccaga

SEQ ID NO: 67553 - DNA, 332 bp, Zea mays
attgaggggttggcccagcttcgcggagaagctacactaccatactacctcttctgctccgtcgctatattcctcgccggagtgtaccggggcgaagcatccgaactccgaacagccccccagcggcctcccctccgccccgcagccatggccgccaccggcgtggtcgccgagccgaagaccaagtacgatcgccagctcaggatatggggtgatcaaggccaggctgcactggagaaggctagcatatgcttgcttaactgtggtcctaccggaaccgaagcattgaagaatctcgtgcttggaggcataggaagtgtgactgttgttgt

SEQ ID NO: 67554 - DNA, 330 bp, Zea mays
caagattcaaacaatggcgtccatctcctcctccaaggtgctcgcactggtgcgctcatcttctccttccttgtcacgtatgcctcgtgcgctagaccggtcaacttcacagcctcagacttcaccgccgatcccaactgggaggctgccagagccacctggtacggcgcgcccaccggcgccggccctgacgacgatggtggcgcgtgcgggttcaagaacgtgaacctgccgcccttctccgccatgacgtcgtgcggcaaccagcccctgttcaaagacggcaagggatgtggctcctgctaccaaatacgatgccagaaccacctg

SEQ ID NO: 67555 - DNA, 198 bp, Zea mays
catctccatgggcaccggggcatgtgctacagcctccagtcccgcacctcatcgccgacagcatcgagaccgtcatgggcgcgcaacactacgacgccaacatctccatacctgggtgcgactagaacatgccaggtacaataatggcaatgggacggcttaatcgacctagtatcatgatatatggtggaactatta

SEQ ID NO: 67556 - DNA, 183 bp, Zea mays
acaggtcgtaactctgcgttctgctcgaatggcaacggatatctcggctctcgcatcgatgaagaacgtagcaaaatgcgtacctggtgtgaattgcaggatcccgcgaacccatcgagtttttgaacgcaagttgcgcccgatgccttctggcggagggcacgtctgcctgggcgtcacgcc

SEQ ID NO: 67557 - DNA, 348 bp, Zea mays
tgaccaagaaggtgcccgtgctcgtccacgacggcaagccggtcgcggagtccaccatcatcgtggagtacatcgacgaagtcctggaagggcggctaccccatcatgccgggcgacccctacgagcgcgcccaggcgaggttctgggccaggttcgcggaagacaagtgcaacgctgctctgtacccgatcttcaccgcgaccggcgaggcgcacgcaaggcggtgcacgaggcccagcagtgcctcaagaccctggagacggccttggaggggaagaagttcttcggcggcgacgccgtgggctactacgacatcgtcgtcgggtggttcggcactggctccccgt

SEQ ID NO: 67558 - DNA, 308 bp, Zea mays
ctcgagccgccgctgcggcaagagctgccgcctccggtgggcgaccacctcaggcccaaactcacaaataggggcctctcacccatgaggaggagcgcctcatcatccagctccacgccaagatggggaacaagtgggcgaggatggctggtcacttgccagggcgtactgacaatgagatcaagaactactggaacactcgaataaagagatgtcaacgagctagccttcctatttatcctgctagtgtatgcaatcaatctacaaatgaagatcagcaactgtctggtaattttaacggtggcgag

SEQ ID NO: 67559 - DNA, 339 bp, Zea mays
gcgagatcaacggctacaccatccccgccggcacgcgcgtcatcgtcaacgcgtgggcgctcgccagggacacgacgtgctggggacaaggccgaggagttcttcccggagcgcttcctggaacaaggccgcgacgccgaggtcgacatgtacggcaaggacatccggttcgtgccgttcggggctgggcgcaggatctgcgcgggggccacgttcgccatcgccaccgtcgagatcatgctcgcgaacctcatctaccatttcgactgggagatgcccgccgagatggagcgcaccggggccaaggtggacatgtccgatcagtcgggatgagcttcg

SEQ ID NO: 67560 - DNA, 358 bp, Zea mays
ctcagcgccgcgcttgcgtttccttctctccgcttccaagatgtcataggagggcgtagacgttcggcttgtaacaagtttccggatgcacctgggtctaccagtggcagctactgtgaactgtgccgataacactggagccaagaacctgtacatcatttctgtgaagggaatcaagggtcgccttaacaggcttccttctgcctgtgttggtgacatggttatggcaaccgtgaagaagggaatacctgaccttagaaagaaggtgatgccagctgttattgtgaggcagcgcaagccatggcgccgaaaagatggtgtctacatgtactcttgaagacaatgctgagtgattgtg

SEQ ID NO: 67561 - DNA, 345 bp, Zea mays
atttatagtatgggaggtttgtgaagccagcgttcgatgattttgtttgccttcaaagaagtatgctgacgtgatcaatccttcgaggtgttgttaaccatgtagcagttgatctgattgttcaacatatccgtacaaaacttggtcagcatgacttgtgcaaaatctatccaaatgttcatgttgttcaatcaacttttcagatccgaggaatgcatactcttatccgtgatagggacatcaccacacctgactttgtattttattcagatcgattgatccgtttggtagtggagcatggtcttggacatttgccatttacagaaaagcagttttaccccaaca

SEQ ID NO: 67562 - DNA, 343 bp, Zea mays
ctccaggagaagcagaagcacagcaacatgatcgacggcaagccttccagctccaagggtacgggaacgaccgggtagcgtcgggaggaccaggtcctggactggtgcgaccgcctttacctcttggtggagcctcaggaggacaggagccttgacctatggcccgcatgtctaagggacgttctgcacgatttcaccacagagtgcacgagagtgaaggactgcctgcttcgagaaatggcgaaggcgctagatgagctcggcgacgacgacgactacttcatcgaccagttcggcgacagggccgacacccatgccaggttcagctataccctccgtgcgc

SEQ ID NO: 67563 - DNA, 346 bp, Zea mays
ggagggggaggaccaagcgaaagggggaactagagcaagatggacggcgaactgctgcttgcgctcctactcgtctctgctggtggcggccctccaggtacttggagttggcaatggagacaatcacatgagaatcatccaggaggacatcattgagacagtcaacaaccatcccagtgctgggtggacagcctcacgtaatccttacttttcaaactataccattgcgcaatttaagcacatacttggagtgaaaccagcaccacagaatgcactaagcaatgttcctgtcaaaacttattcaagatcactggaacttccaaaagagttgacgctagatctgcat

SEQ ID NO: 67564 - DNA, 333 bp, Zea mays
ctcacctcccctccactccctttctcccctgactcctgctctataggatcctccgcctccatcgcctctcgcgcctccaatcgccttcggcgcttcgtccgtcctgctccacctcttcttacgccggttgaccctgacctcaaccttgtgaaagggcggggtggtgctcttcttcgtgagaagatggttgaggcagcatcggacaagtttattgttattgttgacgagacaaaactagttgatgggttaggaggtagtggtctagccatgccagtggaagttgtgcagttctgctggaagtacaaccttgtaagattgcaggactgttaagga

SEQ ID NO: 67565 - DNA, 319 bp, Zea mays
ctgcgactgcaacacctgcaagtgcggcaccagctgcggcgctcctgctgcagctgcaactgagctggcccggcccggcgatcggcgcacgagagtcgagaggaggaggacgacgacgaggcgtatacatataatagcggcgaccagtaaataagatcctgtcaactgcacccgccattatccatggtcgctcgctcctcgcctgcgtctcctggtcctggggttcgtctgaacgtcctcgcggcttcacgacggcgatgccgcctccgtcgatcctgtccgtctcgtgccggatttaatattagatctatatgcgtgt

SEQ ID NO: 67566 - DNA, 338 bp, Zea mays
caacgctctctaccgtccgagaccccaagcaccagcgcggcgcgggggcggcggcgaccatggctgtcggaaagaaccagaaggtcctccaagggaaagaagggtggcaagaaaaagaccgtcgaccctttctctaagaaggattggtatgacatcaaggcaccgtcggtgttcagtgtgcgcaacatcgggaagactctcgtatccaggacacagggtaccaggattgcttctgagggtctgaagcacagagtctttgaggtttgcctagctgatcttcagggcgacgaggatcaagcttacaggaaaatcaggctccgtgctgaagagtgcagggc

SEQ ID NO: 67567 - DNA, 341 bp, Zea mays
gccacctcaacccaggaacagagcgaggcgacgccgcggcactcttctccgttgatattgattatttagggcgaagggaattggaaaccgttccaggggatctgatctggcaggttgtgaggaagaacaactccttccttgtgaagcagttcggcaacggcaatgccaaggtgcagttcaccaaggagccgaacaacctctacaacatccactccttcaaacactcgggtttggcgaacaagaagactgtgacgatccagccagctgcaaaggactcggctgtggtcctctctactaccaagaccaagaagcagaacgcacctgcgaagtcagccacaagt

SEQ ID NO: 67568 - DNA, 344 bp, Zea mays
cggtgacgtgagccgccccaaccccatgaccgttttctggtcgaagacggcgcagagcatgacgtctcggccaattgaagggagttgctgattggcccagtcacaatcctcaactggtccttcgtccggaatgaccagccgaggtttgagacttgctaccagatcgctacttgcgatcaagaaggaagtcgaggatctcgaggctggtggtattcaggttatccaaatcgacgaggctgcactgagagaagggctgccgctccgcaaggctgagcatgcattctacttggactgggctgtccactccttcagaatcaccaactgcgagatccagacaccaccca

SEQ ID NO: 67569 - DNA, 316 bp, Zea mays
aagcgagaagaccagaaggtgagaagagagagatagatgtgtgtgatcggtacaaggatcaccgctgtgcctgcgcgtgctgcttcaccgaatcgagtcagatcctgtccgaatccgagctaagggatggcaaccggtagtgaagcctcgaaggcagctgaggctgtggttgactggcataaacacgacagcaagaggatgctccatgcggtttaccgtgttggggatctggaccgcacaatcaagtactacacggaatgctttgggatgaaactgctgaggaaaagggatgttcctgatgagaagtacaccaatg

SEQ ID NO: 67570 - DNA, 325 bp, Zea mays
ctgtcttctcctcagcctcttatcaagtctcctcggttagggttccttagggttttgtggaggggcgatggcggcggctgcttatggagtaccgttgcttcgtcggcggacttgcctgggccaccagcaacgagtcgctggagaatgccttcgcctcctacggcgagatcctcgactccaaggtcatcaccgaccgggagacggggaggtcccgcggcttcggcttcgttaccttctcctccgagaactccatgctcgacgctatcgagaacatgaacggcaagagctcgacggccgtacatcaccgttaaccaggccagtccgt

SEQ ID NO: 67571 - DNA, 332 bp, Zea mays
gtcagcccctctcgtttttcatccgccttcgcctccaccgcgtgcgctccacgcctcctccaggaaagcgagagcttctgcataagaacaacaaatcaaaagcgtgatcagctcggtgccaacaaaacctcaacaaccaagtttcatgtctgatctcgacgtccagcttccatctgcctttgatccgtttgctgaggcaaatgctgaggactctggtgctggtcctggaacgaaggattatgtgcatgtgcgcatccagcagcgcaacggcagaaagagtctgactacagtccagggtctgaagaaggagttcagctatacaagatcctcaa

SEQ ID NO: 67572 - DNA, 349 bp, Zea mays
caacgctctctaccgtccgagacaccaagcaccagcgcggcgcgggggcggcggcgaccatggctgtcggaaaggaccaagaggtctccaagggaaagaagggtggcaagaaaaagaccgtcgaccctttctctaagaaggattggtatgacatcaaggcaccgtcggtgttcagtgtgcgcaacatcgggaagactctcgtatccaggacacagggtaccaggattgcttctgagggtctgaagcacagagtctttgaggtttgcctagctgatcttcagggcgacgaggatcaagcttacaggaaaatcaggctccgtgctgaagatgtgcaggcaggaatgtgctc

SEQ ID NO: 67573 - DNA, 345 bp, Zea mays
gtgcctgatggacagacgatcgaagctgaagctgcccatggtactgttacccgtcattaccgtgttcaccagaaaagacgttgaacctagtacggaccaagtattgcctcaatctttgcgtggacaagaggacttgcacacagggcaaagcttgatgacaatgctagactacttgacttcacccagaagcttgaggctgcctgcgttggagccgtcgagtctgggaagatgaccaaggaccttgcccttctcgttcacggatcttcaaatatcacgaggagccattacctgaacacggaggagttcattgacgctgttgctgatgtactcagtcaaggctggcag

SEQ ID NO: 67574 - DNA, 339 bp, Zea mays
cagtgacgtgagccgccccaaccccatgaccgttttctggtcgaagacggcgcagagcatgacgtctcgcccaatgaacggggttcctgattggccaagtcacaatcctcaactggtccttcgtccggaatgaccagccgaggtttgagacttgctaccagatcgctcttgcgatcaagaaggaagtcgaggatctcgaggctggtggtattcaggttatccaaatcgacgaggctgcactgagagaagggctgccgctccgcaaggctgagcatgcattctacttggactgggctgtccactccttcagaatcaccaactgcgagatccaggacacca

SEQ ID NO: 67575 - DNA, 328 bp, Zea mays
ggaggagcagcagcagcaggcggcgccgaggagcgcatgccactcagtgcttgcaaccatggctagggggttggagaagcacttgaggaggttcaatgcgcccaagcattggatgctcgacaagcttggcggagcttttgctcccaagccatcttctggacctcacaagtccagggagtgccttcctctgatcctcatcatcaggaacaggctcaagtatgctctgaactaccgtgaggtcatttctatcctgatgcaacgccatgtacttgttgatggcaaggtcaggactgacaagacctaccctgctgggttcatgatgtcattt

SEQ ID NO: 67576 - DNA, 321 bp, Zea mays
ggaactcataagggctggtgctgagaatgatgcactcacaagatcacttcaagaacgggcagaactattgatggaaattggttgacggaaaaaggtcaagctgaagctgagatcgaaattttaaaaagcacaattcaatcaggtgaaagggagataaattcgctaaaatatgaattgcatgttgtctccaaagagcttgaaatccgcaatgaagaaaagaatatgagtgtgcgctcagctgatgtagcaactaaacagcaccaggacgatgtcaagaaaatatcaaaactcgaagctgaatgccaaagattacgcggcctg

SEQ ID NO: 67577 - DNA, 329 bp, Zea mays
ccaccttgacgccgcgtcctggggcgtcaagtgcagccctactcgggctcccccgccaacttcgccgcctacaacggcgttcttcaacccgcacgaacggatcatggggctcgaccttccctccggcggacacctcactcacgggtactacacggccggcggtaagaagatctccgccacctcgatctactttgagagcctgccgtacaaggtgagcgccgcaacggggtacatcgactacgagaagctcgaggagaaggcacttgacttccgccccaagctcatcatctgcggtggcagtgcgtacccgagggctgggattacgccaa

SEQ ID NO: 67578 - DNA, 322 bp, Zea mays
tctcgagccgattcggctcgaggcgttgggtctgggacaccatggctacgatgaagctgtacggggcggtgatgtcgtggaacgtgacgaggtgcgcaacggcgctggaggaggctggctccgactacgagatcgtgcccatcaacttcgccaccgccgagcacaagagccccgagcacctcgtccgcaacccgtttggtcaggttccagctctgcaggatggtgacttgtacctcttcgaatcacgcgcaatctgcaagtacgctgctcgcaaaaacaagccagagctgttgagggatagaaactcgaggagcagcatggt

SEQ ID NO: 67579 - DNA, 232 bp, Zea mays
gaacaacaaatcaaaagcgtgatcagctcggtgccaacaaaacctcaacaaccaagtttcatgtctgatctcgacgtccagcttccatctgcctttgatccgtttgctgaggcaaatgctgaggactctggtgctggtcctggaacgaaggattatgtgcatgtgcgcatccagcagcgcaagggcagaaagactctgactacagtccagggtctcaagaaggagttcagct

SEQ ID NO: 67580 - DNA, 319 bp, Zea mays
ctgatttccctaatgctcggactgcgatgacatcccctttggctaagtcgctttttgctattgatggagtaaccagggtattctttggatctgattttgtaactgttacaaaatcagaagaaacttcatgggattgcctcaaacctgaggtttttgctgcaataatggacttctactcatctgggcaaccactttttctggactcaaatgctgcagcttctatggacacagcaattcacgaggatgattctgaaagtttgccatgataaaagaatattggagatcgtatcgaccagtgttcagatgacgcggtgacatg

SEQ ID NO: 67581 - DNA, 340 bp, Zea mays
ggcgaactttatatggatgacggcaaaagctatgattaccagcaaggggcattcagccatcgccgatttgtctttgcagacaataagctaacttcattcaatatcgcacctgacaatttgagcaagaaatttacaagtggttgcgtgattgaaagaattatagtcctcggtttacgatccggagtgaagaaggctattattgagcctggaaaccaagaagtagaaattgaatcagggccaattagtttaaggagtggttccagcccagttgtgccaacaatccggaggcccaatgttcgcatcgcagacagttggacaatatggatagcgtaagaggttg

SEQ ID NO: 67582 - DNA, 336 bp, Zea mays
ggaggaggacgaactgcctcctgagaaacttgcgatagaaatgtgggtcggcaagatgcaaaaaagcatttggaagagcatgtgtcgaatttgatgtcatcaaacatagttcagaccttaggaaccatgctcgacacggttgtcttttagtctactaataatattgttgtcccaaactgaaacatagccacactatcgaagcacacgtgcaatgagcttgacgccggatacattttggttctaaggtttgtttatgaatggatttgtctacatttcattgttgttaaacttcctaccttttctatcaaagcttaagtgcgttctagttgtgtttag

SEQ ID NO: 67583 - DNA, 336 bp, Zea mays
gctccgctcgcgtggcactccgcggggacgtttgacgtgtcgtcgaggaccggcggcccttcggtactatgaagtgcccggcggaactggctcacggcgccaacgcggggctggacatcgcggtgcggctgctcgagcccatcaaggaggagttccccaccctctcctatgccgatttctaccagcttgccggagttgtggccgtcgaggtcaccggtgggcctgacatccccgtccaccccggcagggaggacaagcctcagccgccacctgagggccgtcttcctgatgccaccaagggttctgaccacctgaggcaagtctttgcgcaagcag

SEQ ID NO: 67584 - DNA, 333 bp, Zea mays
gctccgctcgcgtggcactccgcggggacgttcgacgtgtcgtcgaggaccggcggcccttcggtactatgaagtgcccggcggaactggctcacggcgccaacgcggggctggacatcgcggtgcggctgctcgagcccatcaaggaggagttccccaccctctcctatgccgatttctaccagcttgccggagttgtggccgtcgaggtcaccggtgggcctgagatccccttccaccccggcagggaggacaagcctcagccgccacctgagggccgtcttcctgatgccaccaagggttctgaccacctgaggcaagtctttggcaagc

SEQ ID NO: 67585 - DNA, 301 bp, Zea mays
  unsure (1)..(301): unsure at all n locations
ctcgagccgttgatggtgattgcatgactgttactgcaaaaactctagctgagaatgccaaaattttccctcctttgtctgaagggcagcaaataattcgaccacttgacaatcctatcaaaccaactggccatattcaaatactttatggcaatcttgcaccagaaggttctgtagcaaaaataactggcaaagagggactatacttctcaggtcctgcattagtttttgagggtgaagagtccatgattacagctatctcagaaaacncagcaaatttcaagggaaaggtagtagtgat

SEQ ID NO: 67586 - DNA, 339 bp, Zea mays
gacgttttgcatctccaagcagcatcgtctcctccccagatccatcaattcgttcggaccgcccttctcgtgtccacgttccaaagcgcggcaggctgagcggttccgtcagatttgagtcgtcatgaatcccgagtatgattaccttttcaaacttctgcttatcggtgattctggtgttggaaaatcatgcttgcttctcagatttgcagatgattcatatctggacagctacatcagcacaattggagttgactttacaattaggacagtagagcaagacgggaagaccataaagcttcaaattatgggaactgctggacaagagcgcttcaggac

SEQ ID NO: 67587 - DNA, 334 bp, Zea mays
gtctgtcgctgaggagagagctggacgtaagcttggtggactgagggttcttaactcctactgggtgaatgaggatagtacctacaagtactttgagatcatccttgtggacgttgcccacaaagccatcaaaaccgacccgaggatcaactggctatgcaaccctgtgcacaagcaccgtgagctccgtggcctcacctcagcaggcaagaagtaccgtggtctgcgtggcaagggccacacccaccacaagaacaggccctcaaggagagccaccttgaagcgcaaccagaccctctccctccgccgctaccgctgagcagtcgtcgggtgc

SEQ ID NO: 67588 - DNA, 314 bp, Zea mays
taatccacgtcctggtggtcgacatgacccacttctacaccacgtacacgagagtcgagccgtggatcaaccgccaggacccgccgccgacgctagcgcaaggaggtcccgcagaccaaggccgcccgcgccaagctcgacggcatgtacgagtgcatcctctgcgcctgctgctccacctcctgaccatcctactggtggaaccccgaggagtacctcggcccagccgcgctgctccacgccaataggtggatacaggacagccggcaccagttcaccaaagagcgcctggacgacatcaccgacgagttcaa

SEQ ID NO: 67589 - DNA, 343 bp, Zea mays
cggcaacctgcggcggagatgtcaggcaggggcaagggcggcaaggggctcgggaagggcggcgcgaacgtcaccggaaggtgctgcgcgacaacatccaggggatcacgaagccggcgatccggaggctggcgaggaggggtggcgtgaagcgcatctccgggctgatctacgaggagacccgcggcgtgctcaagatctttctcgagagatgtcatccgcgacgctgtgacctacacggagcacgcccgtcgcaaaaccgtcaccgctatggacgtcgtgtacgccctcaaacgccagggccgcactctctatggcttcggcggctaggttaggtgtgggt

SEQ ID NO: 67590 - DNA, 334 bp, Zea mays
ctgcggcggacacggaggcgaaggaggaggagcagcagcagcaggcggcgccgaggagcggcatcccactcagtgcttgcaaccatggctaggggattgaagaagcacttgaagaggctcaatgcgcccaagcattggatgctcgacaagcttggcggagcttttgctcccaagccatcttctggacctcacaagtccagggagtgccttcctctgatcctcatcatcaggaacaggctcaagtatgctctgaactaccgtgaggtcatttctatcctgatgcaacgccatgtacttgttgatggcaagtcaggactgacaagacctacctgct

SEQ ID NO: 67591 - DNA, 340 bp, Zea mays
atgaaaatgatgctggcaagaaggaaattcagctgcagcttgagaagatgaagaaatatgcttctgttatccgtgtcattgctcatacacagattaggaagatgaagggtttgaagcagaagaaggctcacctgatggagattcaggtcaatggtggtaccattgctgacaaggtggactatggctacaaattctttgagaaagaggtccctgttgatgctgtcttccagaaggatgagatgattgacatcattggtgtgaccaaggggacaggttatgagggtgtggtcactcgttggggtgtcaccggcttccccgcaagacccacagggtctccgca

SEQ ID NO: 67592 - DNA, 328 bp, Zea mays
ctcacatccctgaaaacctcacaaaaccctcgctcgctccctaccaccccgccgcgccgccgcctgtaccagctgcgtcaagatgagtcggcaccctgaggtgaagtgggctcagaggatcgacaaggtttacatcactgtacagttacctgacgcaaaggatgctaaggtcaatttggatccagatggtgtcttcacattctctggcagtgctggtacaaacttgtatgaattgaaactagatctgaatgacaaagtaaacgttgaggctagcaaaataagtgtgggggtcaggtccatattctgtatcgtagaaaaagctgaagcc

SEQ ID NO: 67593 - DNA, 111 bp, Zea mays
  unsure (1)..(111): unsure at all n locations
gagaactttggcattattgcgagtttgatgacaactgttcgtgccatcactgccaccctgtngcctgttgattgaccctcagccaaggactggcgcggtggcagggctgcc

SEQ ID NO: 67594 - DNA, 337 bp, Zea mays
gtgccggcagcgactattcctgatgccacgacgacaagcgtcactgagcggacttcggtttcatctcttttagaggttgtatcggaggacttgctcagccttaacaacaatctcaaatcgcttgttggtgcagaaaatccagttttagtttctgcagctgaacaaatttttggtgctggtggaaaaagattaaggccagcattggttttcctggtgtctagagcaactgctgaattagctggtttgtcggagttaactgcagaacatcgacgcttggcagagattatcgagatgattcacactgcgagtttaatacatgatgatgtcatagatgata

SEQ ID NO: 67595 - DNA, 338 bp, Zea mays
  unsure (1)..(338): unsure at all n locations
gtcttgtgtctcaccactgtcaagaacgaggataagcttgagttcagcaagatcttggaggctattaaggcaaacttcaacgacaagttcgatgaggtcaggaagaagtggggaggtggcatcatgggatccaagtcgcaggccaagaccaaggcccgggaaaagctgctcgccaaggaggctgcgagtggntgacctagattgtctactgctgtgtctgccctgtagtttgacggggaagaactgaactcgtattgtggttttccgaatctagtttcaaatgtttctgtccaccagaccgatgtatagcgctttgcaagacagagtttacagtgttt

SEQ ID NO: 67596 - DNA, 329 bp, Zea mays
ggcgaaggagtagcagcagcaggcggcgccgagtagcggctccccatctcgagcttgccaccatggctagaggattgaagaagcatttgaagaggctcaatgcccccaagcattggatgctggacaagcttggcggagttttgctcccaagccatcttctaggactcacaagtctagggagtgcctgccactgatcctcatcatcaggaacaggctcaagtatgctcttacataccgtgaggtcatttccatcctgatgcaacgccatgtacttgttgatggcaggtcaggacagacaagacctacctgctgggttcatggagtcattc

SEQ ID NO: 67597 - DNA, 324 bp, Zea mays
gaggcgcgattgcacttggacaccctctgggtgcaacaggtgcccggtgtgtggctactcttctaaatgaaatgaagcgccggggcagagactgcagatttggtgttgtcaccatgtgtatcggatctggaatgggggcagcagctgtgttcgagtccggagacgcggtggatggactctccaacgtgagggacatccaggcacataattttctgtctaaggatgcgaagtagaggcgcagaaaaaacatccatccttgagcagcataagcctgctgcatttgtaatactgtcgagatccgtatttttttcttcacaaacacta

SEQ ID NO: 67598 - DNA, 332 bp, Zea mays
cttgcaatcacaacgaacaaaagctctcgatctcaccgacaccgaggaagaagagatcaatggcgtccgagcagggagtcgtgatcgcgtgccacagcaaggctgagttcgacgcccacatgaccaaggcccaggaagccggcaagctggtggtcatcgacttcactgccgcctggtgcggtccatgccgcgccatcgccccactgttcgtcgaacacgccaagaagttcactcaggtcgtcttcctgaaggtggacgtggacgaagtgaaggaagtcaccgcggcctacgaggtcgaggcgatgccgaccttccacttcgtcaagaacggc

SEQ ID NO: 67599 - DNA, 351 bp, Zea mays
ggcaaggtgtggcttgtaccaaatgaagttagtgagatctccatggcaaactcccgccagaatatccggaagttggttaaggatgggcttatcatcaagaagcctcataagatccactctagatcccgtgcaagaagggcacatgacgccaagcaaaagggacgccactcaggatatggtaagcgtaggggtacagggaggctagggaacccaccaaggttctgtggatgaggaggatgcgtgtgctgaggcgccttctccgcaagtatcgtgaggccaagaagattgacaagcacatgtatcatgacatgtacatgaaggacaaagtaagccttcaagaacaagaggtgc

SEQ ID NO: 67600 - DNA, 349 bp, Zea mays
accgccgccgctgcagtgtccatagccaccgcaggagcactgagactggggggttttgtcaagacccacaagaccaatgcgtacttcaagcgtttccaggtgaagttcaagagaaggcgcgctggcaagacagactacagggccaggataaggctgattaaccaagacaaaaacaagtacaatacacccaaatacagatttgttgtgcgatttaccaacaaggacatcacagcacaaatcatctctgctagtatagcaggtgatatggttcttgcttctgcttactcgcatgagttgccacgatatggtcttgaagttggtctgaccaactatgcagctgcctactgca

SEQ ID NO: 67601 - DNA, 347 bp, Zea mays
ctcgagcgcctgatcgtcctgttcctcacagcagcagccatggcggccgagccggagaagcaggcggcccccgcggcacaggagatggccgtgcacatcgtgtacgttgaccgccccgaggacgccgaccctgaggagttccacatccgcaccctcacccccgtcctcggcagaaggccagggacgcagtgctctaccactacaagaacgccgccagcggcttctccgcgaagtcaccccccagcaggtcaaggatctcaaggagcaaccaggtgttctccaggttgtgccgagccagacttaccagctacatggcgctgggtctagcactcaccaggcacgacaca

SEQ ID NO: 67602 - DNA, 342 bp, Zea mays
tgatggcatcctcaagctgcttgagaccatcttgtaccgtcttccactgcccccgagtccaaggtctatctatctcaagatgaagggtgattactacagataccttgctgagttcaagactggagctgagagaaaggacgccgctgagaacacgatggtggcatacaaggctgcccaggacattgctctgctgagcttgctccaactcaccctattaggcttggactggcacttaacttctcagtgttctactatgagattctgaactcacctgatcgcgcctgcagtcttgcaaagcaggcttttgacgaggccatctcggaactggacacctgcagcgag

SEQ ID NO: 67603 - DNA, 314 bp, Zea mays
tgatggcatcctcaagctgcttgagacccatcttgtaccgtcttaccccgcacccgagtccaaggtcttctatctcaggctgccgggtgattactacggataccttgctgagttcacgactggagctgagaaccaggacgccgctgagaccacgatggtggcatataaggctgcccaggacattgctctgctgagcttgctcgaactcaccctattaggcttggactggcacttgacttctcagtgttctactatgagattctgaactcacctgatcgcgcctgcagtcttgcatagcagcttttgacgaggcc

SEQ ID NO: 67604 - DNA, 337 bp, Zea mays
aaactccgacgttttgcatctccaagcagcatcgtctcctccccagatccatcaattcgttcggaccgcccttctcgtgtccccgttccaaagcgcggcaggctgagcggttccgtcagatttgagtcgtcatgaatcccgagtatgattaccttttcaaacttctgcttatcggtgattctggtgttggaaatcatgcttgcttctcagatttgcagatgattcatatctggacagctacatcagcacaattggagttgactttaaaattaggacagtagagcaagacgggaagaccataaagcttcaaatttgggatactgctggacaagagcgc

SEQ ID NO: 67605 - DNA, 308 bp, Zea mays
attaaggcaaacttcaacgacaagttcgatgaggtcaggaagaagtggggcggtggcatcatgggatccaagtcgcaggccaagaccaaggcccgggaacagctgctcgccaaggaggctgcgcagcggatgacctagattgtctactgctgtgtctgccctgtagtttgacggggcagaactgaatcgtattgtggttttccgaatctagtttcatatgtttctgtccaccagaccatgtttagacgctttgcaagacagagttacagtgtttatgtgatgcctcagaccatgcagcttgcttctac

SEQ ID NO: 67606 - DNA, 278 bp, Zea mays
ctgtcaaacagcaagttaaggatgctaaatttcctgatctagaggtcattcgcatgttgtgggatgtgctcatggaggctgttcagtggtctgggaagaaccagcaacagaattctaatgcagcacttcggcaggtgaaagcatgggctgagcttttgaatgctttttgcacgagtggcagactcgaactggaacttatatacaaagtacagacacagtgctatgaggatgctaagctgatgaagctgtttcctgaaatcataagaacactgtatgac

SEQ ID NO: 67607 - DNA, 317 bp, Zea mays
cgcggctcgagcggctcgagatccttgtgacaagaggaggagcatcacagagtaccgtgctcagttccctgatcattgatttttcgctgatagagagtgacgacagatgttctctgggtaccagatgtcagagaaacctttgagtcactcgcagacaggggtatgaagttcattgactggctatggcaagcgacagagagagagatagccatcgtcacccatagcggcttattaagccatacctgcgcatgtacagcaaagagtgccatccaacagaaacacaagcagtgagcaagtctttggcaaatgcgagctcg

SEQ ID NO: 67608 - DNA, 346 bp, Zea mays
ctcatctcattctcaagtgtgtagccgagcgagcgccatggcatagcctccaagtcactcctacttcggcgttcactcagtggaatgagctgaagttcgaaggcctgtacttgttccacaagtaccagggctcaggcgccaaccaaactcaggtcatacgcaacaaggcgccgattggcatcgggccaccgtagttaacaactggacagtgtgtgacgggccagggccgaacgcaaagctcgttgcccgtgcacagggcttgcatatccaagccggcaactgggtcaactccttcagcctagtgttcgtggatcaacagttcagtgggtccagcttgaagtgacgg

SEQ ID NO: 67609 - DNA, 341 bp, Zea mays
agccgccgttgctgctgccgcgtccacagaatggggggtttcgtgaagactcataagaccaatgcgtatttcaaacgtttccaagtgaaattcaagagaaggcgggctggcaagacagactacagggccaggataaggctgattaaccaagacaaaaacaagtacaacacacccaaatacgatttgttgtgcgatttaccaacaaggacatcactgcccaaatcatatctgctcagtatagcgggtgatatggctcttgcttctgcctactcgcatgagttgccacgatatggtcttgaagctggtctgcacaactcatgcagctgctactgcactggctt

SEQ ID NO: 67610 - DNA, 260 bp, Zea mays
gatggcaacactacggatgatcttagactcccaactgatgagactcttgtggcccagatcaaggacgggtttgaacagtggcacggatcttgttgtgactgtccagtctgctatgggggcggagcagatctgcgcgctgaaggatgttggccccaagtaacttccctgccttggaatactgatctcaaaacctaaatcgaaaaaagaagtgtatcaaggattgctacagagacatccatctggcttgcagctggcttttg

SEQ ID NO: 67611 - DNA, 330 bp, Zea mays
cgcaacaccagccgccgccatgtcgaagcgcggcaggggcggttcggcggggaacaagttccgcatgtcgctgggtctgccggttgccgcgacggtgaactgcgcggacaacacgggcgccaagaacctctacatcatctccgtcaagggcatcaagggccgcctcaaccgcctcccgtcgcctgcgttggcgacatggtcatggccaccgtcacgaaggggaagcccgacctcaggacgaaggtgcatgccgccgtcatcgtccgccagcgcaaccgtagcgccgcaagacggtgtctacatgtattcgaagatatgctggagtgatgt

SEQ ID NO: 67612 - DNA, 267 bp, Zea mays
cggacgccactaccaccaccgcaagcgacgacggggcgctgtttctgcgacggctcctgaccggcggcggcggcctggcggcgctgagggcggcgcgcgccgtgaaggcgacgacggggatcgtcggccttgaggtggcgcccaacgcgcgggcggttctcatcgggctctacacgcgtcgctcaaggagatcgaggccgtccccaaagacgagcggtacgcacggccgatgcagtcttcaccaatcacgcctccagatctgccaga

SEQ ID NO: 67613 - DNA, 323 bp, Zea mays
gaagacagaatacttgagaaaccaccagttgccgaatcccagaacttatgttagttcaaagggatatagcttcaccaaggggcagactgaggtgttgtccgcaaagatcacacatctcaagcagaaggttgaggtcactgagggcggtgatgctatggaggagtgatcctgtatgcttcatccaggtaaaacagtcatactcttttttatattattttacttagtggaggagctaggaaaagacagaatggagatctttgttgtactttctcgactgaatccggactttcatgtacaaggtgtttccaattaagagcttgttt

SEQ ID NO: 67614 - DNA, 190 bp, Zea mays
tctggatcaggcctcgaagtagttatactatatggggaactggaacagcgtgaactctactcgcaaaggctgttgccaattctacttcagcaacgttctcgcgtgttgttgggagtgaattgatccaacagtaccttagtgatggtcgcaagcttgttagagaattgttcaggtggctgatgatctttct

SEQ ID NO: 67615 - DNA, 270 bp, Zea mays
gccgggaccgtctgggtgaactgcttcgacgtcttcgatgctgcgattccgtttggcgggtacaagatgagcggcatgggggcggcgaagggcgttgacagcctgaagaactacctgcaggtgcaggcggtcgtcaccccaatcaagaacgccgcgtggttgtagacgctgcaatgtggccttgtgcacgagaaccacgtatattcatttcctggtcacatccccgaacaatgtgaagcgttaatcagatagatgacgatgaagaagaac

SEQ ID NO: 67616 - DNA, 339 bp, Zea mays
  unsure (1)..(339): unsure at all n locations
ctccgccccagggttaccgcaccaacgtcagcatctgcctcgccgacccatccctcaccacgattttctcggcttctaggatcgacattcctagcgcgtggcagatgcctcagggtggtatagatgcaggggcagaaccaagggcggctgccttcagggaattgagagaagaaactgtgtcacatccgcagagatcgtagctgcggctcctgtctggttaacatatgatttccccacggatgtgagaaccaagctgaatgccaggtggggaaccgattgganaggccaagctcgaaaatggtttttatttaggcttactggaaatgatgatgagattaa

SEQ ID NO: 67617 - DNA, 332 bp, Zea mays
cggaggcttcctggaacaaggccgcgacgccgaggtcgacatgtacggcaaggacatccggttcgtgccgttcggggcggagcgcaggatctgcgcggaggccacgttcgccatcgccaccgtcgagatcatgctcgcgaacctcatctaccatttcgactgggagatgctcgcgagatggagcgcaccggggccacggtggacatgtccgaccagttcgggatgacgcttcgccggacgcagaaactttaccttgttcctagaattcccaatgagtgtcgtcgtcgtcgtacagtggcatgcatctattgtcagttttggagttgttgttg

SEQ ID NO: 67618 - DNA, 337 bp, Zea mays
  unsure (1)..(337): unsure at all n locations
ctgcgaggccgccctcaacgagcagatcaacgtggagtacaacgactcgtatgcataccactccctcttcgcctatttcgaccgcgacaacgtggctctcaaaggatttgccaagttcttcaaggaatccagcgacgaggcgagggagcacgctgaaaagctcatggagtaccaaacaaacgtggaggcaaggtgaggctccaatcgattgtgacgcctttaaaccgagtttgaccaccctgagaaaggagatgctctgtacgctatggagctagctcctggcctggaanagctggtcaatgcaaagctgcacaacctgcatggtgtggcaacaagg

SEQ ID NO: 67619 - DNA, 319 bp, Zea mays
gtcgcttccagccgccgccgccgcgtccgcctcgcacaacgcagcgccgccgcagcacatcgctatctcgatctcaaccatggcggcggtggagcagcaacaagacacgccgcagctgttcaaccgctggaccttcgatgatgtccaggtgaacgacatctcgctgaacgacacctcggtgtgaacgcgacgaagcacgcgatgtacctgccgcacaccgcggggcgctactccaagaagcggttccgctaggcgcagtgcccgatcgtcgagcgcctcacaaactccctcatgatgcacgggcgcaacaaggcaagaa

SEQ ID NO: 67620 - DNA, 294 bp, Zea mays
  unsure (1)..(294): unsure at all n locations
cgaaaagtgcacctgaggaactggttcaacaggtgctgagtgctggatggagagagggcctaaatttcgcatgtgaccatacanctcaacgatatgatgcaacagcttacaacaccatcctcaggaatgcaagacctcaaggcatcaacaagaatggccctccagaacacaagtgcacggattcacctacctccgagtatctgatgaactgttccaggaacagaactacaccactttcaaaacttttgtcaggagaatgcatgctaacctggattataatccacatgtcgatcc

SEQ ID NO: 67621 - DNA, 172 bp, Zea mays
catgctcctcgtccacgacaagccagtcgaagccgagatacggccatggactccaccggcaccggagcaaggggtaaggggaagagaggagcggccgggcgcaaggtcggcgggccaaggaagaagtcggtgtcgagatccgtgaaggccgggctccagttccccgtcggcc

SEQ ID NO: 67622 - DNA, 314 bp, Zea mays
gcggcagaatcccctcctcctcctccctgtccctggacgccggcgccggcgtcggctcctcatcgtccgcgggagactgaagtggtgaacgcggaagaaggttgtcattttgctaagttaaagttagatcattggagcaatgccgccccataagatcgagacggggcaccaagatgtggtgctgatgtcgccatggattactatggcaagcgcctagctacatcctcctctgataatacaataaagatcattggcgtaagtggaacctcacaccagcagcttgcaactttgagtggacaccagggcccagtatg

SEQ ID NO: 67623 - DNA, 308 bp, Zea mays
  unsure (1)..(308): unsure at all n locations
cattgactgaattatgatcctggatggataaaaatcacagttattctatctgatgctaatgttcctggcgaaggggagctttnaataatgtcgtatattcgtggtcaacggaatctccctggatttaatccagacacacgccattgcttatatggcctggatgcagacctcataatgttagtttagcaactcatgaagtacacttctctatattgagagatgtagtctttacacctgggcagcaggacaaatgcttcttatgtggtcaggtggggcatctagccgctaattgtgaaggaaaggcaaag

SEQ ID NO: 67624 - DNA, 310 bp, Zea mays
caaggacaagctaacgattttaaaatccaatacagcagtattgttcgcctctttcttttgccgaagtcaaacaatcctcatacatttgttgttatcactcttgatccaccaatccgtaaaggacaaacattgtatcctcacattgttattcagtttgagacagaggcagtagtggaaagagctggcattgagtaaagaactgttggttgaaaaatacaaggacaggcttgaggaatcttacaagggtctaatacatgaggtatttaccaaagtccttcgtggtctatctggtgctaaagtcacaaggcca

SEQ ID NO: 67625 - DNA, 309 bp, Zea mays
gtagctcggttccaggatcaacaaggtgtcatgacagctgaaactggatcatacagatggatggcacctgaggtaataaaacatcatccctatgatagcaaagcagatgcatacagctttgctattgtcatctgggagctgataacgtctaagatcccgtatgagagcatgacccctctacagcggctgtacgtgtgagacagggattgcgcccaggactcccaaagaagacgcatccagaggtatgggacttgatgcagagatgctgggcagcagactcatctgcgcggcctgctttcccagacattt

SEQ ID NO: 67626 - DNA, 308 bp, Zea mays
atgagagccaaatccagagcgccgccgcgatggcctcccctgacgcggaacagccggcgccgacggaactcgagcggtggcgtgacctcgacatgctcttgtcccgccctggaaacctcgtggaggccactttcgatcccagccccggcctgcgagacctactggggagcctcgtggaggtttggttgtgggcgcgggcgggcttggctgcgagctcctcaaggacctggctctctccgggtttaagaaactgcacgtcattgatatggacaccatagacgtctccaacctcaatcgccagtttctct

SEQ ID NO: 67627 - DNA, 305 bp, Zea mays
gccagcaggtgctgcgatacattccacacaacaaccaatagaactctgccccagcccgtcacaggagttcccgcatctcccgctggtctggtcacaggagctccgagacctctccaatggcggttaagatctacgttgtgtactattccatgtatgggcatgttggcaaactagctgagagatcaagaaaggtgccttatctgttgaaggcgttgaggctaaaatatggcaggtccctgaaattctctctgaagaagtgcttggaaagatgggcgcgccccctaagcccgacgtgccagtcatca

SEQ ID NO: 67628 - DNA, 310 bp, Zea mays
cgcgcctctacatttcttctctctctgctcctccgcctccgcctccgcctgatccatccaagacagggatcgccatgtcggactcggaggagcaccacttcgaatcgaaggccgacgctggggcgtccaagaccgacccgcagcaggctggcaccgtccgtaagaacggcttcatcgtcataagaaccgtccctgcaaggttgtggaggtttctacctccaagactggtaagcatggccacgccaaatgccactttgtcgccatagacatattcaatgggaaaaagcttgaagatattgttccttcatca

SEQ ID NO: 67629 - DNA, 306 bp, Zea mays
gtctgtcgctgaggagagagctggacgtaagcttggtggactgagggttcttaactcctactgggtgaatgaggatagtacctacaagtactttgagatcatccttgtggacgttgcccacaaagccatcaaaaccgacccgaggatcaactggctatgcaaccctgtgcacaagcacgtgagctccgtggcctcacctcagcaggcaagaagtaccgtggtctgcgtggcaagggccacacccaccacaagaacaggccctcaaggagagccacctggaagcgcaaccagaccctctccctccgc

SEQ ID NO: 67630 - DNA, 302 bp, Zea mays
ggcggaggcagtggcggtgcgaacgtggctaatgtggtcaccgacgcgttcttcaacggcatcaagaaccaggccgggagcgggtgcgagggcaagaacttctacacccggagcgcgttcctgagcgccgtcaacgcgtacccgggcttcgccatggcgggacggaggtggaggcaagcgcgagatcgccgccttcttcgcgcacgtcacgcacgagaccggacatttctgctacatcagcgagatcaacaagagcaacgcctactgcgacgcgagcaacaggcagtggccgtgcgcggcgg

SEQ ID NO: 67631 - DNA, 310 bp, Zea mays
catctctaaaccctacccacagccaccgccgccgccgccgctccctgacccctagtgtccggatttaacttcaaacatggcggacgtcgatgtcgagccggatgtcgccgccggtgctcccaagaagaggacgttccgcaagtacagctaccgcggcgtcgacctcgatgcgctgcttgcatgtccaccgacgacctcgttcagctcttcccagcgcgcgccaggagaaggttccagaggggtttgaagaggaagcccatggcgctcatcaagaagctgcgcaaggcgaaaaaggatgctcctgtcggcg

SEQ ID NO: 67632 - DNA, 306 bp, Zea mays
gtataggacggagctgagcttctagcaacgtacagtgtatccgccatgagtcctttcggggcggtgatcacgccagaaaccctcaagtacatgtccaagtaccagggacgtgagatcacgcaggtggactgcgcacgggaggcgatgaggctgatccacgcggaagacaagaacctcaggccgaggactcagcgtgggagctgaagaagaagttcggcaacggcgtgagcaccatggtcctcgtctacaacgccaccggggccagcctgagcctggtggacgacgggatagactggatgggctccg

SEQ ID NO: 67633 - DNA, 305 bp, Zea mays
ggagggaggaaggagatcgcgagcagccggagccggaggcgagaggatgaagacgttcgacccgtggccggtcttcttccgccgggagtggaagcgcaactggccctttctcacggggttcgccatcaccggcttcatcatcaccaagatgacggccaacttcaccgaggaagactcaagaactccaagttcgtccaggaacacaagaagcgctgaccaaccgggtggagtcgtccgaatcgcctgcggatgaaaaattagccccctatttttcttgtcttatttttatctagatgcgtgcactc

SEQ ID NO: 67634 - DNA, 304 bp, Zea mays
ctcgagcgctctcgcgcaaacactcctctttccgcgccgcctcccctctcgcccactatgctccgccggcgcggccaccgccgccgcaccgcagcagccagtcagctgatcgtaaccatggcggattctaaggccgctgcggcggtgaccctccgcacgcgcaagttcatgaccaacgccttctctcccgcaagcagttcgtgctcgaggtcatccaccccggccgccccaacgtctccaaggcggactcaaggagaggctggcgaagatctacgaggtgaaggacccaaactgcatcttcgtc

SEQ ID NO: 67635 - DNA, 301 bp, Zea mays
  unsure (1)..(301): unsure at all n locations
ctcgtcttgtgttgttcggagcgggcagcagcacacagccccatcccaatcctagtcgatcttcttcccctcctcaaggaaganaagaagctgaaccatggggaagagaaagtcagctgctaagccacctcctaagaagcggatggacaagcttgacactgtcttttcctgcccatctgcaaccacgggagtagtgttgagtgccgaattgacatgaagaatctgattggcgaacatcttgtagaatctgtcaggaaaacttcagcacaactgttaatgcactcactgagcctattgatat

SEQ ID NO: 67636 - DNA, 299 bp, Zea mays
acttcgctttgcttccgccgatcggcttgctccgtcgatttcgccaacccctcgacccgatcgactccattgatcgtacctcgtcgtcctcttgtcgatggccaggacatctttcaaaatggagcacgacctcgagaaaaggcagttcctctctgccaggatcagggataagttcccgacagaattcctgtgattgttgagaaagctggcaaaactgatgtccccgagattgataagaagaagtacctttgtccctgctgatctcactgtcggccagtttgtctatgtggtgaggaaga

SEQ ID NO: 67637 - DNA, 304 bp, Zea mays
agccaacttcccagattactgcatgcaagctattgccaaatctggatttgtggagccaacacctattcaatctcaaggttggcctatggctttgaagggtagggacctgattggtatcgctcaaacaggctcagggaaaacattatcttatctgttacctgggttggttcatgttgtgcccagcctcggctagaacaaggcgatggcccaattgtattaattctcgctcccacgagagaactggctgttcaaatacaggaagaatctacaaaatttggatcatattcaagaactagaagcacat

SEQ ID NO: 67638 - DNA, 298 bp, Zea mays
atcagcacctggatcttatggtcaacctaatacacttggtaactatgggcaggtacctccatcagtgaatcctggtggtaacagagttcctggtgtgaatcctagttatggtggggatggcagacagggggctggaccagcatatggtggagataactggcaaagaggttctggcagtatcctagcccaggtgaaggacaaggtgactggccaggaaggcagtaagagctgacgtgttccactgaagacaagaatggcacttgagatttaagaatctccatctgtagaataaacgact

SEQ ID NO: 67639 - DNA, 301 bp, Zea mays
gggcattccaccggaccagcagcgcctgatctttgctggcaagcagctggaggatggccgtaccctcgccgactacaacatccagaaggagagcaccctccacctggtgctccgcttgcgaggtggtatgcagatctttgtgaagaccttgactggcaagaccataaccctggagttgagagctccgacaccatcgacaacgtgaaggcaaagatccaggacaaagagggcatccccccagaccagcagcgtctgatcttcgctggcaagcagctggaggatggccgcaccctagcagact

SEQ ID NO: 67640 - DNA, 300 bp, Zea mays
ctgcgtttgctattcttatggagtatattggcaaggatgactcaaacattcgtattggagcaatattgggtcttggaattgcatatgctggttcccagaaagaagagcttaaaatgcatctatctgctgtgttgggagactcccaatcacctcttgaggtcttggtcttctcgccattgccatgggattggtgtttgtcggttcttgcaatgaagagattgcacagtctattatatttgctttgatggagcgtagtgaggccgagttggcagaacccattatacggttgcttcctgttgc

SEQ ID NO: 67641 - DNA, 298 bp, Zea mays
gcttccagagccccccgccgccgctgcgccctcctctcggtcctgccgtccgtcgaggtaaaaggacagcatggtgagggtcagcgtgctcaatgatgctctcaagtccatgtacaatgctgaaaagatagggaaacgtcaggtcatgatcaggccgtcatccaaggtgatcacaagttcctgacggtcatgcagcgccatggttacattggcgagttcgagtacgtggatgaccacagagctgggaagatcgtggtggagctgaatggaagactgaataaatgtggtgttattagcc

SEQ ID NO: 67642 - DNA, 298 bp, Zea mays
tgcaaaccgcttcatctttgatcaggatgttgctattgctgcgatgggaccgatccaaggacttccagactacaactggttcagacgccggacctacatgctccgttactaagatcaatctgccggtgtaccatgtttacggtgtgcaaggacaaagataaaatttgcctcttcggcgtctgtatatcaaggcctcagcactgcacatcgcttgctgcgacagaggtttttttcttcttcagaatttgttttatttcttttcttgctcagaatccacaaatctgccaataatgataga

SEQ ID NO: 67643 - DNA, 290 bp, Zea mays
ctcgcctgcgctccctcgccgccccagttccccaccccctgctcacccacccgtcccctcctgctcgctcatggctcccatcgctgtcggcgacgccctccccgacggccagctcgggtggttcgacgagaacgaccagctacagcaggtctccgtccacgcgctcgccgcgcaagaagttcttctcttcggcgtccccggcgccttcaccccgacctgcagcaaccagcatgtgccaggcttcatcacacaggctgagcaactcaaagccaagggtgtagacgagatcc

SEQ ID NO: 67644 - DNA, 303 bp, Zea mays
atttgatccgtcccggccgcctacacgatgtccaagtcgggagcgctggatcttgcttctggcctcggagggaagatcaacaaggtggaagtcaagtcggccgtcgatgagtatgagaaatatcatcgatactatggagggaaggaggaagcaaggaagtccaactatactgattggttaataaatactatgatcttgccactagcttctatgagtatggttggggtgaatccttccactttgctcacagatggaatggagaatccttacgtgaaagcatcaagcgacatgagcattttcttg

SEQ ID NO: 67645 - DNA, 299 bp, Zea mays
gcacgcagttcacccaatctccgctgtccagctggagtggtcgctctggtcaagggatgttgaagctgatataatcccgacctgcaggtagcttggcattgggatagtagcctacagtccactgggcagagggttcttgtcgagtggtcctacgatggtcgacaagttgtccatcaagatttccgcaaggagctgcccagattccagccggagaacctggagaagaacgccgtgatattcgagagagtcaacgcgatggcggcgaggaaggggtgcacgccgtcgcagctggcgttggc

SEQ ID NO: 67646 - DNA, 301 bp, Zea mays
cgctgacgctcttaaggtcctgaggctgcaacctggacacaagtactgcctccttggtgagctttctaaggaggtcggatggaactaccatgacaccatcagggagcttgaggagaagaggaaggagaaggctaaggtggcctatgagaggaggaagcagctggccaagctggactaaaggctgaggctacagccgaggagaagttagggtcccagctggacattcttactccgatcaagtactgaatttgtggaacatctgatccatcgttttaaaagttgtgacagtataatcttgagt

SEQ ID NO: 67647 - DNA, 185 bp, Zea mays
gtgtctcactgttttatgtatcattatacttcagatattgttggtgtggttcagatcgtatctccgacactcactgattagggggagattgacaacgagacaataccaaagcgtgacattgttgtagcagatgactcttaagtatcacttgatcttttaccctgtcgaagcttagaatacaatca

SEQ ID NO: 67648 - DNA, 298 bp, Zea mays
gcagcaggaaccctagcaccgccgcatccgcagccatgggtatcgacctcgttgccggtgggaggaacaagaagaccaagcgcacacgccgaagtccgacgatgtttatctcaagctccttgtcaagctctaccgtttcttggtcaggaggaccaagagcaacttcaatctgtcattctcaagaggctcttcatgagcaaaaccaatcgcccaccaatctccatgcgccgccttgtcaagttcatggaaggaaaggagaagaacattgctgtgattgttggcacagtcacagatgaca

SEQ ID NO: 67649 - DNA, 296 bp, Zea mays
ccgacatcgtcccttcgtccccacgagcaaccgataatccgccggcgttgagatgttggtttatcaggatctcctatctggcgacgagctcctgtcggattcattcacctacaaggagctcgagaacggcgtcctgtgggaggtcgagggaaagtgggtcacccaaggcctgttgatgtggacattggtgccaatccatccgccgagggtggtgaggacgaaagcgttgatgacacagctgtgaaggtggttgatattgttgacacattccgtctacaggagcaacctccttttga

SEQ ID NO: 67650 - DNA, 294 bp, Zea mays
ttgaaaggggagagagagagagagaagagagagagaagagagagagagagagaggagtgggagacccgcgagatgctgccgtgtagagaccgtagactcagcgactgcgaaggagggataaggggatggccgggatcggaccgatcaggcaggactgggagccggtcttgtgcggaagaaggcacccaccgccgccgccaagaaggatgagaaggccgtcaacgccgcgcgccgcgccggtgcggagatcgataccatgaagaagtacaacgctggtacgaacaaggcggcatc

SEQ ID NO: 67651 - DNA, 293 bp, Zea mays
caactcactagtactcagccgccgcaatcagggacaggtagctcgagcgcgcgctccacctgctccgacgcgatgcgggccaagtggaagaagaagaggatgcggaggctcaagaggaagcgccggaaaatgaggcagagatctaagtaggcgcatcttgtgaccgagatggcgagcttctcctgcaccatggctgagacgcgttgggatgattgtctccctttgtagacgtgctttgctgtagacgtaggcgatgtaaaccgtcctttttgattgattctagtatgttctga

SEQ ID NO: 67652 - DNA, 341 bp, Zea mays
  unsure (1)..(341): unsure at all n locations
ggagcaatgataagctgctcnaaattgagcatgaattatgtgagagggtcataggccatcttgaggaagggaaagatgtccgtttaggggattggaaagctgctgacattgagatcttgaatacattccagctactttcagctaagccagttgtctatttggtgaatatgagcgagaaggacttccagagaaaaaagaacaagtttctacccaagatacatgcttgggtgcaggaacatggtggtagaaccatacttcctttcagctgtgcttttgaacagaactagtggactgccagaagatgagccgccanatatgtgccgaaacagtaacagcatgat

SEQ ID NO: 67653 - DNA, 266 bp, Zea mays
accgccgccaccatcacagctgatcaccggcgcggacttccaacatattctgcgtctgctgaacaccaacgtagatcggatgcacacgctcatcgtcgccatgacctccataaacggtgttaggcgccgcttctccaacatcgtctgcatgccagccgtcatcgacatgaacaagacggtcggtgagctgacacctgtagagctggagcgcctgatgacggtcgttgccaaccctatgcagttcaaggtgccgtactggttcctca

SEQ ID NO: 67654 - DNA, 351 bp, Zea mays
  unsure (1)..(351): unsure at all n locations
catccgcctctcttctcagtgccagccgccgtgcgctcgctctctctgtccctcaaggccttcgccggcgaagagcgcctagtcacccaccaggatgaagtttgttgctgcttacctgcttgctgtccttgctgggaactccagcccctctgctgaggacttgacggccattctggagtcagttggctgtgaagttgacaatgaaaagatggagctcctgctgtcccaactgagcggtaaggacattaccgagctcattgctgcgggcagggagaagttgcttcatcncatgcggcggcggcggcggtatgctgtggcacactggcctgcgctgcggactgctctgcactg

SEQ ID NO: 67655 - DNA, 352 bp, Zea mays
  unsure (1)..(352): unsure at all n locations
tggaactggtttacgaagatcacgagaaggatgtcctattagttggtgatgaccatgggaggacttcgtgaactgcgtgcggtgcatcaggattctttcgccgcaggaagagaggcaaatgaggctggccagcgactacggagacagctttcttggcaaccaagcgtgtagcagctcggacgggggtcgtccgtggagggtcaccggcgactagaaatagcaggctatgcctgagcacaaatgtttgatataatccgtcgcacgatagcaagaaaatgatacgcgatttctgagcacaaacttttgcactcagatgatcgtgcnaacagttagcattttaagaacatgttgc

SEQ ID NO: 67656 - DNA, 365 bp, Zea mays
tggtgatatcgatcaccttgctgcagcatttcttacttcacataacattgctcatggggtgaacctaaagaaatcccctgtacttcagtacctgtattatcttgctcagattggtctagcaatgtctcccttaagtaacaactcactgtttatcgactatcatcggaaccctttcccaacatttttcttaaggggtcttaacgtgtctctttcgactgacgaccctctacaaattgcactgacgaaggaggcgttggttgaggaatacagtggtgcggcttcagtaatgcgcctatctctatctctgtcatgtgttttcccaatcccacccagaggttcttagtctggattgcttgttactcttg

SEQ ID NO: 67657 - DNA, 361 bp, Zea mays
cgtttcgcgtccgcctcagcccgccgcaaggagaggtaagtgcaggagacatcttcgagaagctgaaatggctcctaaagctgctcctgccaagaagggtgatgccaagacccaggccttgaaggttgccaaggctgtgaagtctggggcagccaagaagaagaccaagaagatccgcacgtctgtgacatttcaccgccccacgaccctgaagaaggctagggaccccaagtacccacgaatcagcactaccggaaggaacaagcgtgatcagtaccacattctcaagtacccgcttaccacagaatcagcgatgaagaagattgaagataacaacatctgatcgtcatgttgactcaag

SEQ ID NO: 67658 - DNA, 372 bp, Zea mays
cggctcgaggccgagggtggtgaggacgaaagcgttgatgacacagccgtgaaggtggttgatcttgttgacacattccgtctacaggagcaacctccttttgacaagaaatcatttgtctcttacattaaaaaatacatcaagaatctcactgctgtgttggagccagagaaagcggatgagttcaaaaagggtgtcgagggtgcaaccaagtttctccttagcaagctgaaggaccttcaattttttgttggtgagagcatgaaggatgatgcgtccgtggtattcgcctattacaaggatggtgccactaatccgacattcctctatttctctcatggtcttaaggagtcgagtgctaagctgcggcga

SEQ ID NO: 67659 - DNA, 309 bp, Zea mays
accgcctcctctcacctcccccggctctgtctgttgacttaccccgtcgagctatctagtcagctgctcccgttgccatggggaaggagaaggttcacatcaacattgtggtcattggccatgtcgactccggcaagtccaccaccaccggccacctcatctacaagcttggaggcattgacaagcgtgtcatcgagaggtttgagaaggaggctgccgagatgaacaagaggtcgttctagtacgcctgagtccttgacaagctcaaggccgagcgcgagaggggcatcaccatcgacattgccctgt

SEQ ID NO: 67660 - DNA, 91 bp, Zea mays
tgtcagctgcgtctacacaatgagcatgaacgtatggcgacatatctgtgaacccattttgtttatgaataagatttgtttttttcgagtt

SEQ ID NO: 67661 - DNA, 309 bp, Zea mays
  unsure (1)..(309): unsure at all n locations
cgcttctagcacaacaacgagaccttcaagcaaagattcctgatatagagaagtgtttggacattgtttcaacattacaagctaaaaaggctttgggtgaggcacttatagctgattttgaattatccgaggggatatactcctgtgcgaaaatcgaggatactgactcagtgtggctgtggttgggtgcaatgtgatgctggagtactcttttgtgangcaatgcctcttgaagaaaactagatatgctaagacacttagagtcttgtgctgatctcatcttggaacagcaacacatcagtacatgtc

SEQ ID NO: 67662 - DNA, 345 bp, Zea mays
tggcggaggcagtggcggtgcgaacgtggctaatgtggtcaccgacgcgttcttcaacggcatcaagaaccaggccgggagcgggtgcgagggcaagaacttctacacccggagcgcgttcctgagcgccgtcaacgcgtacccgggcttcgcccatggcgggacggaggtggagggcaagctcgagatcgccgccttcttcgcgcacgtcacgcacgagaccggacatttctgctacatcagcgagatcaacaagagcaacgcctactgcgacgcgagctacaggcagtggccgtgcgcggcgaggcagaagtactacgggcgcggccgctgcagatccgtgga

SEQ ID NO: 67663 - DNA, 355 bp, Zea mays
tggcagagtctgacctcctattccgaaaaaggctgctccttctaaggagccaaaggcaaaggatgtcaagaaggaggctccaaaggaggcccccaagccaaaggtggttgaggcaccagcagaagaggaagcaccaaagccagtgccaaagaatcctcttgacttgctgccaccaagcaagatggtccttgatgactggaagaggctatactcaaacacaaagactaacttccgggaggttgccatcaaaggtttctgggacatgtacgacccagagggctactctttgtggttctgtgactacaagtacaatgatgagaacacgtctcctttgtgacctgaacaggttggtgga

SEQ ID NO: 67664 - DNA, 336 bp, Zea mays
  unsure (1)..(336): unsure at all n locations
tgtcnctctcctctcgaggtggcggcgctccctcctgttttcctcttcttcttcctgtactatatagcctccactcgcaaatcgtcactgacgagtgatgtcattccgcttgcttgattgttccagatattcgcagttgaccgggtcctcggagcacgatgaagtttgttgctgcctacttgcttgctgtcctcgctgggaacgccagcccctccgctgaggatttgactgccattctggagtcagttggctgtgaagttgacaatgaaaggatggaactcctgctgtcncaactgagcggtaaggacatcacgagctcattgcgcgggcagggag

SEQ ID NO: 67665 - DNA, 316 bp, Zea mays
tgatgagactcttgtggctcagatcaaggaagggtttgaaagcggcaaggatcttgttgtgactgtccagtctgctatgggggaggagcagatctgcgcgctgaaggatgttggccccaagtaacttacctgccttggaatactgtatctcaaaacctaaatcgaaaaaagaagtgtatcaaggattgctacagagacatccatctggcttgagctggcttttgctatggctaacacaagtgcagggatcgctgagtgttgcaccgtgtctgcattatctgtggttacatctggacctgtagttctaggttttatg

SEQ ID NO: 67666 - DNA, 349 bp, Zea mays
  unsure (1)..(349): unsure at all n locations
ttgngattgcacacagattgtagcttttcctacatccattcccggctcgctggatatttaggcgagtatctggctttaactggtgctagactgaatgcgaaggaaatgatttctgctggtcttgctactcattttgtcagttctgaaaaattggaagaacttgaaaaacgtctactggattttgacacaggtgctgagtctgcagtccgagctgttattgaagaattttcaacagatgttcaaactgatgaagatagtatattgaataagctgtcaactatcaacaaatgcttctctgcagagactgttgaagatatcatgacagcatttgaatcagaagcgagcatag

SEQ ID NO: 67667 - DNA, 241 bp, Zea mays
cgccgccggaaagccgagggagagggagcgatatggggttcgtcggagacacgatggagtcgatccgctccatgcagatccgccaagtgctcatgcagatcatcagcctcggtatgattgttacctctgcattaatcatatggaagggtttgatagttttcacggggagcgagtcaccagttgtagtggtgctctcgggtagcatggagcctggatttaaaaggggtgatatcctgttttt

SEQ ID NO: 67668 - DNA, 310 bp, Zea mays
  unsure (1)..(310): unsure at all n locations
cgctgtgcactatatggctgcctgttgtctgctgcctgctcgtgaaatctattctgatgggtcatactgttcaggacgtagctatgatggctctgtttgggatatttatttggacgctgatcgaatacactttgcaccgcttcctgttccacatcgagaccaagacctactggtggaacaccgcacattaccttcttcacgggtgccaccataagcancccatggactcgctcaggcttgtgtttcctcctactgcaacagcaattttgtgtttcccgatctggaacctgagtcgcgtcttcgcaactcc

SEQ ID NO: 67669 - DNA, 353 bp, Zea mays
cgtcactgacatcaaggaggaaatcaacaaggtcgttaagcttcaagaagagcttgacattgatgtgcttgtgcatggcgagcctgagagaaacgatatggttgagtacttcggtgagcagctctccggttttgcgttcactgccaatggctgggtgcagtcttatgggtcaaggtgcgtcaagcctccgatcagctacggtgacgtgagccgccccaaccccatgaccgttttctggtcgaagacggcacagagcatgacgtctcgcccaatgaaggggatgctgactggcgcagtcacaatcctcaactggtccttcgtccggaatgaccagcgaggtttgagattactac

SEQ ID NO: 67670 - DNA, 347 bp, Zea mays
  unsure (1)..(347): unsure at all n locations
tggctggtgngtttgacgggtggcatcgcatctgggaagagcactgtctctaacctctttagggactctggtgtccccgttgtggatgccgatgtcattgctcgggatgtagtgcagaaaggcaccagaggttggaagaagattgggaaagcctttgggaatgatattttgctggaaagtggagaaattaacagagctctattgggacaaatcgtattttctgacccatcaaaacgtcaacttctaaaccgtcttctggacacacatatttcttatagcattgtctgggagatagcaaactgtggatgaaggctgcaagttatcaccttgacatgcgctgctgtttg

SEQ ID NO: 67671 - DNA, 308 bp, Zea mays
cgcagcttaagttccctgttaagccagctgatatcaagagaagaatagagagcttaatagaccgggagtacctggagcgggacaggagtaacccccagatctacaactatctggcttgacagagctttggaggatcattaaagagaccgctcactttattatcagaaaagacactgtaaattggtttgttttccagttccttgttctttcctgtttttcttctctgggagggagttgtaactgttgcaacgtgtctgtatacgagacgtttttttttcagtatcagtataaatgtataagcataatgc

SEQ ID NO: 67672 - DNA, 342 bp, Zea mays
  unsure (1)..(342): unsure at all n locations
tggagtcgaattccagaactttccgacttcttacctacgctgtgctgctcatcgtgttgcacaacattatggcttagagactatagtggcagatagtttagtagaaggctcagttagcaggatcgttgcaagaaaaacaccagagagcaggtgtcctgcaatttcattagcagaagttcctagcaaacaagcaagaaatgatcatgaggcagcagagaagcttaagtttgtcatttatcaaaggcccnaagcattccaaaatggaagcactgatttgaggaacaagaatggtgcaccanaaactgttgaagagagaatagaggatataataagcacgacacg

SEQ ID NO: 67673 - DNA, 341 bp, Zea mays
  unsure (1)..(341): unsure at all n locations
ctgcattcaaaggttctgcgcctctgaacctttccgaccgtcttcaccaggtccttcgctgggcccttgggtccgtcgaaattttcttcagcaagcactgcacactttggtacggatacggcggcgggctaaaattcctggaaaggttttcttatatcaactccatcgtttatccctggacgtccattcctctcctggcttactgtaccttgcctgccatctgcctgctcacggggaagtttatcacaccagagcttaccaatgtcgccagtatctggttcatggcacttttcatctgcatctccgtgaccggcatcctgganatgaggtggagtggcgtg

SEQ ID NO: 67674 - DNA, 325 bp, Zea mays
  unsure (1)..(325): unsure at all n locations
atcctgtgtggggtcatgaacgttgaattgaaggctgagccagacaatgatgaggtttatgcccagctcactctgctacctgaatcacagcagccagaggagaatggctctagtgaggagatgcctgcttcacctcctgctgcacttgcaaggccacgcgtgcactccttctgcaagacattgacagcctctgataccagcnatcatggtggattctcggtgctgcggcgccatgcagatgagtgtcttccgccactggatatgacccgtcaaacaccgacacaagagcttgtagccaaggactgcatggtgtggatggcgcttt

SEQ ID NO: 67675 - DNA, 276 bp, Zea mays
  unsure (1)..(276): unsure at all n locations
cctggtacgacgtcggccatctcatcccggcgggttctaggggttgccgcccacggcaacgactacgccgtctgggagatagccggcgccgaacaagtgactcgagcataatagagtgctcgtgataccgatttgattctcagtacaatgtacacgggactgcattgataaaataagtggtttctcctctaataagtaagggagcgtaaaagggcaattggagccatgcatatgtacacttaaaatattgttgagtanaatataaaggtgctctct

SEQ ID NO: 67676 - DNA, 259 bp, Zea mays
gtggctgcagcactgccaaagctgttgaatgggacgcatcctggtccaagaaccttgatccttctgggcgtgctgctttgggtgttcacgatgctgcgtatgaagacactgcagggaaaactcctgcctctgctgatcctgtctcagacaagggccttcgtccagctattggcgagacctagggacaccgttgcttagccacagctgtctaacttatgttatcaccagcatgctgaaacagcaagtgtccatgctgttc

SEQ ID NO: 67677 - DNA, 348 bp, Zea mays
  unsure (1)..(348): unsure at all n locations
aacccgcgatctgaagcgactagtcgaaggcggcggcggcggcgatggggagcgacctggagacggagaagaagaagaccccggtggcgctgatgcccatcgcgaagctctcgctggaaagaagctctgcaagcggaccctcaagctcgtgcgacgagcctctgaggccaagtgcctcaagcgcggagtcaaagaggtagtcaagagcattcgccgcgggaacaaagggttgtgtgtgattgctaggaatatttctcctattgatgtgattacacacgttccaatactatgtgaggcatctaatgtgccttacatatatgttccatcancagaggatcttgcgaccgc

SEQ ID NO: 67678 - DNA, 337 bp, Zea mays
tgtccaagctcaaacagtgattctgttatggctgaaggagaacctgcctcaaatgctgctgctggtgacaaagaacaaccaaaggatgatgacgatctactacagcaggcacttgcaatgtcaatggagggtggtgcttcaggatctgcagctgtgactgactctgctatggcagaagctggtgcagttgaccctgacttggcattggctcttcaaatgtctgtccaggatgcaaacatgtccagtgacactgatatgagtaaggtgtttgaagacagacgtttgtgtcatctaccttaagcgcttcctggtgttgacccaatgatccactgttaag

SEQ ID NO: 67679 - DNA, 344 bp, Zea mays
ggaggttgcagcttatattctcgaccatccagttagtgatagtaaatctggtcacagttttgggttttctggtgtgcctcccaccacattggtccgaacctcgcatagggggaagaacttcaagattggttcactgcagatgttcatggacaacaatggaagcactgaagatatgggtcctcgaccttttcctgtcaaggaggttcataaaatagcagtactagatattaggttagctaatgctgatcgtcatgctgggaatattctagtgtgcaaggagagagaaggtggcaactacaagctgattccaattgatcatggttactgcttgccagagaagtttg

SEQ ID NO: 67680 - DNA, 310 bp, Zea mays
gaacaacaccatctgttgtcgcatttactcagaagggtgaaagacttgttagtactccagccaaatgccaggcagtaaccaatacccagaatactttctttggaacaaagaggatgattggacgacgctttgatgatccacagacacagaaagagatgaagatggtgccatacaaaatcgtgaaggctccaaatggtgatgcttgggttgaaacaacagatggcaagcagtactcaccgagtcaggtcggtgcatttgtgctgaccaagatgaaggagacagctgaatcttaccgtaggcaatctgtctc

SEQ ID NO: 67681 - DNA, 316 bp, Zea mays
catggttctatgagtgatatctggagtttgggactagtgatactggaatgtgcaaccggcatctttccatttcctccttgtgaaagcttctacgaacttctcgtggctgttgttgatcaaccgccaccttctgcgccgccggatcagttttcaccagaattctgtgggttcatttctgcatgtctccagaaggatgctaatgacaggtcatcagcccaagccttattggaccatccgttcctgagcatgtatgatgacctgcatgtagatcttgcttcgtacttcacgacagcaggatctcctctcgccaccttca

SEQ ID NO: 67682 - DNA, 339 bp, Zea mays
ataaaattggaacgatacagagaagattagcatggcccctgcgcaaggatgacacgcacaaatcgagaaatggtccaaatttttgtcagcatgaaggattattcgcttctttttgcggtacatttattacatttcagtaaggtgttgttcgttttggtgataatccacatggattgggtgggattgagccggtttaaatccataacaagtcaaaatccaccccaatcccacccaatacacttcaatacacatgtaatatcaataaccgaacaaggcctaagtggggtcgattgtgatccagcttatgttttccttgtcgcagagagatagctagcgata

SEQ ID NO: 67683 - DNA, 186 bp, Zea mays
aacctctcaaaccctagccgcctcctgcaagtttcagagctcaggaatctgcgccatggcgagtgagacggagaccttcgcatttcaggctgagatcaaccagctgctctcactcatcatcaacaccttctactccaacaaggagatcttcctccgcgagcttatctccaactcttccgatgcgct

SEQ ID NO: 67684 - DNA, 183 bp, Zea mays
ctgaaagagagatggagttgaaggagaaatttgaaaagaatgttcaagaggtagctgagaagttccagaacacaaacttgtatttgaagaacttagaggagaacattgatgatgagaaattgcgtgaactctttgctgagtatggcaatattacttcctgcaaggttatgcgggattcgaatg

SEQ ID NO: 67685 - DNA, 239 bp, Zea mays
agcgaaaattctaggtttctgttgtgtcatgtcatgctctgcataccctgtgtgaactatcgaataatgttggcaaccgcaccgcaccgcacttggcttcccatgaccgggaggatcagtgtgtcgatccagaaattgttcactggctcctggctcgctaaaaaaaaaaaaaaaaaaaaaaaaaaaaaaaaaaaaaaaaaacaaaaaaaaaaaaacagaaaaaaaaaaaaagagggggg

SEQ ID NO: 67686 - DNA, 183 bp, Zea mays
ccgttatctctactttgtaaattggcttcatggcgatattaggcagtacaacattgaggatcgcgcaaagcctttcttggctggacaagtatgggttggtggtcttcttcagaagggcagtgatgtcgtctatgttactgatgatggtcaggaacagcagtacaatgtgcctcaagtcaaggg

SEQ ID NO: 67687 - DNA, 339 bp, Zea mays
ctcgattcttcgtctcgtcctcgtgtaatccccagcttgccctcctcgctcttccctcccaaaaccctacgcctccctgaccaagctccggggacgaatggacggaggagccggcttccctggcacgccggtcccgcgctcgccggaggacgttttccgggactaccgcgcgcgccaggccggcctaatcagggcgctcaccaccgatgttgagaagttctacgtgatgtgcgacccagagaaggataatttatgtttatatggacttcccaatgagacatgggaagtaaacttgcctgctgaggaggttcctcctgaactcccagagccagctctcgg

SEQ ID NO: 67688 - DNA, 337 bp, Zea mays
  unsure (1)..(337): unsure at all n locations
gtgatgataactggaattggtttatatcggaattgaggaagatgcttggagttaacacagataagatgccggtcttgactatactttctgagagaaagcggcaagtggttaaagcagttggatctaatttccccactgcttttcatggtttttgcctgagatacgtgagcgagagtttccttgacgagttcaagaatactagactgcttaaccttttctggagtgctgtttatgctctcacagcatcagaatttgatgcanaggtanatgaaatgatgcgagttcaagatgtcatgccatnggtacagcgttntcgcaccaacctgtgggcagctct

SEQ ID NO: 67689 - DNA, 315 bp, Zea mays
cagaggcagcatagcagcagccaactccatccatcctctttcgcctcctcgcttcgcttcctcggcggattccctctcgctcgaccgtccacgtccccgtccccttccggcgcgcgagctcgcccgagatggcaaacgcgagatcgggtgtcgctgtgaatgacgagtgcatgctcaagttcggcgagctgcagtcgaagaggctgcaccggcttcctaactttcaagatggacgacaagttcaaggagatcgttgtggaccaggtcggggatcgcgctaccagctacgaggacttcacaaacagcctcgccgag

SEQ ID NO: 67690 - DNA, 331 bp, Zea mays
acaacattggggtggcgatggctacaacacatggattagtcgtgccaaacatcaagaaagtgcagtcgctatcaatattggagatcacgaaggaattggcgcgattgcatgagatggcatcacaaaacaggctaagcgctgcagatattgaaggtggcactataacacttagtaacataggtagccattggtggcaagtttggctctccacttctgaacctacctgaagttgccatcattgcccttgggcggattcaaaagcttcctcgcttcgatgatgacgaaaacgtttacccttcatccataatcaatgttactgttggagccgatc

SEQ ID NO: 67691 - DNA, 334 bp, Zea mays
cttgtgttgttcggagcgggcagcagcacacagccccatcccaatcctagtcgatcttcttcccctcctcaaggaagaaaagaagctgaaccatggggaagagaaagtcagctgctaagccacctcctaagaagcggatggacaagcttgacactgtcttttcctgcccattctgcaaccactggagtagtgttgagtgccgaattgacatgaagaatctgattggcgaacatcttgtagaatctgtcaggaaaacttcagcacaactgttaatgcactcactgagcctattgatatatatagtgaatggattgatgagtgtgagcgtgtcaca

SEQ ID NO: 67692 - DNA, 182 bp, Zea mays
gcttgatccttgagaagagagaggaagacgagagctagaagcgaaggagaaaagcagttcttcagctaggcaggagggcacaggaaggaggagatggcgtcaaagaggattcagaaggagctcaaggatctgcagaaggaccctcccacctcgtgcagtgcaggtcctgttggtgaagacat

SEQ ID NO: 67693 - DNA, 319 bp, Zea mays
gggagatgctgttaagaagcttggtctctggggtctcttcactagaggacttcctcttcgtatcgtcatgattggtacccttactggtgctcagtggggaatttacgatgcattcaaagtgatggttggactcccaacaacgggaggtgttacacctgccccagcagcagaggctgaattgaaagccagtgcttgatttttttttctgtgttccctgagatcatatttggtggagtggaattgtatcagccggtcgagagcttagttcccgaatcttttttaatcttaacggaaatttgtccgtcatcctctgatgaga

SEQ ID NO: 67694 - DNA, 320 bp, Zea mays
aagcctcaagacctgatcatcagagaaacgaaaaggaagaggtgagcgtgggagaagaaacaaaagaaaggataagagatatagccctgagaagaatgtcccttacaactgatgaactcaaggccaaggccgaggtatactacggtgacgagatctgccagctgtgtacccagctcctgctcagggaagcaggcctccccaatggcctgcttccattgaaggacctaatcgagtgcggctatgtccaggaaactggattcgtgtggctgaagcaaagcaacagggttgaccacatcttccatagtctaggaaggctggtc

SEQ ID NO: 67695 - DNA, 332 bp, Zea mays
gttcaggcgcgctctctctagccggcgacgattgggcgaccggcgccactcaacgccaggtcttcgtgaaaaccatcgccggcgatgagtttcaaccagtctactgtcaaggggcaggccaggagggagaggcctagggctcgccctcattgcctgacgcagcagaggaggcaggaaataaaggaagcctttgatctgtttgatacagataactctggaaccattgatgcaaaagagctcagatgttgccatgagagccttgggatttgagatgactgaagagcaaattaggcaaatgattgctgatgttgacaaagatggcagtggagcga

SEQ ID NO: 67696 - DNA, 330 bp, Zea mays
gtttttgtgaaccacctgaagaaggtctaatgtgtgaattactatggagtgaccctcagcctcagcttggaagaggtccaagtaaacgtggtgttgctctttcctttggcgcagatgtgactaagaagtttttacaggaaaataacctggatcttattgtccggtctcatgaagtaaaggatgaaggccatgatattgaacatgatggatagcttacaacagtcttctctgcgcctaattactgtgaccagatgggcaacaagggtgcatttattcgcttcacagctccagaaatgaaaccagatattgttactttctcagctgtgccac

SEQ ID NO: 67697 - DNA, 296 bp, Zea mays
gttctcctagaaagatatatcaagatgcaatgccctgattgtggctcagtgcctgatgaaccggcactatgtttgctatgtggcaaactatgttcgcctagttggaaaccatgctgcaggactgggaaatgccagaatcatgcattgcaatgtggtgctggtattggcatatttcttctattgaggaaaacaacaatcctgttgcagcgatctgctcgtctacatttggcgctctatacttgagctcggagaggaggtatgatgcacgagaacttatactagtcagagtccacctg

SEQ ID NO: 67698 - DNA, 299 bp, Zea mays
  unsure (1)..(299): unsure at all n locations
ggaaggaggagatggcgtcaaagaggattcagaaggagctcaaggatctgcagaaggacactcncacctcgtgcagtgcaggtcctgttggtgaagacatgttccactggcaggcaacaataatgggtccatctgatagcccatattctggtggagttttcctagtcacaatccattttcctcctgattatcctttcagacaccagagtgcatttgtactaagtgtccatcgaacatcacagcacgggacattgctcgcatcttgagacagtgagtcgcactacatctcaggtgtgtgt

SEQ ID NO: 67699 - DNA, 314 bp, Zea mays
cgcaccgctcctgagtcctgtccaccctgccaccgccgacgccgcgccgccgcagcaattgtcaccgtcgctatggcccgtatcaaggtgcacgagctccgggggaagagcaagacggacctgcaggcgcactcaaggagctgaagtctgagctctccctcctccgcgtaccaaggtcaccggcggcgcacccaacaagtctctccaagatcaaggtggtgcgcacctcgatcgcgcgcgtgctcacagtgatctcgcagaagcagaagtcggcgttgcgggaagcgtacaagaagagacacctgctcccctcg

SEQ ID NO: 67700 - DNA, 318 bp, Zea mays
ctcgacgaatcggctcacggctcgaggaagctcgaaaccgtgtactgcctgcacattgatccatgagcggagacagcgcaggaagacgaagcagctgacgcaggagcacccgcactgctacgttgacacgttgctcgacctcaggctcgacgaggaacaggatggtggccgccttctcacagaccacgagatagcaagcctgtgcatcgagatcctcatcgttggctcggagctaccggcgacggcgctggagtggatcatggcggactagtaaagacccaggcgtgcaggacaagctctacgaggagatgatggtga

SEQ ID NO: 67701 - DNA, 355 bp, Zea mays
  unsure (1)..(355): unsure at all n locations
ctgcttccgagatctctcgccacctcccggtccgctagcagatagcgggggccagagagatcgagatccggaggcgctagcgccacccatcagcgtctgcggcaatggcgggcacggtgacggtcccggggtcgtcgaaaccctccacgccgctgctcaaggacgagctcgacatcgtgatcccgacgatccgcaacctcgacttcctcgagatgtggaggcccttcttccagccctaccacctcatcatcgtgcaggacggcgactcgaccaagaccatcaaggtgcccgagggcttcgactacgagctctacaaccgcaacgacatcaaccgcatcctcgngcacaaggcctc

SEQ ID NO: 67702 - DNA, 319 bp, Zea mays
ctcgagcgcgcgctccacctgcgccgacgcgatgcgggccaagtggaagaagaagaggatgcggaggctcaagaggaagcgccggaaaatgaggcagagatctaagtaggcgcatcttgtgaccgaggatggcgagcttctcctgcaccatggctgtgacgcgttgggatgattgtctccctttgtagacgtgctttgctgtagacgtaggcgatgtaaaccgtcctttttgattaattctagtatgttctgagactgggtttatattgtaatttgaggataattatatgatgctctaagtttattgatattcctgtcc

SEQ ID NO: 67703 - DNA, 282 bp, Zea mays
  unsure (1)..(282): unsure at all n locations
ctngattttttcattgctgaagcaggttactcttggaagagagacagaagacattaaagttgacattgatttaggaaaagaagggagggcaaataagatatctcgccgacaggggnttatcaagatggatgaatctgggtattttcatattaagaacactggaaaatgtccaatcttggtaatagccaagagataccaagtgtggaagacgcatcaacctaagctcagactcattaatcgagataaaagacatgaaggtttattctccatgtaaaccaagag

SEQ ID NO: 67704 - DNA, 369 bp, Zea mays
tcgatatagcgtagtaactcggaatcggtcgagcagagaccagccatggcgatctcccagatctcacgcatattcctggccatccttctcctggccgccgccttcgccgccgccccagctgcgcttgcggacggcgacgacgtggtggcccttaccgaatccacgttcgagaaggaggtcggaaaggaccgcggcgccctcgtcgagttctacgccccctgtagtgtcaattgcagaaagcttgctcctgagtatgaagagacttggtgcaagttttaagaaagctaaatctgtcttgattgctaaggttgattgtgatgagcacaagagtttgtgcagcaagtatggagtttccgggtatccaacaat

SEQ ID NO: 67705 - DNA, 328 bp, Zea mays
catgtgagtacgaccagaagatatccattgatttctacaaggaaggagatcccttgaaaccagctgtgacaggcgtcttagtgttcgtttccactccagatccaattggcaacaagtactatcttggccctgctcctttgcaagataatggcattgcaaattgctacagccaatggccctactggctataatagggattacctgttctcaatggagaaggcattagccagcattagccacgaagatgattcgatcatagagcttgcaaacgaggtgaggaaggtgctcaacagaacaaaggagaccaagatcactggtgccaatgctt

SEQ ID NO: 67706 - DNA, 344 bp, Zea mays
  unsure (1)..(344): unsure at all n locations
agctgagaaagtggacggtggctatgtccttaatgggaataagatgtggtgcaccaatggcccgtctgctcagacactggttgtttacgcaaaaacagatctagctgcagggtcaaaaggaataactgcattcataatcgagaaagggatgcccgggttcagtactgctcagaagttggacaaacttggcatgagaggaagcgacacgtgtgagcttgtttttgagaactgctttgtgccatgcgaaaatgtcctcggtgaagaaggcaaaggtgtttatgtcatgatgtcagggcttgatctgganaggcttgtattagctgcgggccctattggccttatgc

SEQ ID NO: 67707 - DNA, 329 bp, Zea mays
ctatattggatttaagggctggtttccaccaaattcttttgcaacagggtgaagaatacaagacggcattccaaacatatctgggccactatgagttccgagttatggctttcggccttacgggtgctcctggcacatttcaaaaggccatgaatcatacattagctccaatgctccgtaaatgcgctcttgtgttctttgatgacatattagtgtacaatgtatccttggagagtaaccttcaccatttgcagcaggtgtttgagctgttagccagagaacaatggacaattaagctatccaagtcgtcctttgctcaggatcagttt

SEQ ID NO: 67708 - DNA, 350 bp, Zea mays
aagggcccgagtgtggtgaaggagatcttcattggactgaccctgggtctgatcgcgggaggcatgtggaagatggagcactggaacgagcagaggaagactaggtccttctatgacatgcttgacaagggccagatcagcgttgtcgtcgaggagtaaagagttcttcccagttattttcaaagaactctctcgagagcatgacaaagtgattgcttgctgtggagatttgtcctggaaataagcacaaccatttgggaacaccagattttgtcgaattttcctttccttttgatgaatatttgagcacgtccatgtcaataccaaacatctggccttttctctctctg

SEQ ID NO: 67709 - DNA, 193 bp, Zea mays
cctctcaccggctctccgccttcctcttccagtcgccgcgcgcgagatcgccgccccgtgtgggccctagatcccgatggcctcgcgccgccgcaccctgctcaaggtcatcatcctcggcgatagtggggttgggaaaacttccttgatgaaccagtatcctgcgattcggatcgattcttgacaagctgac

SEQ ID NO: 67710 - DNA, 326 bp, Zea mays
  unsure (1)..(326): unsure at all n locations
gcggtctgctcgttcgatctgtgcagcagatctgaggtcncgggcgaccgtgaagcagcttcaatcgtcggcatggcgctcgtaattgcatagtggggctggaaacaagaatgccttcaaagcacttattgctgcagaatacagtgggatcaaggttgagttgaccaaggattttgagatgggtgtctccaacaagacccctgagtttcttaagatgaacccccttgggaaggttcctgttctggagactcctgatggccctgtttttgagagtaatgctatcgcacgctatgttgctcgcttgaaggatgacaacctctttttgg

SEQ ID NO: 67711 - DNA, 192 bp, Zea mays
cgcttgagaaggtaatcgaagcagagaaggaagctgcacggcagttggttcaacagaagaagagagacagagctttgattgctctgaagaagaagaaagctcaggaagagctgttgaaacaagttgacacatggcaaatgaatgttgaacaaccgctggcagatattgaactagcaagtaaacaaaaggctg

SEQ ID NO: 67712 - DNA, 191 bp, Zea mays
ccgcggtttggctttctcccctcttccgcaccgcttctcgctccggattccggattccctctgctctttccctaacgaaggtagccatggcggggagaggtaaggcgatcggctcaggcgccgccaagaaggccacgtccaggagctccaaggctggcctccagttccccgtgggaaggatcgccaggttc

SEQ ID NO: 67713 - DNA, 340 bp, Zea mays
tgggttcacattccttgaccttattgtgattcaaattgagtccctgaaaaagaagtatggatgcaatgtcgctttacttctgatggactatttcaacacccatgatgacacacagaagattgttgagaagtattccaactccaacatcgaaattcatactttcaatcagagccagtatcctcgcattgttaccgaggacttcttgccacttcccagcaaagggaaatctgggaaggatggctggtatcctcctggtcatggtgatgtgtttccctctgttgaataacagcggaaaacttgacatcttattggctcagggcaaagagtatgtctttgttga

SEQ ID NO: 67714 - DNA, 352 bp, Zea mays
ctgtccactttcaccgtgcttctccgccgtcgaggccgcgtcacagtgcgaagagaccacgactcagatggccagccgctgggtccggcccgaggtgtacccgctgttcgcggcaacgggcgtggccgtcggcatctgcggatttcagctcttccggaacatcaccggcaacccggaagtcagggtaaacaaggcagggagggcagctggtgtgcttgagaaccatgaggaggggaggcgtacgccatgcatggcctaagaagctttgtgcacgacaagactcctgagatcatgcctgcagttaacaagttcttcactgaccctaagtgaagcatgttgattggcatactac

SEQ ID NO: 67715 - DNA, 265 bp, Zea mays
  unsure (1)..(265): unsure at all n locations
cgcttggcgtccgtctcagaccgccgccaggagagccggctcggtcggttcgtcgaagatcccggatctgctctgtcacgaggtctntcggcgggtgttgtctcgcgaggtgtagcgagccaagttcaggagagtttcgagaagctgaaatggctcctaaagctgctcctgccaagaagggtgatgccaagacacaggccttgaaggttgccaaggcatgtgaagtctggagtcagtcaaagaagacgcaagaaagattcgccac

SEQ ID NO: 67716 - DNA, 319 bp, Zea mays
cacaaacccatcgcagggcattctcgagcatagcttctctgcctctctctcccctcctctcctttcctctcgtccactccgatgtccaaagcttcgagatggctcagcagcagaaggtggtggtcagggttccaaccatgacagatgacaagatcaagcagaaggccatcgaagctgttgcgtacatttacggtattgactccatagcagcggatctgaaggagaacaagatgaccatcataggcgagatggatgcagtggcgattgccaagaagttaaagaagattggaaagattgacattgtgtctgttcggactgc

SEQ ID NO: 67717 - DNA, 325 bp, Zea mays
gcttgctgaagagctgtctatgccacttgctgctgtgaagtactcccgtgggacgttcatctttcctggcgcacagccagccgccccacaggagcttctctgaggaagttgctgcacttaaccgctactttggcggcctgaaatctggtggtaatgcttatgtgattggagatccagcaagatctggacagaagtggcacgtcttctacgccactgagtacccagagcaaccaatggttaaccttgagatgtgcatgactggtctggacaagaagaaagcttgtgtctttttcaagactaatgctgatgggaacacaacatgtgc

SEQ ID NO: 67718 - DNA, 285 bp, Zea mays
gacgacacaaaccccagtttaggaacagttggaaaagagggagaaatggagaacggcggcggcaaaggcgacgttcccaacgatgcgaacgaacattgccctggaacgcagtcggaggaggcggggaaggcggatgcctgcgctgggtgccccaaccagcagatttgcgccacgcccccaagagcccgatcccgatgtggttgctattgttgagaagtttggctactgtgaaacacaaattattagttttgtctggaaagggaggtgttggaaagacacattctc

SEQ ID NO: 67719 - DNA, 347 bp, Zea mays
tttaggtatcaagaagatattgattgtcgattgggatgttcaccatggaaatggcacacagaaaatgttttacgatgatcctcgtgtatggttcttctcagttcacagatttgattatggaagcttctatcctgctgaaggggatgcttctcattgtttcatcggggaagaagctggtaaagggtataacatcaatgttccctgggagcatggcaagtgtggtgatgctgattatattgctgcatgggaccatgtactgcttcctgtcactagagtttgtgatcctgatataattctggtatcagcggggtttgatgcagcattgggtgatctctcgggtgggtgct

SEQ ID NO: 67720 - DNA, 344 bp, Zea mays
gatttggtaaatgccttcttgaacttagcggaaacaatgccatcattgttatggatgatgcagatatccagctagctgtgcgatctgtcttgttcgctgctgttggtacagcaggacaacgctgcactacatgtcgtaggctgattcttcatgagaacatatatcaaaccttccttgatcagcatgttgaggtatacaaacaagtccgaattggggatccgttggagaaaggcaccttactgggaccactgcacactcctgcttcaaagagattttttgaaaggcattcagactatcaactctcagggagggaaaatccttttggaggatctgccatgaatcag

SEQ ID NO: 67721 - DNA, 284 bp, Zea mays
ctcgagcgcgccggagaagcgccgctcgctcaggaggacagacatggcgccggagccacaggatgatattatgaacgagaagaatccccgcccgctcgacgaggatgacatcgcgctcctcaaaacctatggactggggccgtattcgaccagcattaagaaggtcgagaaggagatcaaggaatggccaagaaaatcaacgacctctgtgggataaaggagtctgatacagggctggctccacctagccagtgggatttggtttcagataagcagtgtgtgca

SEQ ID NO: 67722 - DNA, 187 bp, Zea mays
aaaggacccaaaagaagcggccaccgaggttttgggtttgtcaccttcgctgatgatggtgtggcagaacgagtagctcgtagaagccatgaaattctaggccatgaggttgcaatagacacagcggcaccacttgagaatgattcagctgctggtgggtacattgatccaatggatctttacggag

SEQ ID NO: 67723 - DNA, 312 bp, Zea mays
aacgttacttgcctgacccgtctggaccacaacagggctcttggccagatttctgagagacttaatgtccaagttagtgatgtgaagaatgttatcatctggggtaaccactcgtcctctcagtaccctgatgttaaccatgccacagtgaagacttccactggggagaagcctgttcgtgagcttgtctctgatgacgagtggcttaatggtgaattcatcacaactgtccaacagcgtggtgctgcaatcattaaagcgagatagtctccatgctctctcgctgctactctgcttgtgacacattcgtga

SEQ ID NO: 67724 - DNA, 342 bp, Zea mays
  unsure (1)..(342): unsure at all n locations
aggacactgtggatgctgttaatcctgaggagactactgccgtggtggaggatgagaagaaacctgaagatgcaccacagtctgaggttgagaaggacaaggagggcgcggagaatgaagaagaagaaaaggaacctgaggataaggagatgactttggaggaatatgaaaaggtactggaggaaaaacgaaaagctttactctcccttaaggctgaggagagaaaagttgaaattgacaaggagctacaggccatgcaacaactgtcagttaaaaaggatggcgatgaagtgtttatcaagctgggctctgacaaggacttgnaaaagaaagaaagtgctg

SEQ ID NO: 67725 - DNA, 387 bp, Zea mays
gtccatcagcgtagtaactcggaatcggtcgagaggcggttctacgtccgagtcgtcgcatcagtgtccctcgattcgccggcggcgccaccaaccaagctcatacatctgaattgactagtcaaactcagtgatctctttggggactaatcaaactcaagaactaagtttcatgtctgatctcaacgtccagcttccatctgcttttgatccgtttgcagaggcaaatgctgaggactccagtgctggtgctggatcaaaggactatgtgcacgtgcgtattcagcagcgcaacggaaggaagagtctgacaactgttcagggcttgaagaaagagtacagctacaacaagatcctcaaggatctcagaaaagagttctgctgcaa

SEQ ID NO: 67726 - DNA, 353 bp, Zea mays
  unsure (1)..(353): unsure at all n locations
ctcccgccgcctgtccctgcgctagtcgacactcgacaggctcggtttccgccctcctctcccaccgccgcgcaccgagaagatggggaagcggtggatcccgctggaggccaacccggacgtcctgaaccagttcatatgggggctgggagtccacgaggaggatgtgcagttctgcgacgtctacggccttgacgatgagctgctcgctatggtgccccagcccgttctcgccgtctcttcctctacccgctcacctccctggacgaggaganagaagaatcaagtgtttctgctgccacatcgacctcagcgggcatagaattgagcaagatagtatactttacgaagca

SEQ ID NO: 67727 - DNA, 337 bp, Zea mays
gtcgaagcagagcaaggggaacgcgctgaacgagctccttgagctcaggagctgctccagctgccttttcttcgagtgcagaaaacagaaggatctttacctttggatggtgaagtctcctggaggaccatcagtaaaatttctagttaatgctgttcacaccatggaggagttgaagcttaccggtaaccatctgaaagggtcacgcccacttcttacattttctacaaattttgatgagccacctcatggaagcttgtgaaggagatgataactcagatatttgctactcctaaagatcaccgtaaagcaaaacctttccatgaccatgtgtttg

SEQ ID NO: 67728 - DNA, 259 bp, Zea mays
tcattccgctcgacgcaaaaccctagcccatccaccgatccttgtcatggcggccaccaccagccaggcgagcctcctcctgcagaagcagctcatagatctcgccaagcacccggtggatgggttctcggctgggctggtcgacgatagtaacgtattcgagtggcaggtcaccatcatcggcccgcccgataccctatatgatggagggtacttcaatgcaataatgagcttcccagaaaattacccaaacagcccg

SEQ ID NO: 67729 - DNA, 259 bp, Zea mays
ctcgagccgtgcgtcagtggcagagatgagttagtttccaaagttcgtatttaccaccatgtagttggtggtgttctaaacccgaatgctgcgtaccttatccttcgaggtatgaagacactgcatctccgtgtgcaatgtcagaacgacactgctcttcggatgggccaagttttagaggagcatccaaagatttcgcgggggtcaaatatcctggcttgccaagtcaccctgaacatcacattgccaagagtcaaat

SEQ ID NO: 67730 - DNA, 254 bp, Zea mays
gcttccagagccccccgccgccgctgcgccctcctctcggtcctgccgtccgtcgaggtaaaaggacagcatggtgagggtcagcgtgctcaatgatgctctcaagtccatgtacaatgctgaaaagatagggaaacgtcaggtcatgatcaggccgtcatccaaggtgatcatcaagttcctgacggtcatgcagcgccatggttacattggcgagtccgagaacgtggatgaccacagagctgggaagatcg

SEQ ID NO: 67731 - DNA, 218 bp, Zea mays
gatcaatcaatatactacatactacattgcagatcaacaaactcctccgcagggaccaccgagctactcgtccgactggggcgtccaatattactttcaaaggaatgccgtgcaaattggacatatggcgcactcaatttggctttacatcgtcccatcgggcatgtatggagtcgtgaactacctaaaggaaaagtaccataatccaatcatcatca

SEQ ID NO: 67732 - DNA, 264 bp, Zea mays
gtttgcggagtgcattaccaagatgtgatgaggcgagtcgtggcaagtgagcttggagaagggagcccaaatttctcaagaatggtgatgctggtatggtgaagatggttcccactaagcccatggtagtggagaccttttctgaatatcctcctcttggtcgctttgctgtccgtgacatgaggcaaacggtggctgtcggagtcatcaagagtgtggagaagaaggacccaactggagccaaggtgaccaaggctgccgcaa

SEQ ID NO: 67733 - DNA, 255 bp, Zea mays
ccgacatcgtcccttcgtccccacgagcaaccgataatccgccgggatgttggtttatcaggatctcctatctggcgacgagctcctgtcggattcattcacctacaaggagctcgagaacggcgtcctgtgagaggtcgagggaaagtgggtcacccaaggtcctgttgatgtagacattggtgccaatccatctgctgagggtggtgaggatgaaagcgttgatgacacagccgtgaaggtggttgatattgt

SEQ ID NO: 67734 - DNA, 256 bp, Zea mays
caccttgtctctgaccgaagcactatgtgggttccaatttgttcttacacatctggacaacaggcagcttctcatcaaatcagaccctggtgaagttgttaaacctgaccaattcaaggcgattaatgatgaggggatgccaatttaccagaggcctttcatgaaggggaagctgtacatccatttcacggtggagttccctgactcgttggcaccagagcagtgcaaggctctcgagacagtacttccaccaagg

SEQ ID NO: 67735 - DNA, 253 bp, Zea mays
cggagaacttctttcttctaaggggcaaccatgaatgcgcatcagtaaatcgcatctatggtttttatgacgagtgcaaacgcagattcagtgtaaagctgtggaaaacattcacagactgttttaactgcttgccagtgtcagcattgatagatgaaaagattctctgtatgcatggtggtctatctccggagttgaacaagcttgagcaaatactcaacctgaatcgccccacagacgtgcctgatactgg

SEQ ID NO: 67736 - DNA, 253 bp, Zea mays
gcaacgctctatctctttcgccgagctcctcgaaaccctaggagcgtgcttgaccggcggcggcgaggtgatggcgatggaccctgacgcggtagcaaggccttcgtggagcattactaccgaacgttcgacaccaaccgcgcggcgctggttgggctgtaccaggagacctccatgctcaccttcgagggccagaagttccagggcccctccgccattgccggcaagctcggatctctccctttccaggcct

SEQ ID NO: 67737 - DNA, 179 bp, Zea mays
gccatggaggtggtgaaggatacggctctgggtctggctttggtggtgctgctggcggcggcggtggacatggtggcggtggtggcggcggccaaggtgggtctggctatggctctggctctggctctggctcgggatatggatcaggtgaaggatacggacaaggtggtgctcatgga

SEQ ID NO: 67738 - DNA, 227 bp, Zea mays
gttgctggcttcctcatgcagaaggaacttgactaccttgttggagctgttgccaacccaaagaagccatttgccgctattgttggtggatccaaggtctcaagtaagattggtgtcattgagtcgttgctggcgaaggtcgatatcctcatccttggtggtggtatgatctacacattttacaaggcacaaggatattcctgttggaaaatctctcgtgggaagag

SEQ ID NO: 67739 - DNA, 252 bp, Zea mays
ggatcctgcacgactgggatgaggacaagtgcatcaagataatggagcgctgcaaggaagcgatcggtggcaaggaagcaggggggaaggtgataataatagacacggtgctcggatctcgggcagacgacgacgacgacgacaagacgtgcagggagacgtatgtgttggatctccacatactgaggcttcgtgaacggggcggacgggaggagcacgagtggaggaggtcttcctggcggctgggttccg

SEQ ID NO: 67740 - DNA, 253 bp, Zea mays
tggagtttcagagcatgccaggacccttggcccaaaaggttctgaccctcacaaggcggctgtcattggtgacaccattggagatcctctcaaggacacgtctggcccttccctcaacatcctcatcaagcttatggcggttgaatcccttgtcttcgcccccttcttcgccgcccatggtggcattctcttcaaatggctctaagccagcgagagacgcaggataaaggccgtagttttgcaaggcgagtag

SEQ ID NO: 67741 - DNA, 250 bp, Zea mays
ggatcctgcacgactgggatgaggacaagtgcatcaagataatggagcgctgcaaggaagcgatcggtggcaaggaagcaggggggaaggtgataataatagacacggtgctcggatctcgggcagacgacgacgacgacgacaagacgtgcagggagacgtatgtgttggatctccacatactgagcttcgtgaacggggcggacgggaggagcacgagtggaggaggatcttcctggcggctgggttc

SEQ ID NO: 67742 - DNA, 238 bp, Zea mays
cttgcaatcacaacgaacaaaagctctcgatctcaccgacaccgaggaagaagagatcaatggcgtccgagcagggagtcgtgatcgcgtgccacagcaaggctgagttcgacgcccacatgaccaaggcccaggaagccggcaagctggtggtcatcgacttcactgccgcctggtgcggttcatgcggggcattggcccactgttcggtcgaacacgccaagaagttcactcaggt

SEQ ID NO: 67743 - DNA, 246 bp, Zea mays
acctggacctggatcgtcaagaactcctggggcacctcctggggcgagggtggctacatccggatgcagcgctgcgccggcaacgcggcctctgcggcatcgccatggaggcgtccttccccatcaagacctcgcccaaccctgcagacccgccgcgcaatccccgacgcgcgctcatcgccagggagagctcttcttcccagtgacacacacgaccacaactggcacgtaagtacacgttgccag

SEQ ID NO: 67744 - DNA, 116 bp, Zea mays
ctcgagcagccacttccgtctctaaccctacagcgacgacgagagcgaggctatgaaggggaagaagccggtcaaggagctcaagctcaccgtgccggcgcaggagaccccggtag

SEQ ID NO: 67745 - DNA, 252 bp, Zea mays
ctcgagccgctcgagccgctcgagccgtgccgcctcaccgcctctctcactctgagaccgaagatccgtagtccggtgagtggacgccgcacgaacccatggcctccggcgagcttgcctgcacctacgccgctctcatcctcagcgacgatggcatcgccatcaccgccgagaagatcgccacgatcgtgaaggcagccaacatcaaggtcgagtcctactggccggcgctcttcgccaagctcctggaga

SEQ ID NO: 67746 - DNA, 251 bp, Zea mays
aacatagagatgtcgatgttgcaagcacagttttctcagatgagccctgctgtaccaatgacacccactctagcaccacgccttccaatgtactctccgatggctcctcagcaactcttctatggacaagcgccaccagctatgatgccccctcagccaggatttgctttccagcaacagcttgttccaggcatgaggcctgggggtccccatatgccaaattattatgttccggttgtccaacagggcca

SEQ ID NO: 67747 - DNA, 250 bp, Zea mays
agccacttcgctccctccctagcagcaaaaacctccacgaatcgccgacactccaacccggaagagccaacgaggtgactccgcgccccggtcatgggtgacagccaatactccttctctcttaccactttcagcccgtcgggaaagcttgtgcagatagagcacgcgctcacggctgtcggatccgggcagacctccctagggatcaaagctgccaacggtgtagtgattgccaccgagaagaaactgc

SEQ ID NO: 67748 - DNA, 217 bp, Zea mays
ttcatccgtgttcttgtttgcgaggtcgagagagactgagagaggatgtcgtgctgcggaggcaactgcgggtgcggctccggctgcaagtgcggcaacggctgcggagggtgcagcaagatgtacccggacatggccgagcaggtgaccaccaccaccacccaggctctcatcatgggtgtcgcacatccaaggggcacgccgagggcgggttcga

SEQ ID NO: 67749 - DNA, 236 bp, Zea mays
ccgcaactgccgccgccactcccacgctcgcagcgtcttcgctggcccccaagatcggcccgctcggtctttcccccaagaagatcggagaggacatcgccaaggagacggccaaggactggaagggcctccgcgtcaccgtcaagctcaccgtccagaaccggcaggccaaggtctccgtcgtcccctccgccgcggcgctcgtcatcaaggcgctcaaggacccagaggggccc

SEQ ID NO: 67750 - DNA, 164 bp, Zea mays
gttgctggcttcctcatgcagaaggtacttgactaccttgttggaactgttgccaacccgaacaagcgatttgccgctgttgttagtggatccatggtgtcaagtaagattggtggcattgagtcgttgctggcgaaggtggatatcctcatccttggtggtgt

SEQ ID NO: 67751 - DNA, 248 bp, Zea mays
aaccagaccaccaaacaagtgccagcgccctctcgcagtcgccgcaatggagagcaccttcatcatgatcaagcctgacggcgtccagaggggcctcattggtgagatcatcagccgttttgagaagaagggcttctacctcaaggccttgaagcttgtcaacgtggagaggtcgtttgccgagaagcactacgccgatctcgcctccaagcccttcttccagggcctcgttgactacatcatctctg

SEQ ID NO: 67752 - DNA, 250 bp, Zea mays
gcaacaaaaagagaccaaactcggctcaagagagatcgcatcttgcctgcccacccagcttccctttcgttcctcctcgccccagcgacgcggcctcccgtagaccgagcaaggcaacccaccactgagaggcacgcagaggagcaggaagccggagaccaagatgtcgtcggtgttcagcggcgatgagacggcccccttcttcggtttcctcggcgccgccgccgccctcgtcttctcatgcatgggg

SEQ ID NO: 67753 - DNA, 233 bp, Zea mays
cctgcaaatgcggctagcactcaattttctgaagcattggcccaagcatggtctgagtttaatattgacagtgctgtaattatgatgattgttcagccagaagagagaaatatgtatgatcaatactggctttccaaacatttgcaagactcacatggcataacaactataaggaaaaccttatcgcaggtggaagcggaaggccaggttctcccagatggaactcttcttgt

SEQ ID NO: 67754 - DNA, 244 bp, Zea mays
aatggagtagcaaatgtttttaataataaaacgctcttgcattgttaaatgagcagaaaggcgctagtttgtctctgataccttagtgtagagaggtaatcattcttgatgcttactagaataaatagttgagatataatcttctcttcagtgtcagatttttaactggacactccagaaatggtgggacagacccactatatgtagctggaaatgcagccgatcctgacactactttggttgt

SEQ ID NO: 67755 - DNA, 247 bp, Zea mays
atttttcatatcctcactcgccgccgccgccgctcgtccctcgccccatcgcgatggcccggatcaaggtgcacgagctgagggggaagagcaaggcggatctgcaagcgcagcttaaggagtttaagtcggagctctccctgctacgcgtagccaaggtcaccggcggggctcccaacaagatctccaagatcaaggttgtgcgcacctccatcgcgcgcgtgctgaccgtcatctcgcagaagca

SEQ ID NO: 67756 - DNA, 247 bp, Zea mays
gcttgagaaggtaatcgaagcagaaaaggaagctgcacggcagttggttcaacagaagaagagagacagagctttgattactctgaagaagaagaaagctcaggaagagctgttgaaacaagttgacacatggcaaatgaatgttgaacaacagctggcagatattgaactagcaagtaaacaaaaggctgtatttgaaggcctgaatgctggaaatgctgccctgaagtctatacagaatgagata

SEQ ID NO: 67757 - DNA, 240 bp, Zea mays
aggaaatgtaggactcctctatttttggaccagactagaggaagatagttatttggacctgaacttattcaagaggcagaagaacaagttcgtataattcgagagaatttgagggtagctcaaaccaggcaaaagagctacgctgataatagaagaagaccactggaatttgaagaaggagattatgtgtacctcagggtgtcaccacttcgtggaatgagggatttcacagttaaggga

SEQ ID NO: 67758 - DNA, 325 bp, Zea mays
ccagcagccgtcgtcgccaccgctgcagccggaggcgaccccccatcgccgccaagatgcagatcttcgtgaagaccctgacggggaaaacgatcacgttggaggtggagtcctcggacaccatcgacaacgtgaaggccaagatacaggacaaggagggcatcccgccggaccagcagcggctaatcttcgccggcaagcagctcgaggacggccgcaccctcgccgactacaacatccagaaggagtccaccctccacctggtgctccgcctccgaggtggcgccaagaagcgcaagaagaagacgtacaccaagcccaagaa

SEQ ID NO: 67759 - DNA, 303 bp, Zea mays
aaaaggcataggcagcccatgaagcctgttacacgtgaggaagtagctgcaatgagggctcagtttaaggagatcgatgcccgcccatccaagaaggttgcagaggccaaggcccggaagaagcgtgttgccatgaagaaactggacaaggctcgccaaaaggcagatgctatagctgaccagaatgacataaacgagctatcgaagaggaagatgattgaccggatttacaggaaggcgatgccaacgaagcctcagaaggagtatgtcgttgcaaagaagggggttcaggtgaggactggc

SEQ ID NO: 67760 - DNA, 326 bp, Zea mays
ggaaaaggaaggagcctgatgtagacaagcaaaaggaaccaattctagagcatgtcacagctgcacttgtcaatcgttatcacctaaaatttacaactcgcgatgtttcttccctctggtttctttgtaagcaggaagcatctttgttgaatacaacaaatcaagcttgtgggctttttaatgaagctgaggttcgttttctggagtggacagatgatttggcgggttttgttctaaaaggctatggtgagtcaattaactacaggatgggactgccattgctcaaggatgttgttcagtcaatggaagaagcaatcatagctagt

SEQ ID NO: 67761 - DNA, 314 bp, Zea mays
cgcttggcgtccgcctcaggccgccgccaggagagccggctcggtcggttcgtcgaagatcccggatctgctctgtcacgaggtctttcggcgggtgttgtctcgcgaggtgtagcgagccaagttcaggagagtttcgagaagctgaaatggctcctaaagctgctcctgccaagaagggtgatgccaagacccaggccttgaaggttgccaaggctgtgaagtctgggtcagtaaagaagaccaagaagatccgcacgtccgtgacatttcacgccccaagacctgaagaggctagggacccaagtacccag

SEQ ID NO: 67762 - DNA, 289 bp, Zea mays
gcgtcgtcgacctgatccgccacatgttcaagacccagtagagagagatatttctgcctccctatcgtgggtcgtccccaatggcctttggtcgcagacgatctttgctgcttgtctatgctgagaataaatgtgaacggtgcccctggacgctggatccatgctggttttggacacgttgtctttttgtgtttaacttatctgctaccgtcctgtaacgaattcactaagttctagttcttttgtgctttgttaagaatatagacaatgaggtttcaattttggtggc

SEQ ID NO: 67763 - DNA, 322 bp, Zea mays
ttccactccgacattcacgtgcagctgtcgggagcaggcaatggcgccggatctaagcgaactcgccgccgccgctccagcccgtggcgcctacctcgccggcgtcggtgctcgggtcctcctcgctgcctccttcctcccagtagccgagtcgtcctgcgtgcgagataactcattggtgagagacataagccaaatgccgcaaagcagctatcggattgaaggattgtcacatataacagttgctggtgcgctcaatcatgggatgaaggaggtggaagtgtggcttcagacaatacgtccaggtcaaaggacgccaatc

SEQ ID NO: 67764 - DNA, 324 bp, Zea mays
ggataaggaaggagcctgatgtagacaagcaaaaggaaccaattctagagcatgtcacagctgcacttgtcaatcgttatcacctaaaatttacaactcgcgatgtttcttccctctggtttctttgtaagcaggaagcatctttgttgaatacaacaaatcaagcttgtgggctttttaatgaagctgaggttcgtattctggagtggacagatgatttggagggttttgttctaaaaggctatggtgagtcgattaactacaggatgggactgccattgctcaaggatgttgtccagtcaatggatgaagcaatcatagcta

SEQ ID NO: 67765 - DNA, 319 bp, Zea mays
cgagggtattaaacgatgtgtcaatgaggtgggtgttggattcatgatgtctgcaaattatcatcctgcaatgaaaattgtcagacctgtgaggaagaagcttaaaataaagacagttttcaatatccttggtcctctactgaatccagcaagggtgcctcatgctgttattggtgtttaccatgagaatatagttaccaagatggctaaggctgctcagaaatttggaatgaagagagcattggtcgtccattcaaagggtttggatgaaataagcccacttggtcccggatatatccttgatgttactccagagaag

SEQ ID NO: 67766 - DNA, 323 bp, Zea mays
ttccgcattcgttccaactcctgagcactttctcctcgtccccgacaagccaatcgaagccgagatacggccatggactccaccggcaccggagcagggggtaaggggaagaagggagcggccgggcgcaaggtcggcgggccaaggaagaagtcggtgtcgaggtccgtgaaggccgggctccagttccccgtcggccgcatcgggcgctacttgaagaagggccgctacggcagtgatcggcaccggcgccccgtctacctcgccgctgtcctcgaatacctcgccgctgaagtactgcaatttgagcccattctttgttt

SEQ ID NO: 67767 - DNA, 275 bp, Zea mays
gatgatgacctgattgccagactgttgaagctcgggtgttgcaaaaataaggaaatagctgttaagacagtcaaaaccatcaagttcttgggactacatgaagagactcaatacataagggttgttcgagccatttaatgtgattgccaggatggaacagaggatggctatggcaaatagcagacatggtatgtccacagagtcgagtgataccggaggcaaccgcgaaagcacagcgagctatggagtcggaggtgaaatgcagtcacatgcat

SEQ ID NO: 67768 - DNA, 324 bp, Zea mays
gcagttaaggttggcctatgcatcgcactggcattcaccttcccagtcatgatgcacccgatccatgagatcgtcgagacaaggttcagatccaacagatgctttcggaagctcagccacaacgatggcggcgcggagtggataggcttgcacgcaagccgcgtcctcgtggtggcggtcctcactgtggtggcgtccttcatccccttctttgggtccttcatctcgttcgtcgggagcaccatgtgcgcgcttctctcctttgtgctgccggctctcttccatctcagcattgtaggctcgtcaatacgcttgtggaggcgg

SEQ ID NO: 67769 - DNA, 209 bp, Zea mays
atcgaatcgtctcgctagtggctgccctactcgtactgcttgccctcgccgccgtttcctccacgcgcagcgacaaaaggagtccgcggctgacaacgccgggatgttggcaggcggcatcaaggacgtgccggcgaacgagaacgacctccagctccaggagctcgcgcgcttcgacgtcaatgagcacaagcagaaggccaatgctc

SEQ ID NO: 67770 - DNA, 319 bp, Zea mays
  unsure (1)..(319): unsure at all n locations
ggagggaggaaggagatcgcgagcagccggagccggaggcgagaggatgaagacgttcgacccgtggccggtcttcttccgccgggagtggaagcgcaactggccctttctcacggggttcgccatcaccggcttcatcatcaccaagatgacggccaacttcaccgaggaagacctcaagaactccaagttcgtccaggaacacaagaagcgctgaccaaccgggtggagtcgtccgaatcgcctgcggatgaacaattagcccctattnttcttgtcttttttttatctagatgcgtgcactctattgtaataatgt

SEQ ID NO: 67771 - DNA, 317 bp, Zea mays
ccaaaggcgttcaagattcgagaggccggaggaaccaagcgtagggcctccgaccccacgtcgtcgtccgcgcgcgccgcccgccgtcgcagggagatgggggccgattactacaaggtcctcggcgtcgaccgcggcgccaggtacgacgacctcaagaaggcctatcggaagctcgccatgcgatggcaccccgacaagaactccaccaataagaaggaggcagaaaccaagttcaaggagatctctgtggcatacgaggtccttagtgatcccaagaaacgtgcaatctatgatcagctaggggaagaagggct

SEQ ID NO: 67772 - DNA, 313 bp, Zea mays
gtggaccgtgtgctccagccgtttgaccctgccaagttcaatttcacaaaagttggccaggaagaggttctcttccaatttgagaatagtggtggtgatgacagctatttcctgaacaacgctccaatcattgctgttgatcgggctccaaatgttattgctatcaatgtaagcccaattgaatatggacatgtgcttctcattcctcgtgttctggaccgcctgcctcagaggattgatccagagagcttcttgcttgcactgcaaatggcagccgagggaggtagcgcatacttcaggcttggttacaata

SEQ ID NO: 67773 - DNA, 317 bp, Zea mays
gtcggcggcgcccggcgggccggatcgtgatggagctgtacgccaacgaggtgcccaagaccgcggacaacgtccacgcgctgtgcacgggcgagaacggcgtgggcaagtccgggaagccgctccactacaaaggctccaccttccaccgcgtcatccccgagttcatgtgccaaggcggcgacttcacccgcggcaacggcaccggcggcgagtccatctacggcgagaagttccccgacgagaagttcgtgcgcaacacaccgcccccggtgtgctctccatggccaacgtcgggcacaacaccaacggctccc

SEQ ID NO: 67774 - DNA, 315 bp, Zea mays
cgtgctgaggctcaactgctgatccgtcttccaagctctggtatcatccctgagcactgatttaagatgtatctccagtactacatcaacgagaagggggacaaggtctacaccaccaagaaggagtcacctcttggggtgccaacgcagtctgctcacccagctcggttctcaccagatgacaagtactctcgccagcgatacctgttgaagaagagatttggacttctgccaacgcagaatccaggaccgaagtactgaagcttcaagtcaactgtccaacctgcgatgttctttttgtgtcaatgcttgttg

SEQ ID NO: 67775 - DNA, 303 bp, Zea mays
gtgatccagaaagcgaacaacacccggtacgtcctggccgccggcatcgtgacctatatgatcgacgtcgccaacaccgtgtcgcggtccatccgtgccgtcgctatctggatcaactgctacttcgcgttcgacccggacgcgctgtttggcgtgtacaagatgagcgggttcggcaaggacatgggcatggacgcgctcgacaagtacctgcataccaagaccgtggtcactccgctgtacaacactccatggctctgaccgaccgacctcatccctgtccgatgaacagttcaatatcac

SEQ ID NO: 67776 - DNA, 305 bp, Zea mays
ctgcttcccagagacccagccatggcgatctcccagatctcacgcatattcctggccatccttctcctggccgccgccatcgccgccgccccagctgcgcttgcggacggcgacgacgtggtggcccttaccgaatccacgttcgagaaggaggtcggaaaggaccgcggcgccctcgtcgagttctacgccccctggtgtggtcactgcaagaagcttgctcctgagtatgacagacttggtgcaagttttaagaacgctaaatctgtcttgattgctaaggttgattgtgctgagcacaagag

SEQ ID NO: 67777 - DNA, 309 bp, Zea mays
caccaaaggcgatcaagattcgagaggccggaggaaccaagcgtagggcctccgaccccacgtcgtcgtccgcgcgcgccgcccgccgtcgcagggagatgggggccgattactacaaggtcctcggcgtcgaccgcggcgccagctacgacgacctcaagaaggcctatcggaagctcgccatgcgatggcaccccgacaagaactccaccaataagaaggaggcagaaaccaagttcaaggagatctctgtggcatacgaggtccttagtgatcgcaagaacagtgcaatctatgatcagctagggg

SEQ ID NO: 67778 - DNA, 309 bp, Zea mays
cgccagtcaccaaccttccactccctccctccgtcgccatggcgcgcaagaagatccgggagtacgactccaagcgcctcctcagggagcacctcaagcgcctcgcgggcatcgacctcaccatcctctccgcccagatcacgcaatcaacggacttcgcagagcttgtgagccagcagccatggctgtcaaccatgaagctagtggtgaagcccgatatgctgttcgggaagcgtgggaagagcggcctcgtggctctcaacttggatttcgatcaagtccaggcgtttgtcaaggagcggctagggg

SEQ ID NO: 67779 - DNA, 312 bp, Zea mays
gttctaccaggagaccttcggcgtccctccggccacgcgagctcgccgacatggtcgcccacaggttccatcagtaccaggtggtaggtcgcgcgctgccgaccccaaccgatgagcaccccaagatctaccgcatgaagctctgggccaccaacgaggttcgcgccaagtccaagttctggtacttcctgagaaagctcaagaaggtgacgacgagcaatggccagatgcttaccatcaacgagatctttgagcgcaacccgaccaccatcaagaactatggcatctggctacgctaccagagcaggactg

SEQ ID NO: 67780 - DNA, 316 bp, Zea mays
gaacagcggagtggagggcagcaaagagccctgcctactacaagcgtggcgactatgtgcctggattgaaggttgatggaatggatgttcttgctgtgaagcaagcgtgcaaatttgcaaaagatcatgctgtcgcaaatggcccaattgtccttgagatggatacctacagataccatggccactctatgtcacatccaggaagcacttaccgcaccagggatgagatttcaggtgtcaggcaggaacgggatccaattgatagggttagaaagttgcttttgactcatgacctggcaaatgctgctgagctcaa

SEQ ID NO: 67781 - DNA, 160 bp, Zea mays
acggcccacctggaagccggagagaatcgagcagagccaccgatcgctcctctccactttccacattccagttccactccgcctccgctgccggtcgccgactccgaaactccgacagtccgaccacaaggatccacagaaggatgagtgaagaggataa

SEQ ID NO: 67782 - DNA, 264 bp, Zea mays
ggtcagactaggttaggatttacctgtgaggcctccttctcccctgccgccgccgccatgggacactccaacgtgtggaactcgcaccccaagaactacggccctggatctagggtttgccgtgtgtgcgctaacccccacggcttgatccggaagtacgggctcatgtgctgcagacagtgcttccgcagcaacgccaaggacattggcttcatcaagtaccgctgaaacttggggagctccaaagcacggcaataatggagg

SEQ ID NO: 67783 - DNA, 266 bp, Zea mays
gcgcgacggaaaccccaaacccaacctcatctcttttctcggcctctaccgccccctcgatcggtcggccggtcagctatgacgccgggaagctcggccgccggatccggcgtcgtcgttcctcggaacttcaggctcctagaagagcttgaacgtggagagaagggcattggagatgggacagtgagctatggaatggatgacgcagatgacatctacatgcgatcatggactggcactattattggccctcataataccgtcca

SEQ ID NO: 67784 - DNA, 261 bp, Zea mays
ggagctcagcctggtccagtcctgtcctggacacaacgagtgaagattgctgttggagcagcaaaaggccttgagtatcttcatgagaaagcgcacctcatattatacacagggacatcaagtccagtaatgttcttctatttgatgacgacgtatctaaaatagctgattttgatttgttaaaccaagctccggatatggcagctcgacttcattcgaccagagttcttggaacatttggctatcatgcacctgagtatg

SEQ ID NO: 67785 - DNA, 134 bp, Zea mays
gtgacgcccgaggacggtttcagctatgccagttatgaggttatgggcttggatgccactgctctgtcttatggtgaccttgtcaagagggtccttcggtgctttggcccctcggagttttccgttgccgtgac

SEQ ID NO: 67786 - DNA, 265 bp, Zea mays
cagcgccgcgcttgcgtttccttctctccgcttccaagatgtcgaagcgagggcgtggaggttcggctggtaacaagttccggatgtcactgggtctaccagtggcagctactgtgaactgtgccgataacactggagccaagaacctgtacatcatttctgtgaagggaatcaagggtcggcttaacaggcttccttctgcctgtgttggtgacatggttatggcaaccgtgaagaagggaaagcctgaccttagaaagaaggt

SEQ ID NO: 67787 - DNA, 136 bp, Zea mays
aaaacattttccattctttgacatggcataccaagggtttgccagtggtgatccagagagagatgccaaggcaatccgaattttccttgaagatggacaccaaattggatgtgctcagtcatacgcaaagaacatg

SEQ ID NO: 67788 - DNA, 264 bp, Zea mays
ctgcgcctctacatttcttctctctctgctcctccgcctccgcctgatccatccaagacagggatcgccatgtcggactcggaggagcaccacttcgaatcgaaggccgacgctggggcgtccaagacctacccgcagcaggctggcaccgtccgtaagaacggcttcatcgtcatcaagaaccgtccctgcagagttgtggaggtttctacctccaagactggtaagcatggccacgccaaatgccactttgtcgccatagac

SEQ ID NO: 67789 - DNA, 184 bp, Zea mays
aggcattccaccggaccagcagcgccggatctttgctggcaagcatctggaggatggccgtaccctcgccgactacaacatccagaatgagagcaccctccaactggtgatccgcttgcgaggtggtatacagatctttgtgaagacttgactggcaagaccataacccaggaggttgagagct

SEQ ID NO: 67790 - DNA, 258 bp, Zea mays
tggagaaggctttgtgtgctcacacaggaagataacttgcgtctctgtcagccaaccttactcattaattgtctcaggctctgatgactgttctgttatcttatgggacctgacaagcctagtctttgtgaagcagctaccaaggttcccggcatcagtatccgcgctacatgtgaacagcctcactggtgagattctgactggtgctggtgttctttttgctgtttggagcatcaatggggactgcttgctgtggtg

SEQ ID NO: 67791 - DNA, 262 bp, Zea mays
ctcatcaccattgggaagataataaagaaagtccctattgtggtcggcaactgcacaggatttgcagtcaaccgtacattttttccttacacacagggttctcatcttctagttagtcttggtattgatgttttcagaattgatcgagtaatcagcacctttggcatgccaatgggaccttttcaactccaagatgtggctgggtatggagttgccttggcagtaaaggatatctacgctgatgcctttggagaaagaattt

SEQ ID NO: 67792 - DNA, 130 bp, Zea mays
caatttttcctgaggttaggctaaagaggtaccttgagatgataggtgctgatggtggcccatggaggagattgtgtgcgttgcctgcattttgggttgggctgctgtacgacgaggaatcgttacaaag

SEQ ID NO: 67793 - DNA, 262 bp, Zea mays
cccaatcagaagagctgaggcgcgggcggacaaggagcaagcggaggaggagttgtgccaagccacaatgggtatctcgcgtgactcgatgcacaagcgccgagccaccggtggaaagcaaaaggcctggacgaacaatcgaaagtatgagcttggtcgccagccagctcaacacaaaattgtcaagcaataagacggtgacgacggtccgtgttcggggaggtaatgtgaaatggagggctcttcgcctagatactggtga

SEQ ID NO: 67794 - DNA, 262 bp, Zea mays
atcgggtccaggtacgacgtcggccatctcatcccggcgggttttgatgtcgccgcccacggcaacgactacgccgtctgggagaaagccggcgccgaacaagtgactcgagcataatagagtgctcgagataccgatttgattctcagtacaatgtacacgggactgcattgataaaataagtggtttctcctctaataagtaagggagcgtaaaagggcaattggagccatatgtaaccttaaaaaattgctgagtaaaa

SEQ ID NO: 67795 - DNA, 262 bp, Zea mays
gtaaaatttagtagcatgcttcataagataattcctgcagaagctggcatcagcataatttgtgcttctcctggaattgtcgacacgaatgttacaagagaccttcctaagattgttgtagctgcataccgttttcttccctacttcatattcgatggtcaagaaggttctaggagtgcactgtttgcagcatgtgacccccaagttccagagtactgtgagatgctcaagtcggaagactggccagtctgtgcttgcatta

SEQ ID NO: 67796 - DNA, 140 bp, Zea mays
cggcaatgtcggggcgcggcaagggcggcaagggtctgggcaagggcggcgccaagcgccaccgcaaggtcctgcgcgacaacatccagggcatcaccaagccggcgatccggaggctggctaggaggggcggcgtcaag

SEQ ID NO: 67797 - DNA, 256 bp, Zea mays
caatgcgcgtgctcgtcactggcgccgcaggacaaattggatatgccctggttcccatgattgctaggggtgttatgcttggtgcagaccagcctgttattctgcacatgcttgacattccgccagcagctgaagcccttaatggtgttaagatggagttggttgatgctgcgtttcctcttctgaagggagttgttgctacaactgatgttgtggaagcctgcactggggtcaatgtggccgtcatggttggtgg

SEQ ID NO: 67798 - DNA, 254 bp, Zea mays
gcaaagttcagggcaccagtggagccctactaagaaaggaagaggatgaggatgttttcttgtggagctatactagctcgctgctgccttttgttacaatgtttgtacggtcgcaataaatgtatggtcgtgtttgctcgagagctactcaggtgattttgtcgtgggagcaccaaaagcagaaaagaacccttttttttcaatctctctagattctgacgagtggtggtctgcactcgtcgtaatgtcgtttg

SEQ ID NO: 67799 - DNA, 258 bp, Zea mays
ctccactccccccttcacagatccgttcctccagctagggttagcgttcctcttctgctatggcgatcaagcggaccaaggcggagaagaacatcgcgtacgacaacaagctgtgcagcctcctcgatggttccaccaagtggctcatcgcccgcgcggccacgtcggttccaagcagctccaggacatccgccggggcctcaggggcgactcggtggtgctcatggggaagaacacgctcatccagcgctgcatcaa

SEQ ID NO: 67800 - DNA, 248 bp, Zea mays
ccagaacacatagacaaaggaagtactgccatttcctctaaagctcagcagaatggagagtatccagagaccttcccagcattgagaacttcattcttgaaggcattccgtgtaatggatagggatctcaaattacataaaagcattgactgctttttcagtgggactacagcggtggcagtgatcaagcaggaacacaatctaaaaattggcaatttgggggattcaagagctgtcttaggcaccag

SEQ ID NO: 67801 - DNA, 342 bp, Zea mays
aaccagaccaccaaacaagtgccagcggcctctcgcagtcgccgcaatggagagcaccttcatcatgatcaagcctgatggcgtccagaggtgcctcattggtgagatcatcagccgttttgagaagaagggcttctacctcaaggccttgaagcttgtcaacgtggagaggtcgtttgccgagaagcactacgccgatctcgcctccaagcccttcttccagggcctcgttgactacatcatctctggccctgtggtggccatggtctgggagggcaagagcgtcgtcacaactggccgcaagatcattggcgccactaaccccctggcttctgacccggc

SEQ ID NO: 67802 - DNA, 368 bp, Zea mays
gcgtacgcaagctcggggcagatcgaggacctcgagcgcgccggagtggtcgagaccgggaccctcaccgtcgacggcgtccccgtcgacacctacctcactaggttcgtgtgggatgagggcaagtaccccacaatgtcccctctcaaggagatcgtcggcagcatacagtcacaggttgccaagatcgaggatgacatgaaggttcgagcatcggaatataataatgtaaggagccagcttagtgcgatcaacaggaagcaaagtgggagcttagcggttcgtgatctttccaatctggtaaaaccggaggatatgatcacctcggaacatctcgtgacacttcttgcaattgatcccaagtactc

SEQ ID NO: 67803 - DNA, 342 bp, Zea mays
gcttgttctcttcggttcagttctcgagtttccaggatgaaggtaatagctgcctatctgcttgctgttctgggtggaaacacttccccgactgctgatgatgttaagagcattctggaatcagttggtgctgaagctgatgaagaaaaactagagttcctgctcacagaactcaaagacaaggacataacagaagtgattgcagctggaagggaaaggttatcctctgtgccttcaggtggtggtgcaattgacatgggagctccagcagctgtagctggcggtggcgcacacctgctgaagaggcaagaaggaagcaaggttgaagagaagaagagtctg

SEQ ID NO: 67804 - DNA, 340 bp, Zea mays
ggacgtggaggatactttgatggctacggtattattcgagacataatgcagaatcatctcattcagatactagctttatttgctatggaaactcctattagtttggaagcagaggatataagaaatgagaaggttaaagttcttcgttccatgaagccgttgcagctggaagatgtggtcgtaggacagtataaaagtcacacaaaaggtggtaccacataccctgggtatactgatgataagacagtgcccaaggatagtgtgactccaacgtttgctgctgcggcgcttttcataaataatgccagatgggatggagttcctttcttatgaaactggg

SEQ ID NO: 67805 - DNA, 348 bp, Zea mays
cgacgtcacgcagttcggctacttcaaggtgctcgggaagggggtgctgccgccaaagcccattgtcgtcaaggccaagctcatctccaaggtcgccgagaagaagatcaaggcagcaggcggcgccgtcgtgctcaccgcctaggtttcagtccttgttcgcctcctggttttgaaatctatatctgaactgatagtgctttcctgtctcggcaatttgtgttaagaaaacctatagttttaaaatatgtggttcctgcctgtttggcagtgcttatgcggtttttgatgccagttcatatcaaatatttcacatcaattaaatctatcctcgctatcagttgtgct

SEQ ID NO: 67806 - DNA, 358 bp, Zea mays
  unsure (1)..(358): unsure at all n locations
accatgtattcggcagaggctcggaaggaaagcagaggagctcatgctcgtgaggatttcacgacaagagatgacgagaagtggatgaagcactcactggggtactgggaaaacgagaaggttcgattggcatacaggccagtgcacatgaacacattagacgatgaagtagagtccttcccgccgaaagctcgtgtctattgatcgattcaagcctcacaccctcgggaattccgtgtaaggtgttaataaagcagatgggcgttcctggctgagaacatgatctgaactcgtgacccccctttttctgtggttctgtatnttgtctgatntgctangaatagaaggaacacatgct

SEQ ID NO: 67807 - DNA, 297 bp, Zea mays
cagcgggcgggctccagtcgcaactcgcaacacagacgccgccgccgcccaaagaaagacgtcaactccaggagacaagatagtgagaactgaagagaaggatgggcttcgagaagcagatcctgagatccggcaccggccccaagccgataaagggccagaaggtcaccgttcactgcaccggctacgggaaggatcgtgatctgtccaagaaattttggagcaccaaggaccctgggcagcagccattcagtttcagcattggtcagggttcagtgatcagaggatgggacgagg

SEQ ID NO: 67808 - DNA, 343 bp, Zea mays
  unsure (1)..(343): unsure at all n locations
ggggattaatctcaaaacactgcgtccggaaccttgtgttgaagggtattctacacctgggggttattctgcaagagctgtgcaccctatagcacttgctaaagtcatgcagatagcaaggatgatgaaagaagagtttgctgatggacagtctctctctgccattggtggtgtggagactggcaatgatgctgctgagtttattcttcttggtgctgatacagtacaggtatgtaccggtgtgatgattcatggttatccccttgtgaagaagctttgcgcagagttacaggatttcatgagagagcacaacttntcatcaattgaagaggtcgaggggctc

SEQ ID NO: 67809 - DNA, 239 bp, Zea mays
cttcgacgacgccgacctcgacatggccgttaacctcgtcaacttcgccacctacaccaacaagggcgagatctgtgtggccggcacgcgcatctacgtgcaggaagggatctacgacgagttcgtgaagaaggccgccgagctcgccagcaagtccgtggtcggagaccgttcaacccgagtgtcagccaaggcccccaggttgacaaggaccagtacgagaaggtcctcaggtacat

SEQ ID NO: 67810 - DNA, 292 bp, Zea mays
gtcaaccgtgccatgtcaggctacgagattttgctttcaacctcaaaatgctcatctgacatcttgtgtattttccatttagcgtctgttcattggtgcaccagaaatgcattgggacgtggtgtatcgtgtggcctgggctctactaatgtttgacaatcctgaagtgccaccagtggtgaacctggtataagcaggcgccattcatgtcagctaatcgttgagaaaacatatcagtgaaatcgtgcaactgttagtgtaatgaggcagttcctgcttacatattattact

SEQ ID NO: 67811 - DNA, 333 bp, Zea mays
cagcgccgccagacactccgtagtctgtaccccaagcaccggcgcggcggcggcggctaccatggcagtcgggaagaacaagaggatctccaagggaaagaagggtggtaagacaaagaccgtcgatcccttctctaagaaggactggtatgacatcaaggccccatcggtcttcagtgtgcgcaacattgggaagactctcgtgtccatgacacagggtaccaggattgcctctgatggtctgaagcacagagtctttgaggtctgtctagctgatcttcagtgtgacgatgatcaggcctacaggaacatcatgctccgtgctgaagatgt

SEQ ID NO: 67812 - DNA, 235 bp, Zea mays
ccttcaccagcgccttcacggcggccatggtgaagatggggaacctcggcccgctcaacgggaccagtgggcagatcaggctcacctgctggaagctcaactcgtcctaataattaaggacggacgtccgatagacgatcctgcgcaatcgtatcgtacgtgcatgatacgcatacatctggaaactactataccaatgcaaacagagatctatacgtacgagtatgtataacga

SEQ ID NO: 67813 - DNA, 337 bp, Zea mays
  unsure (1)..(337): unsure at all n locations
cagcnctgtacaagatgttgctaattcctgcagaactggagcagctactaatgtcatttttgggcttgctttgggttacaaatcagncattatcccaatttttgctattgcgtttagtatcttcctcagcttcagccttgctgccatgtatggtgttgctgtggctgctcttggaatgctgagcaccattgccacaggtcttgctattgatgcatatggccctatcagtgataatgctggaggaatagctganatggctgggatgagccataggattcgtgagagaatgatgctctagatgctgcaggaaataccacggctgcaatgggaagggttt

SEQ ID NO: 67814 - DNA, 343 bp, Zea mays
gtaaaatgtagtagcatgcttcataagagaattcctgcagaagctggcatcagcataatttgtgcttctcctggaattgtcgacacgaatgttacaagagaccttcctaagattgttgtagctgcataccgttttcttccctacttcatattcgatggtcaagaaggttctaggagtgcactgtttgcagcatgtgacccccaagttccagagtactgtgagatgctcaagtcggtagactggccagtctgtgcttgcattaactacgactgtaatccgatgaacgcgtctgaagaagcgcacagccttgaaacctcgcagctggtctgggagaagcgctcga

SEQ ID NO: 67815 - DNA, 348 bp, Zea mays
tgcggttgaagaggatcctggtcgattacatgcttcggatgtcctactacaattccgccaccaagctcgctgagacttctggtattcaggacctcgttgatattgatgtctttctcgatgcgaaaagagtaattgattctcttcagaataatgaagtttctcctgctttagcttggtgtgcagaaaacaagtctcggctaaagaaatcgaagagtaagcttgagtttttactgaggcttcaagagtttgtggagtttgtcaaggttaagaatttcattcaggctatagcatatgctcgaaaacaccttgctccctggggctctgtacacatgaaagaattgcagcgtg

SEQ ID NO: 67816 - DNA, 243 bp, Zea mays
gtggagaacatgaaggccctagatgtcatcccactgctgacgccggaggtcgtcgacaggatcgaggcggtggtccaaagcaagcccaaacgcaacgtcgagtcatacaggtgaaaattcggtgttcatccgacggagttcaggcctcctccgcgaaacttcatccatgatccgtgtgtattctgggcgtggtgctgtgttcacaaacacaagtctgtcagtccctgtgtgtgtattctgctt

SEQ ID NO: 67817 - DNA, 247 bp, Zea mays
acgcggatcgaattaggctctccgagtctccggttccctcctctcggcggcggctcaggtccctctccatctccggcgtggcgcttggcgtctgacctcaacaagcaagaaagcaaatggcaggcggcagggttgcgcatgccaccctcaagggcccgagtgtggtgaaggagatcttcattggactgaccctgggtctgatcgcgggaggcatgtggaagatgcaccactggaacgagcagaggaa

SEQ ID NO: 67818 - DNA, 249 bp, Zea mays
gctgattgagtgtattatgggtaaagttgctgctcagatggggaaggaaggcggatgcactccattcacggatgtgactgtggataacatcagcaaagctcttcataaatgtaattatcaaatgcgtggatttgagacaatgtacaatggtcacactggaagaaaactgactgcgatgattttcctgggccccacatattaccaaagactcaagcacatggtggatgacaagatacattcgagaggacg

SEQ ID NO: 67819 - DNA, 323 bp, Zea mays
ggagggaggaaggagatcgcgagcagccggagccggaggcgagaggatgaagacgttcgacccgtggccggtcttcttccgccgggagtggaagcgcaactggccctttctcacggggttcgccatcaccggcttcatcatcaccaagatgacggccaacttcaccgaggaagacctcaagaactccaagttcgtccaggaacacaagaagcgctgaccaaccgggtggagtcgtccgaatcgcctgcggatgacaaattagcccctatttttcttgtcttttttttatctagatgcgtgcactctattgtaataatgtaata

SEQ ID NO: 67820 - DNA, 165 bp, Zea mays
cggctcgagcggctcgagatccttgtgacaagaggaggagcatcacagagtaccgtgctctcttccatgccattgatttttcgctgatagagagtgacgaagatgttctctgggtaccagatgtcagagaaacctttgagtcactcgcagaaaggggtatgaagt

SEQ ID NO: 67821 - DNA, 208 bp, Zea mays
cgaaggcggcggcggcgatggggagcgaccaggagacggagaagaagaagaccccggtggcactaatgcccatcgcgaagccctcgcaggaaagaagctctgcaagcggaccctcaagctcgtgcgacgagcctctgaggccaagtgcctcaagcgcggagtcaaagaggtagtcaagagcattcgccgcgggaacaaagggttgtgt

SEQ ID NO: 67822 - DNA, 337 bp, Zea mays
gttctaccaggagaccttcggcgtcgctccggccacgcgagctcgccgaaatggtcgcccacaggttccatcagtaccaggtggtgggtcgcgcgctgccgaccccaaccgatgagcaccccaagatctaccgcatgaagctctgggccaccaacgaggttcgcgccaagtccaagttctggtacttcctgagaaagctcaagaaggtgaagaagagcaatggccagatgcttgccatcaacgagatctttgagcgcaacccgaccaccatcaagaactatggcatccttttgcgctaccagagcaggactggttaccacaacatgtacaaggagta

SEQ ID NO: 67823 - DNA, 340 bp, Zea mays
gcaacggaagcaagaacaccttgacgacctcacctcacaggtaaatcagctgaaggaccagaacaagcagctcagcatggcactgagtataaccagccaaaaccttgtggcagtgcaagcgcagaactctgttctgcagacccagaagatggagctggacagcaggctgggtgccctgacggagatcctctggtacatgaactcaagcaccagcaccagcactgctcctacaaatccagccatagcgaacgacttcacagcatggagcagagcctctgatattcttggtggaacagctacagcgcatagactgtacaatgctctagtctaagctctagtc

SEQ ID NO: 67824 - DNA, 312 bp, Zea mays
cgtcggttcacttctccaggtaaggaaagggttcgtactcatggcgccgccgcagccaaagtcgggcctcttcgttggcatcaacaagggtcatgtcgtcaccaagcgcgagctgcctccccgcccgtgccaccgcaaggggaaatcaacgaagagggtgtctatggtcaggggcctgatcagagaggttgctgggtttgctccttatgagaagcgtatcactgagcttctgaaggttggcaaggacaagcgtgccctgaagcttgctaagagaaagctttgaactcacaagatggcaaagaagtagagaga

SEQ ID NO: 67825 - DNA, 187 bp, Zea mays
gagagagagacggaaagggggagatgagccggagcctggggatcccggtgaagttgctccatgaggcagcgggtcatgtggtgacggtggagctcaagaccggcgaagtgtaccgggggtccatggtcgagtgctaggataactggaattgccagctcgagaacattaccttcaccgccaatgatgg

SEQ ID NO: 67826 - DNA, 289 bp, Zea mays
ctcaagggcacaagcagaagttgcggttgtactcttcctcctccgccgtcggctcagatctctgcgtgcgggctagcgatggcgtcgttctcggaggctccccctgggaacccgaaggcgggcgagaagatcttcaagaccaagtgcgcgcagtgccacacagtcgacaagggcgccggccacaagcaaggtccaaacttgaatggtctttttgggaggcagtcgggtaccaccgcaggctactcctattctgcgggaaacaaaaacaaggctgtggtctgggaggaga

SEQ ID NO: 67827 - DNA, 325 bp, Zea mays
gtcccaattatttggcctccgtcagagaggggagaaagacccgttcgaggcggcggcgatgtcggggcgcggcaagggcggcaagggtctgggcaagggtggagccaagcgccaccggaaggtgctccgcgacaacatccagggcatcaccaagccggcgatccggaggctggctcggaggggcggcgtgaagcgcatctcggggctcatctacgaggagacccgcggcgtgctcaagatcttcctcgagaacgtcatccgcgacgccgtcacctacaccgagcacgcgcgccgcaagaccgtcaccgccatggatgtcgtctac

SEQ ID NO: 67828 - DNA, 353 bp, Zea mays
cttctccgcagagcatctcaacaccgccttgaggacccgccaactcgtcggctgcagccatggtgaaatattcgacggagccaaccaaccccaccaagtcaaccaaggccatgggccgtgacctacgtgttcacttcaagaacacccgtgagacagcttttgcccttaggaagttgtcactcaccaaggccaaaaggtaccttgaggatgtgattgcccacaagcaggccatcccgttccgcaggtattgtggcggtgttggacgtaccgctcaggctaagtctcgtcactcaaatgggcagggacgctggcctgtcaaatctgctagattcattctagaccttctcaagaat

SEQ ID NO: 67829 - DNA, 195 bp, Zea mays
cagcgccgccagacactccgtagtctgtaccccaagcaccggcgcggcggcggcggctaccatggcagtcgggaagaacaagaggatctccaagggaaagaagggtggtaagaaaaagaccgtcgatcccttctctaagaaggactggtatgacatcaaggccccatcggtcttcagtgtgcgcaacattgggaa

SEQ ID NO: 67830 - DNA, 168 bp, Zea mays
ccacgctgctcatccacgagggtgtcaaggccgaggaggagtacgagaagaccggcaagatccccgaccctgagtccaccgataacgctgagttcaagatcgtgctcacgatcatccgcgacgggctcaaggctgaccccaagaagtaccgcaagatgaaggagaggc

SEQ ID NO: 67831 - DNA, 355 bp, Zea mays
tcgtcgacccggagaagctgagggagatcggcttcatcgtctactccatcggcaagccgctcgacgcctggcttaaggacatgcccgcggtcgcttaattcatccgaggtgctccattggattggatcctgggaaggaagaagaggaactggttgaccattcttcattacagtttgtttttttgcaggattcttaaaagttggacggcgctgctagtattccatgtttcgtgtgttcatattggaggacgtctgtagatgtaaaaagatcctcgggcgcttgtgctcggcttgaggaaatatccttgtacggttgtacctggacccgctatagctggttggttcttcaaattgtg

SEQ ID NO: 67832 - DNA, 362 bp, Zea mays
gctagggccggaaaggaccttgtttccagcttggtgtctggattattgacgattggtcgccgtttcggtggagcaattgatgatgcagcccgatacttcaaagatgcatgtgataggagcctcacgccatacgagtttgttgaaggcatgaaaaagaagggaatccgtgtgcctgggattggtcacaggattaagagcagagacaacagggataagcgtgtgcagcttctacagaaatatgctcacacacatttcccttcagtcaagtacatggaatacgctgttcaggttgagacctacaccttgtcaaaagccaacaatttggttatgaatgtcgatggtgcgatcgggtcccttttctt

SEQ ID NO: 67833 - DNA, 350 bp, Zea mays
gcacaccaatcgcccacaagcgctcgcaggagaggtcgaaaccctagcttttgcggcggcggcgagagaagatgatctacgacgtgaactcccccctcttccgttccttcctcagccagaagggcggcgccgacaagaggaaaatggaggagcataaaccaaaggagcagaggcccaaggctaacgagaacaagcctgtgatgaacgaatgaatatctccagaagctttgttcaatgtgcaaccaagtccgatgtccgtttgctctggtcagcttaaaaccaacgcttccaataatcctatattggtgacttagtttccccttatagtgttatttgctcggcttgaacat

SEQ ID NO: 67834 - DNA, 346 bp, Zea mays
  unsure (1)..(346): unsure at all n locations
cgcgaggagctcggctgcgtgttcctgaccggcgagaggctcaagtcgcccggcgaggagtgcaacaaggtgttcgtcggcatcagccagggcaagctcgtggaccccatgctcgagtgcctcaaggagtgggacggcaagccgctgcccatcaacatcaagtaaaagaacgccaaggagaagaggagggaggggaggagatacgtgaanataaaatagaacctgtacacgtgtctgtccagatcgtgccgtcgatcgctcttcgttgttgatttttggttgtattgatcgatcagtatgtgtgcgtgcgtgtgtggcgttgctctatcttctgttgtgtagctgt

SEQ ID NO: 67835 - DNA, 338 bp, Zea mays
tattgatgcagctcaggttgttccagcctggcttagctgcttgcctataaaagacgacaaggttgaagctaaagttgtacatggacagctttgctccatggtggagaggtcggatgctgaaattcttgggcctcacagtcagtatcttcctaaaattgtttcaatttttgcagaggttttgtgcaatggaacagaacttgccactgatgaaactagaaacaggatggtgaatgtcttgaggcgtttccagcagactttgcctcctgattttcttgcatcgacgttttccaacttgcaaccgcagcaacagctactgctacagtccatcttgtcgacat

SEQ ID NO: 67836 - DNA, 184 bp, Zea mays
gcgccggcaaccgccgccatcgatcgatcgcccggaaactgacctctaccgatgtctggagccggcgaggaggataagaaagcccccggagggcggcgcccacatcaaccttaaggtcaagggacaggatggcaatgaggtgttctttcgcataaagaggtccacccagctgaagaagctgatg

SEQ ID NO: 67837 - DNA, 345 bp, Zea mays
ggggattaatctcaagacactgcgtccggaaccttgtgttgaagggtattctacacctgggggttattctgcaagagctgtgcaccctatagcacttgctaaagtcatgcagatagcaaggatgatgaaagaagagtttgctgatggacagtctctctctgccattggtggtgtggagactggcaatgatgctgctgagtttattcttcttggtgctgatacagtacaggtatgtaccggtgtgatgattcatggttatccccttgtgaagaagctttgcgcagagttacaggatttcatgagagagcacaacttttcatcaattgaagagtttcgaggggcctc

SEQ ID NO: 67838 - DNA, 348 bp, Zea mays
tggcgttgtccagcgccgtgttaatttaatggctgaagagggtgtcacatttgtggtgaatgccaatgttggtagtgatcctttgtactcgattgaacgtctacgttctgaaaatgatgcggttattttggcttgtggagcaacaaaaccgagagatctcaccatccctggacgcgagctatctggagttcattttgcaatggaatttctccatgcaaatacgaaaagtttactcgacagcaacctggaggatggtaaatatatctccgcccgtgggaaaaaggtggtggttattggtggaggtgatacaggcacagattgcattggcacatctattaggcatggttg

SEQ ID NO: 67839 - DNA, 346 bp, Zea mays
gcgacctccccttctcgccggccggagcgggtgcgccatcaccatggacccggaagcggtacggaaaagcctggagcccaccgcaactgtcgaaaaaatcaccggctccacccctgcgcggctccacttctacgaccccttcgtcctcagcggagtcagcatcgaagccgccgagcacggtcgcctcctctgctcctttgtcgtcacccctcgccttgcgagtcccgcggggtacctccgcagcggtgtcacagcgacgctcgccgaccagctgggatcggccgtgtttttctgcagcgggctccccagcagcggggtatccctcgaaatcagcgtctcctttgtt

SEQ ID NO: 67840 - DNA, 189 bp, Zea mays
tcctttctcaagttttgacatcctttcagatgatgaggttagacaggggctgaaggtgctctcaaactggcgcagttaccctcaactgtacataaaaggtgagctggttggcggctcagacatagtgatggagatgcacaagagtggtgagctgaagaaggttctgtctgagaaaggggttattccaaa

SEQ ID NO: 67841 - DNA, 338 bp, Zea mays
ctttacaagaacagcattcaaggaacaatcccttctgagcttggtaatttgaagaatctaataagcttggacttgtacaagaacaacatttcggggacaatacctccttcccttggaaagttgaaatcccttgtattcctgcggctcaatggcaatcatttgactgggccgatcccaagggaactttctggaatatctagtctaaaagttgtcgatgtttcaagcaatgatttatgtgggacgattcccacatctggaccatttgagcacattcctctgagcaagtaagttacattcctactttgcatcttcttgcatactttataaagatagttaca

SEQ ID NO: 67842 - DNA, 335 bp, Zea mays
gtagaatttagtagcatgcttcataagataattcctgcagaagctggcatcagcataatttgtgcttctcctggaattgtcgacacgaatgttacaagagaccttcctaagattgttgtagctgcataccgttttcttccctacttcatattcgatggtcaagaaggttctaggagtgcactgtttgcagcatgtgacccccaagttccagagtactgttgagatgctcaagtcggaagactggccagtctgtgcttgcattaactacgactgtaatccgatgaacgcgtctgaagaagcgcacagcttgataccttcgcagctggtctgggaga

SEQ ID NO: 67843 - DNA, 340 bp, Zea mays
gtcagcccctctcgttcttcatccgccttcgcctccaaccgcgtgagctccacgcctgctccatgaaagcgagagcttcggctatgaacaacaaatcagaagcgtgatcagctcggtgccaacaaaacctcaacaaccaagtttcatgtctgatctcgacgtccagcttccatctgcctttgatccgtatgctgaggcaaatgctgaggactctggtgctggtcctggaacgaaggattatgtgcatgtgcgcatccagcagcgcaacggcagacagagtctgactacagtccagggtctgacgaagagttcagctaatcacaagatcctcaaggatctg

SEQ ID NO: 67844 - DNA, 219 bp, Zea mays
gcaaggtaggtagactcggagttccgctcgaatccgtcgccatatcgaccgagcgaattcaccacagcttctcaccaccgctaccttcgatggcacccaaggcggacaagaagccggcggcgaagaagcctgcagaggaggagcccgcgacagagaaggcggagaaggctccggcggggaagaagcccaaggccgagaagcgcctcccggcgggcaagt

SEQ ID NO: 67845 - DNA, 184 bp, Zea mays
cgataccatgaagaagtacaacgctggtacgaacaaggcggcatccagcggtacatccctcaacaccaagcgcctcgacgacgacaccgaaaacctcgcccatgagcgagttccaagtgatctgaagaagaatctcatgcaagcaaggctcgataagaagctgacacaggcacaacttgctcag

SEQ ID NO: 67846 - DNA, 338 bp, Zea mays
gtatgatttagtagcatgctgcataagagagttcctgcagaagctggcatcagcataatttgtgcttctcctggaattctcgacacgaatgttacgagaatccttcctaagattgttgtagctgcataccgttgtcttccctacttcatattcgatggtcaacaaggttctaggagtgcactgtctgcagcatgtgacccccaagttccagagtactgtgagatgctcaagtcggaagactggccagtctgtgcttgcattaactacgactgtaatccgatgaacgcgtctgaagaagcgcacagccttgaaacctcgcagctggtctgggagaagac

SEQ ID NO: 67847 - DNA, 339 bp, Zea mays
tgcggttgaagaggatcctggtcgattacatgcttcggatgtcctactacaattccgccaccaagctcgctgagacttctggtattcaggacctcgttgatattgatgtctttctcgatgcgaaaagagtaattgattctcttcagaataatgaagtttctcctgctttagcttggtgtgcagaaaacaagtctcggctaaagaaatcgaagagtaagcttgagtttttactgaggcttcaagagtttgtggagtttgtcaaggttaagaatttcattcaggctatagcatatgctcgtaaacaccttgctccctggggctctgtacacatgaaagaat

SEQ ID NO: 67848 - DNA, 184 bp, Zea mays
acgcggatcgaattaggctctacgagtctccggttccctcctctcggcggcggctcatgtccctctgcatctccggcgtggcgctacgcgtctgaactcaacaagcaagaaagcaaatggcaggcggcacggttgcgcatgacaccctcaagggcccgagtgtggtgaaggagatcttcattgg

SEQ ID NO: 67849 - DNA, 340 bp, Zea mays
cttgcaatcacaacgaacaaaagctctcgatctcaccgacaccgaggaagaagagatcaatggcgtccgagcagggagtcgtgatcgcgtgccacagcaaggctgagttcgacgcccacatgaccaaggcccaggaagccggcaagctggtggtcatcgacttcactgccgcctggtgcggtccatgccgcgccatcgccccactgttcgtcgaacacgccaagaagttcactcaggtcgtcttcctgaaggtggacgtggacgaagtgaaggaagtcaccgcggcctacgaggtcgaggcgatgccgaccttccacttcgtcaagaacggcaagacggt

SEQ ID NO: 67850 - DNA, 180 bp, Zea mays
tgcaccgccggcatctccggtagacacatcaacccagctgtgactttcgggctgttcttagccaggaagctgtccctgactagggccctcttctacatcatcatgcaatgcctgggtgccatctgtggagctggagtggtgaagggcttccagcagggactttacatgggcaacggtggt

SEQ ID NO: 67851 - DNA, 184 bp, Zea mays
ggcgaccagattctgccgtctccaccgccgccgcagccagcgtcaccggatggatctgccgtctcccttgctccacgcgatgaacaccgacatcaccgcctcgactaagccggagtacccggtggtggatcggaacccggccttcaccaaggtggtcggcaacttctctgcgctcgactacatg

SEQ ID NO: 67852 - DNA, 318 bp, Zea mays
cgcacacacacaattaggtcacatacacacttcccggctgcctccctaggtagcagcttctacaatggaggcatccaacaagctcgcagtcttgctcctgtggctggtcatggcagctgccactgccgtgcacccttcctactctgagaattcgcctcaagactacctcactccccaaaacagcgcccgtgccgccgtcggtgttggcccggtgacctggagcacgaagctgcagcagttcgcagagaagtacgccgcacagagggccggcgactgccgtctccagcactcgggcgggcctaccgggagaacacttct

SEQ ID NO: 67853 - DNA, 335 bp, Zea mays
  unsure (1)..(335): unsure at all n locations
canatctccaagctctcccaatttagaaacgagagatggccatgacgatgaccctcggttccatgctcatcgccgccgccgcagttgtcggcctgtgctccgtcgctcccgctgcatcacttcgcgaggagccactacagccgcagatcgtcggcgggtggaaaccgatcaagaacgtgaacgacccccacgtccaagagatcggccggtgggcggtttcggagcacatcaagacggccaacgacgggctgggcttcggcacggtggtgagcggcgatgagcagatccgtcgccggtaagaactacaggctgcgtattcaagcgacgaagtcggc

SEQ ID NO: 67854 - DNA, 334 bp, Zea mays
  unsure (1)..(334): unsure at all n locations
gcaagaacaaagagtgcaagaagcacacactccacaaggtgactcagtataagaagggcaaggatagcctgtctgcccagggaaagcgccgttatgaccgcaagcagtcaggatatggtggtcagaccaagcctgtcttctatnagaaggccaagaccaccaagaagattgttctgaagctgcagtgccagagctgcaagcactactcacagcacgccatcaagagatgcaagcattttgagattggtggagacaagaagggcaagggcacatctcttatctaagcttctcgtccacctgtctggtttgagttgaagctgtgggtctactacta

SEQ ID NO: 67855 - DNA, 160 bp, Zea mays
atcgcccggaaactgacctctaccgatgtctggagccggcgatgaggataagaagcccgcggagggcgcgccacatcagccttaaggtcaagggacaggatggcaatcaggtgtgctatcgcataaagaggtccacccagctgaagatgctgatggacgc

SEQ ID NO: 67856 - DNA, 333 bp, Zea mays
gacggagctgagcttctagcaacgtacagtgtatccgccatgagtcctttcggggcggtgatcacgccagaaaccctcaagtacatgtccaagtaccagggacgtgagatcacgcaggtggactgcgcacgggaggcgatgaggctgatccacgcggaagacaagaacctcaaggccgaggactcagcgtgggagctgaagaagaagttcggcaacggcgtgagcaccatggtcctcgtctacaacgccaccggggccagcctgagcctggtggacgacgggaaagactggatgggctccgtctacagctcgccgatcccggacaccttccac

SEQ ID NO: 67857 - DNA, 333 bp, Zea mays
gaaggcgggctggcaagacagactacagggccaggataaggctgattaaccaagacaaaaacaagtacaacacacccaaatacagatttgttgtgcgatttaccaacaaggacatcactgcccaaatcatatctgctagtatagcgggtgatatggttcttgcttctgcctactcgcatgagttgccacgatatggtcttgaagttggtctgaccaactatgcagctgcctactgcactggccttctgttggctcgccgtgctcaagatccgtggtttggatcaggagtacgagggcaatgttgaggccactggtgaggacttctctgttgag

SEQ ID NO: 67858 - DNA, 330 bp, Zea mays
gcgtgctgtggccaaagatacaactagagattatgaggatattatgcttgcaacattcaatagctacaaggatcagttcactcatgcaatcaacaaggatctgaaagctgaccccaaggatgagtttctttcaacactgcgggcgatcatccggtgcttcacctgccctgacagatacttcgagaaagtcattcgactggctcttggaggcatgggcactgatgaggatgacctcaccagggtcgtaactactcgcgccgaggtcgacctgaagctgataaaggaggcttatcagaagatgaacagtgtgccgctggagcgtgctgtggc

SEQ ID NO: 67859 - DNA, 336 bp, Zea mays
ccttgcaatcacaacgaacagaagctctcgatctcaccgacaccgaggaagaagagatcaatggcgtccgagcaaggagtcgtgatcgcgtgccacagcaaggctgagttcgacgcccacatgaccaaggcccaggaagccggcaagctggtggtcatcgacttcactgccgcctggtgcggtccatgccgcgccatcgccccactgttcgtcgaacacgccaagaagttcactcaggtcgtcttcctgaaggtggacgtggacgaagtgaaggaagtcaccgcggcctacgaggtcgaggcgatgccgaccttccacttcgtcaagaacggcaag

SEQ ID NO: 67860 - DNA, 334 bp, Zea mays
ctcctatctggtataggacggagctgagcttctagcaacgtacagtgtatccgccatgagtcctttcggggcggtgatcacgccagaaaccctcaagtacatgtccaagtaccagggacgtgagatcacgcaggtggactgcgcacgggaggcgatgaggctgatccacgcggaagacaagaacctcaaggccgaggactcagcgtgggagctgaagaagaagttcggcaacggcgtgagcaccatggtcctcgtctacaacgccaccggggccagcctgagcctggtggacgacgggaaagactggatgggctccgtctacagctcgccgatc

SEQ ID NO: 67861 - DNA, 334 bp, Zea mays
  unsure (1)..(334): unsure at all n locations
tggtgcacagacgagttgccagtcatgaacttttcagtcttgtanaattgggaaatttattgggaatggttgaacaagtggaacgccataaaaatgtgacagtgaagtatgcactacactatgatgtttggtttacgaaatgtaaggtaaatagcaatagtaataattcacatccgagtatcagtggtaataagtttgtatagtccggtatcaatttctagtgtggtatctgattatggttggatttaaataaatatgatttaacgttaaaaaaaaaaatgtctagagtaatgtgtcggatgtattgtgttgagttgggtaaaaatgaaggggg

SEQ ID NO: 67862 - DNA, 348 bp, Zea mays
agttccgcatgtcactgggtctaccggtggcggccacggtgaactgcgcggacaacacgggcgcgaagaacctctacatcatctccgtcaagggaatcaagggccgcctcaaccgcctcccgtccgcctgcgtcggcgacatggtcatggccaccgtcaagaagggaaagcccgacctcaggaagaaagtgatgcctgccgtcatcgtccgccagcgcaagccgtggcgtcgcaaggacggtgtctacatgtacttcgaagataatgctggagtgattgtgaatcccaagggtgagatgaaaggttctgcaatcactggacctatcggcaaggagtgtgctgaccttt

SEQ ID NO: 67863 - DNA, 376 bp, Zea mays
gctcatgcgacgaactcggaatcgctcgagaagccgccgccgccgccgtttcgcgcaccgtaccctagccctcgtcagcgacggcttcgagctcatccagccatgacgttcaagcggaggaatggcggacgcaacaagcacgggcgcggccacgtcaagtacatccgctgctccaactgcgccaagtgctgccccaaggataaggctatcaagcggttcttggtgaggaacattgttgagcaggctgccgtgagagatgtgcaggaggcctgtgtacatgatggatatgttctacccaaattgtatgcaaaggttcatcactgtgtctcatgtgcaatccatgcgcacattgtccgggtccgctctcgtgagaaca

SEQ ID NO: 67864 - DNA, 286 bp, Zea mays
ggtgcacagacgagttgccagtcatgaacttttcagtcttgtagaattgggaaatttattgggaatggttgaacaagtggaacgccataaaaatgtgacagtgaagtatgcactacactatgatgtttggtttacgaaatgtaaggtaaatagcaatagtaataattcacatccgagtatcagtggtaataagtttgtatagtccggtatcaatttctagtgtggtatctgattatggttggatttaaataaatatgatttaacgttaaaaaaaaaaaggatgaaa

SEQ ID NO: 67865 - DNA, 193 bp, Zea mays
acgcgattgagcacggtattgtaagcaactgggatgacatggagaaaatctggcatcacactttctacaatgagctccgagttgccccggaggagcaccctgtgttgcttactgaggctcctttgaacccaaaggccaacagggagaagatgacccagattatgttcgagactttcaatgttcctgccatgta

SEQ ID NO: 67866 - DNA, 191 bp, Zea mays
caagaacctcatcttcaacgttcaccctgttcttatgcttatcggttatgttattatcggcggtgaagctataatggtgtacagggtacttccaacatcgaatcatgacacaactaagctgatccatctaattctccacgggattgcacttgtccttggtgcggttggaatatactttgctttcaaaaatc

SEQ ID NO: 67867 - DNA, 350 bp, Zea mays
caagctgctgcagaccaggatcttctcctactccgacacgcagcgccaccgcctcggccccaattacctgctgctaccggccaacgcgcccaagtgcgcacaccacaacaaccactacgacgggttcatgaacttcatgcaccgccacgaggaggtcgactacttcccctccaggtacgacgccgccaggaacgcgcccaggtaccccatcccgaccgcccacattgccggccgccgagagaagactgtgattagcaaggagaacaacttcaagcagcccggggagaggtaccgcgcgatggacccagcaaggcaagagcggttcatcaccagatgggtcgacgcgctct

SEQ ID NO: 67868 - DNA, 349 bp, Zea mays
tccttctccacttctctctctctctcgtgacgacggcgattgcaacgactggggcgacagtcgctgccgccctacttgcccgttgcttcgatcgtcttcggcccgttagccgtcgacgagcaccaccagggcaaccagatacttcagtggcttcgcaaggatgacctggtgcactattgagtctgatcctggtgtgttcactgagctgattcagcaaatgcaagtgaaaggtgtacaggtggaagagctttactctctcgatgtgggctctcttagtcaactgcggccagtatatgggctaatgtttctcttcaagtggatacccggggagaaggatgaacggcctgtt

SEQ ID NO: 67869 - DNA, 348 bp, Zea mays
ctttgtggagcgagacaatgatgaagttggtgaaccagttgccaactactttggtcttactggacaagagaccacagttcttgcttacactggtaatgaagatgctaggaaatttttccttgatggcgaggtgtcacttgaagccattaaggacttcgctgaaggtttcttggaagacaaacttacaccattctacaagtctgaaccagtacctgaatctaatgatggggatgtcaaaattgttgttggaaagagtctggatgtaatagttttggatgaatcaaaagatgtacttctggagatatatgcaccgtggtgtgggcattgtcaatcactggagcctactta

SEQ ID NO: 67870 - DNA, 348 bp, Zea mays
ttcagcaactcggggaaggtcggtcttctctgtcagcatgagtggaggccaaagtccctcgtgactctttcagctgagtatgatccaaaggtggtaagtgcgccttcaaggatcggcgtggccatatcgctcaagccttgagatatgggtcaagtcaccttctgtaaaacagtacaagcgttacgtactgatactcgtgtccaagaacataaacttttggagcgatgcctagaacaaccctctcccttttagccttgtttttggtaagatccttgggcaaagaagtgttgtcagggagttggacttgttttgtggaatgtttccattaagagccaaccccacaccgat

SEQ ID NO: 67871 - DNA, 346 bp, Zea mays
gttcggagcgggcagcagcacacagccccatcccaatcctagtcgatcttcttcccctcctcaaggaagagaagaagctgaaccatggggaagagatagtcagctgctaagccacctcctaagaagcggatggacaagcttgacactgtcttttcctgcccattctgcaaccacgggagtagtgttgagtgtcgaattgacatgaagaatctgattggcgaacatcttgtagaatctgtcaggaaaacttcagcacaactgttaatgcactcactgagcctattgatattgaatggattgatgagtgtgagcgtgtcaacactgttgaaggcgacgatgatgcgtg

SEQ ID NO: 67872 - DNA, 326 bp, Zea mays
gcaccagccatggcgaagcgcagcttcttctctgtttcctactcgccgcctccgcgccgctaatcgtcgccacggccaagaaatccggggacgtgtcggagctccagatcggcgtcaagtacaagccggaatcatgcagcattcaagctcacaaaggtgacaaggttaaagttcacttccgtggaaaacttactgatggaacggtttttgattcaagctatgatagaggtgacccgattgaatttgaattgggcactggacaagtgatcaaaggatgggatcagggtctcctgggaatgtgcgttggtgataagcggaagtcgaag

SEQ ID NO: 67873 - DNA, 330 bp, Zea mays
gcacgcagttcacccaatctccgctgtccagctggagtggtcgctctggtcaagggatgttgaagctgacataatcccgacctgcaaggagcttggcattgggatagtagcctacagtccactgggcagagggttcttgtcgagtggtcctacgatggtcgacaagttgtccgatcaagatttccgcaaggagctgcccagattccagccggagaacctggagaagaacgccgtgatattcgagtgcgtcaacgcgatggcggcgaggaaggggtgcacgccgtcgtagctggcgttggcctgggtacaccaccagggagccgacgtgtg

SEQ ID NO: 67874 - DNA, 188 bp, Zea mays
ctgacagctctatgctggtggtgtttttttagtgaacattcatttctcgccagattaccccttcaaacctccaaaggtttctttcaagacaaaggtcttccatcctaatatcaacagcaatggaagtatatgccttgacattctcaaagagcagtggagccctgctttgacaatttctaatgtcctgc

SEQ ID NO: 67875 - DNA, 192 bp, Zea mays
gcggcgagttcaaatcacacaatcttcttgtagcacaccactgtcttcgtctaactcggcggcgatgtctggtgcgctgctaagggcagcaaaggtgctgtgcaagggcagcgcgaaacgccaccgtaaggttctccgcgacaacatccatggtatcacgaagccggcaatccggaggctggcgaggagggg

SEQ ID NO: 67876 - DNA, 340 bp, Zea mays
gcggctactttgatgtgagggaccaagatgatcagtggatccgtgtagcggtaaagaaagggggcatgatcgttctgcctgcaggaatgtatcaccgctttacgttggatagtgacaactacatcaaggcaatgcgtctatatgtgggcgagcctgtctggacaccatacaatcgtccgcatgaccatctcccggctaggaaggagtacgtcgagaaaatcatcaaccgaggtggaaaccaagccgtcgaagctcgttgagcgtgtccactctacatgtcctcctgccgtctcagcctcttgtgtttacactctacaactcctagtaccgccgaataaga

SEQ ID NO: 67877 - DNA, 342 bp, Zea mays
cagcgagatcgtgcgcgcctccgagatctccacgaagttgtggtaacatggggctcaccttcacgaagctcttgagacggctcgtcgccaagatagtgatgaggatccttatggttggtctcgatgcagctggtaagaccatcatcctcattaagctcaagctcggagaaatcgtgaccaccatccctacaatcgggtataatgtggagactgttgaatacaagaacattagcttcactgtctgggatgttggaggtcaggacaagatcagggcattgtggaggcactatttccagaacacccaaggccttatgcttgttgttgatagcaatgacagagatc

SEQ ID NO: 67878 - DNA, 185 bp, Zea mays
cgaatcgtctcgctcgtggctgctctactagtgctgcttgcactcgtcgccgtttcctccacgagcagcgcactatcaggagtccgtggctgactactcagggatgtaggcaggcggcatcaaggacgtgccggcgaacgagaacgacctcgagctccaggagctctcgtgcttcgccgtcaatg

SEQ ID NO: 67879 - DNA, 199 bp, Zea mays
cattgattagccaagtcgatgtcgtatcgtcggacaatctcgaacatagtgctggcaaccgtcatgagcagcgtgctgtcccgcagccgcggaccgaaggacgcttacaccaggtcctcaacgggctggcgcgcaagcagccccacgccaaggacgtcttcctcaagcccggccagaaggtgctcaactggacagaggg

SEQ ID NO: 67880 - DNA, 334 bp, Zea mays
  unsure (1)..(334): unsure at all n locations
gacgcctgctagccaggtcttcgccggcgacgagcactccaccagacgagaggggattccaagatgccgagggccaccagcgacgcgaagtccttgatcagtccctcggcaaggcgtacgctgccacaccaacaaatctcaagattattgacctctacgtgggttttgcggttgccactgcccttattcaggttgcttacatgggattggttgggtcgttcccttcaactccttcctctcaggagtcctttcatgcatagganactgcagtcttgctctgttgctcgcattcaagtgaacaagacaacaagaatcaaggacttccccagaaggg

SEQ ID NO: 67881 - DNA, 183 bp, Zea mays
ccggcctcggcgccgagatcatcggcaccttcgtgctcgtctacaccgtcttctccgccaccgaccccaagcgcaacgcccgcgactcccacgtcccggttctggctcccctccccatcgggttcgccgtgttcatggtgcacctggccaccatccccgtcaccggcaccggcatcaacccgg

SEQ ID NO: 67882 - DNA, 340 bp, Zea mays
cttctctctctgctcctccggctccgcctccgcctgatccatccaagacagggatcgccatgtcggactcggaggagcaccacttcgaatcgaaggccgacgctggggcgtccaagacctacccgcagcaggctggcaccgtccgtaagaacggcttcatcgtcatcaagaaccgtccctgcaaggttgtggaggtttctacctccaagactggtaagcatggccacgccaaatgccactttgtcgccatagacatattcaatgggataaagcttgaagatattgttccttcatcacacaactgtgacattccgcatgtgaactgtactgagtatcagct

SEQ ID NO: 67883 - DNA, 336 bp, Zea mays
ccgcgatcgaagctcctcacaaaccgttatcgtcgccatggcagccgccgtgcctgcaagctccgtgaaggaagtgctgccgtctccctgacctccgcctccgagccccctcccctcttcgatggcaccaccaggctgtacgttgcctatcattgcccgtacgcgcacgcgcttgtgattgccaggaactacaagggtttgcaggacaagattaagatagtcgccatcgatcttgctgacaggccaacatggtacaaggagaatggttatccagaaaacaaggtgccttctctggagcacaacaaccaggtgaaaggtgagagtctggatctggta

SEQ ID NO: 67884 - DNA, 340 bp, Zea mays
  unsure (1)..(340): unsure at all n locations
accggagacgccactcncacgaacgcgggcggcggaacggaagcgaaccagttatctagtggagctgactccttcaagctactctaatgtcctttctattcaagtctagcaatggcggcaccactgaaaaaatcccatccccagaagaacagcgagattaaataaatgaattacgcaaggagcttggtgaacactcatcagcagccattaaagacttcctttcagatgcctcgttagcgagatttcttcgagcaaggaactggaatgtgcagaaagctagtagaatgatgatagcagctgtgaagtggcggcttgcattcaaacctgaacacatctgttg

SEQ ID NO: 67885 - DNA, 342 bp, Zea mays
atccgatccatccaagccaagccaaggcagagaagaagaagaggaggaagaagaagcatcggcagcatgttcggaggggactgccaaactgcgtggacatcctgatcgccatcatcctgcctccgctgggggtgttcctcaagtacgggtgcggccacgagttctggatctgcctcctcctcaccttcctcggctacatccccggcatcatctacgccatctacgccatcaccaagaacacctagctagtcatccttgccgacgacgatccatgtctctgtatcggtgtctgttcatatgcctgatgccgacttgtgctgtatgtagttgcttgaattcagt

SEQ ID NO: 67886 - DNA, 340 bp, Zea mays
  unsure (1)..(340): unsure at all n locations
aanaggcataggcagcccatgaagcctgttacacgtgaggaagtagctgcaatgagggctcagtttaaggagatcgatgcccgcccatccaagaaggttgcagaggccaaggcccggaagaagcgtgttgccatgaagaaactggacaaggctcgccaaaaggcagatgctatagctgaccagaatgacataaacgagctatcgaagaggaagatgattgaccggatttacaggaaggcgatgccaacgaagcctcagaaggagtatgtcgttgcaaagaagggggttcaggtgaggactggcaaagggaaggtgttggtggatcacgtatgaagaagac

SEQ ID NO: 67887 - DNA, 326 bp, Zea mays
cttctctctctgctcctccggctccgcctccgcctgatccatccaagacagggatcgccatgtcggactcggaggagcaccatttcgaatcgaaggccgacgctggggcgtccaagacctacccgcagcaggctggcaccgtccgtaagaacggcttcatcgtcatcaagaaccgtccctgcaagttgtggaggtttctcactccaagactggtaagcatggccagccaaatgccactttgtcgccatagacatttcaatgggaaaagctgaagtatgttcctcatcaacaatgtgacatccgctgtgaacgtctgagtatcactg

SEQ ID NO: 67888 - DNA, 258 bp, Zea mays
cacgccgccgccatcgcacgcccgcatccgcatccgctatgggtgcgtacaagtacgtctcggagctatggcggaggaagcagtccatgtgatgcggttcgtgcagcgcgtgcgctgctgggagtacaggcagcagccggccatcgtccgcctcacaaggcccactcgtcctgacaaggcgcgccgctcggctacaaggccaagcagggttatgtgttacgtgtccggttagcgtgtggcagaaagccttgctaagta

SEQ ID NO: 67889 - DNA, 317 bp, Zea mays
cacaaatcgactagggcgtctgagactctgagacacaggaacagaaccctctctgcgccgccgccgacgttgcagtcgcggccacatcgtcgcatatccatcccaccggtcccactggcacgattcacaagaggtgtcgagatgtctcagaacaacccctcccagatcctcccctcagagctgatcgatcggtgcatcgggtccaagatctgggtgatcatgaagggggacaaggagctcgttggcaacctctgcggctttgatgtctacgtcaatatggtgctggaggacgtcaccgagtatgcatacactgctga

SEQ ID NO: 67890 - DNA, 329 bp, Zea mays
tgcacttctaagacgatgccgtatcttagttcttgatgaggccacggcatctatagacaacgctactgatgctatccttcaatagacgatcaggacagagtttagagattgcactgtcatcactgtcgcacaccgtatacccaccgttatggactgcgatatggtacttgcaatgagtgacgggaaagtagtggagtacgacaagcctacaaagctcgtggaaaccgaacgatctctcttccgtgatcttgtcacggagtactggtcatacgcatcgaattgaattatctaggaggaactgtcgacatcacatgtgcactcgttgcagt

SEQ ID NO: 67891 - DNA, 342 bp, Zea mays
cttgctcagggcattctccaacatgaccccttcgaggtcctggaccagaggggagtgggcgagctggtgaagcttgctacagagaggggccgcaagctaggcctaattgaaggtgggcatttgtggagaacacggtggagagccttcctctgtggccttcttcgcgaaggctgggctggattacgtttcttgctcccctttcagggttccgattgctaggctagctgcagctcaggtgcttgtctgaggctgcctcctcattggcaaccggattgcctgctgctggtggatgtggtgatcaacagtattattacagagccatgctatgtgaacattactagt

SEQ ID NO: 67892 - DNA, 342 bp, Zea mays
  unsure (1)..(342): unsure at all n locations
ataacttcttgccatgctgcatgtttcattctaatctatattgtttctattcagattgccatctctgcatccaacactggaggtgcctgggacaacgcaaagaaatacattgaggctggtgnatctgagcatgcaagaaccttgggcccgaaaggttcagacccacacaaggctgctgtcatcggtgacaccatcggtgatcccctcaaggacacctcaggcccctcgctgaacatcctcatcaagctcatgggctgtcgagtcccttgtcttgctcccttcttcgccacccatggaggcatcctcttcaaatggnttagaggaagatggaagatggatggg

SEQ ID NO: 67893 - DNA, 307 bp, Zea mays
gagcctccctcagccgcgtcgcgtcgcatcctacgatccaaagctctctctgctcgcagccatggcgaagaactacacgaccgtgagcgccgagtacagcgaggctgtggagaaggccacgcgcaagctccgagccctcatcgccgagaagagctgcgcaccgctcatgctccgcctcgcgtggcactccgcggggacgttcgacgtgtcgtcgaggaccggcggtccattcggcacgatgaagcatcagtcggaattggctcacggcgctaacgcggggctggacatcgcggtgcggctgctcgag

SEQ ID NO: 67894 - DNA, 342 bp, Zea mays
ctcagaagcgggttggcttctcctcccccaccggttcgtgttcaggttctggttcgtgggcgagagggaagagatggcggcgtcggacgttgagtaccgttgcttcgttggcggcctcgcctgggccaccgacgaccactccctcaacaaggccttcagcacctacggcgaggtcctcgagtcgaagatcatcctggatcgggagacgcagaggtcccgcggcttcggcttcgtcaccttctccacggaggacgcgatgcgcaggccatcgagggcatgaacggcaaggagctcgacggccgcaacatcaccgttatacgaggccagtcccgcggcggccgc

SEQ ID NO: 67895 - DNA, 334 bp, Zea mays
gcagcattttcaggatggtgcttacgctgaggatcttgcaaatttccatgaacgcagccacgctgatgattggtttggccatgctatcatggatatccgcgtaggttggaccaaaaatttgtgctcaagtagagatttacccagctgcagtctacttgacattgggactgggagtggcagactcttgcagcagcttgcgaagcaggggttttctgatctgactgggattgactatagtgaaagggcaattgagcttgctcgtagccttgcactcggtgatgggtttgagcacattaatttcttggttgatgatgttttggagtcgaagttggag

SEQ ID NO: 67896 - DNA, 275 bp, Zea mays
gcggctacgttgatgtgaggtgccatgatgatcagtggatccgtgtagcggtaaaagaatgaggcatgatcgttctgtccagacgaaatcgatcaccgctttacgttggatagtgacaactacatcaaggcaatgcgtctatttgtgggcgagcctgtctggacaccatgacaatcagtcgtactgacatcttccggctaggaaggagtacgtcgagaacatcatcaaccgaggtggcaaccaagccgtcgaagctcgttgagcgtgtccactct

SEQ ID NO: 67897 - DNA, 297 bp, Zea mays
gcggcgagttcaaatcccacaatcttcttgtagcacaccactgtcttcgtccaactcggcggcgatgtctgggcgcggcaaaggccggacaggggctgggcaacggcggcgcgaaacgccaccgtcaggttctccgcgacaacatccagggtatcacgaagccggcaatccggaggctggcgacgaggggcggcgtgaagcgtatctccgggcttatctacgagggaacccgcggcgtgctcaagatcttcctcgagaatgtcatccgcgacgcgctcacctacaccgagcacgctc

SEQ ID NO: 67898 - DNA, 334 bp, Zea mays
cgtcaaccgcggcctctgcgccatcgcgcaggcatgagtccctccgctacaagctcctcggaggccttgccgtccggatggcctgcttatggtgttcttcgcttagttatggagagtggtgccaagggttgtgaggtcattgtgagtggaaagctcagggctcaaagagccaagtccatgaagttcaaggatggctacatgatctcatctggtcagccagtgaatgagtacatcgactcagctgtgagacacgtcctcctcagacagggtgttctgggtatcaaggtgaagatcatgcttgactgggacccgaaggcaaggttggccgatcacc

SEQ ID NO: 67899 - DNA, 341 bp, Zea mays
ccaggagggtcatctatgcctctcagctcacggccaagccaaggctgctggagccagtctacctggtggagatccaggctccagaaaatgcacttggtggtatctacggtgttctgaaccagaagagaggtcatgtctttgaggagatgcagaggccgggtaccccgctctacaacatcaaggctttcctccctgtcatcgagtcctttggtttctccagccaactgagggccgcaacctctggtcaggcgttcccccagtgtgtctttgaccattgggacatgatgggctcagatcctttggaggccggctctcaggctgctcagctggtgctggatatc

SEQ ID NO: 67900 - DNA, 328 bp, Zea mays
tgccgtcagtgccgttcgcgctgctgcaggcgccggtcgagagcacctaccgcgactgcaacatgccctaacgtttccactcctgaaacccgcgaaacgccacacctgtcgagatcaatggattgacctctttctcaactgctgtccgtccttcaaacagcgagcggagaacgaccccaccgtacccgatgcgcccgcgaaagcgatgaagttagcgcagaagtacacgtcaatgcttgaagagttgaagacgaatccggagagccatggaggaccaccagattgcatacttctctgtaagcttcgtgaactagtactcagacagctg

SEQ ID NO: 67901 - DNA, 330 bp, Zea mays
  unsure (1)..(330): unsure at all n locations
gcatgacacgtcgagaccattcggatgtatctaatcagctttatgccaactatgctattggaaaggatgttcaggccatgaaagctgtcgttgggagaggaggcactctcgtctgaggatctgctttacttagagttccttgacaagtttgagaggaagtttgtgacacaaggagcatatgacacacggaacatcttccagtcactcgatcttgcatggacattgcttcggatcttccctcgcgaacttctccaccgtattccagcaaagaccttggaccagtactatagcagagatgcttcncactgaatcactgatcgttgatcagtg

SEQ ID NO: 67902 - DNA, 329 bp, Zea mays
gcggtggcaaccgtggcggctgctacggcaactccgacgggaactggaggaactgagcggtggggcccgcgcggtcaagttatcctgttcgctaccgtgatgtttaccctagtccagagggtttatcttcgttcgtctcgtttgttgttgtacatctgtgtttttgattgcaaggtcgctctgtgtcagttgttagtgctgtgttcatcctcggctccagcagacccatgcatcaaccagcatggactgtggatcgatggatgctgttactcctgtcaggatttgttctaagttaatcctaaggaaaaaatggtgcttcttggtgctgc

SEQ ID NO: 67903 - DNA, 330 bp, Zea mays
gttcgctctcctgatcgtcctgttcctcagagcagcagccatggcggacggagcggagaagcaggcggccctcgcggcacaggacacggcagtgaacatcgcgtacgtgagacggcccgaggacgccgaccctgaggagttgcacatacgtactctcagccccgtcctcggcagcgaacagaaggccagggacgcagtgctctagcattacaagaacgctgccagcggcttctccgcgaagtcaacccccagcaggtcaaggatctcaaggagcaaccaggtgttctccaggttgtgccgatccagacttaccagctacatggtcctggg

SEQ ID NO: 67904 - DNA, 334 bp, Zea mays
aatcctcaagaagtatgacggcaggttcatatacatcttccaggaggtatatgaagagcaatggcaggagacgatttgaaggaaacctcaatataggtatgagcacaggttgattgatgacatggtggcctatgctgtgaaaagtgatggtgggtatgtttgggcttgcaaaaactatgacggagatgtacagagcgattttcttgcccaaggttttggttctctgggtttgatgacttctgtgctgttgtcttctgacgggaaaacattagaggctgaggctgctcatgggactgtcactagacatgtcaggctacatcagaaaggacaggag

SEQ ID NO: 67905 - DNA, 336 bp, Zea mays
  unsure (1)..(336): unsure at all n locations
agacctccctcagccgcgtcgcgtcgcatcctacgatccaaagctctctctgctcgcagccatggcgaagaactacccgaccgtgagcgccgagtacagcgaggctgtggagaaggccaggcgcaagcaccgagccctcatcgccgagaagagctgcgccccgctcatgctccgcctcgcgtggcactccgcggggacgttcgacgtgtcgtcgaggaccggcggtccattcggcacgatgaagcatcagtcggaattggctcacagcgctaacgcggggctggacatcgcggtgcggctgctcngagccatcaaggaggagttcccaatcctctc

SEQ ID NO: 67906 - DNA, 332 bp, Zea mays
tcgggctgttcttagccaggaagctgtccctgactagggccctcttctacatcatcatgcaatgcctgggtgccatctgtgggactagagtggtgaagggcttccagcagggactttacatgggcaacggtggtggcgccaatgttgtcgcacctggctacaccaagggtgatggccttggcgctgagattgttggcaccttcatcctagtctacaccgtcttctcagccaccgatgccaagaggaatgccagggactcccatgttcctatccttgccccactgccaattgggttcgcggtgttcctggtccacttgccaccatccccatta

SEQ ID NO: 67907 - DNA, 325 bp, Zea mays
cgcctccgctccgcccacggttccactccaactctccgatctccaggaatccgcggctgatgcgccggcgatggcaggtcccatggtcgacgccgaatacctgcgccaggtcgacagggcgcgccgccacctccgcgccctcatctccaacaagggatgcgccccgatcatgctccgcctcgcatggcatgatgctggaacttatgacctgaagacaaaaactggtggtgcaaatggttcgattagatatgaagaagagtacacccatggttcaaatgctggtttaaagattgctatcgatctccttgagcctatcaaagcaaag

SEQ ID NO: 67908 - DNA, 331 bp, Zea mays
aatcctcaagaagtatgacggcaggttcaaagacatcttccaggaggtatatgaagagcaatggaaggagaagtttgaaggaaactcaatatggtatgagcacaggttgattgatgacatggtggcctatgctgtgaaaagtgatggtgggtatgtttgggcttgcaaaaactatgacggagatgtacagagcgattttcttgcccaaggttttggttctctgggtttgatgacttctgtgctgttgtcttctgacgggaaaacattagaggctgaggctgctcatgggactgtcactagacatttcaggctacatcagaaaggacaggag

SEQ ID NO: 67909 - DNA, 327 bp, Zea mays
gcgcctcgaaacctgagtatttggagattggtatcattgctggtgttcctgtttcaatcaatggccgagacctctcaccagcattcgctcctcgcggagctcaatgaaatcggtggaaagcatgggattgggcgtatcgacatggtggaaaacaggctggtcggcatgaagtcacgtggggtctatgagacccccggtggcaccatcatggcagccgcggtacgcgagttggagtccctgaccctggacagggagaccatgcagtggaaggacatcattgccctcaagtacgccgagctggtctatgctggccgctggtttgacccg

SEQ ID NO: 67910 - DNA, 328 bp, Zea mays
atccgatccatccaagccaagccaaggcagagaagaagaataggaggaagaagaagcatctgcagcatgtccgaggggactgccacctggtggaaatcctgatcgccatcatcctgcctccgctgggggtgttcctcaagtacgggtgcggccacgagttctggatctgcctcctcctcaacttcctcggctacatccccggcatcatctacgccatctacgccatcaccaagaacacctagctagtcatccttgccgacgacgatccatgtctctgtatctgtgtctgttcatatgcctgatgccgacttgtgctgtatgtagttgc

SEQ ID NO: 67911 - DNA, 328 bp, Zea mays
ggaaatagatggtgttcactaccacttcacagaaccaatcaagatagagaaagatataagcgagggcaaatttcttgaattcgctcatgttcatggaaatgtgtatggcacaagtatcgaagcagtcgaatctgtaactgatgagggaaagaggtgtattctcgacattgatgtccaaggagctcgatccgtgagggcttcttctcttgaagcaatattcatctttgtatgccctccatcattcgaggaactagagaagcgccttcgggcacggggtactgaaacagaggagcaaatccagaaacgactcagaaatgctcaggctgaa

SEQ ID NO: 67912 - DNA, 278 bp, Zea mays
  unsure (1)..(278): unsure at all n locations
gccggaggatctgccccgggatgaacttcggattcgcgaccatggagatcatgctggccaatctcatgtaccattttgattggggaggttccgggctctgcagcaggggtgtccatggacgagtcctttgggctgacgcttcgccggaaggagaagcttctccttgttccaaggattgcttcctgataatcctacatctgtaaaacttgtgtcttgctagctgtaccgggaacaagattaaataatgcaaggaatanagtgactctgttcttcgtcag

SEQ ID NO: 67913 - DNA, 244 bp, Zea mays
gcttgatcaactcgacaagatttttaaggtcttaggccaccctacagttgaaaagtggcctacccttgccaatcttccatggtggcaaaacgaccaccaacacattcaaggacataagtatgagaacccaggtttccataacattgttcatttaccaccaaagagtcctgcatttgatcttctctcaaaaatgcttgagtatgatccccgaaagcgtataacagcctcacaagcattgtgagca

SEQ ID NO: 67914 - DNA, 227 bp, Zea mays
ccatcttcccgtgggatcccagtcgccgccgcaagaagaagagctcggggacttccaggtctcgcgagaagatggtcctagtgttgccgacatcgctgacggacccagacaatgttattgtgctctggttttgtacaatctctgtccgaagcagatccacgagatcaaggatttccttctcaccgcgtagaggaaggatgcccggacagtgaagatcaagaggagca

SEQ ID NO: 67915 - DNA, 221 bp, Zea mays
aggacccggacaagcgcgaccaggttcggcgggagcatgtctacaagatgaaggagcggtgcgagcgcactaaggcggcgtggagcctccctctgcgcccctacggcttctggaccttcgaccgcttcaactcgcagctctcctgggatccccaggtcagccaggccgccggccgtcgggacccctacgacgacctcatcgcccgccactctggctcgccg

SEQ ID NO: 67916 - DNA, 222 bp, Zea mays
cggctcgagttcccaatagctatttggaagcagagctgcctcctaactacgatagggttggaatagagaatttcatccgtgcaaaatatgaggacaagagatgggtaccaaggaatggaacatcaaaatcttcgtccagtgttcgagatgagaagagccaagagttccccggctagtgctaataggaagtggacatgggtcatagatcttcatatgggcaaa

SEQ ID NO: 67917 - DNA, 248 bp, Zea mays
gttcaatcttgcaaaggatgacgacgtgcgcaagtacgtgaacacgtaccgcaggacattcactaccaagaatggcaagaaggtgagcaaggcacctaagatccagcggcttgtgacccccttgaccctccagaggaagcgtgctagaattgctgacaagaagaagaggatcgctaagaagaagtctcaggctgctgagtacccaaaacattctttcccaaaggcttgaagaacagagggaccgccgc

SEQ ID NO: 67918 - DNA, 247 bp, Zea mays
tcggctcgcaggctagcagcacagcagcagccagagccatcccctctcctcgctacgcttcgcttcctcggcgccgattcctcctcctcctcctccaccctcgtccgtccccttccggcgcacgagctcgcccgagatggcgaacgcgagatcgggtgtcgctgtgaacgatgagtgcatgctgaagatttggcgagctgcagtcgaagaggcctcaccgcttcataactttcaagatgacgacaag

SEQ ID NO: 67919 - DNA, 241 bp, Zea mays
cgccgtcatcttcccggcccccgcgctcgtcggcgccgccgaggaggaccgcgccgaggccgcgtacccgagcttcgtgttcgaagactacatgaacctgtacgtgcgccacaagttcgaggccaaggagcccaggttcgaggccatgaagtcggccatcgccaccgcgtgagcaaagactgacttccgctcccggcttccttcgtggcgtcaagccttgaggcttgaacgaacaacgtac

SEQ ID NO: 67920 - DNA, 152 bp, Zea mays
ctcagaggcgggttggcttctcctcccccaccggttcgtgttcaggttctggttcgtgggcgagagggaagagatggcggcgtcggacgttgagtaccgttgcttcgttggcggcctcgcctgggccaccgacgaccactccctcaacaacg

SEQ ID NO: 67921 - DNA, 164 bp, Zea mays
gcgcctctacatttcttctctcgctgctcgtccgcctccgccagatccatccagtacagggatcgccatgtcggactctgaggagcaccacttcgaatcgaaggccgacgctggggcgtccaagagctacccgcagcaggctggcaccgaccgtaagaacggct

SEQ ID NO: 67922 - DNA, 251 bp, Zea mays
tgggtttgatgcaagagggaacatcaaggttctcatggccactagtaggcctgataccttggatcctgcacttctgcgccctggtcgcttggacagaaaggtggaattcgggctacctgacttggagggccgtacccaaattttcaagatccatacacgtaccatgaactgtgagcgagatatacgattcgagcttctggcacggctctgccccaactctactggagctgatagaaggagcgtttcacaga

SEQ ID NO: 67923 - DNA, 224 bp, Zea mays
gttcccctctcctgatcgtcctgttcctcacagcagcagccatggcggccgaaccggagaagcaggcggcccccgcggcacaggagacggccgtgcacatcgtgtacgttgaccgccccgaggacgccgaccctgaggagttccacatccgcaccctcacccccgtcctcggcagcgaacagacggccagggacgcagtgctctaccactacaagaacgccgcc

SEQ ID NO: 67924 - DNA, 253 bp, Zea mays
ggcggcttaaaccctagttctcactcccatcgccgcttcagctccgccgcagcagatggagttctggggtctcgaggtcaagcctggttccactgttaagtgtgagcctggatatggctttgtgctgcacctttcccaggctgctcttggggaatcgaagaagagtgataatgccttgatgtatgtcaaaattgatgatcataaacttgccattggaaccctctctgttgacaaggacccacacatacaattt

SEQ ID NO: 67925 - DNA, 265 bp, Zea mays
  unsure (1)..(265): unsure at all n locations
aaaaggttctgaccctcacaaggcggctgtcattggtgacaccattggagatcctcttcaaggacacgtctggcccttccctcaacatcctcatcaagcttatggcggttgaatcccttgtcttcgcccccttcttcgctgcccatggtggcattctcttcaaatggctctaagccagcgagatacgcaggataaaggccgtagttttgcaaggcgagtagagcagnatgtcagtaatacagcatctatgcaangncttttcncg

SEQ ID NO: 67926 - DNA, 236 bp, Zea mays
gccggaggatctgcctcgggatgaacttcggattcgcgaccatggagatcatgctggccaatctcatgtaccattttgattgggaggttccgggctctgcagcaggggtgtccatggacgagtcctttgggctaacgcttcgccggaaggagaagcttcccctagttccaaggattgttcccaaatatccctacatctgaaaaacttgtgtcttgctagctgtaccgggaacaaga

SEQ ID NO: 67927 - DNA, 240 bp, Zea mays
gccggaggatctgccccgggatgaacttcggattcgcgaccatggagatcatgctggccaatctcatgtaccattttgattgggaggtccgggctctgcagcaagggtgtccatggacgagtcctttgggctgacgcttcgccggaaggagaagcttctccttgttccaaggattgcttcctgataatcctacatctgtaaaacttgtgtcttgctagctgtaccgggaacaagattaaa

SEQ ID NO: 67928 - DNA, 244 bp, Zea mays
attgagatcccagggcagctctggtggctgatgagatagcggacaggctgaattcttctccttcggcacgaacgacctgacgcagatgacctttgggtacagcagggatgatgtggggaagttcattcccgactatcttgctcagggcatcctccaacatgaccccttcgaggtcctggaccagaggggaagtgggcgagctgatgaagtttgctcaaagaggggcctaaaagctaggccaaac

SEQ ID NO: 67929 - DNA, 335 bp, Zea mays
aaatccccaaagcctccgacccccttcctctctccctccgccgccgctgcgcacgcagggaacaagcgacatgggcgtctacacctttgtgtgccgcaacaacggcggcgagtggaccgccaagcagcactccggcgagatcgaggcttccgccgctaccccatacgagctgcagcgccgcctcgtcgctgccgcctccgcggccgactctgcctacggcgtccagtcgtccttctccatggtcacccccagctccgccgtgttccaggtgatcgtcggtgctgtcggtcgtggtgcaatgatggtgagccggagtggcggcggcggtgctgctg

SEQ ID NO: 67930 - DNA, 293 bp, Zea mays
gcagatttgggtggttttaatggggaagctgatgatgacgacaacgtggaactagagaaaagcaatgtgctgttaatgggacctactggctctggtaaaactttacttgcaaagacattagctcgttttgtgaatgtaccatttgtaattgctgatgcaacaacattgacccaggcagggtatgtaggagaagatgtagaatctatattatacaagttactcacggtggcagattttaatgtgcaagcagcacaacaagggatggtgtacatagatgaagttgataagatcac

SEQ ID NO: 67931 - DNA, 321 bp, Zea mays
tctcgctccagccgcttcacagcgccgccgctcgcctctccgaccgccgcgagaatgccgttcaagaggttcgtggagatcgggcgcgtggccctggtgaactacggcaaagactatggccgcctcgtcgtcatcgtcgatgtggtcgaccagaacagggcacttgtggacgcccctgatatggtcaggtgccagattaacttcaaacggctctcacttactgacatcaagattgacatcaaacgcgttcccaagaagtcaaccctgatcaaggctatggaggaagctgatgtgaagacgaagttggcaacagctcatggg

SEQ ID NO: 67932 - DNA, 313 bp, Zea mays
gcgacgatgatctgcatagacaactcggagtggatgcggaacggcgactacgccccgtcgcggttccaggcgcaggccgatgccgtcaacctcatatgcggtgccaagccccagtcgaacccggagaacacagtaggcgtgatgacgatggccgggaagggcgtccgcgtgcttgtcactcccaccagcgacctcgggaagattctcgcctgtatgcacgggttggaagttggtgctgaggcaaacttggctgcggcaatccaggttgctcagcttgcgctaaagcatcgccagaacaagaggcagcagcaga

SEQ ID NO: 67933 - DNA, 317 bp, Zea mays
ctggagaagctaaggaacaaaaggctgatgtttgtgggtgattctctgaatcggaaccagtgggagtcgatggtgtgcctggtccagtcagaggcaccatgggacaaaaaatctctcgtcaagaatggttctcttaatgtcttccatcttcaggagtacaatgcaacagttgagttctactgggctccgttcctagtggagtcaaactcagacgacccagacattcacagcatcagcgaccgcatgatcaagccgacatcgatcgcgaacatgcggcaaactgggaaggcgtggactacctgatcttcaacacttac

SEQ ID NO: 67934 - DNA, 321 bp, Zea mays
ctctgggctaatttatagggcaatgggattccctacagaattttttcctgtgctgtttgctattcctcgcatgggtggctggctagcgcattggaaagagtcactcgatgatcctgacactaagattataaggccccaacaggtatacacctgcttctggcttaggcactatacccccgtcagagaacgagtgctatcaagccagagtgaggaacttggtcaggttgccacctcaaacgcactatggcgccgccgtgctggttctgccctgtagaagctgcagcgcataaacgcaccggcatactcaataaacatcgacca

SEQ ID NO: 67935 - DNA, 313 bp, Zea mays
  unsure (1)..(313): unsure at all n locations
ctctcttctctccccgcggcccgtgactcatccacccacagtccactcgccactccccccggaannnnnnnnnnnnnnnnnnnnnnnnnntaacgcaagatggcgaggaaacctctcgactacgaggagctgaacgagaacgtcaagagggtgcagtacgcggtgcgcggggagctgtacntccgcgcctccgagctgcagaaggagggcaagaagatcatcttcaccaacgtcggcaacnngcacgccctcggccagaaaccgctcaccttcccgcgccaggtggtggcgctgtgccaggctccgttcctcc

SEQ ID NO: 67936 - DNA, 298 bp, Zea mays
cgaatcgtctcgctcgtggctgccctactcgtgctgcttgccctcgccgccgtttcctccacgcgcagcaccaaaaggagtccgtggctgacaacgccgggatgttggcaggcggcatcaaggacgtgccggcgaacgagaacgacctccagctccaggagctcgcgcgcttcgccgtcaatgagcacaaccataaggccaatgctcttctggggttcgagaagcttgtgaaggccaagacacaagttgttgctggcacgatgtactatctcactattgaagtgcaagatggcgtagt

SEQ ID NO: 67937 - DNA, 319 bp, Zea mays
cggccacgaatatctcggtcgccaattgctgtatactcttaccttcgccttcgccgccgccgccgtacagtctagagagaaccggcacagccgccgcagtccgcagatgtcgatcgtggtggcatcggaggtcgcgaccgctctcgcgagccgcggtgcggtcgtcgccctcgagtccaccatcatctgccacggtatgccgtacccgaagaatctccagatggccatggaggtggaggccatcatcagggacaacggggctatccctgcaaccatagccgtcctggacggagtccctcacgtcggccttaacaacgaa

SEQ ID NO: 67938 - DNA, 314 bp, Zea mays
caatttgttgacatatgaatgcgtgaagcattggatcccaaagaactccaaaatgcgataaggccttgaatggactagtatcatgattgggagaccatcctgagaagctccatcaagcatgccttgttcacgcgtttcttaagaggcccttttcctgcactgttgatggttgcccctttagctatagcaggaaggctcatttgaacagacatttacttactcatgaagggaaactatttgtgtgccctgtcgaaggatgtggccgtaagttcaatatcaagggtaatatgcagagacatgttcaggaaatccac

SEQ ID NO: 67939 - DNA, 318 bp, Zea mays
cctcccgacccactatcccaaaaccgtagcgccctcgcctgctcgccgccgccgtcgttgcgagctccccatcttcctccgtcaaccatggcgacccagatcagcaagaagaagaagttcgtcagcgacggcgtgttctacgccgagctcaatgagatgctgacgcgggagctcgcggaggacggctactccggcgtggaggtgcgcgtcacaccgatgcgcacggagatcatcatccgcgccacgcgcacgcagaacgtgctcggcgagaagggccgcaggatcagggagctcacgtctgtcgtccagaagaggttc

SEQ ID NO: 67940 - DNA, 309 bp, Zea mays
gttgaacataatggctggcaaggactctgggcaggtaatacaataaatatgctccggattatcccaactcaagcaattgagctcgggacatttgaatgtgtcaaaaggagtatggcctcggcacaagagaaatggaaagaggaaggctgcccaaagatacaactcggcgatttgaaaattgagttgccatttcacttactatcgccgattgcgcattggaggtgcggcactggaatagctagcacttggtgtgtcatcctctgaggttcttaaggatcgcatgactgtcaaccgtgaggcttatcctag

SEQ ID NO: 67941 - DNA, 317 bp, Zea mays
agatcgtgctggcgaacccgggcagcgagatcatgaagaagctggacagctccaaggtgctggagcagatcggccacgagtgggtgttcccgacggtgggcgaggcggtggcgtcgtgcgactacgtgctgcactcgcacaagccgggaatggccaaggacagcgccgccgcccacgagagcatggtgtgacgagcaccgccacgccaaccgtatgtgtagtgtgctccggttccggtctgacgtaaccagtcgtcacgcggaccgagatgaattatgtatacacgtgtctcgagtattgtacacctgcaccgtcgc

SEQ ID NO: 67942 - DNA, 310 bp, Zea mays
gcggcgagttcaaatcccacaatcttcttgtagcacaccactgtcttcgtccaactcggcggcgatgtctgggcgcggcaagggcggcaaggggctgggcaagggcggcgcgaaacgccaccgtaaggttctccgcgacaacatccagggtatcacgaagccggcaatccggaggctggcgaggaggggcggcgtgaagcgtatctccgggcttatctacgaggaaacccgcggcgtgctcaagatcttcctcgagaatgtcatccgcgacgcggtcacctacaccgagcacgctcgccgcaagaccgtc

SEQ ID NO: 67943 - DNA, 318 bp, Zea mays
ggttgatgctgtagtatacctggtagatgcatatgataaggagcgatttgctgaatcaaagaaggagctcgatgctctcctgtctgatgattctttggccaatgttccatttctcatccttggcaacaagattgatatcccatatgctgcctctgaagaggagctacggtatcacctaggccttagcaacttcacaaccgggaagggcaaggtcaaccttggcgactccaatgtccgtccacttgaggtcttcatgtgcagtgttgttcgcaagatgggctacggtgatggtttcaagtgggtctcccagtacatcaa

SEQ ID NO: 67944 - DNA, 312 bp, Zea mays
cgtcaaccgcggcctctgcgccatcgcgcaggctgagtccctccgctacaagcagctcggaggccttgccgtccggagggcctgctatggtgttcttcgctttgttatggagagtggtgccaagggttgtgaggtcattgtgagtggaaagctcagggctcaaagagccaagtccatgaagttcaaggatggctacatgatctcatctggtcagccagtgaatgagtacatcgactcagctgtgagacacgtcctcctcagacagggtgttctgggtatcaaggtgaagatcatgcttgactgggacccgaa

SEQ ID NO: 67945 - DNA, 312 bp, Zea mays
caaagttaaatatgagcttgacaagaaaactggactgattaaggttgatcgagtcctgtactcatcagttgtataccctcacaattatggtttcgttccaaggactctttgtgaagacaatgacccaatggatgtgttagtcctgatgcaggagcctgttgttcctggttcgttcctgcgagcaagagcaatcggccttatgctcatgattgaccagggtgaaaaggatgacaagataatagcagtctgtgctgatgatcctgaatatcgtcactacaacgacatcagtgagctgtctcctcatcgcctgca

SEQ ID NO: 67946 - DNA, 257 bp, Zea mays
gcggtggcaactgtggcggcggctacggcgaactccgacgggaactggagggactgatctgtggggctcgcgcggccaagttatcctgttcgctaccgtgatgtttaccctagttcagagggttgatcttcgttcgtctcgtttgttgttgcgcatctgtgtttttgattgcaaggtcgctctgtatcagtcgttagtgctgtgttcatcctcggctccagcagatccatgcatcaagcagcatagactgtggatcg

SEQ ID NO: 67947 - DNA, 315 bp, Zea mays
tgtgcaagaagggcacatgaggccaagcagaagggaaggcactctggatacggcaagcgcaggggtaccagggaggctaggctccccaccaagattctagggatgaggaggatgcgtgttctgaggcgcctgctccgcaagtaccgtgaggccaagaagatcgacaagcacatgtatcatgacatgtactagaaggtcaagggtaatatgtttaagaacaagagggtgcttatggagagtatccacaagtccaaggctgagaaggccagagagaagacactttctgatcagtttgaggccaagcgtgcaaagagc

SEQ ID NO: 67948 - DNA, 321 bp, Zea mays
cgaatcgtctcgctcgtggctgccctactcgtgctgcttgccctcgccgccgtttcctccacgcgcagcccacaaaggagtccgtggctgacaacgccgggatgttggcaggcggcatcaaggacgtgccggcgaacgagaacgacctgcagctccaggagctcgcgcgcttcgccgtcaatgagcacaaccataaggccaatgctcttctggggttcgagaagcttgtgaaggccaagacacaagttgttgctggcacgatgtactatctcactattgcagtgaaggatggcgtagtcaagaagctttatgaagctaagg

SEQ ID NO: 67949 - DNA, 314 bp, Zea mays
ctcgagccgaatcggctcgagtccgccaccgccgccgctctacgacgagacgcccaggtctatcgccaacgacgagcatccacgttagagaggaagaaattgcaaccgaaacaatggcggcagattccggcgctcgcagacaaccaagcttcaccaaggtcgaccagctgcgccctggaacccacggccacaacctcatcctcaaggttgttgactccaagatggtcgtccagagaggccgcgagggatggccccagggaagacagatgaggattgcggagtgcttggttggtgatgaaacggcatcttgtctt

SEQ ID NO: 67950 - DNA, 310 bp, Zea mays
ctggtataggacggagctgagcttctagcaacgtacagtgtatccgccatgagtcctttcggggcggtgatcacgccagaaaccctcaagtacatgtccaagtaccagggacgtgagatcacgcaggtggactgcgcacgggaggcgatgaggctgatccacgcggaagacaagaacctcaaggccgaggactcagcgtgggagctgaagaagaagttcggcaacggcgtgagcaccatggtcctcgtctacaacgccaccggggccagcctgagcctggtggacgacgggaaagactggatgggctccg

SEQ ID NO: 67951 - DNA, 311 bp, Zea mays
gcggacaccaaccaaacgaatttcccctccaaaagcgagctctagagccacgcgcacgaattcgccctcgcgcgctgtctcgcagcgcgcctcgtccctccctcctggctgtacggcggcgggacggaccggatcccgctccatggcggagggcttcgggcggtgggagtcggatctgctgttccccgccgccgaatgcgtgcaggattccgccgatagaatggagggtgtctaccgcttacttttgcatgaaaggaaagttatgcaggatggtacttctgatgcaaagttccatgctccaatacaatatg

SEQ ID NO: 67952 - DNA, 310 bp, Zea mays
gtaccgtctggatggtgccaagatcatcaagatcttcttggacccaaaggagaggaacaacacagaatacaagctggacacctacactacggtctaccgcaggctgtgtgggaaagatgtggtctttgagtaccctatggccgaaaatgcataaatatgacgcccggatatccccattttattttgttgaatctggatgtttctttggggtctcaactagactgctccgtatgtacttcaaaaaccatagttttgatgccaaagttgttgcctaggaatttggtactcgggaattggtagcggacctgaa

SEQ ID NO: 67953 - DNA, 278 bp, Zea mays
cagtgagctgcgcatcatcgaggccgacgccgacctctacctcgctgagatcgacggcaaggtcatcgtgaagattggatcaagatacgactgcgggcacctcatcccagaaggcttccaggtcgtggcgcacggagatggctatgccgtctgggagaaaaactgagccaaatctgtgcctgatccgtccgtccggtccggcacgacgagttttagcggatttgacctgcattttccttagcttattattactccaaatacgggatatatatagcgac

SEQ ID NO: 67954 - DNA, 316 bp, Zea mays
ccttgcttcaattcatcaaaatgtcattccttcaatgtcaaacccttccatcttatgtgatttcttgactagatcatatgatattggtggtgttatcagtgtgatggccttaagtggccttttcattcttatgacacatcacggttctgagtatccaaaattttatgaaaagctttatgcattactgactccggctgttttcatggcaaaacaccgatcagtgtttttgcaacttcttgacacatgcctgaaatcttcttatcctcctgcctatcttgctgctgcgtttgcaaaaagattgagtagacttgctctt

SEQ ID NO: 67955 - DNA, 308 bp, Zea mays
cgcgcgccggcgacgactcggctagtcggctaccgccgccgccccctacgccagcttcccagctcttcgtcaggcccttctccgtcaacgagcacccagcacatatcctgagcccctccacacctcaacgatggcgcgattcagaagccttgcacccaagaccaggaacctggtggtggctgggggcctgtcggccttcgtgctcggggtctactactacaccatgagagccgtgggaggcacggacgagctgcaggtggcgatcgacaagtttgaggagatgaagaagaaggacgctgccagaaact

SEQ ID NO: 67956 - DNA, 313 bp, Zea mays
aggcattgcccagaaatcctgaggttgtgtatgctgtattgcaccgacaagaggtgtttgagccatttaaaaaccatccacgtttcagtgaactgcttgagaacatatacacagtattggatttcttcaatagccgaatggacatgcaacaattagatggggaatggtctgtggataaggtgcttgaagtcatcaacaaaacttgccgttcatggcgtggagaagggatgaagatgtttacccagttacggtttacatatgagcaagaaagccaccctgaggagttcttcatcccatatgcatggcgccttgt

SEQ ID NO: 67957 - DNA, 329 bp, Zea mays
  unsure (1)..(329): unsure at all n locations
cggtcgagctcgagcgtgatggaggacaatagggcaggtgaagccacccaaaaaggattttacaagtatgagggcaagaggaaagcgactcctgatcctgaaattatgaaatatattgaaaaatctaggagcatggcaggagttacaccagatcctgagctgatgaagctaagtgagaaagacatagtcgagatggtgtttttcccggtgatanatgaaagcctgcgagtccttgatgagggtatcgccgtcaaggcttctgacctagacatcgcttcgatcttcggcatggggttcccaccttataggggaggtgtcatgcactgggc

SEQ ID NO: 67958 - DNA, 360 bp, Zea mays
agaccctccccttcgcttccttccctagcgccgacgcccaccagacgagatggccccgaagacggacaaggcgccgccgccgtcgtcgaagccggacaagtccggtggtggcaagcacaagaagaagaagtggagcaagggaaagctaaaggagaaggtaaacaacgcggtgctgttcgaccaggctacctacgacaagctgctctcggaggtgcccaagtacaagcaaatcaccccttccatcctctccgagcggctgaggatcaacggctcacttgctcggagggccatcaaggacttgatggcgcgtggcctcattcggatggtctcggtccactcaagccagcagatctacaccag

SEQ ID NO: 67959 - DNA, 352 bp, Zea mays
ccgaccattctgcctccagcttacggagacgtgcccctgctcaccaggatcttctcttccaagggcctcgccgtcaaggacctcgccgtcctctccggcgcccacacgctaggcacggcgcactgcccctcctacgccgaccgcctctacaacttcagcagcgcctacgactcggacccgtccctccacaccgcgtacgccgcgctcctcgccgacgccaccactagggagtacgtccaccgtattgccaccggcaagtttgacgacgtgttcttcaaggacttcgccgagtccatgaccaagatggccaacgtcgccgtgctcaccggtgccgagggggagatcaggaaga

SEQ ID NO: 67960 - DNA, 342 bp, Zea mays
  unsure (1)..(342): unsure at all n locations
taggctccgcaaccgctgagtgagacgaagagagggtcggcaatggcgatggaccggctagcggcatcgaatctctgcacggacgtaacncgttgcagttgtcgtgtggcagaactaccgcgtcgatgatcattggccaacgaccatggtaaccgcaccacgccctcgtacgtcgccttcaccgactccgagcgcctcatcggagatgcggtcaagaaccaggtcgccatgaaccccatgcaacaccgtctgtgatgccaagcgtctcatcggcatgaggttcagtgatgcgtctgtccagagtgatatcaagtgtgcaccttcaaggtcatttctgggctg

SEQ ID NO: 67961 - DNA, 305 bp, Zea mays
gttgatgaggctgttttcagtgcaccgctatccatggccatgctgtggtttcaagaccagagttggcggatagttacgtacacaggcggcaaatgtgtctcttagccgctgtttaagtgcaccgctgtaagtttgggtgtccatgtccatgctgtggtttcaagatcagagtccatggcggatagttatgtacacaagcgacaaacgtggttcttagcttaggttcatgaccagttccacgtagtacatatagcttatatgtatatatacaatctattttttactatgcaaaaaaaaaagaagaa

SEQ ID NO: 67962 - DNA, 349 bp, Zea mays
cttgtgtctcaggtgatctcatcgctgactgcttctctgaggttcgatggtgccctcaatgtggatgtgaacgagttccagaccaacctggttccttacccgaggatccacttcatgctctcctcctacgcaccggtgatctcttctgcgaaggccttccacgagcagctgtctgtggcggagatcaccagcagcgcgttcgagccggcttccatgatggtcaagtgcgacccacggcacggcaagtacatggcttgctgcctgatgtaccgcggcgacgtggtgcccaacgacgtgaacgcgcggtggccacatcaagacgagcgcactatcagtcgtgactgtgccg

SEQ ID NO: 67963 - DNA, 354 bp, Zea mays
ctcttttctcggcctctaccgccccctcgatcggtcggccggtcagctatgacgccgggaagctcggccgccggatccggcgtcgtcgttcctcggaacttcaggctcctagaagagcttgaacgtggagagaagggcattggagatgggacagtgagctatggaatggatgacgcagatgacatctacatgcgatcatggactggcactattattggccctcataataccgtccatgagggtcgcatctaccagctgaagttgttctgcgacaaggactaccctgagaagccaccatcagttcgatttcattcaagaataaacttaacatgcgttaatcatgagactggagtg

SEQ ID NO: 67964 - DNA, 351 bp, Zea mays
  unsure (1)..(351): unsure at all n locations
ggaaaccctagccgccatatctcacgatccactcgagcaccaagccgagggaaggtgaggagcgatggcgcgcggcgtggtgtcggcgaagggcggcgcggtcgcgggcaagaagaaggggtcggtttccttcacgatcgactgcaccaagccagtggaggacaagatcatggaggtcgcctcgctcgagaagttcctgcaggagcgcatcaaggtcgccggcggcaaggctggcaacctcggcgactccgtcaccatctctcgcgagaagaccaaggtcaccgtcacctctgacggacncttctccaagaggtacctgaagtacttgaccaagaagtacttgaagaagca

SEQ ID NO: 67965 - DNA, 341 bp, Zea mays
ccatccatcggggatcaccaggggagcaagatgtcgactgccgccgccccaagattgcccgctcccagatccggggcaagctatcactatcagacgaccgcggctccggtggccaacaccctctccttcgccggccacgcgaggcaggcggcccgcgcgtccgggccacggctgtccagcaggttcgtggcgtccgcggcggccgtgctgcacaaggtgaagctggtcggcccggacgggacggagcacgagttcgaggcgcgcgacgacacctacatcctcgaggcggccgagaccgccggggtggagctgccttctcctgcgcgccagtcctgctccac

SEQ ID NO: 67966 - DNA, 345 bp, Zea mays
  unsure (1)..(345): unsure at all n locations
gacaacaccaaggttcacttaatttatgctaatgtcacatatgaagacattcttctgaaggatgagctggacgacatggccanaacctatcctggccgctttaagatctactatgtgttgaatcagcctcctgagaactggaacggtggtgttgggtttgtgtctaaggaaatgatccaatctcattgtccagcgcctgctgaggacattcagatcctgagatgtggtcctcctccgatgaacaaggccatggctgcacaccttgacgagctcaactacacaaaggagatgcagttccagttctaagcaatgttaagtttgcanataataattagtgaccgacat

SEQ ID NO: 67967 - DNA, 340 bp, Zea mays
aagagcaccaagaccaccggccccgtcctcatccacgtcgtcaccgagaagggccgcggctacccctacgccgagcgagccgccgacaagtaccacggtgtcgccaagtttgatccggcgaccgggaagcagttcaagtcccccgccaagacgctgtcctacaccaactacttcgccgaggcgctcatcgccgaggcgggccaggacagcaagatcgtggccatccacgcggccatgggcggcggcacggggctcaactacttcctccgccgcttcccgaaccggtgcttcgacgtcgggatcgcggacagcacgccgtcacgttcgggccggctggctg

SEQ ID NO: 67968 - DNA, 351 bp, Zea mays
  unsure (1)..(351): unsure at all n locations
cagaccaccaaacaagtgccagcggcctctcgcagtcgccgcaatggagagcaccttcatcatgatcaagcctgacggcgtccagagntggctcattggtgggatcatcagcagntttcagnagaagggcttctacctcaaggccttgaagcttgtcaacgtggagaggtcgtttgccgagaagcactacgccgatctcgcctccaagcccttcttccagggcctcgttgactacatcatctctggccctgtggtgaccatggtctgggacggcaagagcgtcgtcacaactggccgcaagatcattggcgccactaatccctggcttctgagccggcaccatcgtggcga

SEQ ID NO: 67969 - DNA, 294 bp, Zea mays
gggttcatgcacttcatgcaccgccacgaggaggacgagtacttcccctccaggtacgacgccgccaggaacgcgcccatgtactccatcacgaccgcccacattgccggccgccgagagaagactgtgattagcaaggagaacaacttcaagcagctcggggagaggtatcgcgcgatggacccagcaaggcaagagcggttcatcaccagatgggtcgatgcgctctccgagcagcgcctcatgcacgagatcaggacatctggctctccactggtctcagccgtcagtctc

SEQ ID NO: 67970 - DNA, 340 bp, Zea mays
gcgaagcgcgactgagcaaggcggaggcggcgggaccggcgatggagcggctgcagcggatctttggcgcctccggcatggggcagccgccgacggactcgccgctgctcgactcctccgagcaggtctacatctcctccctcgcgcttctcaagatgctcaagcacgggagggccggcgtgcccatggaggtcatgggtctcatgctcggcgagttcgtcgatgactacaccgtcagggtcgtcgacgtcttcgccatgccgcagagcgtgactggggtcagcgtcgaggccgtcgaccacgtcttccagacaaacatgcttgacatgctcaagcagac

SEQ ID NO: 67971 - DNA, 350 bp, Zea mays
tgtggatacatgcaaagagatgggcatgaaggagatgtaagctgtcaaggaagggatgacactgttatgtttggaccagatgatgatggtgtaaagattcctactcaggtagagactcttgtaaagggcactgcaatggttgctgaaccagaatacaaggctagcccagatctagattacctacaggagctgctggctattcagcagcaaggacctcgtgcaataggtttctttggaacccgcaacatgggatttatgcatcaacaacttattgagatcctgagctatgctatggtcataacaagaaatcatatattcacatctggtgcttctggaacaaatgcagctgt

SEQ ID NO: 67972 - DNA, 345 bp, Zea mays
ggcgctctggcaaggagcttgagaaggagccaaagttcctgaagaacggtgatgctggtatggtgaagatgatacccaccaagcccatggtggtggagacattctcagcgtatcctccccttggtaggtttgctgtccgtgacatgaggcagacggttgctgttggagttatcaagagtgtggagaagaaggacccaaccggcgccaaggtgaccaaggctgctgccaagaagaaatgatgcgatcctgcgcctgctttagcaatacctagttttcatcattacaagttttgtttgtggtcgttgctgttattgtgtgaactgttgagctctgttagcctgtgca

SEQ ID NO: 67973 - DNA, 303 bp, Zea mays
gtaccacttcgtagaggaatgagtcaaggtcggcgcaccggcgaagtccaaggtgttggacgacgacgcctcggcgcgtttcgaagacgcatgctccatcctggagaaggacgccgtcaacgtgtcccttgagaacctcaagtcctagccgttcgtcaaagaacgactggagaaagggacactcaagctggtcggtagccattacgagtacgtcaatggaaagttcgcgacatgggaaccctaagtggtcataggtacaaatacggctcatcggacttatttgccgagtagagagcttaatta

SEQ ID NO: 67974 - DNA, 351 bp, Zea mays
  unsure (1)..(351): unsure at all n locations
ggaggaaacaaagggccgctgccctgcctgccacacacgttatgacaaggatatgatcgtcaagatggccgccacttgtgacaggacagtggcagataaaaatgcggagaagaagcaaaaggcccaaagggttaagccaaaggcagcaccaacagcaacaacaacatcaaccgtagaatctaagaagcatcttgctactatcagggttatccagagaaatctggtgtacataattgggctacctgcgcatttatgcaatgagagcgtacttgagcgtagggagtactttggtcattatgggaaagttttgaaggttttagtntcccgtccgactgnggctccctctcagca

SEQ ID NO: 67975 - DNA, 353 bp, Zea mays
ccgactcccagccgtcgtctgctgcgtactccgcctccagtttggtctgtttcttgcaagttgctcttgcggtagttcccccaactgtcaccatgcagaacgaggagggtaagactgtggacctctatgttcccaggaagtgctcggccacaaacaggatcatcactgccaaggaccatgcctctgtccagatcatcattggccacttggatgcgaatggcctgtatgatggtcacttcacaacatttgctctctctgggtttgtccgtgctcagggcgatgcagacagctccttggacaggctgtggcagaagaagaaggctgatatcaagcagtagattttacatctagtt

SEQ ID NO: 67976 - DNA, 332 bp, Zea mays
  unsure (1)..(332): unsure at all n locations
gagcggttctacgtccgagtcgtcgcatcaggtcncctcgattcgccggcgggccaccaaccaagctcatacatctgaattgactagtcaaactcagtgatctctttggggactaatcaaactcaagaactaagtttcatgtctgatctcgacgtccagcttccatctgcttttgatccgtttgcagaggcaaatgctgaggattccagtgctggtgctggatcaaaggactatgtgcacgtgcgtattcagcagcgcaacggaaggaagagtctgacaactgttcagggcttgaagaaagagtacagctacaacaagatcctcaaggatct

SEQ ID NO: 67977 - DNA, 280 bp, Zea mays
gtctccgccttccggcttcctctagaattcgattccctttcccaagaaaccaagaacccagcccctcaccatgacgagctcctcctctccttccagaaaggagctgagcaagatcgcttgccatcggctgcagacagagctcgccgagtggcagcaaaacccccccgccgggttcaagcacaaggtctccgataacctccaaaggtgggtaattgaggtcacggaccgccgcgcacccagtacgccggcgaggcttaccagttgcaggttgacttccctg

SEQ ID NO: 67978 - DNA, 345 bp, Zea mays
gccttctgcgcctccatttcggcctctgtcccttgcaagttcaatctcacctccaaccatgggtaaagagaagtcccacatcaacattgtcgttattggccacgttgactctggcaagtcgaccaccacaggacacctgatctacaagcttggaggcattgacaagcgtgtgatcgagaggtttgagaaggaggctgctgaaatgaacaagcggtccttcaagtacgcttgggtgctcgacaagctcaaggctgagcgtgagagaggtatcaccattgatatcgctctgtggcagtttgagaccaccacgtactactgcacggtcattgatgcctctggacaccg

SEQ ID NO: 67979 - DNA, 336 bp, Zea mays
ccgagcccaagagaccttcggacaagcccctgcgtctccccctgcaggatgtgtacaagattggtggtattggaactgtaccggttggtcgtgtggagactggtgtcatcaagcctggtatggttgtcactttcggtccaactggcctgactactgaggtgaagtctgttgagatgcaccacgaggctcttcaggaggcccttcctggtgacaatgttggcttcaacgtgaagaacgttgctgtgaaggatctcaagcgtggttttgtggcctcaaactccaaggatgacactgccaaggaggctgccagcttcacgtcccaggtcatcatcatga

SEQ ID NO: 67980 - DNA, 275 bp, Zea mays
ggcagacagctcacatgagaataatgaagctcggagggagttgcttgaagtgatggcccacaggtctcatgttgacagcagtgttgagctgattggaagccttctctttggctctgaggacggtccaatggttctgaaagccgtccgtgcagctggtgagcctctcgtcgatgattggagctgtctcaagtccacgagttcgtacttttgaggcgctatgtgggtcgttagcgcagtatggggtgaagcacatgcggtccttcgcaaacatctgc

SEQ ID NO: 67981 - DNA, 337 bp, Zea mays
gatgccatcggggtgttccgcgaaatggtgtggagcggggagcggccgaatgagttcgggttctcgtgcgtggtgaacgcgtgcacgggatcgagggatttggaagctgggaggcaggtgcacggtgcagtggtgaggacgggatatgaaaaggatgtgttcacagcaaatgcgctggtcgacatgtactcaaagctgggagacatctgaatggcacagcggttttcgagaagatgcctgcggcggacgtcgtctcatggaatgctttcatttctggctgtgtaacccatgggcatgatcaccgtgcactggagctgctactacagatgaagtcttc

SEQ ID NO: 67982 - DNA, 343 bp, Zea mays
cacaaacacaagtcgtcgtaggcagcgagcgtctctcctctcccacgcatcgcgccaaggaagagagagagatcgccgctccccttctcggcgtcggtggtgcgggtgccctccctcctcgagcgagatctgtctggtcacagatctatctgacaaaatggtgaagatctgctgcatcggtgctggctatgtcggtggcccaaccatggccgtcattgccctcaagtgcccagacattgaggtcgtcgtcgttgacatctccaagccccgcattgaggcctggaacagtgacacgctgccaatctacgagcctggtctcgatgatgttgtgaagcagtgcagg

SEQ ID NO: 67983 - DNA, 342 bp, Zea mays
ggcagacagctcacatgagaaaaatgaagctcggagggagttgcttgaagtgatggcccacaggtctcatgttgacagcagtgttgagctcattggaagccttctctttggctctgaggacggtccaagggttctgaaagccgtccgtgcagctggtgagcctctcgtcgatgattggagctgtctcaagtccacggttcgtacttttgaggcgcaatgtgggtcgttggcgcagtatgggatgaagcacatgcggtccttcgcaaacatctgcaacgctggcatccttcctgaagcagtgtcgaaggtcgctgctcaggcttgcaccagcattccttccaa

SEQ ID NO: 67984 - DNA, 326 bp, Zea mays
cgtcggttcacttctccaggaaagggttcgtactcatggcgccgccgcagccaaagtcgggcctcttcgttggcatcaacaagggtcatgtcgtcaccaagcgcgagcagcctccccgcccgtgccaccgcaaggggaaatcaacgaagagggtgtctatggtcaggggcctgatcagagaggttgctgggtttgctccttatgagaagcgtatcactgagcttctgaaggttggcaaggacaagcgtgccctgaagcttgctaagagaaagcttggaactcacaagagggcaaagaagaagagagaggagatggcgggcgtcctc

SEQ ID NO: 67985 - DNA, 317 bp, Zea mays
ctcgagccgctatcctgatgcaacgccatgtacttgttgatggcaatgtcaggactgacaagacctaccctgctgggttcatggatgtcatttccatccctaagacaatggagaactacaggctgctttatgacaccaagggccgcttccgtcttcacccaatcagggatgaggagtgcaagttcaagctctgcaaggtgaggtccgttcagtttggccagaagggcatctcctacctgaacacctacgacggccgtaccatccgctaccccgacacgctcatcaaggccaacgacaccatctagatcgatctggag

SEQ ID NO: 67986 - DNA, 339 bp, Zea mays
cggctccaccatcccctctcccctgccctgcccccaccgccccgcttccttccgccttgctccgttgcttcctcccaccacagtccactccactcgccggccctgcagctcagtatttgactgagactggtggtggagctgctagcagcgagcctgctacttcctggtcctgacggtgcgttcagacctcagaccagtgccgacgacgagctgtgaggagagggcaaggaaacaagcctgtgaggaaggcggcgatggagaggtacgaggtgatcaaggacataggatcgggcaacttcggggtggccaagctggtccgggacgtcaggaccaaggagc

SEQ ID NO: 67987 - DNA, 341 bp, Zea mays
ccctacgcccgtttctctctcgtcgcgcaacatcagagcacaagcgaggaacccagtccagtcccgggaatggagtgcgtattgggcgtggttggccgcgacttcgtgctggtggcggccgacacctccgccgtgcagagtattctcgtccacaagaccgacgaggacaaggtgatggtgctcgactcgcaaaagctgatgggcgcttcaggggagcctggtgatcgggtgcaatttacggagttcatacagaagaacctccacctgtaccagttccggaacaccatcccgctctcaaccgccgccgccgccaacttcacacgcggcgaactcgccacagc

SEQ ID NO: 67988 - DNA, 359 bp, Zea mays
gcaaaccgaacgaacccaaccgaagcgagagctgagcaaggcagatgcggcgtgaccggcgatggagcggctgcagcggatgctttggcgcctccggcatggggcagccgccgacggactcgccgctgctcgattcctccgagcaggtctacatctcctccctagcgcttctcaagatgtctcaagcacgggagggctggggtgcccatggaggtcatgggcctcatgctcggcgagttcgtcgacgactacaccgtcagggtcgtcgacgtcttcgccatgccgcatagcgtgactggtgtcagcgtcgaggccgtagaccacgtcttccagacaaacatgctttttatgcttaagca

SEQ ID NO: 67989 - DNA, 357 bp, Zea mays
agttgatggtgtgaaagtccttcaactcgaaaccgcagctggtgcagctattcggttcttcgacaaagcgattggaattaatgttccccgctcaaggtttctcccagtgaaggctacatctgatctgttgcttgtgcagtctgatctttacaccttggttgatggctttgtcatccgcaacccatccagagcgaatccagctaacccttcaattgagcttggacctgagttcaagaaggttgccaatttccttgctcggttcaagtccatccccagcatagttgagcttgacagcttgaaggtttctggtgatgtctggtttggctctggaattacactcaagggcaaggtgacaat

SEQ ID NO: 67990 - DNA, 388 bp, Zea mays
atctttgcaggtagagtcagtcggaatcggctcgaggccgtcctccccccactcccactccctccgctgcctggcttgcttcgccgcctgcctccgcaccggcgcgccctctcgtcctcttccggctctatcgcgcttccaccgccggtgatggaatcttcctacaagtttgggccctacaaaatcgacgcctaggaggtcttccacgccacgcccctcttatacgccatggtgaatctccgcccgctgctcccgggtcatgttcttgtgtgccccaagcgtgaagtgaaaagattcgccgatctaagttctgatgagattagtgacttatgggttactgcaaaggaagttggtgcacgtcttgagcagtaccacaaagcatcttcac

SEQ ID NO: 67991 - DNA, 355 bp, Zea mays
  unsure (1)..(355): unsure at all n locations
cccaaatctccaaagcctccgacncccttcctctctccctccgccgccgctgcgcacgcagggaacaagcgacatgggcgtctacacctttgtgtgccgcaacaacggcggcgagtggaccgccaagcagcactccggcgagatcgaggcttccgccgctaccccatacgagctgcagcgccgcctcgtcgctgccgcctccgcggccgactctgcctacggcgtccagtcgtccttctccatggtcacccccagctccgccgtgttccaggtgatcgtcggtgctgtcggtggtggtgcaatgatggtgagcggaggtggcggcggcggtgctgctgcatctggtggtgctgct

SEQ ID NO: 67992 - DNA, 353 bp, Zea mays
gttcttcccggagcgcttcctggaacaaggccgcgacgccgaggtcgacatgtacggcaaggacatccggttcgtgccgttcggggctgggcgcaggatctgcgcgggggccacgttcgccatcgccaccgtcgagatcatgctcgcgaacctcatctaccatttcgactgggagatgcccgccgagatggagcgcaccggggccaaggtggacatgtccgatcagttcgggatgacgcttcgccggacgcagaaactttaccttgttcctagaattcccagatgagtgtcgtcgtcgtcgtacaaatggcatgcatcttattgtaagtcttggagtttgttgttgcacacgc

SEQ ID NO: 67993 - DNA, 353 bp, Zea mays
  unsure (1)..(353): unsure at all n locations
caccgtcttcccgcgccagtacgcgttcgagatgtcctccgtcatctacaaggactggaacttcacagagcaggctctccctgacgacctaatcaagagaggcatggcggttgccgacccgtcgagcccgtacaaggtacggctgctggtggaggactacccgtacgcgtcggacgggctggccatctggcacgccatcgagcagtgggtgacggagtacctcgccgtctactaccccaacgacggcgtgctgcggtcggacgtggagctgcaggcgtngtggaaggaagcgcgcgaagtcgggcacgccgacctcaaggacgcgcctggtggcccaagatgcagacggtggc

SEQ ID NO: 67994 - DNA, 339 bp, Zea mays
cccatatcgccaaagcctccgacccccttcctctctccctccgccgccgctgcgcacgcatggaacaagcgacatgggcgtctacacctttgtgtgccgcaacaacggcggcgagttgaccgccaagcagcactccggcgagatcgaggcttccgccgctaccccatacgagctgcagcgccgcctcgtcgctgacgcctccgcggccgactctgcctacggcgtccagtcgtccttctccatggtcacccccagctccgccgtgttccaggtgatcgtcggtgctgtcggtcagtagtgcaatgatggtgagctgaggtagccgcggcggtgctgctg

SEQ ID NO: 67995 - DNA, 326 bp, Zea mays
acgtgacgctcatgacatctctgcttcggccgagctccatgttcgtggaggacctggtgctccagcaaccctacaccaaggaaaggtacggctcggcgcgcaaggtctacgtcgtgtgcacggaggaccacgccatcgcggaggggttccagcgctggatggtggagaacagccccgtggacgaggtgagggagatcgtggcggaccacctcgtgatgctctccaggcccagcgacctggtgccctgcctcgcggacatcgccgacaagtacgcttgacgacgctacgctgttcagcgcagttcgcccgcgtgctgttctcatttg

SEQ ID NO: 67996 - DNA, 354 bp, Zea mays
  unsure (1)..(354): unsure at all n locations
cagaccaccaaacaagtgccagcggcctctcgcagtcgccgcaatggagagcaccttcatcatgatcaagcctgattgcgtccagatnggcctcattggtgagatcatcagcagttttgagaagaagggcttctacctcaaggccttgaagcttgtcaacgtggagaggtcgtttgccgagaagcactacgccgatctcgcctccaagcccttcttccagggcctcgttgactacatcatctctggccctgtggtggccatggtctgggagggcaagagcgtcgtcacaactggccgcaagatcattggcgccactaaccccctggcttctgagctcggcaccatccgtggcga

SEQ ID NO: 67997 - DNA, 344 bp, Zea mays
gtctccgcctgccggcttcctctagaattcgattcgctttcccaagaagccaagataccagcccctcaccatgacgagctcctcctctgcttccagaaaggtgctgatcaagatcgcttgcaatccgctgcagaaagacctcgccgagtggcagcaaaacccccccgccgggttcaagcacaaggtctccgataacctccagaggtgggtaattcaggtcaccggagcggcgggcacccattacgccggcgaggcttaccagtggcaggttgacttccctgagcattatcctatggaggcacctcaggtcatatgtcttaatccagcgccaatgcatccacaca

SEQ ID NO: 67998 - DNA, 350 bp, Zea mays
caatgactgtgccatgggaatgtgtgccgaactttgtgctgacaatcatgccctcacaagagaagaccaggatgcttttgctatccaaagcaaccagcgtggaattgctgctcgtgacagtgatgcttttgcatgggagattgttccgattgaagttcctgttgggagaggaaaaccacctgtacttattgagaaagatgaaagcctggataagtttgacccagcaaaactgaagaaacttcgcccaagtttcaaggagaatggtggtaccgttacagctggaaatgcttctagtataagtgatggggcggctgcattagttttggtgagtgggcagaaggctcaagagc

SEQ ID NO: 67999 - DNA, 347 bp, Zea mays
caccattcctcctccgtgattcgcagtcagcggtggtgaaggtagcgggcgcggaggaagatggggctcgcgttcgggaagctcttcagccggctcttcgccaagaaggagatgcggattcttatggtcggtctcgacgccgccggtaaaaccaccatcctctacaagctcaagctcggcgagatcgtcacaaccatccccaccatcggtttcaatgttgaaactgttgagtacaagaacattagcttcacggtctgggatgtcgggggtcaggacaagatcagacctctctggaggcattacttccagaacacacagggtcttatctttgttgtggatagcaatga

SEQ ID NO: 68000 - DNA, 342 bp, Zea mays
taacatcccaccaagattagcaacggtaccgtggaaattatcacccctgtggagctgatcaagaagggtgaataagtgggctcgtccgagtctgccctgctcgccaagctgggtatccgccccttctcgtacggtatccaggtcaccagtgtctacgaggatgggtccgtgttcagccctgaggtgcttgacctttccgaggaggacctgattgagaagtatgccactggtgtctccatggttgcctcactgtcactggcgatctcgtactcgacccttgctgctgtgcgccacatgttcatcaatgggtacaagaatgtgcttgctgctgctgtcgagaca

SEQ ID NO: 68001 - DNA, 338 bp, Zea mays
  unsure (1)..(338): unsure at all n locations
ttttcaagcaagtcaaatntatttttaattttttccaatctcatctaatccatgtgtaataggaataaccgaacaaggccttacagagaataaagaaaaaagatctggattctggacatgtctatgtatggagtttcaggtctgagtctgacggcagcgctcttccacggtggttgaagatcatgaaatccaggttagccgggagcgagacgatcctattctcatcagaatgtggaagcaccgagagaaatttagtgggaacagcaagacctgcccacatgcacaagaccaaccctaagagcaactccatcatcacatccatgggcggccccgactag

SEQ ID NO: 68002 - DNA, 351 bp, Zea mays
ctcgtggggaagtttcgctctcgccggcgtcgacggcctagggttcgaggaacgtccgtccgtccgtccggggaaggagctgtatggaggcgagatgatcgaggtggtgctcaacgaccgcctggtgaagaaggtgcgggtcaagtgcaacgaggacgacaccatcggcgacctcaagaagctggtggcggcgcagacggggacgcgccccgagaagatccgcatccagaagtggtacaacatctacaaggaccacatcaccctcaatgactacgaggtccacgacggcatgggcctcgagctctactacaactgagccgccgccctctctgctctcgtcaggttggtctg

SEQ ID NO: 68003 - DNA, 281 bp, Zea mays
attgcatgcaagtttgctgagctgaaggataagattgatcgccgttctggtaaaagctggaagatggcgctaaattcttgaagtctggtgagtgctgccattgttgatatggagcctggcaagcccatgtatgttgagagcttctcagactatccacctttgggtcgctttgctgttcgtgatatgagacagacagttgcggtgggtgtcatcaaagcagtggacaagaaggctgctgtagctggcaaggtcaccaagtctgcccagaaagctcagaaggc

SEQ ID NO: 68004 - DNA, 344 bp, Zea mays
  unsure (1)..(344): unsure at all n locations
cttcgctgttgtgatcttcctcttccttggttcggttganggattcagcacgaagagccagccctgcacatatancaaggacaagtactgcaagcctgcgctgttcactgcactctttagcactgtgtccttcttgcttagagccatcacctctctggtctctggtttccttggcatgaagattgccacatatgcgaatgccanannnaccctggaagctaggaagggtgttggcaaggcttttatcactgctttccgctctggcgctgttatgggtttcctgcttgcatcaagtgggttgtngntctgtacatcacaattaatgtatttaagttgattacggg

SEQ ID NO: 68005 - DNA, 343 bp, Zea mays
ccgcacctctctccatctccctgctcctccgccttcttcttgatccagccaagccagggatcgccatgtcggactcggaggagcacacttcgaatcgaaggccgacgccggagcgtccaagacctacccgcagcaggctggcaccgtccgtaagaacggcttcatcgtcatcaagaaccgcccctgcaaggttgtggaggtttctacctcaaagactggtaagcatggtcatgccaaatgccactttgttgccatagatatattcaacgggaaaaagctcgaagatattgttccttcgtcacacaactgtgatattccgcatgtgaaccgtactgagtatcag

SEQ ID NO: 68006 - DNA, 342 bp, Zea mays
ctttcgtttctttcttgtcggcgacggctggcggctggggtgctgcgccgctctcaccttcaccgccgacgagcattcacaagtagtggtctcttactggtggcggcgtagaggtgacgaaaaagccttgacaatgagcagcataggcacaggttatgatctgtctgtcaccaccttctctcccgatggccgcgtcttccaggtcgagtatgccacgaaggctgtcgacaacagcgggaccgttgttgggatcaagtgcaaagatggcattgttctgggtgtcgagaagctggtaacctcaaagatgatgctggagggatcaaaccgtaggatccattcagt

SEQ ID NO: 68007 - DNA, 339 bp, Zea mays
ctcgagccgcgagatgtcgtcggcggaggcgaaggccgcggcgaaggcggtcccggagtctgtgctgcgcaacgcaagcgtgaggagcagtgggcagcggacaagaaggagaaggccctcgcagacaggaaggaggcgcttgacagccgcaagatcatatttgctcgcgccaagcagtacgcccaggagtacgacgcccaggagaaggagcttgtgcagctcaagcgtgaggctcggttgaagggtgggttctatgtgagcccagaggccaagcttctgtttgtggtccgcatccgtggtatcaatgccatgcaccccaagacccgcaagatcttgcag

SEQ ID NO: 68008 - DNA, 350 bp, Zea mays
gtcataccaaacccagcattcagttatggcttcatcaatgggaaccgagaaaccgaggtctgatgtctttggtgagggtgcttcccatgatgacgaagagagcaaatctgtgtatgtcggcaacgtgccatcatctgtaagtgaggctgatcttgaaaacgagttcaagaaatttggccggcttattcctgacggtgttgctatcagaagccgaaaggagactggcggctattatgctttcgtggaattcgaggaactcagcggtgtacacaatgcgttaaaggcttcaccaattgacataaatgggcggcagatatatgttgaggagaggaagccaatagcggaataag

SEQ ID NO: 68009 - DNA, 356 bp, Zea mays
ttcttcatgagaacatatatcaaaccttccttgatcagcttgttgaggtatacaaacaagtccgaattggggatccgttggagaaaggcaccttactgggaccactgcacactcctgcttcaaaagagaactttttgaaaggcattcagactatcaaatctcagggagggaaaatcctttttggaggatctgccattgaatcagaaggaaactttgtgcaaccaacaattgtggaaattacaccttctgcaccagttgtgaaagaagaactctttggtcctgtcctttatgctatgaaatttcagaccttgaaggaagcaattgaaatcaataactctgttcctcaaggattgagc

SEQ ID NO: 68010 - DNA, 356 bp, Zea mays
cgcgccgccgccgccgccgccgtgacggaaggaagaggaggagcaaggagcacgacgcgatgggccactccaacgtgtggaactcgcaccctaagaactacggccctggctcccgcgtctgccgggtctgcgcgaaccctcacggtctgatcaggacgtacgggctcatgtgctgcaggcagtgcttccgcagcaacgccaaggacattggtttcatcaagtaccgttgaagaggccactgtgctgctgtggagaacttcctacatcaaagaaatgggtccttcattagaaggcctaatttatgcgctttagctttttgttcagaacttgagactcatgtgttaaactcgacttgt

SEQ ID NO: 68011 - DNA, 353 bp, Zea mays
caccgtctccgcgcgccagtacgcgttcgagatgtcctccgtcatctacaaggactggaacttcacagagcaggctctccctgacgacctaatcaagagaggcatggcggttgccgacccgtcgagcccgtacaaggtacggctgctggtggaggactacccgtacgcgtcggacgggctggccatctggcacgccatcgagcagtgggtgacggagtacctcgccgtctactaccccaacgacggcgtgctgcgggcggacgtggagctgcaggcgtggtggaaggaggcgcgcgaggtcgggcacgccgacctcaaggacgcgcgctggtggcccaagatgcagacggtgg

SEQ ID NO: 68012 - DNA, 333 bp, Zea mays
acagctcctcatctcaagtgtgtagacgagacagagagacactgagagagcgccatggccagcctccaagtcactcctacttcggcattcactgagtggaacgagctgaagttcgaaggcctgtacctgttccacacgcccctgggctcgagagcgccaaccaagctcgggtcatagacaacaaggcgccgattggcatcggtgccaccgtagttaacaactggacagtgtatgacgggccaggtccgaacgcaaagctggttgcccgtgcacagggcttgcatatccaagccggcaactgggtcaactccttcagcctagtgttcgtggatc

SEQ ID NO: 68013 - DNA, 330 bp, Zea mays
cgccatcgtgcagactaaggaagcactgaccggccggtcatggcgaggatccacctctacgtcgtcgccgcggcctgcgccgtcgccctcgcgctcgccggcgacccggacatgctccaggacgtctgcgtggctgactacgcttccccggtcaagctgaacgggttcccgtgcaaggcgaacgtctcggcggtcgacttcttcttcgacgggctgaggaccccgggcaacaccaacaacccggcgggctccgcggtgacggcggccaacgtggacaagttcccgggggtgaacacgctgggcgtctccatggcgcgcatcgactacgcg

SEQ ID NO: 68014 - DNA, 355 bp, Zea mays
  unsure (1)..(355): unsure at all n locations
gacattgccaaggagacggccaaggactggaagggcctgcgcgtcaccgtcaagctcactgtccagaaccgccangccaaggtctccgtcgtcccctccgccgccgcgctcgtcatcaaggcgctcaaggagcccgagagggacaggaagaaggtcaagaacatcaagcacagcggcaacatcggcctcgacgacgtcgtcgagatcgccaggaccatgaggaacaggtccatggccaaggagttggccggcaccgtcaaggagatcctcggcacctgcgtcagcgtcgggtgcaccgtcgacggcaangaccccaggacctgcagcaggagattgatgacggcgangtcgagat

SEQ ID NO: 68015 - DNA, 361 bp, Zea mays
cgcactctcagctgctcgcgccgtcttcgaccgccaccaagatgaacaaagagaggctcatgaagatggccggcgccgtccgcaccggcggcaagggcaccatgcgcaggaagaagaaggctgtacacaagacggtcaccacggacgacaagaggctgcagggcactctcaagagagtaggggtcaacaccatccatgcaatcgaggaggtgaacatattcaaggacgatctcgtcatccagttcttgaaccccatagtgcaagcttccatcgcagcaaacacatgggtggtcagtggatctccacagacgagaaagtacaggatgttctccctgggatcattaagcagcttggcgctgac

SEQ ID NO: 68016 - DNA, 350 bp, Zea mays
gtaccacttcgtggaggaatgggtcagggccggcgccccggcgaagtccaaggtgctggccgaccacgcctcggcgcgtttcgaagaccaatgctccatcgtggagatatgggccgtcaaactgtcccttgcagacctcaagtcgtacccgttcgtcaaggaagggctggagatagggatgtacaagctggtcggcggccattacgacttcgtcaatggacagttcgagacatgggaaccctaagtggcgatacgtacaaatacgccgcacgagtgtatttgccgcgtggagtgcttaattatttgccgatatatatatacacatgtaccggaaatgaccggtgagaata

SEQ ID NO: 68017 - DNA, 344 bp, Zea mays
ctgtcagctgcgcatcatcgacgccgacgccgacctctacctcgctgagatcgacggccaggtcatcgtgaagattggatcaagatacgactgcgggcacctcatcccagaagccttccaactcgcggcgcacggagacggctatgccgtctgggagacaaactgagccagatctgtgcctgatccgtccgtccggtccggcacgacgagttttagcggatttgacctgcattttccttagcttattattactccaaatacgggatatatatagcgacaacccgtattcgagatacatgcgtgcccccagggacgcggaatccagcagagatagcacgcgtgtc

SEQ ID NO: 68018 - DNA, 345 bp, Zea mays
taacatccccaccaagattaacaagggtaccgtggaaattatcacccctgtggagctgatcaagaagggtgaaaaggtgggctcgtccgagtctgccctgctcgccaagctgggtatccgccccttctcgtacggcctccaggtcaccagtgtctacgaggatgggtccgtgttcagccctgaggtgcttgacctttccgaggaggacctgattgagaagtttgccactggtgtctccatggttgcctccctgtcactggcgatctcgtacccgacccttgctgctgtgccccacatgttcatcaatgggtacaagaatgtgcttgctgttgctgtcgagacaga

SEQ ID NO: 68019 - DNA, 347 bp, Zea mays
  unsure (1)..(347): unsure at all n locations
atnttcagaggagaggtggggaaatggattgcgattattgctgttattctgcgcctattttttccgcgccacttcccatgtacatctccagcctattggtttcatcctatcaaatttccagatatttgtttcatttacattttattaacattttgcggttttgcgcttaaaataaaatagccacggttaatacattttgcttagcgactctttagcactgtttcatcctgtgcaccagattggttagagcttcccggttccatcatcctgctcacagcggtcgcccccagtctgttcgcacacaccttcagggacgacctcgtcggtgtcttcatatgccttgcgat

SEQ ID NO: 68020 - DNA, 217 bp, Zea mays
gtctccgccttccggcttcctctagaattcgattccctttcccaagaaaccaagaacccagcccctcaccatgacgagctcctcctctccttccagatatgcgctgagcaagaacgcttgccatccgctgcagaaagacctcgccgagtggcagcaaaacccccccgccgggttcaagcacaaggtctccgataacctccaaaggtgggtaattgag

SEQ ID NO: 68021 - DNA, 349 bp, Zea mays
cttgtcattcttttggcactaggagctctctttgtgatcccaaagtcacaaaataaaggtaaatcaaagagaaacgacttaggagctggaacgacatctaggagctttacgacagaagagatctctaaacattccacaaggtaggactgttggatcattatcaaggacaaggtctatgatgtcactccttatgtagaggaacatccaggcggagatgccattctaaataatgctgggggtgattccacggagggcttttttgggccacagcatggcactagggtcttcgatatcatcgaggatttctgcatcggtcagttgaaggcttcatgatgatgacaggatagtt

SEQ ID NO: 68022 - DNA, 327 bp, Zea mays
gcgggagctgcaacgagtcgaagactcccaccagatcctgagtcaaaccagccatgacttaaatgagtgcagctggtccctgaatatcttggccatcaacaagccccagaacaagtgtgacgatctggaccggtttgtgatggtggcaaagacggtgcccgatgacgccaagcagctcaccacaaccatcaacaccaacgcagaggccctcttcagacccggccctggcagcttgcatctgaagaatgggccggagagcatcatgaactcaacggagtacccacacggtggctcccagggacagctgctgcatcctggtgaccacaa

SEQ ID NO: 68023 - DNA, 322 bp, Zea mays
ttgtcaagcaagtcatatctatgtctaatattttccaatctcatctaatccatgtgtaatatgaataaccgaacaaggccttacagagaatggagattgaagatctggattctggacatgtctatgtatggagtttcacgtctgagtctgacggcagcgctcttccacggtggttgaagatcatgaaatccaggttagccgggagcgagacgatcctattctcatcagaatgtggaagcaccgagagaaatttagtgggaacagcaagacctgcccacatgcacaagaccaaccctaagagcaactccatcatcacatccat

SEQ ID NO: 68024 - DNA, 353 bp, Zea mays
ctcactccctcgctccgtctaccagtaccaccacgtccctcctcgtcgacgatctcgtagcggcggcgcacatggcgagcgacggcgcggcggctacgccagcgaaggttaccccaaagaaggccaatctcctcgacccgcactccatcaagcaccttctcgacgagaccatctccgaggtcgtgaagagtaagggctacaccgaggacacgcggctgggcaactggaagctggggatcggagccgccgtgattgctgtcgccctcctcgctcagttttaccccaagaagttcccgcagaaccgcgatttcctccttggctgcatcgccctgtatgtggtgctgaatgtggtg

SEQ ID NO: 68025 - DNA, 353 bp, Zea mays
  unsure (1)..(353): unsure at all n locations
gccgcagacccctctccttcgcttccttccctagcgccgacgcccaccagacgagatggccccgaagaaggacaaggccccgccgccgtcgtcgaagccggccaagtccggtggtggcaagcaaaagaagaagaagtggagcaagggaaagctaaaggagaaggtaaacaacgcggtgctgttcgaccaggctacctacgacaagctgctctcggaggtgcccaagtacaagcaaatcaccccttccatcctctccgagcgtctgaggatcaacggctcncttgctcggagggccatcaaggacttgatggcgcgtggcctcattcggatggtctcggtccactcaagccagc

SEQ ID NO: 68026 - DNA, 340 bp, Zea mays
cattctcatccccgacccccgcaccgcagcgtaaaccctagtccccggcggcgaccttgcggcctccgctgcgctctgactggtgcgcgtttagacgaggagctgcggcggccaagaccaatcgaccatggctacccgtatccagtatgagaacaactgtgaaattggtgttttctccaagctgacaaatgcttactgtctggtagcgattggagggtcagagaacttctacagtgcctttgaggctgagcttgcagatgccatccctgtggtcaagacctctattggtggcactagaataataggccgactttgtgttggaaacaagaatggacttcta

SEQ ID NO: 68027 - DNA, 343 bp, Zea mays
gaaggattacaagaacggctctgaaaagacgagttttctatatcccagcgccgttgacaggttccgtaggcaatttgctagcttagaagaaaatggagagaggaatgccgcgcttgacaggaaacatgtttctctcccaaggacaacaaccgttcactccactccaattcctgcaaaggaaggtccagcagcaacctcccaggttgctcaaaggattccagcagctagaccaggaagagtggtaggcccagtattgccattcgagagcgcaacgtcaccgatcaacacatcgctcgacgggtggcaaggaacccagctgttcctccagcaacgaacacctcgt

SEQ ID NO: 68028 - DNA, 364 bp, Zea mays
cgtttcgcagcgtagtagctcggccgcctccactacgccactcccaggcgccgcacaggtacgtcgccggcgggatgacgacgcgcttcaagaagaaccgcaagaagcgcggccacgtgtccgccgtgcacggccgcatcggcaagcaccggaagcatcccggaggtcgcggtaacgccggtggcatgcaccaccaccgcacctcttcgacaagtaccatcccggctacttcggtaaggtcggcatgcgctacttccacaagctccgcaacaagttctactgccccgcggtcaacatcgagcgcctctggtcgatggtgcccgccgaaaaggcggcggaagcgtcggcgacaaggcccgcagac

SEQ ID NO: 68029 - DNA, 336 bp, Zea mays
  unsure (1)..(336): unsure at all n locations
ttggcgtccgcctcaggccgccgccaggagagccggctcggtcggttcgtcgaagatcccggatctgctctgtcacgaggtctttcggcgggtgttgtctcgcgaggtgtagcgagccaagttcaggagagtttcgagaagctgaaatggctcctaaagctgctcctgccaagaagggtgatgccaagacccaggccttgaaggttgccaaggctgtgaagtctgggtcagtaaagaagaccaagaagatccgcacgtccgtgacatntcaccgccccaagacgctgaagaaggctagggaccccaagtacccaagaatcagcactaccgggaaga

SEQ ID NO: 68030 - DNA, 329 bp, Zea mays
ccgagctccgaaggccgcagcatcaggcgcgccccccctcgcgtgtgaccgagattgcgctgccgaatcaggggaccgttgattaccccagcttcaagctcgtcatcgtcggcgatggtggaactggtaaaactacatttgtgaagaggcatctcactggagagtttagaagaaatatgaaccaaccattggtgtggaagttcatccgttggatttcaccactaactgtggtaagatcaggttctactgctgggataccgcaggcaagagaatttggtgcctcaggatggatctataccatggcagtgtcgatcacatgttgatgtact

SEQ ID NO: 68031 - DNA, 346 bp, Zea mays
ggcacacacctcttcttcttcttcctcctcctcctagcacagctagcgcctgctccccttcgcctgtgatcatgtcttgcagcagcggcaagtgcgactgaggctccagctgctcctgcggcagctcatgcaactgcatgtcccctaacgtggagaccgccgccgccagcagcatcaagacacggtcctacgccgcgccgaccaccaaggccagcgccggcggcttcgaggcggccaccgagggcggcggctgcgactgcaacacctgcaactgcggcaccagctgcggctgctcctgctgcagctgcaactgagccggtcaggcgatggcgcacgagagtcgaga

SEQ ID NO: 68032 - DNA, 339 bp, Zea mays
gagaaggaatccgatccatccaagccaagccaaggcagagaagaagaagaggaggaagaagaagcatcggcagcatgtcggaggggactgccaactgcgtggacatcctgatcgccatcatcctgcctccgctgggggtgttcctcaagtacgggtgcggccacgagttctggatctgcctcctctcaccttcctcggctacatccccggcatcatctacgccatctacgccatcaccaagaacacctagctagtcatccttgccgacgacgatccatgtctctgtatctgtgtctgttcatatgcctgatgccgacttgtgctgtatgtagttgcttg

SEQ ID NO: 68033 - DNA, 304 bp, Zea mays
gcaagagcgacagagagagagagaccgacgcgccggcagatcccaagctcaccggagagggggaagagggcgaccgaagcggcgatgggtttcatcatggacttcgcggagaatctgatcctccgtctgatggaggacccggacaagcgcgaccaggttcggcgggagcattctacaagatgaaggagcggtgcgagcgcactaaggcggcgtggagcctccctctgcgcccctacggcttctggaccttcgaccgcttcaactcgcagctctcctgggatccccagatcagccaggccgccgg

SEQ ID NO: 68034 - DNA, 340 bp, Zea mays
ctcgagccgctcgagccgattcggctcgagatcgactgacgactgcaatcaggcctcaaattaatgccatcctggagaggtttaatgaactcattacacgggagctgatatctatcttcaacgacaaagagcttgaacttctgattagcggacttccagatattgacttggacgattgaaagcaaatacagaatattctggctacagcatagcctctccagtcatccagtggttctgggaatccgttcaggggttcagcaaggaagacaaagcccggttcctccagttcgtcactggcacttcaaaggtaccgttggaaggttttagtgcacttcaaggg

SEQ ID NO: 68035 - DNA, 334 bp, Zea mays
aacagaccgcagcctgcctgggatcgtacctgcactgcagcagctgcagctggcctcctctgggagttgagctcgcggcctgagctcatctcatttgggttggaaaagcaagccgaggcggtggagtgctcgttagacaacttgctggatgctctcactgccaggcggcttcgtctgggcgatcgataactcggaaacagagacatagtaggaactgcatatagggaaagaagaaactcacagtaacagaggagcatggtgtgccatcaagtggaaggctgatttcattcttttttgtagaactcaggagctgatcattgtcaacaagttttct

SEQ ID NO: 68036 - DNA, 121 bp, Zea mays
caatgattgagatcccagggcagctctggtggctgatgagatagcggagcaggctgaattcttctccttcggaacgaacgacctgacgcagatgacctttgggtacagcagggatgatgtg

SEQ ID NO: 68037 - DNA, 327 bp, Zea mays
gaaccgtgaatgcttggcccgcgagtaccgtaacccgaagccagcgtggtcggtcttcagggaagcgagctttgggcacggcgagctaaagatcgtgaactccacccatgcccactggacctggcacagaaacgacgacgaagagccggtgagaaccgatgacgtgtgataaactctcttgctggttcagggtgcatccaggagggcagccgtgaccgtgagtcgaggaagatcctgatgtctccttgatgcttagcagtatagcttgggcctgcgatgtactgtgtatataatgcgtgctacttgataatctaacacctagtaaaa

SEQ ID NO: 68038 - DNA, 333 bp, Zea mays
  unsure (1)..(333): unsure at all n locations
tacatgctggcctaaatggacttgaagttgggcagacagttgttatatctgcggcggttttgatacataatgtaatgcgcatagcatcttctacagatattgaaactcagcaagctcatgaattctctatttatcttgtcttgccattcctaaccatttcattagctctgctagctttaactggtatccttcaattgtttttgttggtgatacctacacctattttgctggaatggctttggctgtgataggaattttgggacatttcagcgagacgttgttgctcttctttttacctcaagttcttaatntcctgtgttcggtcccacagct

SEQ ID NO: 68039 - DNA, 323 bp, Zea mays
agccccggtttccttcgtaagctcgtcgtcctccgtccgcgactctgcgcgagaagcgagagtatggacacccaagtgaagcttgctgttgtggtgaaggtgatgggaaggaccggctccaggggtcaggttacccaggtcagagtgaagttcttggatgtcatctaatttgctatgttcgtcagactttggtatgaccttcaaaacacctgccttgtatgattatttgtgagcctggtgataagattgcagtttggtttttatgatccggttgagggtatgtttggcaacagtatttatcaaaatcatagttttacaataaa

SEQ ID NO: 68040 - DNA, 320 bp, Zea mays
ccggcgggggcggcctggcggccctgagggggcgccgcgtgaaggagacgacggggatcgtgggccttgaggtggtgcctaacgcgcgagaggttctggtagggctctacgagcgcacgctcaaagagatcaaggccgtccccgaagacgagggttaccgcaaggccgtgaatcctttaccggtcaccgcctccagatctgccaggttttatgaggactggaagcgcatcgaggaccgaatcggatgcgggcaggtcgaggagctcatcgaggtaggccgaggacgatgtcttgctcatcgctagaatgattgaatggga

SEQ ID NO: 68041 - DNA, 336 bp, Zea mays
agccttatctgatggatcttgatagtacaaatggaactttcatcaatggaaatcgcattgagcctcggcgatattatgagttatttgaaaaggacacaatcaagtttggcaatagtagccgggagtatgttttgctccacgaaaattcaacagaatgagttttgagaaaattcaacaaatgaggatcgaaacaatcagccttttatgctgtagaagaaaaatacagcaaaaacatgaggttttgcatgttttaaaatttttagactggagattggccggcttgaacttctggtctgtgatttcttcacgtgttcaagtctataaggatatcttgtg

SEQ ID NO: 68042 - DNA, 331 bp, Zea mays
ataaatactatgatcttgccactagcttctatgagtatggttggggtgaatccttccactttgctcacagatggaatggagaatccttacgtgaaagcatcaagcgacatgagcattttcttgccctgcaacttggtttgaaaccaggaatgaaggttttagatgtgggcttggaataggtggaccgctgagagaaattgcaagatttagctcaacttcagttacgggattgaataacaacgaataccagataaccaggggaaaggagctcaaccgtttagcaggaattagtggaacatgtgattttgtcaaggcagacttcatgaagatg

SEQ ID NO: 68043 - DNA, 334 bp, Zea mays
cactgatgtccgtttcaggcctaactctagtcagctggcaacatcttcttttgatagaactattaaattatggaatgctgccgatcctggattctctttgcatacattcactgggcacaacggccaggtcacatcattagattttcatccaaagaaaacagaccttctatgctttgtgatggcagtggtgaaatccggtactggaatgtgacccagtttgcatgcttgcgtgccataaagggtggtagtgcccaagtccggtttcagcctcatgttggacagtttttagccgcagctgctgaaaacgtggtttccatatttgacattgagacac

SEQ ID NO: 68044 - DNA, 338 bp, Zea mays
gtcttgtcgttccctttccatccccgtctccgtctccgcccgccacaacaatatcgcattgacagatcgttcatcgtagcctcctccagtcgtctcccgggatcttcgccggctataaatttccgccccaattccccaatccagatgcgcaaacatcgaatcgtctcgctcgtggtgccctgctcatactgcttgccctcgccgtatcgtccacccgcaacgcacaggaggattccatggccgacaacaccgggacgttggcgggcggcatcaaggacgtgccggggaacgagaacgaccttcacctccaggaactcgcccgcttcgccgtcgatgag

SEQ ID NO: 68045 - DNA, 202 bp, Zea mays
agtacacgacgcaactaactcggaatcggcacgagaaaaaggataagaagacaagtgaaattgttgcattgaagaaggtaaagatggagaaggagcgagaaggtttcccattaacctctcttagggaaataaatatcctcttgtctttccaccatccttcaattgtggatgttaaggaaagtagttcgtgggaaaaacaaaa

SEQ ID NO: 68046 - DNA, 332 bp, Zea mays
acagaagaagtagaagatgcaaatgagccttccgtcagagttcaaggggcaacattgtccgatagttcttcagatagaagcactgctgctccatcaaatggatgcatctatgagatccaaacaatacaaagagagatggaggatggtgttgtccatatgctaggagaagtaatgtggtggcagaaccaaatgcagatttcttcaagaagataatagttgactacgcttacaatttcatgaggaagaacttcagacaaccagagaagataacatgtgtccctcataacagactgctccgggttggaatgacatatgagatctagggcgatgct

SEQ ID NO: 68047 - DNA, 313 bp, Zea mays
caacgtttctgagctggagttgctcatgatgcacaacaggacctactgcgctgaaattgctcacaacgtgtccactaagaagcgcaaggagatcgtggagcgtgctgcgcagctcgacattgtggtcacgaacaagcttgctaggctccgcagccaggaggacgagtagctggtttcttgtcttaacgacgaactggatgttgccattcctttctgtaggaaactactttgcttgtgtcttgttagtactgaaaaccagagtcactcctacctttttgcaatcagtagctactaaaatgtggcagattccact

SEQ ID NO: 68048 - DNA, 333 bp, Zea mays
gaaggattacaagaacggctctgaaaagacgagttttctatatcccagcgccgttgacaggttccgtaggcaatttgctagcttagaagaaaatggagagaggaatgccgcgcttgacaggaaacatgtttctctcccaaggacaacaaccgttcactccactccaattcctcaaaggaaggtccagcagcaacctcccaggttgctcaaaggattccagcagctagaccaggaagagtggtaggcccagtattgccattcgagagcgcaagggcaccgatcaacacatcgctcgacgggtggcaaggaacccagctgttcgtccagcaacga

SEQ ID NO: 68049 - DNA, 132 bp, Zea mays
actatgtgctgtagtatagccgctggctagctagctagttgagtcatttagcggcgatgattgagtaataatgtgtcacgcatcaccatgggtggcagtgtcagtgtgagcaatgacctgaatgaacaattg

SEQ ID NO: 68050 - DNA, 169 bp, Zea mays
gagaccagcaagcaacatagaaagtagaatccattagcaacaatagagcaacaatggcgaccaagatattttccctccttatgctccttgctctttctacatgtgttgctaacgcgacaattttccctcaatgctcacaagctcctatagcttcgcttcttcgcccata

SEQ ID NO: 68051 - DNA, 292 bp, Zea mays
gcagggtacagggtgggcattcgcacccctaaccacagaaaacatgttgtggacattgcgaactgcaatatctacatacagggaacacaagtcctcctgggaagggctaatgaagcgaggcatgtcaaaagacttcacgtgggaccatgccgctgaacaatacgaacaaatcttccagtgggccttcatcgatcgaccctatgtcatgtaaaaaaggaccaaagtggtggttccttgaagatcatcagttcatcatcctatagtaagctgaatgatgaaagaaaaccctgta

SEQ ID NO: 68052 - DNA, 243 bp, Zea mays
agcaacagcagtttcttccattcaaccaactagctgcattgaactctgcttcttatttgcaacaacaacaactaccattcagccagctacctgctgccttcttgatacaacatcagttgttgccgttctaccagcacgctgcgcctaacgctggcaccctcttacaactgcaacaattgctgccattcaaccaacttgctttgacaaacccagcagcgttctaccaacaacccatcattggtg

SEQ ID NO: 68053 - DNA, 282 bp, Zea mays
tagcaacatagaaagcacaatagtgtaccaacaatggcagctaaaatattttgcctccttatgctccttggtctttctgcaagtgctgctacggcgaccattttcccacaatgctcacaagctcctatagcttcccttcttcccccgtacctctcaccaacggtgtcttcggtatgtgaaaacccaattcttcaaccctacaggatccaacaggcaatcgcagctggcatcttacctttatcacccttgttcctccaacaatcatcagccctattacagcag

SEQ ID NO: 68054 - DNA, 301 bp, Zea mays
gttgactgagcgttggtgaaccctgccgcctacgtacaacaacaacaactgctttcatctagcccgctcgctgtgggcaatgcacctacatacctgcaacaacaattgttgcaacagattgtaccagctctgactcaactagctgtggcaaaccctgttgcctacttgcaacagctgcttccattcaaccaactgactctgtcgaaatcgctgcgtacctacaacagcgacaacagttacttaatccattggtagtggctaaccattggtcgccgccttcctacagcagcaacaattgctg

SEQ ID NO: 68055 - DNA, 303 bp, Zea mays
attgagaccaactagcaacatagaaagcacaatagtgtaccaacaatggcagccaaaatattttgcctccttatgctccttggtctttctgcaagtgttgctacggcgaccattttcccacaatgctcacaagctcctatagcttcccttcttcccccgtacctctcaccagcggtgtcttcggtatgtgaaaacccaattcttcaaccctataggatccaacaggcaatcgcagctggcatcttacctttatcacccttgttcctccaacaatcatcagccctattacagcagttacctttg

SEQ ID NO: 68056 - DNA, 295 bp, Zea mays
gcaacagtccctccccccctgaccccacgccctccgtgccgtgcccactcctctccccgcagcttcgggcccctgccatgccgtcctcgtcggtactgatccaactgcacttcaacttcctctggagttgctttgtgcttcttaacaattgctttcgcctcatcgtacaggctactccgagctccgtgttccgataacgctagagaagagtttcatcgccacaacagggcttcatggattcccaatgggtctctccggaactgagattttgaatctacccaaattcgataccgcg

SEQ ID NO: 68057 - DNA, 244 bp, Zea mays
gcgacaacagttacttaatccactagcggtggctaacccattggtcgttgccttcctacagcagcaacaattgctgccatacaaccagttctctttgatgaaccctgccttgttgtggcagcaacccatcgttggaggtgccatcttttagattacatatgagatgtactcgataatggtgccctcatagcggcatgtgtttcctagaaataatcaatatattgattgagatttatctcgatat

SEQ ID NO: 68058 - DNA, 300 bp, Zea mays
attttcagcattcaaaaacacaccaagcgaacgtcactagcaacgacctaacaccaatggctaccaagatattagccctccttgcgcttcttgcccttttagtgagcgcaacaaatgcgttcattattccacagtgctcacttgctcctagtgccagtattccacagttcctcccaccagttacttcaatgggcttcgaacatccagccgtgcaagcctacaggctacaactagcgcttgcggcgagcgccttacaacaaccaattgcccaattgcaacaacaatccttggcacatctaa

SEQ ID NO: 68059 - DNA, 233 bp, Zea mays
agcattcaaaaacacaccaagcgaacgcactagcaacgacctaacaccaatggctaccaagatattagccctccttgcgcttcttgcccttttagtgagcgcaacaaatgcgttcattattccacagtgctcacttgctcctagtgccattattccacagttcctcccaccagttacttcaatgggcttcgaacatccagccgtgcaagcctacaggctacaactagcgcttg

SEQ ID NO: 68060 - DNA, 303 bp, Zea mays
cttatttgcaacaacaacaactaccattcagccagctacctgttgcctacccccagcaatttcttccattcaaccaactggcagcattgaactctcctgcttatttacagcagcaacaactactaccattcagccagctagctggtgtgagccctgctaccttcttgacacaaccacagttgttgccgttctaccagcacgctgcgcctaacgctggcaccctcttacaactgcaacaattgctgccattcaaccaacttgctttgacaaacctagcagtgttctaccaacaacccatcattg

SEQ ID NO: 68061 - DNA, 298 bp, Zea mays
caactagcaacatagaaagcacaatagtgtaccaacaatggcagccaaaatattttgcttccttatgctccttggtctttctgcaagtgttgctaccgcaaccattttcccacaatgctcacaagctcctatagcttcccttcttcccccatacctctcaccagcggtgtcttcaatgtgtgaaaacccaattgttcaaccctacaggatccaacaggcaatcgcaacaggcatcttaccattatcacccttcgttcctccaacaaccgtcagccctattacagcagttacctttggt

SEQ ID NO: 68062 - DNA, 304 bp, Zea mays
  unsure (1)..(304): unsure at all n locations
attgagaccaactagcaacatagaaagcacaatagtgtaccaacaatggcagccaaaatattttgcctccttatgctccttggtctttctgcaagtgctgctactgcgaccattttcccgcaatgctcgcaagctcctatagcttcccttcttcccccgtacctctcaccagcggtgtcttcggtattcgaanactcaattcttcaagcctacaggatccaacaggcaatcacagctggcatcttacctttatcagccttgttcctccaacaatcatcagccctattacatcagttacctttgg

SEQ ID NO: 68063 - DNA, 98 bp, Zea mays
acaactaataagcaatctaaaagatggcaccgccaatgatgtgttgttggtagaaggctgctgtatgtggcctcctagaaataagaagttacatttcc

SEQ ID NO: 68064 - DNA, 296 bp, Zea mays
gctttgtcagatttgagggcacgtagtgtcagatttgagggcacgtagcaggataattcaggggctcttatgcacagtttgagccaacccatctcgccctgctatataataagattggtccctagggttttcgccgccgcaccccacgacttccgtccgagtctgagctacatctccacgcgccgccgccgccgctcgacgcccaccgcgcagccatggcggaacagactgagaaggctttcctcaagcagcctaaggtgttcctcagctcaaagaaatctggcaagggtaagaag

SEQ ID NO: 68065 - DNA, 301 bp, Zea mays
caggcttccacgaatctccccgccgtcctcaattcccctcagcgccgccgccctcaattcccctcggcgccgccgcctcctcccctcgcttcggtcctcggttagttaaccatccaggttctgtcaagatgtctgatagccatgagactgacaggaacattgagatttggacaattaagaaactgatcaaggcattggaatcagccagaggcaatggcacaagcatgatctctctaatcatgcctccacgtgatcaggttgctcgagtggctaagatgttaggtgatgaatatggtactgc

SEQ ID NO: 68066 - DNA, 328 bp, Zea mays
catgcagcgtagtagctcggaatcggtcgagccaaggtgaacctggagttgtcatccgaggaaagaagggcactgggggcattactatcaagaaaaccggcatgtccttgattattggtgtctacgacgagccaatgactccagggcaatgcaacatggtggtggagaggctcggcgattacctgatcgagcagggcttctaaaagttcgtcatgttctgttttggtcatttgggcaccaaagtttgcgcctcatttggttctgtaatccgtgagctcgtgcatgtacttggcgtattgcatgcagtgaataatttagcttgggtttg

SEQ ID NO: 68067 - DNA, 155 bp, Zea mays
ggcagcaaggtttgctagcacaagttgttgtctactctcagcaacagcagtttcttccattcaaccaactagctgcattgaactctgcttcttatttgcaacaacaacaactaccattcagccagctacctgctgcctacccccagcaatttctt

SEQ ID NO: 68068 - DNA, 212 bp, Zea mays
ttttgagcattcaaaaacacacaaagggaagtgcactagcaacttcctaacaacaatggctaccaagatattagccctccttgcgctcctttccctttcagtgagcgcaacaactgcattcattattccacaatgctcacttgctcctaatgccattattccacagttcctcccatcagttacatcaatgggcatcgaacaccctattgtgc

SEQ ID NO: 68069 - DNA, 299 bp, Zea mays
cactatgttgctgactatatatgtgctgtgtttatattttgcatatttattatgtatttgcgtctgagcttatggtatcatagagagtgttggagagggtgtgactgacgtagctccgggcgaccatgtccttcctgtgttcactggggactgcaaggagtgtgcccactgcaagtcggcagagagcaacatgtgtgatctgctcaggatcaacaccgaccgcggtgtgcatgagtgccgatggcaagtcgcggttttcaatcaatgggaagcctatctaccactttgttgggacttcc

SEQ ID NO: 68070 - DNA, 300 bp, Zea mays
gaaagcacaatagtgtaccaacaatggcagccagaatattttgcctccttatgctccttggtctttctgcaagtgctgctacggcgaccattttcccgcaatgctcgcaagctcctatagcttcccttcttcccccgtacctctcaccagcggtgtcttcggtatgtgaaaacccaattcttcaaccctacaggatccaacaggcaatcacagctggcatcttacctttatcacccttgttcctccaacaatcatcagttctattacatcagttacctttggtgcatttattggcacaaa

SEQ ID NO: 68071 - DNA, 301 bp, Zea mays
ttgagaccaactagcaacatagaaagcacaatagtgtaccaacaatggcagccaaaatattttgcctccttatgctccttggtctttctgcaagtgctgctacggcgaccattttcccgcaatgctcgcaagctcctatagcttcccttcttcccccgtacctctcaccagcggtgtcttcggtatgtgaaaacccaattcttcaaccctacaggatccaacaggcaatcgcagctggcatcttacctttatcacccttgttcctccaacaatcatcagccctattacaacagttaccttt

SEQ ID NO: 68072 - DNA, 299 bp, Zea mays
accaacaagcaacatagaaagtggaatccagtagcaacaacagagcaacaatggcgaccaagatattttccctccttatgctccttgctctttctgcatgtgttgctaacgcgacaattttccctcaatgctcacaagctcctatagcttcccttcttcccccataccttccatcaatgatagcttcagtatgtgaaaacccagctcttcagccctataggctccaacaagcaatcgcagcaagcaacatacctttatcacccttgttgtttcaacaatcgccagccctatctttggtg

SEQ ID NO: 68073 - DNA, 190 bp, Zea mays
  unsure (1)..(190): unsure at all n locations
gcaaatacatgggtagtcagtggagtaccccagacaaaaagtctacaagaccttctgccaacaattatcaaccaactgggccctgataacctggagaacctcaagaggcttgctgagcatttccagaagcaggtacctggtgccgaagccagcgccagtgcagctgcccnatngatgaggacgatgtccc

SEQ ID NO: 68074 - DNA, 285 bp, Zea mays
ggtacgtaggtgcattgcccaccgcgagcgggctagatgaaagtagttgtggcaaaccctgctgcctacttacaacagttgcttccattcaaccaactggctgtgtcaaactctgctgcgtacctacaacagcgacaacagttacttaatccattggcagtggctaacccattggtcgctaccttcctgcagcagcaacaacaattgctgccatacaaccagttctctttgatgaaccctgccttgcagcaacccatcgttggaggtgccatcttttagattaca

SEQ ID NO: 68075 - DNA, 224 bp, Zea mays
  unsure (1)..(224): unsure at all n locations
gcaacatagaaagtacaatagtgtaccaacaatgacagccanaatattttgcctccttatgctccttggtctttctgcaagtgctgctacggcgaccattttcccacaatgctcacaatctcctatagcttcccttcttcccccgtacctctcaccagcggtgtcttcggtatgtgaaaacccaattcttcaaccctataggatccaacagcaatcgcagctgg

SEQ ID NO: 68076 - DNA, 291 bp, Zea mays
cggctcgagcggctcgaggagaccaactagcaacacttaaagcacaatagtgtaccaacaatggcagccaaaatcttttgcttccttatgctccttggtctttctgcaagtattgctaccgcaaccattttcccacaatgctcacaatctcctatagcttcccttcttcccccatacctctcaccagcggtgtcttcaatgtgtgaaaccccaattgttcaaccctacaggatccaacaggcaatcgcaacaggcatcttaccattatcacccttgttcctccaacaaccg

SEQ ID NO: 68077 - DNA, 127 bp, Zea mays
cagaaacacacctagcgaacgcactagcaacgacctaacaacaatggctaccaagatattatccctactttgagatcttgccctttttgtgagcgcaacaaatgcgttcattattccacaatgctca

SEQ ID NO: 68078 - DNA, 294 bp, Zea mays
caacatagaaagtagaatccattagcaacaatagagcaacaatggcgaccaagatattttccctccttatgctccttgctctttctacatgtgttgctaacgcgacaattttcgctcaatgctcacaagctcctttagcttcccttcttcccccataccttccatcaattatagcttcagtatgtgaaaacccagctcttcaaccatataggcttcaacaagcaatcgcagcaagcaacatacctttatcgcccttgtggttcaaccaatcaccagccctatctttggtgcagt

SEQ ID NO: 68079 - DNA, 293 bp, Zea mays
tgcacatagaaagtggaatccagtagcaacaatagagcaacaattgcgacaagatactttcctcccttatgctccttgctctttctgcatgtgttgctaacgcgacaattttccctcaatgctcacaagctcctatagcttcccttcttcccccataccttccatcaatgatagcttcagtatgtgaaaacccagctcttcaaccctataggctccaacaagcaatcgcagcaagcaacatacctttatcacccttgtttcaacaatcgccagctctatctttggtgcagtca

SEQ ID NO: 68080 - DNA, 187 bp, Zea mays
  unsure (1)..(187): unsure at all n locations
ctcgagcgcgcgctccacctgcgccgacgcgatgcgggccaagtggaagaagaggagngtgcggaggctcaagaggaagcgccggaaaatgaggcagagatctaagtaggcgcatactgtgaccgaggatggcgagcttctcctgtaccatggctgtgacgcgttgggatgattgtctccctttgta

SEQ ID NO: 68081 - DNA, 197 bp, Zea mays
caactagcaacatagaaagcacaatagtgtaccaacaatggcagctaaaatattttgcctccttatgctccttggtctttctgcaagtgctgctacggcgaccattttcccacaatgctcacaagctcctatagcttcccttcttcccccgtacctctcaccaacggtgtcttcggtatgtgaaaacccaattcttc

SEQ ID NO: 68082 - DNA, 294 bp, Zea mays
  unsure (1)..(294): unsure at all n locations
catcagtcagtatattgccaacatgataaggtttctagtggatagctacaacaagcccgtccctgctattctggagatcccatccaaggaccatccatatgatccagcgcacgactcggtgctctctcgagtgaaatatctgttctctgcagaatcggtggcgtctgataggcgatgaagatatccttgcgtacagtacccttcgatgcatctattttgttatggtattgaaaagaagatggcacgtaccattgggtgcgagcgaccacatcacgntaataatgagcttgcaaa

SEQ ID NO: 68083 - DNA, 299 bp, Zea mays
gcaacaatagagcaacaatggcgaccaagatactttccctccttattctccttgctctttctgcatgtgctgctaacgcgacaattttccctcaatgctcacaagcttctatagcttcccttcttcccccataccttccatcaatgatagcttcagtatgtgaaaacccagctcttcaaccctataggctccaacaagcaatcgcagcaagcaacatacctttatcacccttgtttcaacaatcgccagccctatctttggtgcagtcattggtacaaaccatcaaggcacagcagctg

SEQ ID NO: 68084 - DNA, 296 bp, Zea mays
caatcgcagcaagcaacatacctttatcgcccttgatgtttcaacaatcaccagccctatctttggcgcagtcattggtacaaagcatcagggcacaacagctgcagcaactcgtgctacctgtgatcaagcaagtagctctggcaaacctttctccctactctcagcaacaacaatttcttccatgtcaaccaactgtctacactgaaccctgctgcttatttgcagcaacaactattaccatttagccagctagctactgcctactctcagcaacaacaacttcttccatttaa

SEQ ID NO: 68085 - DNA, 138 bp, Zea mays
ttcattctcgaattccgattcccaatccagcaaaccctaccagccttttgcaaactcagagagggacccgatggcacccaaggcggagaagatgccggctgcgaagatgcccgcagaggaggagcccgctgacccggc

SEQ ID NO: 68086 - DNA, 229 bp, Zea mays
gcaacatagaaagtagaatccattagcaacaatagagcaacaatggcgaccaagatattttccctccttatgctccttgctctttctacatgtgttgctaacgcgacaattttccctcaatgctcacaagctcctatagcttcccttcttcccccataccttccatcaattatagcttcagtatgtgaaaacccagctcttcaaccatataggcttcaacaagcaatcg

SEQ ID NO: 68087 - DNA, 294 bp, Zea mays
ctcgagccgtgagcattcagaaacacaccaagcgaagcgcactagcaacgacctaacaacaaacgctaccaagatattagccctccttgcgcttcttgccctttttgtgagcgcaacaaatgcgttcattattccacaatgctcacttgctcctagtgccattattccacagttcctcccaccagttacttcaatgggcttcgaacacctagctgtgcaagccaacatgcaacaacaagcgcttgcggcgagcgtcttacaacaaccaattgcccaattgcaacaacaatcctt

SEQ ID NO: 68088 - DNA, 289 bp, Zea mays
agaaagtggaatccagtagcaacaatagagcaacaatggcgaccaagatattttccctccttatgatccttgctctttctacatgtgttgctaacgcgacaattttccctcaatgctcacaagctcctatagcttcccttcttcccccataccttccatcaattatagcttcaatatgtgaaaacccagctcttcaaccatataggcttcaacaagcaatcgcagcaagcaacatacctttatcgcccttgttgtttcaacaatcgccagccctatctttggtgcagtc

SEQ ID NO: 68089 - DNA, 292 bp, Zea mays
ctcgttcctgtcgcgcaccacgacctccactacacatctcccccggcggcggcgccgtcagttgaacaatggcggactccaaggccacctcggcggtcaccctccgcacccgcaagttcatgactaaccgcctcctggcccgcaagcaattcgtgcttgaggtgatccaccccggccgcgccaacgtctccaaggcggagttgaaggagaggcttgccaaggcgtacgaggtgaaggacccaaacaccatctttgtcttcaagttccgcacccacttcggaggaggaaagtc

SEQ ID NO: 68090 - DNA, 286 bp, Zea mays
ccgccgtcgtgcgctcgctacccctctccctcgaggcctttgccggcgaagagcgcccagtcgcccaccaggatgaagtttgttgctgcctatctgcttgctgtcctcgctgggaactctagcacctctgccgaggacttgacatccattctggagtcagttggctgtgaagttgacaatgaaaagatggaactccttctgtcccagctgagcggtaaggacattaccgagctcattgccgccggcagggagaagtttgcttcagtcccatgtggcggtagcggtg

SEQ ID NO: 68091 - DNA, 291 bp, Zea mays
attgagaccaacaagcaacatagaaagtggaatccagtagcaacaacagagcaacaatggcgaccaagatattttccctccttatgctccttgctctttctgcatgtgttgctaacgcgacaattttccctcaatgctcacaagctcctatagcttcccttcttcccccataccttccatcaatgatagcttcagtatgtgaaaacccagctcttcagccctataggctccaacaagcaatcgcagcaagcaacatacctttatcacccttgttgtttcaacaatcgccag

SEQ ID NO: 68092 - DNA, 271 bp, Zea mays
cgacaactagcaacatagtcagcacaatactgtagcatcaatggcagccataatattttgcttccttatgctccttggtctttctgcaagtattgctaccgcaaccattttctcacaatgctcataagctcctatagcttcccttcttcccccatacctctcaccagcggtgtcttcaatgtgtgagaacccattcgttcaaccctacaggatccaacaggtaatcgcaacaggcatcttaccattatcacccttgtacctcaaacaaccg

SEQ ID NO: 68093 - DNA, 218 bp, Zea mays
cgagttgctgcagctgttgtgctacctctgatcaaccaagtagctctggcaaacctttctccctactctcagcaacaacaatttcttccattcaaccaactgtctacactgaaccctgctgcttatttgcagcaacaactattaccatttagccagctagctactgcctactctacaacacaacaacttcttccatttaaccaattggccgcactgaa

SEQ ID NO: 68094 - DNA, 156 bp, Zea mays
cagcattcaataacacaccaagcgaggcactagcaacgagctaacactaatggctaccaagatattagccctccttgcgcttcttgcccttttagtgcgcgctacagatgcgttcattattccactctgctcacttgctgctagtgccagtattcc

SEQ ID NO: 68095 - DNA, 292 bp, Zea mays
tgctcacttgctcctagtgccattattccacagttcctccctccagttacttcaatgggcttcgaacacccagctgtgcaagcctacaggctacaacaagcgcttgcggcgagcgtcttacaacaaccaattgcccaattacaacaacaatccttggcacatctaaccatacaaaccatcgcaacgcaacagcaacaacaatttctaccagcactgagccaactagctgtggtgaaccctgtcgcctacttgcaacagcagttgctggcatcaaacccactgctctggcaaa

SEQ ID NO: 68096 - DNA, 290 bp, Zea mays
ccggcagcatagtcctaatcagcgactactgtatgactccatcacatacaagacaagcctgctctgttcagaagcttcttcaaatggctaaagcccggcggcaaagtcctaatcagcgactactgtaagaatcctggaaaaccatcagaagaatttgctgcgtacattaagcagagaggctatgaccttcacgacgtgaaggcttatggacagatgctgaaggatgctggttttcataatgtcatcgcggaagatcgcactgagcagttcttgaatgtctacagagggag

SEQ ID NO: 68097 - DNA, 289 bp, Zea mays
ccaacaagcaacatagaaagtggaatacagtagcaaaaatagagcaacaatggcggccaagatattttccatccttatgctccttgctctttctgcatgtgttgctaacgcgaccatttttcctcaatactcacaagctcctatagctgcccttcttcccccataccttccatcaatgaccgctttagtatgtgaaaacccagcccttcaaccctacaggatccagcaagcaatcgcaacaagcaacttacctttatcacacctgttctttcaacaacgccagccctat

SEQ ID NO: 68098 - DNA, 291 bp, Zea mays
gtctcccatccctgaaaacctcacaaaaccctcgctcgctccccaccagcccgccgcgccgccgcctgtaccagctgcgtcaagatgagtcggcaccctgaggtgaagtgggctcagaggatcgacaaggtttacatcactgtacagttacctgacgcaaaggatgctaaggtcaatttggatccagatggtgtcttcacattctctggcagtgctggtacaaacttgtatgaattgaaactagatctgaatgacaaagtaaacgttgaggctagcaaataagtgtggggg

SEQ ID NO: 68099 - DNA, 288 bp, Zea mays
ctcgagcgttcagaaacacacctagcgaacgcactagcaacgacctaacaacaatggcttccaagacattatccctccttgcgcttcttgccctttttgtgagtgcaacaaatgcgttcattattccacaatgctcacttgctccgagtgccattattccacagttcctccctccagttacttcaatgggcttcgaacacccagctgtgcaagcctataggctacaacaagcgcttgcggcgagcgtcttagaacaaccaattgcccaattacacaacaatccttagc

SEQ ID NO: 68100 - DNA, 290 bp, Zea mays
caacaagcaacttacctttatcacccctgttctttcaacaatcgccagccctatctttggtgcagtcattggtacaaaccatcagggcacaacagctgcaacaactcgtgctaccagtgatcagccaagtagctctggcaaacctttctccctactctcagcaacaacaatttcttccattcaaccaactgtctacactgaaccctgctgcttatttgcagcaacaactattaccatttagccagctagctactgcctactctcagcaacaacaactcttccatttaacc

SEQ ID NO: 68101 - DNA, 289 bp, Zea mays
caacaagcaacatagaaagtggaatccagtagcaacaatagagcaacaatggcgaccaagatactttccctccttatgctccttgctctttctgcatgtgttgctaacgcgacaattttccctcaatgctcacaagctcctatagcttcccttcttcccccataccttccatcaatgatagcttcagtatgtgaaaacccagctcttcaaccctataggctccaacaagcaatcgcagcaagcaacatacctttatcacccttgtttcaacaatcccagccctatcttt

SEQ ID NO: 68102 - DNA, 289 bp, Zea mays
cagcaagcaacatagaaagtagaatccattagcaacaatagagcaacaatggcgaccaagatattttccctccttatgctccttgctctttctacatgtgttgctaacgcgacaattttccctcaatgctcacaagctcctatagcttcccttcttcccccataccttccatcaattatagcttcagtatgtgaaaacccagctcttcaaccatataggcttcaacaagcaatcgcagcaagcaacatacctttatcgcccttgttgtttcaacatcaccagccctatc

SEQ ID NO: 68103 - DNA, 285 bp, Zea mays
ctgagcctctacatctcttctctctctgctcctccgcctccgcctgatccatccaagacagggatcgccatgtcggactcggaggagcaccacttcgaatcgaaggccgacgctggggcgtccaagacctacccgcagcaggctggcaccgtccgtaagaacggcttcatcgtcatcaagaaccgtccctgcaaggttgtggaggtttctacctccaagactggtaagcatcgccacgccatatgccactttgtcgcctagcccatattcaatggaaaaagcttg

SEQ ID NO: 68104 - DNA, 323 bp, Zea mays
atcgtatgcacgcgcatgtacgcgcacgtattctgctcgagtatgatcgagaccaactagcaacatagaaagcacgatagtgtaccaacaatggcagccaaaatattttgcctccttatgctccttggtctttctgcaagtgctgctacggcgaccattttcccgcaatgctcgcaagctcctatagcttcccttcttcccccgtacctctcaccagcggtgtcttcggtatgtgaaaacccaattcttcaaccctacaggatccaacaggcaatcgcagctggcatcttacctttatcacccttgttcctccaacaatcatc

SEQ ID NO: 68105 - DNA, 292 bp, Zea mays
attgagaccaacaagcaacatagaaagtggaatacagtagcaacaatagagcaacaatggcggccaagatattttccatccttatgctccttgctctttctgcatgtgttgctaacgcgaccatttttcctcaatactcacaagctcctatagctgcccttcttcccccataccttccatcaatgaccgcttcagtttgtgaaaacccagcccttcaaccctacaggctccaacaagcaatcgcaacaagcaacttacctttatcacccctgttcttcaacaatcgccagcc

SEQ ID NO: 68106 - DNA, 289 bp, Zea mays
agctcttcaaccatataggcttcaacaagcaatcgcagcaagcaacatacctttatcgcccttgttgtttcaacaatcgccagccctatctttggtgcagtcattggtacaaaccatcagggcacaacagctgcagcaactcgtgctacctctgatcaaccaagtagctctggcaaacctttctccctactctcagcaacaacaatttcttccattcaaccaactgtctacactgaaccctgctgcttatttgcagcagcatctattaccatttaccagctagctactg

SEQ ID NO: 68107 - DNA, 288 bp, Zea mays
gcaacatagaaagcacaatagtgtaccaacaatggcagccagaatattttgcctccttatgctccttggtctttctgcaagtgctgctacggcgaccattttcccgcaatgctcgcaagctcctatagcttcccttcttcccccgtacctctcaccagcggtgtcttcggtatgtgaaaacccaattcttcaaccctacaggatccaacaggcaatcgcagctggcatcttacctttatcacccttgttcctccaacaatcatcagccctattaaacagttacctttg

SEQ ID NO: 68108 - DNA, 281 bp, Zea mays
taagcttcttaagatggaagagactttgcacaagcgtgtcattggccaagatgaggctgtggtagcaattagtcgctccatccgccgtgctcgtgtgggtctcaagaaccccaacaggccaattgcaagctttatttttgctggtcccaccggcgttgggaagtctgagcttgcaaaggctcttgcagcctattactttggctctgaggaggctatgatccggcttgatatgagtgaattcatggagagacacacggtatccaagctgattggtcacctcc

SEQ ID NO: 68109 - DNA, 102 bp, Zea mays
taaaagagggcaccaccaatgatgggttatagttcaataataaagttttttgtctgatgtttgtggcttcccagaaataagaaagtacatttctagattctt

SEQ ID NO: 68110 - DNA, 284 bp, Zea mays
tagcaacatagaaagcacaatagtgtaccaacaatggcagccaaaatattttgcctccttatgctccttggtatttctgcaagtgctgctacggcgaccattttcccgcaatgctcacaagctcctatagcttcccttcttcccccgtacctctcaccagcggtgtcttcggtatgtgaaaacccaattcttcaaccctacaggatccaacacccaatcgcagctggcatcttacctttatcacccttgttcctccaacaatcatcagccctttacagcagtta

SEQ ID NO: 68111 - DNA, 288 bp, Zea mays
gcaacatagaaagtggaatacagtagcaaaaatagagcaacaatggcggccaagatattttccatccttatgctccttgctctttctgcatgtgttgctaacgcgaccatttttcctcaatactcacaagctcctatagctgcccttcttcccccataccttccatcaatgaccgctttagtatgtgaaaacccagcccttcaaccctacaggatccagcaagcaatcgcaacaagcaacttacctttatcacacctgttctttcaacaatcgcagccctatctttgg

SEQ ID NO: 68112 - DNA, 260 bp, Zea mays
attttgagcattcagaaacacacctagcgaaggctactagcaacgacctaacaacaatggcttccaagacattatacctccttgcgcttcttgccctttttatgagtgcaacaaatgcgttcattattccacaatgctcacttgcctcgtgtgccattattccacagttcctccctcctagttacttcaatgggcttcgaacacccagctgtgcaagcctataggctacaacaagcgctgcgcggcgagcgtcttagaac

SEQ ID NO: 68113 - DNA, 120 bp, Zea mays
cagcagtgttgccagcagctcaggcaggtggagccgcagcaccggtaccaggcgatcttcggcttggtcctccagtccatcctgcagcagcagccgcaaagcgccaggtcgcggggatgt

SEQ ID NO: 68114 - DNA, 279 bp, Zea mays
atttcgagcattcagaaacacaccaagcgaagcgcactagcaacgacctaacaacaatggctaccaagatattagccctccttgcgcttcttgccctttttgtgagcgcaacaaatgcgttcattattccacaatgctcacttgctcctagtgccattattccacagttcctcccaccagttacttcaatgggcttcgaacacctagctgtgcaagccaacatgcaacaacaagcgcttgcggcgagcgtcttacaacaaccaattgcccatttgcaac

SEQ ID NO: 68115 - DNA, 285 bp, Zea mays
gcacaatagtgtaccaacaatggcagccaaaatattttgcttccttatgctccttggtctttctgcaagtgttgctaccgcaaccattttcccacaatgctcacaagctcctatagcttcccttcttcccccatacctctcaccagcggtgtcttcaatgtgtgaaaacccaattgttcaaccctacaggatccaacaggcaatcgcaacaggcatcttaccattatcacccttgttcctccaacaaccgtcagccctattacagcagttactttggtccatttg

SEQ ID NO: 68116 - DNA, 286 bp, Zea mays
caactaccaacatacatagtgaagtacactagcaacatcttagcaccaatggcagccaagatttttgcgctccttgccctccttgctctttcagcaagtgttgctaccgcgactattattccacaatgctcacaacaatacctctctccagtgatagccgcgagatttgaatacccatctatacaatcctacaggctacaagaggccatcacagcaagcatcttacggtcgttagcattgaccgtccaacaaccatatgccctattgcaacaccatccttagtgaa

SEQ ID NO: 68117 - DNA, 283 bp, Zea mays
gttgcttgcatcaaacccacttgctctggcaaacgtagttgcaaaccagccacaacaacagctgcaacagtttctgccagcgctcagtcaactagccatggtgaaccctgccgcctacctacaacagcaacaactgctttcatctagcccgctcgctgtggccaatgcacctacatacctgcaacaacaattgttgcaacagattgtaccagctctgactcagctagttgtggcaaaccctgctgcctacttgcaacagctgcttccatcaaccaactgacta

SEQ ID NO: 68118 - DNA, 282 bp, Zea mays
ctcgagccgctcgagccgctcgagccgtgccgcctcaccgcctctctcactctgagacagcagatccattgtccggagagtagaagccgcacgaacccatggcctccggcgagcttgactgcacctacgccgctctcatcctcagcgacgatggcatcgcaatcaccgccgagaagatcgccacgatcgtgaaggcagccaacatcaaggtcgagtcctactggccggcgctcttcgcaagctcctggagaagcgcacgtcgaggactctcctctccgttgg

SEQ ID NO: 68119 - DNA, 272 bp, Zea mays
  unsure (1)..(272): unsure at all n locations
attgagaccaactagcaacatagaaagcacaatagtgtaccaacaatggcagccaaaatattttgcttccttatgctccttggtctttctgcnaatattgctaccgcaaccattttcccacaatgctcacaagctcctatagcttcccttcttcccccatacctctcaccagcggtgtcttcaatgtgtgaaaacccaattgttcaaccctacaggatccaacaggcaatcgcaacaggcatcttaccattatcacccttgttcctccacaa

SEQ ID NO: 68120 - DNA, 287 bp, Zea mays
cggctcgagcttcttcccccgtacctctcaccagcggtgtcttcggtatgtgaaaacccaatacttcaaccctacaggatccaacaggcaatcacagctggcatcttacctttatcacccttgttcctccaacaatcatcagccctattacatcagttacctttggtgcatttattggcacaaaacatcagggcacaacaactacaacaacttgtgctagcaaaccttgctgcctactctcagcaacagcagtttcttccattcaaccaactagcgcattgaactct

SEQ ID NO: 68121 - DNA, 284 bp, Zea mays
gaaacacaccaagcgaagacattagcaacaacctaacaacaatggctaccaagatattatccctccttgcgcttcttgcgctttttgcgagcgcaacaaatgcgttcattattccacaatgctcacttgctccaagttccattattacacagttcctcccaccagttacttcaatgggcttcgaacacccagctgtgcaagcctataggctacaacaagcaattgcggcgagcgtcttacaacaaccaatttcccagttgcaacaacaaccttggcacatctaa

SEQ ID NO: 68122 - DNA, 282 bp, Zea mays
cggggagcggcagctgcagcggccgagggcggagacgcgaggcatggatagataccaaagggtagagaagcctcggaatgacacgccaatcagccagaatgagatcagaatcactactcaggggaggatgaggaactatatcagctatgggatgtcgctgcttgaggaaaatggacatgatgagattagtatcaaggccatgggacgggccataaataagacagttatggttgttgaattgatcaagagaagggttggaggtcttcacagaacactgctact

SEQ ID NO: 68123 - DNA, 284 bp, Zea mays
tctcgagccgattcggctcgaggcaacatagaaagcacaatagtgtaccaacaatggcagccagaatattttgcctcctactgctccttggtctttctgcaagtgctgctacggcgatcattttcccgcaatgctcgcaagctcctatagcacacccttcttcccccgtacctctcaccagcggtgtcttcggtatgtgaaaacccaattcttcaaccctacaggatccaacaggcaatcacagctgggcatcttacctttatcacccttgtactccaacaatc

SEQ ID NO: 68124 - DNA, 278 bp, Zea mays
gtcatgacaagcagcaacaaccacaacagcctcagcaatatcagcagggccaggaaaaatcacaacagcaacaatgtcattgccaggagcagcaacagactacaaggtgcagctataactactatagcagtagctcaaatctaaaaaattgtcatgaattcctaaggcagcagtgcagccctttggtaatgccttttctccaatcacgtttgatacaaccaagtagctgccaggtattgcagcaacaatgttgtcatgatcttaggcagttgagccac

SEQ ID NO: 68125 - DNA, 280 bp, Zea mays
gatccatccagcaaagaggacaaccctaaatggtcaatggtggatgtacagtttgttcggatgatgaagcgcttcatctccctggatgagctgaaaacctatcaccaagcccacaaagcaactggtggtcccttaaaaagcatgactctcttcacccgccagagactttcagttcagcctctgactcaagaagaatttgattatattttgagcctggaggaagcagaaccaagttaatcagaaggctctactaatggatggagtgacgcaccgagatttt

SEQ ID NO: 68126 - DNA, 283 bp, Zea mays
ctagcaacatagaaagcacaatagtgtaccaacaatggcagccaagatattttccatccttatgctccttgctctttcttaatgtgttgctaacgcgaccatttttcctcaatactcacaagctcctatagctgcccttcttcccccataccttccatcaatgaccgctttagtatgtgaaaacccagcccttcaaccctacaggatccagcaagcaatcgcaacaagcaacttacctttatcacacctgttctttcaacaatcgccagcctatctttggtgc

SEQ ID NO: 68127 - DNA, 269 bp, Zea mays
  unsure (1)..(269): unsure at all n locations
ganagcacaatagtgtaccaacaatggcagccaaaatattttgcctccttatgctccttggtctttctgcaagtgatgctacggcgaccattttcccgcaatgctcgcaagctcctattgcttcccttcttcccccgtacctctcaccagcggtgtcttcggtatgtgaaaaccccattcttcaaccctaaaggatccaacaggcaatcgaagctggcactttacttttatcaccctggtcctcccacaatcatcatccctattacaca

SEQ ID NO: 68128 - DNA, 268 bp, Zea mays
  unsure (1)..(268): unsure at all n locations
tgtcacacctcatcgccctcgtaaattacatcgatgccaccctcatcgcagncgtcgccgacgccgccgggaatctggcggacgcagccgcaaagcgccaggtcgcggggctgttggcggcgcagatagcgcacaactgacggcgatgtgcggcctgcagcagccgactccatgcccctacgctgctgccggcggtgtcccccactgaagaaactatgtgctgtagtatagccgctggctagctagctagttgagtcatttagcggcg

SEQ ID NO: 68129 - DNA, 171 bp, Zea mays
gaagaaactatgtgctgtagtatagccgctggctagctagctagttgagtcatttagcggcgatgattgagtaataatgtgtcacgcatcaccatgggtggcagtgtcagtgtgagcaatgacctgaatgaacaattgaaatgaaaagaaaaaaagtactccatctgttcc

SEQ ID NO: 68130 - DNA, 281 bp, Zea mays
gcaacatagaaagcacaatagtgtaccaacaatggcagccaaaatattttgcttccttatgctccttggtctttctgcaagtgctgctaccgcaaccattttcccacaatgctcacaagctcctatagcttcctttcttcccccatacctctcaccagcggtgtcttcagtatgtgaaaacccaattcttcaaccctacaggatccaacaggcaatcgcagcaggcatcttacctttatcacccttgttcctccaacaaccgtcagcccattacagcagtt

SEQ ID NO: 68131 - DNA, 281 bp, Zea mays
ttgaactctgcttcttatttgcaacaacaacaactaccattcagccagctacctgttgcctacccccagcaatttcttccattcaaccaactggcagcattgaactctcctgcttatttacagcagcaacaactactaccattcagccagctagctggtgtgagccctgctaccttcttgacacaaccacagttgttgccgttctaccagcacgctgcgcctaacgctggcaccctcttacaactgcaacaattgctgccattcaacaacttgctttgaca

SEQ ID NO: 68132 - DNA, 274 bp, Zea mays
aaagcacaatagtgtaccaacaatggcagtcagaatattttgccaccttatgctccttggtctttctgcaactgctgctacggcgaccattttcccgcaatgctcgcaagctcctatagcttcccttcttcccccgtacctctcagcagcggtgtcttcggtatgtgaaaacccaattcttcaaccctacaggatccaacaggcaatcgcagctggcatcttacctgtatcacccttgttcctccaacaatcatcagccctattacacagttac

SEQ ID NO: 68133 - DNA, 274 bp, Zea mays
agtccagtaagcaacatagcaagtggaatccagtatcaacaacagatcaatgatggcgaccaagatattatccctccttatgatccttgctctttctgcatgtgttgctaacgctacaactttcccattatgctcactagctcctatagcttcccttcttcccccatagcttccatcaatgatagcttcagtatgtgtagacccagctcttcagcgctataggctccaacaagcaatcgcagcaatcaacatacctgtatcaccctgttgtttc

SEQ ID NO: 68134 - DNA, 283 bp, Zea mays
attttgagcattcagaaacacaccaagcgaagcgcactagcaacgacctaacaacaatggctaccaagatattagccctccttgcgcttcttgccctttttgtgagcgcaacaaatgcgttcattattccacaatgctcacttgctcctagtgccattattccacagttcctcccaccagttacttcaatgggcttcgaacacctagctgtgcaagccaacatgcaacaacaagcgcttgcggcgagcgtcttacaacaaccaattgccaattgcaacaacaa

SEQ ID NO: 68135 - DNA, 276 bp, Zea mays
agaaagcacaatagtgtaccaacaatggcagccaaaatattttgcttccttatgctccttggtctttctgcaagtgttgctaccgcaaccattttcccacaatgctcacaagctcctatagcttcccttcttcccccatacctctcaccagcggtgtcttcaatgtgtgaaaacccaattgttcaaccctacaggatccaacaggcaatcgcaacaggcatcttaccattatcacccttgttcctccaacaaccgtcagccctatacagcagttac

SEQ ID NO: 68136 - DNA, 99 bp, Zea mays
attagccctccttgcgcttcttgcccttttagtgagcgcaacaaatgcgttcattattccacagtgctcacttgctcctagcgccagtattccacagtt

SEQ ID NO: 68137 - DNA, 276 bp, Zea mays
aaatcctccaataccccaccctacgaatcttccaacccctccgacgatgccttccgcgccggcgctcgtccccgcgtgcgacatgcaggagccgttgctggcggagtcgtccgaccgcttctccatgttcccgatccggtacccgcagatttgggagttctacaagaaggcggtggcgtccttctggactgccgaggaggtggacctctccgcggacgcgcgccactgggacgcggccctctccctcgacgctccgcacctcatccccacgtgctc

SEQ ID NO: 68138 - DNA, 277 bp, Zea mays
gcggcgcgggcggacaaggagcaggcggaggaggagttgtgccaagccacaatgggtatctcgcgtgactcgatgcacaagcgccgagccaccggtggaaagcagaaggcctggaggaagaagcgaaagtatgagcttggtcgccagccagccaacaccaagttgtcaagcaataagacggtgaggagggtccgtgttcggggaggtaatgtgaaatggagggctcttcgccttgatactggtaactactcatggggaagtgagctgttacccgcaa

SEQ ID NO: 68139 - DNA, 258 bp, Zea mays
aagcaacatagaaagtggaatccagtagcaacaacagagcaacaatggcgaccaagatattttccctccttatgctccttgctctttctgcatgtgttgctaacgcgacaattttccctcaatgctcacaagctcctatagcttcccttcttcccccataccttccatcaatgatagcttcagtatgtgaaaacccagctcttcagccctataggctccaacaagcaatcgcagcaagcaacatacctttatcaccct

SEQ ID NO: 68140 - DNA, 274 bp, Zea mays
ccggaaactccggggtcacgtgagccacggccacggtcgcatcggtaagcaccgcaagcacccaggatgccgcgggaatgctggaggcatgcatcacgacaggatcaactttgacaaatatcatccaggttacttcggcaaagttggcatgaggcattaccacttgaagaggaaccagagcttctgcccaactgtcaacctggataaattatggacgttggtcagcgagcagacacgggtcaatgcagcaaaaaacaagaatgagttgctccca

SEQ ID NO: 68141 - DNA, 256 bp, Zea mays
ttcagaaacacaccaagcgaagctacctagcaacgacttaacaacaatggctaccaagatattagccctccttgcgcttcttgccctttttgtgagcgcaacaaatgcgttcattattccacaatgctcacttgctcctagtgccattataccacagttcctccgaccagtaacttcaatgggcttcgaacacctagctgtgcaagcctacaagctacaacaagcgcttgcggcgagcgtcttacaacaaccaatt

SEQ ID NO: 68142 - DNA, 255 bp, Zea mays
gtgttgggttcggtgggtcttgcttccagaaggacatcctgaacctggtgtacatctgcgagtgcaatggcctgcccgaggtggccaactactggaagcaggtgatcaagatcaacgactaccagaagagccggttcgtgaaccgcgtcgtgtcgtccatgttcaacaccgttgccggcaagaagatcgccgtcctcggcttcgccttcaagaaggacaccggcgacaccagggagaccccggccatcgatgtct

SEQ ID NO: 68143 - DNA, 253 bp, Zea mays
tgcattcagggacacaccaagcgaacgcactagcaacaacctaacaacaatggctaccaagatattataccgccttgcgcttcttgcgctttttgcgatcgcaacaaatgcgtccattattccacaatgctcacttgctcctagttccattattccacagttcctcccaccagttacttcaatggccttcgaacacccatctgtgcaagcctataggctacaacaagcgattgcggcgagcgtcttacaacaa

SEQ ID NO: 68144 - DNA, 254 bp, Zea mays
cagcaagcaacatagaaagtagaatccattagcaacaatagagcaacaatggcgaccaagatattttccctccttatgctccttgctctttctacatgtgttgctaacgcgacaattttccctcaatgctcacaagctcctatagcttcccttcttcccccataccttccatcaattatagcttcagtatgtgaaaacccagctcttcaaccatataggcttcaacaagcaatcgcagcaagcaacataccttt

SEQ ID NO: 68145 - DNA, 243 bp, Zea mays
caacaagcaacatagaaagtggaatccagtagcaacaacagagcaacaatggcgaccaagatattttccctccttatgctccttgctctttctgcatgtgttgctaacgcgacaattttccctcaatgctcacaagctcctatagcttcccttcttcccccataccttccatcaatgatagcttcagtatgtgaaaacccagctcttcagccctataggctccaacaagcaatcgcagcaagc

SEQ ID NO: 68146 - DNA, 252 bp, Zea mays
caatgtgaaggccaacaacaacatcaccaacaatcacaaggccatgtgcaacaacacgaacagagccatgagcaacaccaaggacagagccatgagcaacaacatcaacaacaattccagggtcatgacaagcagcaacaaccacaacagcctcagcaatatcagcagggccaggaaaaatcacaacagcaacaatgtcattgccaggagcagcagcagactacaaggtgcagctataactactatagcagt

SEQ ID NO: 68147 - DNA, 256 bp, Zea mays
cagaaacacaccaagcgaagcacattagcaacaacctaacaacaatggctaccaagatattatccctccttgcgcttcttgcgctttttgcgagcgcaacaaatgcgttcattattccacaatgctcacttgctccaagttccattattacacagttcctcccaccagttacttcaatgggcttcgaacacccagctgtgcaagcctataggctacaacaagcaattgcggcgagcgtcttacaacaaccaatttc

SEQ ID NO: 68148 - DNA, 68 bp, Zea mays
ttgtaattcaataataaagttttttggatgatgtatgtggccaaccagaaataagaagttacatttcc

SEQ ID NO: 68149 - DNA, 247 bp, Zea mays
gaccaactagcaacatagaaagcacaatagtgtaccaacaatggcagccaaaatattttgcttccttatgctccttggtctttctgcaagtgttgctaccgcaaccattttcccacaatgctcacaagctcctatagcttcccttcttcccccatacctctcaccagcggtgtcttcaatgtgtgaaaacccaattgttcaaccctacaggatccaacaggcaatcgcaacaggcatcttaccatta

SEQ ID NO: 68150 - DNA, 253 bp, Zea mays
ccattcaaccaactggctgcattgaactctgctgcttatttgcaacaacaattaccattcagccagctagttgctgcctacccccagcaatttcttccattcaaccagctagcagcattgaactctgctgcttatttacagcatcgacaactactaccattcagccagctagctgatgtgagcgctgctgccttcttgacacaacaacagttgttgccgtactacctgcacgctatgcctaacgctggcaccc

SEQ ID NO: 68151 - DNA, 249 bp, Zea mays
caacaagcaacatagaaagtggaatccagtagcaacaatagagcaacaatggcgaccaagatactttccctccttatgctccttgctctttctgcatgtgttgctaacgcgacaattttccctcaatgctcacaagctcctatagcttcccttcttgccccataccttccatcaatgatagcttcggtatgtgaaaacccagctcttcaaccctataggctccaacaggcaatcgcagcaagcgacata

SEQ ID NO: 68152 - DNA, 252 bp, Zea mays
tctcgagccgattcggctcaggaattcctaaggcagcagtgcaaccctttggtaatgcctacttctccaatcacgtttgaaccaaccaagtagctgccaggtattgcagcaacaatgttgtcatgatcttaggcagattgagccacaatacattcaccaagcaatctacaacatggttcaatccataatccaggaggagcaacaacaacaaccatgtgagttatgtggatctcaacaagctactcagagtgc

SEQ ID NO: 68153 - DNA, 252 bp, Zea mays
gtgaaaacccagctcttcagccctataggctccaacaagcaatcgcagcaagcaacatacctttatcacccttgttgtttcaacaatcgccagccctatctttggtgcagtcattggtacaaaccatcagggcacagcagctgcagcaactcgtgctacctgtgatcaaccaagtagctctggcaaacctttctccctactctcagcaacaacaatttcttccattcaaccaactgtctacactgaaccctg

SEQ ID NO: 68154 - DNA, 249 bp, Zea mays
ccagcaagcaacatagaaagtagaatccattagcaacaatagagcaacaatggcgaccaagatattttccctccttatgctccttgctctttctacatgtgttgctaacgcgacaattttccctcaatgctcacaagctcctatagcttcccttcttcccccataccttccatcaattatagcttcagtatgtgaaaacccagctcttcaaccatataggcttcaacaagcaatcgcagcaagcaacat

SEQ ID NO: 68155 - DNA, 246 bp, Zea mays
gacggggggtcacacatcatacttcttttgccattgcaatggaaaacaactacgcatgcccaccacccagcaagggaaacctgatcacagtcttgagcatcgatggtggtggggtcaagggcgtcatccctgctaccttccttgcattccttgagtctaaactccaggagcttgatgggagcagcgcgcgcatagctaactactttgatgtcatcgctggcacaagcacaggtagtattattgctg

SEQ ID NO: 68156 - DNA, 125 bp, Zea mays
ctgggtcttcagaccattagctttatctactccagagcgcagaagaacccgatcgacaccatgagggtgttgctcgttgccctcgctctcgtggctctcgctgcgagcgccacctccaagcatac

SEQ ID NO: 68157 - DNA, 246 bp, Zea mays
attttgagcattcagaaacacaccaagcgaaggcactagcaacaacctaacaacaatggctaccaagatattatccctccttgcgcttcttgcgctttttgcgagcgcaacaaatgcgtgcattattccacaatgctcacttgctcctagttccattattccacagttcctcccaccagttacttcaatggccttcgaacacccagctgtgcaagcctataggctacaacaagcgattgcggcgag

SEQ ID NO: 68158 - DNA, 246 bp, Zea mays
  unsure (1)..(246): unsure at all n locations
gcaactacagcgatggcaacctagtcgccactctgctcgcacacaagttgggagtcactcngtgtaccatcgctcatgccttggagaaaaccanataccccaactcggacatctacttggacaagttcgacagccagtaccanttctcttgccagttcacagctgaccttattgccatgaaccacactgatttcatcatcaccagcacnttccaagaaatcgcgggnagcaacgacaccgtggggc

SEQ ID NO: 68159 - DNA, 253 bp, Zea mays
agaatccattagcaacaatagatcaacaatggcgaccaagatattttccctccttatgctccttgctctttctacatgtgttgctaacgcgacaattttccctcaatgctcacaagctcctatagcttcccttcttcccccataccttccatcaattatagcttcagtatgtgaaaacccagctcttcaaccatataggcttcatcaagcaatcgcagcaagcaacatacctttatcgcccttgttgtttcaa

SEQ ID NO: 68160 - DNA, 253 bp, Zea mays
gcattcagaaacacaccaagcgaacgcagctagcaacaacctaacaacaatggctaccaagatattatccctccttgcgcttcttgcgctttttgcgagcgcaacaaatgcgtccattattccacaatgctcacttgctcctagttccattattccacagttcctcccaccagttacttcaatggccttcgaacacccagctgtgcaagcctataggctacaacaagcgattgcggcgagcgtcttacaacaa

SEQ ID NO: 68161 - DNA, 248 bp, Zea mays
tctcgagccgattcggctcgagtagaaagcacaatagtgtaccaacaatggcagccaaaatattttgcctccttatgctccatggtatttctgcaagtgctgctacggcgaccattttcccgcaatgctcacaagctcctatagcttcccttcttcccccgtacctctcaccagcggtgtcttcggtatgtgaaaacccaattcttcaaccctacaggatccaacaggcaatcgcagctggcatctta

SEQ ID NO: 68162 - DNA, 72 bp, Zea mays
ctgggtcttcagaccattagctttatctactccagagcgcagaagaacccgatcggcaccatgagggtgttg

SEQ ID NO: 68163 - DNA, 249 bp, Zea mays
ttcagaaacacacctagcgaacgcagctagcaacgacctaacaacaatggctaccaagatattatccctctttgcgcttcttgccctttttgtgagcgcaacaaatgcgttcattattccacaatgctcacttgctcctagtgccattattccacagttcctccctccagttacttcaatgggcttcgaacacccagctgtgcaagcctacaggctacaacaagcgcttgcggcgagcgtcttacaaca

SEQ ID NO: 68164 - DNA, 248 bp, Zea mays
ctcgagccgatttagcgctgctagtaagggtgtgcaaaaaaccttatgcttgcgttgaaatcagaagctcgggcgatccttgttcattcttttagtctcttcacccccaccaccaatctttccatgtctctttattcgtctctgtactgccgtgtagctgctctttggtcgtgtatgctgtgatcttgtcccgaaatttgcctggaagttcgaagactttgctaactggtctatgtcatttgctaaga

SEQ ID NO: 68165 - DNA, 246 bp, Zea mays
gaagagccagatccatgagatcgtcctggttggtggaagcaccaggattcccaaggtccagcagctcctgcgggactacttcgacggcaaggagcccaacaagggtgtcaaccctgatgaggctgttgactttggtgccgctgtgcagggaagcatcttgagcggcgagggtggtgacgagaccatagatatcctcctccttgatgtggctcccctcaccctgggtatcgagaccgtcggtggagt

SEQ ID NO: 68166 - DNA, 253 bp, Zea mays
attttgagcattcagaaacacacctagcgaagcgcactagcaacgacctaacaacaatggcttccaagacattatccctccttgcgcttcttgccctttttgtgagtgcaacaaatgcgttcattattccacaatgctcacttgctccgagtgccattattccacagttcctccctccagttacttccatgggcttcgaacacccagctgtgcaagcctataggctacaacaagcgcttgcggcgagcgtctt

SEQ ID NO: 68167 - DNA, 250 bp, Zea mays
ggactgtcttgttcatatcggtgtggcatatcattatgcttgaggtggtggtatgtaccttccattagtttatgggccttcaccaacaggaaggatccaccaaggagtttgttcaacatggatgaagaatacaattcttctggaatatagcgaagaatgcagttgggctcacatctttgtgaggcagtcaaatttcaagttacgtgctgatctgtccactccttttatcatgattggtcctgagacaggg

SEQ ID NO: 68168 - DNA, 250 bp, Zea mays
tgagaccaacaagcaacatagaaagtggaatacagtagcaaaaatagagcaacaatggcggccaagatattttccatccttatgctccttgctctttctgcatgtgttgctaacgcgaccatttttcctcaatactcacaagctcctatagctgcccttcttcccccataccttccatcaatgaccgctttagtatgtgaaaacccagcccttcaaccctacaggatccagcaagcaatcgcaacaagca

SEQ ID NO: 68169 - DNA, 249 bp, Zea mays
cagaccattagctttatctactccagagcgcagaagaacccgatcgacaccatgagggtgttgctcgttgccctcgctctcctggctctcgctgcgagcgccacctctacgcatacaagcggcggctgcggctgccagccaccgccgccggttcatctaccgccgccggttcatctgacgcctccaccatgccactaccctactcatccgcgccggcctcagcctcatccccagccagacccatgcccg

SEQ ID NO: 68170 - DNA, 248 bp, Zea mays
caacaaccatccttaatgaatctatatctccaaagaatcgcagcacaacaactacaacaacagttgcttccaacaatcaatcaagtagttgcagcgaaccttgctgcttacctccagcaacaacaatttcttccattcaatcaactagctggggtgaaccctgctgcttacttgcaggcacaacagctactaccattcaaccaacttgtcaggagccctgctgccttcttactgcagcaacagttgct

SEQ ID NO: 68171 - DNA, 247 bp, Zea mays
attttgagcattcagaaacacacctagcgaacgcagctagcaacgacctaacaacaatggcttccaagacattatccctccttgcgcttcttgccctttttgtgagtgcaacaaatgcgttcattattccacaatgctcacttgctccgagtgccattattccacagttcctccctccagttacttcaatgggcttcgaacacccagctgtgcaagcctataggctacaacaagcgcttgcggcgag

SEQ ID NO: 68172 - DNA, 243 bp, Zea mays
cggctcgagtagcaacatagaaagcacaatagtgtaccaacaatggcagccaaaatattttgcttccttatgctccttggtctttctgcaagtgctgctaccgcaaccattttcccacaatgctcacaagctcctatagcttcctttcttcccccatacctctcaccagcggtgtcttcagtatgtgaaaacccaattcttcaaccctacaggatccaacaggcaatcgcagcaggcatctta

SEQ ID NO: 68173 - DNA, 245 bp, Zea mays
attttgagcattcagaaacacacctagcgaagcgcactagcaacgacctaacaacaatggcttccaagacattatccctccttgcgcttcttgccctttttgtgagtgcaacaaatgcgttcattattccacaatgctcacttgctccgagtgccattattccacagttcctccctccagttacttcaatgggcttcgaacacccagctgtgcaagcctataggctacaacaagcgcttgcggcg

SEQ ID NO: 68174 - DNA, 249 bp, Zea mays
cggctcgagctagcaacatagaaagcacaatagtgtaccaacaatggcagccaaaatattttgcctccttatgctccttggtctttctgcaagtgctgctacggcgaccattttcccgcaatgctcgcaagctcctatagcttcccttcttcccccgtacctctcaccagcggtgtcttcggtatgtgaaaacccaattcttcaaccctacaggatccaacaggcaatcgcagctggcatcttaccttt

SEQ ID NO: 68175 - DNA, 247 bp, Zea mays
attttgagcattcagaaacacaccaagcgaacagcattagcaacaacctaacaacaatggctaccaagatattatccctccttgcgcttcttgcgctttttgcgagcgcaacaaatgcgttcattattccacaatgctcacttgctccaagttccattattacacagttcctcccaccagttacttcaatgggcttcgaacacccagctgtgcaagcctataggctacaacaagcaattgcggcgag

SEQ ID NO: 68176 - DNA, 246 bp, Zea mays
ccgtggtgatgaaggggtcgttgacgtacatgttcaagtacgacaccgtgcacggccaatggaagcacagcgacatcgccctcaaggactccaagacgcttctcttcggcgagaagccggtcaccgtctttggcatcaggaaccccgaggagatcccgtggggtgaggctggtgctgagtatgtcgtggagtccaccggtgtcttcactgacaaggacaaggctgctgcacatctgaagggtggtg

SEQ ID NO: 68177 - DNA, 247 bp, Zea mays
attattgagaccaactagcaacatagaaagcacaatagtgtaccaacaatggcagccaaaatattttgcttccttatgctccttggtctttctgcaagtgttgctaccgcaaccattttcccacaatgctcacaagctcctatagcttcccttcttcccccatacctctcaccagcggtgtcttcaatgtgtgaaaacccaattgttcaaccctacaggatccaacaggcaatcgcaacaggcatct

SEQ ID NO: 68178 - DNA, 247 bp, Zea mays
ctgtgttcttgcgcgtacgcgtacacagccccgatccgaatcgtcctcctcgcgagcctcgccgatcccccactcccctcccctcgcttcaagatgcagatctttgtgaagaccctcaccggcaagactatcaccctcgaggtggagtcttctgacaccattgacaatgtcaaggctaagatccaggacaaggagggcatccctcctgaccagcagcgccttatcttcgccggcaagcagcttgagg

SEQ ID NO: 68179 - DNA, 256 bp, Zea mays
tagccatcaagcaacatactaaagtagaatccattagcagcaatagagcaacatatggagaccaagatattttccctccttagtgtccttgctctttctacatgtgttgctaacgcgacaattttccctcaatgctcataagctcctatagcttcccttcttgctccataccttccatcaattatagcttcagtatgtgacaactcagctcttcaaccatgtaggcttcgacaatcaatcgcagcaagcaacatac

SEQ ID NO: 68180 - DNA, 245 bp, Zea mays
attgagaccaactagcaacatagagatcacaatagtgtaccaacaatggcagccaaaatattttgcttccttatgctccttggtctttctgcaagtgttgctaccgcaaccattttcccacaatgctcacaagctcctatagcttcccttcttcccccatacctctcaccagcggtgtcttcaatgtgtgaaaccccaattgttcaaccctacaggatccaacaggcaatcgcaacaggcatctt

SEQ ID NO: 68181 - DNA, 246 bp, Zea mays
cggctcgagcaacaagcaacatagaaagtggaatccagtagcaacaatagagcaacaatggcgaacaagatattttccctccttatgctccttgctctttctacatgtgttgctaacgcgacaattttccctcaatgctcacaagctcctatagcttcccttcttcccccataccttccatcaattatagcttcaatatgtgaaaacccagctcttcaaccatataggcttcaacaagcaatcgca

SEQ ID NO: 68182 - DNA, 248 bp, Zea mays
tccgcagtccctctcctctcgaggtggcggcgctccctcctgttttcctcttcttcttcctgtactatatagcctcccctcgcaaatcgtcactgacgagtgatgtcattccgcttgcttgattgttccagatattcgcagttgaccgggtcctcggagcacgatgaagtttgttgctgcctacttgcttgctgtcctcgctgggaacgccagcccctccgctgaggattagactgccattctggagt

SEQ ID NO: 68183 - DNA, 248 bp, Zea mays
gcaacatagaaagtggaatccagtagcaacaacagagcaacaatggcgaccaagatattttccctccttatgctccttgctctttctgcatgtgttgctaacgcgacaattttccctcaatgctcacaagctcctatagcttcccttcttcccccataccttccatcaatgatagcttcagtatgtgaaaacccagctcttcagccctataggctccaacaagcaatcgcagcaagcaacataccttt

SEQ ID NO: 68184 - DNA, 222 bp, Zea mays
attttgagcattcagtaacacacaatgcgaaggcactatcaacgacctaacaacgatggctaccaagatattaggcctccttgcggttcttgccctttttgtgagcgcaacagatgcgttcattattccacaatgctcacttgctcctagtgctattattggacagttcctctcaccagttacttcaatgggcttcgaacacctagctgtgctagccaacat

SEQ ID NO: 68185 - DNA, 247 bp, Zea mays
attttgagcattcagaaacacacctagcgaacgacactagcaacgacctaacaacaatggcttccaagacattatccctccttgcgcttcttgccctttttgtgagtgcaacaaatgcgttcattattccacaatgctcacttgctccgagtgccattattccacagttcctccctccagttacttcaatgggcttcgaacacccagctctgcaagcctataggctacaacaagcgcttgcggcgag

SEQ ID NO: 68186 - DNA, 248 bp, Zea mays
ccaactagcaacatagaaagcacaatagtgtaccaacaatggcagccaaaatattttgcttccttatgctccttggtctttctgcaagtgctgctaccgcaaccattttcccacaatgctcacaagctcctatagcttcctttcttcccccatacctctcaccagcggtgtcttcagtatgtgaaaacccaattcttcaaccctacaggatccaacaggcaatcgcagcaggcatcttacctttatca

SEQ ID NO: 68187 - DNA, 249 bp, Zea mays
ccagtacgcagtcggcatgccgcagactggtagtagccggcgcgccgtcaccgtatcctcagatcagcggcgagcagaaaccacaccactctactgacgcccgacgagcagtgtaacattttccttcagccatgggtaaggagaagactcacatcaacattgtggtcattggccatgtcgactctggcaagtcgaccaccactggccacctgatctacaagcttggaggtattgacaagcgagtgattg

SEQ ID NO: 68188 - DNA, 243 bp, Zea mays
caatttcttccattcaaccaactgtctacactgaaccctgctgcttatttgcagcaacaactattaccatttagccagctagctactgcctactctcagcaacaacaacttcttccatttaaccaattggccgcactgaaccccgctgcttatttgcagcagcaaatactactgccatttagcgagctagctgcagcaagtcgtgcttccttcttgacacagcaacagttgctgcctttctac

SEQ ID NO: 68189 - DNA, 245 bp, Zea mays
gaccaactagcaacatagaaagcacaatagtgtaccaacaatggcagccagaatattttgcctccttatgctccttggtctttctgcaagtgctgctacggcgaccattttcccgcaatgctcgcaagctcctatagcttcccttcttcccccgtacctctcaccagcggtgtcttcggtatgtgaaaacccaattcttcaaccctacaggatccaacaggcaatcacagctggcatcttacctt

SEQ ID NO: 68190 - DNA, 244 bp, Zea mays
caacaagcaacatagaaagtggaatccagtagcaacaatagagcaacaatggcgaccaagatactttccctccttatgctccttgctctttctgcatgtgttgctaacgcgacaattttccctcaatgctcacaagctcctatagcttcccttcttcccccataccttccatcaatgatagcttcagtatgtgaaaacccagctcttcaaccctataggctccaacaagcaatcgcagcaagca

SEQ ID NO: 68191 - DNA, 233 bp, Zea mays
ctcgagccgcagaaacgcagcaagcgaagctatctagcaacgacttaacaacaatggctaccaccatattagccctcgttgcgcatcttgccctttttgtgagcgcaacaaatgcgttcattattccacaatgctcacttgctcctagtgccattataccacagttcctccgaccagatacttcaatgggcttcggacacatagctgtgcatgcctacgggctacaacaaacg

SEQ ID NO: 68192 - DNA, 236 bp, Zea mays
agtagttgttgcctacccccaacaatttcttccattcaaccaactggcagcattgaactctcctgcttatttacagcatcaacaactactaccattcatccatctagctggtgtgagccctgctaccttcttgacacaaccacagttgttgccgttctaccagcacgctgcgcctaacgcttgcaccctcttacaactgcaacaaatgcctgcattcaaccaacttgctttgacaa

SEQ ID NO: 68193 - DNA, 267 bp, Zea mays
caacaagcaacatagaaagtggaatccagtagcaacaacagagcaacaatggcgaccaagatattttccctccttatgctccttgctctttctgcatgtgttgctaacgcgacaatattccctcaatgctcatgagctcatatagctgcccttattctaatatacctcccatcaatgatagcttcagtatgtgaaaacccagatcttcagccctataggctccaacaagcaatcgcagcaagcaacatacctttatcacccttgttg

SEQ ID NO: 68194 - DNA, 262 bp, Zea mays
atttcgatcccatttgaaatcaacccatcctcgtttcctccgtctagcagcctctcaccctcatggccaagatcaagatcgggatcaatgggtttggcaggatcggaaggctggtggccagggtggccctgcagagcgacgacgtcgagctcgtcgccgtgaacgaccccttcatcagcaccgattacatgacctacatgttcaagtatgacactgtgcacggacagtggaagcaccatgaggtcaaggtgaaggactccaa

SEQ ID NO: 68195 - DNA, 262 bp, Zea mays
gtttgttaattgatcacgtgatgcagacgacaagagccaagtgggcgagttgacatatgcaagggttaagtgctacatatgtcgtgtggttggagatccccagctgggtattaatcgattcggatcgccgaacttctcggatatgaagaccggatcttcgaccttcagcgtagatgacaagtgaaactaaagatgctaaaatgaagctagtataggacaagtgaatactctagattaggcgaatctagattcaggaaaaata

SEQ ID NO: 68196 - DNA, 262 bp, Zea mays
cagaaacacaccaagcgaacacattagcaacaacctaacaacaatggctaccaagatattatccctccttgcgcttcttgcgctttttgcgagcgcaacaaatgcgttcattattccacaatgctcacttgctccaagttccattattacacagttcctcccaccagttacttcaatgggcttcgaacacccagctgtgcaagcctataggctacaacaagcaattgcggcgagcgtcttacaacaaccaatttcccagttg

SEQ ID NO: 68197 - DNA, 262 bp, Zea mays
ccctgatcctgaaagccgccaattgcgtgctgcccttgctgaagattctagacttgaatctgattacatacttgctggatgtggcgcagatgaactaattgatttaattatgagatgtgtgcttgaaccaggcgacaaaattgttgattgccctccaacattcacaatgtatgagttcgacgcttcagtcaatggtgcacttgttatcaaggttccaagactgcccgatttttccctagatgttgatctcattgtcgaagtg

SEQ ID NO: 68198 - DNA, 264 bp, Zea mays
atattttcagcattcaaaaacacaccaagcgaagcgcactagcaacgacctaacaccaatggctaccaagatattagccctccttgcgcttcttgcccttttagtgagcgcaacaaatgcgttcattattccacagtgctcacttgctcctagtgccagtattccacagttcctcccaccagttacttcaatgggcttcgaacatccagccgtgcaagcctacaggctacaactagcgcttgcggcgagcgccttacaacaacc

SEQ ID NO: 68199 - DNA, 262 bp, Zea mays
gaccagcaagcaacatagaaagtagaatccattagcaacaatagagcaacaatggcgaccaagatattttccctccttatgctccttgctctttctacatgtgttgctaacgcgacaattttccctcaatgctcacaagctcctatagcttcccttcttcccccataccttccatcaattatagcttcagtatgtgaaaacccagctcttcaaccatataggcttcaacaagcaatcgcagcaagcaacatacctttatcgc

SEQ ID NO: 68200 - DNA, 263 bp, Zea mays
ctcgagcccgaattcggctcgagcttttgctcggaacgcacacacagcccggtccccgatctccgatcccctcgtcgatccaacatgcagatcttcgtcaagaccctcactggaaagactatcaccctcgaggtggagtcttctgacaccattgacaacgtcaaggccaagatccaggacaaggagggcattcccccggaccagcagcggctcatcttcgctggcaagcagctcgaggacgggcgcacacttgccgactacaa

SEQ ID NO: 68201 - DNA, 259 bp, Zea mays
cggctcgaggagcattcagaaacacaccaagcgaactgacctagcaacgacttaacaacaatggctaccaagatattagccctccttgcgcttcttgccctttttgtgagcgcaacaaatgcgttcattattccacaatgctcacttgctcctagtgccattataccacagttcctccgaccagttacttcaatgggcttcgaacacctagctgtgcaagcctacaagctacaacaagcgcttgcggcgagcgtcttac

SEQ ID NO: 68202 - DNA, 263 bp, Zea mays
tgccctttttgtgagtgcaacaaatgcgttcattattccacaatgctcacttgctccgagtgccattattccacagttcctccctccagttacttcaatgggcttcgaacacccagctgtgcaagcctataggctacaacaagcgcttgcggcgagcgtcttagaacaaccaattgcccaattacaacaacaatccttagcacatctaaccatacaaaccatcgcaacgcagcagcaacaagcactgagccacctagccgtgg

SEQ ID NO: 68203 - DNA, 265 bp, Zea mays
aagcaatcgcagcaagcaacatacctttatcgcacttgttgtttcaacaatcgccagccctatctttaggtgcagtcattggtacagaccatcagggcacaacagctgcagcaactcgtgctacctctgatcaaccaagtagctctggcaaacctttctccctactctcagcaacaacaatttcttccattcaaccaactgtctacactgaaccctgctgcttatttgcagcaacaactattaccatttagccagctagctactg

SEQ ID NO: 68204 - DNA, 92 bp, Zea mays
gcaatctaaaagagggcaccaccaatgatgggttatgagttatagttcaataatgaagttttttggatgatgtatgaggcgtcccagaaata

SEQ ID NO: 68205 - DNA, 252 bp, Zea mays
ccaacaagcaacatagaaagtggaatccagtagcaacaacagagcaacaatggcgaccaagatattttccctccttatgctccttgctctttctgcatgtgttgctaacgcgacaattttccctcaatgctcacaagctcctatagcttcccttcttcccccataccttccatcaatgatagcttcagtatgtgaaaacccagctcttcagccctataggctccaacaagcaatcgcagcaagcaacatacc

SEQ ID NO: 68206 - DNA, 266 bp, Zea mays
aacaactacaacaacttgtgctagcaaaccttgctgcctactctcagcaacaacagtttcttccattcaaccaactagctgcattgaactctgcttcttatttgcaacaacaacaactaccattcagccagctatctgctgcctacccccagcaatttcttccattcaaccaactgacagctttgaactctcctgcttatttacagcagcaacaactactaccattcagccagctagctggtgtgagccctgctaccttcttgaca

SEQ ID NO: 68207 - DNA, 264 bp, Zea mays
gaaaaccaaataccccaactcggacatctacttggacaagttcgacagccagtaccacttctcttgccagttcacagctgaccttattgccatgaaccacactgatttcatcatcaccagcacattccaagaaatcgcgggaagcaaggacaccgtggggcagtacgagtcccacatcgcgttcactcttcctgggctctaccgtgtcgtccatggcatcgatgttttcgatcccaagttcaacattgtctcccctggagcaga

SEQ ID NO: 68208 - DNA, 260 bp, Zea mays
cagtgcagcccgacggcgacgccctactgctcgcctcagtgccagtcgttgcggcacagtgttgccagcagctcaggcaggtggagccgcagcaccggtaccaggcgatcttcggcttggtcctccagtccatcctgcagcagcagccgcaaagcggccaggtcgcggggctgttggcggcgcagatagcgcagaactgacggcgatgtgcggcctgcagcagccgactccatgcccctacgctgctgccggcggtgtcc

SEQ ID NO: 68209 - DNA, 251 bp, Zea mays
caccaagcgaactacctagcaacgacttaacaacaatggctaccaagatattagccctccttgcgcttcttgccctttttgtgagcgcaacaaatgcgttcattattccacaatgctcacttgctcctagtgccattataccacagttcctcccaccagttacttcaatgggcttcgaacacctagctgtgcaagcctacaagctacaacaagcgcttgcggcgagcgtcttacaacaaccaattaaccaa

SEQ ID NO: 68210 - DNA, 262 bp, Zea mays
caactagcaacatagaaagcacaatagtgtaccaacaatggcagctaaaatattttgcctccttatgctccttggtctttctgcaagtgctgctacggcgaccattttcccacaatgctcacaagctcctatagcttcccttcttcccccgtacctctcaccaacggtgtcttcggtatgtgaaaacccaattcttcaaccctacaggatccaacaggcaatcgcagctggcatcttacctttatcacccttgttcctccaa

SEQ ID NO: 68211 - DNA, 258 bp, Zea mays
tgagcattcagaaacacaccaagcgaacacattagcaacaacctaacaacaatggctaccaagatattatccctccttgcgcttcttgcgctttttgcgagcgcaacaaatgcgttcattattccacaatgctcacttgctccaagttccattattacacagttcctcccaccagttacttcaatgggcttcgaacacccagctgtgcaagcctataggctacaacaagcaattgcggcgagcgtcttacaacaacca

SEQ ID NO: 68212 - DNA, 263 bp, Zea mays
gccgcctccgttctatctgccgccgcagcagcagccgcagccatggcaataccccactcaaccaccgcagctaagcccgtgccagcagttcggatcctgcggcgtcggcagcgtcggcagcccgttcctgggccagtgcgtcgagttcctgaggcaccagtgcagcccggcggcgacgccctacggctcgccacagtgccaggcgctgcagcagcagtgctgccaccagatcaggcaggtggagccgctgcaccggtaccagg

SEQ ID NO: 68213 - DNA, 264 bp, Zea mays
tgagaccaacaagcaacatagaaagtggaatccagtagcaacaacagagcaacaatggcgaccaagatattttccctccttatgctccttgctctttctgcatgtgttgctaacgcgacaattttccctcaatgctcacaagctcctatagcttcccttcttcccccataccttccatcaatgatagcttcagtatgtgaaaacccagctcttcagccctataggctccaacaagcaatcgcagcaagcaacatacctttatca

SEQ ID NO: 68214 - DNA, 260 bp, Zea mays
ggtcttgagaacatcctgaaagtcggcgaggcagagaaaaatcttgctgcaggcgatgtcaatgtttacgcacagatgattgatgatgctgagggcctggacaagattgagaacctacagagccatgacaacactgagatatatgagaaggctgtcaagatgctcgaatcttactggctagaggaggaagatgatgccatgccctctggcgacaatccccagaatggcttcaactttgggaaccagccctctgtgccatc

SEQ ID NO: 68215 - DNA, 262 bp, Zea mays
cagaaacacaccaagcgaacacattagcaacaacctaacaacaatggctaccaagatattatccctccttgcgcgcttgcgctttttgcgagcgcaacaaatgcgttcattattccacaatgctcacttgctccaagttccattattacacagttcctcccaccagttacttcaatgggcttcgaacacccagctgtgcaagcctataggctacaacaagcaattgcggcgagcgtcttacaacaaccaatttcccagttgc

SEQ ID NO: 68216 - DNA, 264 bp, Zea mays
gagaccaacaagcaacatagaaagtggaatccagtagcaacaatagagcaacaatggcgaccaagatattttccctccttatgctccttgctctttctacatgtgttgctaacgcgacaattttccctcaatgctcacaagctcctatagcttcccttcttcccccataccttccatcaattatagcttcaatatgtgaaaacccagctcttcaaccatataggcttcaacaagcaatcgcagcaagcaacatacctttatcgc

SEQ ID NO: 68217 - DNA, 263 bp, Zea mays
tgagcattcagaaacacaccaagcgaactgcactagcaacgacctaacaacaatggctaccaagatattagccctccttgcgcttcttgccctttttgtgagcgcaacaaatgcgttcattattccacaatgctcacttgctcctagtgccattattccacagttcctcccaccagttacttcaatgggcttcgaacacctagctgtgcaagccaacatgcgacaacaagcgcttgcggcgagcgtcttacaacaaccaattg

SEQ ID NO: 68218 - DNA, 264 bp, Zea mays
tattattgagaccaactagcaacatagaaagcacaatagtgtaccaacaatggcagccaaaatattttgcttccttatgctccttggtctttctgcaagtgttgctaccgcaaccattttcccacaatgctcacaagctcctatagcttcccttcttcccccatacctctcaccagcggtgtcttcaatgtgtgaaaccccaattgttcaaccctacaggatccaacaggcaatcgcaacaggcatcttaccattatcaccctt

SEQ ID NO: 68219 - DNA, 258 bp, Zea mays
atattattgagaccaactagcaacatagaaagcacaatagtgtaccaacaatggcagccaaaatattttgcttccttatgctccttggtctttctgcaagtgttgctaccgcaaccattttcccacaatgctcacaagctcctatagcttcccttcttcccccatacctctcaccagcggtgtcttcaatgtgtgaaaacccaattgttcaaccctacaggatccaacaggcaatcgcaacaggcatcttaccattat

SEQ ID NO: 68220 - DNA, 261 bp, Zea mays
gcagttacctttggtccatttattggcacaaaacatcagggcacaacaactacaacaacttgtgctagcaaaccttgctgcctactctcagcaacagcagtttcttccattcaaccaactagcaacatagaaagcacaatagtgtaccaacaatggcagccaaaatattttgcttccttatgctccttggtctttctgcaagtgttgctaccgcaaccattttcccacaatgctcacaagctcctatagcttcccttcttc

SEQ ID NO: 68221 - DNA, 265 bp, Zea mays
aagcaatcgcagcaagcaacatacctttatcgcccttgttgtttcaacaatcgccagccctatctttggtgcagtcattggtacaaaccatcagggcacaacagctgcagcaactcgtgctacctctgatcaaccaagtagctctggcaaacctttctccctactctcagcaacaacaatttcttccattcaaccaactgtctacactgaaccctgctgcttatttgcagcaacaactattaccatttagccagctagctactgc

SEQ ID NO: 68222 - DNA, 261 bp, Zea mays
cggctcgagctaagaattccatcccctagccgccgccgtcgccgctcgtctccctgagacgtgccgggaccgaggaactggccgagtactaggtagagaatcggttgatcttgtctcagcccggggtctgctgcgtctggtggtggtgaaggggagaaattcgtgagatctgttccggatcaggcgtgcgagctcgggaatcaggggtttcacacatagcttcgtcgatttgaatttgatgtactaatggagtctaagggt

SEQ ID NO: 68223 - DNA, 264 bp, Zea mays
ccccgctccgcctccactcctcgcgccgctgccgcatctcctctacacgtaagaaggagacaaagagggcgacatggtgaagcacaacaacgtcatccccaacgggcacttcaagaagcactggcagacactatgtcaagacatggttcaaccagcccgcccgcaagcagaggcgccgcatcgcacgtcacaagaaggctgtgaagatattcccacgaccaactgctggccctcttcgtcccattgttcaatgccagactctca

SEQ ID NO: 68224 - DNA, 253 bp, Zea mays
gagcattcagaaacacaccaagcgaagacattagcaacaacctaacaacaatggctaccaagatattatccctccttgcgcttcttgcgctttttgcgagcgcaacaaatgcgttcattattccacaatgctcacttgctccaagttccattattacacagttcctcccaccagttacttcaatgggcttcgaacacccagctgtgcaagcctataggctacaacaagcaattgcggcgagcgtcttacaaca

SEQ ID NO: 68225 - DNA, 183 bp, Zea mays
caataatatatgcatcataataaagttttggtcataccacacatgataatgtgtgtcgtcttactgcattattacatatatagatagagagggatggatagaggacacacattatcatgtgtggtatgaccaataatatatgcatcataataaagtttcggttttaaagaataaaagcaataa

SEQ ID NO: 68226 - DNA, 261 bp, Zea mays
aacagttcctaccagcactgagccacctagccatggtgaaccctgccgcctacttgcaagagcagctgcttgcatccaacccacttgctctggcgaacgtagttgcaaaccagcaacaacaacagctacaacagtttctgccaacgctcagtcaactagccatggtgaaccctgccgcctacgtacaacaacaacaactgctttcatctagcccgctcgctgtgggcaatgcacctacatacctgcaacaacaattgttgc

SEQ ID NO: 68227 - DNA, 263 bp, Zea mays
caagcaacatagaaagtggaatccagtagcaacaatagagcaacaatggcgaccaagatattttccctccttatgctccttgctctttctacatgtgttgctaacgcgacaattttccctcaatgctcacaagctcctatagcttcccttcttcccccataccttccatcaattatagcttcaatatgtgaaaacccagctcttcaaccatataggcttcaacaagcaatcgcagcaagcaacatacctttatcgcccttgtt

SEQ ID NO: 68228 - DNA, 259 bp, Zea mays
gcgaacgcactagcaacgacctaacaacaatggctaccaagatattatccctctttgcgcttcttgccctttttgtgagcgcaacaaatgcgttcattattccacaatgctcacttgctcctagtgccattattccacagttcctccctccagttacttcaatgggcttcgaacacccagctgtgcaagcctacaggctacaacaagcgcttgcggcgagcgtcttacaacaaccaattgcccaattacaacaacaatc

SEQ ID NO: 68229 - DNA, 260 bp, Zea mays
agaaagtggaatccagtagcaacaacagagcaacaatggcgaccaagatattttccctccttatgctccttgctctttctgcatgtgttgctaacgcgacaattttccctcaatgctcacaagctcctatagcttcccttcttcccccataccttccatcaatgatagcttcagtatgtgaaaacccagctcttcagccctataggctccaacaagcaatcgcagcaagcaacatacctttatcacccttgttgtttcaa

SEQ ID NO: 68230 - DNA, 259 bp, Zea mays
gaccaacaagcaacatagaaagtggaatccagtagcaacaacagagcaacaatggcgaccaagatattttccctccttatgctccttgctctttctgcatgtgttgctaacgcgacaattttccctcaatgctcacaagctcctatagcttcccttcttcccccataccttccatcaatgatagcttcagtatgtgaaaacccagctcttcagccctataggctccaacaagcaatcgcagcaagcaacatacctttat

SEQ ID NO: 68231 - DNA, 261 bp, Zea mays
attttcagcattcaaaaacacaccaagcgaacgcactagcaacgacctaacaccaatggctaccaagatattagccctccttgcgcttcttgcccttttagtgagcgcaacaaatgcgttcattattccacagtgctcacttgctcctagtgccagtattccacagttcctcccaccagttacttcaatgggcttcgaacatccagccgtgcaagcctacaggctacaactagcgcttgcggcgagcgccttacaacaacc

SEQ ID NO: 68232 - DNA, 260 bp, Zea mays
aacatagaaagcacaatagtgtaccaacaatggcagccaaaatattttgcctccttatgctccttggtctttctgcaagtgctgctacggcgaccattttcccacaatgctcacaagctcctatagcttcccttcttcccccgtacctctcaccagcggtgtcttcggtatgtgaaaacccaattcttcaaccctataggatccaacaggcaatcgcagctggcatcttacctttatcacccttgttcctccaacaatca

SEQ ID NO: 68233 - DNA, 260 bp, Zea mays
ctcgagccgaatattttgagcattcagaaacacaccaagcgaagcgcactagcaacaacctaccaacaatggctaccaagatattatccctccttgcgcttcttgcgctttttgcgagcgcaacaaatgcgtccattattccacaatgctcacttgctcctagttccattattccacagttcctcccaccagttacttcaatggccttcgaacacccagctgtgcaagcctataggctacaacaagcgattgcggcgagc

SEQ ID NO: 68234 - DNA, 134 bp, Zea mays
cagaccattagctttatctactccagagcgcagaagaacccgatcgactccatgagggtgttgctcgttgccctcgctctcctggctctcgctgcgagcgccacctcgacgcatacaagcggctgctgaggctg

SEQ ID NO: 68235 - DNA, 260 bp, Zea mays
ctactccagagcgcagaagaacccgatcgacaccatgagggtgttgctcgttgccctcgctctcctggctctcgctgcgagcgccacctccacgcatacaagcggcggctgcggctgccagccaccgccgccggttcatcttccgccgccggtgcatctgccacctccggttcacctgccacctccggtgcatctcccaccgccggtccacctgccgccgccggtccacctgccaccgccggtccatgtgccgccgccgg

SEQ ID NO: 68236 - DNA, 260 bp, Zea mays
ggactgtcttgttcatatcggtgtggcatatcattatgcttgaggtggtggtatgtaccttccattagtttatgggccttcaccaacaggaaggatccaccaaggactttgttcaacatggatgaagaatacaattcttctggaatatagcgaagaatgcagttgggctcacatctttgtgaggcagtcaaatttcaagttacgtgctgatctgtccactccttctatcatgattggtcctgagacagggctggctcctt

SEQ ID NO: 68237 - DNA, 259 bp, Zea mays
ggctgttgcggtcaattgtctttcaaggatcaattgtctttcaagaaccacacttatgtattggtttgtgtgcagttcaagctctgcaaggtgaggtctgttcagtttggccagaaagtcatcccctacctgaacacctacgacgaccgcaccatccgctaccccgaccctctcatcaaggccaacgacaccatcaagatcgatctggagaccaacaagatcatggacttcatcaagttgtatttgccctttcatagac

SEQ ID NO: 68238 - DNA, 259 bp, Zea mays
aaagcacaatagtgtaccaacaatggcagccaaaatattttgcttccttatgctccttggtctttctgcaagtgctgctaccgcaaccattttcccacaatgctcacaagctcctatagcttcctttcttcccccatacctctcaccagcggtgtcttcagtatgtgaaaacccaattcttcaaccctacaggatccaacaggcaatcgcagcaggcatcttacctttatcacccttgttcctccaacaaccgtcagcc

SEQ ID NO: 68239 - DNA, 256 bp, Zea mays
gaagagccagatccatgagatcgtcctggttggtggaagcaccaggattcccaaggtccagcagctcctgcgggactacttcgacggcaaggagcccaacaagggtgtcaaccctgatgaggctgttgcctatggtgccgctgtgcagggaagcatcttgagcggcgagggtggtgacgagacgaaagatatcctcctccttgatgtggctcccctcaccctgggtatcgagaccgtcggtggagtcatgaccaag

SEQ ID NO: 68240 - DNA, 259 bp, Zea mays
tgctgagagtaggcagcaactaccattcagtcagctagctgctgcctacccccagcaattgttgcagttgtaacaaggtgcattcaaacaacatgctttgacaaacccaacagcgtactaccatcaacccatcattggtggtgccctcttttagattgcttatgagttatacttcaaagtagaagtatattggatgatgtatgtggcttcccagatataagatagtacatttctaaagttcaatgatagcatattggtg

SEQ ID NO: 68241 - DNA, 252 bp, Zea mays
tttgagcattcagaaacacaccaagcgaacacattagcaacaacctaacaacaatggctaccaagatattatccctccttgcgcttcttgcgctttttgcgagcgcaacaaatgcgttcattattccacaatgctcacttgctccaagttccattattacacagttcctcccaccagttacttcaatgggcttcgaacacccagctgtgcaagcctataggctacaacaagcaattgcggcgagcgtcttac

SEQ ID NO: 68242 - DNA, 255 bp, Zea mays
ctcgagccgcaactagcatcatagaaagcacaatagtgtaccatcaatggcagccaacatattctgctgcctcatgctccttggtctttctgcaagtgttgctaccgcaaccattttcccacaatgctcacaagctcctatagcttccctgcttcccccatacctctcaccagcggagtcttcaacgtgtgagaccccaattgttcagccctacaggatccaacaggcaatcgcaacaggcatcttaccattatc

SEQ ID NO: 68243 - DNA, 260 bp, Zea mays
caactagcaacatagaaagcacaatagtgtaccaacaatggcagccaaaatattttgcttccttatgctccttggtctttctgcaagtgttgctaccgcaaccattttcccacaatgctcacaagctcctatagcttcccttcttcccccatacctctcaccagcggtgtcttcaatgtgtgataccccgattgttctgccctacaggatccaacaggcaatcgcaacaggcatcttaccattatcacccttgttcctcc

SEQ ID NO: 68244 - DNA, 263 bp, Zea mays
cgagcattcagaaacacaccatgcgaagacattagcaacaagctatcagcaatggctaccaagatatgatccctcctgggcgcttctgagcgctgtttgcgagcgcaacaaatgcgttcattattccacaatgctcacttgctccaagttccattattacacagttcctcccaccagttgcttcaatgggcttcgaacacccagctgtgcgagcctataggctacaacaagcaattgcggcgagcgtcttacatcaaccaatt

SEQ ID NO: 68245 - DNA, 260 bp, Zea mays
gccggccatgggtggcatgttctgcgccatcatcatggccatgggtggactctaccagtaccagctgcccagctaccgcaccaacccctgtggcgtctccgctgccattccgccctactactgattcatgatatttgggaaatctcctctatccatctctctctatctatatatgtaataatgcagtaagacgacacacattatcatgtgtggtatgaccaatcctatatgcatggtcataatacagttttggttttaat

SEQ ID NO: 68246 - DNA, 257 bp, Zea mays
tagaaagtggaatccagtagcaacaatagagcaacaatggcgaccaagatattgtccctccttatgctccttgctctgtctacatgtgttgctaacgcgacaattttccctcaatgctcacaagctcctatagcttcccttcttcccccataccttccatcaattatagcttcaatatgtgaaaacccagctcttcaaccatataggcttcaacaagcaatcgcagaaagaaacatacctttatcgcccttgttgtt

SEQ ID NO: 68247 - DNA, 261 bp, Zea mays
caacaatccttggcacatctaacaatacaaaccatcgcaacgcaacagcaacaacaattcctaccagcactgagccacctagccatggtgaaccctgccgcctacttgcaacagcagttgcttgcatcaaacccacttgctctggcaaacgtagttgcaaaccagccacaacaacagctgcaacagtttctgccagcgctcagtcaactagccatggtgaaccctgccgcctacctacaacagcaacaactgctttcatct

SEQ ID NO: 68248 - DNA, 299 bp, Zea mays
attttcagcattcaaaaacacaccaagcgaacgcactagcaacgacctaacaccaatggctaccaagatattagccctccttgcgcttcttgcccttttagtgagcgcaacaaatgcgttcattattccacagtgctcacttgctcctagtgccagtattccacagttcctcccaccagttacttcaatgggcttcgaacatccagccgtgcaagcctacaggctacaactagcgcttgcggcgagcgccttacaacaaccaattgcccaattgcaacaacaatccttggcacatctaa

SEQ ID NO: 68249 - DNA, 290 bp, Zea mays
attttgagcattcagaaacacaccaagcgaagcgcactagcaacgacctaacaacaatggctaccaagatattagccctccttgcgcttcttgccctttttgtgagcgcaacaaatgcgttcattattccacaatgctcacttgctcctagtgccattattccacagttcctcccaccagttacttcaatgggcttcgaacacctagctgtgcaagccaacatgcaacaacaagcgcttgcggcgagcgtcttacaacaaccaattgcccaattgcaacaacaatccttg

SEQ ID NO: 68250 - DNA, 292 bp, Zea mays
tctagtgccattataccacagttcctccgaccagttacttcaatgggcttcgaacacctagctgtgcaagcctacaggctacaacaagcgcttgcggcgagcgtcttacaacaaccaattaaccaattgcaacaacaatccttggcacatctaaccatacaaaccatcgcaacacaacagcaacaacagttcctaccagcactgagccaactagatgtggtgaaccctgtcgcctacttgcaacagcaggtgcttgcatccaacccacttgctctggcaaacgtagctgcat

SEQ ID NO: 68251 - DNA, 294 bp, Zea mays
ccaactaccaacatacatagtgaagtacactagcaacatcttagcaccaatggcagccaagatttttgcgctccttgccctccttgctctttcagcaagtgttgctaccgcgactattattccacaatgctcacaacaatacctctctccagtgatagccgcgagatttgaatacccatctatacaatcctacaggctacaagaggccatcacagcaagcatcttacggtcgttagcattgaccgtccaacaaccatatgccctattgcaacaaccatccttagtgaatctgta

SEQ ID NO: 68252 - DNA, 296 bp, Zea mays
aacaagcaacatagaaagtggaatacagtagcaacaatagagcaacaatggcggccaagatattttccatccttatgctccttgctctttctgcatgtgttgctaacgcgaccatttttcctcaatactcacaagctcctatagctgcccttcttcccccataccttccatcaatgaccgcttcagtttgtgaaaacccagcccttcaaccctacaggctccaacaagcaatcgcaacaagcaacttacctttatcacccctgttctttcaacaatcgccagccctatctttggtg

SEQ ID NO: 68253 - DNA, 290 bp, Zea mays
atggcctggttgaatgccaggccctggtccttgctcccacccgtgagcttgcacagcaaatcgagaaagtcatgcgcgcgcttggtgattaccttggtgttaaggtccatgcatgtgtgggaggaacatccgtccgtgaggaccaaaggattcttggcagtggtgtgcatgttgttgttggtacacctggtcgtgtgtttgatatgctgcgcagacagtccctccgccctgataacatcaagatgtttgttctagatgaagctgatgaaatgctttctcgtggtttcaag

SEQ ID NO: 68254 - DNA, 290 bp, Zea mays
caacaagcaacatagaaagtggaatccagtagcaacaatagagcaacaatggcgaccaagatattttccctccttatgctccttgctctttctacatgtgttgctaacgcgacaattttccctcaatgctcacaagctcctatagcttcccttcttcccccataccttccatcaattatagcttcaatatgtgaaaacccagctcttcaaccatataggcttcaacaagcaatcgcagcaagcaacatacctttatcgcccttgttgtttcaacaatcgccagccctatc

SEQ ID NO: 68255 - DNA, 299 bp, Zea mays
caactagcaacatagaaagcacaatagtgtaccaacaatggcagccaaaatattttgcttccttatgctccttggtctttctgcaagtgctgctaccgcaaccattttcccacaatgctcacaagctcctatagcttcctttcttcccccatacctctcaccagcggtgtcttcagtatgtgaaaacccaattcttcaaccctacaggatccaacaggcaatcgcagcaggcatcttacctttatcacccttgttcctccaacaaccgtcagccctattacagcagttacctttggtgc

SEQ ID NO: 68256 - DNA, 289 bp, Zea mays
ggaacttgtgcagaaacatgtcgaggacgatgctgatatcactatatcatgtgctcctgttgatgagagccgagcttctaaaaatgggctagtgaagattgatcatactggacgtgtacttcaattctttgaaaaaccaaagggtgctgatttgaattctatgagagttgagaccaacttcctgagctatgctatagatgatgcacagaaatatccataccttgcatcaatgggcatttatgtcttcaagaaagatgcacttttagaccttctcaagtcaaaatatatt

SEQ ID NO: 68257 - DNA, 293 bp, Zea mays
tcgactcgagcgcgccgacttcatcgtcgccgtcgtctagacctcttcacgcactggaaagcactaaagtccgacatcaatggcgaacatcatcctgatctcatcatgtgccggatgcagcctggcatcgcgattggccgcctttgcgagaaatgtgatggcaagtgtgttgtctgcgactcgtacgtgcgcccatgtacgcttgtccgggtctgcgacgagtgcaattatggttccttccagggaaggtgtgtgatctgtggaggagtcggcatctcagacgcttactactg

SEQ ID NO: 68258 - DNA, 98 bp, Zea mays
ttgctgcctactctcagcaacagcagtgtctgccattcaacgagctaggtgcagtgaaggctgcttgttatgtgcaacgacaacagactaccgttcag

SEQ ID NO: 68259 - DNA, 289 bp, Zea mays
agcaactgatctaattaagcgttatggtggccgtgtgactggctctattagtagaaagacgagctacttattggccgacgaagacattggtggagtcaaatctaacaaagcaaaagatctgggtgttccattcttgactgaagatggtttatttgatttgatccgaaaatcaaagcctgcaaaggctcctgtagacaaacgtcaaaacaacaacagttctgaaaagcttcagaaatcacagacaaagagctctccagctaaagttgaaaaacgagccgaagcaagtgct

SEQ ID NO: 68260 - DNA, 288 bp, Zea mays
caacaagcaacatagaaagtggaatccagtagcaacaatagagcaacaatggcgaccaagatactttccctccttatgctccttgctctttctgcatgtgttgctaacgcgacaattttccctcaatgctcacaagctcctatagcttcccttcttcccccataccttccatcaatgatagcttcagtatgtgaaaacccagctcttcaaccctataggctccaacaagcaatcgcagcaagcaacatacctttatcacccttgtttcaacaatcgccagccctatct

SEQ ID NO: 68261 - DNA, 288 bp, Zea mays
actcgagcgtgaacaggcaatcgcaacaggcatcttaccattatcacccttgttcctccaacaaccgtcagccctattacagcagttacctttggtccatttggtggcacaaaacatcagggcacaacaactacaacaacttgtgctagcaaaccttgctgcatactctcagcaacatcagtttcttccattcaaccaactggctgcattgaactctgctgcttatttgcaacaacaattaccattcagccagctagttgctgcctacccccagcaatttcttccatt

SEQ ID NO: 68262 - DNA, 111 bp, Zea mays
  unsure (1)..(111): unsure at all n locations
ctcgagccgatgtcggctcgagagtaccacgttagctttatgctactccagnagcgcagnaagaactgccgatcgacaccgatgagggatgatgctcgtgtgccctcgctc

SEQ ID NO: 68263 - DNA, 287 bp, Zea mays
tggtgataaaggtaagatgcctgctgcctactctcagcaacagcagtttcttccattcaaccaactggctgcattgaactctgctgcttatttgcaacaacaactaccattcagtcagctagctgctgcctacccccagcaatttcttccattcaaccaactggcagcattgaactctgctgcttatttacaacagcaacagctaccaccattcagccagctagctgatgtgagccctgttgccttcttgacacaacaacagttgttgccgttctacctgcacgctg

SEQ ID NO: 68264 - DNA, 300 bp, Zea mays
cggctcgagccagaacctaatggatatcttcatattggtcatgccaaggctatgtttattgaacttggtctggctaaggagcgaaatggccattgctaccttagatttgatgacacaaatccagaagctgaaaagaaagaatacatagatcacattcaggaaatcgtccattggatgggatgggagccctacaaagtaacatacacgagtgactatttccaagctttgtatgaacatgccgttgagttaatacagaaagggctagcacatgtggatcaccagactgcagaagaaatcaag

SEQ ID NO: 68265 - DNA, 148 bp, Zea mays
agagcattcagaaacacaccaagcgaacgtcactagcaacaacctaacaacaatggctaccaagatattatccctccttgcgcttcttgcgctttttgcgagcgcaacaaatgcgtccattattccacaatgctcacttgctcctagt

SEQ ID NO: 68266 - DNA, 291 bp, Zea mays
gaccaacaagcaacatagaaagtggaatccagtagcaacaatagagcaacaatggcgaccaagatactttccctccttatgctccttgctctttctgcatgtgttgctaacgcgacaattttccctcaatgctcacaagctcctatagcttcccttcttcccccataccttccatcaatgatagcttcagtatgtgaaaacccagctcttcaaccctataggctccaacaagcaatcgcagcaagcaacatacctttatcacccttgtttcaacaatcgccagccctatct

SEQ ID NO: 68267 - DNA, 290 bp, Zea mays
agcaacatagaaagtggaatacagtagcaaaaatagagcaacaatggcggccaagatattttccatccttatgctccttgctctttctgcatgtgttgctaacgcgaccatttttcctcaatactcacaagctcctatagctgcccttcttcccccataccttccatcaatgaccgctttagtatgtgaaaacccagcccttcaaccctacaggatccagcaagcaatcgcaacaagcaacttacctttatcacacctgttctttcaacaatcgccagccctatctttgg

SEQ ID NO: 68268 - DNA, 288 bp, Zea mays
ctcgagcgaatcggctcgaggttcagggcaccagtggagcccgactaagaaaggaagagcgatgaggatgttttcttgaggagctatactagctcgctgctgccttttgttacaatgtttgtacggtcgcaataaatgtatggtcgtgtttgctcgagagctactcaggtgattttgtcgtgggagcaccaaaagcagaaaagaacccttttttttcaatctctctagattctgacgagtggtggtctgcactcgtcgtaatgtcgtttgcctaaactgattttgatg

SEQ ID NO: 68269 - DNA, 289 bp, Zea mays
ccagaagagcggcggcgcgggcggacaaggagcaggcggaggaggagttgtgccaagccacaatgggtatctcgcgtgactcgatgcacaagcgccgagccaccggtggaaagcagaaggcctggaggaagaagcgaaagtatgagcttggtcgccagccagccaacaccaagttgtcaagcaataagacagtgaggagggtccgtgttcgtggaggtaatgtgaaatggagggctcttcgccttgatactggtaactactcatggggaagtgaagctgttacccgcaa

SEQ ID NO: 68270 - DNA, 288 bp, Zea mays
gagacggaaagggggagatgagccggagcctggggatcccggtgaagttgctccatgaggcagcgggtcatgtggtgacggtggagctcaagaccggcgaagtgtaccgggggtccatggtcgagtgcgaggataactggaattgccagctcgagaacattaccttcaccgccaaggatgggaaggtttcgcagctggagcacgtcttcatcagaggaagcagagtgagatttatgattatacctgatatgctcaagaacgctcccatgttcaagcgcttggaagcga

SEQ ID NO: 68271 - DNA, 291 bp, Zea mays
caacaggcaatcgcagctggcatcttacctttatcacccttgttcctccaacaatcatcagccctattacagcagttacctttggtgcatttattggcacaaaacatcagggcacaacaactacaacaacttgtgctagcaaaccttgctgcctactctcagcaacagcagtttcttccattcaaccaactagctgcattgaactctgcttcttatttgcaacaacaacaactaccattcagccagctacctgttgcctacccccagcaatttcttccattcaaccaactg

SEQ ID NO: 68272 - DNA, 286 bp, Zea mays
  unsure (1)..(286): unsure at all n locations
aaacacaccaagcgaaggnactagcaacgacctaacaccaatggctaccaagatattagccctccttgcgcttcttgcccttttagtgagcgcaacaaatgcgttcattattccacagtgctcacttgctcctagtgccagtattccacagttcctcccaccagttacttcaatgggcttcgaacatccagccgtgcaagcctacaggctacaactagcgcttgcggcgagcgccttacaacaaccaattgcccaattgcaacaacaatccttggcacatctaacc

SEQ ID NO: 68273 - DNA, 287 bp, Zea mays
attttcagcattcaaaaacacaccaagcgaacgcactagcaacgacctaacaccaatggctaccaagatattagccctccttgcgcttcttgcccttttagtgagcgcaacaaatgcgttcattattccacagtgctcacttgctcctagtgccagtattccacagttcctcccacctgttacttcaatgggcttcgaacatccagccgtgcaagcctacaggctacaactagcgcttgcggcgagcgccttacaacaaccaattgcccatgtgcaacaacaatcct

SEQ ID NO: 68274 - DNA, 286 bp, Zea mays
ctgagcgtgccgctgccgccagcagcagcctgtacgagccagctctgatgcagcagcagcagcagctgctggcagcccagggtctcaaccccgtggccatgatgatggcgcagaacatgccggccatgggtggactctaccagtaccagctgcccagctaccgcaccaacccctgtggcgtctccgctgccattccgccctactactgattcatgatatttgggaaatctcctctatccatctctctctatctatatatgtgctaatgcagtaagacgacacacat

SEQ ID NO: 68275 - DNA, 283 bp, Zea mays
ctcaattatcacttatgcttcttagtgcctcatataatttcaatttgatttcaattggtaatttcaatcgacatctatcttgttgggcctatgcttcgtcgccgaaggtcttacagggagaagcagtcttcggcggaagctgtttgtataaaacggccgaaggttcctctttgtgaagcttcggtattgcaaaccgacttaaagatagaatgaccttttagtccataaaggtatgagtcaatgttgtaagcttttataaggggcttacttgtaattcctcaca

SEQ ID NO: 68276 - DNA, 288 bp, Zea mays
cagcaagcaacatagaaagtagaatccattagcaacaatagagcaacaatggcgaccaagatattttccctccttatgctccttgctctttctacatgtgttgctaacgcgacaattttccctcaatgctcacaagctcctatagcttcccttcttcccccataccttccatcaattatagcttcagtatgtgaaaacccagctcttcaaccatataggcttcaacaagcaatcgcagcaagcaacatacctttatcgcccttgttgtttcaacaatcaccagcccta

SEQ ID NO: 68277 - DNA, 143 bp, Zea mays
tctcgaccgctcgagccgattcggctcgacaacaagcaacatagaaagtggaatccaattccaacaacagagcaacaatggcgaccaagatattacccctccttatgctccttgctctttctacatgtgttgctaacgcgaca

SEQ ID NO: 68278 - DNA, 272 bp, Zea mays
gcaacatagaaagtggaatccagtagcaacaatagagcaacaatggcgaccaagatattttccctccttatgctccttgctctttctacatgtgttgctaacgcgacaattttccctcaatgctcacaagctcctatagcttcccttcttcccccataccttccatcaattatagcttcaatatcgcaaacccagctcttcaaccatataggcttcaacaagcaatcgcagcaagcaacatacctttatcgcccttgttgtttcacaatcgc

SEQ ID NO: 68279 - DNA, 296 bp, Zea mays
tagcaacatagaaagcacaatagtgtaccaacaatggcagccaaaatattttgcttccttatgctccttggtctttctgcaagtgttgctaccgcaaccattttcccacaatgctcacaagctcctatagcttcccttcttcccccatacctctcaccagcggtgtcttcaatgtgtgaaaacccaattgttcaaccctacaggatccaacaggcaatcgcaacaggcatcttaccattatcacccttgttcctccaacaaccgtcagccctattacagcagttacctttggtcca

SEQ ID NO: 68280 - DNA, 289 bp, Zea mays
attccacaatgctcacttgctccgagtgccattattccacagttcctccctccagttacttcaatgggcttcgaacacccagctgtgcaagcctataggctacaacaagcgcttgcggcgagcgtcttagaacaaccaattgcccaattacaacaacaatccttggcacatctaaccatacaaaccatcgcaacgcagcagcaacaagcactgagccacctagccgtggtgaaccctatcgcctacttgcaacaacagctgcttgcatccaacccacttgctttggcaa

SEQ ID NO: 68281 - DNA, 288 bp, Zea mays
aacatagaaagtggaatccagtagcaacaatagagcaacaatggcgaccaagatattttccctccttatgctccttgctctttctacatgtgttgctaacgcgacaattttccctcaatgctcacaagctcctatagcttcccttcttcccccataccttccatcaattatagcttcaatatgtgaaaacccagctcttcaaccatataggcttcaacaagcaatcgcagcaagcaacatacctttatcgcccttgttgtttcaacaatcgccagccctatctttggt

SEQ ID NO: 68282 - DNA, 288 bp, Zea mays
caactagcaacatagaaagcacaatagtgtaccaacaatggcagccaaaatattttgcttccttatgctccttggtctttctgcaagtgttgctaccgcaaccattttcccacaatgctcacaagctcctatagcttcccttcttcccccatacctctcaccagcggtgtcttcaatgtgtgaaaccccaattgttcaaccctacaggatccaacaggcaatcgcaacaggcatcttaccattatcacccttgttcctccaacaaccgtcagccctattacagcagtt

SEQ ID NO: 68283 - DNA, 291 bp, Zea mays
attttgagcattcagaaacacaccaagcgaactgcactagcaacaacctaacaacaatggctaccaagatattatccctccttgcgcttcttgcgctttttgcgagcgcaacaaatgcgtccattattccacaatgctcacttgctcctagttccattattccacagttcctcccaccagttacttcaatggccttcgaacacccagctgtgcaagcctataggctacaacaagcgattgcggcgagcgtactacaacaaccaattgcccaattgcaacaacaatccttgg

SEQ ID NO: 68284 - DNA, 288 bp, Zea mays
cgtgcatctcccaccgccggtccacctgccgccgccggtccacctgccaccgccggtccatgtgccgccgccggttcatctgccgccgccaccatgccactaccctactcaaccgccccggcctcagcctcatccccagccacacccatgcccgtgccaacagccgcatccaagcccgtgccagctgcagggaacctgcggcgttggcagcaccccgatcctgggccagtgcgtcgagttcctgaggcatcagtgcagcccgacggcgacgccctactgctcgcctca

SEQ ID NO: 68285 - DNA, 288 bp, Zea mays
gaaaacccaattcttcaaccctacaggatccaacaggcaatcgcagctggcatcttacctttatcacccttgttcctccaacaatcatcagccctattacagcagttacctttggtgcatttattggcacaaaacatcagggcacaacaactacaacaacttgtgctagcaaaccttgctgcctactctcagcaacagcagtttcttccattcaaccaactagctgcattgaactctgcttcttatttgcaacaacaacaactaccattcagccagctacctgttgcc

SEQ ID NO: 68286 - DNA, 285 bp, Zea mays
gaactgtggaataatgggcttcgaacacctagctgtgcaagccaacatgcaacaacaagcgcttgcggcgagcgtcttacaacaaccaattgcccaattgcaacaacaatccttgccacatctaacaatacaagccatcacaacgcaacagcaacaacagttcctaccagcactgagccacctagccatggtgaaccctgccgcctacttgcaagagcagctgcttgcatccaacccacttgctctggcgaacgtagttgcaaaccagcaacaacaacagctaca

SEQ ID NO: 68287 - DNA, 283 bp, Zea mays
  unsure (1)..(283): unsure at all n locations
ggtcgagcgaatcggctcgagcgtcagccctataggctccaaagagcaatcgcagcaagcaacatacctttatcacccagctgtctacactgaaccctgctgcttatttgcagcaacaactattaccattcagccagctagctactgcctactctcagcaacaacaacttcttccatttaaccaattggccgcactgaaccccgctgcttatttgcagcagcanatactactaccatttagccagctagctgcagcaaaccgtgcttccttcttgacacagca

SEQ ID NO: 68288 - DNA, 286 bp, Zea mays
gcaacatagaaagtggaatccagtagcaacaacagagcaacaatggcgaccaagatattttccctccttatgctccttgctctttctgcatgtgttgctaacgcgacaattttccctcaatgctcacaagctcctatagcttcccttcttcccccataccttccatcaatgatagcttcagtatgtgaaaacccagctcttcagccctataggctccaacaagcaatcgcagcaagcaacatacctttatcacccttgttgtttcaacaatcgccagccctatctt

SEQ ID NO: 68289 - DNA, 298 bp, Zea mays
tttgagcattcagaaacacaccaagcgacgcgcactagcaacgacctaacaacaatggctaccaagatattagccctccttgcgcttcttgccctttttgtgagcgcaacaaatgcgttcattattccacaatgctcacttgctcctagtgccattattccacagttcctcccaccagttacttcaatgggcttcgaacacctagctgtgcaagccaaatgcaacaacaagcaatcgcaactagcaacttacctttatcacccctgttctttcaacaatcgccagccctatctttggt

SEQ ID NO: 68290 - DNA, 290 bp, Zea mays
ccatggcggaggaatcaggccgccccttgccaaagttttgcgattgggatgttaatgatccagcttctgcagacggattcactgtcacattcaacaaagccagagacgagaagaagggtgggaacggccaagacactgagtcaccttccaaggacaccaggactgagagggtggaatcttatgctgcaaagccaagcacgaagaaatggttttgttgtgtgacagccagccctacgcaatcctgaggaagacaactgcatgcgttttggaaatactgtccctttaatttt

SEQ ID NO: 68291 - DNA, 288 bp, Zea mays
tgcagcagcaaatactactaccatttagccagctagctgcagcaaaccgtgcttccttcttgacacagcaacagttgctgcctttctaccagcagtttgcggctaaccccgcaaccctcttacaactacaacaattgttgccctttgtccaacttgctttgacagacccagcggcctcctaccaacaacacatcattggtggtgccctcttttagattgcttattagttgtaattcaataatacagttttttggatgatgtatgtggccaaccagaaataagaagtta

SEQ ID NO: 68292 - DNA, 288 bp, Zea mays
caacaagcaacatagaaagtggaatacagtagcaacaatagagcaacaatggcggctaagatattttccatccttatgctccttgctctttctgcatgtgttgctaacgcgaccatttttcctcaatactcacaagctcctatagctgcccttcttcccccataccttccatcaatgaccgcttcagtttgtgaaaacccagcccttcaaccctacaggctccaacaagcaatcgcaacaagcaacttacctttatcatccctgttctttcaacaatcgccagcccta

SEQ ID NO: 68293 - DNA, 288 bp, Zea mays
cccgtcgcatcccatcccactaccacccatctcgtcgtccgccgattcgatccggttcttccaacccaggggctgtgatggcgacgaagaggagcgtgggcaccctcggcgaggcggatctgaaggggaagaaggtgttcgtgcgcgccgacctcaacgtccctctcgacgacgcccagaagatcaccgacgacacccgcatccgcgcctccgtccccaccatcaagttcctcctcgagaagggcgccaaggtcatcctcgccagccacctgggtcgtccaaaaggtg

SEQ ID NO: 68294 - DNA, 289 bp, Zea mays
aacatagaaagtggaatccagtagcaacaatagagcaacaatggcgaccaagatattttccctccttatgctccttgctctttctacatgtgttgctaacgcgacaattttccctcaatgctctcaagctcctatagcttcccttcttcccccataccttccatcaattatagcttcaatatgtgaaaacccagctcttcaaccatataggcttcaacaagcaatcgcagcaagcaacatacctttatcgcacttgttgtttcaacaatcgccagccctatctttggtg

SEQ ID NO: 68295 - DNA, 289 bp, Zea mays
gcaacatagaaagcacaatattgtaccaataatggcagccaaaatattttgcctcattatgctccttggtctttctgcaagtgctgctacggcgagcattttcccgcaatgctcacaagctcctatagcttcccttcttcccccatacctctcaccagcgatgtcttcagtatgtgaaaatccaattcttctaccctacaggatccaacaggcaatcgcagcaggcatcttacctttatcacccttgttcctccaacaatcatcagccctattacagcagttacctttg

SEQ ID NO: 68296 - DNA, 286 bp, Zea mays
ggcaaacgtagttgcaaaccagcaacaacaacaattgcaacagtttctaccagcgctcagtcaactagccatggtgaaccctgccgcctacctacaacagcaacaactgatttcatctagccctctcgctgtggttaatgcacctacatacctgcaacaacagttgctgcaacagattgtaccagctctgactcagctagctgtggcaaaccctgctgcctacttgcaacagctgcttccattcaaccaactgactgtgtcgaactctgctgcgtacctacaacag

SEQ ID NO: 68297 - DNA, 284 bp, Zea mays
ctttctgacaataaatgcaccaaaggtaactgctgtaataggagcgatgattgttggaggaacaagggtgataaaggtaagatgccagcagttacctttggtgcatttattggcacaaaacatcagggcacaacaactacaacaacttgtgctagcaaaccttgctgcctactctcagcaacaacgattacttccattcaaccaactagctgcattgaactctgcttcttatttgcaacaacaacaactaccattcagccagctatctgctgcctacccccagc

SEQ ID NO: 68298 - DNA, 284 bp, Zea mays
cacgcaccaactagaggagccccttccgtcacttcgcctccaacaacagcagcgccgccaccgccgccgccgccgcttgctcgccgggatcgtcgccggaggaaagcgccatggatcggtaccagcgggtggagaagccgccgcccgaggccgccgccatcggcgagaatgagatccgcatcaccactcagggcctcgtccgcaactacgtcacctacgccacctccctcgtccaggaaaaacaggtgaaggaaattgtgttgaaggctatgggacaggctata

SEQ ID NO: 68299 - DNA, 280 bp, Zea mays
cattcagaaacacaccaagcgaagcgcactagcaacaacctaacaacaatggctaccacgatattatccctccttgcgcttcttgcgctttttgcgagcgcaacaaatgcgtccattattccacaatgctcacttgctcctagttccattattccacagttcctcccaccagttacttcaatggccttcgaacacccagctgtgcaagcctataggctacaacaagcgattgcggcgagcgtcttacaacaaccaattgcccaattgcaacaacaatcct

SEQ ID NO: 68300 - DNA, 288 bp, Zea mays
cccaggcaggcaggtcggcgaggagggcaggaagaccgaagaccgagccgtgcggaggctcggaacggtaacgggacaggacctcaaaatctcagatccttcctgctcgcccgcccgtgcccgaccgacgcgtcgttcttgccggccgcgccccacctccgccctctcctcctccagggggatcggatacgccacaggctgcgcgatggtgctgtgggtcttcggctacggctccctcatctggaaccccggcttcgacttcgacgacaaaatcctcggcttcatcaa

SEQ ID NO: 68301 - DNA, 285 bp, Zea mays
cagcattcaaaaacacaccaagcgaacgcactagcaacgacctaacaccaatggctaccaagatattagccctccttgcgcttcttgcccttttagtgagcgcaacaaatgcgttcattattccacagtgctcacttgctcctagtgccagtattccacagttcctcccaccagttacttcaatgggcttcgaacatccagccgtgcaagcctacaggctacaactagcgcttgcggcgagcgccttacaacaaccaattgcccaattgcaacaacaatccttgg

SEQ ID NO: 68302 - DNA, 286 bp, Zea mays
tgctccttgctctttctgcatgtgttgctaacgcgacaattttccctcaatgctcacaagctcctatagcttcccttcttcccccataccttccatcaatgatagcttcagtatgtgaaaacccagctcttcaaccctataggctccaacaagcaatcgcagcaagcaacatacctttatcacccttgtttcaacaatcgccagccctatctttggtgcagtcattggtacaaaccatcaaggcacagcagctgcagcaactcgtgctacctgtgatcaaccaagt

SEQ ID NO: 68303 - DNA, 286 bp, Zea mays
gaccaactagcaacatagaaagcacaatagtgtaccaacaatggcagccaaaatattttgcttccttatgctccttggtctttctgcaagtgttgctaccgcaaccattttcccacaatgctcacaagctcctatagcttcccttcttcccccatacctctcaccagcggtgtcttcaatgtgtgaaaccccaattgttcaaccctacaggatccaacaggcaatcgcaacaggcatcttaccattatcacccttgttcctccaacaaccgtcagccctattacag

SEQ ID NO: 68304 - DNA, 284 bp, Zea mays
cgatgctgttcagtccatcaaacctacagttctgattgggacgtctggagttggaagaacattcacaaaagaagttgttgaggccatggcttccttcaatgagaggcctatcatcttttcactgtcaaatccaacctctcattctgaatgtactgctgaagaagcatataactggactcagggtcgtgcaatatttgccagtggcagtccatttgaccctgtggagtacgatgggaaggtttttgtacctggacagtcgaacaacgcctacattttccctggat

SEQ ID NO: 68305 - DNA, 283 bp, Zea mays
tcgccattgttgctctattgttgctacaatggcgaccaagatatattccctccttatgctccttgctctttctacatgtgttgctaacgcgacaattttccctcaatgctcacaagctcctatagcttcccttcttcccccataccttccatcacatattgaagctataattgatggaaggtatgggggaagaagggaagctataggagcttgtgagcattgagggaaaattgtagcttcaatatgtgaaaacccagctcttcaaccatataggcttcaacaa

SEQ ID NO: 68306 - DNA, 283 bp, Zea mays
caacaagcaacatagaaagtggaatccagtagcaacaacagagcaacaatggcgaccaagatattttccctccttatgctccttgctctttctgcatgtgttgctaacgcgacaattttccctcaatgctcacaagctcctatagcttcccttcttcccccataccttccatcaatgatagcttcagtatgtgaaaacccagctcttcagccctataggctccaacaagcaatcgcagcaagcaacatacctttatcacccttgttgtttcaacaatcgccag

SEQ ID NO: 68307 - DNA, 282 bp, Zea mays
ggtgaagatgcccttaaggaaggaatgggcggtggaggatcccatgttgatccatttgacatcttctcatcattttttggaccctcttttggaggaggtggtgggagcagcaggggaagaaggcaaaggaggggagaagatgtagtccacccacttaaagtttctctggaagatctttacaatggcacctcaaagaagctctctctttcgcgcaatgtcatctgctccaagtgcaagggcaagggctcgaagtctggtgcctcaatgaggtgccctggttgc

SEQ ID NO: 68308 - DNA, 276 bp, Zea mays
cccatactgaagctatcattgatggaaggtatgggggaagaagggaagctatagcttcccttcttcccccataccttccctcaatgctcacaaaagtcatagcttcccttcttcccccatactgaagctatcattgatggaaggtatgggggaagagccgaagctataggagcttgtgaccattcgcagcaagcaacatacctttatcacccttgcttcaacaatcgccagccctatctttggtgcagtcattggtacaaaccatcaaggcacagc

SEQ ID NO: 68309 - DNA, 282 bp, Zea mays
agacaaggtacttgcggcacatcgttatggaatcaagagagtaattttacctgaaaggaacttgaaggacttatcagaggttccattaccaattctctccgacatggagattctgcttgtgaagcgcatcgaggaagtactcgaccatgctttcgaaggcggatgcccacttagatagcgctccaagttgtagcacccaactcgcgtttggtatggatgtttgcttgagaggatcatcgtcacagtaccacgaatggtcaacagtgtgagattccctgctgg

SEQ ID NO: 68310 - DNA, 279 bp, Zea mays
cagaaacacaccaagcgaacacattagcaacaacctaacaacaatggctaccaagatattatccctccttgcgcttcttgcgctttttgcgagcgcaacaaatgcgttcattattccacaatgctcacttgctccaagttccattattacacagttcctcccaccagttacttcaatgggcttcgaacacccagctgtgcaagcctataggctacaacaagcaattgcggcgagcgtcttacaacaaccaatttcccagttgcaacaacaatccttggc

SEQ ID NO: 68311 - DNA, 277 bp, Zea mays
tgaaacacaccaagcgaagtacctagcaacgacttaacaacaatggctaccaagatattagccctccttgcgcttcttgccctttttgtgagcgcaacaaatgcgttcattattccacaatgctcacttgctcctagtgccattataccacagttcctccgaccagttacttcaatgggcttcgaacacctagctgtgcaagcctacaggctacaacaagcgcttgcggcgagcgtcttacaacaaccaattaaccaattgcaacaacaatccttgg

SEQ ID NO: 68312 - DNA, 272 bp, Zea mays
ttgagaccaactagcaacatagaaagcacaatagtgtaccaacaatggcagctaaaatattttgcctccttatgctccttggtctttctgcaagtgctgctacggcgaccattttcccacaatgctcacaagctcctatagcttcccttcttcccccgtacctctcaccaacggtgtcttcggtatgtgaaaacccaattcttcaaccctacaggatccaacaggcaatcgcagctggcatcttacctttatcacccttgttcctccaacaa

SEQ ID NO: 68313 - DNA, 274 bp, Zea mays
tttcagcattcaaaaacacaccaagcgaagcgcactagcaacgacctaacaccaatggctaccaagatattagccctccttgcgcttcttgcccttttagtgagcgcaacaaatgcgttcattattccacagtgctcacttgctcctagtgccagtattccacagttcctcccaccagttacttcaatgggcttcgaacatccagccgtgcaagcctacaggctacaactagcgcttgcggcgagcgccttacaacaacaattgcccaattgca

SEQ ID NO: 68314 - DNA, 274 bp, Zea mays
ccaactaccaacatacatagtgaagtacactagcaacatcttagcaccaatggcagccaagatttttgcgctccttgccctccttgctctttcagcaagtgttgctaccgcgactattattccacaatgctcacaacaatacctctctccagtgatagccgcgagatttgaatacccatctatacaatcctacaggctacaagaggccatcacagcaagcatcttacggtcgttagcattgaccgtccaacaaccatatgccctattgcaacaa

SEQ ID NO: 68315 - DNA, 277 bp, Zea mays
gaaagtgggatccagtagcaacaatagagcaacaatggcgaccaagatactttccctccttatgctccttgctctttctgcatgtgttgctaacgcgataatattccctcaatgctcacaagctcctatagcttcgcttcttcccccataccttccatcaatgatagcttcagtatgtgagaagccagctctgcaacgctataggctccaacaagcaatcgaagcaagcaacatacctttatcacccttgtttcaacaatcgccagccctatctttg

SEQ ID NO: 68316 - DNA, 276 bp, Zea mays
tgggaagctttcatcagcttcttctgttcctgaggtcaagttatctcagtacatttcagcattggagaagctgacaacattgagagtgctacaacaggcctcttgtatttttaaatccataaagattgatatgctctcaagaatgattccattctttgacttctctgtcgtggagaagatttctgttgatgctgccaaacaaaattttgttgctataaaagttgaccatttatcgggagttgttcagtttggtactgtggacatagaatctgatgg

SEQ ID NO: 68317 - DNA, 270 bp, Zea mays
tgagaccaactagcaacatagaaagcacaatagtgtaccaacaatggcagccaaaatattttgcttccttatgctccttggtctttctgcaagtgttgctaccgcaaccattttcccacaatgctcacaagctcctatagcttcccttcttcccccatacctctcaccagcggtgtcttcaatgtgtgaaaccccaattgttcaaccctacaggatccaacaggcaatcgcaacaggcatcttaccattatcaccttgttcctccaacaa

SEQ ID NO: 68318 - DNA, 273 bp, Zea mays
taccaagatattatccctccttgcgcttcttgcgctttttgcgagcgcaacaaatgcgttcattattccacaatgctcacttgctccaagtaccattattacacagttcctcccaccagttacttcaatgggcttcgaacacccagctgtgcaagcctataggctacaacaagcaattgcggcgagcgtcttacaacaaccagtttcccagttgcaacaacaatccttggcacatctaacaatacgaaccatcgcaacgcaacagcaacaaca

SEQ ID NO: 68319 - DNA, 145 bp, Zea mays
gtttgtggcttcccagaaataagaaagtacatccaaaaaacttcattattgaagtataactcataagcaatctaaaagagggcaccaccaatgatgggttatgagttatacttcaataatgaagttttttggatgatgtttgtgg

SEQ ID NO: 68320 - DNA, 273 bp, Zea mays
agaaagtggaatccagtagcaacaacagagcaacaatggcgaccaagatattttccctccttatgctccttgctctttctgcatgtgttgctaacgcgacaattttccctcaatgctcacaagctcctatagcttcccttcttcccccataccttccatcaatgatagcttcagtatgtgaaaacccagctcttcagccctataggctccaacaagcaatcgcagcaagcaacatacctttatcacccttgttgtttcaacaatcgccagccc

SEQ ID NO: 68321 - DNA, 277 bp, Zea mays
attttgagcattcagaaacacaccaagcgaagcacattagcaacaacctaacaacaatggctaccaagatattatccctccttgcgcttcttgcgctttttgcgagcgcaacaaatgcgttcattattccacaatgctcacttgctccaagttccattattacacagttcctcccaccagttacttcaatgggcttcgaacacccagctgtgcaagcctataggctacaacaagcaattgcggcgagcgtcttacaacaaccaatttcccagttgca

SEQ ID NO: 68322 - DNA, 277 bp, Zea mays
tgcaacatagaaagtggaatccagtagcaacaatagagcaacaatggcgaccaagatattttccctccttatgctccttgctctttctacatgtgttgctaacgcgacaattttccctcaatgctcacaagctcctatagcttcccttctgcccccataccttccatcaattatagcttcaatatgtgaaaaccgcagctcgtcaaccatataggcttcaacaagcaatcgcaggaagcaacatacctttatcgcccttgttgtttcaacaatcgcc

SEQ ID NO: 68323 - DNA, 291 bp, Zea mays
ctcggcggttcggctatgagccataagattttgagcattcagaaacacacctagcgaacgcatctagcaacgacctaacaacaatggcttccaagacattatccctccttgcgcttcttgccctttttgtgagtgcaacaaatgcgttcattattccacaatgctcacttgctccgagtgccattattccacagttcctccctccagttacttcaatgggcttcgaacacccagctgtgcaagcctataggctacaacaagcgcttgcggcgagcgtcttagaacaaccaa

SEQ ID NO: 68324 - DNA, 273 bp, Zea mays
accaactagcaacatatagagcacgatagtgtaccagcactggcagccataatattttgcctccttatgctccttggtctttctgcaagtgctgctacggcgaccattttcccgcaatgctcgcaagctcctatagcttcccttctacccccgtacctctcatcagcggtgtcttcggtatgtgaaaacccaattcttcaaccctacaggatccaacaggcaatcacagctggcatcttacctttatcacccttgttcctccatcaatcatca

SEQ ID NO: 68325 - DNA, 256 bp, Zea mays
tgcgagcgcactagcaacgacctaacaacaatggctaccaagatattagccctccttgcgcttcttgccctttttgtgagcgcaacaaatgcgttcattattccacaatgctcacttgctcctagtgccattattccacagttcctcccaccagttacttcaatgggcttcgaacacctagctgtgcaagccaacatgcaacaacaagcgcttgcggcgagcgtcttacaacaaccaattgcccaattgcaacaac

SEQ ID NO: 68326 - DNA, 276 bp, Zea mays
gcaaacattgctgctttcttgcaacaacaacaattgctgccattttacccacaggttgtgggaaacattaacgccttcttgcaacaacaacaattgctgccattctacccacaggatgtggcaaacattgtcgccttcttacaacaacagcaattgctgccatttagccaactcgctttgacgaatcctaccaccttattgcatcagcccaccattggtggtaccatcttctagattttttatgctttatactgtaataataaatttctcatactg

SEQ ID NO: 68327 - DNA, 273 bp, Zea mays
ctagcaacatagaaagcacaatagtgtaccaacaatggcagctaaaatattttgcctccttatgctccttggtctttctgcaagtgctgctacggcgaccattttcccacaatgctcacaagctcctatagcttcccttcttcccccgtacctctcaccaacggtgtcttcggtatgtgaaaacccaattcttcaaccctacaggatccaacaggcaatcgcagctggcatcttacctttatcacccttgttcctccaacaatcatcagccct

SEQ ID NO: 68328 - DNA, 87 bp, Zea mays
attagctttatctactccagagcgcagaagaacccgatcgacaccatgagggtgttgctcgttgtcctcgctctcctggatctcgct

SEQ ID NO: 68329 - DNA, 271 bp, Zea mays
ttcagaaacacacctagcgaacgtcacgagcaacgacctaacaacaatggctaccaagatattatccctctttgcgcttcttgccctttttgtgagcgcaacaaatgcgttcattattccacaatgctcacttgctcctagtgccattattccacagttcctccctccagttacttcaatgggcttcgaacacccagctgtgcaagcctacaggctacaacaagcgcttgcggcgagcgtcttacaacaaccaattgcccaattacaacaa

SEQ ID NO: 68330 - DNA, 271 bp, Zea mays
caacaagcaacatagaaagtggaatccagtagcaacaatagagcaacaatggcgaccaagatactttccctccttatgctccttgctctttctgcatgtgttgctaacgcgacaattttccctcaatgctcacaagctcctatagcttcccttcttcccccataccttccatcaatgatagcttcagtatgtgaaaacccagctcttcaaccctataggctccaacaagcaatcgcagcaagcaacatacctttatcacccttgtttcaac

SEQ ID NO: 68331 - DNA, 271 bp, Zea mays
ctcgagcgctcgagccgaccatgtcaaggtataagtgggtttaatcggttcaggaaccgtgatgaagccattaaagatgagaaaaacaagcaaatggtgactttcatggatattgtggcatacttgaagcccaagtatgttctcatggaaaatgttgtggacatactgaaatttgctgatggctacctaggaaaatatgctttgagctgcctagttgctatgaagtaccaagcacgccttggaatgatggtggcaggctgctatggtctgc

SEQ ID NO: 68332 - DNA, 271 bp, Zea mays
ggcacttaagatggaaattattccaaaccccaaggaagttgatggtgtgaaagtccttcaactcgaaaccgcagctggtgcagctattcggttcttcgacaaagcgattggaattaatgttccccgctcaaggtttctcccagtgaaggctacatctgatctgttgcttgtgcagtctgatctttacaccttggttgatggctttgtcatccgcaacccatccagagcgaatccagctaacccttcaattgagcttggacctgagttcaag

SEQ ID NO: 68333 - DNA, 273 bp, Zea mays
gaggaatgtaacatcaatatcccttcatggctttccttcaactcaaaagatggagtgcatgttgtgagtggtgattcgttaattgaatgcgctactattgctgacaagtgtgcaaaggttggtgcagtcgggataaattgcacacctccaagatttattcatggactgatactctccattcgaaaggtcacagacaagcctattctgatatatcccaacagtggtgaaagatatgatggtgaaaaaaaggagtgggtggaatccctggtgtgt

SEQ ID NO: 68334 - DNA, 274 bp, Zea mays
ggtcaaaccctaagcagggagttgatttatccgctgcagccatgagtaagttgcagtctgagtctgtcaaggatgccatctcccagattgttggggatgccaaggagaagaataggaagttcactgagactgtggaacttcagattggtctgaagaattatgatccacagaaggacaagcgtttcagtggctctgttaagttgccccatatccctcgtcccaagatgaaggtgtgcatgcttggtgatgcccagcatgttgaggaggccgagaa

SEQ ID NO: 68335 - DNA, 278 bp, Zea mays
ctccgagtgccattattccacagttcctccctccagttacttcaatgggcttcgaacacccagctgtgcaagcctataggctacaacaagcgcttgcggcgagcgtcttagaacaaccaattgcccaattacaacaacaatccttggcacatctaaccatacaaaccatcgcaacgcagcagcaacaagcactgagccacctagccgtggtgaaccctatcgcctacttgcaacaacagctgcttgcatccaacccattgctttggcaaacgtagctg

SEQ ID NO: 68336 - DNA, 269 bp, Zea mays
ccgtgccaacagccgcatccaagcccgtgccagctgcagggaacctgcggcgttggcagcaccccgatcctgggccagtgcgtcgagttcctgaggcatcagtgcagcccgacggcgacgccctactgctcgcctcagtgccagtcgttgcggcagagtgttgccagcagctcaggcaggtggagccgcagcaccggtaccaggcgatcttcggcttggtcctccagtccatcctgcagcagcagccgcaaagggccaggtcgcggggc

SEQ ID NO: 68337 - DNA, 267 bp, Zea mays
aagaaaactatccgcccttcattttcagcagagcgtatttatggtggggtattgttggcaatgtgttctagtgacttcatctgcttttatgactgggctgattgtagactaatacgccgaatcgatgtgaatgttaagaatgtttactgggctgatagtggtgacctagttgcaatagcaagtgatacatcattctacatcctcaagtacaatagagatattgttgcttcttatctagaaggtggaaagcctgtggacgaagaaggc

SEQ ID NO: 68338 - DNA, 271 bp, Zea mays
ctcgagctacccgactccgccgccgcccgccgctccgcctcagcgcatagcccgccgcgacctcatcgatcaccttcaactttcaatcatggcggacgtcgatgtcgaaccggaggttgccgccggagctcccaagaagaggacgttccgcaagtacagctaccgcggcgtcgacctagatgcgcttctcgacatgtccacggacgacctcgtccagctcttccccgcgcgcgccaggagaaggttccagaggggtctgaagaggaagcca

SEQ ID NO: 68339 - DNA, 270 bp, Zea mays
tagtgtaccaacaatggcagccaaaatattttgcctccttatgctccttggtatttctgcaagtgctgctacggcgaccattttcccgcaatgctcacaagctcctatagcttcccttcttcccccgtacctctcaccagcggtgtcttcggtatgtgaaaacccaattcttcaaccctacaggatccaacaggcaatcgcagctggcatcttacctttatcacccttgttcctccaacaatcatcagccctattacagcagttaccttt

SEQ ID NO: 68340 - DNA, 264 bp, Zea mays
caacaagcaacatagaaagtggaatccagtagcaacaatagagcaacaatggcgaccaagatactttccctccttatgctccttgctctttctgcatgtgttgctaacgcgacaattttccctcaatgctcacaagctcctatagcttcccttcttcccccataccttccatcaatgatagcttcagtatgtgaaaacccagctcttcaaccctataggctccaacaagcaatcgcagcaagcaacatacctttatcacccttg

SEQ ID NO: 68341 - DNA, 267 bp, Zea mays
aatgaaacatggctcctctgtctcctagactggtagtgcccgtagacgtgaagaagctgccgcgggagcaaaaggtccctctccacaaccgctggcacccggatatccctcctgtcgctgatgtaaccgaaggggaattgttccgcgttgagatggtcgattggagtggagggcgggttagggatgataactctgcagatgatctgaaattcatggatttcacaattgctcattatcttagtgggcccctaagaatacttgattctg

SEQ ID NO: 68342 - DNA, 275 bp, Zea mays
atattattgagaccaactagcaacatagaaagcacaatagtgtaccaacaatggcagccaaaatattttgcctccttatgctccttggtctttctgcaagtgctgctacggcgaccattttcccgcaatgctcgcaagctcctatagcttcccttcttcccccgtacctctcaccagcggtgtcttcggtatgtgaaaacccaattcttcaaccctacaggatccaacaggcaatcacagctggcatcttacctttatcacccttgttcctccaa

SEQ ID NO: 68343 - DNA, 277 bp, Zea mays
  unsure (1)..(277): unsure at all n locations
ctagttctagatcgcgagcggccgcccgcgatctagaactagactnaaacacaccaagcgaacgcactagcaacgacctaacaccaatggctaccaagactattagccctccttgcgcttcttgcccttttagtgagcgcaacaaatgcgttcattattccacagtgctcacttgctcctagtgccagtattccacagttcctcccaccagttacttcaatgggcttcgaacatccagccgtgcaagcctacaggctacaactagcgcttgcggcga

SEQ ID NO: 68344 - DNA, 275 bp, Zea mays
accgacaactagcaacatagccagcacaatagtgtaccaacaatggcagccaaaatattttgcctccttatgctccttggtctttctgcaagtgctgctacggcgaccattttcccacaatgctcacaagctcctatagcttcccttcttcccccgtacctctcaccagcggtgtcttcggtatgtgaaaacccaattcttcaaccctataggatccaacaggcaatcgcagctggcatcttacctttatcacccttagtcctccaacaatcatc

SEQ ID NO: 68345 - DNA, 92 bp, Zea mays
gggtcttcagaccattagctttatctactccagagcgcagaagaacccgatcgacaccatgagggtgttgctcgttgtcctcgctctcctgg

SEQ ID NO: 68346 - DNA, 274 bp, Zea mays
cggctcgaggagcattcagaaacacaccaagcgaagtgacctagcaacgacttaacaacaatggctaccaagatattagccctccttgcgcttcttgccctttttgtgagcgcaacaaatgcgttcattattccacaatgctcacttgctcctagtgccattataccacagttcctccgaccagttacttcaatgggcttcgaacacctagctgtgcaagcctacaagctacaacaagcgcttgcggcgagcgtcttacaacaaccaattaacc

SEQ ID NO: 68347 - DNA, 272 bp, Zea mays
  unsure (1)..(272): unsure at all n locations
tttcagcattcaaaaacacaccaagcgaaggcnactagcaacgacctaacaccaatggctaccaagatattagccctccttgcgcttcttgcccttttagtgagcgcaacaaatgcgttcattattccacagtgctcacttgctcctagtgccagtattccacagttcctcccaccagttacttcaatgggcttcgaacatccagccgtgcaagcctacaggctacaactagcgcttgcggcgagcgccttacaacaaccaattgcccaatt

SEQ ID NO: 68348 - DNA, 268 bp, Zea mays
ctcgagctacccgactccgccgccgcccgccgctccgcctcagcgcatagcccgccgcgacctcatcgatcaccttcaactttcaatcatggcggacgtcgatgtcgaaccggaggttgccgccggagctcccaagaagaggacgttccgcaagtacagctaccgcggcgtcgacctagatgcgcttctcgacatgtccacggacgacctcgtccagctcttccccgcgcgcgccaggagaaggttccagaggggtctgaagaggaag

SEQ ID NO: 68349 - DNA, 266 bp, Zea mays
cacgccgtcgctagcgcctgcggcctgccgcggcgaagcttctgccctccccggcgccgggctcgggtcgtcgtcggccaggaagatggctggcggcttcagggtactgcatctggtcaggccttttctggctttcttgccagaggtgcagagcgcggataggaagataccgttcagagaaaaagttatatacactgttatttccctcttcattttcctggtctgcagccagctcccactctatggcattcattcaacaactggag

SEQ ID NO: 68350 - DNA, 268 bp, Zea mays
aagcaacatagaaagtggaatccagtagcaacaacagagcaacaatggcgaccaagatattttccctccttatgctccttgctctttctgcatgtgttgctaacgcgacaattttccctcaatgctcacaagctcctatagcttcccttcttcccccataccttccatcaatgatagcttcagtatgtgaaaacccagctcttcagccctataggctccaacaagcaatcgcagcaagcaacatacctttatcacccttgttgtttca

SEQ ID NO: 68351 - DNA, 142 bp, Zea mays
gtaggattcgtcaaagcaagttggttaaatggcagcagcccaccattggtggtgccatcttctagatttttttatgctttatactgtaataataaagttctcatactgatatgtgcaacttctcagtaataaaagattagag

SEQ ID NO: 68352 - DNA, 270 bp, Zea mays
gagagcaacaagcaacatagaaagtggaatccagtagcaacaacagagcaacaatggcgaccaagatattttccctccttatgctccttgctctttctgcatgtgttgctaacgcgacaattttccctcaatgctcacaagctcctatagcttcccttcttcccccataccttccatcaatgatagcttcagtatgtgaaaacccagctcttcagccctataggctccaacaagcaatcgcagcaagcgacatacctttatcacgcttgt

SEQ ID NO: 68353 - DNA, 142 bp, Zea mays
ctcgagcctctagcaacatagacagcacaatagtgtaccaacaatggcagccatgatatacatgcctaccttatgctccatgggatgtctgcaagtgctgctacggcgaccattttcccggaatgctcacaagctcctatag

SEQ ID NO: 68354 - DNA, 272 bp, Zea mays
attgagaccaactagcaacatagaaagcacaatattgtaccaataatggcagccaaaatattttgcctcattatgctccttggtctttctgcaagtgctgctacggcgagcattttcccgcaatgctcacaagctcctatagcttcccttcttcccccatacctctcaccagcgatgtcttcagtatgtgaaaatccaattcttctaccctacaggatccaacaggcaatcgcagcaggcatcttacctttatcacccttgttcctccaaca

SEQ ID NO: 68355 - DNA, 273 bp, Zea mays
cagcattcaaaaacacaccaagcgaagcgcactagcaacgacctaacaccaatggctaccaagatattagccctccttgcgcttcttgcccttttagtgagcgcaacaaatgcgttcattattccacagtgctcacttgctcctagtgccagtattccacagttcctcccaccagttacttcaatgggcttcgaacatccagccgtgcaagcctacaggctacaactagcgcttgcggcgagcgccttacaacaacaattgcccaattgcaac

SEQ ID NO: 68356 - DNA, 274 bp, Zea mays
gaggagctgagtgtttctgagtacttgggcattcaaggaacagctggtggatggacaatccaacagcaactttgtgcttgagcttgattttgagcccttcaatgcctcctttcctcgtccttccatgtcgaagtccatcggaaatggagtgcaattccttaaccgacacctgtcgtccaagttgttccaggacaaggagagtttgtaccccttgctgaacttcctcaaggctcataactacaaggcacgacgatgatgttgaatgacagaatcc

SEQ ID NO: 68357 - DNA, 90 bp, Zea mays
cgcaagcgttgctaccgcgactattattccacaatgctcacaacaatacctctctccggtgacagccgcgagatttgaatacccaactat

SEQ ID NO: 68358 - DNA, 272 bp, Zea mays
cagaaacacacctagcgaaggcactagcaacgacctaacaacaatggctaccaagatattatccctctttgcgcttcttgccctttttgtgagcgcaacaaatgcgttcattattccacaatgctcacttgctcctagtgccattattccacagttcctccctccagttacttcaatgggcttcgaacacccagctgtgcaagcctacaggctacaacaagcgcttgcggcgagcgtcttacaacaaccaattgcccaattacaacaacaat

SEQ ID NO: 68359 - DNA, 143 bp, Zea mays
gagaccaactagcaacatagaaagcacaatagtgtaccaacaatggcagccaaaatattttgcctccttatgctccttggtctttctgcaagtgctgctacggcgaccattttcccgcaatgctcgcaagctcctatagcttc

SEQ ID NO: 68360 - DNA, 272 bp, Zea mays
cgtagaaagtagaatccattagcaacaatagagcaacaatggcgaccaagatattttccctccttatgctccttgctctttctacatgtgttgctaacgcgacaattttccctcaatgctcacaagctcctatagcttcccttcttcccccataccttccatcaattatagcttcagtatgtgaaaacccagctcttcaaccatataggcttcaacaagcaatcgcagcaagcaacatacctttatcgcccttgttgtttcaacaatcacca

SEQ ID NO: 68361 - DNA, 260 bp, Zea mays
ctagaaaactatccgcacttcattttcagcagagcgtatttatggtggggtattgttggcaatgtgttttagtgacttcatctgcttttatgactgggctgattgtagactaatacgccgaatcgatgtgaatgttaagaatgtttactgggctgatagtggtgacctagttgcaatagcaagtgatacatcattctacatcctcaagtacaatagagatattgttgcttcttatctagaaggtggaaagcctgtggacg

SEQ ID NO: 68362 - DNA, 264 bp, Zea mays
gcagctgtgaagtggcggcttgcattcaaacctgaaaacatctgttgggatgatattgcagaggaagcagagactggaaagatatatagagcggattataaggacaaacatggcagaactgttcttgtattgaggcctggcttagagaacactacctcagcaataggacagatcaaatatctagtctactctctggagaaagcaattatgaacctgacggaagatcaagagaagatggtatggctgacagattccagtgctgga

SEQ ID NO: 68363 - DNA, 270 bp, Zea mays
ggcaaacctttctccctactctcagcaacaacaatttcttccattcaaccaactgtctacactgaaccctgctgcttatttgcagcaacaactattaccattcagccagctagctactgcctactctcagcaacaacaacttcttccatttaaccaattggccgcactgaaccccgctgcttatttgcagcagcaaatactactaccatttagccagctagctgcagcaaaccgtgcttccttcttgacacagcaacagttgctgccttt

SEQ ID NO: 68364 - DNA, 263 bp, Zea mays
gcagctgtgaagtggcggcttgcattcaaacctgaaaacatctgttgggatgatattgcagaggaagcagagactggaaagatatatagagcggattataaggacaaacatggcagaactgttcttgtattgaggcctggcttagagaacactacctcagcaataggacagatcaaatatctagtctactctctggagaaagcaattatgaacctgacggaagatcaagagaagatggtatggctgacagattccatgctgga

SEQ ID NO: 68365 - DNA, 270 bp, Zea mays
agcattcagaaacacaccaagcgaagcacattagcaacaacctaacaacaatggctaccaagatattatccctccttgcgcttcttgcgctttttgcgagcgcaacaaatgcgttcattattccacaatgctcacttgctccaagttccattattacacagttcctcccaccagttacttcaatgggcttcgaacacccagctgtgcaagcctataggctacaacaagcaattgcgacgagcgtcttacaacaacaatttcccagttgca

SEQ ID NO: 68366 - DNA, 165 bp, Zea mays
gagaccaactagcaacatagaaagcacaatagtgtaccaacaatggcagccaaaatattttgcttccttatgctccttggtctttctgcaagtgttgctaccgcaaccattttcccacaatgctcacaagctcctatagcttcccttcttcccccatacctctca

SEQ ID NO: 68367 - DNA, 162 bp, Zea mays
gcgcctctacatttcttctctctctgctcctccgcctccgcctgatccatccaagacagggatcgccatgtcggactcggaggagcaccacttcgaatcgaaggccgacgctggggcgtccaagacctacccgcagcaggctggcaccgtccgtaagaacgg

SEQ ID NO: 68368 - DNA, 207 bp, Zea mays
caagcaacatagaaagtggaatccagtagcaacaatagagcaacaatggcgaccaagatactttccctccttatgctccttgctctttctgcatgtgttgctaacgcgacaattttccctcaatgctcacaagctcctatagcttcccttcttcccccatacttccatcaatgatagcttcagtatgtgaaaacccagctcttcaac

SEQ ID NO: 68369 - DNA, 289 bp, Zea mays
aagaccaacaagcaacatagaaagtggaatccagtagcaacaatagagcaacaatggcgaccaagatattttccctccttatgctccttgctctttctacatgtgttgctaacgcgacaattttccctcaatgctcacaagctcctatagcttcccttcttccccataccttccatcaattatagcttcaatatgtgaaaacccagctcttcaaccatataggcttcaacaagcaatcgcagcaagcaacatacctttatcgcccgtgttgtttcaacaatcgccagcc

SEQ ID NO: 68370 - DNA, 286 bp, Zea mays
gcgcctctacatttcttctctctctgctcctccgcctccgcctgatccatccaagacagggatcgccatgtcggactcggaggagcaccacttcgaatcgaaggccgacgctggggcgtccaagacctacccgcagcaggctggcaccgtccgtaagaacggttcatcgtcatcaagaaccgtccctgcaaggttgtggaggtttctacctccaagactggtaagcatggccacgccaaatgccactttgtcgccatagacatattcaatgggaaaaagcttgaag

SEQ ID NO: 68371 - DNA, 280 bp, Zea mays
cattcagaaacacacctagcgaacgcactagcaacgacctaacaacaatggctaccaagatattatccctctttgcgcttcttgccctttttgtgagcgcaacaaatgcgttcattattccacaatgctcacttgctcctagtgccattattccacattcctccctccagttacttcaatgggcttccaacacccagctgtgcaagcctacaggctacaacaagcgcttgcggcgagcgtcttacaacaaccaattgcccaattacaacaacaatccttg

SEQ ID NO: 68372 - DNA, 274 bp, Zea mays
attttgagcattcagaaacacaccaagcgaacacattagcaacaacctaacaacaatggctaccaagatattatccctccttgcgcttcttgcgctttttgcgagcgcaacaaatgcgttcattattccacaatgctcacttgctccaagttccatattacacagttcctcccaccagttacttcaatgggcttcgaacacccagctgtgcaagcctataggctacaacaagcaattgcggcgaacgtcttacaacaaccaatttcccagttgc

SEQ ID NO: 68373 - DNA, 225 bp, Zea mays
agcgtcttgatcagcttatctatattcctctgcccgatgagcagtccaggcttcagatcttcaaagcctgtctcaggaagtctcctgtggccaaggatgttgacttgaatgctctcgccaaatacacccagggtttcagcggtgcagatatcacagaatctgccagcgcgcgtgcaagtatgccatcagggagaacatcgagaaggatatcgagagggagaggcg

SEQ ID NO: 68374 - DNA, 202 bp, Zea mays
agcgatggcaacctagtcgccactctgctcgcgcacaagttgggagtcactcagtgtaccatcgctcatgccttggagaaaaccaaataccccaactcggacatatacttggacaaattcgacagccagtaccacttctcttgccagttcacagctgacttattgccatgaaccacaccgatttcatcatcaccagcacatt

SEQ ID NO: 68375 - DNA, 124 bp, Zea mays
cgcaaaccagccacaacaacagctgcaacagtttctgccagcgctcagtcaactagccatggtgaaccctgccgcctacctacaacagcaacaactgctttcatctagcccgctcgctgtggcc

SEQ ID NO: 68376 - DNA, 289 bp, Zea mays
gcaagttcaatctcacctccaaccatgggtaaagagaagtcccacatcaacattgtggttattggtcatgtcgactctggcaagtcgaccaccacaggacaccttatctacaagcttggaggcattgacaagcgtgtgatcgagaggttcgagaaggaggctctgaaatgaacaagcggtccttcaagtacgcgtgggtgctcgacaagctcaaggctgagcgtgagagaggtatcaccattgatatcgctctgtggaagtttgagaccaccaagtactactgcacggt

SEQ ID NO: 68377 - DNA, 128 bp, Zea mays
tggactgcttgctccctgttgaccattgggtattctgaaccatcgagccatggctgccaagctgactcgcctccacagtcttcgcgaacgccttggtgccaccttctcctcccatcccaatgaactgt

SEQ ID NO: 68378 - DNA, 157 bp, Zea mays
agcattcagaaacacacctagcgaaggcactagcaacgacctaacaacaatggctaccaagatattatccctctttgcgcttcttgccctttttgtgagcgcaacaaatgcgttcattattccacaatgctcacttgctcctagtgccattattcca

SEQ ID NO: 68379 - DNA, 285 bp, Zea mays
gagaccaacaagcaacatagaaagtggaatccagtagcaacaatagagcaacaatggcgaccaagatattttccctccttatgctccttgctctttctacatgtgttgctaacgcgacaattttccctcaatgctcacaagctcctatagcttcccttttcccccataccttccatcaattatagcttcaatatgtgaaaacccagctcttcaaccatataggcttcaacaagcaatcgcagcaagcaacatacctttatcgcccttgttgtttcaacaatcgcc

SEQ ID NO: 68380 - DNA, 276 bp, Zea mays
cagaaacacaccaagcgaacacattagcaacaacctaacaacaatggctaccaagatattatccctccttgcgcttcttgcgctttttgcgagcgcaacaaatgcgttcattattccacaatgctcacttgctccaagttccattattacacagtcctcccaccagttacttcaatgggcttcgaacacccagctgtgcaagcctataggctacaacaagcaattgcggcgagcgtcttacaacaaccaatttcccagttgcaacaacaatccttg

SEQ ID NO: 68381 - DNA, 278 bp, Zea mays
gcgagaacgagaagtccgggttcatcagcctcgtgtcacgctacctcagtggggaagcggacagatcgagtggagcaagatccagacccctacggatgaggtggtggtgccctacgataccgtcgcgtcgcctcccgaagatctcgaggagacgagaagctgctggataagctcgttgtgctcaagcttaacggagggctcgggacgaccatgggctgcactgggcccaagtctgtcattgaagtccgcaatgggttcacattccttgatcttattgt

SEQ ID NO: 68382 - DNA, 172 bp, Zea mays
agcaacatagaaagcacaatagtgtaccaacaatggcagccaaaatattttgcctccttatgctccttggtctttctgcaagtgctgctacggcgaccattttcccacaatgctcacaagctcctatagcttcccttcttcccccgtacctctcaccagcggttcttcggta

SEQ ID NO: 68383 - DNA, 162 bp, Zea mays
tgagcattcagaaacacaccaagcgaagacattagcaacaacctaacaacaatggctaccaagatattatccctccttgcgcttcttgcgctttttgcgagcgcaacaaatgcgttcattattccacaatgctcacttgctccaagttccattattacacag

SEQ ID NO: 68384 - DNA, 283 bp, Zea mays
cagcattcagaaacacaccaagcgaacgacattagcaacaacctaacaacaatggctaccaagatattatccctccttgcgcttcttgcgctttttgcgagcgcaacaaatgcgttcattattccacaatgctcacttgctccaagttccattattaacagttcctcccaccagttacttcaatgggcttcgaacacccagctgtgcaagcctataggctacaacaagcaattgcggcgagcgtcttacaacaaccaatttcccagttgcaacaacaatcctt

SEQ ID NO: 68385 - DNA, 124 bp, Zea mays
gctagcacaagttgttgtagttgttgtgccctgatgttttgtgccagcaaaccttgctgcctactctcagcaacagcagtttcttccattcaaccaactagctgcattgaactctgcttcttat

SEQ ID NO: 68386 - DNA, 204 bp, Zea mays
aaccaactagcaacatagaaagcacaatagtgtaccaacaatggcagctaaaatattttgcctccttatgctccttggtctttctgcaagtgctgctacggcgaccattttcccacaatgctcacaagctcctatagcttcccttcttcccccgtaccttcaccaacggtgtcttcggtatgtgaaaacccaattcttcaaccc

SEQ ID NO: 68387 - DNA, 119 bp, Zea mays
aatttctaccagcactgagccaactagctgtggtgagccctgtcgcctacttgcaacagcagttgcttgcatccaacccacttgctctggcaaacatagttgcataccaacaacaacaa

SEQ ID NO: 68388 - DNA, 202 bp, Zea mays
tgctgagagtaggcagtttgcggctaaccccgcaaccctcttacaactacaacaattgttgccctttgtccaacttgctttgacaaacccagcagcctcctaccaacaacacatcattggtggtgccctcttttagattgattattagttgtaattaataataaagttttttggatgatgtatgtggccaaccagaaataag

SEQ ID NO: 68389 - DNA, 201 bp, Zea mays
gaccaactagcaacatagaaagcacaatagtgtaccaacaatggcagccaaaatattttgcttccttatgctccttggtctttctgcaagtgctgctaccgcaaccattttcccacaatgctcacaagctcctatagcttcctttcttcccccatactctcaccagcggtgtcttcagtatgtgaaaacccaattcttcat

SEQ ID NO: 68390 - DNA, 172 bp, Zea mays
cggtcgaaccgagcgaaatttttcttatctgattgtctaagacctataacgggtgtaatggtatcacagtggttggttgagcatcaagtgactcatattttgtcaggtctatgtgtcatcgttaaacttttaacggtcattatatttcaaaagttttgcatttccactaaaa

SEQ ID NO: 68391 - DNA, 274 bp, Zea mays
ccaacatagaaagcacaatagtgtaccaacaatggcagccaaaatattttgcctccttatgctccttggtatttctgcaagtgctgctacggcgaccattttcccgcaatgctcacaagctcctatagcttcccttcttcccccgtacctccaccagcggtgtcttcggtatgtgaaaacccaattcttcaaccctacaggatccaacaggcaatcgcagctggcatcttacctttatcacccttgttcctccaacaatcatcagccctattac

SEQ ID NO: 68392 - DNA, 276 bp, Zea mays
cacacctagcgaaggcactagcaacgacctaacaacaatggcttccaagacattatccctccttgcgcttcttgccctttttgtgagtgcaacaaatgcgttcattattccacaatgctcacttgctccgagtgccattattccacagttctccctccagttacttcaatgggcttcgaacacccagctgtgcaagcctataggctacaacaagcgcttgcggcgagcgtcttagaacaaccaattgcccaattacaacaacaatccttagcacat

SEQ ID NO: 68393 - DNA, 259 bp, Zea mays
  unsure (1)..(259): unsure at all n locations
tcgcgcctccctcgccacgcctcnccagggccggttgcgtaggagaaaggagaaaggaannaggggaggcggtcgtcgggcgagatgagcgactccttctgccccgactgcaagangcatacggaggtggcgtcgaccactcggcgggggacatggtgtgcaccgagtgcggcctcgtcctcgaggcgcactcngtcgacgagacctccgagtggcgcaccttcgcgaacgagtccaacgacaacgaccccgtccgtnt

SEQ ID NO: 68394 - DNA, 187 bp, Zea mays
ctcgagccgaatcggctcgaggaccaacaagcaacatagaaagtcgaatacagtagcaaaaatagagcaacaatggcggacaagatattttccatccttatgctccttgctctttctgcatgtgttgctaacgcgaccatttttcctcaatactccaagctcctatagctgcccttcttcccccata

SEQ ID NO: 68395 - DNA, 168 bp, Zea mays
tagcaacatagaaagcacaatagtgtaccaacaatggcagccaaaatattttgcctccttatgctccttggtctttctgcaagtgctgctacggcgaccattttcccgcaatgctcgcaagctcctatagcttcccttcttcccccgtacctctcacagcggtgtctt

SEQ ID NO: 68396 - DNA, 122 bp, Zea mays
gcgatttcgatctcgcagccaccttttttttgttctgttgtgtatctagtagttggaggagatatgcagtttgcacttgcattggacacgaactcaggtcctcaccagataagatcttgtga

SEQ ID NO: 68397 - DNA, 142 bp, Zea mays
caatagtgtaccaacaatggcagccaaaatattttgcctccttatgctccttggtctttctgcaagtgctgctacggcgaccattttcccgcaatgctcgcaagctcctatagcttcccttcttcccccgtacctctcacca

SEQ ID NO: 68398 - DNA, 141 bp, Zea mays
cattcagaaacacaccaagcgaacgcactagcaacgacctaacaacaatggcttccaagacattatccctccttgcgcttcttgccctttttgtgagtgcaacaaatgcgttcattattccacaatgctcacttgctccga

SEQ ID NO: 68399 - DNA, 119 bp, Zea mays
tggacgtcagcctagcaattagctcatcgactccagattggagaactcgacaccatgaaggtgctgatcgttgcccttgctctcctggcgctcgctgcgagcgccgcctccagtacaag

SEQ ID NO: 68400 - DNA, 276 bp, Zea mays
attttgagcattcagaaacacaccaagcgaacgcagctagcaacaacctaacaacaatggctaccaagatattatccctccttgcgcttcttgcgctttttgcgagcgcaacaaatgcgtccattattccacaatgctcacttgctcctagtccattattccacagttcctcccaccagttacttcaatggccttcgaacacccagctgtgcaagcctataggctacaacaagcgattgcggcgagcgtcttacaacaaccaattgcccaattgca

SEQ ID NO: 68401 - DNA, 272 bp, Zea mays
attttcagcattcaaaaacacaccaagcgaaggcagctagcaacgacctaacaccaatggctaccaagatattagccctccttgcgcttcttgcccttttagtgagcgcaacaaatgcgttcattattccacagtgctcacttgctcctagtgccattattccacagttcctcccaccagttacttcaatgggcttcgaacatccagccgtgcaagcctacaggctacaactagcgcttgcggcgagcgccttacaacaaccaattgcccaa

SEQ ID NO: 68402 - DNA, 273 bp, Zea mays
gttcgtttccactccagatccaattggcaacaagtactatcttggccctgctcctttgcaggatatggcaaggcaaattgctacagccaatggccctactggctataatagggattacctgttctcaatggagaaggcattagccagcatagccacgaagatgattcgatcatagagcttgcaaacgaggtgaggaaggtgctcaacagaacaaaggagaccaagatcactggtgccaatgcttccctgaaatcacatgcccctcttgtgcac

SEQ ID NO: 68403 - DNA, 274 bp, Zea mays
ctcgagccgaatcggctcgagagagcacaatagtgtaccaacaatggcagccaaaatatttacgcttccttatgctccttggcctttctgcaagtgctgctaccgcaaccattttcccacaatgctcacaagctcctatagcttcctttctcccccatacctctcaccagcggtgtcttcagtatgtgaaaacccaattcttcaaccctacaggatccaacaggcaatcgcagcaggcatcttacctttatcacccttgttcctccaacaaccg

SEQ ID NO: 68404 - DNA, 198 bp, Zea mays
caagatattagccctccttgcgcttcttgcccttttagtgagcgcaacaaatgcgttcattattccacagtgctcacttgctcctagtgccagtattccacagttcctcccaccagttacttcaatgggcttcgaacatccagccgtgcaagctacaggctacaactagcgcttgcggcgagcgccttacaacaacca

SEQ ID NO: 68405 - DNA, 152 bp, Zea mays
ctgcattgaactctgctgcttatttgcaacaacaattaccattcagccagctagttgctgcctacccccagcaatttcttccattcaaccaactagcggcattgaactctgctgcttatttacagcagcaacaactactaccagtcagccag

SEQ ID NO: 68406 - DNA, 204 bp, Zea mays
atacgaactagcaacatacatagtgaagtacactagcaacatcttagcaccaatggcagccaagatttttgccatccttgccctccttgctctttcagcaagcgttgctaccgcgactattattccacaatgctcacaacaatacctctctccggtgcagccgcgagatttgaatacccaactatacaatcctacaggctacag

SEQ ID NO: 68407 - DNA, 119 bp, Zea mays
gagaccaactagcaacatagaaagcacaatagtgtaccaacaatggcagccaaaatattttgcctccttatgctccttggtctttctgcaagtgctgctacggcgaccattttcccaca

SEQ ID NO: 68408 - DNA, 159 bp, Zea mays
gcaacatagaaagcacaatagtgtaccaacaatggcagccaaaatattttgcctccttatgctccttggtctttctgcaagtgctgctacggcgaccattttcccgcaatgctcgcaagctcctatagcttcccttcttcccccgtacctctaccagcg

SEQ ID NO: 68409 - DNA, 225 bp, Zea mays
aagctggtgaggcccgcgctccccgtcctggacgacctcgtggcggacaaggagcagcacgggtcgttcgacttcgccttcgtggacgccgacaaggacaactacctcagctaccacgagcggctcctgaagctggtgaggcccggcggcctatcggctacgacaacacgctgtggaacggctccgtcgtgctccccgacgacgcgcccatgcgcaagtacatcc

SEQ ID NO: 68410 - DNA, 270 bp, Zea mays
attttgagcattcagaaacacaccaagcgaacacattagcaacaacctaacaacaatggctaccaagatattatccctccttgcgcttcttgcgctttttgcgagcgcaacaaatgcgttcattattccacaatgctcacttgctccagttccattattacacagttcctcccaccagttacttcaatgggcttcgaacacccagctgtgcaagcctataggctacaacaagcaattgcggcgagcgtcttacaacaaccattttcccag

SEQ ID NO: 68411 - DNA, 149 bp, Zea mays
caactagcaacatagagagcacaatagtgtaccaacaatggcagccaaaatattttgcttccttatgctccttggtctttctgcaagtgctgctaccggaaccattttcccacaatgctcacaagctcctatagcttcctttcttcccc

SEQ ID NO: 68412 - DNA, 196 bp, Zea mays
ctcgagccgttgagaccaactagcaacatagatagcacaatagtgtaccaacaatggcagccaaaatattttgcctccttatgctccttggtctttctgcaagtgctgctacggcgaccattttcccgcaatgctcgcaagctcctatagttcccttcttcccccgtacctctcaccagcggtgtcttcggtatgt

SEQ ID NO: 68413 - DNA, 119 bp, Zea mays
caagcacaatagtgtaccaacaatggcagccaaaatattttgcttccttatgctccttggtctttctgcaagtgttgctaccgcaaccattttcccacaatgctcacaagctcctatag

SEQ ID NO: 68414 - DNA, 261 bp, Zea mays
atttagaccaactagcaacatagaaagcacaatagtgtaccaacaatggcagccaaaatattttgcctccttatgctccttggtatttctgcaagtgctgctacggcgaccattttcccgcaatgctcacaagctcctatagcttcccttcttcccccgtacctctcaccagcggtgtcttcggtatgtgaaaacccaattcttcaaccctacaggatccaacaggcaatcgcagctggcatcttacctttatcacccttg

SEQ ID NO: 68415 - DNA, 216 bp, Zea mays
aatattttgagcattcagaaacacaccaagcgaagcgcactagcaacgacctaacaacaatggctaccaagatattagccctccttgcgcttcttgccctttttgtgagcgcaacaaatgcgttcattattccacaatgctcacttgctcctagtgccattattccacagttcctcccaccagttacttcaatgggcttcgaacacctagctgtgc

SEQ ID NO: 68416 - DNA, 105 bp, Zea mays
caacaagcaacatagaaagtggaatccagtagcaacaacagagcaacaatggcgaccaagatattttccctccttatgctccttgctctttctgcatgtgttgct

SEQ ID NO: 68417 - DNA, 129 bp, Zea mays
tgaatctatatctccaaagaatcgcagcacaacaactacaacaacagttgcttccaacaatcaatcaagtagttgcagcgaaccttgctgcttacctccagcaacaacaatttcttccattcaatcaac

SEQ ID NO: 68418 - DNA, 130 bp, Zea mays
attgagaccaactagcaacatagaaagcacaatagtgtaccaacaatggcagccaaaatattttgcttccttatgctccttggtctttctgcaagtgctgctaccgcaaccattttcccacaatgctcac

SEQ ID NO: 68419 - DNA, 114 bp, Zea mays
gcgcctctacatttcttctctctcagctcctccgcctccgcctgatccatccaagacagggatcgccatgtcggactcggaggagcaccacttcgaatcgaaggccgacgctgg

SEQ ID NO: 68420 - DNA, 255 bp, Zea mays
gttgttgctgagagtagggagaaaggtttgccagagctacttggttgatcacaggtagcacgagttgctgcagctgttgtgccctgatggtttgtaccaatgactgcaccaaagatagggctggtgattgttgaaacaacaacttctaccatttaaccaattggccgcactgaaccccgctgcttatttgcagcagcaaatactactgccatttagcgagctagctgcagcaagtcgtgcttccttcttgacaca

SEQ ID NO: 68421 - DNA, 260 bp, Zea mays
ccaacaagcaacatagaaagtggaatccagtagcaacaacagagcaacaatggcgaccaagatattttccctccttatgctccttgctctttctgcatgtgttgctaacgcgacaattttccctcaatgctcacaagctcctatagcttcccttcttcccccataccttccatcaatgatagcttcagtatgtgaaaacccagctcttcagccctataggctccaacaagcaatcgcagcaagcaacatacctttatcac

SEQ ID NO: 68422 - DNA, 267 bp, Zea mays
agcaaaatacatagtgaagtacactagcaacatcttagcaccaatgggagccaagattttttccctccttgccctccttgctctttcagcaagcgctgctacctctactattattccacaatgctcacaacaatacctctctccggtgacagccgcgggatttcaacacccaactatacaatcctacatgctacatgaggccatcgtagcaagcatcttacggtcattagcattaaccctccaacagccatatgccctattgcaaca

SEQ ID NO: 68423 - DNA, 228 bp, Zea mays
ctgagagtaggcagcaacaactaccattcagtcagctagctgctgcctacccccagcaatttcttccattcaaccaactggcagcattgaactctgctgcttatttacaacagcaacagctaccaccattcagccagctagctgatgtgagccctgttgccttcttgacacaacaacagttgttgccgttctacctgcacgctgcgcataacgctggccccctcttac

SEQ ID NO: 68424 - DNA, 244 bp, Zea mays
ctcgagagagggatatctgtttccgcatcggcagcgttctctgcagcggcgatgccgctcctcgagattcttgagcttgggattgtatcgcactcagtgatcatcgggctatctttgggcgtctcacagaatccttgcaccatcaaacctctaggtgctgctctctccttccaccagttttttgagggctttgcattgggcggctgcatttccgaggctcatcaaagatttcacgcactcttat

SEQ ID NO: 68425 - DNA, 257 bp, Zea mays
gaccaactagcaacatagaaagcacaatagtgtaccaacaatggcagctaaaatattttgcctccttatgctccttggtctttctgcaagtgctgctacggcgaccattttcccacaatgctcacaagctcctatagcttcccttcttcccccgtacctctcaccaacggtgtcttcggtatgtgaaaacccaattcttcaaccctacaggatccaacaggcaatcgcagctggcatcttacctttatcacccttgt

SEQ ID NO: 68426 - DNA, 257 bp, Zea mays
caacaggcaatcgcagctggcatcttacctttatcacccttgttcctccaacaatcatcagccctattacagcagttacctttggtgcatttattggcacaaaacatcagggcacaacaactacaacaacttgtgctagcaaaccttgctgcctactctcagcaacaacagtttcttccattcaaccaactagctgcattgaactctgcttcttatttgcaacaacaacaactaccattcagccagctatctgctgc

SEQ ID NO: 68427 - DNA, 255 bp, Zea mays
tgaaaatccaattcttctaccctacaggatccaacaggcaatcgcagcaggcatcttacctttatcacccttgttcctccaacaatcatcagccctattacagcagttacctttggtgcatttattggcacaaaacatcagggcacaacaactacaacaactcgtgctagcaaaccttgctgcctactctcagcaacagcagttacctttggtgcatttgttggcacaaaacatcagggcacaacaactacaaca

SEQ ID NO: 68428 - DNA, 256 bp, Zea mays
attttcagcattcagaaacacaccaagcggacggactagcgacgacctaacaccaatggctaccaagatattagccctccttgcgcttcttgcccttttagtgagcgcaacaaatgcgttcattattccacagtgctcacttgctcctagtgccattattccacagttcctcccaccagttacttcaatgggcttcgaacatccagccgtgcaagcctacaggctacaactagcgcttgcggcgagcgccttacaa

SEQ ID NO: 68429 - DNA, 263 bp, Zea mays
caactagcaacatagaaagcacaatagtgtaccaacaatggcagccaaaatattttgcctccttatgctccttggtctttctgcaagtgctgctacggcgaccattttcccgcaatgctcgcaagctcctatagcttcccttcttcccccgtacctctcaccagcggtgtcttcggtatgtgaaaacccaattcttcaaccctacaggatccaacaggcaatcacagctggcatcttacctttatcacccttgttcctccaaa

SEQ ID NO: 68430 - DNA, 105 bp, Zea mays
tggaagggccctgccaagagagatcctggatcatgcagttccaggagagatcctggatcatgcagttcctcaccatctcctcgaagggccctgccaagaactggg

SEQ ID NO: 68431 - DNA, 239 bp, Zea mays
ggtctttctgcaagttttgctaccgcaaccattttcccacaatgctcacaagctcctatagcttcccttcttcccccatacctctcaccagcggtgtcttcaatgtgtgaaaacccaattgttcaacctacaggatccaacaggcaatcgcaacaggcatcttaccattatcaccctttttcctccaacaaccgtaagccctattacagcagttacctttggtccatttggtggcacaa

SEQ ID NO: 68432 - DNA, 256 bp, Zea mays
cagaaacacacctagcgaacgacactagcaacgacctaacaacaatggctaccaagatattatccctctttgcgcttcttgccctttttgtgagcgcaacaaatgcgttcattattccacaatgctcacttgctcctagtgccattattccacagttcctccctccagttacttcaatgggcttcgaacacccagctgtgcaagcctacaggctacaacaagcgcttgcggcgagcgtcttacaacaaccaattgc

SEQ ID NO: 68433 - DNA, 258 bp, Zea mays
attccacaatgctcacttgctcctaatgccattattccacagttcctcccatcagttacatcaatgggcatcgaacaccctattgtgcaagcctataggctacaacaagcgcttgcggcgagcgtcttacaacaaccgtttgcccaattacaacaacaatccttggcacatctaaccatacaaaccatcgcaacacaactagagcaacagtttgtgcccgcattgagccaactagccgcagtgaaccctgtctcctac

SEQ ID NO: 68434 - DNA, 252 bp, Zea mays
cattcagaaacacaccaagcgaagcgcactagcaacaacctaacaacaatggctaccaagatattatccctccttgcgcttcttgcgctttttgcgagcgcaacaaatgcgtccattattccacaatgctcacttgctcctagttccattattccacagttcctcccaccagttacttcaatggccttcgaacacccagctgtgcaagcctataggctacaacaagcgattgcggcgagcgtcttacaacaa

SEQ ID NO: 68435 - DNA, 237 bp, Zea mays
gctcgagcgcacctgtaccggatggactatgaaaagttcattcaggcacaacgagaaacaaatgctgatattaccgttgctgccctaccgatggatgagaaacgtgcaactgcatttggcctcatgaaaattgatgaagaagggaggatcattgagtttgctgagaaaccgaaaggagagcagttgaaagcaatgatggttgacaccaccatacttggccttgaagacgtgagggca

SEQ ID NO: 68436 - DNA, 83 bp, Zea mays
attccacagtgctcacttgctcctagtgccagtattccacagttcctcccaccagttacttcaatgggcttcgaacatccagc

SEQ ID NO: 68437 - DNA, 255 bp, Zea mays
caacaagcaacatagaaagtggaatccagtagcaacaatagagcaacaatggcgaccaagatattttccctccttatgctccttgctctttctacatgtgttgctaacgcgacaattttccctcaatgctcacaagctcctatagcttcccttcttcccccataccttccatcaattatagcttcaatatgtgaaaacccagctcttcaaccatataggcttcaacaagcaatcgcagcaagcaacataccttta

SEQ ID NO: 68438 - DNA, 127 bp, Zea mays
tgcctcgtgtggccgtcgtctcccgttcggaacgccaagcccccctccggcgaaatggcccccaagcgaggtggcagggcgccggtgccggccaagaagaagacggataaagtgacgaaccctctgt

SEQ ID NO: 68439 - DNA, 254 bp, Zea mays
aacatagaaagtggaatccagtagcaacaatagagcaacaatggcgaccaagatattttccctccttatgctccttgctctttctacatgtgttgctaacgcgacaattttccctcaatgctcacaagctcctatagcttcccttcttcccccataccttccatcaattatagcttcaatatgtgaaaacccagctcttcaaccatataggcttcaacaagcaatcgcagcaagcaacatacctttatcgccct

SEQ ID NO: 68440 - DNA, 260 bp, Zea mays
attgagaccaactagcaacatagaaagcacaatagtgtaccaacaatggcagccaaaatattttgcttccttatgctccttggtctttctgcaagtgttgctaccgcaaccattttcccacaatgctcacaagctcctatagcttcccttcttcccccatacctctcaccagcggtgtcttcaatgtgtgaaaccccaattgttcaaccctacaggatccaacaggcaatcgcaacaggcatcttaccattatcaccctt

SEQ ID NO: 68441 - DNA, 119 bp, Zea mays
ctgggtttgtcaaagcagcctcctaccaacaacacatcattggtggtgccctcttttagattgcttattagttgtaattcaataataaagttttttggatgatgtatgtggccaaccag

SEQ ID NO: 68442 - DNA, 117 bp, Zea mays
caacacatcattggtggtgccctcttttagattgattattagttgttgttcaataataaagttttttggatgatgtatgtggccaaccagaaataagaagttacatttccagattca

SEQ ID NO: 68443 - DNA, 127 bp, Zea mays
ctgggtcttcagaccattagctttatctactccagagcgcagaagaacccgatcgacaccatgagggtgttgctcgttgccctcgctctcctggctctcgctgcgagcgccacctccacgcatacaa

SEQ ID NO: 68444 - DNA, 252 bp, Zea mays
caaccatataggcttcaacaagcaatcgcagcaagcaacatacctttatcgcccttgttgtttcaacaatcaccagccctatctttggtgcagtcattggtacaaaccatcagggcacaacagctgcagcaactcgtgctacctgtgatcaaccaagtagctctggcaaacctttctccctactctcagcaacaacaatttcttccattcaaccaactgtctacactgaaccctgctgcttatttgcagcaa

SEQ ID NO: 68445 - DNA, 251 bp, Zea mays
tgaagaaggagttcagctacagcaagatcctcaaagatctcaagaaagagttctgctgcaatggtacagtggtccaggacccagaacttggacaggtcattcagctccagggtgatcagaggaagaacgtctcgaatttcctcgtccaggccggcattgtgaagaaggagcacatcaagattcatggtttctgagcaaccgccgggtccatagcaaaccaaccctgcatgcagggccagcttattatatat

SEQ ID NO: 68446 - DNA, 253 bp, Zea mays
atttgcaacaacaacaactaccattcagccagctacctgttgcctacccccagcaatttcttccattcaaccaactggcagcattgaactctcctgcttatttacagcagcaacaactactaccattcagccagctagctggtgtgagccctgctaccttcttgacacaaccacagttgttgccgttctaccagcacgctgcgcctaacgctggcaccctcttacaactgcaacaattgctgccattcaacca

SEQ ID NO: 68447 - DNA, 255 bp, Zea mays; identical to SEQ ID NO: 25876

SEQ ID NO: 68448 - DNA, 258 bp, Zea mays
tgaccacctagccgtggtgaaccctatcgcctacttgcaacaacagctgcttgcatccaacccacttgctttggcaaacgtagctgcataccaacaacaacaacagttgcaacagtttctgccagcgctcagtcaactagccatggtgaaccctatcgcctacctacaacagcaacaacttctttcatctagcccgctcgctatgggcaatgcacctacatacctgcaacaacagttgttgcaacaacagttgctgca

SEQ ID NO: 68449 - DNA, 77 bp, Zea mays
ctagcaacatagaaagcacaatagtgtaccaacaatggcagccaaaatattttgcctccttatgctccttggtcttt

SEQ ID NO: 68450 - DNA, 132 bp, Zea mays
actagcaacatagaaagcacaatagtgtaccaacaatggcagctaaaatattttgcctccttatgctccttggtctttctgcaagtgctgctacggcgaccattttcccacaatgctcacaagctcctatag

SEQ ID NO: 68451 - DNA, 251 bp, Zea mays
tgactaccaggcctttctaatggcatcaagttcatacaacagaacttggtagaattgtccctcactgacgccatccctgtagaatatgatcctctttggtttctgtccagttgccctcccattaccatgttctgtgggatgagaacaactttacggctgatgggttgcaaactctcaccaacaacttgtgttacacgtatgctaggtgcacacgctcagtatcgattgttcctcctgcatactatgctcac

SEQ ID NO: 68452 - DNA, 250 bp, Zea mays
gctgctataaaaccctccgcctccaccggcggctcgccaaactccgtttcgaattctagggttttgctgctctccgaccccgagctccgaaggccgcagcatcaggcgcggcccccctcgcgtgtgaccgagatggcgctgccgaatcaggggaccgttgattaccccagcttcaagctcgtcatcgtcggcgatggtggaactggtaaaactacatttgtgaagaggcatctcactggagagtttgaga

SEQ ID NO: 68453 - DNA, 142 bp, Zea mays
gagaccaactagcaacatagaaagcacaatagtgtaccaacaatggcagccaaaatattttgcctccttatgctccttggtctttctgcaagtgctgctacggcgaccattttcccgcaatgctcgcaagctcctatagctt

SEQ ID NO: 68454 - DNA, 239 bp, Zea mays
ttcgggaggcaagtgcgatttcgatctcgcagccacctttttttttgttctgttgtgtatctagtagttggaggagatatgcagtttgcacttgcattggacacgaactcaggtcctcaccagataagatcttgtgagggtgatgggattgacaggttggaaaaattaagtattgggggcagaaagcaggagaaagctttgagaaataggtgctttggtggtagagttgctgcaactac

SEQ ID NO: 68455 - DNA, 285 bp, Zea mays
gcacaatagtgtaccaacaatggcagccaaaatattttgcctccttatgctccttggtctttctgcaagtgctgctacggcgaccattttcccgcaatgctcgcaagctcctatagcttcccttcttcccccgtacctctcaccagcggtgtcttcggtatgtgaaaacccaattcttcaaccctacaggatccaacaggcaatcacagctggcatcttacctttatcacccttgttcctccaacaatcatcagccctattacatcagttacctttggtgcattt

SEQ ID NO: 68456 - DNA, 269 bp, Zea mays
attgagaccaactagcaacatagaaagcacaatagtgtaccaacaatggcagccaaaatattttgcctccttatgctccttggtctttctgcaagtgctgctacggcgaccattttcccgcaatgctcgcaagctcctatagcttcccttcttcccccgtacctctcaccagcggtgtcttcggtatgtgaaaacccaattcttcaaccctacaggatccaacaggcaatcacagctggcatcttacctttatcacccttgttcctcca

SEQ ID NO: 68457 - DNA, 269 bp, Zea mays
gcaacatagaaagcacaatagtgtaccaacaatggcagccaaaatattttgcttccttatgctccttggtctttctgcaagtgttgctaccgcaaccattttcccacaatgctcacaagctcctatagcttcccttcttcccccatacctctcaccagcggtgtcttcaatgtgtgaaaccccaattgttcaaccctacaggatccaacaggcaatcgcaacaggcatcttaccattatcacccttgttcctccaacaaccgtcagccc

SEQ ID NO: 68458 - DNA, 266 bp, Zea mays
caacaagcaacatagaaagtggaatccagtagcaacaacagagcaacaatggcgaccaagatattttccctccttatgctccttgctctttctgcatgtgttgctaacgcgacaattttccctcaatgctcacaagctcctatagcttcccttcttcccccataccttccatcaatgatagcttcagtatgtgaaaacccagctcttcagccctataggctccaacaagcaatcgcagcaagcaacatacctttatcacccttgtt

SEQ ID NO: 68459 - DNA, 266 bp, Zea mays
gcagcagctagctgctatagcgccaacacttgagcagttgactaaacagaaaaatgaaagaaaaagagagtttgttaatgtacaatcacaaattgatcaaatatgtggtgaaatcgctggcaccatagaggtgggtgagcaaatgacaacaccccaagtcaatgaggatgacttaacacttgagaggcttgaagattttcggtctcagctcaaggatcttgaaaaagagaagagtaataggttggagaaggttcttgattatgtag

SEQ ID NO: 68460 - DNA, 269 bp, Zea mays
gtactctatgacacattgattcagcagtgtagcaatgaggatgagatagtttctgttatagcacatgaacttggacactggaaactcaatcatactgtctattcctttgtagctgtccagctgcttatgtttcttcaatttggaggatatactctagtaaggagctccaaagatctatttggaagttttggcttcaaggaccagccagtaataattggattgatcattttccagcacaccataatacccatccaacaccttctgagctt

SEQ ID NO: 68461 - DNA, 278 bp, Zea mays
tagcaacatagaaagcacaatagtgtaccaacaatggcagccaaaatattttgcctccttatgctccttggtctttctgcaagtgctgctacggcgaccattttcccgcaatgctcgcaagctcctatagcttcccttcttcccccgtacctctcaccagcggtgtcttcggtatgtgaaaacccaattcttcaaccctacaggatccaacaggcaatcacagctggcatcttacctttatcacccttgttcctccaacaatcatcagcctattacat

SEQ ID NO: 68462 - DNA, 264 bp, Zea mays
gaaagcacaatagtgtaccaacaatggcagctaaaatattttgcctccttatgctccttggtctttctgcaagtgctgctacggcgaccattttcccacaatgctcacaagctcctatagcttcccttcttcccccgtacctctcaccaacggtgtcttcggtatgtgaaaacccaattcttcaaccctacaggatccaacaggcaatcgcagctggcatcttacctttatcacccttgttcctccaacaatcatcagccctat

SEQ ID NO: 68463 - DNA, 264 bp, Zea mays
atttataccaactaccaacatacatagtgaagtacactagcaacatcttagcaccaatggcagccaagatttttgcgctccttgccctccttgctctttcagcaagtgttgctaccgcgactattattccacaatgctcacaacaatacctctctccagtgatagccgcgagatttgaatacccatctatacaatcctacaggctacaagaggccatcacagcaagcatcttacggtcgttagcattgaccgtccaacaaccat

SEQ ID NO: 68464 - DNA, 269 bp, Zea mays
attgagaccaactagcaacatagaaagcacaatagtgtaccaacaatggcagctaaaatattttgcctccttatgctccttggtctttctgcaagtgctgctacggcgaccattttcccacaatgctcacaagctcctatagcttcccttcttcccccgtacctctcaccaacggtgtcttcggtatgtgaaaacccaattcttcaaccctacaggatccaacaggcaatcgcagctggcatcttacctttatcacccttgttcctcca

SEQ ID NO: 68465 - DNA, 270 bp, Zea mays
agaccaacaagcaacatagaaagtggaatccagtagcaacaatagagcaacaatggcgaccaagatactttccctccttatgctccttgctctttctgcatgtgttgctaacgcgacaattttccctcaatgctcacaagctcctatagcttcccttcttcccccataccttccatcaatgatagcttcagtatgtgaaaacccagctcttcaaccctataggctccaacaagcaatcgcagcaagcaacatacctttatcacccttgtt

SEQ ID NO: 68466 - DNA, 270 bp, Zea mays
ctcgagccgttcgatcccatttgaaatcaacccatcctcgtttcctccgtctagcagcctctcaccctcatggccaagatcaagatcgggatcaatgggtttggcaggatcggaaggctggtggccagggtggccctgcagagcgacgacgtcgagctcgtcgccgtgaacgaccccttcatcagcaccgattacatgacctacatgttcaagtatgacactgtgcacggacagtggaagcaccatgaggtcaaggtgaaggactccaga

SEQ ID NO: 68467 - DNA, 276 bp, Zea mays
ctcgagccgaatcggctcgagtcagcattcaaaaacacaccaagcgaacgcactagcaacgacctaacaccaatggctaccaagatattagccctccttgcgcttcttgcccttttagtgagcgcaacaaatgcgttcattattccacagtgctcacttgctcctagtgccagtattccacagttcctcccaccagttacttcaatgggcttcgaacatccagccgtgcaagcctacaggctacaactagcgcttgcggcgagcgccttacaacaa

SEQ ID NO: 68468 - DNA, 279 bp, Zea mays
gcggggctagggtttggtcggtcgtctcgccggcgtcgaggccgccagcgctgctagctagctctctcgcgttagggttccccgtagccatggtgctgcagcgcttctcgtggccgtacggcggccggagcgccaccttctgcggtagcttcaccgggtggagagagtgtcccatggggctggttggggccgtgttccaggtcgtcttcgatctgccccccggagtttaccagtaccggtttttggttgatggtgtctggaggtgtgatgagacaaaac

SEQ ID NO: 68469 - DNA, 276 bp, Zea mays
gttgcaaaccatggacatggctttggcgtctaaagcctcccctccgccatggaatgccaccgccgccgagcagccaattccaaagcgtgacaaagccgctgcaaatgattcaacatacctcaatcctcaagctcatgatagtgttcttggaatcattctgggaggtggtgctgggactagattgtaccccttgacaaagaagcgtgccaagcctgcagtgccattgggtgccaactatagactgattgatattcctgtcagcaattgtctcaacag

SEQ ID NO: 68470 - DNA, 268 bp, Zea mays
caacaagcaacatagaaagtggaatccagtagcaacaatagagcaacaatggcgaccaagatattttccctccttatgctccttgctctttctacatgtgttgctaacgcgacaattttccctcaatgctcacaagctcctatagcttcccttcttcccccataccttccatcaattatagcttcaatatgtgaaaacccagctcttcaaccatataggcttcaacaagcaatcgcagcaagcaacatacctttatcgcccttgttgt

SEQ ID NO: 68471 - DNA, 263 bp, Zea mays
atcacccataatattttgagcattcagaaacacacctagcgaacgcactagcaacgacctaacaacaatggctaccaagatattatccctctttgcgcttcttgccctttttgtgagcgcaacaaatgcgttcattattccacaatgctcacttgctcctagtgccattattccacagttcctccctccagttacttcaatgggcttcgaacacccagctgtgcaagcctacaggctacaacaagcgcttgcggcgagcgtct

SEQ ID NO: 68472 - DNA, 260 bp, Zea mays
tgcgcagggcgagctcgcggctgctgctgcaggaaggactgcaggagcagccgcagggacagctcgcggcgctgcctggcggcccaggtagcgcacagctgacggcgatgtgcggcctgcagctacagcaggcaggtccctgcccttgcaacgcagctgccggcggtgtctactactgaggaaactatgtactgtagtaataatgtaatggagccgctgactagctacctagctcgctagtttactcatttagcggcgat

SEQ ID NO: 68473 - DNA, 262 bp, Zea mays
ttgagaccaactagcaacatagaaagcacaatagtgtaccaacaatggcagccaaaatattttgcttccttatgctccttggtctttctgcaagtgctgctaccgcaaccattttcccacaatgctcacaagctcctatagcttcctttcttcccccatacctctcaccagcggtgtcttcagtatgtgaaaacccaattcttcaaccctacaggatccaacaggcaatcgcagcaggcatcttacctttatcacccttgtt

SEQ ID NO: 68474 - DNA, 258 bp, Zea mays
aattagctcatcgactccagattggagaactcgacaccatgaaggtgctgatcgttgcccttgctctcctggcgctcgctgcgagcggcgcctccagtacaagcggcggctgtggctgccagacaccaccgtttcatctaccgcctccgttctatatgccgcctccgttctatctgccgccgcagcagcagccgcagccatggcaataccacactcaaccaccgcagctaagcccgtgccagcagttcggatcctgcg

SEQ ID NO: 68475 - DNA, 265 bp, Zea mays
tttgagcattcagaaacacaccaagcgaagcgcactagcaacgacctaacaacaatggctaccaagatattagccctccttgcgcttcttgccctttttgtgagcgcaacaaatgcgttcattattccacaatgctcacttgctcctagtgccattattccacagttcctcccaccagttacttcaatgggcttcgaacacctagctgtgcaagccaacatgcaacaacaagcgcttgcggcgagcgtcttacaacaaccaattg

SEQ ID NO: 68476 - DNA, 265 bp, Zea mays
  unsure (1)..(265): unsure at all n locations
cgctcgagcgattcggctcactacacgattgagaccaactagcaacatagaaagcaacatagtgtaccaacaatgaccgccaaaatattttgcctccttatgctccttggtcttactgcaagtgctgctacggcgaccattttcccacaatgctcacaagctcctatagcttcccttcttcccccgtacctctcaccagcggtgtcttcggtatgtgaaaacccaattcttcaaccctataggatncatcaggcaatcgcagctg

SEQ ID NO: 68477 - DNA, 167 bp, Zea mays
ataacgctcgcatgcctgtgcacttctccatcaccaccactggggcttcagaccattagctttatctactccagagcgcagaagaacccgatcgacaccatgagggtgcggctcgttgccctcgctctcctggctctcgctgcgagcgccacctccacgcatacaag

SEQ ID NO: 68478 - DNA, 272 bp, Zea mays
gcaacatagaaagcacaatagtgtaccaacaatggcagctaaaatattttgcctccttatgctccttggtctttctgcaagtgctgctacggcgaccattttcccacaatgctcacaagctcctatagcttcccttcttcccccgtacctctcaccaacggtgtcttcggtatgtgaaaacccaattcttcaaccctacaggatccaacaggcaatcgcagctggcatcttacctttatcacccttgttcctccaacaatcatcagccctat

SEQ ID NO: 68479 - DNA, 273 bp, Zea mays
tttggatctgaaatcctcccaagagctgtactagatcatagtgtgcaggcatgcatttttacgggctattgggaggatgttggaacaatcaaatcattctttgatgcaaacttggccctcactgagcagccttccaagtttgatttttatgatccaaaaacacctttcttcactgcaccccgatgcttgcctccgacgcaattggacaagtgcaagatgaaagatgcatttatctcagatggttgcttactgagagaatgcaacatcgagcat

SEQ ID NO: 68480 - DNA, 274 bp, Zea mays
caacaagcaacatagaaagtggaatacagtagcaaaaatagagcaacaatggcggccaagatattttccatccttatgctccttgctctttctgcatgtgttgctaacgcgaccatttttcctcaatactcacaagctcctatagctgcccttcttcccccataccttccatcaatgaccgctttagtatgtgagaacccagcccttcaaccctacaggatccagcaagcaatcgcaacaagcaacttacctttatcacacctgttctttcaac

SEQ ID NO: 68481 - DNA, 265 bp, Zea mays
  unsure (1)..(265): unsure at all n locations
aaaaacacaccaagcgaaggnactagcaacgacctaacaccaatggctaccaagatattagccctccttgcgcttcttgcccttttagtgagcgcaacaaatgcgttcattattccacagtgctcacttgctcctagtgccagtattccacagttcctcccaccagttacttcaatgggcttcgaacatccagccgtgcaagcctacaggctacaactagcgcttgcggcgagcgccttacaacaaccaattgcccaattgcaac

SEQ ID NO: 68482 - DNA, 185 bp, Zea mays
  unsure (1)..(185): unsure at all n locations
ggaaactatgtactgtagtaataatgtaatggagccgctgactagctacctagctcgctagtttactcatttagcggcgatgagtaacgtagtgtcacccatcaccatgngtggcagtgtgagcaatgacctgaatgaaccattgaaatggaaaggaataatatataaggaaaaaagatgattgg

SEQ ID NO: 68483 - DNA, 257 bp, Zea mays
aacagattcatcctgtcgtttctcgtctgtgtgcttccattcagggcactagtccagctcgtctggctgaatgtctgggccttgattcggctaagttccaaccaagattgactgagtcgagcaaccaagatacatctatgatgctgttatctgtaatcgatgacgaagatgagagatatcgtggttgtgaaccactgcgtttgtcatgcccaagctgttctggtaccttcgactgcccccctgtatctagtctgatt

SEQ ID NO: 68484 - DNA, 258 bp, Zea mays
cacagttcctccctccagttacttcaatgggcttcgaacacccagctgtgcaagcctacaggctacaacaagcgcttgcggcgagcgtcttacaacaaccaattgcccaattacaacaacaatccttggcacatctaaccatacaaaccatcgcaacgcaacagcaacaacaatttctactcgcactgagccaactagctgtggtgaaccctgtcgcctacttgcaacagcagttgcttgcatccaacccacttgctc

SEQ ID NO: 68485 - DNA, 264 bp, Zea mays
ccaactagcaacatagaaagcacaatagtgtaccaacaatggcagccaaaatattttgcttccttatgctccttggtctttctgcaagtgttgctaccgcaaccattttcccacaatgctcacaagctcctatagcttcccttcttcacccatacctctcaccagcggtgtcttcaatgtgtgaaaccccaattgttcaaccctacaggatccaacaggcaatcgcaacaggcatcttaccattatcacccttgttcctccaac

SEQ ID NO: 68486 - DNA, 260 bp, Zea mays
tgcgattttgatcttgcagccacctttttttgttctgttgtgtatctagtcgttggaggagatatgcagtttgcacttgcattggacacgaactcaggtcctcaccagataagatcttgtgagggtgatgggattgacaggttggaaaaattaagtattgggggcagaaagcaggagaaagctttgagaaataggtgctttggtggtagagttgctgcaactacacaatgtattcttactcagatgcttgtcctgaaact

SEQ ID NO: 68487 - DNA, 264 bp, Zea mays
ctcgagccggccagtcgttgcggcacagtgttgccagcagctcaggcaggtggagccgcagcaccggtaccaggcgatcttcggcttggtcctccagtccatcctgcagcagcagccgcaaagcgccaggtcgcggggctgttggcggcgcagatagcgcacaactgacggcgatgtgcggcctgcagcagccgactccatgcccctacgctgctgccggcggtgtcccccactgaagaaactatgtgctgtagtatagccgct

SEQ ID NO: 68488 - DNA, 57 bp, Zea mays
cctgaatgaaccattgaaatggaaaggaataatatataaggaaaaaagatgattggc

SEQ ID NO: 68489 - DNA, 274 bp, Zea mays
aatattttgagcattcagaaacacacctagcgaacgacactagcaacgacctaacaacaatggcttccaagacattatccctccttgcgcttcttgccctttttgtgagtgcaacaaatgcgttcattattccacaatgctcacttgctccgagtgccattattccacagttcctccctccagttacttcaatgggcttcgaacacccagctgtgcaagcctataggctacaacaagcgcttgcggcgagcgtcttagaacaaccaattgccca

SEQ ID NO: 68490 - DNA, 277 bp, Zea mays
gtggaatccagtagcaacaacagagcaacaatggcgaccaagatattttccctccttatgctccttgctctttctgcatgtgttgctaacgcgacaattttccctcaatgctcacaagctcctatagcttcccttcttcccccataccttccatcaatgatagcttcagtatgtgaaaacccagctcttcagccctataggctccaacaagcaatcgcagcaagcaacatacctttatcacccttgttgtttcaacaatcgccagccctatctttgg

SEQ ID NO: 68491 - DNA, 269 bp, Zea mays
ctgagaccaactagcaacatagaaagcacaatagtgtaccaacaatggcagcctaaatattttgcctccttatgctccttggtctttctgcaagtgctgctacggcgaccattttcccacaatgctcacaagctcctatagcttcccttcttcccccgtacctctcaccagcggtgtcttcggtatgtgaaaacccaattcttcaaccctataggatccaacaggcaatcgcagctggcatcttacctttatcacccttgttcctccaa

SEQ ID NO: 68492 - DNA, 269 bp, Zea mays
aagcaacatagaaagtggaatacagtagcaacaatagagcaacaatggcggccaagatattttccatccttatgctccttgctctttctgcatgtgttgctaacgcgaccatttttcctcaatactcacaagctcctatagctgcccttcttcccccataccttccatcaatgaccgcttcagtttgtgaaaacccagcccttcaaccctacaggctccaacaagcaatcgcaacaagcaacttacctttatcacccctgttctttcaa

SEQ ID NO: 68493 - DNA, 267 bp, Zea mays
cgacgatgaattcaacagcaaggtttctgattttgggttggctaaacttctgaattctgacaaaagtcatatcaatacaagagtgatgggaacatatgggtatgtagcacctgagtacgcaaacagtgggatgctaaatgaaaaaagtgacatctacagttttggagtggtgttgttagaatgtgtgacccctagggatccagttgattacagtaagcctgcagatgaggtgaatctcatagagtggcttaagatgatggttaccag

SEQ ID NO: 68494 - DNA, 261 bp, Zea mays
ccaactagcaacatagaaagcacaatagtgtaccaacaatggcagccaaaatattttgcttccttatgctccttggtctttctgcaagtgctgctaccgcaaccattttcccacaatgctcacaagctcctatagcttcctttcttcccccatacctctcaccagcggtgtcttcagtatgtgaaaacccaattcttcaaccctacaggatccaacaggcaatcgcagcaggcatcttacctttatcacccttgttcctcc

SEQ ID NO: 68495 - DNA, 263 bp, Zea mays
gaccagcaagcaacatagaaagtagaatccattagcaacaatagagcaccaatggcgaccaagatattttccctccttatgctccttgctctttctacatgtgttgctaacgcgacaattttccctcaatgctcacaagctcctatagcttcccttcttcccccataccttccatcaattatagcttcagtatgtgaaaacccagctcttcaaccatataggcttcaacaagcaatcgcagcaagcaacatacctttatcgcc

SEQ ID NO: 68496 - DNA, 263 bp, Zea mays
cacacctagcgaaggtactagcaacgacctaacaacaatggcttccaagacattatccctccttgcgcttcttgccctttttgtgagtgcaacaaatgcgttcattattccacaatgctcacttgctccgagtgccattattccacagttcctccctccagttacttcaatgggcttcgaacacccagctgtgcaagcctataggctacaacaagcgcttgcggcgagcgtcttagaacaaccaattgcccaattacaacaac

SEQ ID NO: 68497 - DNA, 266 bp, Zea mays
gcaacatagaaagcacaatagtgtaccaacaatggcagctaaaatattttgcctccttatgctccttggtctttctgcaagtgctgctacggcgaccattttcccacaatgctcacaagctcctatagcttcccttcttcccccgtacctctcaccaacggtgtcttcggtatgtgaaaacccaattcttcaaccctacaggatccaacaggcaatcgcagctggcatcttacctttatcacccttgttcctccaacaatcatcag

SEQ ID NO: 68498 - DNA, 268 bp, Zea mays
tgctcgagccgctcgagccgctcgagccgattttcagcattcaaaaacacaccaagcgaacgacactagcaacgacctaacaccaatggctaccaagatattagccctccttgcgcttcttgcccttttagtgagcgcaacaaatgcgttcattattccacagtgctcacttgctcctagtgccagtattccacagttcctcccaccagttacttcaatgggcttcgaacatccagccgtgcaagcctacaggctacaactagcgctt

SEQ ID NO: 68499 - DNA, 70 bp, Zea mays
gttcaataataaagttttttgtctgatgtttgtggcttcccagaaataagaaagtacatttctagattct

SEQ ID NO: 68500 - DNA, 279 bp, Zea mays
attttcagcattcaaaaacacaccaagcgaagcgcactagcaacgacctaacaccaatggctaccaagatattagccctccttgcgcttcttgcccttttagtgagcgcaacaaatgcgttcattattccacagtgctcacttgctcctagtgccagtattccacagttcctcccaccagttacttcaatgggcttcgaacatccagccgtgcaagcctacaggctacaactagcgcttgcggcgagcgccttacaacaaccaattgcccaattgcaac

SEQ ID NO: 68501 - DNA, 275 bp, Zea mays
attatttagaccaactagcaacatagaaagcacactagtgtaccaacaatggcagccaaaatattttgcctccttatgctccttggtatttctgcaagtgctgctacggcgaccattttcccgcaatgctcacaagctcctatagcttcccttcttcccccgtacctctcaccagcggtgtcttcggtatgtgaaaacccaattcttcaaccctacaggatccaacaggcaatcgcagctggcatcttacctttatcacccttgttcctccaaca

SEQ ID NO: 68502 - DNA, 269 bp, Zea mays
gccgagtgccgccccccgcccgcccgccctccgccgcgcgtcggacggtgccgagggaagaggcaccatgaggttggagaagtgctggttctgctcctctaccatctaccccggccatggaatccagttcgtccgcaacgacgccaagatcttccgcttttgccggtcaaagtgccataaaaacttcaagatgaagaggaaccctcgtaaggttaagtggacaaaagcatacaggcatttgcatggcaaggacatgacccaggatacaa

SEQ ID NO: 68503 - DNA, 270 bp, Zea mays
ttttgagcattcaaaaacacacaaagggaagtgcactagcaacttcctaacaacaatggctaccaagatattagccctccttgcgctcctttccctttcagtgagcgcaacaactgcattcattattccacaatgctcacttgctcctaatgccattattccacagttcctcccatcagttacatcaatgggcatcgaacaccctattgtgcaagcctataggctacaacaagcgcttacggcgagcgtcttacaacaaccgtttgccca

SEQ ID NO: 68504 - DNA, 259 bp, Zea mays
cgaactagcaacatacatagtgaagtacactagcaacatcttagcaccaatggcagccaagatttttgccatccttgccctccttgctctttcagcaagcgttgctaccgcgactattattccacaatgctcacaacaatacctctctccggtgacagccgcgagatttgaatacccaactatacaatcctacaggctacaagaggccatcgcagcaagcatcttacggtcgttagcattgaccgtccaacaaccatat

SEQ ID NO: 68505 - DNA, 260 bp, Zea mays
cagaaacacaccaagcgaagacattagcaacaacctaacaacaatggctaccaagatattatccctccttgcgcttcttgcgctttttgcgagcgcaacaaatgcgttcattattccacaatgctcacttgctccaagttccattattacacagttcctcccaccagttacttcaatgggcttcgaacacccagctgtgcaagcctataggctacaacaagcaattgcggcgagcgtcttacaacaaccaatttcccagt

SEQ ID NO: 68506 - DNA, 260 bp, Zea mays
ctcgagccgattcggctcgagattcagaaacacaccaagcgaagacactagcaacgacctaacaacaatggctaccaagatattagccctccttgcgcttcttgccctttttgtgagcgcaacaaatgcgttcattattccacaatgctcacttgctcctagtgccattattccacagttcctcccaccagttacttcaatgggcttcgaacacctagctgtgcaagccaacatgcaacaacaagcgcttgcggcgagcg

SEQ ID NO: 68507 - DNA, 268 bp, Zea mays
ctatactatactctaggaagcaaggacaccaccgccatggcagcccagatgcttgcattgttcgctctcctagctctttgtgcaagcgccactagtgcgacccatattccagggcacttgccaccagtcatgccattgggtaccatgaacccatgcatgcagtactgcatgatgcaacaggggcttgccagcttgatggcgtgtccgtccctgatgctgcagcaactgttggccttaccgcttcagacgatgccagtgatgatgccac

SEQ ID NO: 68508 - DNA, 68 bp, Zea mays
ccatcattggcggtgccctcttttagattgcttatgagttatagttcaataatgaagttttttggatg

SEQ ID NO: 68509 - DNA, 284 bp, Zea mays
ccaactagcaacatagaaagcacaatagtgtaccaacaatggcagccaaaatattttgcctccttatgctccttggtctttctgcaagtgctgctacggcgaccattttcccgcaatgctcgcaagctcctatagcttcccttcttcccccgtacctctcaccagcggtgtcttcggtatgtgaaaacccaattcttcaaccctacaggatccaacaggcaatcgcagctggcatcttacctttatcacccttgttcctccaacaatcatcagccctattacaa

SEQ ID NO: 68510 - DNA, 144 bp, Zea mays
caacaagcaacatagaaagtggaatccagtagcaacaatagagcaacaatggcgaccaagatactttccctccttatgctccttgctctttctgcatgtgttgctaacgcgacaattttccctcaatgctcacaagctcctata

SEQ ID NO: 68511 - DNA, 283 bp, Zea mays
cagaccaactagcaacatagaaagcacaatagtgtaccaacaatggcagccaaaatattttgcttccttatgctccttggtctttctgcaagtgttgctaccgcaaccattttcccacaatgctcacaagctcctatagcttcccttcttcccccatacctctcaccagcggtgtcttcaatgtgtgaaaccccaatttttcaaccctacaggatccaacaggcaatcgcaacaggcatcttaccattatcacccttgttcctccaacaaccgtcagccctat

SEQ ID NO: 68512 - DNA, 132 bp, Zea mays
gcagctgctgttgcaagttggcgacagggttcaccatggctaggtggctcagtgctggtaggaactgttgttgcttgcatccggcccacttgctctagcaaacgtagttgcaaaccagcaacaacaacaact

SEQ ID NO: 68513 - DNA, 102 bp, Zea mays
gcaacatagaaagcacaatagtgtaccaacaatggcagccaaaatattttgcttccttatgctccttggtctttctgcaagtgttgctaccgcaaccatttt

SEQ ID NO: 68514 - DNA, 278 bp, Zea mays
ctagcaacatacatagtgaagtacactagcaacatcttagcaccaatggcagccaagatttttgccatccttgccctccttgctctttcagcaagcgttgctaccgcgactattattccacaatgctcacaacaatacctctctccggtgacagccgcgagatttgaatacccaactatacaatcctacaggctacaagaggccatcgcagcaagcatcttacggtcgttagcattgaccgtccaacaaccatatgccctattgcaacaaccatcctt

SEQ ID NO: 68515 - DNA, 174 bp, Zea mays
gcaagtccaatcccgagcagaggtgcgactcgagcgctcgcgccggtgtccatttcaaagaggaagccgcggtagcactggtagcggcagcagtaaggggaagatgtcgtcggcgttcagcggcgatgagaccgcccctttcttcggcttccttggcgcctccgctgcgctcgt

SEQ ID NO: 68516 - DNA, 67 bp, Zea mays
ataactcataagaaagttttttgtctgatgtttgtggcttcccagaaataagaaagtacatttctag

SEQ ID NO: 68517 - DNA, 269 bp, Zea mays
gttctgttgtgtatctagtagttggaggagatatgcagtttgcacttgcattggacacgaactcaggtcctcaccagataagatcttgtgagggtgatgggattgacaggttggaaaaattaagtattgggggcagaaagcaggagaaagctttgagaaataggtgctttggtggtagagttgctgcaactacacaatgtattcttacctcagatgcttgtcctgaaactcttcattctcaaacacagtcctctaggaaaaattatgct

SEQ ID NO: 68518 - DNA, 280 bp, Zea mays
ccaacaagcaacatagaaagtggaatccagtagcaacaacagagcaacaatggcgaccaagatattttccctccttatgctccttgctctttctgcatgtgttgctaacgcgacaattttccctcaatgctcacaagctcctatagcttcccttcttcccccataccttccatcaatgatagcttcagtatgtgaaaacccagctcttcagccctataggctccaacaagcaatcgcagcaagcaacatacctttatcacccttgttgtttcaacaatcg

SEQ ID NO: 68519 - DNA, 271 bp, Zea mays
gcactgaaccccgctgcttatttgcagcagcaaatactactaccatttagccagctagctgcagcaaaccgtgcttccttcttgacacagcaacagttgctgcctttctaccagcagtttgcggctaaccccgcaaccctcttacaactacaacaattgttgccctttgtccaacttgctttgacagacccagcggcctcctaccaacaacacatcattggtggtgccctcttttagattgcttattagttgtaattcattaataaagttt

SEQ ID NO: 68520 - DNA, 282 bp, Zea mays
cccagctgtgcaagcctataggctacaacaagcaattgcggcgagcgtcttacaacaaccaatttcccagttgcaacaacaatccttggcacatctaacaatacaaaccatcgcaacgcaacagcaacaacaattcctaccagcactgagccacctagccatggtgaaccctgccgcctacttgcaacagcagttgcttgcatcaaacccacttgctctggcaaacgtagttgcaaaccagccacaacaacagctgcaacagtttctgccagcgctcagtca

SEQ ID NO: 68521 - DNA, 275 bp, Zea mays
attgagaccaacaagcaacatagaaagtggaatccagtagcaacaacagagcaacaatggcgaccaagatattttccctccttatgctccttgctctttctgcatgtgttgctaacgcgacaattttccctcaatgctcacaagctcctatagcttcccttcttcccccataccttccatcaatgatagcttcagtatgtgaaaacccagctcttcagccctataggctccaacaagcaatcgcagcaagcaacatacctttatcacccgtgttg

SEQ ID NO: 68522 - DNA, 199 bp, Zea mays
ccggcgtatcgcacctgctggagaggatggccttcaaggacaccaagcaccggagccacctcaacatagtgagcgagctcgagcttgccgggggcaacgtcggcgcttcagcctccagggagcagatggtctacagctatgacacgctcaagggatacatgccagaggctctcgagatcctcatcgactgcatgcgcaa

SEQ ID NO: 68523 - DNA, 277 bp, Zea mays
ctcgagcgttgagaccaactagcaacatagaaagcacaatagtgtaccaacaatggcagccaaaatattttgcctccttatgctccttggtctttctgcaagtgctgctacggcgaccattttcccgcaatgctcgcaagctcctatagcttcccttcttcccccgtacctctcaccagcggtgtcttcggtatgtgaaaacccaattcttcaaccctacaggatccaacaggcaatcgcagctggcatcttacctttatcacccttgttcctccaa

SEQ ID NO: 68524 - DNA, 275 bp, Zea mays
cttcaatatgtgaaaacccagctcttcaaccatataggcttcaacaagcaatcgcagcaagcaacatacctttatcgcccttgttgtttcaacaatcgccagccctatctttggtgcagtcattggtacaaaccatcagggcacaacagctgcagcaactcgtgctacctctgatcaaccaagtagctctggcaaacctttctccctactctcagcaacaacaatttcttccattcaaccaactgtctacactgaaccctgctgcttatttgcag

SEQ ID NO: 68525 - DNA, 273 bp, Zea mays
gcggaacaatggcccgggaagccactgctgtatggaatcggcaccctgttggtcatgccactgaggacactgtatggagtgggtcgtgtttttggcgcaggacggtttctctgcaacatgaccaacgtctcttcgtcgctgcaaattgagcttgtaccatgccttcgagataactatgcgtatatcctgcatgatgttgatactggaacagttggagtagtggatccttctgaggctatgcctattataaatgcattggaaaagagaaaccag

SEQ ID NO: 68526 - DNA, 276 bp, Zea mays
agcacaacaactacaacaacggttgcttccaacaattaatcaagtagttgcagcgaaccttgctgcttaccttcagcaacaacaatttcttccattcaatcaactagctggggtgaaccctgctgcttacttgcaggcacaacagctactaccattcaaccaacttgtcgggagccctgctgccatcttattgcagcaacagttgctgccattccgtctacaagttgttgcaaacattgctgctttcttgcaacaacaacaattgctgccatttta

SEQ ID NO: 68527 - DNA, 281 bp, Zea mays
caaaaacacaccaagcgaagcgcactagcaacgacctaacaccaatggctaccaagatattagccctccttgcgcttcttgcccttttagtgagcgcaacaaatgcgttcattattccacagtgctcacttgctcctagtgccattattccacagttcctcccaccagttacttcaatgggcttcgaacatccagccgtgcaagcctacaggctacaactagcgcttgcggcgagcgccttacaacaaccaattgcccaattgcaacaacaatccttggca

SEQ ID NO: 68528 - DNA, 285 bp, Zea mays
aagaaagaagaattgaagagatcgctttatgccttgtgctcacagtatggaaggatactggatgtggtggccctgaaaacacaaaaactgagagggcaagcatgggtggcgtttagcgaaattacagctgctaccaatgctttccgtggattgcaagattttgatttctacggcaaaaaaatgcgagtacaatatgcaaaaacaaaatcagactgtattgcaaaagaagatggtacttatgcacctaaggagaaaaggaagaagcaagaggagaaagctgctgag

SEQ ID NO: 68529 - DNA, 275 bp, Zea mays
cgaggacgatgctgatatcactatatcatgtgctcctgttgatgagagccgagcttctaaaaatgggctagtgaagattgatcatactggacgtgtacttcaattctttgaaaaaccaaagggtgctgatttgaattctatgagagttgagaccaacttcctgagctatgctatagatgatgcacagaaatatccataccttgcatcaatgggcatttatgtcttcaagaaagatgcacttttagaccttctcaggtcaaaatatatccatttac

SEQ ID NO: 68530 - DNA, 277 bp, Zea mays
gcaacatagaaagtggaatccagtagcaacaatagagcaacaatggcgaccaagatattttccctccttatgctccttgctctttctacatgtgttgctaacgcgacaattttccctcaatgctcacaagctcctatagcttcccttcttcccccataccttccatcaattatagcttcaatatgtgaaaacccagctcttcaaccatataggcttcaacaagcaatcgcagcaagcaacatacctttatcgcccttgttgtttcaacaatcgccag

SEQ ID NO: 68531 - DNA, 275 bp, Zea mays
aatgaactgatagcactcttttccaggtatgttcaccagggcaagggaatgcttcagcgccatcagctgcttgcggagtttgatgccctgtttgatagtgacaaggagaagtatgcaccctttgaagacattcttcgtgctgctcaggaagcaattgtgctccccccatgggttgcacttgctatcaggccaaggcctggtgtctgggattacattcgggtgaatgtaagtgagctggctgtggaggagctgagtgtttctgagtacttggcatc

SEQ ID NO: 68532 - DNA, 125 bp, Zea mays
gggtcttcagaccattagctttatctactccagagcgcagaagaacccgatcgacaccatgagggtgttgctcgttgccctcgctctcctggctctcgctgcgagcgccacctccacgcatacaa

SEQ ID NO: 68533 - DNA, 260 bp, Zea mays
attttgagcattcagaaacacaccaagcgaagctacctagcaacgacttaacaacaatggctaccaagatattagccctccttgcgcttcttgccctttttgtgagcgcaacaaatgcgttcattattccacaatgctcacttgctcctagtgccattataccacagttcctccgaccagttacttcagtgggcttcgaacacctagctgtgcaagcctacaagctacaacaagcgcttgcggcgagcgtctaacaacaa

SEQ ID NO: 68534 - DNA, 255 bp, Zea mays
  unsure (1)..(255): unsure at all n locations
ctcgagcgattcggctcactcacganttgagaccaactagcaacatagaacgcacaatagtgtaccacctatggcagccaaaatattttgcctccttatgctccttggtctttctgcaagtgctgctacggcgaccattttcccacaatgctcacaagctcctatagcttcccttcttcccccgtacctctcacaagcggtgtcttcggtatgtgaaaacccaattcttcaaccctataggatcaaacaggaatc

SEQ ID NO: 68535 - DNA, 179 bp, Zea mays
accccactgaagaaactatgtgctgtagtatagccgctggctagctagctagttgagtcatttagcggcgatgattgagtaataatgtgtcacgcatcaccatgggtggcagtgtcagtgtgagcaatgacctgaatgaacaattgaaatgaaaagaaaaaaagtactccatctgttcc

SEQ ID NO: 68536 - DNA, 275 bp, Zea mays
aagtggaatccagtagcaacaacagagcaacaatggcgaccaagatattttccctccttatgctccttgctctttctgcatgtgttgctaacgcgacaattttccctcaatgctcacaagctcctatagcttcccttcttcccccataccttccatcaatgatagcttcagtatgtgaaaacccagctcttcagccctataggctccaacaagcaatcgcagcaagcaacatacctttatcacccttgttatatcaacaatcgccagccctatct

SEQ ID NO: 68537 - DNA, 266 bp, Zea mays
cagaaacacacctagcgaagccactagcaacgacctaacaacaatggctaccaagatattatccctctttgcgcttcttgccctttttgtgagcgcaacaaatgcgttcattattccacaatgctcacttgctcctagtgccattattccacagttcctccctccagttacttcaatgggcttcgaacacccagctgtgcaagcctacgggctacaacaggcgcttgcggcgagcgtcttacaacaaccatttgcccaattacaac

SEQ ID NO: 68538 - DNA, 275 bp, Zea mays
ggaaattttcttgggcgttcttcggcttcattgtcacaaggttcgagttcgtcaccgtctagtacgactgtgcgagggaggaagaggcgaggagaagatgcagatcttcgtgaagaccctgacggggaagaccatcaccctcgaggtggagagcagcgacaccgtcgacaacgtcaaggccaaaatccaggacaaggaagggattcccccagatcaacagcgactgatattcgctggcaagcagctggaggatggacgcacgctggctgactaca

SEQ ID NO: 68539 - DNA, 275 bp, Zea mays
cgaacgccggagctcgacaaggacgaccgacgacgcacgcggagatccggcgtactgcaaattttgaaaactgaactgtaagatggcatcagcagagctttcccgtgaggaaaatgtgtacatggcgaactcgctgagcaggcggagaggtacgaggagatggttgagttcatggagaaggtagccaagactgttgactcggaggagctcactgtggaggagcgaaacctcttgtctgttgcatacaagaacgtcattggagcccgccgcgcctc

SEQ ID NO: 68540 - DNA, 280 bp, Zea mays
gagaccaactagcaacatagaaagcacaatagtgtaccaacaatggcagccaaaatattttgcttccttatgctccttggtctttctgcaagtgttgctaccgcaaccattttcccacaatgctcacaagctcctatagcttcccttcttcccccatacctctcaccagcggtgtcttcaatgtgtgaaaccccaattgttcaaccctacaggatccaacaggcaatcgcaacaggcatcttaccattatcacccttgttcctccaacaaccgtcagccc

SEQ ID NO: 68541 - DNA, 201 bp, Zea mays
gcgtacctacaacagcgacaacagttacttaatccattggcagtggctaacccattggtcgctaccttcctgcagcagcaacaacaattgctgccatacaaccagttctctttgatgaaccctgccttgcagcaacccatcgttggaggtgccatcttttagattacatatgagatgtactcgacaatggtgccctcatac

SEQ ID NO: 68542 - DNA, 115 bp, Zea mays
tttgagcattcagaaacacaccaagcgaagtacctagcaacgacttaacaacaatggctaccaagatattagccctccttgcgcttcttgccctttttgtgagcgcaacaaatgt

SEQ ID NO: 68543 - DNA, 269 bp, Zea mays
gagcaacaccaaggacagagccatgagcaacgcaacaacaacaacaacagtttctgccatcactgagccacctagccgtggtgaaccctgtcacctacttgcaacagcagctgcttgcatccaacccacttgctctggcgaacgtagctgcataccagcaacaacaacagctgcaacagtttatgccagtgctcagtcaactagccatggtgaaccctgccgtctacctacaactactttcatctagcccgctcgcggtgggcaatgca

SEQ ID NO: 68544 - DNA, 270 bp, Zea mays
ctcgagcgaatcggctcagagaccaactagcaacataaccagcacaatagtgacccaacaatggcagccaacatattttgcctccttatgctccttggtctttctgcaagtgctgctacggcgaccattttcccgcaatgctcgcaagctcctatagcttcccttcttcccccgtacctctcaccagcggtgtcttcggtatgtgaaaacccaattcttcaaccctacaggatccaacaggcaatcacagctggcatcttacctttatca

SEQ ID NO: 68545 - DNA, 272 bp, Zea mays
cagcaagcaacatagaaagtagaatccattagcaacaatagagcaacaatggcgaccaagatattttccctccttatgctccttgctctttctacatgtgttgctaacgcgacaattttccctcaatgctcacaagctcctatagcttcccttcttcccccataccttccatcaattatagcttcagtatgtgaaaacccagctcttcaaccatataggcttcaacaagcaatcgcagcaagcaacatacctttatcgcccttgttgtttca

SEQ ID NO: 68546 - DNA, 273 bp, Zea mays
tacgaactagcaacatacatagtgaagtacactagcaacatcttagcaccaatggcagccaagatttttgccatccttgccctccttgctctttcagcaagcgttgctaccgcgactattattccacaatgctcacaacaatacctctctccggtgacagccgcgagatttgaatacccaactatacaatcctacaggctacaagaggccatcgcagcaagcatcttacggtcgttagcattgaccgtccaacaaccatatgccctattgcaa

SEQ ID NO: 68547 - DNA, 243 bp, Zea mays
gccaacagccgcatccaagcccgtgccagctgcagggaacctgcgtgcgttggcagcaccccgatcctgggccagtgcgtcgagttcctgaggcatcagtgcagcccgacggcgacgccctactgctcgcctcagtgccagtcgttgcggcagcagtgttgccagcagctcaggcaggtggagccgcagcaccggtaccaggcgatcttcggcttggtcctccagtccatcctgcagcagcag

SEQ ID NO: 68548 - DNA, 280 bp, Zea mays
gtgcaagaaagctatgccatgacacacgatgaaccacctccagcactggacacgagagcaccaaccccgcagaagaactacagcctcatgagaaaggagcccgagaagacccactacgtccgccatgggcacccgtatttcaatagctgggacggtcactgtcacccccagcagcagccggaccagcagctgtatcgccagcagcagcacctgcagcagcacaggcagtactctgcaggcccacagacattttacgagcagagctgcgagcctacaaagg

SEQ ID NO: 68549 - DNA, 281 bp, Zea mays
gcattcagaaacacacctagcgaaggcactagcaacgacctaacaacaatggcttccaagacattatccctccttgcgcttcttgccctttttgtgagtgcaacaaatgcgttcattattccacaatgctcacttgctccgagtgccattattccacagttcctccctccagttacttcaatgggcttcgaacacccagctgtgcaagcctataggctacaacaagcgcttgcggcgagcgtcttagaacaaccaattgcccaattacaacaacaatcctt

SEQ ID NO: 68550 - DNA, 137 bp, Zea mays
atggaaggtatagagcaacaatggcggccaagatattttccatccttatgctccttgctctttctgcatgtgttgctaacgcgaccatttttcctcaatactcacaagctcctatagctgcccttcttcccccatac

SEQ ID NO: 68551 - DNA, 120 bp, Zea mays
atgagaccaactagcaacatagaaagcacaatagtgtaccaacaatggcagccaaaatattttgcctccttatgctccttggtctttctgcaagtgctgctacggcgaccattttcccgc

SEQ ID NO: 68552 - DNA, 260 bp, Zea mays
  unsure (1)..(260): unsure at all n locations
gtccggacgtggtacgagaagacgacatggatgtacatttcggtcncgctgctgctctacgtcggtgaaaggatgcttagagccttgaggtcaaatgcttataccgtgaaaattctcaaggtgtgtcttctacctggaaatgtgttgaccataacgatgtcaaagccctatggatttcgttacagaagtggacagtacatatttcttcaatgtccaataatttctccatttgaatggcatcctttctccatcacttcagc

SEQ ID NO: 68553 - DNA, 272 bp, Zea mays
agcttcccttcttcccccgtacctctcaccagcggtgtcttcggtatgtgaaaacccaattcttcaaccctacaggatccaacaggcaatcgcagctggcatcttacctttatcacccttgtccctccaacaaccatatgctctattgcaacagccatccttagtgcatctgtatctccaaagaatcgcggcacaacaactacaacaacagttgctaccaacaatcaatcaagtagttgcagcgaaccttgctgcttacctccagcaacaac

SEQ ID NO: 68554 - DNA, 269 bp, Zea mays
caactagcaacatagaaagcacaatagtgtaccaacaatggcagctaaaatattttgcctccttatgctccttggtctttctgcaagtgctgctacggcgaccattttcccacaatgctcacaagctcctatagcttcccttcttcccccgtacctctcaccaacggtgtcttcggtatgtgaaaacccaattcttcaaccctacaggatccaacaggcaatcgcagctggcatcttacctttatcacccttgttcctccaacaatcat

SEQ ID NO: 68555 - DNA, 270 bp, Zea mays
caactagcaacatagaaagcacaatagtgtaccaacaatggcagccaaaatattttgcttccttatgctccttggtctttctgcaagtgctgctaccgcaaccattttcccacaatgctcacaagctcctatagcttcctttcttcccccatacctctcaccagcggtgtcttcagtatgtgaaaacccaattcttcaaccctacaggatccaacaggcaatcgcagcaggcatcttacctttatcacccttgttcctccaacaaccgtc

SEQ ID NO: 68556 - DNA, 270 bp, Zea mays
ctcgagcgctcgagccgattcggctcgaggaaggtgagaacagagagagagagtatgtgtgataggtacaaggatcaccgctgtgcctacgcgtgctgcttcaccgaatcgagtcagatcctgtccgaatccgagctaagggatggcaaccggtagtgaagcctcgaaggcagctgaggctgtggttgactggcataaacacgacagcaagaggatgctccatgcggtttaccgtgttggggatctggaccgcacaatcaagtactacac

SEQ ID NO: 68557 - DNA, 273 bp, Zea mays
cagttgcacaccttttgcaaaatggtaatatgtatgggaaagaaatatcttcagtaaggccagatgaaatgacagatgaagtctgggatttcgtgttttgtgatggcccggcaccaaaaagcgagatccctgccgctctgttgaacaagatgaaacatgaatttaagtattggtatccatttgatatccgtgtgtctggtaaataccttattcaaaaccatttgacattctgcatatacaatcatacagcacttcttcctgagcaccactggc

SEQ ID NO: 68558 - DNA, 187 bp, Zea mays
ctcgagccgcaacaagcaacatagaaagtggaatacagtagcaaaaatagagcaacaatggcggcaagatattttccatccttatgctccttgctcttctgcatgtgttgctacggacattttctcatactcaagtctatagctgctctcccaactcacatgcgttagaggaacacctcactaagtc

SEQ ID NO: 68559 - DNA, 271 bp, Zea mays
tagaaagtggaatacagtagtaacaatagagcaacaatggcggcaaagatattttccatccttatgctccttgctctttcttcatgtgttcctaacgcgaccatttttcctccatactcacaagctcctatagctgcccttcttcctccataccttccataactgaccgcttcagtatgtgaaaacccagcccttcaaccctataggctccaacaagcaatcgcaacaaacaacttacctttatcacacctgttctttcaacaatcgccag

SEQ ID NO: 68560 - DNA, 260 bp, Zea mays
gtctcgctgaggccatcgatgacggccgtattggcccacgtgatgatccgaaggtgcgctcccagatcctctctcaggagtttgggtgggacaaggacctggccaagaagatttggtgttttggacctgagaccactggcccgaacatggttgtagatatgtgcaagggagtgcagtatctcaatgaaatcaaggattctgttgtggctggtttccagtgggcatcaaaggagggtgcactggctgaggagaacatgcgt

SEQ ID NO: 68561 - DNA, 207 bp, Zea mays
gtttcaacaatcgccagccctatctttggtgcagtcattggtacaaaccatcagggcacaacagctgcagcaactcgtgctacctctgatcaaccaagtagctctggcaaacctttctccctactctcagcaacaacaatttcttccattcaaccaactgtctacactgaaccctgctgcttatttgcagcaacaactattaccatt

SEQ ID NO: 68562 - DNA, 267 bp, Zea mays
cggctcgagattttcagcattcaaaaacacaccaagcgaagccactagcaacgacctaacaccaatggctaccaagatattagccctccttgcgcttcttgcccttttagtgagcgcaacaaatgcgttcattattccacagtgctcacttgctcctagtgccattattccacagttcctcccaccagttacttcaatgggcttcgaacatccagccgtgcaagcctacaggctacaactagcgcttgcggcgagcgccttacaaca

SEQ ID NO: 68563 - DNA, 265 bp, Zea mays
ttcagaaacacacctagcgaagccactagcaacgacctaacaacaatggcttccaagacattatccctccttgcgcttcttgccctttttgtgagtgcaacaaatgcgttcattattccacaatgctcacttgctccgagtgccattattccacagttcctccctccagttacttcaatgggcttcgaacacccagctgtgcaagcctataggctacaacaagcgcttgcggcgagcgtcttagaacaaccaattgcccaattac

SEQ ID NO: 68564 - DNA, 267 bp, Zea mays
attgagaccaactagcaacatagaaagcacaatagtgtaccaacaatggcagccaaaatattttgcctccttatgctccttggtctttctgcaagtgctgctacggcgaccattttcccgcaatgctcgcaagctcctatagcttcccttcttcccccgtacctctcaccagcggtgtcttcggtatgtgaaaacccaattcttcaaccctacaggatccaacaggcaatcgcagctggcatcttacctttatcacccttgttcctc

SEQ ID NO: 68565 - DNA, 263 bp, Zea mays
gagcattcagaaacacaccaagcgaagctacctagcaacgacttaacaacaatggctaccaagatattagccctccttgcgcttcttgccctttttgtgagcgcaacaaatgcgttcattattccacaatgctcacttgctcctagtgccattataccacagttcctccgaccagttacttcaatgggcttcgaacacctagctgtgcaagcctacaagctacaacaagcgcttgcggcgagcgtcttacaacaaccaattaa

SEQ ID NO: 68566 - DNA, 253 bp, Zea mays
tgagaccaactagcaacatagaaagcacaatagtgtaccaacaatggcagccaaaatattttgcctccttatgctccttggtctttctgcaagtgctgctacggcgaccattttcccgcaatgctcgcaagctcctatagcttcccttcttcccccgtacctctcaccagcggtgtcttcggtatgtgaaaacccaattcttcaaccctacaggatccaacaggcaatcacagctggcatcttacctttatca

SEQ ID NO: 68567 - DNA, 160 bp, Zea mays
ctcgagccgctcgagcggctcgacggctcgagactgggtcttcagaccattagctttatctactccagagcgcagaagaacccgatcgacaccatgagggtgttgctcgttgccctcgctctcctggctctcgctgcgagcgccacctccacacaacata

SEQ ID NO: 68568 - DNA, 116 bp, Zea mays
cagaccattagctttatctactccagagcgcagaagaacccgatcgacaccatgagggtgttgctcgttgccctcgctctcctggctctcgctgcgagcgccacctccacacaaca

SEQ ID NO: 68569 - DNA, 244 bp, Zea mays
gcacaatagtgtaccaacaatggcagccaaaatattttgcctccttatgctccttggtctttctgcaagtgctgctacggcgaccattttccctcaatgctcgcaagctcctatagcttcccttcttcccccgtacctctcaccagcggtgtcttcggtatgtgaaaacccaattcttcaaccctacaggatccaacaggcaatcgcagctggcatcttacctttatcacccttgttcctccaa

SEQ ID NO: 68570 - DNA, 243 bp, Zea mays
gaaagctagcagcagaaatcctaatgcagaactgggatgtggcattggaggaattcaaccgcttgaaggaaataattgattcaaagaacttctcatcacctctgaatcagctccagaacaggatatggctgatgcattgggctctgttcatcttctttaaccatgaaaatggtagaaatgggatcattgatctgttcttccaggacaggtacttgaatgctatacagacaaatgctcaccatc

SEQ ID NO: 68571 - DNA, 242 bp, Zea mays
gcaacatagaaagcacaatagtgtaccaacaatggcagccaaaatattttgcctccttatgctccttggtctttctgcaagtgctgctacggcgaccattttcccgcaatgctcgcaagctcctatagcttcccttcttcccccgtacctctcaccagcggtgtcttcggtatgtgaaaacccaattcttcaaccctacaggatccaacaggcaatcacagctggcatcttacctttatcac

SEQ ID NO: 68572 - DNA, 241 bp, Zea mays
atttgcaacaacaacaactaccattcagccagctacctgttgcctacccccaacaatttcttccattcaaccaactggcagcattgaactctcctgcttatttacagcagcaacaactactaccattcagccagctagctggtgtgagccctgctaccttcttgacacaaccacagttgttgccgttctaccagcacgctgcgcctaacgctggcaccctcttacaactgcaacaattgct

SEQ ID NO: 68573 - DNA, 240 bp, Zea mays
attacatctatcccactagtagcatactgcgtccttcctgctatctgtttactcaccaacaaatttattattcctgcgattagcaattatgctggggcgttcttcatcctgctttttgcttccatcttcgccactggtattttggagcttcgatggagtggtgttggcattgaggattggtggagaaatgagcagttttgggtcattggtggcacctctgcacatctctttgctgtgttc

SEQ ID NO: 68574 - DNA, 243 bp, Zea mays
caacatagaaagcacaatagtgtaccaacaatggcagccaaaatattttgcttccttatgctccttggtctttctgcaagtgttgctaccgcaaccattttcccacaatgctcacaagctcctatagcttcccttcttcccccatacctctcaccagcggtgtcttcaatgtgtgaaaacccaattgttcaaccctacaggatccaacaggcaatcgcaacaggcatcttaccattatcaccc

SEQ ID NO: 68575 - DNA, 245 bp, Zea mays
caacatagaaagcacaatagtgtaccaacaatggcagccaaaatattttgcttccttatgctccttggtctttctgcaagtgttgctaccgcaaccattttcccacaatgctcacaagctcctatagcttcccttcttcccccatacctctcaccagcggtgtcttcaatgtgtgaaaacccaattgttcaaccctacaggatccaacaggcaatcgcaacaggcatcttaccattatcaccctt

SEQ ID NO: 68576 - DNA, 248 bp, Zea mays
ctcgagccgcaactagcaacatagaaagcacaatagtgtaccaacaatggcagctaaaatattttgcctccttatgctccttggtctttctgcaagtgctgctacggcgaccattttcccacaatgctcacaagctcctatagcttcccttcttcccccgtacctctcaccaacggtgtcttcatcatgtgaaaacccaattcttcaaccctacaggatccaacaggcaatcgcagctggcatcttac

SEQ ID NO: 68577 - DNA, 246 bp, Zea mays
gagaccagcaagcaacatagaaagtagaatccattagcaacaatagagcaacaatggcgaccaagatattttccctccttatgctccttgctctttctacatgtgttgctaacgcgacaattttccctcaatgctcacaagctcctatagcttcccttcttcccccataccttccatcaattatagcttcagtatgtgaaaacccagctcttcaaccatataggcttcaacaagcaatcgcagcaa

SEQ ID NO: 68578 - DNA, 241 bp, Zea mays
gcaacatagaaagcacaatagtgtaccaacaatggcagccaaaatattttgcctccttatgctccttggtctttctgcaagtgctgctacggcgaccattttcccacaatgctcacaagctcctatagcttcccttcttcccccgtacctctcaccagcggtgtcttcggtatgtgaaaacccaattcttcaaccctataggatccatcttgcaatcgcagctggcatcttacctttatca

SEQ ID NO: 68579 - DNA, 240 bp, Zea mays
cgcctccgtcgccctgcgccagatcagattcgtggatatggctgataatgagaaagaagtgggggagggaaccaccccccgaggggcggactgggaagttgtgactctcacagcatctgcctatgaagcggcgccaggacctgtcaggacagaagtaaagcctgttaatgaaaatcaagagcatagttcatccaatgcactgctcatgtctgaccactttgtgtttccgccgagtgagca

SEQ ID NO: 68580 - DNA, 238 bp, Zea mays
atattattgagaccaactagcaacatagaaagcacaatagtgtaccaacaatggcagccaaaatattttgcttccttatgctccttggtctttctgcaagtgttgctaccgcaaccattttcccacaatgctcacaagctcctatagcttcccttcttcccccatacctctcaccagcggtgtcttcaatgtgtgaaaacccaattgctcaaccctacaggatccaacaggcaatcgc

SEQ ID NO: 68581 - DNA, 118 bp, Zea mays
cagaaacacaccaagcgaagacattagcaacaacctaacaacaatggctaccaagatattatccctccttgcgcttcttgcgctttttgcgagcgcaacaaatgcgttcattattcca

SEQ ID NO: 68582 - DNA, 240 bp, Zea mays
gcaacatagaaagtggaatccagtagcaacaatagagcaacaatggcgaccaagatactttccctccttatgctccttgctctttctgcatgtgttgctaacgcgacaattttccctcaatgctcacaagctcctatagcttcccttcttcccccataccttccatcaatgatagcttcagtatgtgaaaacccagctcttcaaccctataggctccaacaagcaatcgcagcaagcaac

SEQ ID NO: 68583 - DNA, 129 bp, Zea mays
attttcagcattcaaaaacacaccaagcgaagcgcactagcaacgacctaacaccaatggctaccaagatattagccctccttgcgcttcttgcccttttagtgagcgcaacaaatgcgttcattattc

SEQ ID NO: 68584 - DNA, 247 bp, Zea mays
caactaccaacatacatagtgaagtacactagcaacatcttagcaccaatggcagccaagatttttgcgctccttgccctccttgctctttcagcaagtgttgctaccgcgactattattccacaatgctcacaacaatacctctctccagtgatagccgcgagatttgaatacccatctatacaatcctacaggctacaagaggccatcacagcaagcatcttacggtcgttagcattgaccgtcc

SEQ ID NO: 68585 - DNA, 236 bp, Zea mays
attttgagcattcagaaacacaccaagcgaagcgcactagcaacgacctaacaacaatggctaccaagatattagccctccttgcgcttcttgccctttttgtgagcgcaacaaatgcgttcattattccacaatgctcacttgacacctagtgccattattccacagttcctcccactcgttacttcaatgggcttcgaacacctagctgtgcaagccaacatgcaacaacaagc

SEQ ID NO: 68586 - DNA, 239 bp, Zea mays
agaccaacaagcaacatagaaagtggaatccagtagcaacaacagagcaacaatggcgaccaagatattttccctccttatgctccttgctctttctgcatgtgttgctaacgcgacaattttccctcaatgctcacaagctcctatagcttcccttcttcccccataccttccatcaatgatagcttcagtatgtgaaaacccagctcttcagccctataggctccaacaagcaatcg

SEQ ID NO: 68587 - DNA, 238 bp, Zea mays
caagcaacatagaaagtggaatccagtagcaacaacagagcaacaatggcgaccaagatattttccctccttatgctccttgctctttctgcatgtgttgctaacgcgacaattttccctcaatgctcacaagctcctatagcttcccttcttcccccataccttccatcaatgatagcttcagtatgtgaaaacccagctcttcagccctataggctccaacaagcaatcgcagcaa

SEQ ID NO: 68588 - DNA, 237 bp, Zea mays
gagaccaactagcaacatagaaagcacaatagtgtaccaacaatggcagccaaaatattttgcctccttatgctccttggtctttctgcaagtgctgctacggcgaccattttcccgcaatgctcgcaagctcctatagcttcccttcttcccccgtacctctcaccagcggtgtcttcggtatgtgaaaacccaattcttcaaccctacaggatccaacaggcaatcacagctggc

SEQ ID NO: 68589 - DNA, 236 bp, Zea mays
gaaacacacctagcgaaggctactagcaacgacctaacaacaatggctaccaagatattatccctctttgcgcttcttgccctttttgtgagcgcaacaaatgcgttcattattccacaatgctcacttgctcctagtgccattattccacagttcctccctccagttacttcaatgggcttcgaacacccagctgtgcaagcctacaggctacaacaagcgcttgcggcgagcgt

SEQ ID NO: 68590 - DNA, 236 bp, Zea mays
ccagcaagcaacatagaaagtagaatccattagcaacaatagagcaacaatggcgaccaagatattttccctccttatgctccttgctctttctacatgtgttgctaacgcgacaattttccctcaatgctcacaagctcctatagcttcccttcttcccccataccttccatcaattatagcttcagtatgtgaaaacccagctcttcaaccatataggcttcaacaagcaatcg

SEQ ID NO: 68591 - DNA, 128 bp, Zea mays
tagtcccctgcaccattctcagccgccgccaatcccttcccgtgctccgaaaccgctgagtgagaagaagagatggccggcaagggcgatagcccggctatcggcatcgatctcggcacgacgtactc

SEQ ID NO: 68592 - DNA, 237 bp, Zea mays
ctactatactatactctaggaagcaaggacaccaccgccatggcagccaagatgcttgcattgttcgctctcctagctctttgtgcaagcgccactagtgcgacccatattccagggcacttgccaccagtcatgccattgggtaccatgaacccatgcatgcagtactgcatgatgctccaggggcttgccagcttgatggcgtgtccgtccctgatgctgcagcaactgttggcc

SEQ ID NO: 68593 - DNA, 238 bp, Zea mays
ggagccttgaaggctatcgtcaatgtcattggtatgactaaaatgactccaccaatcaaggatcttcttcctcgtctgacccccattcttaagaacaggcatgagaaggtccaagagaactgcattgatcttgttggtaggattgctgatcgtggagcagaatttgtgccagcaagggaatggatgaggatttgttttgagctgctcgaaatgttgaaggctcataagaagggtatta

SEQ ID NO: 68594 - DNA, 242 bp, Zea mays
gagatcaactagcaacatagaaagcacaatagtgtaccaacaatggcagctaaaatattttgcctccttatgctccttggtctttctgcaagtgctgctacggcgaccattttcccacaatgctcacaagctcctatagcttcccttcttcccccgtacctctcaccaacggtgtcttcggtatgtgaaaacccaattcttcaaccctacaggatccaacaggcaatcgcagctggcatctt

SEQ ID NO: 68595 - DNA, 241 bp, Zea mays
gtgtgagtacgaccagaagatatccattgatttctacaaggaaggagatcccttgaaaccagctgtgacaggcgtcttagtgttcgtttccactccagatccaattggcaacaagtactatcttggccctgctcctttgcaggatatggcaaggcaaattgctacagccaatggccctactggctataatagggattacctgttctcaatggagaaggcattagccagcattagccacgaa

SEQ ID NO: 68596 - DNA, 237 bp, Zea mays
ctagcaacatagaaagcacaatagtgtaccaacaatggcagccaaaatattttgcctccttatgctccttggtatttctgcaagtgctgctacggcgaccattttcccgcaatgctcacaagctcctatagcttcccttcttcccccgtacctctcaccagcggtgtcttcggtatgtgaaaacccaattcttcaaccctacaggatccaacaggcaatcgcagctggcatcttacc

SEQ ID NO: 68597 - DNA, 233 bp, Zea mays
attttggatgggaagattgaatgaagggttgtcattatttgatgcaatactgattgttccaatgtttcaaattgcttggaccttcttctctatctgtacaggatttgtttactttcaagaatatcaagtatttgatacgctcaggataattatggttgtattgggcatgacatttgtctttgttgggatctccttgctagcacccgatgacactaaagctgatacgaaagatg

SEQ ID NO: 68598 - DNA, 237 bp, Zea mays
attgagaccaactagcaacatagaaagcacaatagtgtaccaacaatggcagccaaaatattttgcttccttatgctccttggtctttctgcaagtgttgctaccgcaaccattttcccacaatgctcacaagctcctatagcttcccttcttcccccatacctctcaccagcggtgtcttcaatgtgtgaaaacccaattgttcaaccctacaggatccaacaggcaatcgcaaca

SEQ ID NO: 68599 - DNA, 218 bp, Zea mays
ctgccattctacccacataatgtggcaaacattgttgccttcttacaacaacaacaattgctgccatttagccaacatgctttgacgaatcctaccaccttattgcaatcgcccaccattggtggtgccatcttctagattttttatgatttatactgtaataataaagttctcatgctgatatgtgcgacctctcagtaataaagtattatagatct

SEQ ID NO: 68600 - DNA, 234 bp, Zea mays
ccagcaagcaacatagaaagtagaatccattagcaacaatagagcaacaatggcgaccaagatattttccctccttatgctccttgctctttctacatgtgttgctaacgcgacaattttccctcaatgctcacaagctcctatagcttcccttcttcccccataccttccatcaattatagcttcagtatgtgaaaacccagctcttcaaccatataggcttcaacaagcaat

SEQ ID NO: 68601 - DNA, 234 bp, Zea mays
attgagaccaactagcaacatagaaagcacaatagtgtaccaacaatggcagccaaaatattttgcctccttatgctccttggtctttctgcaagtgctgctacggcgaccattttcccgcaatgctcgcaagctcctatagcttcccttcttcccccgtacctctcaccagcggtgtcttcggtatgtgaaaacccaattcttcaaccctacaggatccaacaggcaatcaca

SEQ ID NO: 68602 - DNA, 234 bp, Zea mays
gagaccagcaagcaacatagaaagtagaatccattagcaacaatagagcaacaatggcgaccaagatattttccctccttatgctccttgctctttctacatgtgttgctaacgcgacaattttccctcaatgctcacaagctcctatagcttcccttcttcccccgtacctctcaccagcggtgtcttcggtatgtgaaaacccaattcttcaaccctataggatccaacagg

SEQ ID NO: 68603 - DNA, 234 bp, Zea mays
tgttactccattatctcttggtttggagacattgggaggagtgatgacaaagattatccccaggaataccacactgccaacctcaaaatcggaggtattctcaacagctgcagatggacagacgagcgttgagattaatgttctccagggagaaagagagtttgtcagggacaacaagtccgttggaagcttccggttggatgggatccctcctgcacctcgtggtgtcccaca

SEQ ID NO: 68604 - DNA, 121 bp, Zea mays
cttcagaccattagctttatgtactccagagcgcagaagaacccgatcgacaccatgagggtgttgctcgttgccctcgctctcctggctctcgctgcgagcgccacctccacacaacata

SEQ ID NO: 68605 - DNA, 101 bp, Zea mays
caacgacctaacaacaatggcttccaagacattatccctccttgcgcttcttgccctttttgtgagtgcaacaaatgcgttcattattccacaatgctcac

SEQ ID NO: 68606 - DNA, 239 bp, Zea mays
aagcaagatagaaagtggaatacagtagcaacaatagagcaacaatggcggccaagatattttccatccttatgctccttgctctttctgcatgtgttgctaacgcgaccatttttcctcaatactcacaagctcctatagctgcccttcttcccccataccttccatcaatgaccgcttcagtttgtgaaaacccagcccttcaaccctacaggctccaacaagcaatcgcaacaagc

SEQ ID NO: 68607 - DNA, 235 bp, Zea mays
catcaacgaagcttgcttctacgagaggatatagagagtaagaacagctcgtccgagaccatgaagaacagcccacaccaggtgctgatcctgtgcctccaggccgctctggtcatgggcgtcttcgccgctttggctaatgaaaatgccctggttgagagcaaggccatcgacatcaacccggggcagctcaagtgctgcaccaactgcaacttctccttctcggggctctaca

SEQ ID NO: 68608 - DNA, 224 bp, Zea mays
ctagcaacatagaaagcacaatagtgtaccaacaatggcagccaaaatattttgcctccttatgctccttggtctttctgcaagtgctgctacggcgaccattttcccgcaatgctcgcaagctcctatagcttcccttcttcccccgtacctctcaccagcggtgtcttcggtatgtgaaaaccaattcttcaacctacaggatcacaggcaatcaagtggca

SEQ ID NO: 68609 - DNA, 235 bp, Zea mays
gagaccaacaagcaacatagaaagtggaatacagtagcaacaatagagcaacaatggcggccaagatattttccatccttatgctccttgctctttctgcatgtgttgctaacgcgaccatttttcctcaatactcacaagctcctatagctgcccttcttcccccataccttccatcaatgaccgcttcagtttgtgaaaacccagcccttcaaccctacaggctccaacaagc

SEQ ID NO: 68610 - DNA, 235 bp, Zea mays
caacaagcaacatagaaagtggaatccagtagcaacaacagagcaacaatggcgaccaagatattttccctccttatgctccttgctctttctgcatgtgttgctaacgcgacaattttccctcaatgctcacaagctcctatagcttcccttcttcccccataccttccatcaatgatagcttcagtatgtgaaaacccagctcttcagccctataggctccaacaagcaatcg

SEQ ID NO: 68611 - DNA, 234 bp, Zea mays
  unsure (1)..(234): unsure at all n locations
attttgagcattcagaaacacaccaagcgaactnacctagcaacgacttaacaacaatggctaccaagatattagccctccttgcgcttcttgccctttttgtgagcgcaacaaatgcgttcattattccacaatgctcacttgctcctagtgccattataccacagttcctccgaccagttacttcaatgggcttcgaacacctagctgtgcaagcctacaggctacaacaag

SEQ ID NO: 68612 - DNA, 178 bp, Zea mays
cgcaaattgcaccaagaaatccatcgagatgccgtcgacaggggaattaatggcgtcgtcgtctagcagcagccaccgccgcctcatcctcgcagccgccgtcctgctctccgtgctcgcggctgccagcgccagcgctcgggacctcctgcgtgccggggtgggccattccacacaa

SEQ ID NO: 68613 - DNA, 232 bp, Zea mays
gaccaacaagcaacatagaaagtggaatccagtagcaacaacagagcaacaatggcgaccaagatattttccctccttatgctccttgctctttctgcatgtgttgctaacgcgacaattttccctcaatgctcacaagctcctatagcttcccttcttcccccataccttccatcaatgatagcttcagtatgtgaaaacccagctcttcagccctataggctccaacaag

SEQ ID NO: 68614 - DNA, 228 bp, Zea mays
gggttcgtgaggttctccggggttcggtttcgtgggtgggcggatcgagatggcggcgtcggatgttgagtaccgctgcttcgtcggcggcctcgcctgggccacggacgaccactccctccacatgcgcttcagcacctacggcgaggtcctcgagtccaagatcatcctcgatcgggtgacgcagaggtcccgcggcttcggcttcgtcacctgctccacggagga

SEQ ID NO: 68615 - DNA, 233 bp, Zea mays
caaccctctttttgggtcttcccgtattgaacaagcccacgttgagcaatggatggattttgccgcaacagaagttgatcctggtgttgcatggtacttgtatccaaggcttgggtacctcccttatgttagcacaactgaggaaacagctatttcttcattgaagaggtcgcttggtgctctgaacacacaccttgcttcaaacacataccttgttgggcatgctgttactc

SEQ ID NO: 68616 - DNA, 236 bp, Zea mays
agaaagtggaatccagtagcaacaatagagcaacaatggcgaccaagatactttccctccttatgctccttgctctttctgcatgtgttgctaacgcgacaattttccctcaatgctcacaagctcctatagcttcccttcttcccccataccttccatcaatgatagcttctgtatgtgaaaacccagctcttcaaccctataggctccaacaagcaatcgcagcaagcaacata

SEQ ID NO: 68617 - DNA, 237 bp, Zea mays
agaccaactagcaacatagaaagcacaatagtgtaccaacaatggcagccaaaatattttgcctccttatgctccttggtctttctgcaagtgctgctacggcgaccattttcccgcaatgctcgcaagctcctatagcttcccttcttcccccgtacctctcaccagcggtgtcttcgctccgtgaaaacccaattcttcaaccctacaggatccaacaggcaatcacagctggca

SEQ ID NO: 68618 - DNA, 233 bp, Zea mays
ggcaatcgcaacaggcatcttaccattatcacccttgttcctccaacaaccgtcagccctattacagcagttacctttggtccatttggtggcacaaaacatcagggcacaacaactacaacaacttgtgctagcaaaccttgctgcatactctcagcaacatcagtttcttccattcaaccaactggctgcattgaactctgctgcttatttacagcagcaacaactactac

SEQ ID NO: 68619 - DNA, 233 bp, Zea mays
ccctaagcagggagttgatttatccgctgcagccatgagtaagttgcagtctgagtctgtcaaggatgccatctcccagattgttggggatgccaaggagaagaataggaagttcactgagactgtggaacttcagattggtctgaagaattatgatccacagaaggacaagcgtttcagtggctctgttaagttgccccatatccctcgtcccaagatgaaggtgtgcatgc

SEQ ID NO: 68620 - DNA, 230 bp, Zea mays
gaaagtggaatacagtagcaacaatagagcaacaatggcggccaagatattttccatccttatgctccttgctctttctgcatgtgttgctaacgcgaccatttttcctcaatactcacaagctcctatagctgcccttcttcccccataccttccatcaatgaccgcttcagtttgtgaaaacccagcccttcaaccctacaggctccaacaagcaatcgcaacaagca

SEQ ID NO: 68621 - DNA, 230 bp, Zea mays
ccaacaagcaacatagaaagtggaatccagtagcaacaatagagcaacaatggcgaccaagatattttccctccttatgctccttgctctttctacatgtgttgctaacgcgacaattttccctcaatgctcacaagctcctatagcttcccttcttcccccataccttccatcaattatagcttcaatatgtgaaaacccagctcttcaaccatataggcttcaacaag

SEQ ID NO: 68622 - DNA, 231 bp, Zea mays
attttcagcattcaaaaacacaccaagcgaagcgcactagcaacgacctaacaccaatggctaccaagatattagccctccttgcgcttcttgcccttttagtgagcgcaacaaatgcgttcattattccacagtgctcacttgctcctagtgccagtattccacagttcctcccaccagttacttcaatgggcttcgaacatccagccgtgcaagcctacaggctacaac

SEQ ID NO: 68623 - DNA, 230 bp, Zea mays
tagtctcctcttcgcacgagcgcaacaccatccacccaccagttcgaagcggaggcgaccggcaacctgcggcggagatgtcaggcaggggcaagggcggcaaggggctcgggaagggcggcgcgaagctcaccggaaggtgctgcgcgacaacatccaggggatcacgaacccggcgatccggaggctggcgaggaggggtggcgtgaagcgcatctccgggctgatct

SEQ ID NO: 68624 - DNA, 233 bp, Zea mays
aagcaacatagaaagtggaatccagtagcaacaatagagcaacaatggcgaccaagatattttccctccttatgctccttgctctttctacatgtgttgctaacgcgacaattttccctcaatgctcacaagctcctatagcttcccttcttcccccataccttccatcaattatagcttcaatatgtgaaaacccagctcttcaaccatataggcttcaacaagcaatcgca

SEQ ID NO: 68625 - DNA, 235 bp, Zea mays
caactagcaacatagaaagcacaatagtgtaccaacaatggcagccaaaatattttgcctccttatgctccttggtctttctgcaagtgctgctacggcgaccattttcccacaatgctcacaagctcctatagcttcccttcttcccccgtacctctcaccagcggtgtcttcggtatgtgaaaacccaattcttcaaccctataggatccaacaggcaatcgcagctggcatc

SEQ ID NO: 68626 - DNA, 235 bp, Zea mays
ctttggtgcatttgttggcacaaaacatcaaggcacaacaactacaacaacttgtgctaggaaaccttgctgcctactctcagcaacagcagtttcttccattcaaccaactggctgcattgaactctgctgcttatttgcaacaacaactaccattcagtcagctagctgctgcctacccccagcaatttcttccattcaaccaactggcagcattgaactctgctgcttattt

SEQ ID NO: 68627 - DNA, 260 bp, Zea mays
gagaccaactagcaacatagaaagcacaatagtgtaccaacaatggcagccaaaatattttgcctccttatgctccttggtctttctgcaagtgctgctacggcgaccattttcccacaatgctcacaagctcctatagcttcccttcttcccccgtacctctcaccagcggtgtcttcggtatgtgaaaacccaattcttcaaccctataggatccaacaggcaatcgcagctggcatcttacctttatcacccttgtt

SEQ ID NO: 68628 - DNA, 260 bp, Zea mays
  unsure (1)..(260): unsure at all n locations
attttcagcattcaaaaacacaccaagcgaaggnatctagcaacgacctaacaccaatggctaccaagatattagccctccttgcgcttcttgcccttttagtgagcgcaacaaatgcgttcattattccacagtgctcacttgctcctagtgccagtattccacagttcctcccaccagttacttcaatgggcttcgaacatccagccgtgcaagcctacaggctacaactagcgcttgcggcgagcgccttacaacaa

SEQ ID NO: 68629 - DNA, 256 bp, Zea mays
attgagaccaactagcaacatagaaagcacaatagtgtaccaacaatggcagccaaaatattttgcctccttatgctccttggtctttctgcaagtgctgctacggcgaccattttcccgcaatgctcgcaagctcctatagcttcccttcttcccccgtacctctcaccagcggtgtcttcggtatgtgaaaacccaattcttcaaccctacaggatccaacaggcaatcacagctggcatcttacctttatcac

SEQ ID NO: 68630 - DNA, 257 bp, Zea mays
attgagaccagcaagcaacatagacagtagaatccattagcaacaatagagcaacaatggcgaccaagatattttccctccttatgctccttgctctttctacatgtgttgctaacgcgacaattttccctcaatgctcacaagctcctatagcttcccttcttcccccataccttccatcaattatagcttcagtatgtgaaaacccagctcttcaaccatataggcttcaacaagcaatcgcagcaagcaacata

SEQ ID NO: 68631 - DNA, 76 bp, Zea mays
tatgagttatagttcaataataaagttttttgtctgatgtttgtggcttcccagaaataagaaagtacatttctag

SEQ ID NO: 68632 - DNA, 119 bp, Zea mays
ggtcttcagaccattagctttatctactccagagcgcagaagaacccgatcggcaccatgagggtgttgctcgttgccctcgctctcctggctctcgctacgagcgccacctccacaca

SEQ ID NO: 68633 - DNA, 139 bp, Zea mays
attttgagcattcagaaacacacctagcgaaggcatctagcaacgacctaataacaatggcttccaagacattatccctccttgcgcttcttgccctttttgtgagtgcaacaaatgcgttcattattccacaatgctc

SEQ ID NO: 68634 - DNA, 242 bp, Zea mays
ctcgagccgcaccaaccgatcattttcgctattgatacaaagagaagggaatggccgagataaccctagagccgagtgagcttatggcgcaaacaaacaacagagtagtgccaaaggtcactgaaatcttccccgtggaggacgcgaactacccttaaagcgccttcatcgcgtcggtccggaccgacgtgatcaaacactgaaccgaacataaagggatattccagcccgtgctgccaccg

SEQ ID NO: 68635 - DNA, 244 bp, Zea mays
cagcgaaccatctagcaacgacctaacaccaatggctaccaagatattagccctccttgcgcttcttgcccttttagtgagcgcaacaaatgcgttcattattccacagtgctcacttgcccctagtgccattattccacagttcctcccacccgttacttcaatgggcttcgaacatccagccgtgcaatcctacaggctacaactagcgcttgcggcgagcgccttacaacaaccatttgcc

SEQ ID NO: 68636 - DNA, 260 bp, Zea mays
aactagcaacatacatagtgaagtacactagcaacatcttagcaccaatgggagccaagatttttgccctccttgccctccttgctctttcagcaagcgctgctacctcgacttttattccacaatgctcacaacaatacctctctccggtgacagccgcgggatttcaatacccaactatacaatcctacatggtacaagaggccatccaagcaagcatcttacggtcattagcattaaccctccaacaaccatatgct

SEQ ID NO: 68637 - DNA, 130 bp, Zea mays
cagaaacacaccaagcgaagcgcactagcaacaacctaatcacaatggctaccaagatattatccctccttgcgcttcttgcgctttttgcgagcgcaacaaatgcgtccattattccacaatgctcact

SEQ ID NO: 68638 - DNA, 257 bp, Zea mays
cacccgggcacccacgcgctcttcagatcagatcggcaagtccaatcccgagcagaggtgcgactcgagcgctcgcgccggtgtccatttcaaagaggaagccgcggtagcactggtagcggcagcagtaaggggaagatgtcgtcggcgttcagcggcgatgagaccgcccctttcttcggcttccttggcgcctccgctgcgctcgtcttctcatgcatgggggcggcgtacgggacagccaagagtggcgttgg

SEQ ID NO: 68639 - DNA, 258 bp, Zea mays
gtttttgattttagccgccgccgctgctcatctcacatccctcgagaagacgcctgctcctcgccgatcgatacgatggccgtcttctccgacctccacaccgccgacggcctcaagtccctcgaggctcacctcgccggcaaaacctatgtgtctggtgactccattactaaggatgacattaaggtcttcgccgcggtgccgtcgaagcctggcgctgagtttcctaatgccgcccgctggtacgagaccgtctct

SEQ ID NO: 68640 - DNA, 253 bp, Zea mays
agcaagcaacatagaaagtagaatccattagcaacaatagagcaacaatggcgaccaagatattttccctccttatgctccttgctctttctacatgtgttgctaacgcgacaattttccctcaatgctcacaagctcctatagcttcccttcttcccccataccttccatcaattatagcttcagtatgtgaaaacccagctcttcaaccatataggcttcaacaagcaatcgcagcaagcaacataccttt

SEQ ID NO: 68641 - DNA, 257 bp, Zea mays
ctcgagccgcacaacaactacaacaacttgtgctaggaaaccttgctgcctactctcagcaacagcagtttcttccattcaaccaactggctgcattgaactctgctgcttatttgcaacaacaactaccattcagtcagctagctgctgcctacccccagcaatttcttccattcaaccaactggcagcattgaactctgctgcttatttacaacagcaacagctaccaccattcagccagctagctgatgtgagc

SEQ ID NO: 68642 - DNA, 253 bp, Zea mays
ctcgagccgctcgagccgcaactagcaacatagaaagcacaatagtgtaccaacaatggcagccaaaatattttgcctccttatgctccttggtctttctgcaagtgctgctacggcgaccattttcccgcaatgctcgcaagctcctatagcttcccttcttcccccgtacctctcaccagcggtgtcttcggtatgtgaaaacccaattcttcaaccctacaggatccaacaggcaatcgcagctggcatc

SEQ ID NO: 68643 - DNA, 164 bp, Zea mays
attttccctcaatgctcacaagctcctatagcttcccttcttcccccataccttccatcaatgatagcttcagtatgtgaaaacccagctcttcagccctataggctccaacaagcaatcgcagcaagcaacatacctttatcacccttgttgtttcaacaatc

SEQ ID NO: 68644 - DNA, 259 bp, Zea mays
gagaccaacaagcaacatagaaagtggtttccagtagcaacaatagatcaacaatggcgaccaagatattttccctccttatgctccttgctctttctacatgtgttgctaacgcgacaattttccctcaatgctcacaatctcctatagcttccctttcttcccccatacctttcatcaattatagcttcactatgtgaaaacccagctcttcaaccatataggcttcaacaagcaatcgcagcaagcaacatacctt

SEQ ID NO: 68645 - DNA, 256 bp, Zea mays
ctcgagccgattcggctcgagcggctcgaggcaacatagaaagacgaatccattagcaacaatagagcaacaatggcgaacaagatattttccctccttatgctccttgctctttctacatgtgttgctaacgcgacaattttccctcaatgctcacaagctcctatagcttcccttcttcccccataccttccatcaattatagcttcagtatgtgaaaacccagctcttcaaccatataggcttcaacaagcaa

SEQ ID NO: 68646 - DNA, 256 bp, Zea mays; identical to SEQ ID NO: 68147

SEQ ID NO: 68647 - DNA, 251 bp, Zea mays
cttgcggcgagcgtcttagaacaaccaattgcccaattacaacaacaatccttagcacatctaaccatacaaaccatcgcaacgcagcagcaacaagcactgagccacctagccgtggtgaaccctatcgcctacttgcaacaacagctgcttgcatccaacccacttgctttggcaaacgtagctgcataccaacaacaacaacagttgcaacagtttctgccagcgctcagtcaactagccatggtgaa

SEQ ID NO: 68648 - DNA, 134 bp, Zea mays
cggctcgagggtcttcagaccattagctttatctactccagagcgctgaagaacccgatcgacaccatgagggtgttactcgatgccctcgctctcctggctctcgctgcgagcgccacctccacacaacatac

SEQ ID NO: 68649 - DNA, 252 bp, Zea mays
cagcattcaaaaacacaccaagcgaaggcgactagcaacgacctaacaccaatggctaccaagatattagccctccttgcgcttcttgcccttttagtgagcgcaacaaatgcgttcattattccacagtgctcacttgctcctagtgccagtattccacagttcctcccaccagttacttcaatgggcttcgaacatccagccgtgcaagcctacaggctacaactagcgcttgcggcgagcgccttacaa

SEQ ID NO: 68650 - DNA, 251 bp, Zea mays
attgagaccaactagcaacatagaaagcacaatagtgtaccaacaatggcagctaaaatattttgcctccttatgctccttggtctttctgcaagtgctgctacggcgaccattttcccacaatgctcacaagctcctatagcttcccttcttcccccgtacctctcaccaacggtgtcttcggtatgtgaaaacccaattcttcaaccctacaggatccaacaggcaatcgcagctggcatcttaccttt

SEQ ID NO: 68651 - DNA, 252 bp, Zea mays
agaccaactagcaacatagaaagcacaatagtgtaccaacaatggcagccaaaatattttgcctccttatgctccttggtctttctgcaagtgctgctacggcgaccattttcccgcaatgctcgcaagctcctatagcttcccttcttcccccgtacctctcaccagcggtgtcttcggtatgtgaaaacccaattcttcaaccctacaggatccaacaggcaatcgcagctggcatcttacctttatcac

SEQ ID NO: 68652 - DNA, 257 bp, Zea mays
attttcagcattcaaaaacacaccaagcgaaggctactagcaacgacctaacaccaatggctaccaagatattagccctccttgcgcttcttgcccttttagtgagcgcaacaaatgcgttcattattccacagtgctcacttgctcctagtgccagtattccacagttcctcccaccagttacttcaatgggcttcgaacatccagccgtgcaagcctacaggctacaactagcgcttgcggcgagcgccttacaa

SEQ ID NO: 68653 - DNA, 122 bp, Zea mays
ttggtcttcagaccattagctttatctactccagagcgcagaagatcccgatcgacaccatgagggtgttgctcgttgccctcgctctcctggctctcgctgcgagcgccacctccacacaa

SEQ ID NO: 68654 - DNA, 249 bp, Zea mays; identical to SEQ ID NO: 28316

SEQ ID NO: 68655 - DNA, 247 bp, Zea mays
caagcaacatagaaagtggaatccagtagcaacaatagagcaataatggcgaccaagatattttccctccttatgctccttgctctttctacatgtgttgctaacgcgacaattttccctcaatgctcacaagctcctatagcttcccttcttcccccataccttccatcaattatagctccaatatgtgaaaacccagctcttcaaccatataggcttcaacaagcaatcgcagcaagcaacatac

SEQ ID NO: 68656 - DNA, 251 bp, Zea mays
gcagcaacaactactaccattcagccagctagctggtgtgagccctgctaccttcttgatacaaccacagttgttgccgttctaccagcacgctgcgcctaacgctggcaccctcttacaactgcaacaattgctgccattcaaccaacttgctttgacaaacccagcagcgttctaccaacaacccatcattggtggtgccctcttttagatttcttatgagttatagttcaataataaagttttttgtc

SEQ ID NO: 68657 - DNA, 255 bp, Zea mays
acacctagcgaagcgcactagcaacgacctaacaacaatggctaccaagatattatccctctttgcgcttcttgccctttttgtgagcgcaacaaatgcgttcattattccacaatgctcacttgctcctagtgccattattccacagttcctccctccagttacttcaatgggcttcgaacacccagctgtgcaagcctacaggctacaacaagcgcttgcggcgagcgtcttacaacaaccaattgcccaatt

SEQ ID NO: 68658 - DNA, 241 bp, Zea mays
ttcgccgcggtgccgtcgaagcctggcgctgagtttcctaatgccgcccgctggtacgagaccgtctctgcggctgtagcctcaagattccctggtaaggctgttggtgtaaatctgcctgcgggatcagctcctgcggcagctgctcctgcggatgaggctgaggatgatgatgaccttgatctttttggtgatgaaactgaggaggacaagaaggcagctgatgagcgtgctgccgctg

SEQ ID NO: 68659 - DNA, 251 bp, Zea mays
tagcaacatagaaagcacaatagtgtaccaacaatggcagccaaaatattttgcctccttatgctccttggtatttctgcaagtgctgctacggcgaccattttcccgcaatgctcacaagctcctatagcttcccttcttcccccgtacctctcaccagcggtgtcttcggtatgtgaaaacccaattcttcaaccctacaggatccaacaggcaatcgcagctggcatcttacctttatcacccttgtt

SEQ ID NO: 68660 - DNA, 250 bp, Zea mays
attgagaccagcaagcaacatagaaagtagaatccattagcaacaatagagcaacaatggcgaccaagatattttccctccttatgctccttgctctttctacatgtgttgctaacgcgacaattttccctcaatgctcacaagctcctatagcttcccttcttcccccataccttccatcaattatagcttcagtatgtgaaaacccagctcttcaaccatataggcttcaacaagcaatcgcagcaag

SEQ ID NO: 68661 - DNA, 172 bp, Zea mays
cgattttgatcttgcagccacctttttttgttctgttgtgtatctagtagttggaggagatatgcagtttgcacttgcattggacacgaactcaggtcctcaccagataagatcttgtgagggtgatgggattgacaggttggataaattaagtattgggggcagaaagcag

SEQ ID NO: 68662 - DNA, 249 bp, Zea mays
caacaagcaacatagaaagtggaatccagtagcaacaatagagcaacaatggcgaccaagatattttccctccttatgctccttgctctttctacatgtgttgctaacgcgacaattttccctcaatgctcacaagctcctatagcttcccttcttcccccataccttccatcaattatagcttcaatatgtgaaaacccagctcttcaaccatataggcttcaacaagcaatcgcagcaagcaacata

SEQ ID NO: 68663 - DNA, 205 bp, Zea mays
tgctgccattccatcggcatgctatggcaaacattgctgctttcttgcaacaacaacagttgttgccattttacccacatgtggtgggaaacattactgccttcttgcaacagcaacaattgctgccattctacccacagaatgtggcaaacattgttgccttcttacaccaacaacaattgcttccatttagccaacttgcttt

SEQ ID NO: 68664 - DNA, 252 bp, Zea mays
tagcaacattagaaagcactaatacgtgtacccaactaatgggcagcccaacatatttttgcctcccttatgctccctgggtctttcctgcagtgctgctacgggcgacattttcccggaatgctcgcaagctcctatagcttcccttcttcccccgtacctctcaccagcggtgtcttcggtatgtgaaaacccaattcttcaaccctacaggatccaacaggcaatcgcagctggcatcttacctttatc

SEQ ID NO: 68665 - DNA, 127 bp, Zea mays
ctgggtcttcagaccattagctttatctactccagagcgcagaagaacccgatcgacaccatgagggtgttgctcgttgccctcgctctcctggctctagctgcgagcgccacttccacacaacata

SEQ ID NO: 68666 - DNA, 245 bp, Zea mays
ctcgagccgcgcgctactcgtcctggtggtgtccaacatcgtggacgtgggggacgtggcgcacgcggcgctctccacggccagcgtcatagtctacttctgcttcttcgtcatggggttcgggcccgtccccaacatcctctgcgcggagatcttccccaccacggtccgcggtgtccccatcgccatctgcgccttggccttctgggtcggtgacatcatcgtgacgtacactctccccgtga

SEQ ID NO: 68667 - DNA, 250 bp, Zea mays
gaaaacccaattcttcaaccctacaggatccaacaggcaatcacagctggcatcttacctttatcacccttgttcctccaacaatcatcagccctattacatcagttacctttggtgcatttattggcacaaaacatcagggcacaacaactacaacaacttgtgctagcaaaccttgctgcctactctcagcaacagcagtttcttccattcaaccaactagctgcattgaactctgcttcttatttgc

SEQ ID NO: 68668 - DNA, 262 bp, Zea mays
gaccaacaagcaacatagaaagtggaatccagtagcaacaatagagcaacaatggcgaccaagatattttccctccttatgctccttgctctttctacatgtgttgctaacgcgacaattttccctcaatgctcacaagctccaatagcttccctctttccccaatactttcattaattatagcttccatatgtgaaaacccagctcttcaaccatataggcgtcaacaagcaatcgcagctagctattatacctttatcgc

SEQ ID NO: 68669 - DNA, 249 bp, Zea mays
ggcagcaacagtttcttccattcaaccaactagctgcattgaactctgcttcttatttgcaacaacaacaactaccattcagccagctatctgctgcctacccccagcaatttcttccattcaaccaactgacagctttgaactctcctgcttatttacagcagcaacaactactaccattcagccagctagctggtgtgagccctgctaccttcttgacacaaccacaattgttgccgttctaccagc

SEQ ID NO: 68670 - DNA, 245 bp, Zea mays
caaccctctttttgggtcttcccgtattgaacaagcccacgttgagcaatggatggattttgccgcaacagaagttgatcctggtgttgcatggtacttgtatccaaggcttgggtacctcccttatgttagcacaactgaggaaacagctatttcttcattgaagaggtcgcttggtgctctgaacacacaccttgcttcaaacacataccttgttgggcatgctgttactctagctgacattg

SEQ ID NO: 68671 - DNA, 242 bp, Zea mays
atggatttcatagctggtgtgttggacggacacattcttctgggctgtgacccgggtacgtggaaagcgtatgtgtcgcaatttatgttcctggtggtgaaatttgttccgtcatggttgcgggacataaagctggacacgctaaagaagatagcagctggacttcggagctggcacgaacacgaccttgctctgtctcttcttgaacgaggaggtacacaagcaatctctgttgtagtcga

SEQ ID NO: 68672 - DNA, 243 bp, Zea mays
gagaccaactagcaacatagaaagcacaatagtgtaccaacaatggcagccaaaatattttgcctccttatgctccttggtctttctgcaagtgctgctacggcgaccattttcccgcaatgctcgcaagctcctatagcttcccttcttcccccgtacctctcaccagcggtgtcttcggtatgtgaaaacccaattcttcaaccctacaggatccaacaggcaatcacagctggcatctta

SEQ ID NO: 68673 - DNA, 243 bp, Zea mays
gcaacatagaaagtggaatccagtagcaacaacagagcaacaatggcgaccaagatattttccctccttatgctccttgctctttctgcatgtgttgctaacgcgacaattttccctcaatgctcacaagctcctatagcttcccttcttcccccataccttccatcaatgatagcttcagtatgtgaaaacccagctcttcagccctataggctccaacaagcaatcgcagcaagcaacata

SEQ ID NO: 68674 - DNA, 98 bp, Zea mays
taggcagcaaggtttgctagcacaagttgttgtagttgttgtgccctgatgttttgtgcctactctcagcaacaacagtttcttccattcaaccaacg

SEQ ID NO: 68675 - DNA, 132 bp, Zea mays
ccctgctccattctcagccgccgccaatcccttcccgtgctccgcaaccgctgagtgagaagaagagatggccggcaagggcgatggcccggctatcggcatcgatctcggcacgacgtactcttgcgtcgg

SEQ ID NO: 68676 - DNA, 257 bp, Zea mays
ctggaatcatgtcacgtgatggattccctgcaaatgcagatgacattttcattacagacggagcaagtcctggggtccacatgatgatgcaattactgattaggaatgagaaagatggcattctgtgcccaattcctcagtaccccttgtactcagcctccatagctcttcatggtggagctcttgtcccctattaccttaatgaaaaaactgggtggggtttggagatctctgatcttaagatgcaactggaaaat

SEQ ID NO: 68677 - DNA, 280 bp, Zea mays
gaccaactagcaacatagaaagcacaatagtgtaccaacaatggcagccaaaatattttgcttccttatgctccttggtctttctgcaagtgctgctaccgcaaccattttcccacaatgctcacaagctcctatagcttcctttcttcccccatacctctcaccagcggtgtcttcagtatgtgaaaacccaattcttcaaccctacaggatccaacaggcaatcgcagcaggcatcttacctttatcacccttgttcctccaacaaccgtcagcccta

SEQ ID NO: 68678 - DNA, 319 bp, Zea mays
  unsure (1)..(319): unsure at all n locations
agtcgcatgcnttaccgcacgcgcgtctccgcattcggctcgagcagatacacaccaagcgaacacattagcaacaacctaacaacaatggctaccaagatattatccctccttgcgcttcttgcgctttttgcgagcgcaacaaatgcgttcattattccacaatgctcacttgctccaagttccattattacacagttcctcccaccagttacttcaatgggcttcgaacacccagctgtgcaagcctataggctacaacaagcatttgcggcgagcgtcttacaacaaccaatttcccagttgcaacaacaatcct

SEQ ID NO: 68679 - DNA, 269 bp, Zea mays
atagaaagcacaatagtgtaccaacaatggcagccaaaatattttgcctccttatgctccttggtctttctgcaagtgctgctacggcgaccattttcccgcaatgctcgcaagctcctatagcttcccttcttcccccgtacctctcaccagcggtgtcttcggtatgtgaaaacccaattcttcaaccctacaggatccaacaggcaatcgcagctggcatcttacctttatcacccttgttcctccaacaatcatcagccctatta

SEQ ID NO: 68680 - DNA, 268 bp, Zea mays
atcagaaacgcccattgtctgatcaaggtccatttgacatcgttcttcataagttgactggaagggggtggcagcaattgctggaggaatatagggaggcgcacccagaagttactgttcttgatccacctggcgcaatagcaaacttgcttgatcgccagtctatgcttcaagaagtatctgaattggacctcacagactgtcatgttctcttctgcaggtaaagtacgtgtgcctaagcagctatttgttaatactgatccctcat

SEQ ID NO: 68681 - DNA, 271 bp, Zea mays
caactagcaacatagaaagcacaatagtgtaccaacaatggcagccaaaatattttgcctccttatgctccttggtctttctgcaagtgctgctacggcgaccattttcccacaatgctcacaagctcctatagcttcccttcttcccccgtacctctcaccagcggtgtcttcggtatgtgaaaacccaattctccaaccctataggatccaacaggcaatcgcagctggcatcttacctttatcacccttgttcctccaacaatcatca

SEQ ID NO: 68682 - DNA, 268 bp, Zea mays
agaccaacaagcaacatagatagtggaatccagtagcaacaatagagctacaatggcgtccaagatattttccctccttatgctccttgctctttctacatgtgttgctaacacgacaattttccctcaatgctcacaagctcctatagcttcccttcttcccccataccttccatcaattatagcttcaatatgtatgagaccagctcttcaaccatataggcttcaacaagcaatcgcagcaagcaacatacctttatcgcccttg

SEQ ID NO: 68683 - DNA, 266 bp, Zea mays
ctcctccctcgaccgtccccgtccccgtccccttccggcgcgcaagctcgcccgagatggcaaacgcgagatcgggtgtcgctgtgaatgacgagtgcatgctcaagttcggcgagctgcagtcgaagaggctgcaccgcttcctaactttcaagatggacgacaagttcaaggagatcgttgtggaccaggtcggggatcgcgctaccagctacgaggacttcacaaacagcctccccgagaatgactgccgatacgcgatctat

SEQ ID NO: 68684 - DNA, 266 bp, Zea mays
ctcggaacgcacacacagcccggtccccgatctccgatcccctcgtcgatccaagatgcagatcttcgtcaagaccctcactggaaagactatcaccctcgaggtggagtcttctgacaccattgacaacgtcaaggccaagatccaggacaaggagggcattcccccggaccagcagcggctcatcttcgctggcaagcagctcgaggacgggcgcacacttgccgactacaacatccagaaggagagcactctccacctggtgc

SEQ ID NO: 68685 - DNA, 270 bp, Zea mays
gctcgagcggctcgagcggctcgagattgagaccaacaagcaacatagaaagtggaatccagtagcaacaacagagcaacaatggcgaccaagatattttccctccttatgctccttgctctttctgcatgtgttgctaacgcgacaattttccctcaatgctcacaagctcctatagcttcccttcttcccccataccttccatcaatgatagcttcagtatgtgaaaacccagctcttcagccctataggctccaacaagcaatcgca

SEQ ID NO: 68686 - DNA, 269 bp, Zea mays
ctagcaacatagaaagcacaatagtgtaccaacaatggcagccaaaatattttgcctccttatgctccttggtctttctgcaagtgctgctacggcgaccattttcccgcaatgctcgcaagctcctatagcttcccttcttcccccgtacctctcaccagcggtgtcttcggtatgtgaaaacccaattcttcaaccctacaggatccaacaggcaatcgcagctggcatcttacctttatcacccttgttcctccaacaatcatcag

SEQ ID NO: 68687 - DNA, 276 bp, Zea mays
attgagaccaactagcaacatagaaagcactatagtgtaccaacaatggcagccaaaatattttgcttccttatgctccttggtctttctgcaagtgctgctaccgcaaccattttcccacaatgctcacaagctcctatagcttcctttcttcccacatacctctcaccagcggtgtcttcagtatgtgcaaacccaattcttcaaccctacaggatccaacaggcaatcgcagcaggcatcttacctttatcacccttgttcctccaacaaccg

SEQ ID NO: 68688 - DNA, 269 bp, Zea mays
tcgcgccgccgccgctgctgcaagcgccactcgccgtcgtccgaatagtacactctaacgccgccatggggcgtatgcacagccgcgggaagggtatctcgtcgtcggcgctgccgtacaagaggacgcctcctacctggctgaagaccgccgcctccgacgtggaggagatgatcacaaaggcagcgaagaagggacagatgccgtcgcagatcggcgtcctgctccgtgaccagcacggtatcccccttgtcaagagtgtcaccggc

SEQ ID NO: 68689 - DNA, 266 bp, Zea mays
actatactctaggaagcaaggacaccaccgccatggcagccaagatgcttgcattgttcgctctcctagctctttgtgcaagcgccactagtgcgacccatattccagggcacttgccaccagtcatgccattgggtaccatgaacccatgcatgcagtactgcatgatgcaacaggggcttgccagcttgatggcgtgtccgtccctgatgctgcagcaactgttggccttaccgcttcagacgatgccagtgatgatgccacag

SEQ ID NO: 68690 - DNA, 269 bp, Zea mays
agcaacatagaaagcacaatagtgtaccaacaatggcagccaaaatattttgcctccttatgctccttggtctttctgcaagtgctgctacggcgaccattttcccgcaatgctcgcaagctcctatagcttcccttcttcccccgtacctctcaccagcggtgtcttcggtatgtgaaaacccaattcttcaaccctacaggatccaacaggcaatcacagctggcatcttacctttatcacccttgttcctccaacaatcatcagcc

SEQ ID NO: 68691 - DNA, 271 bp, Zea mays
cacaaaacatcagggcacaacaactacaacaacttgtgctagcaaaccttgctgcctactctcagcaacagcagtttcttccattcaaccaactagctgcattgaactctgcttcttatttgcaacaacaacaactaccattcagccagctacctgctgcctacccccagcaatttcttccattcaaccaactggcagcattgaactctcctgcttatttacagcagcaacaactactaccattcagccagctagctggtgtgagccctgc

SEQ ID NO: 68692 - DNA, 102 bp, Zea mays
agaccattagctttatctactccagagcgcagaagaacccgatcgacaccatgagggtgttgctcgttgccctcgctctcctggctctcgctgcgagcgcca

SEQ ID NO: 68693 - DNA, 265 bp, Zea mays
ctagcaacatagaaagcacaatagtgtaccaacaatggcagccaaaatattttgcctccttatgctccttggtctttctgcaagtgctgctacggcgaccattttcccacaatgctcacaagctcctatagcttcccttcttcccccgtacctctcaccagcggtgtcttcggtatgtgaaaacccaattcttcaaccctataggatccaacaggcaatcgcagctggcatcttacctttatcacccttgttcctccaacaatca

SEQ ID NO: 68694 - DNA, 111 bp, Zea mays
cagaccattagctttatctactccagagcgcagaagaacccgatcgacaccatgagggtgttgctcgttgccctcgctctcctggctctcgctgcgagcgccacctccaca

SEQ ID NO: 68695 - DNA, 265 bp, Zea mays; identical to SEQ ID NO: 27673

SEQ ID NO: 68696 - DNA, 268 bp, Zea mays
gaccaacaagcaacatagaaagtggaatccagtagcaacaacagagcaacattggcgaccaagatattttccctccttatgctccttgctctttctgcatgtgttgctaacgcgacaattttccctcaatgctcacaagctcctatagcttcccttcttcccccataccttccatcaatgatagcttcagtatgtgaaaacccagctcttcagccctataggctccaacaagcaatcgcagcaagcaacatacctttatcacccttgt

SEQ ID NO: 68697 - DNA, 270 bp, Zea mays
agctcctatagcttcccttcttcccccgtacctctcaccagcggtgtcttcggtatgtgaaaacccaattcttcaaccctacaggatccaacaggcaatcacagctggcatcttacctttatcacccttgttcctccaacaatcatcagccctattacatcagttacctttggtgcatttattggcacaaaacatcagggcacaacaactacaacaacttgtgctagcaaaccttgctgcctactctcagcaacagcagtttcttccatt

SEQ ID NO: 68698 - DNA, 274 bp, Zea mays
caactagcaacatagaaagcacaatagtgtaccaacaatggcagccaaaatattttgcctccttatgctccttggtctttctgcaagtgctgctacggcgaccattttcccacaatgctcacaagctcctatagcttcccttcttcccccgtacctctcaccagcggtgtcttcggtatgtgaaaacccaattcttcaaccctataggatccaacaggcaatcgcagctggcatcttacctttatcacccttgttcctccaacaatcatcagcc

SEQ ID NO: 68699 - DNA, 265 bp, Zea mays
ttctcgagcgattcggctcacaactagcaacatagaaagcacgatagtgtaccaacaatggcagccaaaatattttgcttccttatgctccttggtctttctgcaagtgttgctaccgcaaccattttcccacaatgctcacaagctcctatagcttcccttcttcccccatacctctcaccagcggtgtcttcaatgtgtgaaaacccaattgttcaaccctacaggatccaacaggcaatcgcaacaggcatcttaccattat

SEQ ID NO: 68700 - DNA, 262 bp, Zea mays
attttgagcattcagaaacacacctagcgaagcgcactagcaacgacctaacaacaatggctaccaagatattatccctctttgcgcttcttgccctttttgtgagcgcaacaaatgcgttcattattccacaatgctcacttgctcctagtgccattattccacagttcctccctccagttacttcaatgggcttcgaacacccagctgtgcaagcctacaggctacaacaagcgcttgcggcgagcgtcttacaacaacc

SEQ ID NO: 68701 - DNA, 265 bp, Zea mays
aacaagcaacatagaaagtggaatccagtagcaacaacagagcaacaatggcgaccaagatattttccctccttatgctccttgctctttctgcatgtgttgctaacgcgacaattttccctcaatgctcacaagctcctatagcttcccttcttcccccataccttccatcaatgatagcttcagtatgtgaaaacccagctcttcagccctataggctccaacaagcaatcgcagcaagcaacatacctttatcacccttgtt

SEQ ID NO: 68702 - DNA, 264 bp, Zea mays
atgatatctcttccagagctgggaatctagttgagagcatgaccgctgatttggctggtgaagtgacgtctgctgctggacctgtacgcttggaggatctgagagaattctgagtgcaatacagtcatcaggtgctgcagctgaccctgatgctggagtaggactaggagacatcttgaagcctgatctggtcttgccattaattgaggacttgcccattgaacaattggcatcacatcttccggagggtggctcatggagtcc

SEQ ID NO: 68703 - DNA, 228 bp, Zea mays
ctcgagccgctcgagccgatcaccggctcgagctcgagcgctacgagcacggaaaatttcatatagcagctgtttcgcgtacacgatcgactacaaaggtcgcgtctcgaaacgtcttgccctgttcggaagggatggcgtcggaggtggaggacgacgcggcggtgcctggcgcgccgctggtcgccaatggtgcagccgacgtccgccggcagagggatcaggcga

SEQ ID NO: 68704 - DNA, 265 bp, Zea mays
caacaaatgcgttcattattccacagtgctcacttgctcctagtgccagtattccacagttcctcccaccagttacttcaatgggcttcgaacatccagccgtgcaagcctacaggctacaactagcgcttgcggcgagcgccttacaacaaccaattgcccaattgcaacaacaatccttggcacatctaaccctacaaaccattgcaacgcaacaacaacaacaacagtttctgccatcactgagccacctagccgtggtgaa

SEQ ID NO: 68705 - DNA, 265 bp, Zea mays
caactagcaacatagaaagcacaatagtgtaccaacaatggcagccaaaatattttgcttccttatgctccttggtctttctgcaagtgctgctaccgcaaccattttcccacaatgctcacaagctcctatagcttcctttcttcccccatacctctcaccagcggtgtcttcagtatgtgaaaacccaattcttcaaccctacaggatccaacaggcaatcgcagcaggcatcttacctttatcacccttgttcctccaacaa

SEQ ID NO: 68706 - DNA, 263 bp, Zea mays
  unsure (1)..(263): unsure at all n locations
cattcaaaaacacaccaagcgaaggnatctagcaacgacctaacaccaatggctaccaagatattagccctccttgcgcttcttgcccttttagtgagcgcaacaaatgcgttcattattccacagtgctcacttgctcctagtgccattattccacagttcctcccacctgttacttcaatgggcttcgaacatccagccgtgcaagcctacaggctacaactagcgcttgcgtgcgagcgccttacaacaaccaattgccc

SEQ ID NO: 68707 - DNA, 262 bp, Zea mays
caactagcaacatagaaagcacaatagtgtaccaacaatggcagccaaaatattttgcctccttatgctccttggtctttctgcaagtgctgctacggcgaccattttcccgcaatgctcgcaagctcctatagcttcccttcttcccccgtacctctcaccagcggtgtcttcggtatgtgaaaacccaattcttcaaccctacaggatccaacaggcaatcacagctggcatcttacctttatcacccttgttcctccaa

SEQ ID NO: 68708 - DNA, 264 bp, Zea mays
cagaaacacaccaagcgaagatcattagcaacaacctaacaacaatggctaccaagatattatccctccttgcgcttcttgcgctttttgcgagcgcaacaaatgcgttcattattccacaatgctcacttgctccaagttccattattacacagttcctcccaccagttacttcaatgggcttcgaacacccagctgtgcaagcctataggctacaacaagcaattgcggcgagcgtcttacaacaaccaatttcccagttgc

SEQ ID NO: 68709 - DNA, 265 bp, Zea mays
cagaaacacaccaagcgaagatcattagcaacaacctaacaacaatggctaccaagatattatccctccttgcgcttcttgcgctttttgcgagcgcaacaaatgcgttcattattccacaatgctcacttgctccaagttccattattacacagttcctcccaccagttacttcaatgggcttcgaacacccagctgtgcaagcctataggctacaacaagcaatcgcggcgagcgtcttacaacaaccaatttcccagttgca

SEQ ID NO: 68710 - DNA, 270 bp, Zea mays
attttgagcattcagaaacacaccaagcgaagctacctagcaacgacttaacaacaatggctaccaagatattagccctccttgcgcttcttgccctttttgtgagcgcaacaaatgcgttcattattccacaatgctcacttgctcctagtgccattataccacagttcctccgaccagttacttcaatgggcttcgaacacctagctgtgcaagcctacaggctacaacaagcgcttgcggcgagcgtcttacaacaaccaattaacc

SEQ ID NO: 68711 - DNA, 263 bp, Zea mays
gtgctagcaaaccttgctgcctactctcagcaacagcagtttcttccattcaaccaactaggttcattgaactctgcttcttatttgcaacaacaacaactaccattcagccagctacctgctgcctacccccagcaatttcttccattcaaccaactagcagcattgaactctcctgcttatttacagcagcaacaactactaccattcagccagctagctggtgtgagccctgctaccttcttgacacaaccacagttgtt

SEQ ID NO: 68712 - DNA, 264 bp, Zea mays
caacaagcaacatagaaagtggaatccagtagcaacaatagagcaacaatggcgaccaagatattttccctccttatgctccttgctctttctacatgtgttgctaacgcgacaattttccctcaatgctcacaagctcctatagcttcccttcttcccccataccttccatcaattatagcttcaatatgtgaaaacccagctcttcaaccatataggcttcaacaagcaatcgcagcaagcaacatacctttatcgcccttg

SEQ ID NO: 68713 - DNA, 261 bp, Zea mays
cggggtgctcctgtcgtcgagcttgccgatgtggccaagctccttggtgaacgcgaggcagccgaagacccgtaggtgagagaccgccggcttgcgcccatgccaagcctcgtacggtgtcatcccgttgagtgccttggtgggcgagcggttgaggatgtagaccgctgtcaccaccgcctctccccagaaggcagccgacattcccctctgtttgaggagagcccgagccattcccacagccgtctggttgcgccgctc

SEQ ID NO: 68714 - DNA, 258 bp, Zea mays
attattgataccaactagcaaaatacatagtgaagtacactagcaacatcttagcaccaatgggagccaagattttttccctccttgccctccttgctctttcagcaagcgctgctacatctactattattccacaatgctcacaacattacctctgtccggtgacagccgcgggatttcaacacccaactatacaatcctacatgctacatgaggccatcgtagcaagcatcttatggtcactagcattgaccctcc

SEQ ID NO: 68715 - DNA, 256 bp, Zea mays
ccgacctgcagcaaccagcatgtgccaggcttcatcacacaggctgagcagctcaaagccaagggtgtagacgagatcctgcttatcagcgttaacgaccccttcgtcatgaaggcgtgggcgaagacctaccccgagaacaagcacgtgaagttcctcgccgacggatctggagcgtacaccaaggcgctcgacctcgagctcgatctcacggacaaagggctgggcgtgcgctcgaagaggttcgctctcctgg

SEQ ID NO: 68716 - DNA, 268 bp, Zea mays
attttcagcattcaaaaacacaccaagcgaacgcactagcaacgacctaacaccaatggctaccaagatattagccctccttgcgcttcttgcccttttagtgagcgcaacaaatgcgttcattattccacagtgctcacttgctcctagtgccattattccacagttcctcccaccagttacttcaatgggcttcgaacatccagccgtgcaagcctacaggctacaactagcgcttgcggcgagcgccttacaacaaccaattgcc

SEQ ID NO: 68717 - DNA, 264 bp, Zea mays
ctcgagccgttttgagcattcagaaacacacctagcgaactgcactagcaacgacctaacaacaatggcttccaagacattatccctccttgcgcttcttgccctttttgtgagtgcaacaaatgcgttcattattccacaatgctcacttgctccgagtgccattattccacagttcctccctccagttacttcaatgggcttcgaacacccagctgtgcaagcctataggctacaacaagcgcttgcggcgagcgtcttaga

SEQ ID NO: 68718 - DNA, 260 bp, Zea mays
gtaatagggctgatgattgttggaggaacaagggtgataaaggtaagatgccagctgtgattgcaaaccttgctgcctactctcagcaacagcagtttcttccattcaaccaactagctgcattgaactctgcttcttatttgcaacaacaacaactaccattcagccagctacctgctgcctacccccagcaatttcttccattcaaccaactggcagcattgaactctcctgcttatttacagcagcaacaactacta

SEQ ID NO: 68719 - DNA, 259 bp, Zea mays
caatccttggcacatctaaccctacaaaccattgcaacgcaacaacaacaacaacaacagtttctgccatcactgagccacctagccgtggtgaaccctgtcacctacttgcaacagcagctgcttgcatccaacccacttgctctggcgaacgtagctgcataccagcaacaacaacagctgcaacagtttatgccagtgctcagtcaactagccatggtgaaccctgccgtctacctacaactactttcatctagcc

SEQ ID NO: 68720 - DNA, 257 bp, Zea mays
  unsure (1)..(257): unsure at all n locations
cagcattcaaaaacacaccaagcgaacgntactagcaacgacctaacaccaatggctaccaagatattagccctccttgcgcttcttgcccttttagtgagcgcaacaaatgcgttcattattccacagtgctcacttgctcctagtgccattattccacagttcctcccaccagttacttcaatgggcttcgaacatccagccgtgcaagcctacaggctacaactagcgcttgcggcgagcgccttacaacaacc

SEQ ID NO: 68721 - DNA, 262 bp, Zea mays
  unsure (1)..(262): unsure at all n locations
cagcaagcaacatagaaagtagaatccattagcaacaatagagcaacaatggcgaccaagatattttccctccttatgctccttgctctttctacatgtgttgctaacgcgacaattttccttctctgctcacaagctcctatagcttcccttcttcccccataccttccatcaattatagcttcagtatgtgaaaacccagctcttcaaccatatagncttcaacaagcaatcgcagcaagctacatacttacttcgccct

SEQ ID NO: 68722 - DNA, 263 bp, Zea mays
gctcttcagccctataggctccaacaagcaatcgcagcaagcaacatacctttatcacccttgttgtttcaacaatcgccagccctatctttggtgcagtcattggtacaaaccatcagggcacagcagctgcagcaactcgtgctacctgtgatcaaccaagtagctctggcaaacctttctccctactctcagcaacaacaatttcttccattcaaccaactgtctacactgaaccctgctgcttatttgcagcaacaact

SEQ ID NO: 68723 - DNA, 254 bp, Zea mays
cctaacaccaatggctaccaagatattagccctccttgcgcttcttgcccttttagtgagcgcaacaaatgcgttcattattccacagtgctcacttgctcctagtgccattattccacagttcctcccaccagttacttcaatgggcttcgaacatccagccgtgcaagcctacaggctacaactagcgcttgcggcgagcgccttacaacaaccaattgcccaattgcaacaacaatccttggcacatctaa

SEQ ID NO: 68724 - DNA, 232 bp, Zea mays
  unsure (1)..(232): unsure at all n locations
ggatttggctgacattgttgccaacaagtggaagtgagagccatcanattctgaattggtaattcaattattatatgtatgtaccatgccattgtagttttgtatgcttactactactactactaccactataaacacttgttgcttcatttttcattctaaaacttgtactgagaaacagaaccatcaattttctctgccttctcattgtgcaataaaattcttaccttga

SEQ ID NO: 68725 - DNA, 258 bp, Zea mays
ctcgagccggctgcagcaactcgtgctacctctgatcaaccaagtagctctggcaaacctgtctccctactctcagcaacaacaatttcttccattcaaccaactgtctacactgaaccctgctgcttatttgcagcaacaactattaccatttagccagctagctactgcctactctcagcaacaacaacttcttccatttaaccaattggccgcactgaaccccgctgcttatttgcagcagcaaatactactacc

SEQ ID NO: 68726 - DNA, 258 bp, Zea mays
gcaacatagaaagcacaatagtgtaccaacaatggcagccaaaatattttgcctccttatgctccttggtctttctgcaagtgctgctacggcgaccattttcccgcaatgctcgcaagctcctatagcttcccttcttcccccgtacctctcaccagcggtgtcttcggtatgtgaaaacccatttcttcaaccctacaggatccaacaggcaatcacagctggcatcttacctttatcacccttgttcctccaaca

SEQ ID NO: 68727 - DNA, 264 bp, Zea mays
ttcagaaacacaccaagcgaaggcactagcaacaacctaacaacaatggctaccaagatattatccctccttgcgcttcttgcgctttttgcgagcgcaacaaatgcgtccattattccacaatgctcacttgctcctagttccattattccacagttcctcccaccagttacttcaatggccttcgaacacccagctgtgcaagcctataggctacaacaagcgattgcggcgagcgtcttacaacaaccaattgcccaattg

SEQ ID NO: 68728 - DNA, 261 bp, Zea mays
gaccaacaagcaacatagaaagtggaatccagtagcaacaacagagcaacaatggcgaccaagatattttccctccttatgctccttgctctttctgcatgtgttgctaacgcgacaattttccctcaatgctcacaagctcctatagcttcccttcttcccccataccttccatcaatgatagcttcagtatgtgaaaacccagctcttcagccctataggctccaacaagcaatcgcagcaagcaacatacctttatca

SEQ ID NO: 68729 - DNA, 260 bp, Zea mays
tttagaccaactagcaacatagaaagcacaatagtgtaccaacaatggcagccaaaatattttgcctccttatgctccttggtatttctgcaagtgctgctacggcgaccattttcccgcaatgctcacaagctcctatagcttcccttcttcccccgtacctctcaccagcggtgtcttcggtatgtgaaaacccaattcttcaaccctacaggatccaacaggcaatcgcagctggcatcttacctttatcacccttg

SEQ ID NO: 68730 - DNA, 260 bp, Zea mays
aactaccaacatacatagtgaagtacactagcaacatcttagcaccaatggcagccaagatttttgcgctccttgccctccttgctctttcagcaagtgttgctaccgcgactattattccacaatgctcacaacaatacctctctccagtgatagccgcgagatttgaatacccatctatacaatcctacaggctacaagaggccatcacagcaagcatcttacggtcgttagcattgaccgtccaacaaccatatgcc

SEQ ID NO: 68731 - DNA, 261 bp, Zea mays
attcaaaaacacaccaagcgaagcaactagcaacgacctaacaccaatggctaccaagatattagccctccttgcgcttcttgcccttttagtgagcgcaacaaatgcgttcattattccacagtgctcacttgctcctagtgccagtattccacagttcctcccaccagttacttcaatgggcttcgaacatccagccgtgcaagccttacaggttacactagcgcttgcggcgagcgccttacaacaaccaattgccca

SEQ ID NO: 68732 - DNA, 258 bp, Zea mays
gcaacatagaaagtggaatacagtagcaacaatagagcaacaatggcggccaagatattttccatccttatgctccttgctctttctgcatgtgttgctaacgcgaccatttttcctcaatactcacaagctcctatagctgcccttcttcccccataccttccatcaatgaccgcttcagtttgtgaaaacccagcccttcaaccctacaggctccaacaagcaatcgcaacaagcaacttacctttatcacccctg

SEQ ID NO: 68733 - DNA, 255 bp, Zea mays
caactagcaacatagaaagcacaatagtgtaccaacaatggcagccaaaatattttgcttccttatgctccttggtctttctgcaagtgctgctaccgcaaccattttcccacaatgctcacaagctcctatagcttcctttcttcccccatacctctcaccagcggtgtcttcagtatgtgaaaacccaattcttcaaccctacaggatccaacaggcaatcgcagcaggcatcttacctttatcacccttgtt

SEQ ID NO: 68734 - DNA, 258 bp, Zea mays
gcaacatagaaagtggaatccagtagcaacaatagagcatcaatggcgaccaagatactttccctccttatgctccttgctctttctgcatgtgttgctaacgcgacaattttccctcaatgctcacaagctcctatagcttcccttcttcccccataccttccatcaatgatagcttcagtatgtgaaaacccagctcttcaaccctataggctccaacaagcaatcgcagcaagcaacatacctttatcacccttg

SEQ ID NO: 68735 - DNA, 129 bp, Zea mays
gattcatgatatttgggaaatctcctctatccatctctctctatctatatatgtaataatgcagtaagacgacacacattatcatgtgtggtatgaccaataatatatgcatggtcataataaagtttt

SEQ ID NO: 68736 - DNA, 268 bp, Zea mays
caactagcaacatagaaagcacaatagtgtaccaacaatggcagccaaaatattttgcttccttatgctccttggtctttctgcaagtgctgctaccgcaaccattttcccacaatgctcacaagctcctatagcttcctttcttcccccatacctctcaccagcggtgtcttcagtatgtgaaaacccaattcttcaaccctacaggatccaacaggcaatcgcagcaggcatcttacctttatcacccttgttcctccacaaccgt

SEQ ID NO: 68737 - DNA, 264 bp, Zea mays
ggaacaagggtgataatggtaagatgcctgttcctccaacaaccgtcagccctattacagcagttacctttggtccatttggtggcacaaaacatcagggcacaacaactacaacaacttgtgctagcaaaccttgctgcatactctcagcaacatcagtttcttccattcaaccaactggctgcattgaactctgctgcttatttgcaacaacaattaccattcagccagctagttgctgcctacccccagcatttcttccat

SEQ ID NO: 68738 - DNA, 260 bp, Zea mays
gaaatgagagtgaaaagccgtgacactgatcagtggatgtcatatcgacatcttcctgagaacctcaaggaaagaatacggcgttatgaacaatatagatggcaagaaacaagcggggttgatgaagagcaactccttatgaacctccccaaagatcttaggagggatataaaacgacatctttgtttgaaacttctcatgagggttccactgtttgaaaatattgacgaacagcttttggatgccatgtgtgactggct

SEQ ID NO: 68739 - DNA, 260 bp, Zea mays
ttgagaccaactagcaacatagaaagcacaatagtgtaccaacaatggcagccaaaatattttgcttccttatgctccttggtctttctgcaagtgctgctaccgcaaccattttcccacaatgctcacaagctcctatagcttcctttcttcccccatacctctcaccagcggtgtcttcagtatgtgaaaacccaattcttcaaccctacaggatccaacaggcaatcgcagcaggcatcttacctttatcaccttgt

SEQ ID NO: 68740 - DNA, 263 bp, Zea mays
  unsure (1)..(263): unsure at all n locations
ctgaaatccagaggaacccctggtgattggagccatatcattaagcaaattgggatgtttactttcactgggctgaatagcgaacaagtcgcattcatngaggcaggaataccacatttatatgacatactgatgggaggatcagcatggccggtttgagncatgaggactgtgccccatncttgcagatgccatacacntcgcagttactcaactggaaatgaggatagtatcgcagctttcgtgaataaacctggaatcac

SEQ ID NO: 68741 - DNA, 114 bp, Zea mays
cagcattcaaaaacacaccaagcgaagcaagctagcaacgacctaacaccaatggctaccaagatattagccctccttgcgcttcttgcccttttagtgagcgcaacaaatgcg

SEQ ID NO: 68742 - DNA, 272 bp, Zea mays
tgagcattcagaaacacacctagcgaagcgcactagcaacgacctaacaacaatggcttccaagacattatccctccttgcgcttcttgccctttttgtgagtgcaacaaatgcgtccataatcccacaatgctcacttgctccgagtgccattattccacagttcctccctcgagtgacttcaatgggcttcgaacacccagctgtgcaagcctataggctacaacaagcgcttgcggcgagcgtcttagaacaaccaatgcccaattaca

SEQ ID NO: 68743 - DNA, 264 bp, Zea mays
cgaactagcaacatacatagtgaagtacactagcaacatcttagcaccaatggcagccaagatttttgccatccttgccctccttgctctttcagcaagcgttgctaccgcgactattattccacaatgctcacaacattacctctctccggtgacagccgcgagatttgaatacccaactatacaatcctacaggctacaagaggccatcgcagcaagcatcttacggtcgttagcattgaccgtccaacaacctatgcccta

SEQ ID NO: 68744 - DNA, 260 bp, Zea mays
gaagaatgcaaccatcaacgatgggtctgtcatatagatcggctgcgtttgcgtctacaaaacaagaacctacaatggtattgcatcgatggatcgtgtaaccttggtatggtaagagccgcttgacaggaagtcgagcgttcgggcgcaagatgcgttgtctggcatgctgttccttgaccatttgtgctgctagtatgtactgttataagctgccctagaagttgcagcaaacctttttatgaaccttttatttccat

SEQ ID NO: 68745 - DNA, 260 bp, Zea mays
gcagcattgaactctcctgcttatttacagcagcaacaactactaccattcagccagctagctggtgtgagccctgctaccttcttgacacaaccacagttgttgccgttctaccagcacgctgcgcctaacgctggcaccctcttacaactgcaacaattgctgccattcaaccaacttgctttgacaaacctagcagtgttctaccaacaacccatcattggtggtgccctcttttagatttcttatggttatagttc

SEQ ID NO: 68746 - DNA, 256 bp, Zea mays
attgagaccaacaagcaacatagaaagtggaatccagtagcaacaatagagcaacaatggcgaccaagatactttccctccttatgctccttgctctttctgcatgtgttgctaacgcgacaattttccctcaatgctcacaagctcctatagcttcccttcttcccccataccttccatcaatgatagcttcagtatgtgaaaacccagctcttcaaccctataggctccaacaagcaatcgcagcaacaacata

SEQ ID NO: 68747 - DNA, 255 bp, Zea mays
cttgagaccaactagcaacatagaaagcacaatagtgtaccaacaatggcagccaaaatattttgcttccttatgctccttggtctttctgcaagttttgctaccgcaaccattttcccacaatgctcacaagctcctatagcttcccttcttcccccatacctctcaccagcggtgtcttcaatgtgtgaaaccccaattgttcaaccctacaggatccaacaggcaatcgcaacaggcatcttaccttatcac

SEQ ID NO: 68748 - DNA, 246 bp, Zea mays
ctcgagccgtcaacaagcaacatagaaagtggaatccagtagcaacaatagatcaacaatggcgtccaagatattttccctccttatgctccttgctctttctacatgtgttgctaacgcgacaattttccctcaatgctcacaagctcctatagcttcccttcttcccccataccttccatcaattatagcttctatatgtgaaaacccagctcttcaaccatataggcttcaacaagcaatcgc

SEQ ID NO: 68749 - DNA, 103 bp, Zea mays
cagcattcaaaaacacaccaagcgaagcgcactagcaacgacctaacaccaatggctaccaagatattagccctccttgcgcttcttgcccttttagtgagcg

SEQ ID NO: 68750 - DNA, 260 bp, Zea mays
gcaacaatggcgaccaagatattttccctccttatgctccttgctctttctacatgtgttgctaacgcgacaattttccctcaatgctcacaagctcctatagcttcccttcttcccccataccttccatcaattatagcttgagtatgtgaaaagccagctcttcaactagagcggcttcagcaagcaatggaagcaagcaccatccctgtagcgctcttgttgtgcaaacaatcgccagccctatgtatggtgcttga

SEQ ID NO: 68751 - DNA, 275 bp, Zea mays
aacacacctagcgaagcgcactagcaacgacctaacaacaatggcttccaagacattatccctccttgcgcttcttgccctttttgtgagtgcaacaaatgcgttcattattccacaatgctcacttgcttcgagtgccattattccacagttcctccctcctgttacttcaatgggcttcgaacacccagctgtgcaagcctataggctacaacaagcgcttgcggcgagcggtcttagaacaaccaattgcccatttacaacacaatccttgg

SEQ ID NO: 68752 - DNA, 262 bp, Zea mays
gcagttgcttgcatcaaaccacttgctctggcaaacgtagttgcaaaccagccacaacaacagctgcaacagtttctgccagcgctcagtcaactagccatggtgaaccctgccgcctacctacaacagcaacaactgctttcatctagcccgctcgctgtggccaatgcacctacatacctgcaacaacaattgttgcaacagattgtaccagctctgactcagctagttgtggcaaaccctgctgcctactgcaacagct

SEQ ID NO: 68753 - DNA, 260 bp, Zea mays
gaccaacaagcaacatagaaagtggaatccagtagcaacaacagagcaacaatggcgaccaagatattttccctccttatgctccttgctctttctgcatgtgttgctaacgcgacaattttccctcaatgctcacaagctcctatagcttcccttcttcccccataccttccatcaatgatagcttcagtatgtgaaaacccagctcttcagccctataggctccaacaagcaatcgcagcaagcaacaacctttatca

SEQ ID NO: 68754 - DNA, 255 bp, Zea mays
ctcgagccgatcgcccttgttgtttcaacaatcgccagccctatctttggtgcagtcactggtacaaaccatcagggcacaacagctgcagcaactcgtgctacctctgatcaaccaagtagctctggcaaacctttctccctactctcagcaacaacaatttcttccattcaaccaactgtctacactgaaccctgctgcttatttgcagcaacaactattacgatttagccagctagctactgctactctcag

SEQ ID NO: 68755 - DNA, 251 bp, Zea mays
gtgggattgaagccaattatggacgagtttctcgttttggtctcatggcctacgcttcatcactagatgttgtgggatgctttggttcgtcggtttttgacactgcaaccatcttatctgttgttgctggccatgacaagatggacgcaaccagcagttcacaggttgttccagagtatgcatcggagttggtctccctagatttactagaatcgaaaccattaaatggtgtgagaattgggatatacaag

SEQ ID NO: 68756 - DNA, 256 bp, Zea mays
caacaagcaacatagaaagtggaatccagtagcaacaatagagcaacaatggcgaccaagatattttccctccttatgctccttgctctttctacatgtgttgctaacgcgacaattttccctcaatgctcacaagctcctatagcttcccttcttcccccataccttccatcaattatagcttcaatatgtgaaaacccagctcttcaaccatataggcttcaacaagcaatcgcagcaagcaaatacctttatc

SEQ ID NO: 68757 - DNA, 255 bp, Zea mays
caactagcaacatagaaagcacaatagtgtaccaacaatggcagccaaaatattttgcctccttatgctccttggtctttctgcaagtgctgctacggcgaccattttcccgcaatgctcgcaagctcctatagcttcccttcttcccccgtacctctcaccagcggtgtcttcggtatgtgaaaacccaattcttcaaccctacaggatccaacaggcaatcacagctggcatcttacctttatcaccttgttc

SEQ ID NO: 68758 - DNA, 255 bp, Zea mays
ggacgtcagcctagcaattagctcatcgactccagattggagaactcgacaccatgaaggtgctgatcgttgcccttgctctcctggcgctcgctgcgagcgccgcctccagtacaagcggcggctgtggctgccagacaccaccgtttcatctaccgcctccgttctatatgccgctccgttctatctgccgccgcagcagcagccgcagccatggcaataccccactcaaccaccgcagctaagccgtgccag

SEQ ID NO: 68759 - DNA, 264 bp, Zea mays
tagcaacatagaaagcacaatagtgtaccaacaatggcagccaaaatattttgcctccttatgctccttggtctttctgcaagtgctgctacggcgaccattttcccgcaatgctcgcaagctcctatagcttcccttcttcccccgtacctctcaccagcggtgtcttcggtatgtgaaaacccaattcttcaaccctacaggatccaagagggaatcacagctggcatctcacctttctcaccctagtacctgaacaatcat

SEQ ID NO: 68760 - DNA, 265 bp, Zea mays
attttgagcattcaaaaacacaccaagcgaagacattagcaacaacctaacaacaatggctaccaagatattatccctccttgcgcttcttgcgctttttgcgagcgcaacaaatgcgttcattattccacaatgctcacttgctccaagttccattattacacagttcctcccaccagttacttcaatgggcttcgaacacccagctgtgcaagcctataggctacaacaagcaattgcggcgagcgtcttacaaaaccaattt

SEQ ID NO: 68761 - DNA, 270 bp, Zea mays
attttgagcattcagaaacacaccaagcgaagccactagcaacgacctaacaacaatggctaccaagatattagccctccttgcgcttcttgccctttttgtgagcgcaacaaatgcgttcattattccacaatgctcacttgctcctagtgccattattccacagttcctcccaccagttacttcaatgggcttcgaacacctagctgtgcaagccaacatgcaacaacaagcgcttgcggcgagcgtcttacaacaaccattgcccaa

SEQ ID NO: 68762 - DNA, 269 bp, Zea mays
attgagaccaactagcaacatagaaagcacaatagtgtaccaacaatggcagccaaaatattttgcttccttatgctccttggtctttctgcaagtgctgctaccgcaaccattttcccacaatgctcacaagctcctatagcttcctttcttcccccatacctctcaccagcggtgtcttcagtatgtgaaaacccaattcttcaaccctacaggatccaacaggcaatcgcagcaggcatcttacctttattaccctgttcctccaa

SEQ ID NO: 68763 - DNA, 266 bp, Zea mays
caacaagcaacatagaaagtggaatccagtagcaacaatagagcaacaatggcgaccaagatattttccctccttatgctccttgctctttctacatgtgttgctaacgcgacaattttccctcaatgctcacaagctcctatagcttcccttcttcccccataccttccatcaattatagcttcaatatgtgaaaacccagctcttcaaccatataggcttcaacaagcaatcgcagctttttacatacctttatcgcccttggt

SEQ ID NO: 68764 - DNA, 259 bp, Zea mays
cagcaagcaacatagaaagtagaatccattagcaacaatagagcaacaatggcgaccaagatattttccctccttatgctccttgctctttctacatgtgttgctaacgcgacaattttccctcaatgctcacaagctcctatagcttcccttcttcccccataccttccatcaattatagcttcagtatgtgaaaacccagctcttcagccctataggctccaacaagcaatcgcagcaagcaacatactttatcacc

SEQ ID NO: 68765 - DNA, 255 bp, Zea mays
ttgagaccaactagcaacatagaaagcacaatagtgtaccaacaatggcagccaaaatattttgcctccttatgctccttggtctttctgcaagtgctgctacggcgaccattttcccacaatgctcacaagctcctatagcttcccttcttcccccgtacctctcaccagcggtgtcttcggtatgtgaaaacccaattcttcaaccctataggatccaacaggcaatcgcagctggcatcttactttatcacc

SEQ ID NO: 68766 - DNA, 255 bp, Zea mays
cgaacatccagccgagcgagcgtacaggctacaactagcgcttgcggcgagcgccttacaacaaccaattgcccaattgcaacaacaatccttggcacatctaaccctacaaaccattgcaacgcaacaacaacaacaacagtttctgccatcactgagccacctagccgtggtgaaccctgtcacctacttgcaacagcagctgcttgcatccaacccacttgctctggcgaacgtagctgcatccagcaacaa

SEQ ID NO: 68767 - DNA, 256 bp, Zea mays
attttgagcattcagaaacacacctagcgaagcgcactagcaacgacctaacaacaatggctaccaagatattatccctctttgcgcttcttgccctttttgtgagcgcaacaaatgcgttcattattccacaatgctcacttgctcctagtgccattattccacagttcctccctccagttacttcaatgggcttcgaacacccagctgtgcaagcctacaggctacaacaagcgcttgcggcgagcgtcttaca

SEQ ID NO: 68768 - DNA, 262 bp, Zea mays
cagtcgcacatatctactatactatactctaggaagcaaggacaccaccgccatggcagccaagatgcttgcattgttcgctctcctagctctttgtgcaagcgccactagtgcgacccatattccagggcacttgccaccagtcatgccattgggtaccatgaaccccatgcatgcagtactgcatgatgcaacaggggcttgccagcttgatggcgtgtccgtccctgatgctgcagcaactgttggccttaccgcttca

SEQ ID NO: 68769 - DNA, 262 bp, Zea mays
gcaagatcgagatggcatgcttcctttcagttcccttctcgagtcgagccttttattgctgtggttgatctgacagttcctgtttcgtgatcatatgattgatatcatcagatctctgatgacatgaggcctcacccgatcgtggtcagcgctctgacgatggtttgtgctgttgcgcctagttggaaggtcatacccacacctgatatcattgacaaagtctgcaaagctcgagtgatgaggaaagaggtcgttccaatcc

SEQ ID NO: 68770 - DNA, 263 bp, Zea mays
aaatttgaagatgactgccgctccatcattgggactcagtcatatgttctctttactatagataaactgatatacaaaattgtgaagcagcttcaagcattagcatctgatgaaatggacaaccagcttctccagctttatttatatgaaaagtcgaggtctcctgggagcttctttgatctggtttatcacgaaaatgcacgagcccttctacatgatgacaacatataccgttttgaatgtcattctgatcctcagaatta

SEQ ID NO: 68771 - DNA, 263 bp, Zea mays
gggcgccgccgccagctggctgcactgcggctgcctcaggtactccgcgtaggggtacagccctactacgccgggtgtgggcagccgagcgccatgttccagccgctccggcaacagtgctgccagcagcagatgaggatgatggacgtgcagtccgtcgcgcagagctgcagatgatgatgcagcttgagcgtgccgctgccgccagcagcagcctgtacgagccagctctgatgcagcagcagcagcagctgctggcagcc

SEQ ID NO: 68772 - DNA, 263 bp, Zea mays
  unsure (1)..(263): unsure at all n locations
tgagaatggcatcctccgcaagtggatctctcgttttgangtctggccatacctggagacatacactgaggatgtttccagtgaaataatgaaagaaatgcaggccaagcctgaccttatcattggcaactacagcgatggcaacctagtcgccantctgctcgcacanaagttgggagtcactcattgtaccatcgctcatgccttggagnnaaccaaataccccaagctgcggacatctanttggacaagtcganagccag

SEQ ID NO: 68773 - DNA, 258 bp, Zea mays
caccaagcgaaggagctagcaacaacctaacaacaatggctaccaagatattatccctccttgcgcttcttgcgctttttgcgagcgcaacaaatgcgtccattattccacaatgctcacttgctcctagttccattattccacagttcctcccaccagttacttcaatggccttcgaacacccagctgtgcaagcctataggctacaacaagcgattgcggcgagcgtcttacaacaaccaattgccaattgcaaca

SEQ ID NO: 68774 - DNA, 253 bp, Zea mays
tcaagagcaactaccagtcccacggcatctacagggacgcaaagaccgctttctgcatccacaacatctcctaccagggccggttcgccttctccgactacccggagctgaacctcccggagagattcaagtcgtccttcgatttcatcgacggctacgagaagcccgtggaaggccggaagatcaactggatgaaggccgggatcctcgaggccgacagggtcctcaccgtcagcccctactacgcgaggag

SEQ ID NO: 68775 - DNA, 249 bp, Zea mays
catccccccggaccagcagcgtctgatcttcgccggcaaacagctggaggatggccgcaccctagcagactacaacatccaaaaggagagcaccctccaccttgtgctccgtctccgtggtggtcagtaagtcatgggtcgtttaagctgccgatgtgcctgcgtcgtctggtgccctctctccatatggaggttgtcaaagtatctgctgttcgtgtcatgagtcgtgtcagtgttggtttataatgg

SEQ ID NO: 68776 - DNA, 251 bp, Zea mays
gagaccaactagcaacatagaaagcacaatagtgtaccaacaatggcagccaaaatattttgcctccttatgctccttggtctttctgcaagtgctgctacggcgaccattttcccacaatgctcacaagctcctatagcttcccttcttcccccgtacctctcaccagcggtgtcttcggtatgtgaaaacccaattcttcaaccctataggatccaacaggcaatcgcagctggcatctacctttatca

SEQ ID NO: 68777 - DNA, 260 bp, Zea mays
cttgttgtttcaacaatcgccagccctatctttggtgcagtcaatggtacaaaccatcagggcacaacagctgcagcaactcgtgctacctctgatcaaccaagtagctctggcaaacctttctccctactctcagcaacaacaatttcttccattcaaccaactgtctacactgaaccctgctgcttatttgcagcaacaactattaccatttagccagctagctactgcctactctcagcaacaacaattcttccatt

SEQ ID NO: 68778 - DNA, 262 bp, Zea mays
agatgtggcgctgcagtccaccaattagcggctatggtgcttggcaagatcgccatcgtcatcggctccggagttatcggatcagtactcacaggtggtgagtctggccttcccgacttcaaggatgcaatctctggtgctttcaagttcttgaccaagagttcaaagcaaggcaaggatggactgtcgaccagcaggccacatacttctgagttgttgacccaggtcaattatctcagagaggagctacaaatgtgtctaa

SEQ ID NO: 68779 - DNA, 260 bp, Zea mays
cagcaagcaacatagaaagtagaatccattagcaacaatagagcaacaatggcgaccaagatattttccctccttatgctccttgctctttctacatgtgttgctaacgcgacaattttccctcaatgctcacaagctcctatagcttcccttcttcccccataccttccatcaattatagcttcagtatgtgaaaacccagctcttcaaccatataggcttcaacaagcaatcgcagcaagcaacataccttatcgccc

SEQ ID NO: 68780 - DNA, 254 bp, Zea mays
attgagaccaacaagcaacatagaaagtggaatccagtagcaacaatagagcaacaatggcgaccaagatattttccctccttatgctccttgctctttctacatgtgttgctaacgcgacaattttccctcaatgctcacaagctcctatagcttcccttcttcccccataccttccatcaattatagcttcaatatgtgaaaacccagctcttcaaccatataggcttcaacaagcaatcgagcaagcaaca

SEQ ID NO: 68781 - DNA, 252 bp, Zea mays
aagcaacatagaaagtggaatccagtagcaacaatagagcaacaatggcgaccaagatattttccctccttatgctccttgctctttctacatgtgttgctaacgcgacaattttccctcaatgctcacaagctcctatagctctccttcttcccccataccttccatcaattatagtctcaatatgtgaaaacccagctcttcaaccatataggcttcaacaagcaatcgcagcaagcaacatacctttat

SEQ ID NO: 68782 - DNA, 249 bp, Zea mays
tccgcagtcctctcctctcgaggtggcggcgctccctcctgttttcctcttcttcttcctgtactatatagcctcccctcgcaaatcgtcactgacgagtgatgtcattccgcttgcttgattgttccagatattcgcagttgaccgggtcctcggagcacgatgaagtttgttgctgcctacttgcttgctgtcctcgctgggaacgccagcccctccgctgaggatttgactgccatctggagtcag

SEQ ID NO: 68783 - DNA, 260 bp, Zea mays
cagccagctagttgctgcctacccccagcaatttcttccattcaaccaactagcagcattgaactctgctgcttatttacagcagcaacaactactaccattcagccagctagctgatgtgagccctgctgccttcttgacacaacaacagttgttgccgttctacctgcacgctatgcctaacgctggcaccctcttacaactgcaacaattgctgccattcaaccaacttgctttgacaaactcaacgtgttctacca

SEQ ID NO: 68784 - DNA, 261 bp, Zea mays
caaaacatcaaggcacaacaactacaacaacttgtgctaggaaaccttgctgcctactctcagcaacagcagtttcttccattcaaccaactggctgcattgaactctgctgcttatttgcaacaacaactaccattcagtcagctagctgctgcctacccccagcaatttcttccattcaaccaactggcagcattgaactctgctgcttatttacaacagcaacagctaccaccattcagccagctagctatgtgagcc

SEQ ID NO: 68785 - DNA, 263 bp, Zea mays
attgcaaccaaactggacaaatgttagctggattgctcaagtggccacaaggaacctttgcctccaaggttacattggacacagaaaaacaaaaagctactgttgagcgagaagttgatggtggaattgaaaccatctgccttgatctgccagcagtgatcaccacggatttaagacttaaccagccaagatatgcaactttgcccaacataatgaaggcaaaatccaaagttattaagaaagtcgccgctgaagacttggcg

SEQ ID NO: 68786 - DNA, 227 bp, Zea mays
cacagcccggtccccgatctccgatcccctcgtcgatccaagatgcagatcttcgtcaagaccctcactggaaagactatcaccctcgaggtggagtcttctgacaccattgacaacgtcaaggccaagatccaggacaaggagggcatcccccggaccagcagcggctcatcttcgctggcaagcagctcgaggacgggcgcacacttgccgactacaacatccag

SEQ ID NO: 68787 - DNA, 228 bp, Zea mays
tgagcattcagaaacacacctagcgaagcgcactagcaacgacctaacaacaatggctaccaagatattatccctctttgcgcttcttgccctttttgtgagcgcaacaaatgcgttcattattccacaatgctcacttgctcctagtgcattattccacagttcctccctccagttacttcaatgggcttcgaacacccagctgtgcaagcctacaggctacaacaa

SEQ ID NO: 68788 - DNA, 227 bp, Zea mays
tgaccaactagcaacatagaaagcacaatagtgtaccaacaatggcagccaaaatattttgcttccttatgctccttggtctttctgcaagtgctgctaccgcaaccattttcccacaatgctcacaagctcctatagcttcctttctcccccatacctctcaccagcggtgtcttcagtatgtgaaaacccaattcttcaaccctacaggatccaacaggcaatcg

SEQ ID NO: 68789 - DNA, 88 bp, Zea mays
ttgagaccaacaagcaacatagaaagtggaatacagtagcaaaaatagagcaacaatggcggccaagatattttccatccttatgctc

SEQ ID NO: 68790 - DNA, 225 bp, Zea mays
gtttcttcagagagtgcagcggagcattttgcactctgacattcaatcgaaggcagacaagactcctgttacagttgcggattatggatcacaggtactggtatgtctggtcctgaagaaggaattgccttctcactctttctcaatatagctgaagaggattcaaaagacttgagagaagatggtgcccaagaaattatagaacacattaccaccctcattaat

SEQ ID NO: 68791 - DNA, 95 bp, Zea mays
caacaagcaacatagaaagtggaatccagtagcaacaatagagcaacaatggcgaccaagatactttccctccttatgctccttgctctttctgc

SEQ ID NO: 68792 - DNA, 221 bp, Zea mays
tattattgagaccaactagcaacatagaaagcacaatagtgtaccaacaatggcagccaaaatattttgcctccttatgctccttggtctttctgcaagtgctgctacggcgaccattttcccgcaatgctcgcaagctcctatgcttcccttcttcccccgtacctctcaccagcggtgtcttcggtatgtgaaaacccaattcttcaaccctacaggat

SEQ ID NO: 68793 - DNA, 183 bp, Zea mays
gcaacatagaaagcacaatagtgtaccaacaatggcagccaaaatattttgcctccttatgctccttggtctttctgcaagtgctgctacggcgaccattttcccgcaatgctcgcaagctcctatagcttcccttcttcccccgacctctcaccagcggtgtcttcggtatgtgaaaaccca

SEQ ID NO: 68794 - DNA, 221 bp, Zea mays
ccaacaagcaacatagaaagtggaatccagtagcaacaacagagcaacaatggcgaccaagatattttccctccttatgctccttgctctttctgcatgtgttgctaacgcgacaattttccctcaatgctcacaagctcctatgcttcccttcttcccccataccttccatcaatgatagcttcagtatgtgaaaacccagctcttcagccctataggct

SEQ ID NO: 68795 - DNA, 223 bp, Zea mays
  unsure (1)..(223): unsure at all n locations
attttgagcattcagaaacacaccaagcgaagcacattagcaacaacctaacaacaatggctaccaagatattatccctccttgcgcttcttgcgctttttgcgagcgcaacaaatgcgttcattattccacaatgctcacttgcccaagttccattattacacagttcctcccaccagttacttcaattgngttcgaacacccagctgtgcaagcctatagg

SEQ ID NO: 68796 - DNA, 213 bp, Zea mays
attttcagcattcaaaaacacaccaagcgaacgcactagcaacgacctaacaccaatggctaccaagatattagccctccttgcgcttcttgcccttttagtgagcgcaacaaatgcgttcattattccacagtgctcactgctcctagtgccagtattccacagttcctcccaccagttacttcaatgggcttcgaacatccagccgtgcaa

SEQ ID NO: 68797 - DNA, 217 bp, Zea mays
ttcgaagcctataggctacaacaagcgcttgcggcgagcgtcttagaacaaccaattgcccaattacaacaacaatccttagcacatctaaccatacaaaccatcgcaacgcagcagcaacaagcactgagccacctagcctggtgaaccctatcgcctacttgcaacaacagctgcttgcatccaacccacttgctttggcaaacgtagctgcata

SEQ ID NO: 68798 - DNA, 218 bp, Zea mays
cagcattcaaaaacacaccaagcgaacgcactagcaacgacctaacaccaatggctaccaagatattagccctccttgcgcttcttgcccttttagtgagcgcaacaaatgcgttcattattccacagtgctcacttgctctagtgccagtattccacagttcctcccaccagttacttcaatgggcttcgaacatccagccgtgcaagcctacaggc

SEQ ID NO: 68799 - DNA, 220 bp, Zea mays
ctagcaacatagaaagcacaatagtgtaccaacaatggcagccacaatattttgcttccttatgctccttggtctttctgcaagtgttgctaccgcaaccattttcccacaatgctcacaagctcctatagcttcccttcttccccatacctctcaccagcggtgtcttcaatgtgtgaaaccccaattgttcaaccctacaggatccaacaggcaatcg

SEQ ID NO: 68800 - DNA, 95 bp, Zea mays
ccttgctttcacgcttggagtgaagcagatgatttgctgttgcaacaagatggatgccaccacacccaagtactccaaggcccgttatgatgaga

SEQ ID NO: 68801 - DNA, 221 bp, Zea mays
ctttcgtcaactccacttctcttctccgcgtcacctcctcttcgccgccgccgacgcttcacccggcagccagccatggatgaggagtacgacgtgatcgtactaggcacggggctcaaggagtgcatcctcagcggtctccctctgtagacggcctcaaggttttgcatatggacagaaatgactactatggaggagattccacctcactcaaccttaat

SEQ ID NO: 68802 - DNA, 222 bp, Zea mays
  unsure (1)..(222): unsure at all n locations
acggaaaccgacaagagactcactgccttccatcctgaaatcgaggagctcatcaacagcgacgtcgagaactccgagcacaagttcgtgctgaaggacaagaagaagccgatcatcttctcgatggcgcgtctcgaccgcgtgaagaacatgacaggcctggtggagatgtacggcaagancgcgcgcntgagggagntggcgaacntcgtgatcgtcgcg

SEQ ID NO: 68803 - DNA, 219 bp, Zea mays
gatcagcagagcggcagtgcgtagagaggatcgtcgaacagaacagcatgaagatggtcatcgttctcgtcgtgtgcctggctctgtcagctgccagcgcctctgcaatgcagatgccctgcccctgcgcggggctgcagggttgtacggcgctggcgccagcctgacgacgatgatgggcgccggcgggctgtacccctacgcggagtacctgaggca

SEQ ID NO: 68804 - DNA, 94 bp, Zea mays
cagaaacacaccaagcgaagcgcactagcaacgacctaacaacaatggctaccaagatattagccctccttgcgcttcttgccctttttgtgag

SEQ ID NO: 68805 - DNA, 94 bp, Zea mays
aagatattagccctccttgcgcttcttgcccttttagtgagcgcaacaaatgcgttcattattccacagtgctcacttgctcctagtgccagta

SEQ ID NO: 68806 - DNA, 90 bp, Zea mays
cagaaacacacctagcgaaggcactagcaacgacctaacaacaatggctaccaagatattatccctctttgcgcttcttgccctttttgt

SEQ ID NO: 68807 - DNA, 211 bp, Zea mays
attttgagcattcagaaacacacctagcgaacgcactagcaacgacctaacaacaatggcttccaagacattatccctccttgcgcttcttgccctttttgtgagtgcaacaaatgcgttcattattccacaatgctccttgctccgagtgccattattccacagttcctccctccagttacttcaatgggcttcgaacacccagctgtgc

SEQ ID NO: 68808 - DNA, 62 bp, Zea mays
aacacaccaagcgaaggcactagcaacgacctaacaccaatggctaccaagatattagccct

SEQ ID NO: 68809 - DNA, 214 bp, Zea mays
ccttgcgcttcttgccctttttgtgagtgcaacaaatgcgttcattattccacaatgctcacttgctccgagtgccattattccacagttcctccctccagttacttcaatgggcttcgaacacccagctgtgcaagcctataggctacaacaagcgcttgcggcgagcgtcttagaacaaccaattgcccaattacaacaacaatccttggca

SEQ ID NO: 68810 - DNA, 217 bp, Zea mays
caaaaacacaccaagcgaaggcactagcaacgacctaacaccaatggctaccaagatattagccctccttgcgcttcttgcccttttagtgagcgcaacaaatgcgttcattattccacagtgctcacttgctcctagtccagtattccacagttcctcccaccagttacttcaatgggcttcgaacatccagccgtgcaagcctacaggctacaat

SEQ ID NO: 68811 - DNA, 51 bp, Zea mays
caactagcaacatagaaagcacaatagtgtaccaacaatggcagccaaaat

SEQ ID NO: 68812 - DNA, 221 bp, Zea mays
gcaacatagaaagcacaatagtgtaccaacaatggcagccaaaatattttgcttccttatgctccttggtctttctgcaagtgttgctaccgcaaccattttcccacaatgctcacaagctcctatagcttcccttcttccccatacctctcaccagcggtgtcttcaatgtgtgaaaacccaattgttcaaccctacaggatccaacaggcaatcgcaac

SEQ ID NO: 68813 - DNA, 219 bp, Zea mays
caacatagaaagcacaatagtgtaccaacaatggcagccaaaatattttgcctccttatgctccttggtctttctgcaagtgctgctacggcgaccattttcccacaatgctcacaagctcctatagcttcccttcttccccgtacctctcaccagcggtgtcttcggtatgtgaaaacccaattcttcaaccctataggatccaacaggcaatcgcag

SEQ ID NO: 68814 - DNA, 218 bp, Zea mays
attttcagcattcaaaaacacaccaagcgaacgtcactagcaacgacctaacaccaatggctaccaagatattagccctccttgcgcttcttgcccttttagtgagcgcaacaaatgcgttcattattccacagtgctcattgctcctagtgccagtattccacagttcctcccaccagttacttcaatgggcttcgaacatccagccgtgcaagcct

SEQ ID NO: 68815 - DNA, 92 bp, Zea mays
cgcacatatctactatactatactctaggaagcaaggacaccaccgccatggcagccaagatgcttgcattgttcgctctcctagctctttg

SEQ ID NO: 68816 - DNA, 80 bp, Zea mays
gtaatctaaaagatggcaccaccaacgatgggttgctgccacgacaaggcagggttcatcaaagagaactggttgtatgg

SEQ ID NO: 68817 - DNA, 212 bp, Zea mays
tcagaaacacacctagcgaacgtcactagcaacgacctaacaacaatggctaccaagatattatccctctttgcgcttcttgccctttttgtgagcgcaacaaatgcgttcattattccacaatgctcacttgctctagtgccattattccacagttcctccctccagttacttcaatgggcttcgaacacccagctgtgcaagcctacagg

SEQ ID NO: 68818 - DNA, 195 bp, Zea mays
ctagcaacatagaaagcacaatagtgtaccaacaatggcagccaagatattttgcctccttatgctccttggtctttctgcaagtgctgctacggcgaccattttcccgcaatgctcgcaagctcctatagcttccttcttcccccgtacctctcaccagcggtgtcttcggtatgtgaaaacccaattcttcaa

SEQ ID NO: 68819 - DNA, 212 bp, Zea mays
cggctcgagcggctcgagcgagttgcaaaccatggacatggctttggcgtctaaagcctcccctccgccatggaatgccaccgccgccgagcagccaattccaaagcgtgacaaagccgctgcaaatgattcaacaacctcaatcctcaagctcatgatagtgttcttggaatcattctgggaggtggtgctgggactagattgtacccctt

SEQ ID NO: 68820 - DNA, 214 bp, Zea mays
gtgagcgcaacaaatgcgttcattattccacagtgctcacttgctcctagtgccagtattccacagttcctcccaccagttacttcaatgggcttcgaacatccagccgtgcaagcctacaggctacaactagcgctgcggcgagcgccttacaacaaccaattgcccaattgcaacaacaatccttggcacatctaaccctacaaaccattgc

SEQ ID NO: 68821 - DNA, 214 bp, Zea mays
gcgcttcgctctcacgctcgcgtcaccggagctctccagaaccgaaccccaactgcccaagggcgagcgatccgaacccctcggcggcttcgtcaacgacgccgagaacactttgaggaatggctgaagaggatgtcagccccttgtgtgtgacaatggcactggaatggtcaaggcgggtttcgctggtgacgacgcaccgagagctgtcttt

SEQ ID NO: 68822 - DNA, 122 bp, Zea mays
gcaacatagaaagcacaatagtgtaccaacaatggcagccaaaatattttgcttccttatgctccttggtctttctgcaagtgctgctaccgcaaccattttcccacaatgctcacaagctc

SEQ ID NO: 68823 - DNA, 70 bp, Zea mays
  unsure (1)..(70): unsure at all n locations
gccaagagcggggaccgcttncgcctacgactccttcngccgcttcctcgacatgttcggcaacntcgtg

SEQ ID NO: 68824 - DNA, 59 bp, Zea mays
agaccattagctttatctagtccagagcgcagaagaacgcgatcgacaccatgagggtg

SEQ ID NO: 68825 - DNA, 220 bp, Zea mays
acggaaaccgacaagagactcactgccttccatcctgaaatcgaggagctcatcaacagcgacgtcgagaactccgagcacaagttcgtgctgaaggacaagaagaagccgatcatcttctcgatggcgcgtctcgaccgcggaagaacatgacaggcctggtggagatgtacggcaagaacgcgcgcctgagggagctggcgaacctcgtgatcgtcgc

SEQ ID NO: 68826 - DNA, 209 bp, Zea mays
cctactctcagcaacagcagtttcttccattcaaccaactagctgcattgaactctgcttcttatttgcaacaacaacaactaccattcagccagctacctgctgcctacccccagcaatttcttccattcaacaactggcagcattgaactctcctgcttatttacagcagcaacaactactaccattcagccagctagctggtgtga

SEQ ID NO: 68827 - DNA, 210 bp, Zea mays
ctcgagccgattcggctcgaggtcagcctagcaattagctcatcgactccagattggagaactcgacaccatgaaggtgctgatcgttgcccttgctctcctggcgctcgctgcgagcgccgcctccagtacaacggcggctgtggctgccagacaccaccgtttcatctaccgcctccgttctatatgccgcctccgttctatctgccg

SEQ ID NO: 68828 - DNA, 205 bp, Zea mays
gttggttgaatggaagaaattgtctatactgaaccctgctgcttatttgcagcaacaacaactactaccattcagccagctagctactgcctactctcagcagcaacaatttcttccatttaaccaattggccgcctgaacccctctgcttatttccagcagcaaatactactaccatttggccagctagctgcaacaagccccg

SEQ ID NO: 68829 - DNA, 110 bp, Zea mays
tagaccaactagcaacatagaaagcacaatagtgtaccaacaatggcaaccaaaatattttgcttccttatgctccttggtctttctgcaagtgctgctaccgcgaccat

SEQ ID NO: 68830 - DNA, 194 bp, Zea mays
cacatagaaagcacaatagtgtaccaacaatggcagccaaaatattttgcctccttatgctccttggtatttctgcaagtgctgctacggcgaccattttcccgcaatgctcacaagctcctatagcttcccttctcccccgtacctctcaccagcggtgtcttcggtatgtgaaaacccaattcttcaaccct

SEQ ID NO: 68831 - DNA, 204 bp, Zea mays
  unsure (1)..(204): unsure at all n locations
attttgagcattcagaaacacaccaagcgaacntacctagcaacgacttaacaacaatggctaccaagatattagccctccttgcgcttcttgccctttttgtgagcgcaacaaatgcgttcattattccaaatgctcacttgctcctagtgccattataccacagttcctccgaccagttacttcaatgggcttcgaacacct

SEQ ID NO: 68832 - DNA, 208 bp, Zea mays
ggaagagcaaaccgggcctccatcgatttggagcagatggatttattgggaaatcacaacgaatggaggctcgtgatggtgttgaaccccgattcattgacgtttacatggagggacaccgaggtccagatcagatcatcctgaagttttatgtgatgacagcgcgacagaaaagctgactcgttatgccgaggaggttaggaggaaa

SEQ ID NO: 68833 - DNA, 209 bp, Zea mays
  unsure (1)..(209): unsure at all n locations
gtcttgacaaagatgctcagtcagtgcgtatgtttgttgctgatggtggtgaacttctcatggctcagagctacgctaagaacatgggattgtatggagagcgtgttggcgctttgagcattgtatgtaaaatgccgatgtagctgttagggttgaaagtcaactcaaacttgtcatcnggcctatgtatttcaaaccctcctctnnag

SEQ ID NO: 68834 - DNA, 186 bp, Zea mays
ggacgtcgtgttcgtctgcaacgactggcacaccggccctctctcgtgctacctcaagagcaactaccagtcccacggcatctacagggacgcaaagaccgctttctgcatccacaacatctcctaccagggccggttcgccttctccgactacccggagctgaacctcccggagagattcaagtc

SEQ ID NO: 68835 - DNA, 276 bp, Zea mays
tgagaccaactagcaacatagaaagcacaatagtgtacaacaatggcagccaaaatattttgcctccttatgctccttggtctttctgcaagtgctgctacggcgaccattttcccgcaatgctcgcaagctcctatagcttcccttcttcccccgtacctctcaccagcggtgtcttcggtatgtgaaaacccaattcttcaaccctacaggatccaacaggcaatcacagctggcatcttacctttatcacccttgttcctccaacaatcatcg

SEQ ID NO: 68836 - DNA, 279 bp, Zea mays
attttgagcattcagaaacacaccaagcgaagcacattagcaacaacctaacaacaatggctaccaagatattatccctccttgcgcttcttgcgctttttgcgagcgcaacaaatgcgttcattattccacaatgctcacttgctccaagttccattattacacagttcctcccaccagttacttcaatgggcttcgaacacccagctgtgcaagcctataggctacaacaagcaattgcggcgagcgtcttacaacaaccaatttcccagttgcaac

SEQ ID NO: 68837 - DNA, 277 bp, Zea mays
attttgagcattcagaaacacaccaagcgaagacattagcaacaacctaacaacaatggctaccaagatattatccctccttgcgcttcttgcgctttttgcgagcgcaacaaatgcgttcattattccacaatgctcacttgctccaagttccattattacacagttcctcccaccagttacttcaatgggcttcgaacacccagctgtgcaagcctataggctacaacaagcaattgcggcgagcgtcttacaacaaccaatttcccagttgcaa

SEQ ID NO: 68838 - DNA, 279 bp, Zea mays
tggcagccaaaatattttgcctccttatgctccttggttttctgcaagtgctgctacggcgaccattttcccgcaatgctcgcaagctcctatagcttcccttcttcccccgtacctctcaccagcggtgtcttcggtatgtgaaaacccaattcttcaaccctacaggatccaacaggcaatcacagctggcatcttacctttatcacccttgttcctccaacaatcatcagccctattacatcagttacctttggtgcatttattggcacaaaacac

SEQ ID NO: 68839 - DNA, 274 bp, Zea mays
tagcaacatagaaagcacaatagtgtaccaacaatggcaccaaaatattttgcctccttatgctccttggtatttctgcaagtgctgctacggcgaccattttcccgcaatgctcacaagctcctatagcttcccttcttcccccgtacctctcaccagcggtgtcttcggtatgtgaaaacccaattcttcaaccctacaggatccaacaggcaatcgcagctggcatcttacctttatcacccttgtccctccaacaatcatcagcctatta

SEQ ID NO: 68840 - DNA, 274 bp, Zea mays
attttgagcattcagaaacacaccaagcgaacacattagcaacaacctaacaacaatggctaccaagatattatccctccttgcgcttcttgcgctttttgcgagcgcaacaaatgcgttcattattccacaatgctcacttgctccaagttccattattacacagttcctcccaccagttacttcaatgggcttcgaacacccagctgtgcaagcctataggctacaacaagcaattgcggcgagcgtctaacaacaaccaatttcccagttg

SEQ ID NO: 68841 - DNA, 270 bp, Zea mays
agggaattctgacatatacagaattgttaagatgatatggagcgcaagtttcaaccagtcataattttcagctttagtagaagagaatgtgagcatcatgccatgtctatgtcaaaacttgacttcagcactgaagaagaaaaggaatgcattgagcaggttttctgtaatgccattggttgtttagtggaggaagacagaagtttacctgctatagagttgatgttgccactccttaaacgaggtattgcagtacaccattctggacta

SEQ ID NO: 68842 - DNA, 275 bp, Zea mays
atttagaccaactagcaacatagaaagcacaatagtgtaccaacaatggcagccaaaatattttgcctccttatgctccttggtatttctgcaagtgctgctacggcgaccattttcccgcaatgctcacaagctcctatagcttcccttcttcccccgtacctctcaccagcggtgtcttcggtatgtgaaaacccaattcttcaaccctacaggatccaacaggcaatcgcagctggcatcttacctttatcacccttgttcctccaacaatc

SEQ ID NO: 68843 - DNA, 241 bp, Zea mays
attgagaccaactagcaacatagaaagcacaatagtgtaccaacaatggcagccaaaatattttgcttccttatgctccttggtctttctgcaagtgctgctaccgcaaccattttcccacaatgctcacaagctcctatagcttcctttcttcccccatacctctcaccagcggtgtcttcagtatgtgaaaacccaattcttcaaccctacaggatccaacaggcaatcgcagcaggca

SEQ ID NO: 68844 - DNA, 276 bp, Zea mays
  unsure (1)..(276): unsure at all n locations
caactaccaacatacatagtgaagtacactagcaacacttagcaccaatggcagccaagatttttgcgctccttgccctccttgctctttcagcaagtgttgctaccgcgactattattccacaatgctcacaacaatacctctctccagtgatagccgcgagatttgaatacccatctatacaatcctacaggctacaagaggccatcacagncagcatcttacggtcgttagcattgaccgtccaacaaccatatgccctattgcaacaaccat

SEQ ID NO: 68845 - DNA, 230 bp, Zea mays
ataccaactagcaacatacatagtgaagtacactagcaacatcttagcaccaatgggagccaagatttttgccctccttgccctccttgctctttcagcaagcgctgctacctcgacttttattccacaatgctcacaacaatacctctctccggtgacagccgcgggatttcaatacccaactatacaatcctacatggtacaagaggccatcaaagcaagcatcttac

SEQ ID NO: 68846 - DNA, 226 bp, Zea mays
gagcattcagaaacacacctagcgaacgtcactagcaacgacctaacaacaatggcttccaagacattatccctccttgcgcttcttgccctttttgtgagtgcaacaaatgcgttcattattccacaatgctcacttgctccgagtgccattattccacagttcctccctccagttacttcaatgggctttcgaacaccagctgtgcaagcctataggctacaca

SEQ ID NO: 68847 - DNA, 277 bp, Zea mays
ctcgagccgttggcacaaaacatcaaggcacaacaatacaacaacttgtgctaggaaaccttgctgcctactctcagcaacagcagtttcttccattcaaccaactggctgcattgaactctgctgcttatttgcaacaacaactaccattcagtcagctagctgctgcctacccccagcaatttcttccattcaaccaactggcagcattgaactctgctgcttatttacaacagcaacagctaccaccattcagccagctagctgatgtgagccg

SEQ ID NO: 68848 - DNA, 282 bp, Zea mays
caactagcaacatagaaagcacaatagtgtaccaacaatggcagccaaaatattttgcctccttatgctccttggtctttctgcaagtgctgctacggcgaccattttcccacaatgctcacaagctcctatagcttcccttcttcccccgtacctctcaccagcggtgtcttcggtatgtgaaaacccaattcttcaaccctataggatccaacaggcaatcgcagctggcatcttacctttatcacccttgttcctccaacaatcatcagccctattaca

SEQ ID NO: 68849 - DNA, 273 bp, Zea mays
ataccaactagcaacatacatagtgaagtacactagcaacatcttagcaccaatgggagccaagatttttgccctccttgccctccttgctctttcagcaagcgctgctacctcgacttttattccacaatgctcacaacaatacctctctccggtgacagccgcgggatttcaatacccaactatacaatcctacatggtacaagaggccatccaagcaagcatcttacggtcattagcattaaccctccaacaaccatatgctctattgca

SEQ ID NO: 68850 - DNA, 270 bp, Zea mays
atagacagcacaatagtgtaccaacaatggcaccaaaatattttgcctccttatgctccttggtctttctgcaagtgctgctacggcgaccattttcccgcaatgctcgcaagctcctatagcttcccttcttcccccgtacctctcaccagcggtgtcttcggtatgtgaaaacccaattcttcaaccctacaggatccaacaggcaatcgcagctggcatcttacctttatcacccttgttcctccaacaatcatcagccctattaca

SEQ ID NO: 68851 - DNA, 273 bp, Zea mays
gccgcgcggtaagctcacccgcaacttcaagcactcaacctcgacttccagctgcaggacggcggtcgcaagctcaaggtcgacgcctggtttggcacccgccgaaccatggccgccatccgcaccgccatctcccacgtccagaacctcatcgcaggcgtcaccaagggtttccgctacaagatgcggttcgtctacgctcactttcccatcaacgcctccatcaccaacgccaactccgccattgagatcagaaacttcctcggggagaaa

SEQ ID NO: 68852 - DNA, 100 bp, Zea mays
caacaaatgcgttcattattccacagtgctcactgcacctagtgccagtattccacagttcctcccaccagttacttcaatgggcttcgaacatccagcc

SEQ ID NO: 68853 - DNA, 275 bp, Zea mays
agaccaactagcaacatagaaagcacaatagtgtaccaacaatggcagccaaaatattttgcctccttatgctccttggtatttctgcaagtgctgctacggcgaccattttcccgcaatgctcacaagctcctatagcttcccttcttcccccgtacctctcaccagcggtgtcttcggtatgtgaaaacccaattcttcaaccctacaggatccaacaggcaatcgcagctggcatcttacctttatcacccttgttcctccaacaatcatca

SEQ ID NO: 68854 - DNA, 273 bp, Zea mays
ccctcctccccctgaagtcccgaagctcgcggaagcgccgagatgtaccatcccacgagaggcggcgtccgcggcggcagagatcaattcaaatgggacgatgtgaaggttgacaagcatcgggagaattaccttggtcatagtgttaaggctccggttggtagatggcagaaaggaaaggatctttactggtatactcgggataagaaatccgacacggaagatgctcttaaggaagaaatcaggagagtgaaggaagaggaggaacaggct

SEQ ID NO: 68855 - DNA, 270 bp, Zea mays
caacaagcaacatagaaagtggaatccagtacaacaatagagcaacaatggcgaccaagatactttccctccttatgctccttgctctttctgcatgtgttgctaacgcgacaattttccctcaatgctcacaagctcctatagcttcccttcttcccccataccttccatcaatgatagcttcagtatgtgaaaacccagctcttcaaccctataggctccaacaagcaatcgcagcaagcaacatacctttatcacccttgtttcaac

SEQ ID NO: 68856 - DNA, 269 bp, Zea mays
atccaacccacttgctttggcaaacgtagctgcataccaacaacaacaacagttgcaacagtttctaccagcgctcagtcaactagccatggtgaaccctatcgcctacctacaacagcaacaacttctttcatctagcccgctcgctatgggcaatgcacctacatacctgcaacaacagttgttgcaacaacagttgctgcaacaaattgtaccagctcttactcagctagctgtggcaaaccctgctgcctacttgcaacaactac

SEQ ID NO: 68857 - DNA, 260 bp, Zea mays
ttcagaaacacacctagcgaacgcacctagcaccgacctaacaacaatggcttccaagacattatccctccttgcgcttcttgccctttttgtgagtgcaacaaatgcgttcattattccacaatgctcacttgctccgagtgccattattccacagttcctccctccagttacttcaatgggcttcgaacacccagctgtgcaagcctataggctacaacaagcgcttgcggcgagcgtcttagaacaaccaattgccc

SEQ ID NO: 68858 - DNA, 273 bp, Zea mays
cgcacccaaaaaggttatgattctatatgggtgatgtggatagattgaccaaagtagctcacttcattcatgttaagactacttgtaagtgatctcaattggctgagttatataaggcttggattgtgtctctatatggtgtaccgaagaagatcattttggatagaggatcacagtttacctcaagattttggaaaagttttaatgagaatagggatacaaagtggaattttagttcggcctaccatccacagactgatgggcagactgaga

SEQ ID NO: 68859 - DNA, 279 bp, Zea mays
caacaagcaacatagaaagtggaatccagtagcaaaacagagcaacaatggcgaccaagatattttccctccttatgctccttgctctatctgcatgtgttgctaacgcgacaattttccctcaatgctcacaagctcctatagcttcccttcttcccccataccttccatcaatgatagcttcagtatgtgaaaacccagctcttcagccctataggctccaacaagcaatcgcagcaagcaacatacctttatcacccttgttgtgtcaacaatcgc

SEQ ID NO: 68860 - DNA, 270 bp, Zea mays
gagaccagcaagcaacatagaaagtagaatcattagcaacaatagagcaacaatggcgaccaagatattttccctccttatgctccttgctctttctacatgtgttgctaacgcgacaattttccctcaatgctcacaagctcctatagcttcccttcttcccccataccttccatcaattatagcttcagtatgtgaaaacccagctcttcaaccatataggcttcaacaagcaatcgcagcaagcaacatacctttatcgcccttgtg

SEQ ID NO: 68861 - DNA, 266 bp, Zea mays
ttgagaccaactagcaacatagaaagcacatagtgtaccaacaatggcagccaaaatattttgcctccttatgctccttggtctttctgcaagtgctgctacggcgaccattttcccgcaatgctcgcaagctcctatagcttcccttcttcccccgtacctctcaccagcggtgtcttcggtatgtgaaaacccaattcttcaaccctacaggatccaacaggcaatcgcagctggcatcttacctttatcacccttgttcctcc

SEQ ID NO: 68862 - DNA, 272 bp, Zea mays
ctccaacagccatatgccctattgcaacaacatccttagtgcatctgtatctccaaagaatcgcgacacaacaactacaacaacagttgctaccaacaatcaatcaagtagttgcagcgaaccttgctgcttatctccagcaacaacaatttcttccattcaatcaactagctggggtgaaccctgctgtctacttgcaggcacaacaactactaccatttaaccaacttgtcgggagccctgatgccttcttactgcaacaacagcttctc

SEQ ID NO: 68863 - DNA, 273 bp, Zea mays
agcatgccaaaagacagttctttgaatatctgcaaggtgaggcagaatctggtttggagcggctacatcaatgtgcagagaaagaacttcaaatataccttgacgcagaatctccctcgaaagacttcaatgatttccgtacaaagttggctggattaactagtgtgactcgcaattattttgaaaatctcgtccgggctctggaaactggattaaatgatgtaggcccttccactagccatggcacatgcagcaaaagcgcaacttccaagg

SEQ ID NO: 68864 - DNA, 268 bp, Zea mays
aagtcgcattcatgaggcaggaataccactttatatgacatctgatgggaggatcagcatggccggtttgagcatgaggactgtgccccatcttgcagatgccatacacgctgcagttactcaactgaaatgaggatagtatcgcagctttcgtgaataaaacctgaatcacccacaacaatgttctaagtactcagccagtggtatttactggttgacctactgtagtttgcgtcggaatagatatgtttttttactcttcgtgggg

SEQ ID NO: 68865 - DNA, 170 bp, Zea mays
gccttccttgctccttgccgccgtcgagtcgtcgcaggaacgatgacccggcggaacggctgtacgatctacgtgggcaacctccccggcgacatccgcgagagggaagtggatgatctcttctacaagtatggacgtatagtggaaattgacttgaaaattccaccaag

SEQ ID NO: 68866 - DNA, 271 bp, Zea mays
cagcaacagactacaaggtgcagctataactactatagcagtagctcaaatctaaaaaattgtcatgaattcctaaggcagcagtgcagccctttggtaatgccttttctccaatcacgtttgatacaaccaagtagctgccaggtattgcagcaacaatgttgtcatgatcttaggcagattgagccacaatacattcaccaagcaatctacaacatggttcaatccataatccaggaggagcaacaacaacaaccatgtgagttatgtg

SEQ ID NO: 68867 - DNA, 276 bp, Zea mays
tagaaagcacaatagtgtaccaacaatggcagcaaaatattttgcctccttatgctccttggtatttctgcaagtgctgctacggcgaccattttcccgcaatgctcacaagctcctatagcttcccttcttcccccgtacctctcaccagcggtgtcttcggtatgtgaaaacccaattcttcaaccctacaggatccaacaggcaatcgcagctggcatcttacctttatcacccttgttcctccaacaatcatcagccctattacagcagtta

SEQ ID NO: 68868 - DNA, 269 bp, Zea mays
attttgagcattcagaaacacacctagcgaagcgcactagcaacgacctaacaacaatggctaccaagatattatccctctttgcgcttcttgccctttttgtgagcgcaacaaatgcgttcattattccacaatgctcacttgctcctagtgccattattccacagttcctccctccagttacttcaatgggcttcgaacacccagctgtgcaagcctacaggctacaacaagcgcttgcggcgagcgtcttacaacaaccaattgca

SEQ ID NO: 68869 - DNA, 266 bp, Zea mays
cagcattcaaaaacacaccaagcgaaggactagcaacgacctaacaccaatggctaccaagatattagccctccttgcgcttcttgcccttttagtgagcgcaacaaatgcgttcattattccacagtgctcacttgctcctagtgccagtattccacagttcctcccaccagttacttcaatgggcttcgaacatccagccgtgcaagcctacaggctacaactagcgcttgcggcgagcgccttacaacaaccaattgcccaat

SEQ ID NO: 68870 - DNA, 231 bp, Zea mays
ctcgagccgagaaacacaccaagcgatgcactagcaacgacctaacaacaatggctaccgagatattagccctccttgcgcttcttgccctttttgtgagcgcaacaaatgcgttcattattccacaatgctcacttgctcctagtgccattattccacagttcctcccaccagttacttcaatgggcttcgaacacctagctgtgcaagccaacatgcaacaacaagcgc

SEQ ID NO: 68871 - DNA, 265 bp, Zea mays
caccaagcgaacacattagcaacaactaacaacaatggctaccaagatattatccctccttgcgcttcttgcgctttttgcgagcgcaacaaatgcgttcattattccacaatgctcacttgctccaagttccattattacacagttcctcccaccagttacttcaatgggcttcgaacacccagctgtgcaagcctataggctacaacaagcaattgcggcgagcgtcttacaacaaccaatttcccagttgcaacaacaatct

SEQ ID NO: 68872 - DNA, 106 bp, Zea mays
gcaacatagaaagcacaatagtgtacaacaatggcagccaaaatattttgcctccttatgctccttggtctttctgcaagtgctgctacggcgaccattttcccgc

SEQ ID NO: 68873 - DNA, 269 bp, Zea mays
agaaagcacaatagtgtaccaacaatggcagccaaaatattttgcttccttatgctccttggtctttctgcaagtgctgctaccgcaaccattttcccacaatgctcacaagctcctatagcttcctttcttcccccatacctctcaccagcggtgtcttcagtatgtgaaaacccaattcttcaaccctacaggatccaacaggcaatcgcagcaggcatcttacctttatcacccttgttcctccaacaaccgtcagccctattaca

SEQ ID NO: 68874 - DNA, 273 bp, Zea mays
ctcgagccgattcggctcgagcatagaaacacaatagtgtaccagcaatggcagccaaaatcattttgcttccttatgctcactggtctttctgcaagtgttgctaccgcaaccattttcccacaatgctcacaagctcctatagcttcccttcttcccccatacctctcaccagcggtgtcttcaatgtgtgaaaacccaattgttcaacgctacaggatccaacaggcaatcgcaacaggcatcttaccattatcacccttgttcctccaa

SEQ ID NO: 68875 - DNA, 237 bp, Zea mays
cattgagacaactagcaacatagaaagcacaatagtgtaccaacaatggcagccaaaatattatgcttccttatgctccttggtctttctgcaagtggtgctaccgcaacaattttcccacaatgctcaaaagctcctatagcttccctcttccccatactctcacagcgagatcttcatgtgtgaaccccattgttcacctacagatccacagcatcgcacagctctaccatatca

SEQ ID NO: 68876 - DNA, 61 bp, Zea mays
tagcaacatagaaagcacaatagtgtaccaacaatggcagccaaaatattttgcctcctta

SEQ ID NO: 68877 - DNA, 265 bp, Zea mays
aattttcagcattcaaaaacacacaagcgaacctactagctacgacctaacaccaatggctaccaagatattagccctccttgcgcttcttgcccttttagtgagcgctacaaatgcgtgcattattccacagtgctcacttgctcctagtgccagtattccacagatcctgcccaccagttacttcaatgggcttcgaacatccagccgtgcaagcctacaggctacaactagcgcttgcggcgagcgccttacaacaaccaat

SEQ ID NO: 68878 - DNA, 262 bp, Zea mays
gatctgtacaggtattagcggctacacaaatgcctgaagagccagctggatggttccagggtacagcagactctatcagaaaatttatctgggtactcgaggattattacagtcacaaatccattgacaacattgtaatcttgagtggcgatcagctttatcggatgaattacatggaacttgtgcagaaacatgtcgaggacgatgctgatatcactatatcatgtgctcctgttgatgagagccgagcttctacaaatgg

SEQ ID NO: 68879 - DNA, 104 bp, Zea mays
aaagcacaatagtgtaccaacaatggcagccaaaatattttgcctccttatgctccttggtctttctgcaagtgctgctacggcgaccattttcccacaatgct

SEQ ID NO: 68880 - DNA, 200 bp, Zea mays
gtcaacggcatggacgtcagcgagtgggacccagcagggagcagtacattcccgccaaatacgacgtgtcgacggccgtggaggccaaggcgcagaacaaggaggcgctgcaggcggaactactggctcccggtggaccggaacatcccgctggtggcgttcatcggcaggctggaagagcagaagggccccgacgtcat

SEQ ID NO: 68881 - DNA, 104 bp, Zea mays
ctctcaccagcggtgtcttcggtatgtgaaaacccaattctacgaccctacaggatccaacaggcaatcacagctggcatcttacctttatcacccttgttcct

SEQ ID NO: 68882 - DNA, 109 bp, Zea mays
tgggtcttcagaccattagctttatcgactccagagcgcagaagaatccgatcgacaccatgagggtgttgctcgttgccctcgctctcctggctctcgctgcgagcgc

SEQ ID NO: 68883 - DNA, 260 bp, Zea mays
cgaactagcaacatacatagtgaagtacactagcaacatcttagcaccaatggcagccaagatttttgccatccttgccctccttgctctttcagcaagcgttgctaccgcgactattattccacaatgctcacaacaatacctctctccggtgacagccgcgagatttgaatacccaactatacaatcctacaggctacaagaggccatcgcagcaagcatcttacggtcgttagcattgaccgtccaacaaccatatg

SEQ ID NO: 68884 - DNA, 258 bp, Zea mays
gaccaactagcaacatagaaagcacaatagtgtaccaacaatggcagccaaaatattttgcctccttatgctccttggtctttctgcaagtgctgctacggcgaccattttcccgcaatgctcgcaagctcctatagcttcccttcttcccccgtacctctcaccagcggtgtcttcggtatgtgaaaacccaattcttcaaccctacaggatccaacaggcaatcacagctggcatcttacctttatcacccttgtt

SEQ ID NO: 68885 - DNA, 120 bp, Zea mays
tgaccaactagcaacatagaaagcacaatagtgtaccaacaatggcagccaaaatattttgcctccttatgctccttggtctttctgcaagtgctgctacggcgaccattttcccgcaat

SEQ ID NO: 68886 - DNA, 172 bp, Zea mays
attgagaccaacaagcaacatagaaagtggaatccagtagcaacaatagagcaacaatggcgaccaagatactttccctccttatgctccttgctctttctgcatgtgttgctaacgcgacaattttccctcaatgctcacaagctcctatagcttcccttcttcccccata

SEQ ID NO: 68887 - DNA, 119 bp, Zea mays
agaccaacaagcaacatagaaagtggaatccagtagcaacaacagagcaacaatggcgaccaagatattttccctccttaggctccttgctctttctgcatgtgttgctaacgcgacaa

SEQ ID NO: 68888 - DNA, 256 bp, Zea mays
ctcgagcgcgagtttctgaggcatcagtgcagcccgacggcgacgccctactgctcgactcagtgccagtcgttgcggcagcagtgttgccagcagctcaggcaggtggagccgcagcaccggtaccaggcgatcttcggcttggtcctccagtccatcctgcagcagcagccgcaaagcggccaggtcgcggggctgttggcggcgcagatagcgcacaactgacggcgatgtgcggcctgcagcagccgactcc

SEQ ID NO: 68889 - DNA, 148 bp, Zea mays
caacaagcaacatagaaagtggaatccagtagcaacaatagagcaacaatggcgaccaagatattttccctccttatgctccttgctctttctacatgtgttgctaacgcgacaattttccctcaatgctcacaagctcctatagctt

SEQ ID NO: 68890 - DNA, 100 bp, Zea mays
gagcattcagaaacacaccaagcgaagcgcactagcaacgacctaacaacaatggctaccaagatattagccctccttgcgcttcttgccctttttgtga

SEQ ID NO: 68891 - DNA, 254 bp, Zea mays
agcaactgttgctgtgtcaagaaggaagcacgacttgctgcctttctacaagcagtttgcggctaaccccgcaaccctcttacaactacaacaattgttgccctttgtccaacttgctttgacaaacccagcagcctcctaccaacaacacatcattggtggtgccctcttttagattgattattagttgtaattcaataataaagttttttggatgatgtatgtggccaaccagaaataagaagttacatttc

SEQ ID NO: 68892 - DNA, 106 bp, Zea mays
  unsure (1)..(106): unsure at all n locations
ggcgacgtcgagaactccgagcacaagtttcgtgctgaaggacaagaagaagccgatcatcttcctncgatggccgcgttctcgaccgcgtgaagaacatgacagg

SEQ ID NO: 68893 - DNA, 95 bp, Zea mays
aaacacacctagcgaaggcaactagcaacgacctaacaacaatggctaccaagatattatccctctttgcgcttcttgccctttttgtgagcgca

SEQ ID NO: 68894 - DNA, 100 bp, Zea mays
agcaacatagaaagcacaatagtgtaccaacaatggcagctaaaatattttgcctccttatgctccttggtctttctgcaagtgctgctacggcgaccat

SEQ ID NO: 68895 - DNA, 97 bp, Zea mays
tgagaccagcaagcaacatagaaagtagaatccattagcaacaatagagcaacaatggcgaccaagatattttccctccttatgctccttgctcttt

SEQ ID NO: 68896 - DNA, 100 bp, Zea mays
cccttcttcccccataccttccatcaattatagcttcaatatgtgaaaacccagctcttcaaccatataggcttcagcaagcaatcgcagcaagcaacat

SEQ ID NO: 68897 - DNA, 136 bp, Zea mays
ctcgagccgattcggctcgagattgagaccaactagcaacatagtaagcacaatagtgtaccaccaatggcagccaaaaccttttgcgtcctgatgctccttggtctttctgcaagtgctgctaccgcagccattt

SEQ ID NO: 68898 - DNA, 97 bp, Zea mays
actagctgcattgaactctgcttcttatttgcaacaacaacaactaccattcagccagctatctgctgcctacccccagcaatttcttccattcaac

SEQ ID NO: 68899 - DNA, 255 bp, Zea mays
ccagcaagcaacatagaaagtagaatccattagcaacaatagagcaacaatggcgaccaagatattttccctccttatgctccttgctctttctacatgtgttgctaacgcgacaattttccctcaatgctcacaagctcctatagcttcccttcttcccccataccttccatcaattatagcttcagtatgtgaaaacccagctcttcaaccatataggcttcaatcagcaatctcagcaagcaacataccttt

SEQ ID NO: 68900 - DNA, 255 bp, Zea mays
ctcgagccgtttcagcattcaaaaacacaccaagcgaagcgactagcaacgacctaacaccaatggctaccaagatattagccctccttgcgcttcttgcccttttagtgagcgcaacaaatgcgttcattattccacagtgctcacttgctcctagtgccattattccacagttcctcccactagttacttcaatgggcttcgaacatccagccgtgcaagcctacaggctacaactagcgcttgcggcgagcg

SEQ ID NO: 68901 - DNA, 253 bp, Zea mays
gcctcgggtcaaaccctaagcagggagttgatttatccgctgcagccatgagtaagttgcagtctgagtctgtcaaggatgccatctcccagattgttggggatgccaaggagaagaataggaagttcactgagactgtggaacttcagattggtctgaagaattatgatccacagaaggacaagcgtttcagtggctctgttaagttgccccatatccctcgtcccaagatgaaggtgtgcatgcttggtga

SEQ ID NO: 68902 - DNA, 125 bp, Zea mays
attttttccatcggaatgtctgaaactatgttgggtgtatcctagtggttggttgagcattaatggctcatattttgtcaggtctatgtgtcgccgtgaaacttttaatcaaatcagttcactct

SEQ ID NO: 68903 - DNA, 113 bp, Zea mays
caactagcaacatagaaagcacaatattgtaccaataatggcagccaaaatattttgcctcattatgctccttggtctttctgcaagtgctgctacggcgagcattttcccgc

SEQ ID NO: 68904 - DNA, 113 bp, Zea mays
ccaactagcaacatagaaagcacaatagtgtaccaacaatggcagccaaaatattgtgcctccttatgctccttggtctttctgcaagtgctgctacggcgaccattttcccg

SEQ ID NO: 68905 - DNA, 251 bp, Zea mays
cagaaacacacctagcgaacggactagcaacgacctaacaacaatggctaccaagatattatccctctttgcgcttcttgccctttttgtgagcgcaacaaatgcgttcattattccacaatgctcacttgctcctagtgccattattccacagttcctccctccagttacttcaatgggcttcgaacacccagctgtgcaagcctacaggctacaacaagcgcttgcggcgagcgtcttacaacaaccat

SEQ ID NO: 68906 - DNA, 109 bp, Zea mays
ctcgagccgattcggctcgagattgagaccaactagcaacatagaaagcacaatagtgtaccaacaatggcagccaaaatattttgcttccttatgctccttggtcttt

SEQ ID NO: 68907 - DNA, 249 bp, Zea mays
gcatttattggcacaaaacatcagggcacaacaactacaacaacttgtgctagcaaaccttgctgcctactctcagcaacagcagtttcttccattcaaccaactagctgcattgaactctgcttcttatttgcaacaacaacaactaccattcagccagctacctgctgcctacccccagcaatttcttccattcaaccaactggcagcattgaactctcctgcttatttacagcagcaacaactact

SEQ ID NO: 68908 - DNA, 94 bp, Zea mays
caacatacatagtgaagtacactagcaacatcttagcaccaatggcagccaagatttttgcgctccttgccctccttgctctttcagcaagtgt

SEQ ID NO: 68909 - DNA, 265 bp, Zea mays
taagcaacatagaaagtggaatccagtagcaacaatagagcaacaatggcgaccaagatactttccctccttatgctccttgctctttctgcatgtgttgctaacgcgacaattttccctcaatgctcacaagctcctatagcttcccttcttcccccataccttccatcaatgatagcttcagtatgtgaaaacccagctcttcaaccctataggctccaacaagcaatcgcagcaagcaacatacctttatcacccttgtttc

SEQ ID NO: 68910 - DNA, 95 bp, Zea mays
caacaagcaacatagaaagtggaatccagtagcaacaacagagcaacaatggcgaccaagatattttccctccttatgctccttgctctttctgc

SEQ ID NO: 68911 - DNA, 132 bp, Zea mays
  unsure (1)..(132): unsure at all n locations
attttgagcattcagaaacacacctagcgaaggcnactagcaacgacctaacaacaatggcttccaagacattatccctccttgcgcttcttgccctttttgtgagtgcaacaaatgcgttcattattccac

SEQ ID NO: 68912 - DNA, 195 bp, Zea mays
agcaagcaacatagaaagtagaatccattagcaacaatagagcaacaatggcgaccaagatattttccctccttatgctccttgctctttctacatgtgttgctaacgcgacaattttccctcaatgctcacaagctcctatagcttcccttcttcccccataccttccatcaattatagcttcagtatgtgaaa

SEQ ID NO: 68913 - DNA, 87 bp, Zea mays
aggtacgcgggctctgccccgatccgatgattcatgataacttgacggatcgcacggccttcgtgccggcgacgcatcattcaaatt

SEQ ID NO: 68914 - DNA, 250 bp, Zea mays
attttgagcattcagaaacacaccaagcgaagctacctagcaacgacttaacaacaatggctaccaagatattagccctccttgcgcttcttgccctttttgtgagcgcaacaaatgcgttcattattccacaatgctcacttgctcctagtgccattataccacagttcctccgaccagttacttcaatgggcttcgaacacctagctgtgcaagcctacaggctacaacaagcgcttgcggcgagcgt

SEQ ID NO: 68915 - DNA, 266 bp, Zea mays
atttagaccaactagcaacatagatagcacaatagtgtaccaacaatggcagccaaaatattttgcctccttatgctccttggtatttctgcaagtgctgctacggcgaccattttcccgcaatgctcacaagctcctatagcttcccttcttcccccgtacctctcaccagcggtgtcttcggtatgtgaaaacccaattcttcaaccctacaggatccaacaggcaatcgcagctggcatcttacctttatcacccttgttcct

SEQ ID NO: 68916 - DNA, 109 bp, Zea mays
ccacaacaagccagtgcaggaggtacttgctgagatgaccaacggaggggtcgaccgcagtgtggaatgcactggcaacattaatgctatgatccaagctttcgaatgt

SEQ ID NO: 68917 - DNA, 129 bp, Zea mays
gcaacaacagttcctaccagcactgagccaactagctgtggtgaaccctatcgcctacttgcaatagcagatgcttgcatccaacccacttgctctggcaaacgtagctacataccaacaacaacaatt

SEQ ID NO: 68918 - DNA, 152 bp, Zea mays
gagagaccaacaagcaacatagaaagtggaatccagtagcaacaacagagcaacaatggcgaccaagatattttccctccttatgctccttgctctttctgcatgtgttgctaacgcgacaattttccctcaatgctcacaagctcctatag

SEQ ID NO: 68919 - DNA, 246 bp, Zea mays
tagaaagcacaatagtgtaccaacaatggcagccaaaatattttgcctccttatgctccttggtatttctgcaagtgctgctacggcgaccattttcccgcaatgctcacaagctcctatagcttcccttcttcccccgtacctctcaccagcggtgtcttcggtatgtgaaaacccaattcttcaaccctacaggatccaacaggcaatcgcagctggcatcttacctttatcacccttgttcct

SEQ ID NO: 68920 - DNA, 247 bp, Zea mays
gaccaactagcaacatagaaagcacaatattgtaccaataatggccgccaaaatattttgcctcattatgctccttggtctttctgcaagtgctgctacggcgagcattttcccgcaatgctcactagctcctatagcttcccttcttcccccatacctctcaccagcgatgtcttcagtatgtgaaaatccaattcttctaccctacaggatccaacaggcaatcgtcgcaggcatcttaccttta

SEQ ID NO: 68921 - DNA, 245 bp, Zea mays
aatattttcagcattcaaaaacacaccaagcgaagcgcactagcaacgacctaacaccaatggctaccaagatattagccctccttgcgcttcttgcccttttagtgagcgcaacaaatgcgttcattattccacagtgctcacttgctcctagtgccagtattccacagttcctcccaccagttacttcaatgggcttcgaacatccagccgtgcaagcctacaggctacaactagcgcttgcg

SEQ ID NO: 68922 - DNA, 105 bp, Zea mays
gaaacacaccaagcgaagctacctagcaacgacttaacaacaatggctaccaagatattagccctccttgcgcttcttgccctttttgtgagcgcaacaaatgcg

SEQ ID NO: 68923 - DNA, 180 bp, Zea mays
ggtggcacaaaacatcagggcacaacaactacaacaacttgtgctagcaaaccttgctgcatactctcagcaacatcagtttcttccattcaaccaactggctgcattgaactctgctgcttatttgcaacaacaattaccattcagccagctagttgctgcctacccccagcaatttct

SEQ ID NO: 68924 - DNA, 294 bp, Zea mays
tcagcaagcaacatagaaagtagaatccattagcaacaatagagcaacaatggcgaccaagatattttccctccttatgctccttgctctttctacatgtgttgctaacgcgacaattttccctcaatgctcacaagctcctatagcttcccttcttcccccataccttccatcaattatagcttcagtatgtgaaaacccagctcttcaaccatataggcttcaacaagcaatcgcagcaagcaacatacctttatcgcccttattgtttcaacaatcaccgccctatctttg

SEQ ID NO: 68925 - DNA, 287 bp, Zea mays
cgtggaatactggcaataggagcaagtgagcacagttcctcccaccagttacttcaatgggcttcgaacatccagccgtgcaagcctacaggctacaactagcgcttgcggcgagcgccattcaacaaccaattgcccaattgcaacaacaatccttggcacatctaaccctacaaaccattgcaacgcaacaacaacaacaagacattctgccatcactgagccacctagccgtggtgaacctgtcacctattgcaacacagctgcttgcatccacccattgctct

SEQ ID NO: 68926 - DNA, 291 bp, Zea mays
attttgagcattcagaaacacaccaagcgaagacattagcaacaacctaacaacaatggctaccaagatattatccctccttgcgcttcttgcgctttttgcgagcgcaacaaatgcgttcattattccacaatgctcacttgctccaagttccattattacacagttcctcccaccagttacttcaatgggcttcgaacacccagctgtgcaagcctataggctacaacaagcaattgcggcgagcgtcttacaacaaccaatttcccagttgcaacaaaatccttggca

SEQ ID NO: 68927 - DNA, 291 bp, Zea mays
ttggtctccaagggtgttcgatatcacattagaatctggaaatgtaacttcttattcctggtcgtgcacatacatcatccaaaaaactttattattgaattacaactaataagcaatctaaaagagagcaccaccaatgatgtgttgttggtaggaggctgctgggtttgtcaaagcaagttggacaaagggcaacaattgttgtagttgttattcaataataaagttttttggatgatgtatgtggccaaccagaaataagaagttacatttccagatctaatgtgatat

SEQ ID NO: 68928 - DNA, 243 bp, Zea mays
gcaacatagaaagcacaatagtgtaccaacaatggcagccaaaatattttgcctccttatgctccttggtctttctgcaagtgctgctacggcgaccattttcccgcaatgctcgcaagctcctatagcttcccttcttcccccgtacctctcaccagcggtgtcttcggtatgtgaaaacccaattcttcaaccctacaggatccaacaggcaatcacagctggcatcttacctttatcacc

SEQ ID NO: 68929 - DNA, 174 bp, Zea mays
ctcgagccggagaccagcaagcaacatagaaagtagaatccattagcaacaatagagcaacaatggcgaccaagatattttccctccttatgctccttgctctttctacatgtgttgctaacgcgacaattttccctcaatgctcacaagctcctatagcttcccttcttcccc

SEQ ID NO: 68930 - DNA, 205 bp, Zea mays
attttgagcattcagaaacacaccaagcgaacacattagcaacaacctaacaacaatggctaccaagatattatccctccttgcgcttcttgcgctttttgcgagcgcaacaaatgcgttcattattccacaatgctcacttgctccaagttccattattacacagttcctcccaccagttacttcaatgggcttcgaacaccca

SEQ ID NO: 68931 - DNA, 253 bp, Zea mays
tagcaacatagaaagtggaatccagtagcaaaatagagcaacaatggcgaccaagatactttccctccttatgctccttgctctttctgcatgtgttgctaacgcgacaattttccctcaatgctcacaagctcctatagcttcccttcttcccccataccttccatcaatgatagcttcagtatgtgaaaacccagctcttcaaccctataggctccaacaagcaatcgcagcaagcaacatacctttatct

SEQ ID NO: 68932 - DNA, 292 bp, Zea mays
atagaaagtggaatccagtagcaacaacagagcacaatggcgaccaagatattttccctccttatgctccttgctctttctgcatgtgttgctaacgcgacaattttccctcaatgctcacaagctcctatagcttcccttcttcccccataccttccatcaatgatagcttcagtatgtgaaaacccagctcttcagccctataggctccaacaagcaatcgcagcaagcaacatacctttatcacccttgttgtttcaacaatcgccagccctatcttggtgcagtcatt

SEQ ID NO: 68933 - DNA, 135 bp, Zea mays
caagcaacatagaaagtggaatccagtagcaacaacagagcaacaatggcgaccaagatattttccctccttatgctccttgctctttctgcatgtgttgctaacgcgacaattttccctcaatgctcacaagct

SEQ ID NO: 68934 - DNA, 292 bp, Zea mays
taacaagcaacatagatagtggaatccagtagcaacaacagagcaacaatggcgaccaagatattttccctccttatgctccttgctctttctgcatgtgttgctaacgcgacaattttccctcaatgctcacaagctcctatagcttcccttcttcccccataccttccatcaatgatagcttcagtatgtgaaaacccagctcttcagccctataggctccaacaagcaatcgcagcaagcaacatacctttatcacccttgttgtttcaacaatcgcagccctatcttt

SEQ ID NO: 68935 - DNA, 292 bp, Zea mays
atcttgagcattcagaaacacacctagcgaaggcactagcaacgacctaacaacaatggctaccaagatattatccctctttgcgcttcttgccctttttgtgagcgcaacaaatgcgttcattattccacaatgctcacttgctcctagtgccattattccacagttcctccctccagttacttcaatgggcttcgaacacccagctgtgcaagcctacaggctacaacaagcgcttgcggcgagcgtcttacaacaaccaattgcccaattacaacaaaatccttggcac

SEQ ID NO: 68936 - DNA, 166 bp, Zea mays
tagtgtaccaacaatggcagccaaaatattttgcctccttatgctccttggtctttctgcaagtgctgctacggcgaccattttcccgcaatgctcgcaagctcctatagcttcccttcttcccccgtacctctcaccagcggtgtcttcggtatgtgaaaaccca

SEQ ID NO: 68937 - DNA, 287 bp, Zea mays
accacctagccatggtgaaccctgccgcctacttgcaagagcatctgcttgcatccaacccacttgctctggcgaacgatattgcaaaccagcaacaacaacagctacaacagtttctgccaacgctcagtcaactagccatggtgaaccctgccgcctacgtacaacaacaacaactgctttcatctagcccgctcgctgtgggcaatgcacctacatacctgcaacaacaattgttgcaacagattgtaccagctctgactcaactagctgtggcaaccctgttg

SEQ ID NO: 68938 - DNA, 133 bp, Zea mays
gtacttgcgtgtctggtgcaacggcggcttgacccaacaacgcagtgcaatatgtaatgctgttgtcgtagcacgaatcatgaatgctacactagtgctgccagagttagacacaaattcattttggcacgat

SEQ ID NO: 68939 - DNA, 135 bp, Zea mays
gggttatgactgtctcgttccacaagtttggtgattatttcccaggaacaggggatatccgtgacattgggcactcaaaagggaagtactactccctgaatgtccctctagatgatgggattgatgatgaaagct

SEQ ID NO: 68940 - DNA, 146 bp, Zea mays
gaccaactagcaacatagaaagcacaatagtgtaccaacaatggcagccaaaatattttgcttccttatgctccttggtctttctgcaagtgctgctaccgcaaccattttcccacaatgctcacaagctcctatagcttcctttc

SEQ ID NO: 68941 - DNA, 286 bp, Zea mays
attgagaccaactagcaacatagaaagcacaatagtgtaccaacaatggcagcgacaatattttgcctccttatgctccttggtctttctgcaagtgctgctacggcgaccattttcccacaatgctcacaagctcctatagcttcccttcttcccccgtacctctcaccagcggtgtcttcggtatgtgaaaacccaattcttcaaccctataggatccaacaggcaatcgcagctggcatcttacctttatcacccttgttcctccaacaatcacagccctatt

SEQ ID NO: 68942 - DNA, 246 bp, Zea mays
cagaaacacacctagcgaagcgcactagcaacgacctaacaacaatggctaccaagatattatccctctttgcgcttcttgccctttttgtgagcgcaacaaatgcgttcattattccacaatgctcacttgctcctagtgccattattccacagttcctccctccagttacttcaatgggcttcgaacacccagctgtgcaagcctacaggctacaacaagcgcttgcggcgagcgtcttacaac

SEQ ID NO: 68943 - DNA, 289 bp, Zea mays
gagagaaggtgtttgtgctgcctctttgccaactacaatgggtgttgttgcgggtctcctggtccagaattctctgaaatatttgttgaactttggacaagtttccccttacttgggatataactcacttaaggattattcccctgcaatggaaatgaggccaaatccacaatgctcgaatccagcatgtgttcacagacagaaagaatatatggaatccaaacctgctagagatgcagcagcgaagactaagatggaagctgaagcatccacagaaatgaatgtcctg

SEQ ID NO: 68944 - DNA, 291 bp, Zea mays
tctcgagccgaatcggctcgagtagaaagtagaatccattagccattatagagcaacaatgttgaccaagatattttcccaccttatgctccttgctctttctacatgtgttgctaacgcgacaattttccctcaatgctcacaagctcctatagcttcccttcttcccccataccttccatcaattatagcttcagtatgtgaaaacccagctcttcaaccatataggcttcaacaagcaatcgcagcaagcaacatacctttatcgcccttgttgttcaacaatcacca

SEQ ID NO: 68945 - DNA, 122 bp, Zea mays
ctcgctgaacgactacctcgctgtgaacgcgacgaagcacgcgatgtacctgccgcacaccgcggggcgttactccaagaagcggttgcgcaaggcgcagtgcccgatcgtcatgcgcctca

SEQ ID NO: 68946 - DNA, 280 bp, Zea mays
attatgaaatgtgatgtgatagcaagtggaattgttaatgctgccaaacaggttgacctgaaagttcctgttgttgttcggttggaaggcaccaatgtagaccaaggaaagaggattcttaaggaaagtggaatgactttgatcactgcagaagatcttgatgatgcggcagagaaagctgtaaaagcatccgtcaaataactagtgtatcaatctgaagtttctttttttttcactggtacaagatgagcagtgctcttttacggatttcgattggagc

SEQ ID NO: 68947 - DNA, 281 bp, Zea mays
tattcagaaacacaccaagcgaagacattagcaacaacctaacaacaatggctaccaagatattatccctccttgcgcttcttgcgctttttgcgagcgtaacaaatgcgttcattattccacaatgctcacttgctccaagttccattattacacagttcctcccaccagttacttcaatgggcttcgaacacccagctgtgcaagcctataggctacaacaagcaattgcggcgagcgtcttacaacaaccaatttcccagttgcacaacaatccttgg

SEQ ID NO: 68948 - DNA, 286 bp, Zea mays
gtgaccaacaagcaacatagaaagtggaatccagtagcaacaatagagcaacaatggcgaccaagatactttccctccttatgctccttgctctttctgcatgtgttgctaacgcgacaattttccctcaatgctcacaagctcctatagcttcccttcttcccccataccttccatcaatgatagcttcagtatgtgaaaacccagctcttcaaccctataggctccaacaagcaatcgcagcaagcaacatacctttatcacccttgtttcacaatcgccagcc

SEQ ID NO: 68949 - DNA, 286 bp, Zea mays
ctcgctgaacgactacctcgctgtgaacgcgacgaagcacgcgatgtacctgccgcacaccgcggggcgttactccaagaagcggttccgcaaggcgcagtgcccgatcgtcgagcgcctcacaaactccctcatgatgcacgggcgcaacaacggcaagaaggtcatggctgtccgcatcatcaagcataccctggagatcattcacctgctcaccgatgccaaccccatccaggtcgtcgtcgacgcgatcatcaacagtggaccccgtgaggtgccacccgta

SEQ ID NO: 68950 - DNA, 131 bp, Zea mays
atcgaccgatcgatcgccacagccaacaccacccgccgcggcgacgcgacagcgccaggaggaaggaataaactcactgccagccagtgaagggggagaagtgtactgctccgtcgaccagtgcgcgcacc

SEQ ID NO: 68951 - DNA, 321 bp, Zea mays
gcacgtgcacgcaagctccggctccggctcgtgccgcagtccgcaggaccgcgtcactcggcagtcggcacgcaggctagcagcacagcagcagccagagccatcccctctcctcgctacgcttcgcttcctcggcgccgattcctcctcctcctcctccaccctcgtccgtcccgttccggcgcgcgagctcgcccgagatggcgaacgcgagatcgggtgtcgctgtgaacgatgagtgcatgctgaagtttggcgagctgcagtcgaagaggctgcaccgcttcataactttcaagatggacgacaagtcaaggagat

SEQ ID NO: 68952 - DNA, 176 bp, Zea mays
tttgcatccaacccacttgctctggcgaacgtagttgcaaaccagttacaacaacagctacaacagtttctgccaacgctcagtcaactagccatggtgaaccctgccgcctacgtacaacaacaacaactgctttcatctagcccgctcgctgtgggcaatgcacctacatacct

SEQ ID NO: 68953 - DNA, 284 bp, Zea mays
atcgagccgaatcggctcgagattgagaccaacaagcaacatagattgtggaatacagtagttcaaatagagcaacaatggtggccaagatattttccatccttatgctccttgctctttctgcatgtgttgctaacgcgaccatttttcctcaatactcacaagctcctatagctgcccttcttcccccataccttccatcaatgaccgctttagtatgtgaaaacccagcccttcaaccctacaggatccagcaagcaatcgcaacaagcacttacctttat

SEQ ID NO: 68954 - DNA, 127 bp, Zea mays
ctcttacaactgcaacagttgctgcctttgtccaacttgctttgacaaacccagcagccttctaccaacaacacatcattggcggtgcctcttttagattgcttattagttgtaattcaataatgaa

SEQ ID NO: 68955 - DNA, 141 bp, Zea mays
caacttcagaggctatccgtgactgggtcacaaatgtggagaccacacactatatcttgggctctgttgccggtccgcacccgtacccgatgatggtgagggagttccataaggttattggcaaggaaacccggaggcagg

SEQ ID NO: 68956 - DNA, 282 bp, Zea mays
atgaaagaagatgatctggaaagactgagccttcctttgatggttaccacaaaagaaaatgaggagaagctatgcactgctttcactgttacagtggatgcaaaagagggcacaactactggggtatctgccaaggacagggcaaaaacggtcatgactcttgcatctcctgactctaagcctgaggacctcaaccgccctggtcatattttccctttgaaatacagagaagggggtgttctgaaacgagctggacacaccgaggcatctgtgaccttgcca

SEQ ID NO: 68957 - DNA, 281 bp, Zea mays
gttttagaggcggattttaagaaagtggtaggcataagctggtacttgtgggtcttcgtggtgatatttctgttgctgaatgttaatggctggcacacatacttttggattgctttccttccccttattcactgagccatgccgacgtcttcatcccactgttgggaggcagcagccgtggcttctttaacagaggcatctcgtgaagccaacacagagccgctgctgaagctgaggagtgtgacacatgcattggagcagcaaaggcgcagcggcgtggg

SEQ ID NO: 68958 - DNA, 95 bp, Zea mays
ttgcattcaaaaacacaccaagcgaagggcactagctacgacctaacaccaatggctaccaagatattagccctccttgcgcttcttgccctttt

SEQ ID NO: 68959 - DNA, 130 bp, Zea mays
gaactagcaacatagaaagcacaatagtgtaccaacaatggcagcctaaatattttgcttccttatgctccttggtctttctgcaagtgctgctaccgcaaccattttgccacaatgctcacaagctcct

SEQ ID NO: 68960 - DNA, 128 bp, Zea mays
ttttgagcattcagaaacacaccaagcgaggcactagcaacgacctaacaacaatggctaccaagatattagccctccttgcgcttcttgccctttttgtgagcgcaacaaatgcgttcattattcca

SEQ ID NO: 68961 - DNA, 124 bp, Zea mays
tattcagaaacacaccaagcgaagacattagcaacaacctaacaacaatggctaccaagatattatccctccttgcgcttcttgcgctttttgcgagcgcaacaaatgcgttcattattccaca

SEQ ID NO: 68962 - DNA, 279 bp, Zea mays
ggcagagcaaaccgggcctccatcgatttggagcagatggatttattgggaaatcacaacgaatggaggctcgtgatggtgttgaaccccgattcattgacgtttacatggagggacaccgaggtccagatccagatcatcctgaagttttatgtgatgacagcgcgacagaaaagctgactcgttatgccgaggaggttaggaggaaagcaggctccgatgatctagattggagggaggcacctttcgatccggatgcagcatatgtgctggtggtgg

SEQ ID NO: 68963 - DNA, 128 bp, Zea mays
caacaagcaacatagaaagtggaatccagtagcaacatgagagcaatcatggcgaccaagatattttccctccttatgctccttgttctttctgcatgtgttgctaacgcgacaattttccctcaatg

SEQ ID NO: 68964 - DNA, 146 bp, Zea mays
gaacaagcaacatagaaagtggaatccagtagcaacaatagagcaacaatggcgaccaagatactttccctccttatgctccttgctctttctgcatgtgttgctaacgcgacaattttccctcaatgctcacaagctcctatagc

SEQ ID NO: 68965 - DNA, 290 bp, Zea mays
tggtcgattcgagccgattgagaccaactagcaacatagaaagcacaatagtgtaccaacaatggcatccaaaatattttgcctccttatgctccttggtctttctgcaagtgctgctacggcgaccattttcccacaatgctcacaagctcctatagcttcccttcttcccccgtacctctcaccagcggtgtcttcggtattcgaaaacccaattcttcaaccctataggatccaacaggcaatcgcagctggcatcttacctttatcacccttgttcctccaacaat

SEQ ID NO: 68966 - DNA, 252 bp, Zea mays
gcaacatagaaagcacaatagtgtaccaacaatggcagccaaaatattttgcctccttatgctccttggtctttctgcaagtgctgctacggcgaccattttcccacaatgctcacaagctcctatagcttcccttcttcccccgtacctctcaccagcggtgtcttcggtatgtgaaaacccaattcttcaaccctataggatccaacaggcaatcgcagctggcatcttacctttatcacccttgttcct

SEQ ID NO: 68967 - DNA, 284 bp, Zea mays
caacaagcaacatagaaagtggaatccagtagcaacaacagagcaacaatggcgaccaagatattttccctccttatgctccttgctctttctgcatgtgttgctaacgcgacaattttccctcaatgctcacaagctcctatagcttcccttcttcccccataccttccatcaatgatagcttcagtatgtgaaaacccagctcttcagccctataggctccaacaagcaatcgcagcaagcaacatacctttatcacccttgttgtttcaacaatcgccagc

SEQ ID NO: 68968 - DNA, 270 bp, Zea mays
aaattttcaacgtacggttacgttgtcagatggtaccgtttcagaaggtactctgagagtttcagaggctgcaatacaaatatctaggtgtcgtgtttctgaatatctgagtttgcatacatgctatgatttactcccagattctggcaaggttattgccctagacattgatttacctgtgaagcaatcattccatattctccatgaacaggggattcctgtagctcctctctgggactcattcagaggtcatttgttggtctccttagc

SEQ ID NO: 68969 - DNA, 279 bp, Zea mays
ctacaggatccaacaggcaatcgcaacaggcatcttaccattatcacccttgttcctccaacaaccgtcagccctattacagcagttacctttggtccatttggtggcacaaaacatcagggcacaacaactacaacaacttgtgctagcaaaccttgctgcatactctcagcaacatcagtttcttccattcaaccaactggctgcattgaactctgctgcttatttgcaacaacaattaccattcagccagctagttgctgcctacccccagcaatt

SEQ ID NO: 68970 - DNA, 281 bp, Zea mays
gacaagcgctacaagaacagggagctgcaaatcatgcgatccatggatcactgcaatgctgtttccttgaagcattgtttcttctccaccacaagcagagatgaactttttcttaacttagtgatggagtttgttcctgagtcactacatcgtgtgctgaagcactacagcaatatgaaccagaggatgccgcttatttatgttaaattatatacctaccagatatttcgaggtttagcctatattcacacagtacctggtgtttgccacagggatgtgaa

SEQ ID NO: 68971 - DNA, 271 bp, Zea mays
aacacaccaagcgaaggcactagcaacgacctaacaacaatggctaccaagatattagccctccttgcgcttcttgccctttttgtgagcgcaacaaatgcgttcattattccacaatgctcacttgctcctagtgccattattccacagttcctcccaccagttacttcaatgggcttcgaacacctagctgtgcaagccaacatgcaacaacaagcgcttgcggcgagcgtcttacaacaaccattgcccattgcaacaacaatcttgc

SEQ ID NO: 68972 - DNA, 281 bp, Zea mays
  unsure (1)..(281): unsure at all n locations
cctaatcctctctttccatactcgcggaagccaccaccaccggcaggggaagcggaaggggagcacctcgggccaggcaagatggtgcttgcgcactngggcgggagcatctcccgcgccctggcgcagatgagcaacgccacggtgatcgatgagaaggtgctcaacgactgcctcaacgagatctcgcgcgctctcctacaggccgatgtccagttcaagatggtccgcgacatgcaggccaacatcaagcgcatcgtcaacctcgaggcgcttgccgc

SEQ ID NO: 68973 - DNA, 280 bp, Zea mays
tgagcattcagaaacacacctagcgaaggcactagcaacgacctaacaacaatggcttccaagacattatccctccttgcgcttcttgccctttttgtgagtgcaacaaatgcgttcattattccacaatgctcacttgctccgagtgccattattccacagttcctccctccagttacttcaatgggcttcgaacaccaggtgtgcaagcctataggctacaaacaagcgcttgcggcgagcgtcttagaacaaccattgcccaattacacacatctta

SEQ ID NO: 68974 - DNA, 137 bp, Zea mays
agaccaactagcaacatagaaagcacaatagtgtaccaacaatggcagccaaaatattttgcttccttatgctccttggtctttctgcaagtgctgctaccgcaaccattttcccacaatgctcacaagctcctata

SEQ ID NO: 68975 - DNA, 284 bp, Zea mays
caaaaccagaccaccaaacaagtgccagcgccctctcgcagtcgccgcaatggagagcaccttcatcatgatcaagcctgacggcgtccagaggggcctcattggtgagatcatcagccgttttgagaagaagggcttctacctgcaagggtaatctagcgtccatgttttgattcaaacttccattatgttccgaaacagccttaaatttctccatttaaagactaaagatgtggctttagacggaaattcaacagtttgtgctcaaatgagttgtcgctttt

SEQ ID NO: 68976 - DNA, 243 bp, Zea mays
gattgagaccaactagcaacataggaagcacgatagtgtaccaacaatggcagccaaaatattttgcttccttatgctccttggtctttctgcaagtgctgctaccgcaaccattttcccacaatgctcacaagctcctatagcttcctttcttcccccatacctctcaccagcggtgtcttcagtatgtgaaaacccaattcttcaaccctacaggatccaacaggcaatcgcagcaggcat

SEQ ID NO: 68977 - DNA, 283 bp, Zea mays
cttcggtatgtgaaaacccaattcttcaaccctataggatccagcaggcaatcgcagctggcatcttacctttatcacccttgttcctccaacaatcatcagccctattacagcagttacctttggtgcatttattggcacaaaacatcagggcacaacaactacaacaacttgtgctagcaaaccttgctgcctactctcagcaacaacagtttcttccattcaaccaactagctgcattgaactctgcttcttatttgcaacaacaacaactaccattcag

SEQ ID NO: 68978 - DNA, 280 bp, Zea mays
gccaactagcaacatagaaagcacaatagtgtaccaacaatggcagccaaaatattttgcctccttatgctccttggtctttctgcaagtgctgctacggcgaccattttcccacaatgctcacaagctcctatagcttcccttcttcccccgtacctctcaccagcggtgtcttcggtatgtgaaaacccaattcttcaaccctataggatccaacaggcaatcgcagctggcatcttacctttatcacccttgttcctccaacaatcatcagccctat

SEQ ID NO: 68979 - DNA, 132 bp, Zea mays
ttgagaccaactagcaacatagaaagcacaatagtgtaccaacaatggcagccaaaatattttgcttccttatgctccttggtctttctgcaagtgttgctaccgcaaccattttcccacaatgctcacaag

SEQ ID NO: 68980 - DNA, 278 bp, Zea mays
tgagaccaactagcaacatagaaagcacaatagtgtaccaacaatggcagccaaaatattttgcttccttatgctccttggtctttctgcaagtgttgctaccgcaaccattttcccacaatgctcacaagctcctatagcttcccttcttcccccatacctctcaccagcggtgtcttcaatgtgtgaaaacccaattgttcaaccctacaggatccaacaggcaatcgcaacaggcatcttaccattatcgaccttgttcctccaacaaccgtcag

SEQ ID NO: 68981 - DNA, 277 bp, Zea mays
gtgagatgtggagaagtaaaacgaaagattctaagcctgccaagtctggacgtctatctcacgaagaaaagaagcttgggaagtctaatgatgaaaagaagacaaaacctcggaagtcaatggaatttcataacatcaagattggcaaggttgaacttcttgttacatacgagggatcaaggcttgctattaatgacctaaggttgcttatggatactttccacaaggcagaatttactggtacatggaggcgactattctctagagtcaaaaaaca

SEQ ID NO: 68982 - DNA, 276 bp, Zea mays
tgttgaaagcaatgatggttgacaccaccatacttggccttgatgacgtgagggcaaaggaaatgccttatattgctagcatgggtatctatgttttcagcaaagatgtaatgcttcagctcctccgtgaacaatttcctgaagccaatgactttggaagtgaggttattccaggtgcaaccagcattggaaagagggttcaggcttatctgtatgatggttactgggaagatatcggtaccattgcggcattttataatgcaaacttgggaataa

SEQ ID NO: 68983 - DNA, 279 bp, Zea mays
gcaacatagaaagtggaatccagtagcaacaacagagcaacaatggcgaccaagatattttccctccttatgctccttgctctttctgcatgtgttgctaacgcgacaattttccctcaatgctcacaagctcctatagcttcccttcttcccccataccttccatcaatgatagcttcagtatgtgaaaacccagctcttcagccctataggctccaacaagcaatcgcagcaagcaacatacctttatcacccttgttgtttcaacaatcgccagcc

SEQ ID NO: 68984 - DNA, 97 bp, Zea mays
cagaccattagctttatctactccagagcgcagaagaaccagatcgacaccatgagggtgtagctcgttgccctcgctctcctggctctcgctgcga

SEQ ID NO: 68985 - DNA, 272 bp, Zea mays
gtaagcacaatagtgtaccaacaatggcagccaaaatattttgcctccttatgctccttggtctttctgcaagtgctgctacggcgaccattttcccgcaatgctcgcaagctcctatagcttcccttcttcccccgtacctctcaccagcggtgtcttcggtatgtgaaaaccctttcttcaaccctacaggatccaacaggcaatcacggctggcatcttaccttaatcacccttgttcctccaacaatcatcagccctattacatcagt

SEQ ID NO: 68986 - DNA, 132 bp, Zea mays
ctcgtgcaacgcaaagcgctagccttcctactgtcccgatggcccgcacgaagcagacggcgaggaagtccactggcggcaaggcgccaaggaagcagctggccaccaaggcggcgcgcaagtctgccccgg

SEQ ID NO: 68987 - DNA, 281 bp, Zea mays
tctcaccagcggtgtcttcggtatgtgaaaacccaattcttcaaccctacaggatccaacaggcaatcacagctggcatcttacctttatcacccttgttcctccaacaatcatcagccctattacatcagttacctttggtgcatttattggcacaaaacatcagggcacaacaactacaacaacttgtgctagcaaaccttgctgcctactctcagcaacagcagtttcttccattcaaccaactagctgcattgaactctgcttcttatttgcaacaa

SEQ ID NO: 68988 - DNA, 274 bp, Zea mays
catcaatgctgcttcagaatgtgccacctgccctactagtacggtttctgagggagcatcgctccgaatgggctgatcctggtgttgatgcttattccgctgctgctttgagggctagtccatatgcagttcctggtttgcgtgctagtgggtttacgggcagccaggttattctgccgcttgcacataccttagagcatgaggagttcttagaggttattaggcttgagggacacagctctgccatgatgaagttgttctgtcacgagatatg

SEQ ID NO: 68989 - DNA, 278 bp, Zea mays
cgagcgctgcagcagcacgggatgccaccagatcaggcaggtgcagccgctgcaccggtaccaggcgacatacggtgtggtcctgcagtccttcctgcagcagcagccgcaaggcgagctcgcggcgctgatggcggcccaggtagcgcacagctgacggcgatgtgcggcctgcagctgcagcagcccggtccctgcccttgcaacgcagctgccggcggcgtcagactatgaggaaactatgtactgtagtaataatgttatggagccgctgacta

SEQ ID NO: 68990 - DNA, 275 bp, Zea mays
atttgctagcagatcatcttcctactctttactttatttattgtttgaaaaatatgtcctgcacctagggagctcgtatacagtaccaatgcatcttcattaaatgtgaatttcagaaaggaagtaggaacctatgagagtatttttcaaaattaattagcggcttctattatgtttatagcaaaggccaagggcaaaattggaacactaatgatggttggttgcatgagtctgtcgattacttgcaagaaatgtgaacctttgtttctgtgcgg

SEQ ID NO: 68991 - DNA, 277 bp, Zea mays
attttgagcattcagaaacacaccaagcgaactacattagcaacaacctaacaacaatggctaccaagatattatccctccttgcgcttcttgcgctttttgcgagcgcaacaaatgcgttcattattccacaatgctcacttgctccaagttccattattacacagttcctcccaccagttacttcaatgggcttcgaacacccagctgtgcaagtatgcgataaaaagcaatttctggcggcgagtttcaacaacaaatttcccagttgcaacaa

SEQ ID NO: 68992 - DNA, 67 bp, Zea mays
ctcgagccggttttttatctgatgtttgtggcttcccagaaataagaaagtacatttctagattctt

SEQ ID NO: 68993 - DNA, 258 bp, Zea mays
ccacaaccacacgttcacggtagcgagagcttatcgtcgtcggcggtgaagatggtgtcgctgaagctgcagaagcggctcgccgctagcgtcctcaagtgtgggaaaggcaaagtctggcttgaccccaatgaagtcagcgagatctccatggctaactcccgccagaacatccggaagttggttaaggatgggtttatcatcaggaagcctcagaaggttcaactctaggtcccgtgcaagaagggcacatgaggc

SEQ ID NO: 68994 - DNA, 161 bp, Zea mays
cagaaacacacctagcgaaggcactagcaacgacctaacaacaatggcttccaagacattatccctccttgcgcttcttgccctttttgtgagtgcaacaaatgcgttcattattccacaatgctcacttgctccgagtgccattattccagagttcctcc

SEQ ID NO: 68995 - DNA, 277 bp, Zea mays
ctagcaacatagaaagcacaatattgtaccaataatggcagccagaatattttgcctcattatgctccttggtctttctgcaagtgctgctacggcgagcattttcccgcaatgctcacaagctcctatagcttcccttcttcccccatacctctcaccagcgatgtcttcagtatgtgaaaatccaattcttctaccctacaggatccaacaggcaatcgcagcaggcatcttacctttatcacccttgttcctccaacaatcatcagccctatta

SEQ ID NO: 68996 - DNA, 270 bp, Zea mays
gtacaacatcaccagcagcagcaacaccaacaacaacaagttcacatgcaaccacaaaaacatcagcaacaacaagaagttcatgttcaacaacaacaacaacaaccgcagcaccaccaccaacaacaacaacaacagcaccaacaacaacatcaatgtgaggacaaacagcccatataaagtggaatacagtgtcgccactatagagcaacaatggcggccaagatattttccatccttatgctccttgctctttctgcatgtgttgct

SEQ ID NO: 68997 - DNA, 279 bp, Zea mays
gaagcgcactagcaacgacctaacaccaatggctaccaagatattagccctccttgcgcttcttgcccttttagtgagcgcaacaaatgcgttcattattccacagtgctcacttgctcctagtgccagtattccacagttcctcccaccagttacttcaatgggcttcgaacatccagccgtgcaagcctacaggctacaactagcgcttgcggcgagcgccttacaacaacgcattgcccaattgcaacaacaatccttggcacatctaaccctaca

SEQ ID NO: 68998 - DNA, 105 bp, Zea mays
caagcaacatagaaagtagaatccattagcaacaatagagcaacaatggcgaccaagatattttccctccttatgctccttgctctttctacatgtgttgctaac

SEQ ID NO: 68999 - DNA, 118 bp, Zea mays
tttgagcattcagaaacacacctagcgaaggcactagcaacgacctaacaacaatggcttccaagacattatccctccttgcgcttcttgccctttttgtgagtgcaacaaatgcgtt

SEQ ID NO: 69000 - DNA, 276 bp, Zea mays
gtacatgaatgccttgacatatttaacaagtgaagccttttctaatattccttctgatttggtattggatttgcaaaggatgctatcgatggatgcactatcacgtcctagtgctatggcctttacaggttcttctttcttccgggatgatacgaggttgcgcgctcttcgtttccttgaccatttgcttgagagagataatatgcagaagacagagtttttgaaggcattatcagatatgtggaaggattttgattcccgagttcttcgatataa

SEQ ID NO: 69001 - DNA, 273 bp, Zea mays
cgcatccaagcccgtgccagctgcagggaacctgcggcgttggcagcaccccgatcctgggccagtgcgtcgagtttctgaggcatcagtgcagcccgacggcgacgccctactgctcgcctcagtgccagtcgttgcggcacagtgttgccagcagctcaggcaggtggagccgcagcaccggtaccaggcgatcttcggcttggtcctccagtccatcctgcagcagcagccgcaaagcggccaggtcgcggggctgttggcggcgcagat

SEQ ID NO: 69002 - DNA, 257 bp, Zea mays
agaagacgctattacttacctaatccatctctgtaccaagtttggagtaggtcatttgcctcagacagcggagacaagttcgaggctgttgtgcccttcatgggtgaatctgtaactgatggaactcttgctaacttcttaaagaagcctggagacagagtcgaggccgatgaacccatagcgcagattgaaactgataaggtcactatagatgtcgcagtcctgaagctggtgttattgaaaactcattgctagtg

SEQ ID NO: 69003 - DNA, 269 bp, Zea mays
attttcagcattcaaaaacacaccaagcgaaggtcactagcaacgacctaacaccaatggctaccaagatattagccctccttgcgcttcttgcccttttagtgagcgcaacaaatgcgttcattattccacagtgctcacttgctcctagtgccagtattccacagttcctcccaccagttacttcaatgggcttcgaacatccagccgtgcaagcctacaggctacaactagcgcttgcggcgagcgccttacaacaaccaattgcc

SEQ ID NO: 69004 - DNA, 268 bp, Zea mays
ttcagaaacacaccaagcgaagacattagcaacaacctaacaacaatggctaccaagatattatccctccttgcgcttcttgcgctttttgcgagcgcaacaaatgcgttcattattccacaatgctcacttgctccaagttccattattacacagttcctcccaccagttacttcaatgggcttcgaacacccagctgtgcaagcctataggctacaacaagcaattgcggcgagcgtcttacaacaaccaatttcccagttgcaac

SEQ ID NO: 69005 - DNA, 270 bp, Zea mays
ctttgtccaacttgctttgacagaggtcaacaattgctgtagttgtaagagggttgcggggttagccgcaaactgctggtagaaagagtgcaactgttgctgtgtcaagaaggaagcacggtttgctgcagctagctggctaaatggtagtagtatttgctgctgcaaataagcagcggggatcagtgcggctaaccccgcaaccctcttacaactacaacaattgttgccctttgtccaacttgctttgacagacccagcggcctccta

SEQ ID NO: 69006 - DNA, 268 bp, Zea mays; identical to SEQ ID NO: 69004

SEQ ID NO: 69007 - DNA, 272 bp, Zea mays
atttgctagcagatcatcttcctactctttactttatttattgtttgaaaaatatgtcctgcacctagggagctcgtatacagtaccaatgcatcttcattaaatgtgaatttcagaaaggaagtaggaacctatgagagtattttccaaaattaattagcggcttctattatgtttatagcaaaggccaagggcaaaattggaacactaatgatggttggttgcatgagtctgtcgattacttgcaagaaatgtgaatctttgtttctgtg

SEQ ID NO: 69008 - DNA, 273 bp, Zea mays
caagcaacatagaaagtggaatccagtagcaacaacagagcaacaatggcgaccaagatattttccctccttatgctccttgctctttctgcatgtgttgctaacgcgacaattttccctcaatgctcacaagctcctatagcttcccttcttcccccataccttccatcaatgatagcttcagtatgtgaaaacccagctcttcagccctataggctccaacaagcaatcgccagcagcaacatactttatcacccttgtgtttcacaatcg

SEQ ID NO: 69009 - DNA, 253 bp, Zea mays
gattgcactgctaggacaagtctagatatgctttctaagcactactatcaagctactggcagctgggtcgtattttttgtcccagaaaatgatgcggacatgacagcttataatgatttcatgagttatctaggtgataagcagcgtgcagcagtctgtaagcttggagagagcagcaccttgtttcttgtcccaccttcagatttctcagagcaagtactgagagtgcctggaaatgtcagaatatctggag

SEQ ID NO: 69010 - DNA, 193 bp, Zea mays
gctgcatatgtgcaggttttagtgagattatggtaaccctttccaaaactgggttctttgatgctgcaaatcatccactgctgcaagatactagtcgtccaacatataagggtttccttgatgaactactgaataatatctccacaattaacacggacttagatattgaagcctctggtggatacgatgatga

SEQ ID NO: 69011 - DNA, 199 bp, Zea mays
gggtcttcagaccattagctttatctactccagagcgcagaagaacccgatcgacaccatgagggtgttgctcgttgccctcgctctcctggctctcgctgcgagcgccacttccagaggacatacgacacgcaggctcatggtgtcgatcgggttcttctgcgctctggagtagcttaagctaatggtctgaagaccc

SEQ ID NO: 69012 - DNA, 268 bp, Zea mays
  unsure (1)..(268): unsure at all n locations
ggatcgagccgaatcggctcgagctcgaccgttggcacaaaacatcagggcacaacaactacagtagattgtgctagcaaacactgntgnntantctcagcaacagcagtttcttccattcaaccaactagctgcattgaactctgcttcttatttgcaacaacaacaactaccattcagccagctacctgctgcctacccccagcaatttcttccattcaaccaactggcagcattgaactctcctgcttatttacagcagcaacaa

SEQ ID NO: 69013 - DNA, 266 bp, Zea mays
ctcgagccgattcggctcgaggcaacatagaaagcacaatagtgtagcaacaatggcagccagaatattttgcctccttatgactccttggtctttctgcaagtgctgctacggcgaccattttcccgcaatgctcgcaagctcctatagcttcccttcttcccccgtacctctcaccagcggtgtcttcggtatgtgaaaacccaattcttcaaccctacaggatccaacaggcaatcacagctggcatcttacctttatcaccc

SEQ ID NO: 69014 - DNA, 263 bp, Zea mays
aagcaacatagaaagtggaatccagtagcaacaacagagcaacaatggcgaccaagatattttccctccttatgctccttgctctttctgcatgtgttgctaacgcgacaattttccctcaatgctcacaagctcctatagcttcccttcttcccccataccttccatcaatgatagcttcagtatgtgaaaacccagctcttcagccctataggctccaacaagcaatcgcagcaagcaacatacctttatcacccttgttg

SEQ ID NO: 69015 - DNA, 152 bp, Zea mays
  unsure (1)..(152): unsure at all n locations
catcctgnaatcgnggagntcatctacagcgncgtcnngaactccgagcacaagttcgtcgctnaagganaagaagaagccgatcatcttctcgatngcgngtctcganngcgtgaagaacatgacaggcctggtcgnaatgtanggcaaga

SEQ ID NO: 69016 - DNA, 291 bp, Zea mays
gcgcgagaacgcgctgctggagttcgtgcgcgtggtggaggccaaggagcaggtggtggccggcacgctgcaccacctcacgctcgaggccgtcgaggccgggaggaagaagctctacgaggccaaggtctgggtcaagccatggctcgacttcaaggagctccaggaattcagccacaagggggacgccaccgccttcaccaacgccgacctcggcgccaagcaaggtggacatgagcctggttggcgtgaggttccagtagaggatcctgtggtcaaagatgctgcaca

SEQ ID NO: 69017 - DNA, 139 bp, Zea mays
gaccaattgcccaattacaacaacaatccttggcacatctaaccatacaaaccatcgcaacgcaacagcaacaacaatttctaccagcactgagccaactagctgtggtgaaccctgtcgcctacttgcaacagcagtt

SEQ ID NO: 69018 - DNA, 162 bp, Zea mays
atgtgctgtagtatagccgctggctagctagctagttgagtcatttagcggcgatgattgagtaataatgtgtcacgcatcaccatgggtggcagtgtcagtgtgagcaatgacctgaatgaacaattgaaatgaaaagaaaaaaagtactccatctgttcc

SEQ ID NO: 69019 - DNA, 293 bp, Zea mays
gagcattcagaaacacacctagcgaacgcactagcaacgacctaacaacaatggcttccaagacattatccctccttgcgcttcttgccctttttgtgagtgcaacaaatgcgttcattattccacaatgctcacttgctccgagtgccattattccacagttcctccctccagttacttcaatgggcttcgaacacccagctgtgcaagcctataggctacaacaagcgcttgcggcgagcgtcttagaacaaccaattgcccaattacaacaacaatccttggcacatcta

SEQ ID NO: 69020 - DNA, 290 bp, Zea mays
attttcagcattcaaaaacacaccaagcgaagcgcactagcaacgacctaacaccaatggctaccaagatattagccctccttgcgcttcttgcccttttagtgagcgcaacaaatgcgttcattattccacagtgctcacttgctcctagtgccagtattccacagttcctcccaccagttacttcaatgggcttcgaacatccagccgtgcaagcctacaggctacaactagcgcttgcggcgagcgccttacaacaaccaattgcccaattgcaacaacaatccttg

SEQ ID NO: 69021 - DNA, 285 bp, Zea mays
ctctccttttgctcggaacgcacacacagcccggtccccgatctccgatcccctcgtcgatccaagatgcagatcttcgtcaagaccctcactggaaagactatcaccctcgaggtggagtcttctgacaccattgacaacgtcaaggccaagatccaggacaaggagggcattcccccggaccagctacggctcatcttcgctggcaagcagctcgaggacgggcgcacacttgccgactacaacatccagaaggagagcaccctccaccttgttctccgcctc

SEQ ID NO: 69022 - DNA, 283 bp, Zea mays
agcagatgaggatgatggacgtgcagtccgtcgcgcagagctgcagatgatgatgcagcttgagcgtgccgctgccgccagcagcagcctgtacgagccagctctgatgcagcagcagcagcagctgctggcagcccagggtctcaaccccatggccatgatgatggcgcagaacatgccggccatgggtggactctaccagtaccagctgcccagctaccgcaccaacccctgtggcgtctccgctgccattccgccctactactgattcatgatatttggg

SEQ ID NO: 69023 - DNA, 291 bp, Zea mays
gagcattcagaaacacaccaagcgaacacattagcaacaacctaacaacaatggctaccaagatattatccctccttgcgcttcttgcgctttttgcgagcgcaacaaatgcgttcattattccacaatgctcacttgctccaagttccattattacacagttcctcccaccagttacttcaatgggcttcgaacacccagctgtgcaagcctataggctacaacaagcaattgcggcgagcgtcttacaacaaccaatttcccagttgcaacaacaatccttggcacatc

SEQ ID NO: 69024 - DNA, 288 bp, Zea mays
acctagcgaacgcactagcaacgacctaacaacaatggctaccaagatattatccctctttgcgcttcttgccctttttgtgagcgcaacaaatgcgttcattattccacaatgctcacttgctcctagtgccattattccacagttcctccctccagttacttcaatgggcttcgaacacccagctgtgcaagcctacaggctacaacaagcgcttgcggcgagcgtcttacaacaaccaattgcccaattacaacaacaatccttggcacatctaaccatacaaac

SEQ ID NO: 69025 - DNA, 292 bp, Zea mays
tgggggaagaagggaagctataggcttcaacaagcaatcgcagcaagcaacatacctttatcgcccttgttgtttcaacaatcgccagccctatctttggtgcagtcattggtacaaaccatcagggcacaacagctgcagcaactcgtgctacctctgatcaaccaagtagctctggcaaacctttctccctactctcagcaacaacaatttcttccattcaaccaactgtctacactgaaccctgctgcttatttgcagcaacaactattaccatttagccagctagcta

SEQ ID NO: 69026 - DNA, 159 bp, Zea mays
tacagcaccccgatcctgggccagtgcgtcgagtttctgaggcatcagtgcagcccgacggcgacgccctactgctcgcctcagtgccagtcgttgcggcagcagtgttgccagcagctcaggcaggtggagccgcagcaccggtaccaggcgatcttc

SEQ ID NO: 69027 - DNA, 292 bp, Zea mays
gaccaactagcaacatagaaagcacaatagtgtaccaacaatggcagccaaaatattttgcttccttatgctccttggtctttctgcaagtgctgctaccgcaaccattttcccacaatgctcacaagctcctatagcttcctttcttcccccatacctctcaccagcggtgtcttcagtatgtgaaaacccaattcttcaaccctacaggatccaacaggcaatcgcagcaggcatcttacctttatcacccttgttcctccaacaaccgtcagccctattacagcagtta

SEQ ID NO: 69028 - DNA, 141 bp, Zea mays
ctcgagccgaatcggctcgagagaccattagctttatctactccagagcgcagaagaacccgatcgacaccatgagggagttgctcgttgccctcgctctcctggctctcgctgcgagcgccacttccacacaacatacga

SEQ ID NO: 69029 - DNA, 288 bp, Zea mays
agcaagcaacatagaaagtagaatccattagcaacaatagagcaacaatggcgaccaagatattttccctccttatgctccttgctctttctacatgtgttgctaacgcgacaattttccctcaatgctcacaagctcctatagcttcccttcttcccccataccttccatcaattatagcttcagtatgtgaaaacccagctcttcaaccatataggcttcaacaagcaatcgcagcaagcaacatacctttatcgcccttgttgtttcaacaatcaccagccctat

SEQ ID NO: 69030 - DNA, 281 bp, Zea mays
gagaccaacaagcaacatagaaagtggaatccagtagcaacaacagagcaacaatggcgaccaagatattttccctccttatgctccttgctctttctgcatgtgttgctaacgcgacaattttccctcaatgctcacaagctcctatagcttcccttcttcccccataccttccatcaatgatagcttcagtatgtgaaaacccagctcttcagccctataggcttcaacaagcaatcgcagcaagcaacatacctttatcacccttgttgtttcaacaa

SEQ ID NO: 69031 - DNA, 282 bp, Zea mays
ctcgagccgagaaagcacaatagtgtaccaacaatggcagccaaaatattttgcctccttatgctccttggtatttctgcaagtgctgctacggcgaccattttcccgcaatgctcacaagctcctatagcttcccttcttcccccgtacctctcaccagcggtgtcttcggtatgtgaaaacccaattcttcaaccctacaggatccaacaggcaatcgcagctggcatcttacctttatcacccttgttcctccaacaatcatcagccctattacagcag

SEQ ID NO: 69032 - DNA, 278 bp, Zea mays
ccgaaccccaaaccctagcttcgctcgttgcggcggcgagccgccgatggcgaagtctctgcgatccaaacgcgagaagcggcttcggacgttgccccgggagatagcggacccgttctacgacaagaaggaggccgccctagctgctgccccgctcccggtccgcgggcccccgccatcccaggatgccggcagctcccgcgccgctagctcggcctctcgctatggatgtggagatgtctgatgcatcgaacaacaggtctaagaccttcttgagg

SEQ ID NO: 69033 - DNA, 108 bp, Zea mays
cttcagaccactagctttatctactccagagcgcagaagaacccgatcgacaccatgagggtgttgctcgttgccctcgctctcctggctctcgctgcgagcgccacc

SEQ ID NO: 69034 - DNA, 283 bp, Zea mays
ctcgagccgaatcggctcgagggacagccgcgaatacaatccgactcccctccaaaaacacaccataccgtctcccccaactgcaagaacaagatcaggagagcatcctagggggaagaaacaggagggggaaaaagaagcccagaaagaccaactgaccaaacaaaaaggtggcatctttgtgtcaccgaggcaccgccgatcacagaccaaagcccgctcctctggtccatcccaagcgtacagcagccgagatttcttcgatctgcgcttgcgttttttt

SEQ ID NO: 69035 - DNA, 135 bp, Zea mays
tttgagcattcagaaacacaccaagcgaacacgattagcaacaagctgacaacagtggctaccagggtattgtccctccttgcgcttcttggcgctttttgcgagcgcaacagatgcgttcattattccacaatg

SEQ ID NO: 69036 - DNA, 287 bp, Zea mays
tagcaaaccttgctgcctactctcagcaacagcagtttcttccattcaaccaactagctgcattgaactctgcttcttatttgcaacaacaacaactaccattcagccagctacctgctgcctacccccagcaatttcttccattcaaccaactggcagcattgaactctcctgcttatttacagcagcaacaactactaccattcagccagctagctggtgtgagccctgctaccttcttgatacaaccacagttgttgccgttctaccagcacgctgcgcctaac

SEQ ID NO: 69037 - DNA, 279 bp, Zea mays
  unsure (1)..(279): unsure at all n locations
ctgagcacacagacatcattcgcgttcccttcagaaatgagaatggcatcctccgcaagtggatctctcgttttgatgtctggccatacctggagacatacactgaggatgtttccagtgaaataatgaaaganatgcaggccaagcctgaccttatcattggcaactacagcgatggcaacctagtcgccactctgctcgcgcacaagttgggagtcactcagtgtaccatcgctcatgccttggagaaaaccaaataccccaactcggacatatact

SEQ ID NO: 69038 - DNA, 280 bp, Zea mays
ccagcaagcaacatagaaagtagaatccattagcaacaatagagcaacaatggcgaccaagatattttccctccttatgctccttgctctttctacatgtgttgctaacgcgacaattttccctcaatgctcacaagctcctatagcttcccttcttcccccataccttccatcaattatagcttcagtatgtgaaaacccagctcttcaaccatataggcttcaacaagcaatcgcagcaagcaacatacctttatcgcccttgttgtttcaacaatca

SEQ ID NO: 69039 - DNA, 264 bp, Zea mays
cagaaacacaccaagcgaacgacattagcaacaacctaacaacaatggctaccaagatattatccctccttgcgcttcttgcgctttttgcgagcgcaacaaatgcgttcattattccacaatgctcacttgctccaagttccattattacacagttcctcccaccagttacttcaatgggcttcgaacacccagctgtgcaagcctataggctacaacaagcaattgcggcgagcgtcttacaacaaccaatttcccagttgc

SEQ ID NO: 69040 - DNA, 278 bp, Zea mays
gttgtgagcattgtggaataatacctctctccagtgatagccgcgagatttgaatacccatctatacaatcctacaggctacaagaggccatcacagcaagcatcttacggtcgttagcattgaccgtccaacaaccatatgccctattgcaacaaccatccttagtgaatctgtatctccaaagaatcacagcacaacaactacaacaacggttgcttccaacaattaatcaagtagttgcagcgaaccttgctgcttaccttcagcaacaacaatt

SEQ ID NO: 69041 - DNA, 286 bp, Zea mays
gaccaacaagcaacatagaaagtggaatccagtagcaacaatagagcaacaatggcgaccaagatattttccctccttatgctccttgctctttctacatgtgttgctaacgcgacaattttccctcaatgctcacaagctcctatagcttcccttcttcccccataccttccatcaattatagcttcaatatgtgaaaacccagctcttcaaccatataggcttcaacaagcaatcgcagcaagcaacatacctttatcgcccttgttgtttcaacaatcgccag

SEQ ID NO: 69042 - DNA, 283 bp, Zea mays
cagaaacacaccaagcgaagacattagcaacaacctaacaacaatggctaccaagatattatccctccttgcgcttcttgcgctttttgcgagcgcaacaaatgcgttcattattccacaatgctcacttgctccaagttccattattacacagttcctcccaccagttacttcaatgggcttcgaacacccagctgtgcaagcctataggctacaacaagcaattgcggcgagcgtcttacaacaaccaatttcccagttgcaacaacaatccttggcacat

SEQ ID NO: 69043 - DNA, 187 bp, Zea mays
ctaacaagcaacatagaaagtggaatacagtagcaacaatagagcaacaatggcggccaagatattttccatccttatgctccttgctctttctgcatgtgttgctaacgcgaccatttttcctcaatactcacaagctcctatagctgcccttcttcccccataccttccatcaatgaccgcttca

SEQ ID NO: 69044 - DNA, 285 bp, Zea mays
agatagcacaatagtgtaccaacaatggcagccaaaatattttgcctccttatgctccttggtctttctgcaagtgctgctacggcgaccattttcccgcaatgctcgcaagctcctatagcttcccttcttcccccgtacctctcaccagcggtgtcttcggtatgtgaaaacccaattcttcaaccctacaggatccaacaggcaatcacagctggcatcttacctttatcacccttgttcctccaacaatcatcagccctattacatcagttacctttggtg

SEQ ID NO: 69045 - DNA, 282 bp, Zea mays
caactagcaacatagaaagcacaatagtgtaccaacaatggcagccaaattattttgcctccttatgctccttggtctttctgcaagtgctgctacggcgaccattttcccacaatgctcgacagctcctatagctttccttcttcccccgtacctctcaccagcggtgtcttcggtatgtgaaaacccaattcttcaaccctacaggatccaacaggcaatcgcagctggcatcttacctttatcacccttgttcctccaacaatcatcagctctattaca

SEQ ID NO: 69046 - DNA, 279 bp, Zea mays
ctatactatactctaggaagcaaggacaccaccgccatggcagccaagatgcttgcattgttcgctctcctagctctttgtgcaagcgccactagtgcgacccatattccagggcacttgccaccagtcatgccattgggtaccatgaacccatgcatgcagtactgcatgatgcaacaggggcttgccagcttgatggcgtgtccgtccctgatgctgcagcaactgttggccttaccgcttcagacgatgccagtgatgatgccacagatgatgacg

SEQ ID NO: 69047 - DNA, 278 bp, Zea mays
atggacaccgaggcacccaacgcgcccatcaccagggagcggaggctcaaccccgatctgcaggagcagctccccaagccatatctcgcgagagctctcgaggcggtggacccgagccacccgcaggggaccaaggggcgcgacccccgcggcatgagcgtgcttcagcagcacgccgccttcttcgaccgcaatggcgacggcgtcatctacccctgggagacgtttcaaggactgcgagcgataggatgtggactcactgtatcattcgcgttctc

SEQ ID NO: 69048 - DNA, 275 bp, Zea mays
ctcatcgactccagattggagaactcgacaccatgaaggtgctgatcgttgcccttgctctcctggcgctcgctgcgagcgccgcctccagtacaagcggcggctgtggctgccagacaccagcgtttcatctaccgcctccgttctatatgccgcctccgttctatctgctgccgcagcagcagccgcagccatggcccttgcccactcagccaccgcagctaagcccgtgccagcagttcggatcctgcggcgtcggcagcgtcggcagtccg

SEQ ID NO: 69049 - DNA, 277 bp, Zea mays
gtccaacaagcaacatagaaagtggaatccagtagcaacaacagagcaacaatggcgaccaagatattttccctccttatgctccttgctctttctgcatgtgttgctaacgcgacaattttccctcaatgctcacaagctcctatagcttcccttcttcccccataccttccatcaatgatagcttcagtatgtgaaaacccagctcttcagccctataggcttcaacaagcaatcgcagcaagcaacatacctttatcacccttgttgtttcaaa

SEQ ID NO: 69050 - DNA, 272 bp, Zea mays
cagaaacacaccaagcgaacgcactagcaacgacctaacaacaatggctaccaagatattagccctccttgcgcttcttgccctttttgtgagcgcaacaaatgcgttcattattccacaatgctcacttgctcctagtgccataattccacagttcctcccaccagttacttcaatgggcttcgaacacctagctgtgcaagccaacatgcaacaacaagcgcttgcggcgagcgtcttacaacaaccaattgcccaattgcaacaacaat

SEQ ID NO: 69051 - DNA, 277 bp, Zea mays
gagaccaacaagcaacatagaaagtggaatccagtagcaacaacagagcaacaatggcgaccaagatattttccctccttatgctccttgctctttctgcatgtgttgctaacgcgacaattttccctcaatgctcacaagctcctatagcttcccttcttcccccataccttccatcaatgatagcttcagtatgtgaaaacccagctcttcagccctataggcttctaacaagcaatcgcagcaagcaacatacctttatcacccttgttgtttc

SEQ ID NO: 69052 - DNA, 277 bp, Zea mays
gaactagcaacatacatagtgaagtacactagcaacatcttagcaccaatggcagccaagatttttgccatccttgccctccttgctctttcagcaagcgttgctaccgcgactattattccacaatgctcacaacaatacctctctccggtgacagccgcgagatttgaatacccaactatacaatcctacaggctacaagaggccatcgcagcaagcatcttacggtcgttagcattgaccgtccaacaaccatatgccctattgcaacaaccat

SEQ ID NO: 69053 - DNA, 136 bp, Zea mays
cacctagcgaaggcactagcaacgacctaacaacaatggctaccaagatattatccctctttgcgcttcttgccctttttgtgagcgcaacaaatgcgttcattattccacaatgctcacttgctccaagtgccat

SEQ ID NO: 69054 - DNA, 115 bp, Zea mays
tagctttatctactccagagcgcagaagaacccgatcgacaccatgagggtgttgctcgttgccctcgctctcctggctctcgctgcgagcgccacctccatgcatacaagcggc

SEQ ID NO: 69055 - DNA, 279 bp, Zea mays; identical to SEQ ID NO: 68836

SEQ ID NO: 69056 - DNA, 279 bp, Zea mays
tttcccgcaatgctcgcaagctcctatagcttcccttcttcccccgtacctctcaccagcggtgtcttcggtatgtgaaaacccaattcttcaaccctacaggatccaacaggcaatcacagctggcatcttacctttatcacccttgttcctccaacaatcatcagccctattacatcagttacctttggtgcatttattggcacaaaacatcagggcacaacaactacaacaacttgtgctagcaaaccttgctgcctactctcagcaacagcattt

SEQ ID NO: 69057 - DNA, 276 bp, Zea mays
atctaacaatacaaaccatcgcaacgcaacagcaacaacaattcctaccagcactgagccacctagccatggtgaaccctgccgtctacctacaactactttcatctagcccgctcgcggtgggcaatgcacctacgtacctacaacaacagttgctgcaacaaattgtaccagctctgactcagctagctgtggcaaaccctgctgcctacttacaacagttgcttccattcaaccaactggctgtgtcaaactctgctgcgtacctacaacagc

SEQ ID NO: 69058 - DNA, 274 bp, Zea mays
ctaaaacacaccaagcgaagcgctactagcaacgacctaacaccaatggctaccaagatattagccctccttgcgcttcttgcccttttagtgagcgcaacaaatgcgttcattattccacagtgctcacttgctcctagtgccagtattccacagttcctcccaccagttacttcaatgggcttcgaacatccagccgtgcaagcctacaggctacaactagcgcttgcggcgagcgccttacaacaaccaattgcccaattgcaacaacaat

SEQ ID NO: 69059 - DNA, 270 bp, Zea mays
ctgaaacacaccaagcgatcacattagcaacaacctagcaacaatggctaccaagatattatccctccttgcgcttcttgcgctttttgcgagcgcaacagatgcgttcattattccacaatgctcacttgctccaagttccattattacacagttcctcccaccagttacttcaatgggcttcgaacacccagctgtgcaagcctataggctacaacaagcaattgcggcgagcgtcttagaacaaccaatttcccagttgcaacaaca

SEQ ID NO: 69060 - DNA, 276 bp, Zea mays
gaccaactagcaacatagaaagcacaatagtgtaccaacaatggcagccaaaatattttgcttccttatgctccttggtctttctgcaagtgctgctaccgcaaccattttcccacaatgctcacaagctcctatagcttcctttcttcccccatacctctcaccagcggtgtcttcagtatgtgaaaacccaattcttcaaccctacaggatccaacaggcaatcgcagcaggcatcttacctttatcacccttgttcctccaacaaccgtcagc

SEQ ID NO: 69061 - DNA, 277 bp, Zea mays
ttgagaccaactagcaacatagaaagcacaatagtgtaccaacaatggcagccaaaatattttgcctccttatgctccttggtctttctgcaagtgctgctacggcgaccattttcccgcaatgctcgctagctcctattgcttcccttcctcccccgtacctatcaccagcggtgtcttcggtatgtgacaacccaattcttcaaccctacaggatccaacaggctatcacagctggcatcttacctttatcacccttgttcctccaacaatcatc

SEQ ID NO: 69062 - DNA, 296 bp, Zea mays
aaccaattgcccaattccaacaacaatccttggcacatctaaccatacaaaccatcgcaacgcaacagcaacaacaatttctaccagcactgagccaactagctgtggtgaaccctgtcgcctacttgcaacagcagttgctttcatccaacccacttgctctggcaaacatagttgtctaccaacaacaacaacaattgcaacagtttctaccagcgctcagtcaactagccatggtgaactctgccgcctacctacaacagcaacaactgatttcatctagccctctcgctgtg

SEQ ID NO: 69063 - DNA, 280 bp, Zea mays
attttgagcattcagaaacacaccaagcgaactacattagcaacaacctaacaacaatggctactcagatattatccctccttgcgcttcttgcgctttttgcgagcgcaacaaatgcgttcattattccacaatgctcacttgctccaagttccattattacacagttcctcccaccagttacttcaatgggcttcgaacacccagctgtgcaagcctataggctacaacaagcaattgcggcgagcgtcttacaacagccaatttcccagttgcaaca

SEQ ID NO: 69064 - DNA, 278 bp, Zea mays
gtgaaatccagaggaacccctggtgattggagccatatcattaagcgaattgggatgtttactttcactgggctgaatagcgaacaagtcgcattcatgaggcaggaataccacatttatatgacatctgatgggaggatcagcatggccggtttgagcatgaggactgtgccccatcttgcagatgccatacacgctgcagttactcaactgaaatgaggatagtatcgcagctttcgtgaataaaacctgaatcacccacaacaatgttctaagta

SEQ ID NO: 69065 - DNA, 270 bp, Zea mays
gcgcacgcagccgctgcttttcgttcgtcttcatcctacgcgagggcgaaacccagaaaccctctccctcctgtactccggccgacacatccaggggcgatgacgctgggtagctccggcgccggatcgagcgtcgtcgttcctcgaaacttcaggctattagaggagctcgagcgtggagagaagggcattggtgatgggacagtgagctatggaatggatgatgctgatgacatctacatgcggtcatggactggtaccatcattggc

SEQ ID NO: 69066 - DNA, 270 bp, Zea mays
agttaatccatcgcccataatattttgagcattcaaaaacacacaaagggaagtgcactagcaacttcctaacaacaatggctaccaagatattagccctccttgcgctcctttccctttcagtgagcgcaacaactgcattcattattccacaatgctcacttgctcctaatgccattattccacagttcctcccatcagttacatcaatgggcatcgaacaccctattgtgcaagcctataggctacaacaagcgcttgcggcgagcg

SEQ ID NO: 69067 - DNA, 268 bp, Zea mays
gcaacatagaaagtggaatccagtagcaacaatagagcaacaatggcgaccaagatattttccctccttatgctccttgctctttctacatgtgttgctaacgcgacaattttccctcaatgctcacaagctcctatagcttcccttcttcccccataccttccatcaattatagcttcactatgtgaaaacccagctcttcaaccatataggtgtcaacaagcaatcgcagcaagcaacatacctttatcgcccttgttgtttcaac

SEQ ID NO: 69068 - DNA, 142 bp, Zea mays
  unsure (1)..(142): unsure at all n locations
ttcaaaaacacaccaagcgaaggnactagcaacgacctaacaccaatggctaccaagatattagccctccttgcgcttcttgcccttttagtgagcgcaacaaatgcgttcattattccacagtgctcacttgctcctagtg

SEQ ID NO: 69069 - DNA, 147 bp, Zea mays
gtccaccatgagtacgccacaccctttggtttaacatcggaatatgcccacccagctgaaattttgttcctgggattcgccacagttgttggtcctgctcttactggccctcatctcttcaccctgtggctgtggatggtgttgagg

SEQ ID NO: 69070 - DNA, 146 bp, Zea mays
ctagcaacatagaaagcacaatagtgtaccaacaatggcagccaaaatattttgcctccttatgctccttggtgtttctgcaagtgctgctacggcgaccattttcccacaatgctcacaagctcctatagcttcccttcttcccc

SEQ ID NO: 69071 - DNA, 264 bp, Zea mays
caacaagcaacatagaaagtggaatccagtagcaacaacagagcaacaatggcgaccaagatattttccctccttatgctccttgctctttctgcatgtgttgctaacgcgacaattttccctcaatgctcacaagctcctatagcttcccttcttcccccataccttccatcaatgatagcttcagtatgtgaaaacccagctcttcagccctataggctccaacaagcaatcgcagcaagcaacatacctttatcacccttg

SEQ ID NO: 69072 - DNA, 262 bp, Zea mays
cagaaacacacctagcgaagcgcactagcaacgacctaacaacaatggctaccaagatattatccctctttgcgcttcttgccctttttgtgagcgcaacaaatgcgttcattattccacaatgctcacttgctcctagtgccattattccacagttcctccctccagttacttcaatgggcttcgaacacccagctgtgcaagcctacaggctacaacaagcgcttgcggcgagcgtcttacaacaaccaattgcccaatt

SEQ ID NO: 69073 - DNA, 265 bp, Zea mays; identical to SEQ ID NO: 26697

SEQ ID NO: 69074 - DNA, 263 bp, Zea mays
cggttgcaagaagttggtgttctcatcatcagctgcagtttatggatcacccaaaaactcaccctgcacagaaaattttcctcttactccaaacaatccatatggcaaaacaaagctcgttgttgaagatatttgccgggatatctaccgttcagatcctgaatggaagatcattttacttaggtacttcaatccagttggtgctcatcctagtggatatcttggcgaggacccacgaggaattcccaacaatcttatgccct

SEQ ID NO: 69075 - DNA, 264 bp, Zea mays
cagtcatgtggaaattcaatgttgccagaacaggacagttgacttagagcttcttgcaaagagctgcaagtcactgatttccttgaagattggcgattgtgatctttcagatttgatagggttcttccaatctgccacatcactggaagaatttgctggagggacatttaatgggcaaggggaactcaccaagtatggggatgttaaatttccatcaagaatatgctccttgggacttactttcatgggtgcaaatgaaatgcc

SEQ ID NO: 69076 - DNA, 272 bp, Zea mays
agaaagtggaatccagtagcaacaatagagcaacaatggcgaccaagatactttccctccttatgctccttgctctttctgcatgtgttgctaacgcgacaattttccctcaatgctcacaagctcctatagcttcccttcttcccccataccttccatcaatgatagcttcagtatgtgaaaacccagctcttcaaccctataggctccaacaagcaatcgcagcaagcaacatacctttatcacccttgtttcaacaatcgccagcccta

SEQ ID NO: 69077 - DNA, 131 bp, Zea mays
gtaatagggctgacggttgttggaggaacaagacatcagggcacaacaactacaacaacttgtgctagcaaaccttgctgcatactctcagcaacatcagtttcttccattcaaccaactggctgcattga

SEQ ID NO: 69078 - DNA, 145 bp, Zea mays
tgattttgagcattcagaaacacacctagcgaagcgcactagcaacgacctaacaacaatggctaccaagatattatccctctttgcgcttcttgccctttttgtgagcgcaacaaatgcgttcattattccacaatgctcactt

SEQ ID NO: 69079 - DNA, 262 bp, Zea mays
catctacagcgacgtcgagaactccgagcacaagttcgtgctgaaggacaagaagaagccgatcatcttctcgatggcgcgtctcgaccgcgtgaagaacatgacaggcctggtcgagatgtacggcaagaacgcgcgcctgagggagctggcgaacctcgtgatcgttgccggtgaccacggcaaggagtccaaggacagggaggagcaggcggagttcaagaagatgtacagcctcatcgacgagtacaattgaagggcc

SEQ ID NO: 69080 - DNA, 262 bp, Zea mays
cggctcgagctcgagcgcaacatagaaagtggaatccagtagcgacaacagagcaacaatggcgaccagagatattttccctccttatgctccttgctctttctgcatgtgttgctaacgcgacaattttccctcaatgctcacaagctcctatagcttcccttcttcccccataccttccatcaatgatagcttcagtatgtgaaaacccagctcttcagccctataggctccaacaagcaatcgcagcaagcaacatacc

SEQ ID NO: 69081 - DNA, 266 bp, Zea mays
tctcgagccgaatcggctcgagatagcttcagtatgtgaaaacccagctcttcaaccctatacggctccaacaagcaatcgaggcaagcaacatacctttatcacccttgtttcaacaatcgccagccctatctttggtgcagtcattggtacaaaccatcaaggcacagcagctgcagcaactcgtgctacctgtgatcaaccaagtagctctggcaaacctttctccctactatcagcaacaacaatttcttccactcaaccaa

SEQ ID NO: 69082 - DNA, 266 bp, Zea mays
gagcattcagaaacacacctagcgaacgtcactagcaacgacctaacaacaatggcttccaagacattatccctccttgcgcttcttgccctttttgtgagtgcaacaaatgcgttcattattccacaatgctcacttgctccgagtgccattattccacagttcctccctccagttacttcaatgggcttcgaacacccagctgtgcaagcctataggctacaacaagcgcttgcggcgagcgtcttagaacaaccaattgccca

SEQ ID NO: 69083 - DNA, 266 bp, Zea mays
aacagtttctgccatcactgagccacctagccgtggtgaaccctgtcacctacttgcaacagcagctgcttgcatccaacccacttgctctggcgaacgtagctgcataccagcaacaacaacagctgcaacagtttatgccagtgctcagtcaactagccatggtgaaccctgccgtctacctacaactactttcatctagcccgctcgcggtgggcaatgcacctacgtacctacaacaacagttgctgcaacaaattgtacca

SEQ ID NO: 69084 - DNA, 267 bp, Zea mays
ccgtcgcatcccatcccactaccacccatctcgtcgtccgccgattcgatccggttcttccaacccaggggcagtgatggcgacgaagaggagcgtgggcaccctcggcgaggcggatctgaaggggaagaaggtgttcgtgcgcgccgacctcaacgtcccgctcgacgatgcccagaagatcaccgacgacacccgcatccgcgcctccgtccccaccatcaagttcctcctcgagaagggcgccaaggtcatcctcgccagcca

SEQ ID NO: 69085 - DNA, 188 bp, Zea mays
tagaaagtggaatccagtagcaacaatagagcaacaatggcgaccaagatattttccctccttatgctccttgctctttctacatgtgttgctaacgcgacaattttccctcaatgctcacaagctcctatagcttcccttcttcccccataccttccatcaattatagcttcaatatgtgaaaaccc

SEQ ID NO: 69086 - DNA, 218 bp, Zea mays
caaatgcgttcattattccacaatgctcacttgctccgagtgccattattccacagttcctccctccagttacttcaatgggcttcgaacacccagctgtgcaagcctataggctacaacaagcgcttgcggcgagcgtcttagaacaaccaattgcccaattacaacaacaatccttagcacatctaaccatacaaaccatcgcaacgcagcagcaa

SEQ ID NO: 69087 - DNA, 259 bp, Zea mays
gcacaatagtgtaccaacaatggcagccaaaatattttgcctccttatgctccttggtctttctgcaagtgctgctacggcgaccattttcccgcaatgctcgcaagctcctatagcttcccttcttcccccgtacctctcaccagcggtgtcttcggtatgtgaaaacccaattcttcaaccctacaggatccaacaggcaatcgcagctggcatcttacctttatcacccttgttcctccaacaatcatcagcccta

SEQ ID NO: 69088 - DNA, 257 bp, Zea mays
cagtcatgtggaaattcaatgttgccagaacaggacagttgacttagagcttcttgcaaagagctgcaagtcactgatttccttgaagattggcgattgtgatctttcagatttgatagggttcttccaatctgccacatcactggaagaatttgctggagggacatttaatgggcaaggggaactcaccaagtatggggatgttaaatttccatcaagaatatgctccttgggacttactttcatgggtgcaaatg

SEQ ID NO: 69089 - DNA, 261 bp, Zea mays
gcaacatagaaagcacaatagtgtaccaacaatggcagccaaaatattttgcctccttatgctccttggtctttctgcaagtgctgctacggcgaccattttcccgcaatgctcgcaagctcctatagcttcccttcttcccccgtacctctcaccagcggtgtcttcggtatgtgaaaacccaactcttcaaccctacaggatccaacaggcaatcacagctggcatcttacctttatcacccttgttcctccaacaatc

SEQ ID NO: 69090 - DNA, 261 bp, Zea mays
ttcaaaaacacaccaagcgaagcgcactagcaacgacctaacaccaatggctaccaagatattagccctccttgcgcttcttgcccttttagtgagcgcaacaaatgcgttcattattccacagtgctcacttgctcctagtgccagtattccacagttcctcccaccagttacttcaatgggcttcgaacatccagccgtgcaagcctacaggctacaactagcgcttgcggcgagcgccttacaacaaccaattgccca

SEQ ID NO: 69091 - DNA, 261 bp, Zea mays
ccaacaagcaacatagaaagtggaatccagtagcaacaatagagcaacaatggcgaccaagatattttccctccttatgctccttgctctttctacatgtgttgctaacgcgacaattttccctcaatgctcacaagctcctatagcttcccttcttcccccataccttccatcaattatagcttcaatatgtgaaaacccagctcttcaaccatataggcttcaacaagcaatcgcagcaagcaacatacctgaatcgcc

SEQ ID NO: 69092 - DNA, 261 bp, Zea mays
accccaacaggccaattgcaagctttatttttgctggtcccaccggcgttgggaagtctgagcttgcaaaggctcttgcagcctattactttggctctgaggaggctatgatccggcttgatatgagtgaattcatggagagacacacggtatccaagctgattggttcacctccaggatatgtaggatacactgagggtggccagctgacagaggcagttcgacggcggccatacacagttgtgctctttgatgagattg

SEQ ID NO: 69093 - DNA, 261 bp, Zea mays
caccccggcagccgcaaacgccttcgccgtcgcgtcccgctcctccgcccgcccgacgcgacccctaggacctggagagagaggtcggcatggctgccgcagtggtcgacgacgctggtatggacgccgtccagaagcgcctcatgttcgaagacgaatgcattttggtggacgagcaggacaatgttgttggccatgagtcaaagtacaactgccatttgatggaaaagattgattctgagaatctgctacatagggcat

SEQ ID NO: 69094 - DNA, 264 bp, Zea mays
agttaatccatcgcccataatattttgagcattcaaaaacacacaaagggaagtgcactagcaacttcctaacaacaatggctaccaagatattagccctccttgcgctcctttccctttcagtgagcgcaacaactgcattcattattccacaatgctcacttgctcctaatgcaacaattccacagttcctcccatcagttacatcaatgggcatcgaacaccctattgtgcaagcctataggctacaacaagcgcttgcgg

SEQ ID NO: 69095 - DNA, 264 bp, Zea mays
gagaccaactagcaacatagaaagcacaatagtgtaccaacaatggcagccaaaatattttgcttccttatgctccttggtctttctgcaagttttgctaccgcaaccattttcccacaatgctcacaagctcctatagcttcccttcttcccccatacctctcaccagcggtgtcttcaatgtgtgaaaacccaattgttcaaccctacaggatccaacaggcaatcgcaacaggcatcttaccattatcacccttgttcctc

SEQ ID NO: 69096 - DNA, 266 bp, Zea mays
cgacggcacccgtcttctctccgcactcgaaaccccatccttgactagctccgatctggtacgagatggccggcaagatgaaggagttagacggcgccaccctgccaagatcttcattggcgggctctccaaggatacaagcatgagtacattcaaagaacattttgggaagtatggggatataattgatgctgtcataatgaaggaccgctatacacaaaagcccagaggctttggctttattacttttgctgatcccactgttg

SEQ ID NO: 69097 - DNA, 257 bp, Zea mays
cgcctcgcctcacctcacctcatctcacctcgccgactagggttttgtaccgccgtggatctcgccgtccccgccatggacgtctcgcacgcgggatcctccgtcgccggcgaggctccgaccaccggggagcaccggatggggactaccatcgtcggggtctgctacgagggcggcgtcgtcctgggcgccgattccaggaccagcactggaatgtatgtagccaaccgtgcttcagacaagattactcaactgac

SEQ ID NO: 69098 - DNA, 258 bp, Zea mays
ctgggtcttcagaccattagctttatctactccagagcgcagaagaacccgatcgacaccatgagggtgttgctcgttgccctcgctctcctggctctcgctgcgagcgccacctccacgcatacaagctgcggctgcggctgccagccaccgccgccggttcatctaccgccgccggtgcatctgccacctccggttcacctgccacctccggtgcatctcccaccgccggtccacctgccgccgccggtccacctg

SEQ ID NO: 69099 - DNA, 257 bp, Zea mays
gtgaagtacactagcaacatcttagcaccaatggcagccaagatttttgcgctccttgccctccttgctctttcagcaagtgttgctaccgcgactattattccacaatgctcacaacaatacctctctccagtgatagccgcgagatttgaatacccatctatacaatcctacaggctacaagaggccatcacagcaagcatcttacggtcgttagcattgaccgtccaacaaccatatgccctattgcaacaacc

SEQ ID NO: 69100 - DNA, 260 bp, Zea mays
caactagcaacatagaaagcacaatagtgtaccaacaatggcagccaaaatattttgcctccttatgctccttggtctttctgcaagtgctgctacggcgaccattttcccacaatgctcgcaagctcctatagcttcccttcttcccccgtacctctcaccagcggtgtcttcggtatgtgaaaacccaattcttcaaccctacaggatccaacaggcaatcgcagctggcatcttacctttatcacccttgttcctcc

SEQ ID NO: 69101 - DNA, 260 bp, Zea mays
gaaatgcaaggccgtgccatctttgaagctgctataacgatgaccaaccagggcgttcaagtctttccagagataatggttcctcttgttggaacaccgcaggaattgggacatcaggtggcccttatccgtcaagtcgctaacaaagttttcaccagtatgggtaaaactattgggtacaagatcgggacgatgattgagattcccagggcagctctagtggctgacgagatcgcggagcaggctgaattcttctcctt

SEQ ID NO: 69102 - DNA, 215 bp, Zea mays
  unsure (1)..(215): unsure at all n locations
gccagctagctacaacaagccccacttcctttttgaaacaacaacaattgcttccgttctaccagcagcttgtggctaaccccgacancctcttacaactgcaacagttgctgccctttgtccaacttgctttgacaaacccagcagccttctaccaacaacacatcattggcggtgccatcttttagattgcttattagttgtaattcaataat

SEQ ID NO: 69103 - DNA, 171 bp, Zea mays
ccacttgctctggcaaacgtagttgcaaaccagccacaacaacagctgcaacagtttctgccagcgctcagtcaactagccatggtgaaccctgccgcctacctacaacagcaacaactgctttcatctagcccgctcgctgtggccaatgcacctacatacctgcaacaa

SEQ ID NO: 69104 - DNA, 102 bp, Zea mays
aagaaatctaaaagagggcaccaccaatgatgggttatagttcaataataaagttttttgtctgatgtttgtggcttcccagaaataagaaagtacatttct

SEQ ID NO: 69105 - DNA, 265 bp, Zea mays
ccaacaagcaacatagaaagtggaatccagtagcaacaacagagcaacaatggcgaccaagatattttccctccttatgctccttgctctttctgcatgtgttgctaacgcgacaattttccctcaatgctcacaagctcctatagcttcccttcttcccccataccttccatcaatgatagcttcagtatgtgaaaacccagctcttcagccctataggctccaacaagcaatcgcagcaagcaacatacctttatcacccttg

SEQ ID NO: 69106 - DNA, 73 bp, Zea mays
atgagttatagttcaataataaagttttttgtctgatgtttgtggcttcccagaaataagaaagtacatttct

SEQ ID NO: 69107 - DNA, 125 bp, Zea mays
cagcaacaactgctttcatctagcccgctcgctgtggccaatgcacctacatacctgcaacaacaattgttgcgacagattgtaccagctctgactcagctagctgtggcaaaccctgctgccta

SEQ ID NO: 69108 - DNA, 175 bp, Zea mays
gaccaactagcaacatagaaagcacaatagtgtaccaacaatggcagccaaaatattttgcttccttatgctccttggtctttctgcaagtgttgctaccgcaaccattttcccacaatgctcacaagctcctatagcttcccttcttcccccatacctctcaccagcggtgtct

SEQ ID NO: 69109 - DNA, 252 bp, Zea mays
caacatagaaagtggaatccagtagcaacaatagagcaacaatggcgaccaagatactttccctccttatgctccttgctctttctgcatgtgttgctaacgcgacaattttccctcaatgctcacaagctcctatagcttcccttcttcccccataccttccatcaatgatagcttcagtatgtgaaaacccagctcttcaaccctataggctccaacaagcaatcgcagcaagcaacatacctttatcac

SEQ ID NO: 69110 - DNA, 256 bp, Zea mays
acctggaacaggaaagtatatttaatttcagacaatgctagctaaagctgtggctactgagtgcaaaacaacttttttcaatatttctgcctcgtcgattgtaagcaagtggcgcggtgactcggagaaactagtgaaagtgttattcgaacttgcaaggcatcatgcaccatctactattttccttgatgagattgatgctatcattagtcaacgtggtgaagctcgtagtgaacatgaagctagccggcgattg

SEQ ID NO: 69111 - DNA, 258 bp, Zea mays
gaccagcaagcaacatagaaagtagaatccattagcaacaatagagcaacaatggcgaccaagatattttccctccttatgctccttgctctttctacatgtgttgctaacgcgacaattttccctcaatgctcacaagctcctatagcttcccttcttcccccataccttccatcaattatagcttctgtatgtgaaaacccagctgcttcaaccatataggcttcaacaagcaatcgcagcaagcaacataccttt

SEQ ID NO: 69112 - DNA, 259 bp, Zea mays
gaccaacaagcaacatagaaagtggaatccagtagcaacaatagagcaacaatggcgaccaagatactttccctccttatgctccttgctctttctgcatgtgttgctaacgcgacaattttccctcaatgctcacaagctcctatagcttcccttcttcccccataccttccatcaatgatagcttcagtatgtgaaaacccagctcttcaaccctataggctccaacaagcaatcgcagcaagcaacatacctttat

SEQ ID NO: 69113 - DNA, 263 bp, Zea mays
ctcgagccgtttcagcattcaaaaacacaccaagcgaagcgcactagcaacgacctaacaccaatggctaccaagatattagccctccttgcgcttcttgcccttttagtgagcgcaacaaatgcgttcattattccacagtgctcacttgctcctagtgccagtattccacactatcctcccaccagttacttcaatgggcttcgaacatccagccgtgcaagcctacaggctacaactagcgcttgcggcgagcgccttac

SEQ ID NO: 69114 - DNA, 255 bp, Zea mays
ggatgatggacgtgcagtccgtcgcgcagcagctgcagatgatgatgcagcttgagcgtgccgctgccgccagcagcagcctgtacgagccagctctgatgcagcagcagcagcagctgctggcagcccagggtctcaaccccatggccatgatgatggcgcagaacatgccggccatgggtggactctaccagtaccagctgcccagctaccgcaccaacccctgtggcgtctccgctgccattccgccctact

SEQ ID NO: 69115 - DNA, 254 bp, Zea mays
aagcaacatagaaagtggaatccagtagcaacaacagagcaacaatggcgaccaagatattttccctccttatgctccttgctctttctgcatgtgttgctaacgcgacaattttccctcaatgctcacaagctcctatagcttcccttcttcccccataccttccatcaatgattacttcagtatgtgaaaacccagctcttcagccctataggctccaacaagcaatcgcagcaagcaacatacctttatca

SEQ ID NO: 69116 - DNA, 254 bp, Zea mays
attttcagcattcaaaaacacaccaagcgaagcgcactagcaacgacctaacaccaatggctaccaagatattagccctccttgcgcttcttgcccttttagtgagcgcaacaaatgcgttcattattccacagtgctcacttgctcctagtgccagtattccacagttcctcccaccagttacttcaatgggcttcgaacatccagccgtgcaagcctacaggctacaactagcgcttgcggcgagcgcctta

SEQ ID NO: 69117 - DNA, 249 bp, Zea mays
  unsure (1)..(249): unsure at all n locations
ccgcagcaccggtaccaggcgatcttcggcttggtcctccagtccatcctgcagcagcagccgcaaagcggccaggtcgcggggctgttggcggcgcagatagcgcacaagctgacggcgatgtgcggcctgcagcagccgactccatgcccctacgctgctgccgccngtgtcccccactgaagaaactatgtgctgtagtatagccgctggctagctagctagttgagtcatttagcggcgatgatt

SEQ ID NO: 69118 - DNA, 254 bp, Zea mays
gagaccaacaagcaacatagaaagtggaatacagtagcaacaatagagcaacaatggcggccaagatattttccatccttatgctccttgctctttctgcatgtgttgctaacgcgaccatttttcctcaatactcacaagctcctatagctgcccttcttcccccataccttccatcaatgaccgcttcagtttgtgaaaacccagcccttcaaccctacaggctccaacaagcaatcgcaacaagcaactta

SEQ ID NO: 69119 - DNA, 211 bp, Zea mays
gagaccaactagcaacatagaaagtagaatccattagcaacaatagagcaacaatggcgaccaagatattttccctccttatgctccttgctctttctacatgtgttgctaacgcgacaattttccctcaatgctcacaagctcctatagcttcccttcttcccccataccttccatcaattatagcttcagtatgtgaaaacccagctct

SEQ ID NO: 69120 - DNA, 114 bp, Zea mays
cgttagctttatctactccagagcgcagaagaacgcgatcgacaccatgagggtgttgctcgttgccctcgctctcctggctctcgctgcgagcgccacttccacacaacatac

SEQ ID NO: 69121 - DNA, 258 bp, Zea mays
aactagcaacatagaaagcacaatagtgtaccaacaatggcagccaaaatattttgcttccttatgctccttggtctttctgcaagtgttgctaccgcaaccattttcccacaatgctcacaagctcctatagcttcccttcttcccccatacctctcaccagcggtgtcttcaatgtgtgaaaccccaattgttcaaccctacaggatccaacaggcaatcgcaacaggcatcttaccattatcacccttgttcctc

SEQ ID NO: 69122 - DNA, 259 bp, Zea mays
ctagggttttgctgctctccgaccccgagctccgaaggccgcagcatcaggcgcgccccccctcgcgtgtgaccgagatggcgctgccgaatcaggggaccgttgattaccccagcttcaagctcgtcatcgtcggcgatggtggaactggtaaaactacatttgtgaagaggcatctgactggagagtttgagaagaaatatgaaccaaccattggtgtggaagttcatccgttggatttcaccactaactgtggtaa

SEQ ID NO: 69123 - DNA, 139 bp, Zea mays
gagccacctagccgtggtgaaccctatcgcctacttgcaacaacagctgcttgcatccaacccacttgctttggcaaacgtagctgcataccaacaacaacaacagttgcaacagtttctgccagcgctcagtcaacta

SEQ ID NO: 69124 - DNA, 252 bp, Zea mays
caactagcaacatagaaagcacaatagtgtaccaacaatggcagccaaaatattttgcttccttatgctccttggtctttctgcaagtgttgctaccgcaaccattttcccacaatgctcacaagctcctatagcttcccttcttcccccatagctctcaccagcggcgtcttcaatgtgtgcaaccccaattgttcaaccctacaggatccaacaggcaatcgcaacaggcatcttaccattatcaccctt

SEQ ID NO: 69125 - DNA, 106 bp, Zea mays
gaaagcacaatagtgtaccaacaatggcagccaagatgttttgcctcgttatgctccttggtctttctgcaagtgctgctacggcgagcattttgccacaatgctc

SEQ ID NO: 69126 - DNA, 250 bp, Zea mays; identical to SEQ ID NO: 27165

SEQ ID NO: 69127 - DNA, 132 bp, Zea mays
tgaacatttagaaacacacacctagcgaagcgcactagcaacgacctaacaacaatggctaccaagatattagcccttcttgcgcttcttgccctttttgtgagcgcaacaaatgcgttcattatttcacaa

SEQ ID NO: 69128 - DNA, 258 bp, Zea mays
agaccaacaagcaacatagaaagtggaatccagtagcaacaatagagcaacaatggcgaccaagatattttccctccttatgctccttgctctttctacatgtgttgctaacgcgacaattttccctcaatgctcacaagctcctatagcttcccttcttcccccataccttccatcaattatagcttcaatatgtgaaaacccagctcttcaaccatataggcttcaacaagcaatcgcagcaagcaacataccttt

SEQ ID NO: 69129 - DNA, 252 bp, Zea mays
tattattgagaccaactagcaacatagaaagcacaatattgtaccaataatggcagccaaaatattttgcctcattatgctccttggtctttctgcaagtgctgctacggcgagcattttcccgcaatgctcacaagctcctatagcttcccttcttcccccatacctctcaccagcgatgtcttcagtatgtgaaaatccaattcttctaccctacaggatccaacaggcaatcgcagcaggcatcttacc

SEQ ID NO: 69130 - DNA, 234 bp, Zea mays
gacgtcagcctagcaattagctcatcgactccagattggagaactcgacaccatgaaggtgctgatcgttgcccttgctctcctggcgctcgctgcgagcgccgcctccagtacaagcggcggctgtggctgccagacaccaccgtttcatctaccgcctccgttctatatgccgcctccgttctatctgccgccgcagcagcagccgcaagcatggcaataccccattaaacc

SEQ ID NO: 69131 - DNA, 255 bp, Zea mays
cagcattcaaaaacacaccaagcgaagcgcactagcaacgacctaacaccaatggctaccaagatattagccctccttgcgcttcttgcccttttagtgagcgcaacaaatgcgttcattattccacagtgctcacttgctcctagtgccagtattccacagttcctcccaccagttacttcaatgggcttcgaacatccagccgtgcaagcctacaggctacaactagcgcttgcggcgagcgccttacaacaa

SEQ ID NO: 69132 - DNA, 125 bp, Zea mays
tattttgagcattcagaaacacaccaagcgaagtgacctagcaacgacttgacaacaatggctaccaagatattagccctccttgcgcttcttgccctttttgtgagcgcaacaaatgcgttcat

SEQ ID NO: 69133 - DNA, 254 bp, Zea mays
tagcaacatagaaagcacaatagtgtaccaacaatggcagccaaaatattttgcttccttatgctccttggtctttctgcaagtgctgctaccgcaaccattttcccacaatgctcacaagctcctatagcttcctttcttcccccatacctctcaccagcggtgtcttcagtatgtgaaaacccaattcttcaaccctacaggatccaacaggcaatcgcagcaggcatcttacctttatcacccttgttcct

SEQ ID NO: 69134 - DNA, 249 bp, Zea mays
tgttgctatcaacttgtatcctaccaaaggactaaaaggagcttttgataaagctgaggaaatagtcctgagaacaccaaatgcgtatatgtttcagcagttcaacaatgaggcaaatagtgagatccactttcaaaccacaggcccagaaatatgggaagacacgttgggttctgttgatatacttgttgcaagcataggaacaggcggtaccattagtggcactgggcgttacttgaaaaggatgaa

SEQ ID NO: 69135 - DNA, 250 bp, Zea mays
gagaccagcaagcaacatagaaagtagaatccattagcaacaatagagcaacaatggcgaccaagatattttccctccttatgctccttgctctttctacatgtgttgctaacgcgacaattttccctcaatgctcacaagctcctatagcttcccttcttcccccataccttccatcagttatagcttcagtatgtgaaaacccagctctacaaccatataggcttcaacaagcaatcgcagcaagcaa

SEQ ID NO: 69136 - DNA, 251 bp, Zea mays
gaccaacaagcaacatagaaagtggaatccagtagcaacaatagagcaacaatggcgaccaagatattttccctccttatgctccttgctctttctacatgtgttgctaacgcgacaattttccctcaatgctcacaagctcctatagcttcccttcttcccccataccttccatcaattatagcttcaatatgtgaaaacccagctcttcacccatataggtttcaacaagcaatcgcagcaagcaacat

SEQ ID NO: 69137 - DNA, 251 bp, Zea mays
cagcattcaaaaacacaccaagcgaagcgcactagcaacgacctaacaccaatggctaccaagatattagccactccttgcgcttcttgcccttttagtgagcgcaacaaatgcgttcattattccacagtgctcacttgctcctagtgccagtattccacagttcctcccaccagttacttcaatgggcttcgaacatccagccgtgcaagcctacaggctacaactagcgcttgcggcgagcgccttac

SEQ ID NO: 69138 - DNA, 254 bp, Zea mays
gcgcaacaaatgcgttcattattccacaatgctcacttgctcctagtgccattattccacagttcctccctccagttacttcaatgggcttcgaacacccagctgtgcaagcctacaggctacaacaagcgcttgcggcgagcgtcttacaacaaccaattgcccaattacaacaacaatccttggcacatctaaccatacaaaccatcgcaacgcaacagcaacaacaatttctaccagcactgagccaacta

SEQ ID NO: 69139 - DNA, 131 bp, Zea mays
ctcacaagctcctatagcttcccttcttcccccataccttccatcaatgatagcttcagtatgtgaaaacccagctcttcagccctataggctccaacaagcaatcgcagcaagcaacatacctttatcac

SEQ ID NO: 69140 - DNA, 107 bp, Zea mays
  unsure (1)..(107): unsure at all n locations
atcaattcgtatcttgctagcatatgccgctcaccattctttcaggttgttccaaatggatgtgaagcacngttacctcgacggggcaatcaaggaggaggtgtacg

SEQ ID NO: 69141 - DNA, 250 bp, Zea mays
ttcagaaacacacctagcgaagcgcactagcaacgacctaacaacaatggcttccaagacattatccctccttgcgcttcttgccctttttgtgagtgcaacaaatgcgttcattattccacaatgctcacttgctccgagtgccattattccacagttcctccctccagttacttcaatgggcttcgaacacccagctgtgcaagcctataggctacaacaagcgcttgcggcgagcgtcttagaacaa

SEQ ID NO: 69142 - DNA, 250 bp, Zea mays
ggacaccgtggggcagtacgagtcccacatcgcgttcactcttcctgggctctaccgtgtccttgcttcccgcgatttcttggaatgtgctggtgatgatgaaatcggtgtggttcatggcaataaggtcagctgtgaactggcaagagaagtggtactggctgtacgagtcccacatcgcgttcactcttcctgggctctaccgtgtcgtccatggcatcgatgttttcgatcccaagttcaacattgt

SEQ ID NO: 69143 - DNA, 251 bp, Zea mays
gcaacatagaaagtggaatccagtagcaacaacagagcaacaatggcgaccaagatattttccctccttatgctccttgctctttctgcatgtgttgctaacgcgacaattttccctcaatgctcacaagctcctatagcttcccttcttcccccataccttccatcaatgatagcttcagtatgtgaaaacccagctcttcagccctataggctccaacaagcaatcgcagcaagcaacatacctttatc

SEQ ID NO: 69144 - DNA, 128 bp, Zea mays
ggtggcacatctaaccctacaaaccattgcaacgcaacaacaacaacaacagtttctgccatcactgagccacctagccgtggtgaaccctgtcacctacttgcaacagcagctgcttgcatccaacc

SEQ ID NO: 69145 - DNA, 255 bp, Zea mays
attattaagaccaactagcaacatagaaagcacaatagtgtaccaacaatggcaaccaaaatattttgcttccttatgctccttggtctttctgcaagtgctgctaccgcgaccattttcccgcaatgctcacaagctcctatagcttcccttcttcccccatacctctcaccagcggtgtcttcagtatgtgaaaacccaattcttcaaccctacaggatccaacaggcaatcgcagcaggcatcttaccttta

SEQ ID NO: 69146 - DNA, 108 bp, Zea mays
atagttgttgctgcaacaacttcttccatttaaccaattggccgcactgaaccccgctgcttatttgcagcagcaaatactactaccatttagccagctagctgcagc

SEQ ID NO: 69147 - DNA, 109 bp, Zea mays
gtggaatccagtagcaacaatagagcaacaatggcgaccaagatactttccctccttatgctccttgctctttctgcatgtgttgctaacgcgacaattttccctcaat

SEQ ID NO: 69148 - DNA, 107 bp, Zea mays
caactagcaacatagaaagcacaatagtgtaccaacaatggcagctaaaatattttgcctccttatgctccttggtctatctgcaagtgctgctacggcgaccattt

SEQ ID NO: 69149 - DNA, 98 bp, Zea mays
tccagagcgcagaagaacccgatcgacaccatgagggtgttgctcgttgccctcgctctcctggctctcgctgcgagcgccacctccacgcatacaag

SEQ ID NO: 69150 - DNA, 134 bp, Zea mays
agtgctgctaccgcaaccattttcccacaatgctcacaagctcctatagcttcctttcttcccccatacctctcaccagcggtgtcttcagtatgtgaaaacccaattcttcaaccctacaggatccaacaggc

SEQ ID NO: 69151 - DNA, 136 bp, Zea mays
attacacagttcctcccaccagttacttcaatgggcttcgaacacccagctgtgcaagcctataggctacaacaagcaattgcggcgagcgtcttacaacaaccaatttcccagttgcaacaacaatccttggcac

SEQ ID NO: 69152 - DNA, 107 bp, Zea mays
gtcgagccgattcggctcgagattttgagcattcagaaacacaccatgcgaagcgcactagcagcaacctaacgacaatgggtaccaagatattatccctccttgcg

SEQ ID NO: 69153 - DNA, 160 bp, Zea mays
tgccttgcccgttggaacagtcagtggtgcaccaaaggtgaaggccatggagttgattgataagttggaagttacgaggcgaggaccatatagtggtggtctaggaggaatatcgtttgatggtgacatgcaaattgcactttctctccgcaacatcgta

SEQ ID NO: 69154 - DNA, 142 bp, Zea mays
attttcagcattcaataacacaccaagcgaagcgcactagcaacgacctaacaccaatggctaccaagatatcagccctcgttgcgcttcttgcccttatagtgagcgcaacagatgcgttcattattccgcagtgctcact

SEQ ID NO: 69155 - DNA, 132 bp, Zea mays
atctccttttgctcggaatgcacacacagcccggtcgccgatctccgatcccctcgtcgatccaagatgcagatcttcgtcaagaccctcactggaaagactatcaccctcgaggtggagtcttctgacaca

SEQ ID NO: 69156 - DNA, 119 bp, Zea mays
atccccagaagccggtagtgcgcatggcaaatttgtgtgtggtgtcttctcatacggtgaatggagtggctgagttgcatagcaacattttgaagcaagaactatttgcagattatgtc

SEQ ID NO: 69157 - DNA, 132 bp, Zea mays
taattgctttgacaaactcaacagtgttctaccaacaacccatcattagtggtgccctcttttagattgcttatgagttatagatcaataatgaagttttttggatgatgtctgtggcgtcccagaaataag

SEQ ID NO: 69158 - DNA, 105 bp, Zea mays
taaagacacaccaagcgaagggactagcaacgacctaacaccaatggctaccaagatattagccctccttgcgcttcttgcccttttagtgagcgcaacaaatgc

SEQ ID NO: 69159 - DNA, 133 bp, Zea mays
caacaagcaacatagaaagtggaatccagtagcaacaacagagcaacaatggcgaccaagatattttcgctccttatgctccttgctctttctgcatgtgttgctaacgcgacaattttccctcaatgctcac

SEQ ID NO: 69160 - DNA, 104 bp, Zea mays
ctagttctagatcgcgagctcctatagcttcccttcttcccccgtacctctcaccagcggtgtctacggtatgagaaaacccaattcttcaaccctacaggatc

SEQ ID NO: 69161 - DNA, 105 bp, Zea mays
attttgagcattcagaaacacacctagcgaaggcaactagcaacgacctaacaacaatggctaccaagatattatccctctttgcgcttcttgccctttttgtga

SEQ ID NO: 69162 - DNA, 266 bp, Zea mays
attgagaccaacaagcaacatagaaagtggaatccagtagcaacaatagagcaacaatggcgaccaagatattttccctccttatgctccttgctctttctacatgtgttgctaacgcgacaattttccctcaatgctcacaagctcctatagcttcccttcttcccccataccttccatcaattatagcttcaatatgtgaaaacccagctcttcaaccatataggcttcaacaagcaatcgcagcaagcaacatacctttatcg

SEQ ID NO: 69163 - DNA, 264 bp, Zea mays
agaaagcacaatcgtgtaccaacaatggcagccaaattaccttgcctccttatgctccttggtctttctgcaagtgctgctacggcgaccattttcccgcaatgctcgcaagctcctatagcttcccttctacccccgtacctctcaccagcggtgtcttcggtatgtgaaaacccaattcttcaaccctacaggatccaacaggcaatcacagctggcatcttacctttatcacccttgttcctccaacaatcatcagcccta

SEQ ID NO: 69164 - DNA, 265 bp, Zea mays
  unsure (1)..(265): unsure at all n locations
attttgagcattcagaaacacaccaagcgaaggnatctagcaacgacctaacaacaatggctaccaagatattagccctccttgcgcttcttgccctttttgtgagcgcaacaaatgcgttcattattccacaatgctcacttgctcctagtgccattattccacagttcctcccaccagttacttcaatgggcttcgaacacctagctgtgcaagccaacatgcaacaacaagcgcttgcggcgagcgtcttacaacaaccaat

SEQ ID NO: 69165 - DNA, 262 bp, Zea mays
aaggagtccaaggacagggaggagcaggcggagttcaagaagatgtacagcctcatcgacgagtacaagttgaagggccatatccggtggatctcggcgcagatgaaccgcgtccgcaacggggagctgtaccgctacatttgcgatacgaagggcgcattcgtgcagcctgcgttctacgaagcgttcggcctgactgtgatcgagtccatgacgtgcggtctgccaacgatcgcgacctgccatggtggccctgctgaga

SEQ ID NO: 69166 - DNA, 264 bp, Zea mays
attcagaaacacaccaagcgaagacattagcaacaacctaacaacaatggctaccaagatattatccctccttgcgcttcttgcgctttttgcgagcgcaacaaatgcgttcattattccacaatgctcacttgctccaagttccattattacacagttcctcccaccagttacttcaatgggcttcgaacacgcagctgtgcaagcctataggctacaacaagcaattgcggcgagcgtcttacaacaaccaatttcccagtt

SEQ ID NO: 69167 - DNA, 263 bp, Zea mays
attgagaccaactagcaacatagaaagcacaatagtgtaccaacaatggcagccaaaatattttgcttccttatgctccttggtctttctgcaagtgttgctaccgcaaccattttcccacaatgctcacaagctcctatagcttcccttcttcccccatacctctcaccagcggtgtcttcaatgtgtgaaaacccaattgttcaaccctacaggatccaacaggcaatcgcaacaggcatcttaccattatcacccttgtt

SEQ ID NO: 69168 - DNA, 264 bp, Zea mays
gcaacatagaaagtggaatccagtagcaacaatagagcaacaatggcgaccaagatactttccctccttatgctccttgctctttctgcatgtgttgctaacgcgacaattttccctcaatgctcacaagctcctatagcttcccttcttcccccataccttccatcaatgatagcttcagtatgtgaaaacccagctcttcaaccctataggctccaacaagcaatcgcagcaagcaacatacctttatcacccttgtttcaa

SEQ ID NO: 69169 - DNA, 263 bp, Zea mays
caagcatcttacggtcattagcattaaccctccaacagccatatgccctattgcaacaaccatccttagtgcatctgtatctccaaagaatcgcgacacaacaactacaacaacagttgctaccaacaatcaatcaagtagttgcagcgaaccttgctgcttatctccagcaacaacaatttcttccattcaatcaactagctggggtgaaccctgctgtctacttgcaggcacaacaactactaccatttaaccaacttgtc

SEQ ID NO: 69170 - DNA, 260 bp, Zea mays
ctgtccgatactgttactgatgatgagttgaaggagatgtttggaaaatatggaaccataacaagtgctgttgttatgcgggatagtgatggaaattctaggtgttttggatttgtcaattttgaaaatgcagatgctgctgctcaggctgttcaagagttgaatggcaagatattcaatgataaggaactgtatgttggaagagcacaaaagaagtctgaaagagagatggagttgaaggagaaatttgaaaagaatat

SEQ ID NO: 69171 - DNA, 262 bp, Zea mays
cacattgaagacaccgctggtgagaggtatgggggaagaagggaagctataggagcttgtgagcattgtgggaaaatggttgcggtagcacacttgcagaaagaccaaggagcataaggcatcttaccactatcacccttgttcctccaacaaccgtcagccctattacagcagttacctttggtccatttggtggcacaaaacatcagggcacaacaactacaacaacttgtgctagcaaaccttgctgcatactctcagc

SEQ ID NO: 69172 - DNA, 260 bp, Zea mays
gatccaacaggcaatcacagctggcatcttacctttatcacccttgttcctccaacaatcatcagccctattacatcagttacctttggtgcatttattggcacagaacatcagggcacaacaactacaacaacttgtgctagcaaaccttgctgcctactctcagcaacagcagtttcttccattcaaccaactagctgcattgaactctgcttcttatttgcaacaacaacaactaccattcagccagctacctgctg

SEQ ID NO: 69173 - DNA, 260 bp, Zea mays
gcaacatagaaagcacaatagtgtaccaacaatggcagccaaaatattttgcttccttatgctccttggtctttctgcaagtgctgctaccgcaaccattttcccacaatgctcacaagctcctatagcttcctttcttcccccatacctctcaccagcggtgtcttcagtatgtgaaaacccaattcttcaaccctacaggatccaacaggcaatcgcagcaggcatcttacctttatcacccttgttcctccaacaac

SEQ ID NO: 69174 - DNA, 261 bp, Zea mays
aggtaatccatcaaccatattattgagaccaacaagcaacatagaaagtggaatccagtagcaacaacagagcaacaatggcgaccaagatattttccctccttatgctccttgctctttctgcatgtgttgctaacgcgacaattttccctcaatgctcacaagctcctatagcttcccttcttcccccataccttccatcaatgatagcttcagtatgtgaaaacccagctcttcagccctataggctccaacaagcaa

SEQ ID NO: 69175 - DNA, 260 bp, Zea mays
tagaaagtggaatacagtagcaacaatagagcaacaatggcggccaagatattttccatccttatgctccttgctctttctgcatgtgttgctaacgcgaccatttttcctcaatactcacaagctcctatagctgcccttcttcccccataccttccatcaatgaccgcttcagtttgtgaaaacccagcccttcaaccctacaggctccaacaagcaatcgcaacaagcaacttacctttatcacccctgttctttca

SEQ ID NO: 69176 - DNA, 255 bp, Zea mays
ggcaagtgcgattttgatcttgcagccacctttttttgttctgttgtgtatctagtagttggaggagatatgcagtttgcacttgcattggacacgaactcaggtcctcaccagataagatcttgtgagggtgatgggattgacaggttggaaaaattaagtattgggggcagaaagcaggagaaagctttgagaaataggtgctttggtggtagagttgctgcaactacacaatgtattcttacctcagatgct

SEQ ID NO: 69177 - DNA, 266 bp, Zea mays
attttgagcattcagaaacacaccaagcgaagacattagcaacaacctaacaacaatggctaccaagatattatccctccttgcgcttcttgcgctttttgcgagcgcaacaaatgcgttcattattccacaatgctcacttgctccaagttccattattacacagttcctcccaccagttacttcaatgggcttcgaacacccagctgtgcaagcctataggctacaacaagcaattgcggcgagcgtcttacaacaaccaattt

SEQ ID NO: 69178 - DNA, 264 bp, Zea mays
ggcgtggtcacgctcacgcaggacgacgatggacctacaactgtgaatgtccgtatcactggacttacccctggacttcatggcttccacctccacgagtttggtgatactaccaatgggtgcatatcgacaggaccacattttaatccaaacaatctgacacacggtgcaccagaagacgaagtccgtcatgcgggtgacctgggaaacattgttgcaaatgctgagggcatagccgaggcaaccattgttgatacccagatt

SEQ ID NO: 69179 - DNA, 262 bp, Zea mays
ctcgagccgtgctcatcgtgttgcacaacattatggcttagagactatagtggcagatagtttagtagaaggctcagttagcaggatcgttgcaagaaaaacaccagagagcaggtgtcctgcaatttcattagcagaagttcctagcaaacaagcaagaaatgatcatgaggcagcagagaagcttaagtttgtcatttatcaaaggcccaaagcattccaaaatggaagcactgatttgggaaacaagaatggtgcacca

SEQ ID NO: 69180 - DNA, 262 bp, Zea mays
aagcaacatagaaagtagaatccattagcaacaatagagcaacaatggcgaccaagatattttccctccttatgctccttgctctttctacatgtgttgctaacgcgacaattttccctcaatgctcacaagctcctatagcttcccttcttcccccataccttccatcaattatagcttcagtatgtgaaaacccagctcttcaaccatataggcttcaacaagcaatcgcagcaagcaacatacctttatcgcccttgtt

SEQ ID NO: 69181 - DNA, 259 bp, Zea mays
agaaagcacaatagtgtaccaacaatggcagccaaaatattttgcctccttatgctccttggtctttctgcaagtgctgctacggcgaccattttcccacaatgctcacaagctcctatagcttcccttcttcccccgtacctctcaccagcggtgtcttcggtatgtgaaaacccaattcttcaaccctataggatccaacaggcaatcgcagctggcatcttacctttatcacccttgttcctccaacaatcatcag

SEQ ID NO: 69182 - DNA, 257 bp, Zea mays
aatcaactcacttatccggcacgttcctttgacatggcgcattgctctcgttgcctcatcccatggcagctttacgacgggctgtacttgatagaggttgatcgtatcctgcgtcctggaggttattggattttgtctggaccaccaataaactggaagaaacactggaaggggtgggacaggactaaagaagacctggacgcagagcagaaagccatcgaggcagttgccaggagcctatgttggaagaagatcaa

SEQ ID NO: 69183 - DNA, 255 bp, Zea mays
aggtaatccatcaaccatattattgagaccaacaagcaacatagaaagtggaatccagtagcaacaacagagcaacaatggcgaccaagatattttccctccttatgctccttgctctttctgcatgtgttgctaacgcgacaattttccctcaatgctcacaagctcctatagcttcccttcttcccccataccttccatcaatgatagcttcagtatgtgaaaacccagctcttcagccctataggctccaac

SEQ ID NO: 69184 - DNA, 258 bp, Zea mays
cttgttgaaggcaactatgtcgcagctctgcacgtactcgttcacctggctcagcgcacagatagtcctcaatgagatctaggcgtgacttccgatcagtccttctcctggggtgctggcgatggtggtggctgggcaatgcaccagcctaatttatccatagctatatgtctgctttgtgtggccagtgatattgccgtgagtatttttggatcctattcgagtcgaatgtaccagtaccagagttaatttgcttta

SEQ ID NO: 69185 - DNA, 258 bp, Zea mays
gcaacatagaaagcacaatagtgtaccaacaatggcagccaaaatattttgcttccttatgctccttggtctttctgcaagtgttgctaccgcaaccattttcccacaatgctcacaagctcctatagcttcccttcttcccccatacctctcaccagcggtgtcttcaatgtgtgaaaccccaattgttcaaccctacaggatccaacaggcaatcgcaacaggcatcttaccattatcacccttgttcctccaaca

SEQ ID NO: 69186 - DNA, 256 bp, Zea mays
attttgaccattcagaaacacacctatcgaaggcactagcaacgacctaacaacaatggcttccaagacattatccctccttgcgcttcttgccctttttgtgagtgcaacaaatgcgttcattattccacaatgctcacttgctccgagtgccattattccacagttcctccctccagttacttcaatgggcttcgaacacccagctgtgcaagcctataggctacaacaagcgcttgcggcgagcgtcttagaa

SEQ ID NO: 69187 - DNA, 125 bp, Zea mays
cgcaaattgcaccaagaaatccatcgagaggccgtcgacaggggaattaatggcgtcgtcgtctagcagcagccaccgccgcctcatcctcgcagccgccgtcctgctctccgtgctcgcggctg

SEQ ID NO: 69188 - DNA, 261 bp, Zea mays
ctcgagcgctgctgcctacccccagcaatttcttccattcaaccaactggcagcattgacctctcctgcttatttacagcagcaacaactactaccattcagccagctagctggtgtgagccctgctaccttcttgatacaaccacagttgttgccgttctaccagcacgctgcgcctaacgctggcaccctcttacaactgcaacaattgctgccattcaaccaacttgctttgacaaacccagcagcgttctaccaaca

SEQ ID NO: 69189 - DNA, 259 bp, Zea mays
gttgaagcccttgttgtttcaacaatcgccagccctatctttggtgcagtcattggtacaaaccatcagggcacaacagctgcagcaactcgtgctacctctgatcaaccaagtagctctggcaaacctttctccctactctcagcaacaacaatttcttccattcaaccaactgtctacactgaaccctgctgcttatttgcagcaacaactattaccatttagccagctagctactgcctactctcagcaacaacaa

SEQ ID NO: 69190 - DNA, 260 bp, Zea mays
gtgccgccgccggttcatctgccgccgccaccatgccactaccctactcaaccgccccggcctcagcctcatccccagccacacccatgcccgtgccaacagccgcatccaagcccgtgccagctgcagggaacctgcggcgttggcagcacccgcgatcctgggccagtgcgtcgagtttctgaggcatcagtgcagcccgacggcgacgccctactgctcgcctcagtgccagtcgttgcggcacagtgttgccagca

SEQ ID NO: 69191 - DNA, 226 bp, Zea mays
cgcactggcatcttacctttatcacccttgttcctccaacaatcatcagccctattacagcagttacctttggtgcatttattggcacaaaacatcagggcacaacaactacaacaacttgtcctagcaaaccttgctgcctactctcagcaacagcagtttcttccattcaaccaactagctgcattgaactctgcttcttatttgcaacaacaacaactaccat

SEQ ID NO: 69192 - DNA, 259 bp, Zea mays
ggatgttgcatctcaagatccactcagtgtttcagttgcaattcttcatcagttcaacattttacctgagatgtatcaagttggctacacaaagttgttcttccgaactggtcagattggcaaccttgaagatactcggaatcgtactctgcatggtattttaagggttcaaagctgtttcagggggtatcaagcccgtcatcatgcaagagaacgaacaagaggagttttgactcttcaatcattcattcgtggtgag

SEQ ID NO: 69193 - DNA, 256 bp, Zea mays
  unsure (1)..(256): unsure at all n locations
cacctagcgaaggnactagcaacgacctaacaacaatggctaccaagatattatccctctttgcgcttcttgccctttttgtgagcgcaacaaatgcgttcattattccacaatgctcacttgctcctagtgccattattccacagttcctccctccagttacttcaatgggcttcgaacacccagctgtgcaagcctacaggctacaacaagcgcttgcggcgagcgtcttacaacaaccaattgcccaattaca

SEQ ID NO: 69194 - DNA, 255 bp, Zea mays
cccggatccgatggccaacagcaacctcccgcggcggatcatcaaggagactcagcggctgctcagcgagccagcaccggggatcagcgcgtcgccctcggaggagaacatgcgctacttcaacgttatgatccttgggccggcgcagtcgccctatgaaggtggagtttttaagcttgaactctttttacctgaggaatatccaatggctgccccaaaggttaggtttctgacaaagatttatcatcccaacat

SEQ ID NO: 69195 - DNA, 256 bp, Zea mays
ttcagcattcaaaaacacaccaagcgaaggcactagcaacgacctaacaccaatggctaccaagatattagccctccttgcgcttcttgcccttttagtgagcgcaacaaatgcgttcattattccacagtgctcacttgctcctagtgccagtattccacagttcctcccaccagttacttcaatgggcttcgaacatccagccgtgcaagcctacaggctacaactagcgcttgcggcgagcgccttacaacaa

SEQ ID NO: 69196 - DNA, 257 bp, Zea mays
gccggtccacctgccaccgccggtccatgtgccgccgccggttcatctgccgccgccaccatgccactaccctactcaaccgccccggcctcagcctcatccccagccacacccatgcccgtgccaacagccgcatccaagcccgtgccagctgcagggaacctgcggcgttggcagcaccccgatcctgggccagtgcgtcgagttcctgaggcatcagtgcagcccgacggcgacgccctactgctcgcctcagt

SEQ ID NO: 69197 - DNA, 257 bp, Zea mays
tagcaacatagaaagcacaatagtgtaccaacaatggcagccaaaatattttgcctccttatgctccttggtatttctgcaagtgctgctacggcgaccattttcccgcaatgctcacaagctcctatagcttcccttcttcccccgtacctctcaccagcggtgtcttcggtatgtgaaaacccaattcttcaaccctacaggatccaacaggcaatcgcagctggcatcttacctttatcacccttgttcctcca

SEQ ID NO: 69198 - DNA, 119 bp, Zea mays
cagaccattagctttatctactccagagcgcagaagaacccgatcgacaccatgagggtgttgctcgttgccctcgctctcctggctctcgctgcgagcgccacctccacgcatactag

SEQ ID NO: 69199 - DNA, 262 bp, Zea mays
  unsure (1)..(262): unsure at all n locations
caaaaacacaccaagcgaaggnactagcaacgacctaacaccaatggctaccaagatattagccctccttgcgcttcttgcccttttagtgagcgcaacaaatgcgttcattattccacagtgctcacttgctcctagtgccagtattccacagttcctcccaccagttacttcaatgggcttcgaacatccagccgtgcaagcctacaggctacaactagcgcttgcggcgagcgccttacaacaaccaattgcccaattg

SEQ ID NO: 69200 - DNA, 257 bp, Zea mays
gaaacacaccaagcgaagacattagcaacaacctaacaacaatggctaccaagatattatccctccttgcgcttcttgcgctttttgcgagcgcaacaaatgcgttcattattccacaatgctcacttgctccaagttccattattacacagttcctcccaccagttacttcaatgggcttcgaacacccagctgtgcaagcctataggctacaacaagcaattgcggcgagcgtcttacaacaaccaatttcccag

SEQ ID NO: 69201 - DNA, 255 bp, Zea mays
gagaccaacaagcaacatagaaagtggaatacagtagcaaaaatagagcaacaatggcggccaagatattttccatccttatgctccttgctctttctgcatgtgttgctaacgcgaccatttttcctcaatactcacaagctcctatagctgcccttcttcccccataccttccatcaatgaccgctttagtatgtgaaaacccagcccttcaaccctacaggatccagcaagcaatcgcaacaagcaacttac

SEQ ID NO: 69202 - DNA, 258 bp, Zea mays
caactagcaacatagaaagcacaatagtgtaccaacaatggcagccaaaatattttgcttccttatgctccttggtctttctgcaagtgctgctaccgcaaccattttcccacaatgctcacaagctcctatagcttcctttcttcccccatacctctcaccagcggtgtcttcagtatgtgaaaacccaattcttcaaccctacaggatccaacaggcaatcgcagcaggcatcttacctttatcacccttgttcct

SEQ ID NO: 69203 - DNA, 254 bp, Zea mays
agatagcacaatagtgtaccaacaatggcagccaaaatattttgcctccttatgctccttggtctttctgcaagtgctgctacggcgaccattttcccacaatgctcacaagctcctatagcttcccttcttcccccgtacctctcaccagcggtgtcttcggtatgtgaaaacccaattcttcaaccctataggatccaacaggcaatcgcagctggcatcttacctttatcacccttgttcctccaacaatc

SEQ ID NO: 69204 - DNA, 252 bp, Zea mays
cacaaaacatcagggcacaacaactacaacaacttgtgctagcaaaccttgctgcctactctcagcaacagcagtttcttccattcaaccaactagccgcattgaactctgcttcttatttgcaacaacaacaactaccattcagccagctacctgctgcctacccccagcaatttcttccattcaaccaactggccgcattgaactctcctgcttatttacagcagcaacaactactaccattcagccagc

SEQ ID NO: 69205 - DNA, 251 bp, Zea mays
gaaacacaccaagcgaagtacctagcaacgacttaacaacaatggctaccaagatattagccctccttgcgcttcttgccctttttgtgagcgcaacaaatgcgttcattattccacaatgctcacttgctcctagtgccattataccacagttcctccgaccagttacttcaatgggcttcgaacacctagctgtgcaagcctacaggctacaacaagcgcttgcggcgagcgtcttacaacaaccaatt

SEQ ID NO: 69206 - DNA, 253 bp, Zea mays
cgcagctggcatcttacctttatcacccttgttcctccaacaatcatcagccctattacagcagttacctttggtgcatttattggcacaaaacatcagggcacaacaactacaacaacttgtgctagcaaaccttgctgcctactctcagcaacagcagtttcttccattcaaccaactagctgcattgaactctgcttcttatttgcaacaacaacaactaccattcagccagctatctgctgcctacccc

SEQ ID NO: 69207 - DNA, 252 bp, Zea mays
attttgagcattcagaaacacacctagcgaaggcactagcaacgacctaacaacaatggcttccaagacattatccctccttgcgcttcttgccctttttgtgagtgcaacaaatgcgttcattattccacaatgctcacttgctccgagtgccattattccacagttcctccctccagttacttcaatgggcttcgaacacccagctgtgcaagcctataggctacaacaagcgcttgcggcgagcgtctt

SEQ ID NO: 69208 - DNA, 249 bp, Zea mays
gaaagcacaatagtgtaccaacaatggcagccaaaatattttgcctccttatgctccttggtctttctgcaagtgctgctacggcgaccattttcccgcaatgctcgcaagctcctatagcttcccttcttcccccgtacctctcaccagcggtgtcttcggtatgtgaaaacccaattcttcaaccctacaggatccaacaggcaatcacagctggcatcttacctttatcacccttgttcctccaac

SEQ ID NO: 69209 - DNA, 253 bp, Zea mays
attttgagcattcagaaacacacctagcgaaggtcactagcaacgacctaacaacaatggcttccaagacattatccctccttgcgcttcttgccctttttgtgagtgcaacaaatgcgttcattattccacaatgctcacttgctccgagtgccattattccacagttcctccctccagttacttcaatgggcttcgaacacccagctgtgcaagcctataggctacaacaagcgcttgcggcgagcgtctt

SEQ ID NO: 69210 - DNA, 236 bp, Zea mays
atagaaagcacaatagtgtaccaacaatggcagctaaaatattttgcctccttatgctccttggtctttctgcaagtgctgctacggcgaccattttcccacaatgctcacaagctcctatagcttcccttcttcccccgtacctctcaccaacggtgtcttcggtatgtgaaaacccaattcttcaaccctacaggatccaacaggcaatcgcagctggcatcttacctttatca

SEQ ID NO: 69211 - DNA, 257 bp, Zea mays
cggctcgagagaaatcacaatagtgtaccaacaatggcagccaaaatattttgcttccttatgctccttggtctttctgcaagtgttgctaccgcaaccattttcccacaatgctcacaagctcctatagcttcccttcttcccccatacctctcaccagcggtgtcttcaatgtgtgaaaacccaattgttcaaccctacaggatccaacaggcaatcgcaacaggcatcttaccattatcacccttgttcctcca

SEQ ID NO: 69212 - DNA, 254 bp, Zea mays
ccaacaagcaacatagaaagtggaatccagtagcaacaatagagcaacaatggcgaccaagatattttccctccttatgctccttgctctttctacatgtgttgctaacgcgacaattttccctcaatgctcacaagctcctatagcttcccttcttcccccataccttccatcaattatagcttcaatatgtgaaaacccagctcttcaaccatataggcttcaacaagcaatcgcagcaagcaacatacctt

SEQ ID NO: 69213 - DNA, 252 bp, Zea mays
agcaagcaacatagaaagtagaatccattagcaacaatagagcaacaatggcgaccaagatattttccctccttatgctccttgctctttctacatgtgttgctaacgcgacaattttccctcaatgctcacaagctcctatagcttcccttcttcccccataccttccatcaattatagcttcagtatgtgaaaacccagctcttcaaccatataggcttcaacaagcaatcgcagcaagcaacatacctt

SEQ ID NO: 69214 - DNA, 249 bp, Zea mays
caacatagaaagcacaatagtgtaccaacaatggcagccaaaatattttgcttccttatgctccttggtctttctgcaagtgttgctaccgcaaccattttcccacaatgctcacaagctcctatagcttcccttcttcccccatacctctcaccagcggtgtcttcaatgtgtgaaaacccaattgttcaaccctacaggatccaacaggcaatcgcaacaggcatcttaccattatcacccttcttc

SEQ ID NO: 69215 - DNA, 250 bp, Zea mays
ctccagtccatcctgcagcagcagccgcaaagcggccaggtcgcggggctgttggcggcgcagatagcgcagcaactgacggcgatgtgcggcctacagcagccgactccatgcccctacgctgctgccggcggtgtcccccactgaagaaactatgtgctgtagtatagccgctggctagctagctagttgagtcatttagcggcgatgattgagtaataatgtgtcacgcatcaccatgggtggcagt

SEQ ID NO: 69216 - DNA, 251 bp, Zea mays
attgagaccaacaagcaacatagaaagtggaatccagtagcaacaacagagcaacaatggcgaccaagatattttccctccttatgctccttgctctttctgcatgtgttgctaacgcgacaattttccctcaatgctcacaagctcctatagcttcccttcttcccccataccttccatcaatgatagcttcagtatgtgaaaacccagctcttcagccctataggctccaacaagcaatcgcagcaagc

SEQ ID NO: 69217 - DNA, 250 bp, Zea mays
  unsure (1)..(250): unsure at all n locations
cagaaacacaccaagcgaaggnactagcaacaacctaacaacaatggctaccaagatattatccctccttgcgcttcttgcgctttttgcgagcgcaacaaatgcgtccattattccacaatgctcacttgctcctagttccattattccacagttcctcccaccagttacttcaatggccttcgaacacccagctgtgcaagcctataggctacaacaagcgattgcggcgagcgtcttacaacaacca

SEQ ID NO: 69218 - DNA, 243 bp, Zea mays
agaccaacaagcaacatagaaagtggaatacagtagcaacaatagagcaacaatggcggccaagatattttccatccttatgctccttgctctttctgcatgtgttgctaacgcgaccatttttcctcaatactcacaagctcctatagctgcccttcttcccccataccttccatcaatgaccgcttcagtttgtgaaaacccagcccttcaaccctacaggctccaacaagcaatcgcaac

SEQ ID NO: 69219 - DNA, 255 bp, Zea mays
ggaacctgcggcgttggcagcaccccgatcctgggccagtgcgtcgagtttctgaggcatcagtgcagcccgacggcgacgccctactgctcgcctcagtgccagtcgttgcggcagcagtgttgccagcagctcaggcaggtggagccgcagcaccggtaccaggcgatcttcggcttggtcctccagtccatcctgcagcagcagccgcaaagcggccaggtcgcggggctgttggcggcgcagatagcgcac

SEQ ID NO: 69220 - DNA, 272 bp, Zea mays
cacacctagcgaaggcactagcaacgacctaacaacaatggctaccaagatattatccctctttgcgcttcttgccctttttgtgagcgcaacaaatgcgttcattattccacaatgctcacttgctcctagtgccattattccacagttcctccctccagttacttcaatgggcttcgaacacccagctgtgcaagcctacaggctacaacaagcgcttgcggcgagcgtcttacaacaaccaattgcccaattacaacaacaatccttgg

SEQ ID NO: 69221 - DNA, 234 bp, Zea mays
gttgctgcctttctaccagcagtttgcggctaaccccgcaaccctcttacaactacaacaattgttgccctttgtccaacttgctttgacagaccgagcggcctcctaccaacaacacatcattggtggtgccctcttttagatgcttattagttgtaattcaataataaagttttttggatgatgtatgtggccaaccagaaataagaagttacatttccagattttaatgtg

SEQ ID NO: 69222 - DNA, 189 bp, Zea mays
ctcgagccgcggcggagacggaggcgaaggaggaggagcagcagcagcaggcggcgccgaggagcggcatcccactcagtgcttgcaaccatggctaggggattgaagaagcacttgaagaggctcaatgcgcccaagcatggatgctcgacaagcttggcggagcttttgctcccaagccatcttctg

SEQ ID NO: 69223 - DNA, 98 bp, Zea mays
cggtgtggtcctgcagtccttcctgcagcagcagccgcagggcgagctcgcggcgctgatggcggcccaggtagcgcacagctgacggcgatgagcgg

SEQ ID NO: 69224 - DNA, 271 bp, Zea mays
cctacaggatccaacaggcaatcgcagcaggcatcttacctttatcacccttgttcctccaacaaccgtcagccctattacagcagttacctttggtgcatttgttggcacaaaacatcaaggcacaacaactacaacaactgtgctaggaaaccttgctgcctactctcagcaacagcagtttcttccattcaaccaactggctgcattgaactctgctgcttatttgcaacaacaactaccattcagtcagctagctgctgcctacccc

SEQ ID NO: 69225 - DNA, 273 bp, Zea mays
tagcaacatagaaagcacaatagtgtaccaacaatggcagccaaaatattttgcctccttatgctccttggtctttctgcaagtgctgctacggcgaccattttcccgcaatgctcgcaagctcctatagcttcccttcttccccgtacctctcaccagcggtgtcttcggtatgtgaaaacccaattcttcaaccctacaggatccaacaggcaatcgcagctggcatcttacctttatcacccttgttcctcgaacaatcatcagccctat

SEQ ID NO: 69226 - DNA, 268 bp, Zea mays
caacaagcaacatagaaagtggaatccagtagcaacaacagagcaacaatggcgaccaagatattttccctccttatgctccttgctctttctgcatgtgttgctaacgcgacaattttccctcaatgctcacaagctctatagcttcccttcttcccccataccttccatcaatgatagcttcagtatgtcaaaacccagctcttcagccctataggctccaacaagcaatcgcagcaagcaacatacctttatcacccttgttgtt

SEQ ID NO: 69227 - DNA, 266 bp, Zea mays
gcttgatgggagcagcgcgcgcatagctaactactttgatgtcatcgctggcacaagcacaggtggtcttattgctgcaatgctggcagctccgtcgctgagcaatgccaagcaaccatgctatgaggccaaggacatcgtgccattctacctcgagcacagtcctcgcatcttcccatgcagaactgggattttgggctggttcttcaagatcctacaaacagttaaggtgatgatcaggccaaaatatgacgggaagtacctgc

SEQ ID NO: 69228 - DNA, 177 bp, Zea mays
ttctgcaagtgctgctacggcgaccattttcccacaatgctcacaagctcctatagcttcccttcttcccccgtacctctcaccagcggtgtcttcggtatgtgaaaacccaattcttcaaccctataggatccaacagcaatcgcagctggcatcttacctttatcacccttgttc

SEQ ID NO: 69229 - DNA, 176 bp, Zea mays
attttgagcattcagaaacacacctagcgaagcgcactagcaacgacctaacaacaatggctaccaagatattatccctctttgcgcttcttgccctttttgtgagcgcaacaaatgcgttcattattccacaatgctacttgctcctagtgccattattccacagttcctccctc

SEQ ID NO: 69230 - DNA, 269 bp, Zea mays
ccagcaagcaacatagaaagtagaatccattagcaacaatagagcaacaatggcgaccaagatattttccctccttatgctccttgctctttctacatgtgttgctaacgcgacaattttccctcaatgctcacaagctctatagcttcccttcttcccccataccttccatcaattatagcttcagtatgtgaaaacccagctcttcaaccatataggcttctacaagcaatcgcagcaagcaacatacctttatcgcccttgttgtt

SEQ ID NO: 69231 - DNA, 177 bp, Zea mays
ctcgagccgtgagcattcagaaacacaccaagcgaagcgcactagcaacaacctaacaacaatggctaccaagatattatccctccttgcgcttcttgcgctttttgcgagcgcaacaaatgcgtccattattccacaatctcacttgctcctagttccattattccacagttcctc

SEQ ID NO: 69232 - DNA, 271 bp, Zea mays
caccaagcgaagccactagcaacgacctaacaccaatggctaccaagatattagccctccttgcgcttcttgcccttttagtgagcgcaacaaatgcgttcattattccacagtgctcacttgctcctagtgccagtatccacagttcctcccaccagttacttcaatgggcttcgaacatccagccgtgcaagcctacaggctacaactagcgcttgcggcgagcgccttacaacaaccaattgcccaattgcaacaacaatccttggca

SEQ ID NO: 69233 - DNA, 221 bp, Zea mays
tgccgttctaccagcacgctgcgcctaacgctggcaccctcttacaactgcaacaattgctgccattcaaccaacttgctttgacaaacccaacagcattctaccaacaacccatcattggtggtgccctcttttagattcttatgagttatagttcaataataaagttttttgtctgatgtttgtggcttcccagaaataagaaagtacatttctagatt

SEQ ID NO: 69234 - DNA, 262 bp, Zea mays
cagcaagcaacatacctttatcgcccttgttgtttcaacaatcgccagccctatctttggtgcagtcattggtacaaaccatcagggcacaacagctgcagcaactcgtgctacctctgatcaaccaagtagctcggcaaacctttctccctactctcagcaacaacaatttcttccattcaaccaactgtctacactgaaccctgctgcttatttgcagcaacaactattaccattcagccagctagctactgcctactct

SEQ ID NO: 69235 - DNA, 151 bp, Zea mays
gaccaactagcaacatagaaagcacaatattgtaccaataatggcagccaaaatattttgcctcattatgctccttggtctttctgcaagtgctgctacggcgagcattttcccgcaatgctcacaagctcctatacttcccttcttcccc

SEQ ID NO: 69236 - DNA, 267 bp, Zea mays
caacaagcaacatagaaagtggaatccagtagcaacaatagagcaacaatggcgaccaagatattttccctccttatgctccttgctctttctacatgtgttgctaacgcgacaattttccctcaatgctcacaagctcctatagcttcccttcttcccccataccttccatcaattatagcttcaatatgtgaaaacccagctcttcaaccatataggcttcaacaagcaatcgcagcaagcaacatacctttatcgcccttgttg

SEQ ID NO: 69237 - DNA, 266 bp, Zea mays
cgcacatatctactatactatactctaggaagcaaggacaccaccgccatggcagccaagatgcttgcattgttcgctctcctagctctttgtgcaagcgccactagtgcgacccatattccagggcacttgccacagtcatgccattgggtaccatgaacccatgcatgcagtactgcatgatgcaacaggggcttgccagcttgatggcgtgtccgtccctgatgctgcagcaactgttggccttaccgcttcagacgatgcca

SEQ ID NO: 69238 - DNA, 265 bp, Zea mays
  unsure (1)..(265): unsure at all n locations
aaccacaccaagcgaagcnactagcaacgacctaacaccaatggctaccaagatattagccctccttgcgcttcttgcccttttagtgagcgcaacaaatgcgttcattattccacagtgctcacttgctcctagtgcagtattccacagttcctcccaccagttacttcaatgggcttcgaacatccagccgtgcaagcctacaggctacaactagcgcttgcggcgagcgccttacaacaaccaattgcccaattgcaacaac

SEQ ID NO: 69239 - DNA, 268 bp, Zea mays
attgagaccaactagcaacatagaaagcacaatagtgtaccaacaatggcagccaaaatattttgcttccttatgctccttggtctttctgcaagtgctgctaccgcaaccattttcccacaatgctcacaagctcctaagcttcctttcttcccccatacctctcaccagcggtgtcttcagtatgtgaaaacccaattcttcaaccctacaggatccaacaggcaatcgcagcaggcatcttacctttatcacccttgttcctcca

SEQ ID NO: 69240 - DNA, 268 bp, Zea mays
gcttatttgcaacaacaattaccattcagccagctagttgctgcctacccccagcaatttcttccattcaaccaactagcagcattgaactctgctgcttatttacagcagcaacaactactaccattcagccagctagctgatgtgagccctgctgccttcttgacacaacaacagttgttgccgttctacctgcacgctatgcctaacgctggcaccctcttacaactgcaacaattgctgccattcaaccaacttgctttgacaa

SEQ ID NO: 69241 - DNA, 267 bp, Zea mays
agaaagcacaatagtgtaccaacaatggcagccaaaatattttgcctccttatgctccttggtatttctgcaagtgctgctacggcgaccattttcccgcaatgctcacaagctcctatagcttcccttcttccccgtacctctcaccagcggtgtcttcggtatgtgaaaacccaattcttcaaccctacaggatccaacaggcaatcgcagctggcatcttacctttatcacccttgttcctccaacaatcatcagccctattac

SEQ ID NO: 69242 - DNA, 261 bp, Zea mays
aagcaacatagaaagtggaatacagtagcaacaatagagcaacaatggcggccaagatattttccatccttatgctccttgctctttctgcatgtgttgctaacgcgaccatttttcctcaatactcacaagccctatagctgcccttcttcccccataccttccatcaatgaccgcttcagtttgtgaaaacccagcccttcaaccctacaggctccaacaagcaatcgcaacaagcaacttacctttatcacccctgtt

SEQ ID NO: 69243 - DNA, 262 bp, Zea mays
atagaaagcacaatagtgtaccaacaatggcagccaaaatattttgcttccttatgctccttggtctttctgcaagtgctgctaccgcaaccattttcccacaatgctcacaagctcctatagcttcctttctcccccatacctctcaccagcggtgtcttcagtatgtgaaaacccaattcttcaacaaccgtcagccctattacagcagttacctttggtgcatttgttggcacaaaacatcaaggcacaacaactacaa

SEQ ID NO: 69244 - DNA, 264 bp, Zea mays
ggcaacagttgttgccgttctacctgcacgctgcgcctaacgctggcaccctcttacaactgcaacaattgctgccattcaaccaacttgctttgacaaacccaacagcgttctaccaacaacccatcattggtgtgccctcttttagattgcttatgagttatacttcaataatgaagttttttggatgatgtttgtggcttcccagaaataagaaagtacatttctagaaaaagaggaaaaaaaaaaaaaaaaaaggggggg

SEQ ID NO: 69245 - DNA, 126 bp, Zea mays
aacagcaacaactgctttcatctagcccgctcgctgtggccaatgcacctacatacctgcaacaacaattgttgcaacagattgtaccagctctgactcagctagttgtggcaaaccctgctgcct

SEQ ID NO: 69246 - DNA, 149 bp, Zea mays
attgagaccaactagcaacatagaaagcacaatagtgtaccaacaatggcagccaaaatattttgcctccttatgctccttggtctttctgcaagtgctgctacggcgaccattttcccgcaatgctcgcaagtcctatagcttccctt

SEQ ID NO: 69247 - DNA, 127 bp, Zea mays
tccagatcagcaaagcggcagtgcgtagagaggatcgtcgaacagaacagcatgaagatggtcatcgttctcgtcgtgtgcctggctctgtcagctgccagcgcctctgcaatgcagatgccctgcc

SEQ ID NO: 69248 - DNA, 264 bp, Zea mays
gcaacatagaaagtggaatccagtagcagcaatagagcaacaatggcgaccaagatattttccctccttatgctccttgctctttctacatgtgttgctaacgcgacaattttccctcaatgctcacaagctccatagcttcccttcttcccccataccttccatcaattatagcttcaatatgtgaaaacccagctcttcaaccatataggcttcaacaagcaatcgcagcaagcaacatacctttatcgcccttgttgtttc

SEQ ID NO: 69249 - DNA, 265 bp, Zea mays
  unsure (1)..(265): unsure at all n locations
gccgcactgtgagagagggacgcggcctgttgtcccggcttttagacgcaacttccatcgctgcgaantatccattcgtgttcgtcatggccgccagcgtcaccgtggaaaacctcaaccccaaggtcttaaaagtgagtatgcagtccgtggggagattgtcatccatgctcagcgcctgcagcaacaactacaaacacaaccagggtctcttccttttgatgagatcctctattgcaatattggggaatccccaatctcttgg

SEQ ID NO: 69250 - DNA, 264 bp, Zea mays
gaccaactagcaacatagaaagcacaatagtgtaccaacaatggcagccaaaatattttgcctccttatgctccttggtctttctgcaagtgctgctacggcgaccattttcccacaatgctcacaagctcctaagcttcccttcttcccccgtacctctcaccagcggtgtcttcggtatgtgaaaacccaattcttcaaccctataggatccaacaggcaatcgcagctggcatcttacctttatcacccttgttcctccaa

SEQ ID NO: 69251 - DNA, 264 bp, Zea mays
gttggatcctgtagggttgaacaggcaatcgcaacaggcatcttaccattatcacccttgttcctccaacaaccgtcagccctattacagcagttacctttggtccatttggtggcacaaaacatcagggcacacaactacaacaacttgtgctagcaaaccttgctgcatactctcagcaacatcagtttcttccattcaaccaactggctgcattgaactctgctgcttatttgcaacaacaattaccattcagccagctag

SEQ ID NO: 69252 - DNA, 259 bp, Zea mays
attgagaccaactagcaacatagaaagcacaatagtgtaccaacaatggcagccaaaatattttgcttccttatgctccttggtctttctgcaagtgctgctaccgcaaccattttcccacaatgctcacagctcctatagcttcctttcttcccccatacctctcaccagcggtgtcttcagtatgtgaaaacccaattcttcaaccctacaggatccaacaggcaatcgcagcaggcatcttacctttatcaccctt

SEQ ID NO: 69253 - DNA, 258 bp, Zea mays
ccttggcacatctaaccatacaaaccatcgcaacgcaacagcaacaacaatttctaccagcactgagccaactagctgtggtgaaccctgtcgcctacttgcaacagcagttgcttgcatccaacccacttgtctggcaaacatagttgcataccaacaacaacaacaattgcaacagtttctaccagcgctcagtcaactagccatggtgaaccctgccgcctacctacaacagcaacaactgatttcatctagccc

SEQ ID NO: 69254 - DNA, 123 bp, Zea mays
cggctcgagagaccattagctttatctactccagagcgcagaagaacccgatcgacaccatgagggtgttgctcgttgccctcgctctcctggctctcgctgcgagcgccacctccacgcata

SEQ ID NO: 69255 - DNA, 258 bp, Zea mays
cagaaacacacctagcgaagcgcactagcaacgacctaacaacaatggcttccaagacattatccctccttgcgcttcttgccctttttgtgagtgcaacaaatgcgttcattattccacaatgctcacttgtccgagtgccattattccacagttcctccctccagttacttcaatgggcttcgaacacccagctgtgcaagcctataggctacaacaagcgcttgcggcgagcgtcttagaacaaccaattgccca

SEQ ID NO: 69256 - DNA, 228 bp, Zea mays
ctagcaacatagaaagcacaatagtgtaccaacaatggcagccaaaatattttgcttccttatgctccttggtctttctgcaagtgctgctaccgcaaccattttcccacaatgctcacaagctcctatagcttctttcttcccccatacctctcaccagcggtgtcttcagtatgtgaaaacccaattcttcaaccctacaggatccaacaggcaatcgcagcaggc

SEQ ID NO: 69257 - DNA, 262 bp, Zea mays
tctcgagccgattcggctcgagattttgagcattcagaaacacacagagcgaagcgcactagcaacaacctaacaacaatggctaccaagatattatccctccttgcgcttcttgcgctttttgcgagcgcacaaatgcgtccattattccacaatgctcacttgctcctagttccattattccacagttcctcccaccagttacttcaatggccttcgaacacccagctgtgcaagcctatagctacaacaagcgattgcg

SEQ ID NO: 69258 - DNA, 260 bp, Zea mays
aaacccagcaccagcctgcagtggtggcgtgctcctcgcctgtgcctgagcactcatctgtggagcgcggtggttgtgcttgtgcatgcctgtgcacttgccttcaaggcagcggtccagtggaggttgcgacggtggcggtgctgttgtggcgcggcgtttcaggttcacaacggaggttggcaaggcgccaaggcctcacgctggaggtacgacgagcggtggtcaaggctagcacgaagctaattctaacctttatc

SEQ ID NO: 69259 - DNA, 259 bp, Zea mays
attttcagcattcaaaaacacaccaagcgaaggtcactagcaacgacctaacaccaatggctaccaagatattagccctccttgcgcttcttgcccttttagtgagcgcaacaaatgcgttcattattccacgtgctcacttgctcctagtgccagtattccacagttcctcccaccagttacttcaatgggcttcgaacatccagccgtgcaagcctacaggctacaactagcgcttgcggcgagcgccttacaacaa

SEQ ID NO: 69260 - DNA, 263 bp, Zea mays
ttcagaaacacacctagcgaagcgcactagcaacgacctaacaacaatggcttccaagacattatccctccttgcgcttcttgccctttttgtgagtgcaacaaatgcgttcattattccacaatgctcacttctccgagtgccattattccacagttcctccctccagttacttcaatgggcttcgaacacccagctgtgcaagcctataggctacaacaagcgcttgcggcgagcgtcttagaacaaccaattgcccaatt

SEQ ID NO: 69261 - DNA, 260 bp, Zea mays
ggaaattttcttgggcgttcttcggcttcattgtcacaaggttcgagttcgtcaccgtctagtacgactgtgcgagggaggaagaggcgaggagaagatgcagatcttcgtgaagaccctgacggggaagacatcaccctcgaggtggagagcagcgacaccgtcgacaacgtcaaggccaaaatccaggacaaggaagggattcccccagatcaacagcgactgatattcgctggcaagcagctggaggatggacgcac

SEQ ID NO: 69262 - DNA, 172 bp, Zea mays
aagcacaatagtgtaccaacaatggcagccaaaatattttgcttccttatgctccttggtctttctgcaagtgctgctaccgcaaccattttcccacaatgctcacaagctcctatagcttcctttcttccccctacctctcaccagcggtgtcttcagtatgtgaaaaccc

SEQ ID NO: 69263 - DNA, 260 bp, Zea mays
gagaccaacaagcaacatagaaagtggaatccagtagcaacaatagagcaacaatggcgaccaagatattttccctccttatgctccttgctctttctacatgtgttgctaacgcgacaattttccctcaagctcacaagctcctatagcttcccttcttcccccataccttccatcaattatagcttcaatatgtgaaaacccagctcttcaaccatataggcttcaacaagcaatcgcagcaagcaacatacctttat

SEQ ID NO: 69264 - DNA, 256 bp, Zea mays
gaaacacaccaagcgaacgtactagcaacgacctaacaacaatggctaccaagatattagccctccttgcgcttcttgccctttttgtgagcgcaacaaatgcgttcattattccacaatgctcacttgtcctagtgccattattccacagttcctcccaccagttacttcaatgggcttcgaacacctagctgtgcaagccaacatgcaacaacaagcgcttgcggcgagcgtcttacaacaaccaattgcccat

SEQ ID NO: 69265 - DNA, 166 bp, Zea mays
ttcagaaacacacctagcgaagcgcactagcaacgacctaataacaatggctaccaagatattatccctctttgcgcttcttgccctttttgtgagcgcaacaaatgcgttcattattccacaatgctccttgctcctagtgccattattccacagttcctccctc

SEQ ID NO: 69266 - DNA, 123 bp, Zea mays
gattgttggaggaacaatcatcagccctattacagcagttacctttggtgcatttattggcacaaaacatccgggcacaacaactacaacaacttgtgctagcaaaccttgctgcctactctc

SEQ ID NO: 69267 - DNA, 250 bp, Zea mays
  unsure (1)..(250): unsure at all n locations
gctccctgttgaccattgggtatctgaaccatcgagccatgcgctgccaagctgactngcctccacagtcntcgcgaacgccttggtgccaccttctcctcncatcccaatgaactgatngcactcttttccaggtatgttcaccagggcatgggantgcttcagcgccatcagctgcttgnggagtttgntgncccngntngnnagtgacangganannangcncccntcaagnacctntncgtgtggc

SEQ ID NO: 69268 - DNA, 65 bp, Zea mays
gtcttttggatgatgtttgtggttcccagagataagagagtacatttctagaaaaccacccagac

SEQ ID NO: 69269 - DNA, 234 bp, Zea mays
attttcagcattcaaaaacacacaagcgaagcgcactagcaacgacctaacaccaatggctaccaagatattagccctccttgcgcttcttgcccttttagtgagcgcaacaaatgcgttcattattccacagtgctcacttgctcctagtgccagtattccacagttcctcccaccagttacttcaatgggcttcgaacatccagccgtgcaagcctacaggctacaactagc

SEQ ID NO: 69270 - DNA, 245 bp, Zea mays
tggatgagatctacagagtcgatttcaaggataaatttcgtggatgggttggatttagtgttccagtttcccaccgaataactgccggctgcgatatattgttaatgccatccagattcgaaccttgtggtctcaatcagctatatgctatgcagtatggcacagttcctgttgtcaatgcaactgggggccttagagataccgtggagaacttcaaccctttcggtgagaatggaagcagggta

SEQ ID NO: 69271 - DNA, 250 bp, Zea mays
cggctcgagcggctcgaggcaaatagaaagtggaatccagtagcaacaatagagcaacaatggcgaccaagacattttccctccttatgctccttgctctttctacatgtgttgctaacgcgacaattttccctcaatgctcacaagctcctatagcttcccttcttcccccataccttccatcaattatagcttcaatatgtgaaaacccagctcttcaaccatataggcttcaacagcaatcgcagca

SEQ ID NO: 69272 - DNA, 246 bp, Zea mays
gagaccaactagcaacatagaaacacaatagtgtaccaacaatggcagccaaaatattttgcctccttatgctccttggtctttctgcaagtgctgctacggcgaccattttcccacaatgctcacaagctcctatagcttcccttcttcccccgtacctctcaccagcggtgtcttcggtatgtgaaaacccaattcttcaaccctataggatccaacaggcaatcgcagctggcatttaccttt

SEQ ID NO: 69273 - DNA, 219 bp, Zea mays
ggcaacacaactgctaagtcaatcacgtggatctgtttggcccaaacttgatggacgatttaattgatgcatctgcagcaactccagctacagacaatgctgcagaaccacaggttgatctgtctgatgatcgcagattttcaatcggcaaccgctagtacagagacagctgcacatacagatgtcaaggtcaatgttcgactttttgcggaaaaggca

SEQ ID NO: 69274 - DNA, 247 bp, Zea mays
tgcaacatagaaagcacaatagtgtaccaacaatggcagccaaaatattttgcctccttatgctccttggtctttctgcaagtgctgctacggcgaccattttcccgcaatgctcgcaagctcctatagcttcccttcttcccccgtacctctcaccagcggtgtcttcggtatgtgaaaacccaattcttcaaccctacaggatccaacaggcaatcgcagctggcatcttaccttatcacccttg

SEQ ID NO: 69275 - DNA, 241 bp, Zea mays
tagaaagtggaatccagtagcacaatagagcaacaatggcgaccaagatattttccctccttatgctccttgctctttctacatgtgttgctaacgcgacaattttccctcaatgctcacaagctcctatagcttcccttcttcccccataccttccatcaattatagcttcaatatgtgaaaacccagctcttcaaccatataggcttcaacaagcatcgcagcaagcaacatactttat

SEQ ID NO: 69276 - DNA, 250 bp, Zea mays
ggatgagatctacagagtcgacttcaaggataaatttcgtggatgggttggatttagtgttccagtttcccaccgaataactgccggctgcgatatattgttaatgccatccagattcgaaccttgtggtctcaatcagctatatgctatgcagtatggcacagttcctgttgtccatgcaactgggggccttagagataccgtggagaacttcaaccctttcggtgagaatggagacagggtacagggt

SEQ ID NO: 69277 - DNA, 235 bp, Zea mays
agccgccgccgctgctcatctcacatccctcgagaagacgcctgctcctcgccgatcgatacgatggccgtcttctccgacctccacaccgccgacggcctcaagtccctcgaggctcacctcgccggcaaaacctatgtgtctggtgactccattactaaggatgacattaaggtcttcgccgcggtgccgtcgaaccctggcgcggatttcccaaatgcccccggtggaaaaa

SEQ ID NO: 69278 - DNA, 104 bp, Zea mays
gcaacatagaaagcacaatagtgtaccaacaatggcagccaaaatattttgcctccttatgctccttggtctttctgcaagtgctgctacggcgaccattttcc

SEQ ID NO: 69279 - DNA, 227 bp, Zea mays
cagaaacacaccaagcgaagcgactagcaacaacctaacaacaatggctaccaagatattatccctccttgcgcttcttgcgctttttgcgagcgcaacaaatgcgtccattattccacaatgctcacttgctcctagttccattattccacagttcctcccaccagttacttcaatggccttcgaacacccagctgtgcaagcctataggctacaacaagcgattg

SEQ ID NO: 69280 - DNA, 245 bp, Zea mays
agcaacatagaaagcacaatagtgtaccaacaatggcagccaaaatattttgcttccttatgctccttggtctttctgcaagtgttgctaccgcaaccattttcccacaatgctcacaagctcctatagcttcccttcttcccccatacctctcaccagcggtgtcttcaatgtgtgaaaacccaattgttcaaccctacaggatccaacaggcaatcgcaacaggcatcttacattatcaccct

SEQ ID NO: 69281 - DNA, 248 bp, Zea mays
caccaagcgaagcgcactagcaacgacctaacaccaatggctaccaagatattagccctccttgcgcttcttgcccttttagtgagcgcaacaaatgcgttcattattccacagtgctcacttgctgcctagtgccagtattccacagttcctcccaccagttacttcaatgggcttcgaacatccagccgtgcaagcctacaggctacaactagcgcttgcggcgagcgccttacacaaccaattgc

SEQ ID NO: 69282 - DNA, 250 bp, Zea mays
ctcgagccgtgcaaaccatggacatggctttggcgtctaaagcctcccctccgccatggaatgccaccgccgccgagcagccaattccaaagcgtgacaaagacgctgcaaatgattcaacatacctcaatcctcaagctcatgatagtgttcttggaatcattctgggaggtggtgctgggactagattgtaccccttgacaaagaagcgtgccaagcctgcagtgccattgggtgcaactatagactg

SEQ ID NO: 69283 - DNA, 244 bp, Zea mays
tgagcattcagaaacacacaagcgaacacattagcaacaacctaacaacaatggctaccaagatattatccctccttgcgcttcttgcgctttttgcgagcgcaacaaatgcgttcattattccacaatgctcacttgctccaagttccattattacacagttcctcccaccagttacttcaatgggcttcgaacacccagctgtgcaagcctataggctacaacaagcaattgggcgagcgtc

SEQ ID NO: 69284 - DNA, 100 bp, Zea mays
ctagcaacatagaaagcacatagtgtaccagcaatggcagccaagatattttgcttccatatgctccttggtctttctgcaagtgttgctaccgcaacca

SEQ ID NO: 69285 - DNA, 177 bp, Zea mays
cggcgctgatggcggcccggtagcgcagagctgacggcgatgtgcggcctgcagctgcagcagccaggtccctgcccttgcaacgcagctgccggcggtgtctactactgaggaaactatgtactgtactaataatgtaatggagccgctgactagctacctaactcgctagtttac

SEQ ID NO: 69286 - DNA, 192 bp, Zea mays
gaccaactagcaacatagaagcacaatagtgtaccaacaatggcagccaaaatattttgcctccttatgctccttggtctttctgcaagtgctgctacggcgaccattttcccgcaatgctcgcaagctcctatagcttcccttattcccccgtacctctcaccagcggtgtcttcggtatgtgaaaaccca

SEQ ID NO: 69287 - DNA, 237 bp, Zea mays
ctcgagccgattcggctcggcggctcgagattgagaccaacaaaatacatagaaagtggaatccagtagcaacaatagatggacaatggcgaccaagatattttccctccttatgctccttgctctttctacatgtgttgctaacgcgacaattttccctcaatgctcacaagctcctatagcttcccttcttcccccataccttccatcaattatagcttcaatatgtgaaaacca

SEQ ID NO: 69288 - DNA, 97 bp, Zea mays
tgggtcttaagaccattactttatctactccagagcgcagaagaacacgatcgacaccatgagggtgttgctcgttgcactcgctctcatggctctc

SEQ ID NO: 69289 - DNA, 244 bp, Zea mays
tgtgaaacgggtcaacgtatgaacagtccattgtacgactggaaagctatggaagcagatggtttttcatggtggataaagaggattaaacgtgcccttgatttgtatgatgaattccgtattgaccatttccgggggcttgcgggtttttgggcagtcccttctgatgcaaaagtagcactggttggaagctggagggctggaccaaggaatagcttttttaacacgctcttcaagctgttgg

SEQ ID NO: 69290 - DNA, 138 bp, Zea mays
cgtcagcctagcaattagctcatcgaatccagattggagaactcgacaccatgaaggtgcagatcgttgcacttgctctcctggcgctcgctgcgagcgccgctccagtacaagcggcggctgtggctgccaaacacc

SEQ ID NO: 69291 - DNA, 244 bp, Zea mays
attttcagcattcaaaaaacaccaagcgaagcgcactagcaacgacctaacaccaatggctaccaagatattagccctccttgcgcttcttgcccttttagtgagcgcaacaaatgcgttcattattccacagtgctcacttgcacctagtgccagtattccacagttcctcccaccagttacttcaatgggcttcgaacatccagccgtgcaagcctacaggctacaactagcgttgcggcga

SEQ ID NO: 69292 - DNA, 241 bp, Zea mays
ccctaacctaccttagacccgccgccgccgccgcccaagggagagagagacttgcacatcaaagggcgtccgatggggaagaagaagaagcgcgtcgataaggtcttctgctactactgcgaccgcgagttcgacgacgagaagatcctcgtccagcaccagaaggccaagcacttcaagtgccacgtatgccacaagaagctctccaccgcctctggcatggccatacacgtctccaggt

SEQ ID NO: 69293 - DNA, 246 bp, Zea mays
agaccaactagcaacatcgaaagcacaatagtgtaccaacaatggcagccaaactattttgcctccttatgctccttggtctttctgcaagtgctgctacggcgaccattttcccgcaatgctcgcaagctcctatagcttcccttcttcccccgtacctctcaccagcggtgtcttcggtatgtgaaaacccaattcttcaaccctacaggatccaacaggcaatcacagctgcatcttaccttt

SEQ ID NO: 69294 - DNA, 226 bp, Zea mays
aatattttgagcattcaaaacacacaaagggaagtgcactagcaacttcctaacaacaatggctaccaagatattagccctccttgcgctcctttccctttcagtgagcgcaacaactgcattcattattccacaatgctcacttgcaactaatgccattattccacagttcctcccatcagttacatcaatgggcatcgaacaccctattgtgcaggcctatagg

SEQ ID NO: 69295 - DNA, 244 bp, Zea mays
ctgtaatagggctgatgttgttggaggaacaagggcacaacaactacaacaacttgtgctagcaaaccttgctgcctactctcagcaacagcagtttcttccattcaaccaactagctgcattgaactctgcttcttatttgcaacaacaacaactaccattcagccagctacctgttgcctacccccaacaatttcttccattcaaccaactggcagcattgaactctcctcttatttacagc

SEQ ID NO: 69296 - DNA, 245 bp, Zea mays
caacaagcaacatagatagtggaatccagtagcaacaacagagcaacaatggcgaccaagatattttccctccttatgctccttgctctttctgcatgtgttgctaacgcgacaattttccctcaatgctcacaagctcctatagcttcccttcttcccccataccttccataaatgatatgatcagtatgtgaaaacccagctcttcagcactataggctcaaacaagcaatgcagcaagcaat

SEQ ID NO: 69297 - DNA, 78 bp, Zea mays
gcaaagcggcagtgcgtagagaggatcgtcgaacagaacagcatgaagatggtcatcgttctcgtcgtgtgcctggct

SEQ ID NO: 69298 - DNA, 235 bp, Zea mays
cgagtgggagctgaagtccgcgacgtcaagatccgcaaggaggacatgaaccgcctcgtcatgaacttcctcgtcaccgagggcttcgtcgacgccgccgacaagtttcgcatcgagtccggcacccagccggagattgacctagcgaccatcactgatcgaatggaggttaagagagcagtacagtcgggtaatgttcaggaggcgatcgagaaaatcaacgaccttaacccac

SEQ ID NO: 69299 - DNA, 245 bp, Zea mays
ctcgagccgatagaaacacaatagtgtaccaacaatggcagccaaaatattttgcctcctgatgctccttggtctttctgcaagtgctgctacggcgaccattttcccgcaatgctcgcaagctcctatagcttcccttcttcccccgtacctctcaccagcggtgtcttcggtatgtgaaaacccaattcttcaaccctacaggatccaacaggcaatcgcagctggcatctacctttatcacc

SEQ ID NO: 69300 - DNA, 241 bp, Zea mays
gcaacatagaaagcaaatagtgtaccaacaatggcagccaaaatattttgcttccttatgctccttggtctttctgcaagtattgctaccgcaaccattttcccacaatgctcacaagctcctatagcttcccttcttcccccatacctctcaccagcggtgtcttcaatgtgtgaaaacccaattgttcaaccctacaggatccaacaggcaatcgcaacaggcatcttacattatcacc

SEQ ID NO: 69301 - DNA, 242 bp, Zea mays
gtgagaccaactagcacatagaaagcacaatagtgtaccaacaatggcagccaaaatattttgcctccttatgctccttggtctttctgcaagtgctgctacggcgaccattttcccgcaatgctcgcaagctcctatagcttcccatcttcccccgtacctctcaccagcggtgtcttcggtatgtgaaaacccaattcttcaaccctacaggatccaacaggcaatcgcgctggaatctt

SEQ ID NO: 69302 - DNA, 212 bp, Zea mays
cagcattcaaaaacaaccaagcgaacgcactagcaacgacctaacaccaatggctaccaagatattagccctccttgcgcttcttgcccttttagtgagcgcaacaaatgcgttcattattccacagtgctcacttgctcctagtgccagtattccacagttcctcccaccagttacttcaatgggcttcgaacatccagccgtgcaagcct

SEQ ID NO: 69303 - DNA, 239 bp, Zea mays
attgagaccaactagcaacatagaaagcacaatagtgtaccaacaatggcagccaaaatattttgcttccttatgctccttggtctttctgcaagtgttgctaccgcaaccattttcccacaatgctcacaagctcctatagcttcccttcttcccccatacctctcaccagcggtgtcttcaatgtgtgaaaccccaattgttcaaccctacaggatccaacaggcaatcgaacaggc

SEQ ID NO: 69304 - DNA, 239 bp, Zea mays
gaccaactagcaacaagaaagcacaatagtgtaccaacaatggcagccaaaatattttgcctccttatgctccttggtctttctgcaagtgctgctacggcgaccattttcccacaatgctcacaagctcctatagcttcccttcttcccccgtacctctcaccagcggtgtcttcggtatgtgaaaacccaattcttcaaccctataggatccaacaggaaatcgcagtggcatctta

SEQ ID NO: 69305 - DNA, 225 bp, Zea mays
attcaaaaacacaccaagcgaacgacactagcaacgacctaacaccaatggctaccaagatattagccctccttgcgcttcttgcccttttagtgagcgcaacaaatgcgttcattattccacagtgctcacttgcacctagtgccagtattccacagttcctcccaccagttacttcaatgggcttcgaacatccagccgtgcaagcctacaggctacaactag

SEQ ID NO: 69306 - DNA, 240 bp, Zea mays
aacaattgcaacagttctgccagcgctcagtcaactagccatggtgaaccctgccgcctacctacaacagcaacaactgctttcatctagccctctcgttgtgggtaatgcacctacatacctgcaacaacaattgctgcaacagattgtaccagctctgactcagctagctgtggcaaatactgctgcctacttgcaacagctgcttccattcaaccaactgactgtgcgaactctgct

SEQ ID NO: 69307 - DNA, 98 bp, Zea mays
gaccaacaagcaacaagaaagtggaatccagtagcaacaatagagcaacaatggcgaccaagatattttccctccttatgctccttgctctttctaca

SEQ ID NO: 69308 - DNA, 241 bp, Zea mays
cagaaacacacctacgaacgcactagcaacgacctaacaacaatggcttccaagacattatccctccttgcgcttcttgccctttttgtgagtgcaacaaatgcgttcattattccacaatgctcacttgctccgagtgccattattccacagttccaccctccagttacttcaatgggcttcgaacacccagctgtgcaagcctataggctacaacaagcgcttgcgggagcgtcttaga

SEQ ID NO: 69309 - DNA, 239 bp, Zea mays
gcattcaaaaacaaccaagcgaacgcactagcaacgacctaacaccaatggctaccaagatattagccctccttgcgcttcttgcccttttagtgagcgcaacaaatgcgttcattattccacagtgctcacttgctcctagtgccagtattccacagttcctcccaccagttacttcaatgggcttcgaacatccagccgtgcaagcctacaggctacaactagcgctgcggcgagcg

SEQ ID NO: 69310 - DNA, 94 bp, Zea mays
attgagaccaactagcaacatagaaagcacaatagtgtaccaacaatggcagccaaaatattttgcttccttatgctccttggtctttctgcaa

SEQ ID NO: 69311 - DNA, 97 bp, Zea mays
gttagttgtaattcataataaagtttttctggatgatgtatgtggccaaccagaaataagaagttacatttccagattttaaaaaaaaaaaaaaaga

SEQ ID NO: 69312 - DNA, 238 bp, Zea mays
aagcaacatagaaagtagaatccattagcaacaatagagcaacaatggcgaccaagatattttccctccttatgctccttgctctttctacatgtgttgctaacgcgacaattttccctcaatgctcacaagctcctatagcttcccttcttcacccataccttccatcaattatagcttcagtatgtgaaagaccagctcttcaaccatataggcttcaacaagcaatcgcgcaagc

SEQ ID NO: 69313 - DNA, 240 bp, Zea mays
gagcattcagaaaccacctagcgaacgcactagcaacgacctaacaacaatggcttccaagacattatccctccttgcgcttcttgccctttttgtgagtgcaacaaatgcgttcattattccacaatgctcacttgctccgagtgccattattccacagttcctccctccagttacttcaatgggcttcgaacacccagctgtgcaagcctataggctacaacaagcgttgcggcgagc

SEQ ID NO: 69314 - DNA, 242 bp, Zea mays
attttgagcattcagaaacacaccaagcgaagcacatgtagcaacaaactaacaacaatggctaccaagatattatccctccttgcgcttcttgcgcttattgcgagcgcaacaaatgcgttcattattccacaatgctcacttgctccaagttccattattacacagttcctcccaccagtttacttcaatgggcttcgaacacccagctgagcaagcctataagctacaaaagcaattgc

SEQ ID NO: 69315 - DNA, 218 bp, Zea mays
aacacaccaagcgacgcactagcaacgacctaacaacaatggctaccaagatattagccctccttgcgcttcttgccctttttgtgagcgcaacaaatgcgttcattattccacaatgctcacttgcaactagtgccattattcaacagttcctcccaccacttacttcaatgggcttcgaacacctagctgtgcaagccaacatgcaacaacaagcg

SEQ ID NO: 69316 - DNA, 242 bp, Zea mays
gagccacctgagcctggtgaaccctgtcacctacttgcaacagcagctgcttgcatccaacccacttgctctggcgaacgtagctgcataccagcaacaacaacagctgcaacagtttatgccagtgctcagtcaactagccatggtgaaccctgccgtctacctacaactactttcatctagcccgctcgcggtgggcaatgcacctacgtacctacaacaacagttgcgcaacaaattgt

SEQ ID NO: 69317 - DNA, 242 bp, Zea mays
gcacaatagtgtacaacaatggcagctaaaatattttgcctccttatgctccttggtctttctgcaagtgctgctacggcgaccattttcccacaatgctcacaagctcctatagcttcccttcttcccccgtacctctcaccaacggtgtcttcggtatgtgaaaacccaattcttcatccctacaggatccaacaggcaatcgcagctggcatcttacctttatcaccttgttcctccaa

SEQ ID NO: 69318 - DNA, 285 bp, Zea mays
aagcaacatagaaagtagaatccattagcaacaatagagcaacaatggcgaccaagatattttccctccttatgctccttgctctttctacatgtgttgctaacgcgacaattttccctcaatgctcacaagctcctatagcttcccttcttcccccataccttccatcaattatagcttcagtatgtgaaaacccagctcttcaaccatataggcttcaacaagcaatcgcagcaagcaacatacctttatcgcccttgttgtttcaacaatcaccagccctat

SEQ ID NO: 69319 - DNA, 280 bp, Zea mays
gctcgttcgatctgtgcagcagatctgaggtcccgggcgaccgtgaagcagcttcaatcgtcggcatggcgctcgtattgcatagtggggctggaaacaagaatgccttcaaagcacttattgctgcagaatacagtgggatcaaggttgagttgaccaaggattttgagatgggtgtctccaacaagacccctgagtttcttaagatgaacccccttgggaaggttcctgttctggagactcctgatggccctgtttttgagagtaatgctatcgcacg

SEQ ID NO: 69320 - DNA, 119 bp, Zea mays
cagcactgagccacctagccatggtgaaccctgccgcctacttgcaacagcagttgcttgcatcaaacccacttgctctggcaaacgtagttgcaaaccagccacaacaacagctgcaa

SEQ ID NO: 69321 - DNA, 266 bp, Zea mays
caacaagcaacatagaaagtggaatccagtagcaacaatagagcaacaatggcgaccaagatactttccctccttatgctccttgctctttctgcatgtgttgctaacgcgacaattttccctcaatgctcacaagctcctagagctccctttttcccccaataccttccatcaatgatagcttcagtatgtgaaaacccagctcttcaaccctataggctccaacaagcatcgcagcaagcaacatacctttatcaccttgtttc

SEQ ID NO: 69322 - DNA, 145 bp, Zea mays
caacaagcaacatagaaagtggaatccagtagcaacaatagagcaacaatggcgaccaagatactttccctccttatgctccttgctctttctgcatgtgttgctaacgcgacaattttccctcaatgctcaaaagctcctatag

SEQ ID NO: 69323 - DNA, 227 bp, Zea mays
  unsure (1)..(227): unsure at all n locations
attttgagcattcagaaacacaccaagcgaaccnactagcaacgacctaacaacaatggctaccaagatattagccctccttgcgcttcttgccctttttgtaagcgcaacaaatgcgttcattattccacaatgctcacttgctactagtgccattattccacagttcctcccacaagttacttcaatgggcttcgaacacctagctgtgcaagccaacatgcaac

SEQ ID NO: 69324 - DNA, 268 bp, Zea mays
attttgagcattcagaaacacaccaagcgaagtacattagcaacaacctaacaacaatggctaccaagatattatccctccttgcgcttcttgcgctttttgcgagcgcaacaaatgcgttcattattccacaatgctcacttgctccaagttccattattacacagttcctcccaccagttacttcaatgggcttcgaacacccagctgtgcaagcctataggctacaaccaagcaattgcggcgagcgtcttacaacaaccatttc

SEQ ID NO: 69325 - DNA, 248 bp, Zea mays
gcaacatagaaagcacaatagtgtaccaacaatggcagccaaaatattttgcttccttatgctccttggtctttctgcaagtgctgctaccgcaaccattttcccacaatgctcacaagctcctatagcttcctttcttcccccatacctctcaccagcggtgtcttcagtatgtgaaaacccaattcttcaaccctacaggatccagcaggcaatcgcagcaggcatcttaactttatcacccttgt

SEQ ID NO: 69326 - DNA, 138 bp, Zea mays
tgatgaggaaactatgtactgtagtaataatgtaatggtgccgctgactagctacctatagggctatagctagttcactcgtttagcggcgatgagtaacggagtgtcacccatcaccatgggtggcagtgtgagcaa

SEQ ID NO: 69327 - DNA, 278 bp, Zea mays
caactagcaacatagaaagcacaatagtgtaccaacaatggcagccaaaatattttgcttccttatgctccttggtctttctgcaagtgttgctaccgcaaccattttcccacaatgctcacaagctcctatagcttcccttcttcccccatacctctcaccagcggtgtcttcaatgtgtgaaaacccaattgttcaaccctacaggatccaacaggcaatcgcaacaggcatcttaccattatcacccttgttcctccaacaaccgtcagccctat

SEQ ID NO: 69328 - DNA, 276 bp, Zea mays
tagaaagtggaatccagtagcaacaacagagcaacaatggcgaccaagatattttccctccttatgctccttgctctttctgcatgtgttgctaacgcgacaattttccctcaatgctcacaagctcctatagcttcccttcttcccccataccttccatcaatgatagcttcagtatgtgaaaacccagctcttcagccctataggctccaacaagcaatcgcagcaagcaacatacctttatcacccttgttgtttcaacaatcgccagcccta

SEQ ID NO: 69329 - DNA, 197 bp, Zea mays
tactgaggaaactatgtactgtagtaataatgtaatggagccgctgactagctacctatagggctatagctagttcactcgtttagcggcgatgagtaacggagtgtcacccatcaccatgggtggcagtgtgagcaatgacctgaatgaaccattgaaatggaaaggaataatatatagggaaaaaggatgtttgg

SEQ ID NO: 69330 - DNA, 186 bp, Zea mays
gcattcagaaacacacctagcgaagcgcactagcaacgacctaacaacaatggcttccaagacattatccctccttgcgcttcttgccctttttgtgagtgcaacaaatgcgttcattattccacaatgctcacttgctccgggcgctattctcccatagtcccccccaacagttactagaggggt

SEQ ID NO: 69331 - DNA, 223 bp, Zea mays
tctcgagccgattcggctcgagcacaaagataaggaactgtatcagtgacatgaatgctaggattgggaagaacgtggtgatcacaaacagtaagggcatccaagaggctgatcacccggaagaagggtactacatagggtctggaatcgtggtgatcttgaagaatgcgaccatcaacgatgggtctgtcatatagatcggctgcgtttgcgtctacaaaac

SEQ ID NO: 69332 - DNA, 234 bp, Zea mays
ttcagtgcggccaattggttaaatggaacccctctgcttatttccagctggccaaatggtagtagtatttgctgctggaaataagcagaggggttcagtgcggccaatactactaccatttggccagctagctacaacaagccccacttcctttttgaaacaacaacaattgcttccgttctaccactagtttgtggctaaccccgcaaccctcttacaactgcaacagttgct

SEQ ID NO: 69333 - DNA, 227 bp, Zea mays
ccaacaatcatcagccctattacaacagttacctttggtgcatttattggcacaaaacatcagggcacaacaactacaacaacttgtgctagcaaaccttgctgcctactctcagcaacagcagtttcttccattcaaccaactaggttcattgaactctgcttcttatttgcaacaacaacaactaccattcagccagctacctgctgcctaccccaagcattttc

SEQ ID NO: 69334 - DNA, 224 bp, Zea mays
ctactatactatactctaggaagcaaggacaccaccgccatggcagccaagatgcttgcattgttcgctctcctagctctttgtgcaagcgccactagtgcgacccatattccagggcacttgccaccagtcatgccattgggtaccatgaacccatgcatgcagtactgcatgatgcaacaggggcttgccagcttgatggcgtgtccgtccctgatgctgca

SEQ ID NO: 69335 - DNA, 175 bp, Zea mays
agcaacatagaaagcacaatagtgtaccaacaatggcagccaaaatattttgcctccttatgctccttggtctttctgcaagtgctgctacggcgaccattttcccgcaatgctcgcaagctcctatagcttcccttcttcccccgtacctctcaccagcggtgtctgcggtatg

SEQ ID NO: 69336 - DNA, 277 bp, Zea mays
caccaagcgaagacattagcaacaacctaacaacaatggctaccaagatattatccctccttgcgcttcttgcgctttttgcgagcgcaacaaatgcgttcattattccacaatgctcacttgctccaagttccattattacacagttcctcccaccagttacttcaatgggcttcgaacacccagctgtgcaagcctataggctacaacaaacattgcggcgagcgtcttacaacaaccaatttcccagttgcaacaacaatcctggcacatctaa

SEQ ID NO: 69337 - DNA, 277 bp, Zea mays
tagcaacatagaaagcacaatagtgtaccaacaatggcagccaaaatattttgcttccttatgctccttggtctttctgcaagtgctgctaccgcaaccattttcccacaatgctcacaagctcctatagcttcctttcttcccccatacctctcaccagcggtgtcttcagtatgtgaaaacccaattcttcaaccctacaggatccaacaggcaatcgcagcaggcatcttacctttatcacccttgttcctccaacaaccgtcagccctattac

SEQ ID NO: 69338 - DNA, 271 bp, Zea mays
attttgagcattcagaaacacaccaagcgaagcacattagcaacaacctaacaacaatggctaccaagatattatccctccttgcgcttcttgcgctttttgcgagcgcaacaaatgcgttcattattccacaatgctcacttgctccaagttccattattacacagttcctcccaccagttacttcaatgggcttcgaacacccagctgtgcaagcctataggctacaagaaattgttgcggacgtcctacaacaacgagttaccagttg

SEQ ID NO: 69339 - DNA, 269 bp, Zea mays; identical to SEQ ID NO: 68464

SEQ ID NO: 69340 - DNA, 155 bp, Zea mays
  unsure (1)..(155): unsure at all n locations
ctcgagccgaatcggctcgagaatattttgagcattcagaaacacaccaagcgaacgnacatagcaacaacctaacaacaatggctaccaagatattatccctccttgcgcttcttgcgctttttgcgagcgcaacaaatgcgtccattattcca

SEQ ID NO: 69341 - DNA, 211 bp, Zea mays
gctagttgctgcctacccccagcaatttcttccattcaaccaactagcagcattgaactctgctgcttatttacagcagcaacaactactaccattcagccagctagctgatgtgagccctgctgccttcttgacacaacaacagttgttgccgttctacctgcacgctatgcctaacgctggcaccctctaacacctgcaacaattgctg

SEQ ID NO: 69342 - DNA, 271 bp, Zea mays
aagcaacatagaaagtggaatccagtagcaacaacagagcaacaatggcgaccaagatattttccctccttatgctccttgctctttctgcatgtgttgctaacgcgacaattttccctcaatgctcacaagctcctatagcttcccttcttcccccataccttccatcaatgatagcttcagtatgtgaaaacccagctcttcagccctataggctccaacaagcaatcgcagcaagcaacatacctttatcacccttgttgtttcaaca

SEQ ID NO: 69343 - DNA, 279 bp, Zea mays
cctcgagccgattcggctcgagaaggtatgttgcttgctgcgattacctacctgtgatcaaccaagtagctctggcaaacctactctccctactctcagcaacaacaatttcttccattcaaccaactgtctacactgaaccctgctgcttatttgcagcaacaactattaccatttagccagctagctactgcctactctcagcaacaacaacttcttccatttaaccaattggccgcactgaaccccgctgcttatttgcagcagcaaatactactg

SEQ ID NO: 69344 - DNA, 277 bp, Zea mays
cgcacatatctactatactatactctaggaagcaaggacaccaccgccatggcagccaagatgcttgcattgttcgctctcctagctctttgtgcaagcgccactagtgcgacccatattccagggcacttgccaccagtcatgccattgggtaccatgaacccatgcatgcagtactgcatgatgcaacaggggcttgccagcttgatggcgtgtccgtccctgatgctgcagcaactgttggccttaccgcttcagacgatgccagtgatgatgc

SEQ ID NO: 69345 - DNA, 272 bp, Zea mays
gctagttgctgcctacccccagcaatttcttccattcaaccaactagcagcattgaactctgctgcttatttacagcagcaacaactactaccattcagccagctagctgatgtgagccctgctgccttcttgacacaacaacagttgttgccgttctacctgcacgctatgcctaacgctggcaccctcttacaactgcaacaattgctgccattcaaccaacttgctttgacaaactcaacagtgttctaccaacaacccatcattggtg

SEQ ID NO: 69346 - DNA, 259 bp, Zea mays
attttgagcattcagaaacacacctagcgaagcgcactagcaacgacctaacaacaatggctaccaagatattatccctctttgcgcttcttgccctttttgtgagcgcaacaaatgcgttcattattccacaatgctcacttgttctaattgccattattcaacagttcttccctccagttacttcaatgggcttcgaacacccagctgtgcaagcctacaggctacaacaagcgcttgcggcgagcgtcttacaaca

SEQ ID NO: 69347 - DNA, 266 bp, Zea mays
gcaacatagaaagcacaatagtgtaccaacaatggcagccaaaatattttgcttccttatgctccttggtctttctgcaagtgttgctaccgcaaccattttcccacaatgctcacaagctcctatagcttcccttcttcccccatacctctcaccagcggtgtcttcaatgtgtgaacacccaattgttcaaccctacaggatccaacaggcaatcgcaacaggcatcttaccattatcacccttgttcctccaacaaccgtcag

SEQ ID NO: 69348 - DNA, 239 bp, Zea mays
cctccaagtaactgcgaagagcatagtgcatgaggaatgagcttgtagctagctcatatgtctgaataataagcacagcaagaagatgaatgcatttctcggatcgttcatccggaacaataattaaaggggatccggatttgttcttgtgaaaaaaaaaaaaaaaaaaaaaaaaaaaaaaaaaaaaaaaaaaaaaaaaaaaattaaaaaaaaaaaaaaaaaagggggggtccaccagg

SEQ ID NO: 69349 - DNA, 224 bp, Zea mays
ctgcaagtgctgctacggcgaccattttcccgcaatgctcacaagctcctatagcttcccttcttcccccgtacctctcaccagcggtgtcttcggtatgtgaaaacccaattcttcaaccctacaggatccaacaggcaatcgcagctggcatcttacctttatcacccttgttcctccaacaatcatcagccctattacagcagttactttgggtgcattta

SEQ ID NO: 69350 - DNA, 266 bp, Zea mays
tttcagcattcaaaaacacaccaagcgaagcgcactagcaacgacctaacaccaatggctaccaagatattagccctccttgcgcttcttgcccttttagtgagcgcaacaaatgcgttcattattccacagtgctcacttgctcctagtgccattattccacagttcctcccaccagttacttcaatgggcttcgaacatccagccgtgcaagcctacaggctacaactagcgcttgccccgagcgccttacaacaaccattgcc

SEQ ID NO: 69351 - DNA, 263 bp, Zea mays
atattttcagcattcaaaaacacaccaagcgaagcgcactagcaacgacctaacaccaatggctaccaagatattagccctccttgcgcttcttgcccttttagtgagcgcaacaaatgcgttcattattccacagtgctcacttgctcctagtgccagtattccacagttcctcccaccagttacttcaatgggcttcgaacatccagccgtgcaagcctacaggctacaactagcgcttgcggcgagcgccttacaacaac

SEQ ID NO: 69352 - DNA, 278 bp, Zea mays
  unsure (1)..(278): unsure at all n locations
caccaagcgaaggcactagcaacgacctaacaccaatggctaccaagatattagccctccttgcgcttcttgcccttttagtgagcgcaacaaatgcgttcattattccacagtgctcacttgctcctagtgccagtattccacagttcctcccaccagttacttcaatgggcttcgaacatccagccgtgcaagcctacaggctacaactagcgcttgcggcgagcgccttacaacaaccaattgcccaattgcaacaacaatcctcngcacatcta

SEQ ID NO: 69353 - DNA, 268 bp, Zea mays
gtgaaaatccaattcttctaccctacaggatccaacaggcaatcgcagcaggcatcttacctttatcacccttgttcctccaacaatcatcagccctattacagcagttacctttggtgcatttattggcacaaaacatcagggcacaacaactacaacaactcgtgctagcaaaccttgctgcctactctcagcaacagcagttacctttggtgcatttgttggcacaaaacatcagggcacaacaactacaacaactcgtgctagc

SEQ ID NO: 69354 - DNA, 247 bp, Zea mays
gagaccaactagcaacatagaaagcacaatagtgtaccaacaatggcagccaaaatattttgcctccttatgctccttggtctttctgcaagtgctgctacggcgaccattttcccacaatgcttccaagctcctatagcttcccttcttcccccgtacctctcaccagcggtgtcttcggtatgtgaaaacccaattcttcaaccctataggatccaacaggcaatcgcagctggcatcttacctt

SEQ ID NO: 69355 - DNA, 259 bp, Zea mays
  unsure (1)..(259): unsure at all n locations
gcaagctaaaacttgcaagcctggagcaaganctccagaaagctcgacaacagggaatcttcatatccagttctggagatcaaactcatgctatgagtggaaatggagctatgaccttcgntttagaatatnctcgatggcaggaggnaganattaggcagtnaattngctgaggnctncantaaatgctcatgcagtganagtgactccgtcttatcgtcgtgggnnantggccccttagntnagttnngggctgggg

SEQ ID NO: 69356 - DNA, 167 bp, Zea mays
gcaacatagaaagtggaatccagtagcaacaatagagcaacaatggcgaccaagatactttccctccttatgctccttgctctttctgcatgtgttgctaacgcgacaattttccctcaatgctcacaagctcctatagcttcccttcttcccccataccttccatc

SEQ ID NO: 69357 - DNA, 253 bp, Zea mays
cttgttgaaggcaactatgtcgcagctctgcacgtactcgttcactggctcagcgcacagatagtcctcaatgagatctaggcgtgacttccgatcagtccttctcctggggtgctggcgatggtggtggctgggcaatgcaccagcctaatttatccatagctatcacgtctgctttgtgtggccagtgatattgccgtgagtatttttggatcctattcgagtcgaatgtaccagtaccagagttaatttg

SEQ ID NO: 69358 - DNA, 234 bp, Zea mays
ctcccccgctccagcttatggcggaggcggcgccagccgccggcggcggcatcggggacatcctcgccacgagcgatcgggacttcctcgtccgcaactccggcgagcaggtgaagatcagcagcgttgaggcgagccctgtggccatctacttctccgcctcatggtgcccgccatgcaggaggttcacgcccaagcttattgaagtatacgaaaaactggcctcacggggca

SEQ ID NO: 69359 - DNA, 267 bp, Zea mays
cttatcaggattcaataacacaccaagcgatggaactagcgaggacctaccaccaatggctaccaggatattagccctccttgcgcttcttgcgcttttagtgcgcgcaacaaatgcgttcattatgccacagtgctcacttgctcctagtgccattattccacagttcctcccaccagttacttcaatgggcttcgaacatccagccgtgcaagcctacaggctacaactagcgcttgcggcgagcgccttacagcaacaattgcc

SEQ ID NO: 69360 - DNA, 275 bp, Zea mays
acaagcaacatagaaagtggaatccagtagcaacaatagagcaacaatggcgaccaagatactttccctccttatgctccttgctctttctgcatgtgttgctaacgcgacaattttccctcaatgctcacaagctcctatagcttcccttcttcccccataccttccatcaatgatagcttcagtatgtgaaaacccagctcttcaaccctataggctccaacaagcaatcgcagcaagcaacatacctttatcacccttgtttcaacaatcgc

SEQ ID NO: 69361 - DNA, 269 bp, Zea mays
ccgtcatcgatctcgtttcaaatccatccatcctcgtttcctccgtcccgcagcatctcaaccccatggccaagatcaagatcgggatcaatgggttcggcaggatcggaaggctggtggccagggtggccctgcagagtgacgatgtcgagctcgtcgccgtgaacgaccccttcatcagcaccgactacatgacctacatgttcaagtacgacactgtgcacggacagtggaagcaccatgaagtcaaggtgaaggactccaaaacc

SEQ ID NO: 69362 - DNA, 134 bp, Zea mays
gaccatttcaggtaccggatgaaaagattcctagagcagaaaggatcaattgaagaaaatgagggaagtcttgaatctttgtctaaaggctatttgaaatttgggattaatacaaatgaggatgaaactgtata

SEQ ID NO: 69363 - DNA, 250 bp, Zea mays
gcaacatagaaagcacaatagtgtaccaacaatggcagccaaaatattttgcctccttatgctccttggtctttctgcaagtgctgctacggcgaccattttcccgcaatgctcgcaagctcctatagcttcccttctcccctagttcttatcaccgtgtcttccgtatgtatgagcccattcttttaccccaccagataccatcagacagtcaatcgcagctttcatcttatcttcaccattttgtccc

SEQ ID NO: 69364 - DNA, 159 bp, Zea mays
cattcagaaacacaccaagcgaacagcattagcaacaacctaacaacaatggctaccaagatattatccctccttgcgcttcttgcgctttttgcgagcgcaacaaatgcgttcattattccacaatgctcacttgctccaagttccattattacacag

SEQ ID NO: 69365 - DNA, 156 bp, Zea mays
gttcagtgtagacagttggttgaatggaagaaattgttgttgctgaaccctgctgcttatttgcagcaacaactattaccatttagccagctagctactgcctactctcagcaacaacaacttcttccatttaaccaattggccgcattgaacccg

SEQ ID NO: 69366 - DNA, 127 bp, Zea mays
tcgacttcgagttcctgggcaacgtgagcggggagccctacacgctgcacaccaacgtgttcacgcgcggacagggccagcgggagcagcagttccgcctctggttcgaccctaccactgccttcca

SEQ ID NO: 69367 - DNA, 196 bp, Zea mays
ttcagcattcaaaaacacaccaagcgaaccgactagcaacgacctaacaccaatggctaccaagatattagccctccttgcgcttcttgcccttttagtgagcgcaacaaatgcgttcattattccacagtgctcactaggccctagtgccagtattccacagttcctcccaccagttacttcaatgggcttcgaa

SEQ ID NO: 69368 - DNA, 265 bp, Zea mays
caacaagcaacatagaaagtggaatccagtagcaacaacagagcaacaatggcgaccaagatattttccctccttatgctccttgctctttctgcatgtgttgctaacgcgacaattttccctcaatgctcacaagctcctatagcttcccttcttcccccataccttccatcaatgatagcttcagtatgtgaaaacccagctcttcagccctataggctccaacaagcaatcgcagcaagcaacatacctttatcacccttgt

SEQ ID NO: 69369 - DNA, 263 bp, Zea mays
agaccaacaagcaacatagaaagtggaatccagtagcaacaatagagcaacaatggcgaccaagatactttccctccttatgctccttgctctttctgcatgtgttgctaacgcgacaattttccctcaatgctcacaagctcctatagcttcccttcttcccccataccttccatcaatgcccgcttcagtatgtgaaaacccagctcttcaaccctataggctccaacaagcaatcgcagcaagcaacatacctttatcac

SEQ ID NO: 69370 - DNA, 269 bp, Zea mays
ggcgctgcagcagcagtgctgccaccagatcaggcaggtggagccgctgcaccggtaccaggcgacatacggtgtggtcctgcagtccttcctgcagcagcagccgcagggcgagctcgcggcgctgatggcggcccaggtagcgcagagctgacggcgatgtgcggcctgcagctgcagcagccaggtccctgcccttgcaacgcagctgccggcggtgtctactactgaggaaactatgtactgtagtaataatgtaatggagccgc

SEQ ID NO: 69371 - DNA, 103 bp, Zea mays
ctgggtcttcagaccattagctttatctactccagagcgcagaagaacccgatcgacaccatgagggtgttgctcgttgccctcgctctcctggctctcgctg

SEQ ID NO: 69372 - DNA, 248 bp, Zea mays
gttgctgcctacccccagcaatttcttccattcaaccaactagcagcattgaactctgctgcttatttacagcagcaacaactactaccattcagccagctagctgatgtgagccctgctgccttcttgacacaacaacagttgttgccgttctacctgcacgctatgcctaacgctggcaccctcttacaactgcaacaattgctgccattcaaccaacttgctttgacaaactcaacagtgttcta

SEQ ID NO: 69373 - DNA, 255 bp, Zea mays
gtgttgggttcggtgggtcttgcttccagaaggacatcctgaacctggtgtacatctgcgagtgcaatggcctgcccgaggtggccaactactggaagcaggtgatcaagatcaacgactaccagaagagccggttcgtgaaccgcgtcgtgtcgtccatgttcaacaccgttgccggctataagatcgccgtcctcggcttcgccttcaagaaggacaccggcgacacctaggagaccccggccatcgatgtct

SEQ ID NO: 69374 - DNA, 267 bp, Zea mays
ttcagaaacacacctagcgaaggcactagcaacgacctaacaacaatggcttccaagacattatccctccttgcgcttcttgccctttttgtgagtgcaacaaatgcgttcattattccacaatgctcacttgctccgagtgccattattccacagttcctaccctccagttacttcaatgggcttcgaacacccagctgtgcaagcctataggctacaacaagcgcttgcgcgcgagcgtcttagaacaaccaattgcccaattac

SEQ ID NO: 69375 - DNA, 267 bp, Zea mays
gcaacatagaaagcacaatagtgtaccaacaatggcagccaaaatattttgcctccttatgctccttggtatttctgcaagtgctgctacggcgaccattttcccgcaatgctcacaagctcctatagcttcccttcttcccccgtacctctcaccagcggtgtcttcggtatgtgaaaacccaattcttcaaccctacaggatccaacaggcaatcgcagctggcatcttacctttatcacccttgttcctccaacaatcatcagc

SEQ ID NO: 69376 - DNA, 261 bp, Zea mays
gagcattcagaaacacacctagcgaagcgcactagcaacgacctaacaacaatggcttccaagacattatccctccttgcgcttcttgccctttttgtgagtgcaacaaatgcgttcattattccacaatgctcacttgctccgagtgccattattccacagttcctcgctccagttacttcaatgggcttcgaacacccagctgtgcaagcctataggctacaacaagcgcttgcggcgagcgtcttagaacaaccaatt

SEQ ID NO: 69377 - DNA, 265 bp, Zea mays
gcaagattaagatcggaatcaacggtgagtttgtcccctctccccatgctacgctatttctcctcctcgagctggttcggtccgatctgagttgcgccttctctctgcgactgcgtccgcgtccgcgtccgcgtccgctcaggcttcggaaggatcggcaggctcgtggccagggtcgtcctccagagcgaggatgtcgagctcgtcgccgtcaacgaccccttcatcaccacggactacatgacctacatgttcaagtacgaca

SEQ ID NO: 69378 - DNA, 263 bp, Zea mays
agaccaactagcaacatagaaagcacaatagtgtaccaacaatggcagccaaaatattttgcctccttatgctccttggtctttctgcaagtgctgctacggcgaccattttcccgcaatgctcgcaagctcctatagcttcccttcttcccccgtacctctcaccagcggtgtcttcggtatgtgaaaacccaattcttcaaccctacaggatccaacaggcaatcgcagctggcatctgacctttatcacccttgttcctc

SEQ ID NO: 69379 - DNA, 261 bp, Zea mays
cgggaggcaagtgcgatttcgatctcgcagccacctttttttttgttctgttgtgtatctagtagttggaggagatatgcagtttgcacttgcattggacacgaactcaggtcctcaccagataagatcttgtgagggtgatgggattgacaggttggaaaaattaagtattgggggcagaaaacccaagaaagctttgagaaataggtgctttggtggtagagttgctgcaactacacaatgtattcttacctcagatgc

SEQ ID NO: 69380 - DNA, 261 bp, Zea mays
cagaaacacaccaagcgaacacattagcaacaacctaacaacaatggctaccaagatattatccctccttgcgcttcttgcgctttttgcgagcgcaacaaatgcgttcattattccacaatgctcacttgctccaagttccattattacacagttcctcccaccagttacttcaatgggcttcgaacacccagctgtgcaagcctataggctacaacaagcaattgcggcgagcgtcttacaacaaccaatttcccagtt

SEQ ID NO: 69381 - DNA, 264 bp, Zea mays
  unsure (1)..(264): unsure at all n locations
agctccctcactctactctggacgcgactcgaaacttaaaccctagagccgcagccccggtcgctccaccgaccccaaatctcaaatcagcgggagggaactcgcacgcgaaggctgaactcatggctcgcgtctacgttgggaacctggatccgcgtgtcacggcgcgggagatcgaggacgagttccggacgtttggggttctgaggagtgtatgggttgctaggaaaccaccagggtttgccttcatgacnnnnnncnccg

SEQ ID NO: 69382 - DNA, 248 bp, Zea mays
caactagcaacatagacagcacaatagtgtaccaacaatggcagccataatcattcagcttccttatgctccttggtctttctgcaagtgctgctaccgcaaccattttcccacaatgctcacaagctcctatagcttcctttcttcccccatacctctcaccagcggtgtcttcagtatgtgaaaacccaattcttcaaccctacaggatccaacaggcaatcgcagcaggcatcttacctttatca

SEQ ID NO: 69383 - DNA, 264 bp, Zea mays
caactagcaacatagaaagcacaatagtgtaccaacaatggcagctagaatattttgcttccttatgctccttggtctttctgcaagtgctgctaccgcaaccattttcccacaatgctcacaagctcctatagcttcctttcttcccccatacctctcaccagcggtgtcttcagtatgtgaaaacccaattcttcaaccctacaggatccaacaggcaatcgcagcaggcatcttaccattatcacccttgttcctccaaca

SEQ ID NO: 69384 - DNA, 266 bp, Zea mays
gaccaacaagcaacatagaaagtggaatccagtagcaacaacagagcaacaatggcgaccaagatattttccctccttatgctccttgctctttctgcatgtgttgctaacgcgacaattttccctcaatgctcacaagctcctatagcttcccttcttcccccataccttccatcaatgatagcttcagtatgtgaaaacccagctcttcagccctataggctccaacaagcaatcgcagcaagcaacatacctttatcaccctt

SEQ ID NO: 69385 - DNA, 267 bp, Zea mays
attgagaccaacaagcaacatagaaagtggaatccagtagcaacaatagagcaacaatggcgaccaagatactttccctccttatgctccttgctctttctgcatgtgttgctaacgcgacaattttccctcaatgctcacaagctcctatagcttcccttcttcccccataccttccatcaatgatagcttcagtatgtgaaaacccagctcttcatccctataggcttccaaaagcaatcgcagcaagcaacatacctttatcac

SEQ ID NO: 69386 - DNA, 267 bp, Zea mays
attgagaccaactagcaacatagaaagcacaatagtgtaccaacaatggcagccaaaatattttgcttccttatgctccttggtctttctgcaagtgttgctaccgcaaccattttcccacaatgctcacaagctcctatagcttcccttcttcccccatacctctcaccagcggtgtcttcaatgtgtgaaaacccaattgttcaaccctacaggatccaacaggcaatcgcaacaggcatcttaccattatcacccttgttcctc

SEQ ID NO: 69387 - DNA, 262 bp, Zea mays
gggttaccagcagtattaaccgccacattcttggaagcaaaggtaggaagtttcccatagagattgttaaaatcacagttgcagggggaaatgctaatggtggtgctcgcgcaagtgagacatatagccaagcgagcagtggtccacgggacatccatgttgttgaaagtggaaatatggtcatttcaatccaagttctccgcaatgtgaccaacaacttcagcgaggacaacatccttggtcgaggacggtttggcactgt

SEQ ID NO: 69388 - DNA, 257 bp, Zea mays
gacggggggtcacacatcatacttcttttgccattgcaatggaaaacaactacgcatgcccaccacccagcaagggaaacctgatcacagtcttgagcatcgatggtggtggggtcaaaggcgtcatccctgctaccttccttgcattccttgagtctaaactccaggagcttgatgggagcagcgcgcgctcagctaactactttgatgtcatcgctggcacaagcacaggtggtcttattgctgcaatgctggca

SEQ ID NO: 69389 - DNA, 261 bp, Zea mays
gggcttcgaacacctagctgtgcaagccaacatgcaacaacaagcgcttgcggcgagcgtcttacaacaaccaattgcccaattgcaacaacaatccttgccacatctaacaatacaagccatcacaacgcaacagcaacaacagttcctaccagcactgagccacctagccatggtgaaccctgccgcctacttgcaagagcagctgcttgcatccaacccacttgctctggcgaacgtagttgcaaaccagcaacaaca

SEQ ID NO: 69390 - DNA, 260 bp, Zea mays
atagatagcacaatagtgtaccaacaatggcagccaaaatattttgcctccttatgctccttggtatttctgcaagtgctgctacggcgaccattttcccgcaatgctcacaagctcctatagcttcccttcttcccccgtacctctcaccagcggtgtcttcggtatgtgaaaacccaattcttcaaccctacaggatccaacaggcaatcgcagctggcatcttacctttatcacccttgttcctccaacaatcatca

SEQ ID NO: 69391 - DNA, 263 bp, Zea mays
atacatcaaggcacaacaactacaacaacttgtgctaggaaaccttgctgcctactctcagcaacagcagtttcttccattcaaccaactggctgcattgaactctgctgcttatttgcaacaacaactaccattcagtcagctagctgctgcctacccccagcaatttcttccattcaaccaactggcagcattgaactctgctgcttatttacaacagcaacagctaccaccattcagccagctagctgatgtgagccctg

SEQ ID NO: 69392 - DNA, 252 bp, Zea mays
atttagagcattcagaaacacaccaagcgaagcgcactagcaacaaccttccaacaatggctaccaagatattatccctccttgcgcttctttcgctttttgcgagcgcaacaaatgcgtcgattattccacaatgctcacttgctcctagttccattattccacagttcctcccaccagttacttcaatggccttcgaacacccagctgtgcaagcctataggctacaacaagcgattgcggcgagcgtct

SEQ ID NO: 69393 - DNA, 214 bp, Zea mays
ataatccattagcaacaatagagcaacaatggcgaccaagatattttccctccttatgctcacttctcttactacatgtgctgctaacgcgacaattttccctcaatgatcacaagctcctattgcttcccttcttccctcataccttccatcaattatagcttcagtatgtgaaaacccagctcttcaatcatataggcgtcaacaagcaatc

SEQ ID NO: 69394 - DNA, 252 bp, Zea mays
attcagaaacacaccaagcgaactatcctagcaacgacttaacaacaatggctaccaagatattagccctccttgcgcttcttgcgctttttgtgagcgcaacaaatgcgttcattattccacaatgctcacttgctcctagtgccattataccacagttcctccgaccagttacttcaatgggcttcgaacacctagctgtgcaagcctacaagctacaacaagcgcttgcgtgcgacgtcttacaacaac

SEQ ID NO: 69395 - DNA, 262 bp, Zea mays
ctgaaacacacctagcgaagccactagcaacgacctaacaacaatggcagccaaaatattttgcctccttatgctccttggtctttctgcaagtgctgctacggcgaccattttcccacaatgctcacaagctcctatagcttcccttcttcccccgtacctctcaccagcggtgtcttcggtatgtgaaaacccaattcttcaaccctataggatccaacaggcaatcgcagctggcatcttacctttatcacccttgttc

SEQ ID NO: 69396 - DNA, 265 bp, Zea mays
actcgagccgattcggctcgagtagaaagcacaatagtgtaccatctatggcagccaaaatgttttgcctccttatgctcagtggtatttctgcaagtgctgctacggcgaccattttcccgcaatgctcacaagcttctatagcttcccttcttcccccgtacctctcaccagcggtgtctacagtatgtgaaaacccaattcttcaaccctacaggatccaacaggcaatcgcagctggcatcttacctttatcacccttgtt

SEQ ID NO: 69397 - DNA, 261 bp, Zea mays
caactagcaacatagaaagcacaatagtgtaccaacaatggcagctaaaatattttgcctccttatgctccttggtctttctgcaagtgctgctacggcgaccattttcccacaatgctcacaagctcctatagcttcccttcttcccccgtacctctcaccaacggtgtcttcggtatgtgaaaacccaattcttcaaccctacaggatccaacaggcaatcgcagctggcatcttacctttatcacccttgttcctcca

SEQ ID NO: 69398 - DNA, 262 bp, Zea mays
  unsure (1)..(262): unsure at all n locations
gttnctnactctactctggacgcgactcgaacttaaaccctagagcngcagccccggtcgntccaccgaccccanatctcaaatcagcgggagggaactcgcacgcgaaggctgaactcatgngctcgcgtctacgttgggaacctggatccgcgtgtcacggcgcgggagatcgnggacgagttccggacgtttggggttctgaggagtgtatgggntgctaggtaaccanctnggtttgccttcatacacngnnnngncc

SEQ ID NO: 69399 - DNA, 127 bp, Zea mays
ctcgcgccgtcagcattcaaatgcacaccaagcgatggcagctagcatcgaccgaataccaatggttaccaagatattagccctccgtgcgtttcttgcccttttagtgagcgtcacaatgcgttca

SEQ ID NO: 69400 - DNA, 253 bp, Zea mays
ggactgtcttgttcatatcggtgtggcatatcattatgcttgaggtggtggtatgtaccttccattagtttatgggccttcaccaacaggaaggatccaccaaggagtttgttcaacatgtctgaagaatacaattcttctggaatatagcgaagaatgcagttgggctcacatctgtgtgaggcagtcaaatttcaagttacgtgctgatctgtccactccttttatcatgattggtcctgagacagggctg

SEQ ID NO: 69401 - DNA, 264 bp, Zea mays
gcaacatagaaagtggaatccagtagcaacaatagagcaacaatggcgaccaagatactttccctccttatgctccttgctctttctgcatgtgttgctaacgcgacaattttccctcaatgctcacaagctcctatagcttcccttcttcccccataccttccatcaatgatagcttcagtatgtgaaaacccagctcttcaaccctataggctccaacaagcaatcgcagcaagcaacatacctttatcacccttgttggag

SEQ ID NO: 69402 - DNA, 261 bp, Zea mays
gcaacatagaaagcacaatagtgtaccaacaatggcagccaaaatattttgcctccttatgctccttggtctttctgcaagtgctgctacggcgaccattttcccacaatgctcacaagctcctatagcttcccttcttcccccgtacctctcaccagcggtgtcttcggtatgtgaaaacccaattcttcaaccctataggatccaacaggcaatcgcagctggcatcttacctttatcacccttgttcctccaacaatc

SEQ ID NO: 69403 - DNA, 259 bp, Zea mays
gagcattcagaaacacacctagcgaagcgcactagcaacgacctaacaacaatggcttccaagacattatccctccttgcgcttcttgccctttttgtgagtgcaacaaatgcgttcattattccacaatgctcacttgctccgagtgccattattccacagttcctccctccagttaatctaatgggcttcgaacacccagctgtgcaagcctataggctacaacaagcgcttgcggcgagcgtcttagaacaaccaa

SEQ ID NO: 69404 - DNA, 265 bp, Zea mays
tctcgagccgaatcggctcgagcttgctccaagttccattattacactgttcctcccaccaagtacttcaatgggcttcgaactcccagctgtgcaagcctataggctacaacaagcaattgcggcgagcgtcttacaacaaccaatttcccagttgcaacaacaatccttggcacatctaacaatacaaaccatcgcaacgcaacagcaacaacaattcctaccagcactgagccacctagccatggtgaaccctgccgcctac

SEQ ID NO: 69405 - DNA, 259 bp, Zea mays
gcaacatagaaagcacaatagtgtaccaacaatggcagccaaaatattttgcttccttatgctccttggtctttctgcaagtgctgctaccgcaaccattttcccacaatgctcacaagctcctatagcttcctttcttcccccatacctctcaccagcggtgtcttcagtatgtgaaaacccaattcttcaaccctacaggatccaacaggcaatcgcagcaggcatcttacctttatcacccttgttcctccaacaa

SEQ ID NO: 69406 - DNA, 260 bp, Zea mays
gtaacatagatagtggaatccagtagcaacaacagagcaacaatggcgaccaagatattttccctccttatgctccttgctctttctgcatgtgttgctaacgcgacaattttccctcaatgctcacaagctcctatagcttctcttcttcccccataccttccatcaatgatagcttcagtatgtgtaaacccagctcttcagccctataggctccaacaagcaatcgcagcaagcaacatacctttatcacccttgtt

SEQ ID NO: 69407 - DNA, 254 bp, Zea mays
attttgagcattcagaaacacacctagcgagcgcactagcaacgacctaacaacaatggcttccaagacattatccctccttgcgcttcttgccctttttgtgagtgcaacaaatgcgttcattattccactatgctcacttgctccgagtgccattattccacagttcctccctccagttacttcaatgggcttcgaacacccagctgtgcaagcctataggctacaacaagcgcttgcggcgagcgtcttag

SEQ ID NO: 69408 - DNA, 256 bp, Zea mays
attttgagcattcagaaacacaccaagcgacgcactagcaacaacctaacaacaatggctaccaagatattatccctccttgcgcttgctgcgctttttgcgagcgcaacaaatgcgtccattattccacaatgctcacttgctcctagttccattattccacagttcctcccaccagttacttcaatggccttcgaacacccagctgtgcaagcctataggctacaacaagcgattgcggcgagcgtcttacaac

SEQ ID NO: 69409 - DNA, 262 bp, Zea mays
ttctgaggcatcagtgcaggccgacggcgacgccctactgctcgcctcagtgccagtcgttgcggcagcagtgttgccagcagctcaggcaggtggagccgcagcaccggtaccaggcgatcttcggcttggtcctccactccatcctgcagcaggagccgcaaagcggccaggtcgcggggctgttggcggcgcagatagcgcagaactgacggcgatgtgcggcctgcagcagccgactccatgcccctacgctgctgcc

SEQ ID NO: 69410 - DNA, 261 bp, Zea mays
gcaacatagaaagcacgatagtgtaccaacaatggcagccaaaatattttgcttccttatgctccttggtcttactgcaagtgttgctaccgcaagcattttcccacaatgctcacaagctcctatagcttcccttcttcccccatacctctcaccagcggtgtcttcaatgtgtgataacccaattgttcaaccctacaggatccaacaggcaatcgctacaggcatcttacgattatcaccctagatcctccaacaacc

SEQ ID NO: 69411 - DNA, 260 bp, Zea mays
atcaacacaccaagcggacgcactagcagcgacctaacaccaatggctaccaagatattagccctccttgcgcttcttgcccttttagtgagcgcaacatatgcgttcattattccacagtgctcacttgctcctagtgccagtattccacagttcctcccaccagttacttcaatgggcttcgaacatccagccgtgcaagcctacaggctacaactagcgcttgcggcgagcgccttacaacaaccaattgcccaatt

SEQ ID NO: 69412 - DNA, 257 bp, Zea mays
attgagaccagcaagcaacatagaaagtagaatccattagcaacaatagagcaacaatggcgatcaagatattttccctccttatgctccttgctatttctacatgtgttgctaacgcgacaattttccctcaatgctcacaagctcctatagcttcccttcttcccccataccttccatcaattatagcttcagtatgtgaaaacccagctcttcgatcatataggcttcaacaagcaatcgcagcaagcaacata

SEQ ID NO: 69413 - DNA, 256 bp, Zea mays
tgaggcatcagtgcagcccgacggcgacgccctactgctcgcctcagtgccagtcgttgcggcacagtgttgccagcagctcaggcaggtggagccgcagcaccggtaccaggcgatcttcggcttggtcctccagtccatcctgcagcagcagctgcaaagcggacaggtcgcggggctgttggcggcgcagatagcgcacaactgacggcgatgtgcggcctgcagcagccgactccatgcccctacgctgctg

SEQ ID NO: 69414 - DNA, 258 bp, Zea mays
ctactagcaacatagacagcacaatagtgtaccaacaatggcagccacaatattttgcctccttatgctccttggtctttctgcaagtgctgctacggcgaccattttcccgcaatgctcgcaagctcctatagcttcccttcttcccccgtacctctcaccagcggtgtcttcggtatgtgaaaacccaattcttcaaccctacaggatccaacaggcaatcgcagctggcatcttacctttatcacccttgttcct

SEQ ID NO: 69415 - DNA, 260 bp, Zea mays
atagatagcacaatagtgtaccaacaatggcagctaaaatattttgcctccttatgctccttggtctttctgcaagtgctgctacggcgaccattttcccacaatgctcacatcctcctatagcttcccttcttcccccgtacctctcaccaacggtgtcttcggtatgtgaaaacccaattcttcaaccctacaggatccaacaggcaatcgcagctggcatcttacctttatcacccttgttcctccaacaatcatca

SEQ ID NO: 69416 - DNA, 280 bp, Zea mays
catgcggcgtactcagggcctgctcggctcacggaacacctagcgaaggcactagcaacgacctaacaacaatggcttccaagacattatccctccttgcgcttcttgccctttttgtgagtgcaacaaatgcgttcattattccacaatggtcacttgctccgagtgccattattccacagttcctccctccagttacttcaatggtcttcgaacacccagctgtgcaagcctataggctacaacaagcgcttgcggcgagtgtcttagatcaaccaat

SEQ ID NO: 69417 - DNA, 259 bp, Zea mays
gtctcgacgtctcgtctcgtctcgtctcgcctgcgcgcagccccttggcttcgttccatccggcttctcggcggcggcggagacgagggggatggcgcaccggctgctgcgggacgcgcaggcggacgggtgggagcggtcggacttccccatcatctgcgagtcatgcctcggcgacaacccctacgtccggatgttaagagctgaatatgacaaagaatgcaacatttgtgcacgtccttttactgtattccggtgg

SEQ ID NO: 69418 - DNA, 250 bp, Zea mays
  unsure (1)..(250): unsure at all n locations
tgggaaaaagaggaaaccaaatcattgttcagtgctgatgcaatttctcgagcanagcagattcttgcaactattcctggaagggcaacaggtgcatatagtcacagtcagggtatcaaaggactgcgtgatgcaattgctgctggaatcatgtcacgtgatggattccctgnnaaatgcagatgacattttcattacagacggagcaagtcctggggtccacatgatgatgcaattactgattaggaat

SEQ ID NO: 69419 - DNA, 214 bp, Zea mays
gtagtggctaacccattggtcgccgccttcctacagcagcaacaattgctgccatacaaccagttctctttgatgaatcctgtcttgtcgaggcagcaacccatcgttggacgtgccatcttttagattacatatgagatgtactcgataatggtgccctcataccgacgtgtgtctcctagaaataatcaatatattgattgagatttatctc

SEQ ID NO: 69420 - DNA, 264 bp, Zea mays; identical to SEQ ID NO: 69071

SEQ ID NO: 69421 - DNA, 148 bp, Zea mays
caaaaacacaccaagcgaacgcactagcaacgacctaacaccaatggctaccaagatattagccctccttgcgcttcttgcccttttagtgagcgcaacaaatgcgttcattataccacagtgctcacttgctcctagtgccagtatt

SEQ ID NO: 69422 - DNA, 256 bp, Zea mays
cggctcgagcgcttcctcccgttagactaggttaggctaggctagggtgtcgaccagctcgcggtaatggtggccttcaggttccatcagtaccaggtggtggggcgcgcgctgccgacgcccggcgacgagcaccccaagatctaccgcatgaagctctgggccaccaacgaagtccgcgccaagagcaagttctggtactactgaggaagttgaagaaggttaagaagagcaacggtcaggtcctggccatcaa

SEQ ID NO: 69423 - DNA, 259 bp, Zea mays
gcaacatagaaagcacaatagtgtaccaacaatggcagccaaaatattttgcttccttatgctccttggtctttctgcaagtgttgctaccgcaaccattttcccacaatgctcacaagctcctatagcttcccttcttcccccatacctctcaccagcggtgtcttcaatgtgtgaaaccccaattgttcaaccctacaggatccaacaggcaatcgcaacaggcatcttaccattatcacccttgttcctccaacaa

SEQ ID NO: 69424 - DNA, 257 bp, Zea mays
ctcgagccgcgagttgcaaaccatggacatggctttggcgtctaaagcctcccctccgccatggaatgccaccgccgccgagcagccaattccaaagcgtgacaaagccgctgcaaatgattcaacatacctcaatcctcaagctcatgatagtgttcttggaatcattctgggaggtggtgctgggactagattgtaccccttgacaaagaagcgtgccaagcctgcagtgccattgggtgccaactatagactga

SEQ ID NO: 69425 - DNA, 257 bp, Zea mays
ggaatacagtagcaaaaatagagcaacaatggcggccaagatattttccatccttatgctccttgctctttctgcatgtgttgctaacgcgaccattttcccgcaatgctcgcaagctcctatagcttcccttcttcccccgtacctctcaccagcggtgtcttcggtatgtgaaaacccaattcttcaaccctacaggatccaacaggcaatcgcagctggcatcttacctttatcacccttgttcctccaacaat

SEQ ID NO: 69426 - DNA, 88 bp, Zea mays
caacaacccatcattggtggtgccctcttttagatttcttatgagttatagttcaataataaagttttttatctgatgtttgtggctt

SEQ ID NO: 69427 - DNA, 89 bp, Zea mays
ttttgagcattcagaaacacacctagcgaagcgcactagcaacgacctaacaacaatggcttccaagacattatccctccttgcgcttc

SEQ ID NO: 69428 - DNA, 257 bp, Zea mays
ggctaaatggtagtagtatttgccagctagctgcagcaaaccgtgcttccttcttgacacagcaacagttgctgcctttctaccagcagtttgcggctaaccccgcaaccctcttacaactacaacaattgttgccctttgtccaacttgctttgacagaccgagcggcctcctaccaacaacacatactcggtggtgccctcttttagattgcttattagttgtaattcaataataaagttttttggatgatgtat

SEQ ID NO: 69429 - DNA, 254 bp, Zea mays
ctacaggatccaacaggcaatcgcagctggcatcttacctttatcacccttgttcctccaacaatcatcagccctattacaacagttacctttggtgcatttattggcacaaaacatcagggcacaacaactacaacaacttgtgctagcaaaccttgctgcctactctcagcaacagcagtttcttccattcaaccaactaggttcattgaactctgcttcttatttgcaacaacaacactaccattcagcca

SEQ ID NO: 69430 - DNA, 257 bp, Zea mays
ccaacaagcaacatagaaagtggaatccagtagcaacaacagagcaacaatggcgaccaagatattttccctccttatgctccttgctctttctgcatgtgttgctaacgcgacaattttccctcaatgctcacaagctcctatagcttcccttcttcccccataccttccatcaatgatagcttcagtatgtgaaaacccagctcttcagccctataggctccaacaagcaatcgcagcaagcaacatacctttat

SEQ ID NO: 69431 - DNA, 256 bp, Zea mays
gtcccctgctccattctcagccgccgccaatcccttcccgtgctccgcaaccgctgagtgagaagaagagatggccggcaagggcgatggcccggctatcggcatcgatctcggcacgacgtactcttgcgtcggcgtgtggcagcacgaccgcgtcgagatcattgccaacgaccagggtagctcgcaccacgccctcgtacgtcgccttcaccgactccgagcgcctcatcggagatgcggccaagaaccagtc

SEQ ID NO: 69432 - DNA, 259 bp, Zea mays
  unsure (1)..(259): unsure at all n locations
caccaagcgaactacctagcaacactattaacaacaatggctaccaagatattagccctccttgcgcttattgccctttacgtgagcgcaacaaatgcgttcattattccacaatgctcacttgctcctagtgccattataccacagttcctccgaccagttacttcaatgggcttcgaacacctagctgtgcaagcctacaagctaangaccaagcgcttgcggcgagcgtcttacaacaaccaattaaccaattgca

SEQ ID NO: 69433 - DNA, 257 bp, Zea mays
ggacggggtatctggcctgcacattgacccttaccacagcgacaaggccgcggatatcctggtcaacttctttgacaaatgcaaggcagatccgagctactgggacaagatctcacagggcggcctgcagagaatttatgagaagtacacctggaagctctactccgagaggctgatgaccctgaccggcgtgtacgggttctggaagtacgtgagcaacctggagaggcgcgagacccgccgctacatcgagatgt

SEQ ID NO: 69434 - DNA, 258 bp, Zea mays
caacaagcaacatagaaagtggaatacagtagcaacaatagagcaacaatggcggccaagatattttccatccttatgctccttgctctttctgcatgtgttgctaacgcgaccatttttcctcaatactcacaagctcctatagctgcccttcttcccccataccttccatcaatgaccgcttcagtttgtgaaaacccagcccttcaaccctacaggctccaacaagcaatcgcaacaagcaacttacctttatca

SEQ ID NO: 69435 - DNA, 256 bp, Zea mays
gcttgctggatcctgttctttcaacaatcgccagccctatctttggtgcagtcattggtacaaaccatcagggcagaacagttgcagcaactcgtgctaccagtgatcagccaagtagctctggcaaacctttccccctactctcagcaacaacaatttcttccattcaaccaactgtctatactgaaccctgctgcttatttgcagcaacaacaactactaccattcagccagctagctactgcctactctcagc

SEQ ID NO: 69436 - DNA, 252 bp, Zea mays
ttcagaaacacacctagcgaagcgcactagcaacgacctaacaacaatggcttccaagacattatccctccttgcgcttcttgccctttttgtgagtgcaacaaatgcgttcattattccacaatgctcacttgctccgagtgccattattccacagttcctccctccagttacttcaatgggcttcgaacacccagctgtgcaagcctataggctacaacaagcgcttgcggcgagcgtcttagaacaacc

SEQ ID NO: 69437 - DNA, 79 bp, Zea mays
ggactagctgcattgaactctgcttcttatttgcaacaacaacaactaccattcagccagctagctgctgcgtacgccg

SEQ ID NO: 69438 - DNA, 260 bp, Zea mays
cattgagttggtgatgacccaggcatctgtttcgaggcccaaggctgtcaaggccctcaaggcttctaatggggacattgtcactgccatcatggatctgacaacttagggtgatatttctgtccgtgccacttttgttttggagtgctattgcaacttgagtgttatatgtggacctatgcttcgatgatgttaccatgattgcttcttgggtcaaggtcattccaacaaggtttcatctttgctggcttgaaacctgg

SEQ ID NO: 69439 - DNA, 253 bp, Zea mays
gtaacacaccaagcgaacgcactagcaacaacctaacaacaatggctaccaagatattatccctccttgcgcttcttgcgctttttgcgagcgcaacaaatgcgtccattattccacaatgctcacttgctcctagttccattattccacagttcctcccaccagttacttcaatggccttcgaacacccagctgtgcaagcctataggctacaacaagcgattgcgcgcgacgtcttacaacaaccattgcc

SEQ ID NO: 69440 - DNA, 86 bp, Zea mays
gtctatgtgctgtagtatagccgctggctagctagctagttgagtcatttagcggcgatgattgagtaataatgtgtcacgcatca

SEQ ID NO: 69441 - DNA, 253 bp, Zea mays
gttcggagcgcacacacacgcaaccagatctcccccaaatccagccgtcggcacctccgcttcaagatgcagatctttgtgaaaaccctgactggcaagactatcaccctcgaggtggagtcgtctgacaccattgacaacgttaaggccaagatccaggacaaggagggcatccccccagaccagcagcggctcatctacgctggcaaacagcttgaggacgggcgcacgcttgctgactacaacatccaga

SEQ ID NO: 69442 - DNA, 255 bp, Zea mays
cttcaatgggcttcgaacacccagctgtgcaagcctataggctacaacaagcgcttgcggcgagcgtcttagaacaaccaattgcccaattacaacaacaatccttagcacatctaaccatacaaaccatcgcaacgcagcagcaacaagcactgagccacctagccgtggtgaaccctatcgcctacttgcaacaacagctgcttgcatccaacccaacttgctttgacaaacccaacagcattctaccaacaa

SEQ ID NO: 69443 - DNA, 255 bp, Zea mays
attgaactctgcttcttatttgcaacaacaacaactaccattcagccagctatctgctgcctacccccagcaatttcttccattcaaccaactgacagctttgaactctcctgcttatttacagcagcaacaactactaccattcagccagctagctggtgtgagccctgctaccttcttgacacaaccacaattgttgccgttctaccagcacgctgcgcctaacgctggcaccctcttacaactgcaacaatg

SEQ ID NO: 69444 - DNA, 257 bp, Zea mays; identical to SEQ ID NO: 28003

SEQ ID NO: 69445 - DNA, 255 bp, Zea mays
ggagagcacaatagtgtaccaacaatggcagccaaaatattttgcctccttatgctccttggtctttctgcaagtgctgctacggcgaccattttcccgcaatgctcgcaagctcctatagcttcccttcttcccccgtacctctcaccagcggtgtcttcggtatgtgaaaacccaattcttcaaccctacaggatccaacaggcaatcacagctggcatcttacctttatcacccttgttcctccaacaatca

SEQ ID NO: 69446 - DNA, 255 bp, Zea mays
gtgcaaaccatggacatggctttggcgtctaaagcctcccctccgccatggaatgccaccgccgccgagcagccaattccaaagcgtgacaaagccgctgcaaatgattcaacatacctcaatcctcaagctcatgatagtgttcttggaatcattctgggaggtggtgctgggactagattgtgccccttgacaaagaagcgtgccaagcctgcagtgccattgggtgccaactatagactgattgatattcct

SEQ ID NO: 69447 - DNA, 257 bp, Zea mays
ttcagaaacacaccaagcgaagcgcactagcaacaacctaacaacaatggctaccaagatattatccctccttgcgcttcttgcgctttttgcgagcgcaacaaatgcgtccattattccacaatgctcacttgctcctagttccattattccacagttcctcccaccagttacttcaatggccttcgaacacccagctgtgcaagcctataggctacaacaagcgattgcggcgagcgtcttacaacaaccaattg

SEQ ID NO: 69448 - DNA, 253 bp, Zea mays
gcccaacaaccccccgacccgtcacctgacccagccgatcgagaatacccggaaggccggaacccacctgctgcgcacctgcaagcctcgagtggagctcttccacggccgcggtggagatggcggcgaatctggaggacgtgccgtcactggatctgatgcacgagctgctccgccgcatgaagtgcagctccaagcccgacaagcgcctcatcctcatcggtccacctggctctggaaagggaatcagtct

SEQ ID NO: 69449 - DNA, 257 bp, Zea mays
gcaacaagcaacttacctttatcacacctgttctttcaacaatcgccagccctatctttggtgcagtcattggtacaaaccatcagggcagaacagttgcagcaactcgtgctaccagtgatcagccaagtagctctggcaaacctttccccctactctcagcaacaacaatttcttccattcaaccaactgtctatactgaaccctgctgcttatttgcagcaacaacaactactaccattcagccagctagctac

SEQ ID NO: 69450 - DNA, 253 bp, Zea mays; identical to SEQ ID NO: 25463

SEQ ID NO: 69451 - DNA, 254 bp, Zea mays
tagcaacatagaaagcacaatagtgtaccaacaatggcagccaaaatattttgcctccttatgctccttggtctttctgcaagtgctgctacggcgaccattttcccgcaatgctcgcaagctcctatagcttcccttcttcccccgtacctctcaccagcggtgtcttcggtatgtgaaaacccaattcttcaaccctacaggatccaacaggcaatcacagctggcatcttacctttatcaccttgttcctc

SEQ ID NO: 69452 - DNA, 231 bp, Zea mays
ggacaagcaacataggcagtggaatccagtagcaacaacagagcaacaatggcgatcaagatattttccctccttatgctccttgctctttctgcatgtgttgctaacgcgacaattttccctcaatgctcacaagctcctatagcttcccttcttcccccataccttccatcaatgatagcttcagtatgtgataacccagctcttcagccctatcagtggccaacaagc

SEQ ID NO: 69453 - DNA, 255 bp, Zea mays
gtcgagagtgccgaggctacattgaagtataatgttgctgttaagtgtgcaacaattacgcctgacgagactcgagtaaaagagtttaaactcaagtctatgtggcggagtccaaatggcacaataaggaatattctaaatgggactgtttttcgtgagcccatcttgtgtaaaaacatcccaagaatcctttctggttggaagaaacctatttgcataggaaggcacgcctttggtgaccagtatcgagctact

SEQ ID NO: 69454 - DNA, 255 bp, Zea mays
ctcgagccgcagaaacacaccaagcgaactacattagcaacaacctaacaacaatggctaccatgatattatccctccttgcgcttcttgcgctttttgcgagcgcaacaaatgcgttcattattccacaatgctcacttgctccaagttccattattacacagttcctcccaccagttacttcaatgggcttcgaacacccagctgtgcaagcctataagctacaacaagcaattgcggcgagcgtcatacaac

SEQ ID NO: 69455 - DNA, 255 bp, Zea mays
attgagaccaactagcaacatagaaagcacaatagtgtaccaacaatggcagccaaaatattttgcctccttatgctccttggtctttctgcaagtgctgctacggcgaccattttcccgcaatgctcgcaagctcctatagcttcccttcttcccccgtacctctcaccagcggtgtcttcggtatgtgaaaacccaattcttcaaccctacaggatccaacaggcaatcgcagctggcatcttacctttatca

SEQ ID NO: 69456 - DNA, 259 bp, Zea mays
attttcagcattcaaaaacacaccaagcgaagcgcactagcaacgacctaacaccaatggctaccaagatattagccctccttgcgcttcttgcccttttagtgagcgcaacaaatgcgttcattattccacagtgctcacgtgctcctagtgccagtattccacagttcctcccaccagttactttcatgggcttcgaacatccagccgtgcaagcctacaggctacaactagcgcttgcggcgagcgccttacaaca

SEQ ID NO: 69457 - DNA, 252 bp, Zea mays
attgagaccaacaagcaacatagaaagtggaatccagtagcaacaatagagcaacaatggcgaccaagatactttccctccttatgctccttgctctttctgcatgtgttgctaacgcgacaattttccctcaatgctcacaagctcctatagcttcccttcttcccccataccttccatcaatgatagcttcagtatgtgaaaacccagctcttcaaccctataggggccaacaagcaatcgcagcaagca

SEQ ID NO: 69458 - DNA, 144 bp, Zea mays
ggactgtcttgttcatatcggtgtggcatatcattatgcttgaggtggtggtatgtaccttccattagtttatgggccttcaccaacaggaaggatccaccaaggagtttgttcaacatggatgaagaatacaattcttctggg

SEQ ID NO: 69459 - DNA, 253 bp, Zea mays
caacagttgcaacagtttctgccagcgctcagtcaactagccatggtgaaccctatcgcctacctacaacagcaacaacttctttcatctagcccgctcgctatgggcaatgcacctacatacctgcaacaacagttgttgcaacaacagttgctgcaacaaattgtaccagctcttactcagctagctgtggcaaaccctgctgcctacttgcaacaactacttccattcaaccaactgactgtgtcgaact

SEQ ID NO: 69460 - DNA, 254 bp, Zea mays
attttgagcattcagaaacacaccaagcgaagtatcctagcaacgacttaacaacaatggctaccaagatattagccctccttgcgcttcttgccctttttgtgagcgcaacaaatgcgttcattattccacaatgctcacttgctcctagtgccattataccacagttcctccgaccagttacttcaatgggcttcgaacacctagctgtgcaagcctacaggctacaacaagcgcttgcggcgagcgtctta

SEQ ID NO: 69461 - DNA, 254 bp, Zea mays
gagcaacatagaaagcacaatagtgtaccaacaatggcagccaaaatattttgcttccttatgctccttggtctttctgcaagtgttgctaccgcaaccattttcccacaatgctcacaagctcctatagcttcccttcttcccccatacctctcagcagcggtgtcttcaatgtgtgaaaacccaattgttcaaccctacaggatccaacaggcaatcgcaacaggcatcttaccattatcacccttgttcct

SEQ ID NO: 69462 - DNA, 254 bp, Zea mays
ttttgctcggaacgcacacacagcccggtccccgatctccgatcccctcgtcgatccaagatgcagatcttcgtcaagaccctcactggaaagactatcaccctcgaggtggagtcttctgacaccattgacaacgtcaaggccaagatccaggacaaggagggcattcccccggaccagcagcggctcatcttcgctggcaagcagctcgaggacgggcgcacacttgccgactacaacatccagaaggagag

SEQ ID NO: 69463 - DNA, 250 bp, Zea mays
ggaatacagtagcaaaaatagagcaacaatggcggccaagatattttccatccttatgctccttgctctttctgcatgtgttgctaacgcgaccattttcccgcaatgctcgcaagctcctatagcttcccttcttcccccgtacctctcaccagcggtgtcttcggtatgtgaaaacccaattcttcaaccctacaggatccaacaggcaatcgcagctggcatcttacctttatcaccttgttcctcc

SEQ ID NO: 69464 - DNA, 248 bp, Zea mays
cacacacacacaaccagatctcccccaaatccacccgtcggcacctccgcttcaagatgcagatctttgtgaaaaccctgactggcaagactatcaccctcgaagtggagtcgtctgacaccattgacaacgttaaggccaagatccaggacaaggagggcatccccccagatcagcagcggctcatctttgctggcaaacagcttgaggacgggcgcaccttgctgactactacatccagaaggaga

SEQ ID NO: 69465 - DNA, 239 bp, Zea mays
gtaccatcaatcatcattcatcttagtagtataggcaccaaatcaaatctgcaacatcaattatctaactccaaaaaccatgatgctggtgcttgtggttcttgctttcattgctttagtatcaagtgtttcttgtacacagacaggcggctgcagctgtggtcaacaacaaagccatgagcagcaacatcatccacaacaacatcatccacataaacaacaacatcaaccaccaccac

SEQ ID NO: 69466 - DNA, 252 bp, Zea mays
attgagaccaactagcaacatagaaagcacaatagtgtaccaacaatggcagccaaaatattttgcctccttatgctccttggtctttctgcaagtgctgctacggcgaccattttcccgcaatgctcgcaagctcctatagcttcccttcttcccccgtacctctcaccagcggtgtcttcggtatgtgaaaacccaattcttcaaccctacaggatccaacaggcaatcacagctggcatcttaccttta

SEQ ID NO: 69467 - DNA, 250 bp, Zea mays
aaaaaagaatatgatggcaagattgctgacgtttggtcatgtggtgtaaccctctatgtaatggttgttggcgcatatccttttgaagatccagaagagcctaagaacttccgcaagacaattcagcgtatcttgaatgttcagtacgcaattccagacaacgtgaacatatctccagagtgcaggcatctaatttcgaggatttttgttggcgatcctgctacgcgaataacaatcctgaaatccggaa

SEQ ID NO: 69468 - DNA, 251 bp, Zea mays
atgcaacatagaaagtggaatccagtagcaacaacagagcaacaatggcgaccaagatattttccctccttatgctccttgctctttctgcatgtgttgctaacgcgacaattttccctcaatgctcacaagctcctatagcttcccttcttcccccataccttccatcaatgatagcttcagtatgtgaaaacccagctcttcagccctataggttccaacaagcaatcgcagcaagcaacataccttta

SEQ ID NO: 69469 - DNA, 251 bp, Zea mays
cttgaaagctcaagcatggactgatgaggatctgttagatgctctgaatcaactagaggtgggactcaaagaaaaccttaagaagttgagttcctttgataagtacaaacagcaagttcttcttggtcatctggactggtctccaatgcacaaagatccaagtttctggcgtgagaacattaacaattttgaagaaaatgatttccagattctgcgagttctcatgacaatcattgacacatcaagtgaca

SEQ ID NO: 69470 - DNA, 246 bp, Zea mays
tagaaagtggaatccagtagcaacaatagagcaacaatggcgaccacgatattttccctccttatgctcgttgctctttctacatgtgttgctaacgcgacaattttccctcaatgctcacaagctcctatagcttcccttcttcccccataccttccatcaattatagcttcaatatgtgaaaacccagctcttcaaccatataggtttcaacaagcaatcgcagcaagcaacatacctttatcg

SEQ ID NO: 69471 - DNA, 254 bp, Zea mays
ctcgagccgaagcacaatagtgtaccaacaatggcagccaaaatattttgcttccttatgcgccttggtctttctgcaagtgctgctaccgcaaccattttcccacaatgctcacaagctcctatagcttcctttcttcccccatacctctcaccagcggtgtcttcagtatgtgaaaacccaattcttcaaccctacaggatccaacaggcaatcgcagcaggcatcttacctttatcacccttgttcctcca

SEQ ID NO: 69472 - DNA, 250 bp, Zea mays
ggtgctccgcctcaggggaggcgccaagaagcgcaagaagaagacgtacaccaagcccaagaagatcaagcacaagcacaagacggtgaagctcgccgtgctccagttctacaaggttgacgacgccaccggcaaggtcacccgcctccgcaaggagtgccccaacgccgagtgcggcgcgggggtcttcatggccaaccacttcgaccgccactactgcggtaagtgtggcctcacctacgtctacaac

SEQ ID NO: 69473 - DNA, 248 bp, Zea mays
gaaacacacctagcgagcgcactagcaacgacctaacaacaatggctaccaagatattatccctctttgcgcttcttgccctttttgtgagcgcaacaaatgcgttcattattccacaatgctcacttgctcctagtgccattattccacagttcctccctccagttacttcaatgggcttcgaacacccagctgtgcaagcctacaggctacaacaagcgcttgcggcgagcgtcttacaacaacca

SEQ ID NO: 69474 - DNA, 245 bp, Zea mays
atattttgagcattcagaaacacaccaagcgaagcagctagcaacgacctaacaacaatggctaccaagatattagccctccttgcgcttcttgccctttttgtgagcgcaacaaatgcgttcattattccacaatgctcacttgctcctagtgccattattccacagttcctcccaccagttacttcaatgggcttcgaacacctagctgtgcccgccaacatgcaacaacaagcgcttgcggc

SEQ ID NO: 69475 - DNA, 246 bp, Zea mays
attttgagcattcagaaacacaccaagcgaagcgcactagcaacgacctaataacaatggctaccaagatattagccctccttgcgcttcttgccctttttgtgagcgcaacatctgcgttcattattccacaatgctcacttgctcctagtgccattattccacagttcctctcaccagtgacttcaatgggcttcgaacacctagctgtgcatgccaaactgcaacaatccgcgcttgcggcga

SEQ ID NO: 69476 - DNA, 245 bp, Zea mays; identical to SEQ ID NO: 27063

SEQ ID NO: 69477 - DNA, 166 bp, Zea mays
gcacctacatacctgcaacaacagttgctgcaacagattgtagcagctctgactcagctagctgtggcaaaccctgctgcctacttgcaacagctgcttccattcaaccaactgactgtgtcgaactctgctgcgtacctacaacagcgacaacagttacttaatc

SEQ ID NO: 69478 - DNA, 239 bp, Zea mays
caagcaacatagaaagtggaatccagtagcaacaacagagcaacaatggcgaccaagatattttccctccttatgctccttgctctttctgcatgtgttgctaacgcgacaattttccctcaatgctcacaagctcctatagcttcccttcttcccccataccttccatcaatgatagcttcagtatgtgaaaacccagctcttcagccctataggctccaacaagcaatcgcagcaag

SEQ ID NO: 69479 - DNA, 243 bp, Zea mays
aacaagcaacatagaaagtggaatacagtagcaacaatagagcaacaatggcggccaagatattttccatccttatgctccttgctctttctgcatgtgttgctaacgcgaccatttttcctcaatactcacaagctcctatagctgcccttcttcccccataccttccatcaatgaccgcttcagtttgtgaaaacccagcccttcaaccctacaggctccaacaagcaatcgcaacaagca

SEQ ID NO: 69480 - DNA, 244 bp, Zea mays
tagcaacatagaaagcacaatagtgtaccaacaatggcagccaaaatattttgcttccttatgctccttggtctttctgcaagtgctgctaccgcaaccattttcccacaatgctcacaagctcctatagcttcctttcttcccccatacctctcaccagcggtgtcttcagtatgtgaaaacccaattcttcaaccctacaggatccaacaggcaatcgcagcaggcatcttacctttatcac

SEQ ID NO: 69481 - DNA, 244 bp, Zea mays
aaaacacctttcttcactgcaccccgatgcttgcctccgacgcaattggacaagtgcaagatgaaatatgcatttatctcagatggttgcttactgagagaatgcaacatcgagcattctgtgattggagtctgctcacgtgtcagctctggatgtgaactcaaggactccgtgatgatgggagcggacatctatgaaactgaagaagaagcttcaaagctactgttagctgggaaggtcccat

SEQ ID NO: 69482 - DNA, 246 bp, Zea mays
tagcaacatagaaagcacaatagtgtaccaacaatggcagccaaaatattttgcttccttatgctccttggtctttctgcaagtgttgctaccgcaaccattttcccacaatgctcacaagctcctatagcttcccttcttcccccatacctctcaccagcggtgtcttcaatgtgtgaaaccccaattgttcaaccctacaggatccaacaggcaatcgcaacaggcatcttaccattatcaccc

SEQ ID NO: 69483 - DNA, 249 bp, Zea mays
ttcagaaacacaccaagcgacgacattagcaacaacctaacaacaatggctaccaagatattatccctccttgcgcttcttgcgctttttgcgagcgcaacaaatgcgttcattattccacaatgctcactatgcgccaagttccattattacacagttcctcccaccagttactccaatgaggcttcgttcacccagctgtgccagcctataggctacaacaagcaattgcgacgagcgtcttacaac

SEQ ID NO: 69484 - DNA, 250 bp, Zea mays
tgagcattcagaaacacaccaagcgaagtacattagcaacaacctaacaacaatggctaccaagatattatccctccttgcgcttcttgcgctttttgcgagcgcaacaaatgcgttcattattccacaatgctcacttgctccaagttccattattacacagttcctcccaccagttacttcaatgggcttcgaacacccagctgtgcaagcctataggctacaacaagcaattgcggcgagcgtctta

SEQ ID NO: 69485 - DNA, 256 bp, Zea mays
cctccagttacttcaatgggcttcgaacacccagctgtgcaagcctacaggctacaacaagcgcttgcggcgagcgtcttacaacaaccaattgcccaattacaacaacaatccttggcacatctaaccatacaaaccatcgcaacgcaacagcaacaacaatttctaccagcactgagccaactagctgtggtgaaccctgtcgcctacttgcaacagcagttgcttgcatccaacccacttgctctggcaaaca

SEQ ID NO: 69486 - DNA, 97 bp, Zea mays
cagaaacacacctagcgaagcgcactagcaacgacctaacaacaatggctaccaagatattatccctctttgcgcttcttgccctttttgtgagcgc

SEQ ID NO: 69487 - DNA, 249 bp, Zea mays
agcaacatagaaagcacaatattgtaccaataatggcagccaaaatattttgcctcattatgctccttggtctttctgcaagtgctgctacggcgagcattttcccgcaatgctcacaagctcctatagcttcccttcttcccccatacctctcaccagcgatgtcttcagtatgtgaaaatccaattcttctaccctacaggatccaacaggcaatcgcagcaggcatcttacctttatcacccttgt

SEQ ID NO: 69488 - DNA, 241 bp, Zea mays
tagtgaagtacactagcaacatcttagcaccaatgggagccaagatttttgccctccttgccctccttgctctttcagcaagcgctgctacctcgacttttattccacaatgctcacaacaatacctctctccggtgacagccgcgggatttcaatacccaactatacaatcctacatggtacaagaggccatccaagcaagcatcttacggtcattagcattaaccctccaacaaccata

SEQ ID NO: 69489 - DNA, 243 bp, Zea mays
gcagcagcagtatggatacggatatggatatggacaccatcaccatcagcatgaccaccacaagatccaccgattcgagcagggcgacgtggtggccatgccggccggcgcccagcactggctgtacaacgacggcgacgcgccgcttgtggcggtctacgtcttcgacgagaacaacaacatcaaccagctcgagccttccatgaggaaattcttgctggctgggggcttcagcaaggggca

SEQ ID NO: 69490 - DNA, 241 bp, Zea mays
ctcgagcgaatcggctcgaggcgaacgcactagcaacgacctaacaacaatggcttccacagacattatccctccttgcgcttcttgccctttttgtgagtgcaacaaatgcgttcattattccacaatgctcacttgctccgagtgccattattccacagttcctccctccagttacttcaatgggcttcgaacacccagctgtgcaagcctataggctacaacaagcgcttgcggcgag

SEQ ID NO: 69491 - DNA, 241 bp, Zea mays
aaacacaccaagcgaagcaactagcaacgacctaacaccaatggctaccaagatattagccctccttgcgcttcttgcccttttagtgagcgcaacaaatgcgttcattattccacagtgctcacttgctcctagtgccagtattccacagttcctcccaccagttacttcaatgggcttcgaacatccagccgtgcaagcctacaggctacaactagcgcttgcggcgagcgccttacaa

SEQ ID NO: 69492 - DNA, 249 bp, Zea mays
ccaactagcaacatagaaagcacaatagtgtaccaacaatggcagccaaaatattttgcctccttatgctccttggtctttctgcaagtgctgctacggcgaccattttcccacaatgctcacaagctcctatagcttcccttcttcccccgtacctctcaccagcggtgtcttcggtatgtgaaaacccaattcttcaaccctataggatccaacaggcaatcgcagctggcatcttacctttatcac

SEQ ID NO: 69493 - DNA, 247 bp, Zea mays
caaccctacaggatccaacaggcaatcgcaacaggcatcttaccattatcacccttgttcctccaacaaccgtcagccctattacagcagttacctttggtccatttggtggcacaaaacatcagggcacaacaactacaacaacttgtgctagcaaaccttgctgcatactctcagcaacatcagtttcttccattcaaccaactggctgcattgaactctgctgcttatttgcaacaacaattac

SEQ ID NO: 69494 - DNA, 243 bp, Zea mays
cagaaacacacctagcgaagccactagcaacgacctaacaacaatggcttccaagacattatccctccttgcgcttcttgccctttttgtgagtgcaacaaatgcgttcattattccacaatgctcacttgctccgagtgccattattccacagttcctccctccagttacttcaatgggcttcgaacacccagctgtgcaagcctataggctacaacaagcgcttgcggcgagcgtcttaga

SEQ ID NO: 69495 - DNA, 240 bp, Zea mays
ggaacctgcggcgttggcagcaccccgatcctgggccagtgcgtcgagttcctgaggcatcagtgcagcccgacggcgacgccctactgctcgcctcagtgccagtcgttgcggcagcagtgttgccagcagctcaggcaggtggagccgcagcaccggtaccaggcgatcttcggcttggtcctccagtccatcctgcagcagcagccgcaaagcggcaggtcgcggggctgttcgcgg

SEQ ID NO: 69496 - DNA, 240 bp, Zea mays
ttcaagaactggcttccttggaaagacacgtgggattcgtccttgtgttttccctgctggaagagttggatttgtcagaacagtagtggaatgcaaggaatctagaattggaaagcagcccatcgaagttccatcaaatgttactctcacattagaagagcagtttgtcaaagctaagggtccgctgggggagttatctctgagctttccaggtgacttgaagatcacgaaagaagaatc

SEQ ID NO: 69497 - DNA, 242 bp, Zea mays
tattattgagaccaacaagcaacatagaaagtggaatccagtagcaacaacagagcaacaatggcgaccaagatattttccctccttatgctccttgctctttctgcatgtgttgctaacgcgacaattttccctcaatgctcacaagctcctatagcttcccttcttcccccataccttccatcaatgatagcttcagtatgtgaaaacccagctcttcagccctataggctccaacaagc

SEQ ID NO: 69498 - DNA, 243 bp, Zea mays
tgacaaagcaagcggccaaagaaaaattatttgcaatacatacttcgccactattgattctctcttgtaggcttttaagtttagctccaaacaacaaaattttagagctctagtttagagttctacatttgagttaaagctctaaatagttgctgttgggcctatgcttcgtcgccgaaggtcttctaggaagaagcggctttcggctgaagctgtttgtataagatggccgaagtccctctt

SEQ ID NO: 69499 - DNA, 246 bp, Zea mays
gcttcgaacacccagctgtgcaagcctacaggctacaacaagcgcttgcggcgagcgtcttacaacaaccaattgcccaattacaacaacaatccttggcacatctaaccatacaaaccatcgcaacgcaacagcaacaacaatttctaccagcactgagccaactagctgtgtcgaaccctgtcgcctacttgcaacagcagttgcttgcatccaacccacttgctctggcaaacatagttgcat

SEQ ID NO: 69500 - DNA, 250 bp, Zea mays
tgctgcaacaaattgtaccagctcttactcagctagctgtggcaaaccctgctgcctacttgcaacaactacttccattcaaccaactgactgtgtcgaactctgctgcgtacctacaacagcgacaacagttacttaatccactagcggtggctaacccattggtcgctgccttcctacagcagcaacaattgctgccatacaaccagttctctttgatgaaccctgccttgtcgtggcagcaacccat

SEQ ID NO: 69501 - DNA, 255 bp, Zea mays; identical to SEQ ID NO: 27753

SEQ ID NO: 69502 - DNA, 248 bp, Zea mays
tatttataccaactaccaacatacatagtgaagtacactagcaacatcttagcaccaatggcagccaagatttttgcgctccttgccctccttgctctttcagcaagtgttgctaccgcgactattattccacaatgctcacaacaatacctctctccagtgatagccgcgagatttgaatacccatctatacaatcctacaggctacaagaggtcgtcacagcaagcatcttacggtcgttagcatt

SEQ ID NO: 69503 - DNA, 241 bp, Zea mays
attttgagcattcagaaacacacctagcgaagccactagcaacgacctaacaacaatggctaccaagatattatccctctttgcgcttcttgccctttttgtgagcgcaacaaatgcgttcattattccacaatgctcacttgctcctagtgccattattccacagttcctccctccagttacttcaatgggcttcgaacacccagctgtgcaagcctacaggctacaacaagcgcttgcg

SEQ ID NO: 69504 - DNA, 242 bp, Zea mays
tagaaagcacaatagtgtaccaacaatggcagctaaaatattttgcctccttatgctccttggtctttctgcaagtgctgctacggcgaccattttcccacaatgctcacaagctcctatagcttcccttcttcccccgtacctctcaccaacggtgtcttcggtatgtgaaaacccaattcttcaaccctacaggatccaacaggcaatcgcagctggcatcttacctttatcacccttgt

SEQ ID NO: 69505 - DNA, 110 bp, Zea mays
attgagaccaactagcaacataggaagcacaatagtgtaccaacaatggcagccaaaatattttgcctcctgatgctccttggtctttctgcgagtgctgctacggcgac

SEQ ID NO: 69506 - DNA, 123 bp, Zea mays
ttgagaccaacaagcaacatagaaagtggaatccagtagcaacaatagagcaacaatggcgaccaagatactttccctccttatgctccttgctctttctgcatgtgttgctaacgcgacaat

SEQ ID NO: 69507 - DNA, 243 bp, Zea mays
gagaccaacaagcaacatagaaagtggaatccagtagcaacaacagagcaacaatggcgaccaagatattttccctccttatgctccttgctctttctgcatgtgttgctaacgcgacaattttccctcaatgctcacaagctcctatagcttcccttcttcccccataccttccatcaatgatagcttcagtatgtgaaaacccagctcttcagccctataggctccaacaagcaatcgcag

SEQ ID NO: 69508 - DNA, 246 bp, Zea mays
attttgagcattcagaaacacacctagcgaagcgcactagcaacgacctaacaacaatggctaccaagatattatccctctttgcgcttcttgccctttttgtgagcgcaacaaatgcgttcattattccacaatgctcacttgctcctagtgccattattccacagttcctccctccagttacttcaatgggcttcgaacacccagctgtgcaagcctacaggctacaacaagcgcttgcggcga

SEQ ID NO: 69509 - DNA, 249 bp, Zea mays
attgagaccaactagcaacatagaaagcacaatagtgtaccaacaatggcagccaaaatattttgcctccttatgctccttggtctttctgcaagtgctgctacggcgaccattttcccgcaatgctcgcaagcgcctatagcttcccttcttcccccgtacctctcaccagcggtgtcttcggtatgtgataacccaattcttcaacgctacaggatccaacaggcaatcacagctggcatcttacct

SEQ ID NO: 69510 - DNA, 252 bp, Zea mays
cgctcgagccgattcggctcgacggctcgagcaaaaacatcaacaacaaccaattgcccaagtacaacaacaatccttggcacatctaaccatacaaaccatcgcaacgcaacagcaacaacaatttctaccagcactgagccaactagctgtggtgaaccctgtcgcctacttgcaacagcagttgcttgcatccaacccacttgctctggcaaacatagttgcataccaacaacaacaacaattgcaaca

SEQ ID NO: 69511 - DNA, 250 bp, Zea mays
gcaacatagaaagtggaatccagtagcaacaacagagcaacaatggcgaccaagatattttccctccttatgctccttgctctttctgcatgtgttgctaacgcgacaattttccctcaatgctcacaagctcctatagcttcccttcttcccccataccttccatcaatgatagcttcagtatgtgaaaacccagctcttcagccctataggctccaacaagcaatcgcagcaagcaacatacctttat

SEQ ID NO: 69512 - DNA, 248 bp, Zea mays
cacagatgatgacgcctaacatgatgtcaccattgatgatgccgagcatgatgtcaccaatggtcttgccgagcatgatgtcgcaaatgatgatgccacaatgtcactgcgacgccgtctcgcagattatgctgcaacagcagttaccattcatgttcaacccaatggccatgacgattccacccatgttcttacagcaaccctttgttggtgctgcattctagatagaaatatttgtgttgtatcga

SEQ ID NO: 69513 - DNA, 241 bp, Zea mays
attgagaccaactagcaacatagaaagcacaatagtgtaccaacaatggcagctaaaatattttgcctccttatgctccttggtctttctgcaagtgctgctacggcgaccattttcccacaatgctcacaagctcctatagcttcccttcttcccccgtacctctcaccaacggtgtcttcggtatgtgaaaacccaattcttcaaccctacaggatccaacaggcaatcgcagctggca

SEQ ID NO: 69514 - DNA, 241 bp, Zea mays
gaccaacaagcaacatagatagtggaatccagtagcaacaatagagcaacaatggcgaccaagatactttccctccttatgctccttgctctttctgcatgtgttgctaacgcgacaattttccctcaatgctcacaagctcctatagcttcccttcttcccccataccttccatcaatgatagcttcagtatgtgaaaacccagctcttcaaccctataggctccaacaagcaatcgcag

SEQ ID NO: 69515 - DNA, 250 bp, Zea mays
  unsure (1)..(250): unsure at all n locations
tcagcattcaaaaacacaccaagcgaaggnatctagcaacgacctaacaccaatggctaccaagatattagccctccttgcgcttcttgcccttttagtgagcgcaacaaatgcgttcattattccacagtgctcacttgctcctagtgccagtattccacagttcctcccaccagttacttcaatgggcttcgaacatccagccgtgcaagcctacaggctacaactagcgcttgcggcgagcgcctta

SEQ ID NO: 69516 - DNA, 254 bp, Zea mays
acctcatccaacaattatcttgcaatttatcttttgttagttatattagtgttgaggacttgaggtcattgttcttcttattattttgcagaatggatagattttccaagaggtccgcaaagacttccaagtggtaagtttattccagggaataacaacagttatgacaaatgtcgtcgaagatttgacctggtaaactttctttgattgtgcaaaagtccaagtttgtatttacttttaccactgatccagtg

SEQ ID NO: 69517 - DNA, 249 bp, Zea mays
attttgagcattcagaaacacaccaagcgaaggctactagcaacgacctaacaacaatggctaccaagatattagccctccttgcgcttcttgccctttttgtgagcgcaacaaatgcgttcattattccacaatgctcacttgctcctagtgccattattccacagttcctcccaccagttacttcaatgggcttcgaacacctagctgtgcaagccaacatgcaacaacaagcgcttgcggcgagcg

SEQ ID NO: 69518 - DNA, 246 bp, Zea mays
caactagcaacatagaaagcacaatagtgtaccaacaatggcagccaaaatattttgcttccttatgctccttggtctttctgcaagtgctgctaccgcaaccattttcccacaatgctcacaagctcctatagcttcctttcttcccccatacctctcaccagcggtgtcttcagtatgtgacaacccaattcttcaaccctacaggatccaccaggcaatcgcagcaggcatcgtacctttatc

SEQ ID NO: 69519 - DNA, 242 bp, Zea mays
gttgctgcctacccccagcaatttcttccattcaaccaactagcagcattgaactctgctgcttatttacagcagcaacaactactaccattcagccagctagctgatgtgagccctgctgccttcttgacacaacaacagttgttgccgttctacctgcacgctatgcctaacgctggcaccctcttacaactgcaacaattgctgccattcaaccaacttgctttgacaaactcaacagt

SEQ ID NO: 69520 - DNA, 240 bp, Zea mays
gcagctgcatgggaaatcaattcttatgtactgcacaggaggtatacgctgtgaaatggcatcagcttatattcgctcaaaaggtgaaggatttgagaacgtttttcagctatatggaggcattcagcggtatctggagcaattcccagatggtggctattttgaaggaaagaattttgtatttgaccacagaatatcagtaggaagccttaaggaaaacatactcggtgcatgtctgat

SEQ ID NO: 69521 - DNA, 198 bp, Zea mays
cgacgacgacgaggaacatggacatggagaggacccgccgcaggaagctcaacgagaggctctacgcgctccggagcgtcgtgcccaacatcaccaagatggacaaggcgtccatagtcagggacgccatcgcccacatcgagcatctgcaggagcaggagcgccgactgctcgccgagatatccgttctccagtctt

SEQ ID NO: 69522 - DNA, 240 bp, Zea mays
gaccaactagcaacatagaaagcacaatagtgtaccaacaatggcagccaaaatattttgcttccttatgctccttggtctttctgcaagtgttgctaccgcaaccattttcccacaatgctcacaagctcctatagcttcccttcttcccccatacctctcaccagcggtgtcttcaatgtgtgaaaccccaattgttcaaccctacaggatccaacaggcaatcgcaacaggcatctt

SEQ ID NO: 69523 - DNA, 242 bp, Zea mays
aagcaacatagaaagtggaatccagtagcaacaatagagcaacaatggcgaccaagatactttccctccttatgctccttgctctttctgcatgtgttgctaacgcgacaattttccctcaatgctcacaagctcctatagcttcccttcttcccccataccttccatcaatgatagcttcagtatgtgaaaacccagctcttcaaccctataggctccaacaagcaatcgcagcaagcaac

SEQ ID NO: 69524 - DNA, 242 bp, Zea mays
caactagcaacatagaaagcacaatagtgtaccaacaatggcagccaaaatattttgcttccttatgctccttggtctttctgcaagtgctgctaccgcaaccattttcccacaatgctcacaagctcctatagcttcctttcttcccccatacctctcaccagcggtgtcttcagtatgtgaaaacccaattcttcaaccctacaggatccaacaggcaatcgcagcaggcatcttacctt

SEQ ID NO: 69525 - DNA, 243 bp, Zea mays
caacaagcaacatagatagtggaatccagtagcaacaacagagctacaatggcgaccaagatattttacatccttatgctccttgctctttctgcatgtgttgctaacgcgacagttttccctcaatgctcacaagctcctatagcttcccttcttcccccataccttccatcaatgatagcttcagtatgtgagaacccagctcttcagccctataggctcgaacaagcaatcgcagcaagc

SEQ ID NO: 69526 - DNA, 245 bp, Zea mays
ctcgagccgaatcggctcgagttcagaaacacaccaagcgaaggacctagcaacgacctaacaacaatggctaccaagaacttagccctccttgcgcttcttgccctttttgtgagcgcaacaaatgcgttcattattccacaatgctcacttgctcctagtgccattattccacagttcctcccaccagttacttcaatgggcttcgaacacctagctgtgcaagccaacatgcaacaacaagc

SEQ ID NO: 69527 - DNA, 251 bp, Zea mays; identical to SEQ ID NO: 26909

SEQ ID NO: 69528 - DNA, 298 bp, Zea mays
aatcggctctgtcgagcgaatcggctcacggctcgagattgagaccaactagcaacatagaaagtgtgaatacagtagcaaaaatatagcaacaatggcggccaagatattttccatccttatgctccttgctctttctgcatgtgttgctaacgcgaccatttttcctcaatactcacaagctcctatagctgcccttcttcccccataccttccatcaatgaccgctttagtatgtgaaaacccagcccttcaaccctacaggatccagcaagcaatcgcaaagcaacttactttt

SEQ ID NO: 69529 - DNA, 278 bp, Zea mays
attttgagcattcagaaacacaccaagcgaactacctagcaacgacttaacaacaatggctaccaagatattagccctccttgcgcttcttgccctttttgtgagcgcaacaaatgcgttcattattccacaatgctcacttgctcctagtgccattataccacagttcctccgaccagttacttcaatgggcttcgaacacctagctgtgcaagcctacaggctacaacaagcgcttgcggcgagcgtcttacaacacaattaaccaattgcaacaa

SEQ ID NO: 69530 - DNA, 282 bp, Zea mays
gagaccaactagcaacatagaaagcacaatagtgtaccaacaatggcagccaaaatattttgcttccttatgctccttggtctttctgcaagtgttgctaccgcaaccattttcccacaatgctcacaagctcctatagcttcccttcttcccccatacctctcaccagcggtgtcttcaatgtgtgaaaccccaattgttcaaccctacaggatccaacaggcaatcgcaacaggcatcttaccattatcacccttgttctccaacaaccgtcagccctat

SEQ ID NO: 69531 - DNA, 275 bp, Zea mays
ggaatccagtagcaacaatagagcaacaatggcgaccaagatattttccctccttatgctccttgctctttctaacaatgtgttgctaacgcgacaattttccctcaatgctcacaagctcctatagcttcccttcttcccccataccttccatcaattatagcttcaatatgtgaaaacccagctcttcaaccatataggcttcaacaagcaatcgcagcaagcaacatacctttatcgcccttgttgtatcaacaatgccagccctatctttg

SEQ ID NO: 69532 - DNA, 275 bp, Zea mays
attttcagcattcaaaaacacaccaagcgaagccactagcaacgacctaacaccaatggctaccaagatattagccctccttgcgcttcttgcccttttagtgagcgcaacaaatgcgttcattattccacagtgctcacttgctcctagtgccagtattccacagttcctcccaccagttacttcaatgggcttcgaacatccagccgtgcaagcctacaggctacaactagcgcttgcggcgagcgccttacacaaccaattgcccaattgca

SEQ ID NO: 69533 - DNA, 273 bp, Zea mays
gagcactaaagggacgctatcaagatgcgatgaacatactcgggcctcagggccgagaactcgacttgctgattgttatactgcctgacaataatggttctctttacggggatgtcaaaaggatctgtgagactaatcttggattggtctcccaatgctgtctgactaaacatgttttcaaggtgaacaagcagcagtatcttgcaaatgttgccctgaaaataaatgtgaaggttgggggaaggaatactgtgttgttgatgctttggcaag

SEQ ID NO: 69534 - DNA, 284 bp, Zea mays
attgagaccaactagcaacatagaaagcacaatagtgtaccaacaatggcagccaaaatattttgcctccttatgctccttggtctttctgcaagtgctgctacggcgaccattttcccgcaatgctcgcaagctcctatagcttcccttcttcccccgtacctctcaccagcggtgtcttcggtatgtgaaaacccaattcttcaaccctacaggatccaacaggcaatcacagctggcatcttacctttatcacccttgttcctccaacaatcatagcccta

SEQ ID NO: 69535 - DNA, 264 bp, Zea mays
gggaagctttcatcagcttcttctgttcctgaggtcaagttatctcagtacatttcagcattggagaagctgacaacattgagagtgctacaacaggcctcttgtatttttaaatccataaagattgatatgctctcaagaatgattccattctttgacttctctgtcgtggagaagatttctgttgatgctgccaaacaaaattttgttgctataaaaggtgaccatttatcgggagttgttcagtttggtactgtggacata

SEQ ID NO: 69536 - DNA, 288 bp, Zea mays
cgcggcctgttgtcccggcttttagacgcaacttccatcgctgcgaactatccattcgtgttcgtcatggccgccagcgtcaccgtggaaaacctcaaccccaaggtcttaaaatgtgagtatgcagtccgtggggagattgtcatccatgctcagcgcctgcagcaacaactacaaacacaaccagggtctcttccttttgatgagatcctctattgcaacattgggaatccccaatctcttggtcagcaacctgtgacattcttagggaggttcttgctctttgtg

SEQ ID NO: 69537 - DNA, 285 bp, Zea mays
taccaagatattatccctccttgcgcttcttgcgctttttgcgagcgcaacaaatgcgttcattattccacaatgctcacttgctccaagttccattattacacagttcctcccaccagttacttcaatgggcatcgaacacccagctgtgcaagcctataggctacaacaagcaattgcggcgagcgtcttacaacaaccagtttcccagttgcaacaacaatccttggcacatctaacaatacaaaccatcgcaacgcaacacaacaacaattcctaccagca

SEQ ID NO: 69538 - DNA, 274 bp, Zea mays
aaagaattccctcccctagccgccgccgccgctcgtctccctgagaggtgccgggaccgaggaactggccgagttctaggtagagaatcggttttgcttgtctcagcacggggtctgctgcgtctggtggtggtgaaggggagaaattcgtgagatctgttccggatcaggcgtgcgagctcgggaatcaggggtttcacacatagcttcgtcgatttgaatttgatgtactaatggagtctaagggtggcaaaatctagcagtagtcgttcca

SEQ ID NO: 69539 - DNA, 280 bp, Zea mays
gcatgtgttgctaacgcgacaattttccctcaatgctcacaagctcctatagcttcccttcttcccccataccttccatcaatgatagcttcagtatgtgaaaacccagctcttcagccctataggctccaacaagcaatcgcagcaagcaacatacctttatcacccttgttgtttcaacaatcgccagccctatctttggtgcagtcattggtacaaaccatcagggcacagcagctgcagcaactcgtgctacctggatcaaccaagtagctctggc

SEQ ID NO: 69540 - DNA, 274 bp, Zea mays
ccggaaacggatcagcgacgcgctagacaagcaccttgagaaggcggtcgcatcgccgtccacatcgagggggtcagcgggcggcggcggtgtgcgcgaccaccaccgcctcatcgtgccgtcctccgtgtcgtccatccccaagggccgctgctccgaaggggagtctgattctgatagtgaagcattcgatgttagtggctctgatggagaagacacctcgtggatttcatggtattgcaacttaagagggaagagttcttctgtgaagtcg

SEQ ID NO: 69541 - DNA, 273 bp, Zea mays
tgttcggcaacgtcgtcatggacatcccccgctcactgttcgaagagaagcttgagcacatgaaggaatccaaggggctgaagaacgacaccgacctgacggcctctgacctcaaagagctcgtgggtcagtacaaggaggtctacctctcagccaagggagagccattcccctcagaccccaagaagcagctggagctagcagtgctggctgtgttcaactcgtgggagagccccagggccaagaagtacagagcatcaaccagatcatggc

SEQ ID NO: 69542 - DNA, 273 bp, Zea mays
ctcgagccgtgagaccaactagcaacatagaaagcacaatagtgtaccaacaatggcaaccaaggtattttgcttccttatgctccttggtctttctgcaagtgctgctaccgcaaccattttcccacaatgctcacaagctcctatagcttcctttcttcccccatacctctcaccagcggtgtcttcagtatgtgaaaacccaattcttcaaccctacaggatccaacaggcaatcgcagcaggcatcttcctttatcacccttgttcctc

SEQ ID NO: 69543 - DNA, 274 bp, Zea mays
  unsure (1)..(274): unsure at all n locations
gcaacatagaaagtggaatccagtagcaacaatagagcaacaatggcgaccaagatattttccctccttatgctccttgctctttctacatgtgttgctaacgcgacaattttccctcaatgctcacaagctcctatagcttcccttcttcccccataccttccatcaattatagcttcaatatgtgaaaacccagctcttcaaccatataggcttcaacaagcaatcgcagcaagcaacatacctttanttccttgttgtttcaacaatcgcc

SEQ ID NO: 69544 - DNA, 277 bp, Zea mays
gagaccaacaagcaacatagaaagtggaatacagtagcaacaatagagcaacaatggcggccaagatattttccatccttatgctccttgctctttctgcatgtgttgctaacgcgaccatttttcctcaatactcacaagctcctatagctgcccttcttcccccataccttccatcaatgaccgcttcagtttgtgaaaacccagcccttcaaccctagaggctccaacaagcaatcgcaacaagcatcttaccttatcacccctgttctatcaa

SEQ ID NO: 69545 - DNA, 278 bp, Zea mays
gccgacaactctctctaccgtccgataccccaagcaccagcgcggcggcggcgaccatggctgtcggaaagaacaagaggatctccaagggaaagaagggtggcaagaaaaagaccgtcgaccctttctctaagaaggattggtatgacatcaaggcaccgtcggtgttcagtgtgcgcaacatcgggaagactctcgtatccaggacacagggtaccaggattgcttctgagggtctgaagcacagagtctttgagtttgcctagctgatcttcagg

SEQ ID NO: 69546 - DNA, 280 bp, Zea mays
gcgaacgcactagcaacgacctaacaacaatggctaccaagatattagccctccttgcgcttcttgccctttttgtgagcgcaacaaatgcgttcattattccacaatgctcacttgctcctagtgccattattccacagttcctcccaccagttacttcaatgggcttcgaacacctagctgtgcaagccaacatgcaacaacaagcgcttgcggcgagcgtcttacaacaaccaattgcccaattgcaacaacaatctgccacatctaacaatacaag

SEQ ID NO: 69547 - DNA, 152 bp, Zea mays
ggcatccggctcgagctcgagccgctcgagccgaatcggctcgagtagcaacatagaaagcacaatagtgtaccaacaatggcggccaaaatattttgcttccttatgctccttggtctttctgcaagtgctgctaccgcaaccattttccc

SEQ ID NO: 69548 - DNA, 292 bp, Zea mays
attgagaccaacaagcaacatagaaagtggaatccagtagcaacaatagagcaacaatggcgaccaagatactttccctccttatgctccttgctctttctgcatgtgttgctaacgcgacaattttccctcaatgctcacaagctcctatagcttcccttcttcccccataccttccatcaatgatagcttcagtatgtgaaaacccagctcttcaaccctataggctccaacaagcaatcgcagcaagcaacatacctttatcacccttgttcaacaatcgccagcccta

SEQ ID NO: 69549 - DNA, 283 bp, Zea mays
gtcgcacatatctactatactatactctaggaagcaaggacaccaccgccatggcagccaagatgcttgcattgttcgctctcctagctctttgtgcaagcgccactagtgcgacccatattccagggcacttgccaccagtcatgccattgggtaccatgaacccatgcatgcagtactgcatgatgcaacaggggcttgccagcttgatggcgtgtccgtccctgatgctgcagcaactgttggccttaccgcttcagacgatcagtgatgatgcacagat

SEQ ID NO: 69550 - DNA, 285 bp, Zea mays
ctcgagccgacttcggctcgagatcgactggaatcgtcgtggtcactggatctggatttagtcaagttcctggaacatgacacatcagatgcacgatcctgccgcaggaagacaagatccccgcggtgatcagccgcttcagggctttccatgaggcgttcttggccgaataccgcgactaaactgttacgctgtgtgtgagttaagttggaggttcagtagaactgtagaagagctcagtgacagcgcagaaagaggcagtgtagaaaggcttaggtccttctt

SEQ ID NO: 69551 - DNA, 273 bp, Zea mays
ctcgagccgttcaaaaacacaccaagcgaagcgcactagcaacgacctaacaccaatggctaccaagatattagccctccttgcgcttcttgcccttttagtgagcgcaacaaatgcgttcattattccacagtgctcacttgctcctagtgccattattccacagttcctcccaccagttacttcaatgggcttcgaacatccagccgtgcaagcctacaggctacaactagcgcttgcggcgagcgccttacaaaccaattgcccaattgc

SEQ ID NO: 69552 - DNA, 276 bp, Zea mays
cagcattcaaaaacacaccaagcgaaggcactagcaacgacctaacaccaatggctaccaagatattagccctccttgcgcttcttgcccttttagtgagcgcaacaaatgcgttcattattccacagtgctcacttgctcctagtgccagtattccacagttcctcccaccagttacttcaatgggcttcgaacatccagccgtgcaagcctacaggctacaactagcgcttgcggcgagcgccttacaacaaccattgcccaattgcaacaaca

SEQ ID NO: 69553 - DNA, 278 bp, Zea mays
gaaagtggaatccagtagcaacaacagagcaacaatggcgaccaagatattttccctccttatgctccttgctctttctgcatgtgttgctaacgcgacaattttccctcaatgctcacaagctcctatagcttcccttcttcccccataccttccatcaatgatagcttcagtatgtgaaaacccagctcttcagccctataggctccaacaagcaatcgcagcaagcaacatacctttatcacccttgttgtttcaaatcgccagccctatctttg

SEQ ID NO: 69554 - DNA, 271 bp, Zea mays
gcattcagaaacacaccaagcgaagacattagcaacaacctaacaacaatggctaccaagatattatccctccttgcgcttcttgcgctttttgcgagcgcaacaaatgcgttcattattccacaatgctcacttgctccaagttccattattacacagttcctcccaccagttacttcaatgggcttcgaacacccagctgtgcaagcctataggctacaacaagcaattgcggcgagcgtcttacaacacaatttcccagttgcaacaa

SEQ ID NO: 69555 - DNA, 271 bp, Zea mays
caacaagcaacatagaaagtggaatacagtagcaaaaatagagcaacaatggcggccaagatattttccatccttatgctccttgctctttctgcatgtgttgctaacgcgaccatttttcctcaatactcacaagctcctatagctgcccttcttcccccataccttccatcaatgaccgctttagtatgtgaaaacccagcccttcaaccctacaggatccagcaagcaatcgcaacaagcaacttactttatcacacctgttctttca

SEQ ID NO: 69556 - DNA, 272 bp, Zea mays
gcaacatagaaagcacaatagtgtaccaacaatggcagccaaaatattttgcctccttatgctccttggtctttctgcaagtgctgctacggcgaccattttcccacaatgctcacaagctcctatagcttcccttcttcccccgtacctctcaccagcggtgtcttcggtatgtgaaaacccaattcttcaaccctataggatccaacaggcaatcgcagctggcatcttacctttatcacccttgttccccaacaatcatcagccctatt

SEQ ID NO: 69557 - DNA, 278 bp, Zea mays
ttctcgagccgattcggctcgagcaactagcaacatagaaagcacattagtgtaccaacaatggcagccaaaatattttgattccttatgctccttggtctttctgcaagtgttgctaccgcaaccattttcccacaatgctcacaagctcctatagcttcccttcttcccccatacctctcaccagcggtgtcttcaatgtgtgaaaacccaattgttcaaccctacaggatccaacaggcaatcgcaacaggcatttaccattatcacccttgttc

SEQ ID NO: 69558 - DNA, 279 bp, Zea mays
ctcgagccgctagcaacatagaaagcacaatagtgtaccaacaatggcagccaaaatattttgcctccttatgctccttggtctttctgcaagtgctgctacggcgaccattttcccgcaatgctcgcaagctcctatagcttcccttcttcccccgtacctctcaccagcggtgtcttcggtatgtgaaaacccaattcttcaaccctacaggatccaacaggcaatcgcagctggcatcttacctttatcaccctgttcctccaacaatcatcagcc

SEQ ID NO: 69559 - DNA, 280 bp, Zea mays
aacacaccaagcgaagccactagcaacgacctaacaacaatggctaccaagatattagccctccttgcgcttcttgccctttttgtgagcgcaacaaatgcgttcattattccacaatgctcacttgctcctagtgccattattccacagttcctcccaccagttacttcaatgggcttcgaacacctagctgtgcaagccaacatgcaacaacaatcgcttgcggcgagcgtcttacaacaaccaattgcccaattgcaacaacaatcctgcacatcta

SEQ ID NO: 69560 - DNA, 286 bp, Zea mays
caagcaacatagaaagtggaatccagtagcaacaatagagcaacaatggcgaccaagatactttccctccttatgctccttgctctttctgcatgtgttgctaacgcgacaattttccctcaatgctcacaagctcctatagcttcccttcttcccccataccttccatcaatgatagcttcagtatgtgaaaacccagctcttcaaccctataggctccaacaagcaatcgcagcaagcaacatacctttatcacccttgtttaacaatcgccagccctatcttt

SEQ ID NO: 69561 - DNA, 274 bp, Zea mays
ttttcagcattcaaaaacacaccaagcgaagccactagcaacgacctaacaccaatggctaccaagatattagccctccttgcgcttcttgcccttttagtgagcgcaacaaatgcgttcattattccacagtgctcacttgctcctagtgccagtattccacagttcctcccaccagttacttcaatgggcttcgaacatccagccgtgcaagcctacaggctacaactagcgcttgcggcgagcgccttacacaaccaattgcccaattgca

SEQ ID NO: 69562 - DNA, 276 bp, Zea mays
ctttctccctactctcagcaacaacaatttcttccattcaaccatactgtctacactgaaccctgctgcttatttgcagcaacaactattaccattcagccagctagctactgcctactctcagcaacaacaacttcttccatttaaccaattggccgcactgaaccccgctgcttatttgcagcagcaaatactactaccatttagccagctagctgcagcaaaccgtgcttccttcttgacacagcaacagttgcgcctttctaccagcagttt

SEQ ID NO: 69563 - DNA, 276 bp, Zea mays
agcattcagaaacacaccaagcgaagacattagcaacaacctaacaacaatggctaccaagatattatccctccttgcgcttcttgcgctttttgcgagcgcaacaaatgcgttcattattccacaatgctcacttgctccaagttccattattacacagttcctcccaccagttacttcaatgggcttcgaacacccagctgtgcaagcctataggctacaacaagcaattgcggcgagcgtcttacaacaaccatttcccagttgcaacaacaa

SEQ ID NO: 69564 - DNA, 270 bp, Zea mays
ctcgagccacacacactcgagaactccatttcgatcccatttgaaatcaacccatcctcgtttcctccgtctagcagcctctcaccctcatggccaagatcaagatcgggatcaatgggtttggcaggatcggaaggctggtggccagggtggccctgcagagcgacgacgtcgagctcgtcgccgtgaacgaccccttcatcagcaccgattacatgacctacatgttcaagtatgacactgtgcacggcagtggaagcaccatgaggt

SEQ ID NO: 69565 - DNA, 271 bp, Zea mays
atacgaactagcaacatacatagtgaagtacactagcaacatcttagcaccaatggcagccaagatttttgccatccttgccctccttgctctttcagcaagcgttgctaccgcgactattattccacaatgctcacaacaatacctctctccggtgacagccgcgagatttgaatacccaactataccatcctacaggctacaagaggccatcgcagcaagcatcttacggtcgttagcattgaccgtcaacaaccatatgccctattgc

SEQ ID NO: 69566 - DNA, 270 bp, Zea mays
ctcgagcgattcggctcgagggacgaggcaaccatggccgcgaggggcaccgccgacttcttctaccgcgagtcgcaacgtctgggctacgtcgcccgctctgcgtttaagctgatccagatgcagaagcagcacaagctcatcgcgccgggcgccgctgtgctcgacctcggctgcgcccccggcgcgtggcttcaggtggcttgtcagaacctgggtcccctcgagaagggtggcattgtcgtcggctcgatgttaagaaggtgaaag

SEQ ID NO: 69567 - DNA, 277 bp, Zea mays
ccaactagcaacatagaaagcacaatagtgtaccaacaatggcagccaaaatattttgcctccttatgctccttggtctttctgcaagtgctgctacggcgaccattttcccgcaatgctcgcaagctcctatagcttcccttcttcccccgtacctctcaccagcggtgtcttcggtatgtgaaaacccaattcttcaaccctacaggatccaacaggcaatcacagctggcatcttacctttatcacccttgtcctccaacaatcatcagcccta

SEQ ID NO: 69568 - DNA, 292 bp, Zea mays
cgcgctcgaggagcattcagaaacacaccaagcgaagctacctagcaacgacttaacaacaatggctaccaagatattagccctccttgcgcttcttgccctttttgtgagcgcaacaaatgcgttcattattccacaatgctcacttgctcctagtgccattataccacagttcctccgaccagttacttcaatgggcttcgaacacctagctgtgcaagcctacaagctacaacaagcgcttgcggcgagcgtcttacaacaaccattaacattgcaacaacaatccttg

SEQ ID NO: 69569 - DNA, 280 bp, Zea mays
ctcgagctacccgactccgccgccgcccgccgctccgcctcagcgcatagcccgccgcgacctcatcgatcaccttcaactttcaatcatggcggacgtcgatgtcgaaccggaggttgccgccggagctcccaagaagaggacgttccgcaagtacagctaccgcggcgtcgacctagatgcgcttctcgacatgtccacggacgacctcgtccagctcttccccgcgcgcgccaggagaaggttccagaggggtctaagaggaagcccatggcgctca

SEQ ID NO: 69570 - DNA, 276 bp, Zea mays
ctctgactcaactagctgtggcaaaccctgttgcctacttgcaacagctgcttccattcaaccaactgactctgtcgaactctgctgcgtacctacaacagcgacaacagttacttaatccattggtagtggctaacccattggtcgccgccttcctacagcagcaacaattgctgccatacaaccagttctctttgatgaatcctgtcttgtcgaggcagcaacccatcgttggaggtgccatcttttagattcatatgagatgtactcgataat

SEQ ID NO: 69571 - DNA, 273 bp, Zea mays
ctagcaacatagaaagcacaatagtgtaccaacaatggcagccacaatattttgcctccttatgctccttggtctttctgcaagtgctgctacggcgaccattttcccgcaatgctcgcaagctcctatagcttcccttcttcccccgtacctctcaccagcggtgtcttcggtatgtgaaaacccaattcttcaaccctacaggatccaacaggcaatcacagctggcatcttacctttatcacccttgttctccaacaatcatcagcccta

SEQ ID NO: 69572 - DNA, 274 bp, Zea mays
cagctgcttgcatccaacccacttgctttggcaaacgtagctgcataccaacaacaacaacagttgcaacagtttctgccagcgctcagtcaactagccatggtgaaccctatcgcctacctacaacagcaacaacttctttcatctagcccgctcgctatgggcaatgcacctacatacctgcaacaacagttgttgcaacaacagttgctgcaacaaattgtaccagctcttactcagctagctgtggcaacctgctgcctacttgcaacaa

SEQ ID NO: 69573 - DNA, 271 bp, Zea mays
tggaaaccctagccgccatatctcacgatccactcgagcaccaagccgagggaaggtgaggagcgatggcgcgcggcgtggtgtcggcgaagggcggcgcggtcgcgggcaagaagaaggggtcggtttccttcacgatcgactgcaccaagccagtggaggacaagatcatggaggtcgcctcgctcgagaagttcctgcaggagcgcatcaaggtcgccggcggcaaggctggcaacctcggcgactccgtaccatctctcgcgagaag

SEQ ID NO: 69574 - DNA, 271 bp, Zea mays
caacaagcaacatagaaagtggaatccagtagcaacaatagagcaacaatggcgaccaagatactttccctccttatgctccttgctctttctgcatgtgttgctaacgcgacaattttccctcaatgctcacaagctcctatagcttcccttcttcccccataccttccatcaatgatagcttcagtatgtgaaaacccagctcttcaaccctataggctccaacaagcaatcgcagcaagcaacatactttatcacccttgtttcaaca

SEQ ID NO: 69575 - DNA, 269 bp, Zea mays
atttagaccaactagcaacatagaaagcacaatagtgtaccaacaatggcagccaaaatattttgcctccttatgctccttggtatttctgcaagtgctgctacggcgaccattttcccgcaatgctcacaagctcctatagcttcccttcttcccccgtacctctcaccagcggtgtcttcggtatgtgaaaacccaattcttcaaccctacaggatccaacaggcaatcgcagctggcatcttaccttatcacccttgttcctccaa

SEQ ID NO: 69576 - DNA, 265 bp, Zea mays
tttcagcattcaaaaacacaccaagcgaagctactagcaacgacctaacaccaatggctaccaagatattagccctccttgcgcttcttgcccttttagtgagcgcaacaaatgcgttcattattccacagtgctcacttgctgctagtgccattattccacagttcctcccaccagttacttcaatgggcttcgaacatccagccgtgcaagcctacaggctacaactagcgcttgcggcgagcgctacaacaaccaattgccc

SEQ ID NO: 69577 - DNA, 267 bp, Zea mays
cagcattcaaaaacacaccaagcgaagccactagcaacgacctaacaccaatggctaccaagatattagccctccttgcgcttcttgcccttttagtgagcgcaacaaatgcgttcattattccacagtgctcacttgctcctagtgccagtattccacagttcctcccaccagttacttcaatgggcttcgaacatccagccgtgcaagcctacaggctacaactagcgcttgcggcgagcgcctacaacaaccaattgcccaatt

SEQ ID NO: 69578 - DNA, 273 bp, Zea mays
caacaagcaacatagaaagtggaatccagtagcaacaatagagcaacaatggcgaccaagatattttccctccttatgctccttgctctttctacatgtgttgctaacgcgacaattttccctcaatgctcacaagctcctatagcttcccttcttcccccataccttccatcaattatagcttcaatatgtgaaaacccagctcttcaaccatataggcttcaacaagcactcgcagcgagcaatataccttatcgcccttgttgcatcaac

SEQ ID NO: 69579 - DNA, 273 bp, Zea mays
ctctgactcaactagctgtggcaaaccctgttgcctacttgcaacagctgcttccattcaaccaactgactctgtcgaactctgctgcgtacctacaacagcgacaacagttacttaatccattggtagtggctaacccattggtcgccgccttcctacagcagcaacaattgctgccatacaaccagttctctttgatgaatcctgtcttgtcgaggcagcaacccatcgttggaggtgccatcttttagatacatatgagatgtactcgat

SEQ ID NO: 69580 - DNA, 277 bp, Zea mays
tgcgcctctacatttcttctctctctgctcctccgcctccgcctgatccatccaagacagggatcgccatgtcggactcggaggagcaccacttcgaatcgaaggccgacgctggggcgtccaagacctacccgcagcaggctggcaccgtccgtaagaacggcttcatcgtcatcaagaaccgtccctgcaaggttgtggaggtttctacctccaagactggtaagcatggccacgccaaatgccactttgtcgcatagacatattcaatgggaaa

SEQ ID NO: 69581 - DNA, 281 bp, Zea mays
ttcagaaacacacctagcgaagcgcactagcaacgacctaacaacaatggcttccaagacattatccctccttgcgcttcttgccctttttgtgagtgcaacaaatgcgttcattattccacaatgctcacttgctccgagtgccattattccacagttcctccctccagttacttcaatgggcttcgaacacccagctgtgcaagcctataggctacaacaagcgcttgcggcgagcgtcttagaacaaccaattgcccattacaacaacaatccttggc

SEQ ID NO: 69582 - DNA, 272 bp, Zea mays
ggctagttgactgagcactggtgaaccctgccgtctacctacaactactttcatctagcccgctcgcggtgggcaatgcacctacgtacctacaacaacagttgctgcaacaaattgtaccagctctgactcagctagctgtggcaaaccctgctgcctacttacaacagttgcttccattcaaccaactggctgtgtcaaactctgctgcgtacctacaacagcgacaacagttacttaatccattggcagtgctaaccattggtcgctac

SEQ ID NO: 69583 - DNA, 270 bp, Zea mays
agcaaattgggatgtttactttcactgggctgaatagcgaacaagtcgcattcatgaggcaggaataccacatttatatgacatctgatgggaggatcagcatggccggtttgagcatgaggactgtgccccatcttgcagatgccatacacgctgcagttactcaactgaaatgaggatagtatcgcagctttcgtgaataaaacctgaatcacccacaacaatgttctaagtactcagccagtggtattactggttgacctactgtag

SEQ ID NO: 69584 - DNA, 272 bp, Zea mays
gcagctgtgaagtggcggcttgcattcaaacctgaaaacatctgttgggatgatattgcagaggaagcagagactggaaagatatatagagcggattataaggacaaacatggcagaactgttcttgtattgaggcctggcttagagaacactacctcagcaataggacagatcaaatatctagtctactctctggagaaagcaattatgaacctgacggaagatcaagagaagatggtatggctgacagattccagtgctggacattggga

SEQ ID NO: 69585 - DNA, 268 bp, Zea mays
tagcaacatagaaagcacaatagtgtaccaacaatggcagccaaaatattttgcctccttatgctccttggtctttctgcaagtgctgctacggcgaccattttcccgcaatgctcgcaagctcctatagcttcccttcttcccccgtacctctcaccagcggtgtcttcggtatgtgaaaacccaattcttcaaccctacaggatccaacaggcaatcgcagctggcatcttacctttatcacccttttcctccaacaatcatcagc

SEQ ID NO: 69586 - DNA, 266 bp, Zea mays
ggcttctgatcactcgatatttgttggcgatctagctgctgatgtcactgatgaaatgctgctggagcttttctccagcaagtaccgctcggtgaaaggagctaaagttattattgatgcaaacacaggccgttccaggggctatggatttgtcaggtttggagacgacaacgacaaatctcatgccatgtctgaaatgaatggtgtatattgctctacgaggccaattcgtataggacctgcgatcccagaagatcttcaggtga

SEQ ID NO: 69587 - DNA, 266 bp, Zea mays
ctcgagccgattcggctcgagaagaatgctgcctacattggcactcctggcaagggtatccttgctgctgatgagtccaatggcaccattggcaagcgcctttccagcatcaatgtcgagaacgttgaggagaaccgccgtgccctccgtgagctcctattctgctgccctggtgctctccagtacatcagcggtgtgatcctcttcgaggagaccctgtaccagaagaccaaggatggcaagcctttgttgatgtcctcaaggag

SEQ ID NO: 69588 - DNA, 268 bp, Zea mays
gcaacatagaaagcacaatagtgtaccaacaatggcagccaaaatattttgcctccttatgctccttggtatttctgcaagtgctgctacggcgaccattttcccgcaatgctcacaagctcctatagcttcccttcttcccccgtacctctcaccagcggtgtcttcggtatgtgaaaacccaattcttcaaccctacaggatccaacaggcaatcgcagctggcatcttacctttatcacccttgtcctccaacaatcatcagccc

SEQ ID NO: 69589 - DNA, 167 bp, Zea mays
cagctagctggctgaatggtagtagttgttgctgctgtaaataagcaggagagttcaatgctgtcagttggttgtgccctcttttagatttcttatgagttatagttcaataataaagttttttgtctgatgtttgtggcttcccagaaataagaaagtacatttct

SEQ ID NO: 69590 - DNA, 276 bp, Zea mays
  unsure (1)..(276): unsure at all n locations
ctagcaacatagaaagcacaatagtgtaccaacaatggcagccaaaatattttgcctccttatgctccttggtctttctgcaagtgctgctacggcgaccattttcccgcaatgctcgcaagctcctatagcttcccttcttcccccgtacctctcaccagcggtgtcttcggtatgtgaaaacccaattcttcaaccctacaggatccaacaggcaatcacagctggcatcttacctttatcacccttgttncccaacaatcatcagccctatta

SEQ ID NO: 69591 - DNA, 260 bp, Zea mays
acgcccgagagagagagagagggagagtgagagtggggattcaagtttcaaactcactatcgaggggggataggaaggtggtcactcatcggtccacagctagctcgtcgccccccatggctgactggggccccgtggtgatcgcgacggtgctgttcgtgctgctcacgccgggcctgctgttccagctgccggcgcacggccgaatcgtcggcttcggcaccatgcacaccagcggcctcgccatcctcgtccacgcc

SEQ ID NO: 69592 - DNA, 253 bp, Zea mays
aaattcagagaatttctgttgtcaaaggactttgttgggatccacacgccaaaattgatttctggatccagtgaaggtggtgcagctgtattcaagcttctgtacaatggtcaacctgcttgcttggcacaatctcctcagttgcacaagcagatggctctatgtggtggttttgaacgagtatttgaggttggccctgtgtttagagcagaaaattcaaacacacacaggcatctctgtgagtttgttggtc

SEQ ID NO: 69593 - DNA, 235 bp, Zea mays
cgccagcaccgccgcatcaccgaaggttcgcaaagatggcggtgccgctgctgacgcagaagatcgtgaagaagagggtcaagcagttcaagatgccccatcttgatcgctacaagtgccttaagccaagctggcgcaggcccaagggtatcgactcccgcgtcaggcgtaagtccaagggatgcaccttgatgccaacattggaatatggctccgacaagaagaccaggcacta

SEQ ID NO: 69594 - DNA, 256 bp, Zea mays
gcaaaatctgcacgagagacagacgacgagatggccgatgcggaggacgccgccgccgcgcgccgacgggccgccataaccgactaccgcaagaagctgctcaactgcagggagctcgagtcgcgcgtcggcaccgtgacagaaagccttacaaatgcaaagagggattttaccaagactgaagacgacttgaaatctctgcagagcgtggggcacataattcgagaggttctccgacctcttgataatgaacgct

SEQ ID NO: 69595 - DNA, 255 bp, Zea mays
attttgagcattcagaaacacacctagcgaagcgcactagcaacgacctaacaacaatggcttccaagacattatccctccttgcgcttcttgccctttttgtgagtgcaacaaatgcgttcattattccacaatgctcacttgctccgagtgccattattccacagttcctccctccagttacttcaatgggcttcgaacacccagctgtgcaagcctataggctacaacaagcgcttgcggcgagcgtcttag

SEQ ID NO: 69596 - DNA, 252 bp, Zea mays
ggaagaagagagagaagacgtctctctcctctcggcgtccccgttccccaacctctcgtctgctgcctgcctgcctgcctgcctgcaaaaaggacgtttgtcatggcgtctaagcgcatcctcaaggagctgaaggacctgcagaaggacccccccacatcatgcagtgcaggtcctgctggtgaggacatgtttcattggcaagcaacaattatgggaccacctgacagtccctatgctggtggtgttttt

SEQ ID NO: 69597 - DNA, 251 bp, Zea mays
attgagaccagcaagcaacatagaaagtagaatccattagcaacaatagagcaacaatggcgaccaagatattttccctccttatgctccttgctctttctacatgtgttgctaacgcgacaattttccctcaatgctcacaagctcctatagcttcccttcttcccccataccttccatcaattatagcttcagtatgtgaaaacccagctcttcaaccatataggcttcaacaagcaatcgcagcaagc

SEQ ID NO: 69598 - DNA, 251 bp, Zea mays
ctcgagccgtgaaggatgcctatgatgctgctcatgagactgagaggaagcgtgcattatcagcacttctctcccaaacaaagcagcaagaacgaaaggacgccgagactttagcagaagcaaaacgtatcatggaatctcgtgctgctagcaaaaatgttgatgtagctgtaatgcctccgaactctgataatgctatggtacctgttgatggtgtatctccttcaagcagtactcatccatctttagca

SEQ ID NO: 69599 - DNA, 254 bp, Zea mays
attttgagcattcagaaacacaccaagcgaagcgcactagcaacgacctaacaacaatggctaccaagatattagccctccttgcgcttcttgccctttttgtgagcgcaacaaatgcgttcattattccacaatgctcacttgctcctagtgccattattccacagttcctcccaccagttacttcaatgggcttcgaacacctagctgtgcaagccaacatgcaacaacaagcgcttgcggcgagcgtctta

SEQ ID NO: 69600 - DNA, 259 bp, Zea mays
ctagcaacatagaaagcacaatagtgtaccaacaatggcagccaaaatattttgcctccttatgctccttggtatttctgcaagtgctgctacggcgaccattttcccgcaatgctcacaagctcctatagcttcccttcttcccccgtacctctcaccagcggtgtcttcggtatgtgaaaacccaattcttcaaccctacaggatccaacaggcaatcgcagctggcatcttacctttatcacccttgttcctccaa

SEQ ID NO: 69601 - DNA, 251 bp, Zea mays
actcgagccgaatcggctcgaggaaaaagacggatttaccagttacgagaaaaaatatttcatctgttagatgcaacacaaacatcccttggtggagctaaagcaaggttccctcagtactatgaggcatactatgagttggtgtctgctggtgtgcaattttcaaatcggccaaatgttcttgtcacacgagcagaagtgccagtcccagaaacgagaacagaaccaaataatgaaagtttatcgacccg

SEQ ID NO: 69602 - DNA, 255 bp, Zea mays
gaaacacaccaagcgaacacattagcaacaacctaacaacaatggctaccaagatattatccctccttgcgcttcttgcgctttttgcgagcgcaacaaatgcgttcattattccacaatgctcacttgctccaagttccattattacacagttcctcccaccagttacttcaatgggcttcgaacacccagctgtgcaagcctataggctacaacaagcaattgcggcgagcgtcttacaacaaccaatttccc

SEQ ID NO: 69603 - DNA, 257 bp, Zea mays
caacaagcaacatagaaagtggaatacagtagcaacaatagagcaacaatggcggccaagatattttccatccttatgctccttgctctttctgcatgtgttgctaacgcgaccatttttcctcaatactcacaagctcctatagctgcccttcttcccccataccttccatcaatgaccgcttcattttgtgaaaacccagcccttcaaccctacaggctccaacaagcaatcgcaacaagcaacttacctttatc

SEQ ID NO: 69604 - DNA, 256 bp, Zea mays
gaaacacacctagcgaacctactagcaacgacctaacaacaatggcttccaagacattatccctccttgcgcttcttgccctttttgtgagtgcaacaaatgcgttcattattccacaatgctcacttgctccgagtgccattattccacagttcctccctccagttacttcaatgggcttcgaacacccagctgtgcaagcctataggctacaacaagcgcttgcggcgagcgtcttagaacaaccaattgccca

SEQ ID NO: 69605 - DNA, 256 bp, Zea mays
attgagaccaactagcaacatagaaagcacaatagtgtaccaacaatggcagccaaaatattttgcttccttatgctccttggtctttctgcaagtgctgctaccgcaaccattttcccacaatgctcacaagctcctatagcttcctttcttcccccatacctctcaccagcggtgtcttcagtatgtgaaaacccaattcttcaaccctacaggatccaacaggcaatcgcagcaggcatcttacctttatcac

SEQ ID NO: 69606 - DNA, 251 bp, Zea mays
gaccaacaagcaacatagaaagtggaatccagtagcaacaacagagcaacaatggcgaccaagatattttccctccttatgctccttgctctttctgcatgtgttgctaacgcgacaattttccctcaatgctcacaagctcctatagcttcccttcttcccccataccttccatcaatgatagcttcagtatgtgaaaacccagctcttcagccctataggctccaacaagcaatcgcagcaagcaacat

SEQ ID NO: 69607 - DNA, 245 bp, Zea mays
gcaacatagacagcacaatagtgtaccaacaatggcagctaaaatattttgcctccttatgctccttggtctttctgcaagtgctgctacggcgaccattttcccacaatgctcacaagctcctatagcttcccttcttcccccgtacctctcaccaacggtgtcttcggtatgtgaaaacccaattcttcaaccctacaggatccaacaggcaatcgcagctggcatcttacctttatcaccct

SEQ ID NO: 69608 - DNA, 251 bp, Zea mays
gcacaatagtgtaccaacaatggcagccaaaatattttgcctccttatgctccttggtctttctgcaagtgctgctacggcgaccattttcccgcaatgctcgcaagctcctatagcttcccttcttcccccgtacctctcaccagcggtgtcttcggtatgtgaaaacccaattcttcaaccctacaggatccaacaggcaatcgcagctggcatcttacctttatcacccttgttcctccaacaatcat

SEQ ID NO: 69609 - DNA, 242 bp, Zea mays
cgtaggggcatggagtcggctgctgcaggccgcacatcgccgtcagttgctgcgctgctgccggcggtgtcccccactgaagaaactatgtgctgtagtatagccgctggctagctagctagttgagtcatttagcggcgatgattgagtaataatatgtcacgcatcaccatgggtggcagtgtcagtgtgagcaatgacctgaatgaacaattgaaatgaaaagaaaaaagtattgttcc

SEQ ID NO: 69610 - DNA, 222 bp, Zea mays
attgagaccaactagcaacatagaaagcacaatagtgtaccaacaatggcagccaaaatattttgcctccttatgctccttggtctttctgcaagtgctgctacggcgaccattttcccgcaatgctcgcaagctcctatagcttcccttcttcccccgtacctctcaccagcggtgtcttcggtatgtgaaaacccaattcttcaaccctacaggatccaa

SEQ ID NO: 69611 - DNA, 241 bp, Zea mays
caactagcaacatagaaagcacaatagtgtaccaacaatggcagccaaaatattttgcttccttatgctccttggtctttctgcaagtattgctaccgcaaccattttcccacaatgctcacaatctcctatagcttcccttcttcccccatacctctcaccagcggtgtcttcaatgtgtgaaaacccaattgttcaaccctacaggatccaacaggcaatcgcaacaggcatcttacca

SEQ ID NO: 69612 - DNA, 248 bp, Zea mays
cagaaacacacctagcgaagcgcactagcaacgacctaacaacaatggcttccaagacattatccctccttgcgcttcttgccctttttgtgagtgcaacaaatgcgttcattattccacaatgctcacttgctccgagtgccattattccacagttcctccctccagttacttcaatgggcttcgaacacccagctgtgcaagcctataggctacaacaagcgcttgcggcgagcgtcttagaacaa

SEQ ID NO: 69613 - DNA, 249 bp, Zea mays
ggcacaacaactacaacaacttgtgctaggaaaccttgctgcctactctcagcaacagcagtttcttccattcaaccaactggctgcattgaactctgctgcttatttgcaacaacaactaccattcagtcagctagctgctgcctacccccagcaatttcttccattcaaccaactggcagcattgaactctgctgcttatttacaacagcaacagctaccaccattcagccagctagctgatgtgag

SEQ ID NO: 69614 - DNA, 254 bp, Zea mays
agcattcagaaacacaccaagcgaacgaactagcaacgacctaacaacaatggctaccaagatattagccctccttgcgcttcttgccctttttgtgagcgcaacaaatgcgttcattattccacaatgctcacttgctcctagtgccattattccacagttcctcccacaagttacttcaatgggcttcgaacacctagctgtgcaagccaacatgcaacaacaagcgcttgcggcgagcgtcttacaacaac

SEQ ID NO: 69615 - DNA, 253 bp, Zea mays
caacaagcaacatagaaagtggaatccagtagcaacaatagagcaacaatggcgaccaagatactttccctccttatgctccttgctctttctgcatgtgttgctaacgcgacaattttccctcaatgctcacaagctcctatagcttcccttcttcccccataccttccatcaatgatagcttcagtatgtgaaaacccagctcttcaaccctataggctccaacaagcaatcgcagcaagcaacatacctt

SEQ ID NO: 69616 - DNA, 94 bp, Zea mays
tgggcttcgaacatccagccgtgcaagcctacaggctacaactagcgcttgcggcgagcgccttacaacaaccaattgcccaattgcaacaaca

SEQ ID NO: 69617 - DNA, 249 bp, Zea mays
attatataccatgttaacacccacaaacaggtagtcgatatctttaccaagcccttggatggaaagagattctgtgagcttaggaatgaactaaatttcatagattctcgaaaccttgattgaattattgcactatgctcattttatacctttgatcacgacatgtctctttcatttggttcaaatgcatatttcttattctttttgtgccaaagctaagactaatatgctttcaactgtgtttctata

SEQ ID NO: 69618 - DNA, 242 bp, Zea mays
aagcaatcgcagcaagcaacatacctttatcacccttgttgtttcaacaatcgccagccctatctttggtgcagtcattggtacaaaccatcagggcacagcagctgcagcaactcgtgcgacctgtgatcaaccaagtagctctggcaaacctttctccctactctcagcaacaacaatttcttccattcaaccaactgtctacactgaaccctgctgcttatttgcagcaacaactatta

SEQ ID NO: 69619 - DNA, 245 bp, Zea mays
attcctcccaacaccacctcgcctgcaatcttcgtagcctccgtcgcgtcgagcatcgatcatgtcggcctactgcggaaagtacaaggatgagctcatcaagaatgctgcctacattggcacccccggcaagggtatccttgctgctgatgagtccactggcaccattggcaagcgcctttccagcatcaatgtcgagaacgttgaggagaaccgccgtgccctccgtgagctcctattctgct

SEQ ID NO: 69620 - DNA, 180 bp, Zea mays
tagcaacatagaaagcacaatattgtaccaataatggcagccaaaatattttgcctcattatgctccttggtctttctgcaagtgctgctacggcgagcattttcccgcaatgctcacaagctcctatagcttcccttcttcccccatacctctcaccagcgatgtcttcagtatgtgaa

SEQ ID NO: 69621 - DNA, 247 bp, Zea mays
atagaaagcacaatagtgtaccaacaatggcagccaaaatattttgcctccttatgctccttggtatttctgcaagtgctgctacggcgaccattttcccgcaatgctcacaagctcctatagcttcccttcttcccccgtacctctcaccagcggtgtcttcggtatgtgaaaacccaattcttcaaccctacaggatccaacaggcaatcgcagctggcatcttacctttatcacccttgttcct

SEQ ID NO: 69622 - DNA, 250 bp, Zea mays
attgagaccaactagcaacatagaaagcacaatagtgtaccaacaatggcagccaaaatattttgcttccttatgctccttggtctttctgcaagtgctgctaccgcaaccattttcccacaatgctcacaagctcctatagcttcctttcttcccccatacctctcaccagcggtgtcttcagtatgtgaaaacccaattcttcaaccctacaggatccaacaggcaatcgcagcaggcatcttacctt

SEQ ID NO: 69623 - DNA, 249 bp, Zea mays
cagcattcacaaacacaccaagcgaagcatctagcaacgacctaacaccaatggctaccaagatattagccctccttgcgcttcttgcccttttagtgagcgcagcaaatgcgttcattattccacagtgctcactcgctcctagtgccagtattccacagttcctcccaccagttacttcaatgggcctcgaacatccagccgtgcaagcctacaggctacaactagcgcttgcggcgaagccttaca

SEQ ID NO: 69624 - DNA, 207 bp, Zea mays
gcaacatagaaagcacaatagtgtaccaacaatggcagccaaaatattttgcctccttatgctccttggtatttctgcaagtgctgctacggcgaccattttcccgcaatgctcacaagctcctatagcttcccttcttcccccgtacctctcaccagcggtgtcttcggtatgtgaaaacccaattcttcaaccctacaggatcca

SEQ ID NO: 69625 - DNA, 250 bp, Zea mays
ccaaggagtccaaagagacgcagcacttcaaggtctcctcctaggagacgtggtagatcaaggtcaagggataggagtcggtccaggagcccagatgatagaaatccagggaataacctttatgtaactggattgtctactcgtgtaacggaagatgatcttgagaagttctttagtaaagaaggaaaggttaagaactgtcatgttgttcttgatcctaggacaaaagaatcccgtggctttgccttcg

SEQ ID NO: 69626 - DNA, 249 bp, Zea mays
attcaaccaactgtctacactgaaccctgctgcttatttgcagcaacaactattaccatttagccagctagctactgcctactctcagcaacaacaacttcttccatttaaccaattggccgcactgaaccccgctgcttatttgcagcagcaaatactactgccatttagcgagctagctgcagcaagtcgtgcttccttcttgacacagcaacagttgctgcctttctacaagcagtttgcggctaa

SEQ ID NO: 69627 - DNA, 244 bp, Zea mays
  unsure (1)..(244): unsure at all n locations
gaaacacaccaagcgaacgntactagcaacaacctaacaacaatggctaccaagatattatccctccttgcgcttcttgcgctttttgcgagcgcaacaaatgcgtccattattccacaatgctcacttgctcctagttccattattccacagttcctcccaccagttacttcaatggcactcgaacacccagctgtgcaagcctataggctacaacaagcgattgcggcgagcgtcttacaac

SEQ ID NO: 69628 - DNA, 242 bp, Zea mays
caactagcaacatagaaagcacactagtgtaccaacaattgcagccaaaatattttgcttccttatgctccttggtctttctgcaagtgttgctaccgcaaccattttcccacaatgctcacaagctcctatagcttcccttcttcccccatacctctcaccagcggtgtcttcaatgtgtgaaaacccaattgttcaaccctacaggatccacaggcaatcgcaacaggcatttaccatta

SEQ ID NO: 69629 - DNA, 249 bp, Zea mays
tcagaaacacaccaagcgaacacattagcaacaacctaacaacaatggctaccaagatattatccctccttgcgcttcttgcgctttttgcgagcgcaacaaatgcgttcattattccacaatgctcacttgctccaagttccattattacacagttcctcccaccagttacttcaatgggcttcgaacacccagctgtgcaagcctataggctacaacaagcaattgcggcgagcgtcttacaacaac

SEQ ID NO: 69630 - DNA, 250 bp, Zea mays
gaccaactagcaacatagatagcacaatagtgtaccaacaatggcagccaaaatattttgcctccttatgctccttggtctttctgcaaatgctgctacggcgaccattttcccgcaatgctcgcaagctcctatagcttcccttcttcccccgtacctctcaccagcggtgtcttcggtatgtgaacacccaattcttcaaccctacaggatccaacaggcaatcacagctggcatcttacctttatca

SEQ ID NO: 69631 - DNA, 242 bp, Zea mays
ctcgagccgcgagtttctgaggcatcagtgcagcccgacggcgacgccctactgctcgcctcagtgccagtcgttgcggcagcagtgttgccagcagctcaggcaggtggagccgcagcaccggtaccaggcgatcttcggcttggtcctccagtccatcctgcagcagcagccgcaaagcgacaaggtcgcggggctgttggcggcgcagatagcgcacaactgacggcgatgtgcggcct

SEQ ID NO: 69632 - DNA, 244 bp, Zea mays
attgagaccagcaagcaacatagaaagtagaatccattagcaacaatagagcaacaatggcgaccaagatattttccctccttatgctccttgctctttctacatgtgttgctaacgcgacaattttccctcaatgctcacaagctcctatagcttcccttcttcccccataccttccatcaattatagcttcagtatgtgaaaacccagctcttcaaccatataggcttcaacaagcaatcgc

SEQ ID NO: 69633 - DNA, 233 bp, Zea mays
gcaacatacctttatcacccttgttgtttcaacaatcgccagccctatctttggtgcagtcattggtacaaaccatcagggcacagcagctgcagcaactcgtgctacctgtgatcaaccaagtagctctggcaaacctactgcctactctcagcaacaacaacttcttccatttaaccaattggccgcactgaaccccgctgcttatttgcagcagcaaatactactaccat

SEQ ID NO: 69634 - DNA, 243 bp, Zea mays
cagaaacacaccaagcgaacacactagcaacaacctaacaacaatggctaccaagatattatccctccttgcgcttcttgcgctttttgcgagcgcaacaaatgcgtccattattccacaatgctcacttgctcctagttccattattccacagttcctcccaccagttacttcaatggccttcgaacacccagctgtgcaagcctatacgctacaacaagcgattgcagcgagcgtcttaca

SEQ ID NO: 69635 - DNA, 246 bp, Zea mays
attgagaccagcaagcaacatagaaagtagaatccattagcaacaatagagcaacaatggcgaccaagatattttccctccttatgctccttgctctttctacatgtgttgctaacgcgacaattttccctcaatgctcacaagctcctatagcttcccttcttcccccataccttccatcaattatagcttcagtatgtgaaaacccagctcttcaaccatataggcttcaacaagcaatcgcag

SEQ ID NO: 69636 - DNA, 250 bp, Zea mays
caacaacaattcctaccagcactgagccacctagccatggtgaaccctgccgcctacttgcaacagcagttgcttgcatcaaacccacttgctctggcaaacgtagttgcaaaccagccacaacaaagctgcaacagtttctgccagcgctcagtcaactagccatggtgaaccctgccgccttcctacaacagcaacaactgctttcatctagcccgctcgctgtggccaatgcacctacatacctgca

SEQ ID NO: 69637 - DNA, 250 bp, Zea mays
cagaaacacacctagcgaacgcactagcaacgacctaacaacaatggcttccaagacattatccctccttgcgcttcttgccctttttgtgagtgcaacaaatgcgttcattattccacaatgctcacttgctccgagtgccattattccacagttcctccctccagttacttcaatgggcttcgaacacccagctgtgcaagcctataggctacaacaagcgcttgcggcgagcgtcttagaacaacca

SEQ ID NO: 69638 - DNA, 250 bp, Zea mays
ttcccccgtacctctcaccagcggtgtcttcggtatgtgaaaacccaattcttcaaccctataggatccaacaggcaatcgcagctggcatcttacctttatcacccttgttcctccaacaatcacagccctattacagcagttacctttggtgcatttattggcacaaaacatcagggcacaacaactacaacaacttgtgctagcaaaccttgctgcctactctcagcaacaacagtttcttccattc

SEQ ID NO: 69639 - DNA, 252 bp, Zea mays
tattattgagaccaactagcaacatagaaagcacaatagtgtaccaacaatggcagccaaaatattttgcctccttatgctccttggtctttctgcaagtgctgctacggcgaccattttcccgcatgctcgcaagctcctatagcttcccttcttcccccgtacctctcaccagcggtgtcttcggtatgtgaaaacccaattcttcaaccctacaggatccaacaggcaatcgcagctggcatcttacct

SEQ ID NO: 69640 - DNA, 249 bp, Zea mays
caagcctacaggctacaactagcacttgctcctagtgccattattccacagttcctcccaccagttacttcaatgggcttcgaacatccagccgtgcaagcctacaggctacaactagcgcttcggcgagcgccttacaacaaccaattgcccaattgcaacaacaatccttggcacatctaaccctacaaaccattgcaacgcaacaacaacaacaacaacagtttctgccatcactgagccacctag

SEQ ID NO: 69641 - DNA, 216 bp, Zea mays
ttgagaccaacaagcaacatagaaagtggaatccagtagcaacaatagagcaacaatggcgaccaagatattttccctccttatgctccttgctctttctacatgtgttgctaacgcgacaattttcctcaatgctcacaagctcctatagctccccttcttccccaatacctccatccatttaaggttccattatgtgaacacccagctcttcaa

SEQ ID NO: 69642 - DNA, 249 bp, Zea mays
cggctcgagtcaaagggtatctgggctctggttgaaagtatgaatttcgatgttggagttggaatacttctcaacaatcttctgtgtgtcatcatgggtgttgaaagagttcatcagaagtaaagggacattgcatccatacttcttgttcagggactcaatttgaatcacaataaggtcaaggaatgtgaacccattgcggacttcaatgacagacttgggcccagtgcagcccatggtcgtcccgag

SEQ ID NO: 69643 - DNA, 250 bp, Zea mays
attgagaccaactagcaacatagaaagcacaatagtgtaccaacaatggcagccaaaatattttgcctccttatgctccttggtctttctgcaagtgctgctacggcgaccattttcccgcaatctcgcaagctcctatagcttcccttcttcccccgtacctctcaccagcggtgtcttcggtatgtgaaaacccaattcttcaaccctacaggatccaacaggcaatcacagctggcatcttaccttt

SEQ ID NO: 69644 - DNA, 233 bp, Zea mays
cttaatttcaaggaggagaacaacgatggctcaaacaaaatatcaggcgacacctaaagacctgtacaagtcctttgtttctgagtaccctatcgagtcgatcgaagacccatttgatcaggtgactggagcacttatgccaaactcactgatgagattggacagaaagtgcagattttaggagatgatcttctgcgttacaaccccccgggggtcgcaagggcctcattgag

SEQ ID NO: 69645 - DNA, 249 bp, Zea mays
taccatcaatcatcattcatcttagtagtataggcaccaaatcaaatctgcaacatcaattatctaactccaaaaaccatgaagctggtgcttgtggttcttgctttcattgctttagtatcaatgtttcttgtacacagacaggcggctgcagctgtggtcaacaacaaagccatgagcagcaacatcatccacaacaacatcatctccaaaaacaacaacattaaccaccaccacaacatcaccagc

SEQ ID NO: 69646 - DNA, 249 bp, Zea mays
gcccgtataagagccccttcctcactccggaaccccattccccgccgcctcgcgcccccgctcgcttcacttctctaggtgcgcaccgatcagaagagatggcggtgccgctgctgacgaagaaatcgtgaagaagcgggtcaagcagttcaagaggccccacctcgaccgctacaagtgccttaagccaagctggcgcaggccaaagggtattgattcccgtgtcaggaggaagttcaagggatgcac

SEQ ID NO: 69647 - DNA, 246 bp, Zea mays
atcgattcccccgcatccgatctcttcggtgctagagaaatataggccgccgcctcctcctcattcggtgaaaggtgggcggttagggttgggagatctcttgactcacgacacgagcagcagattcgtcgagggccgctggttgctgcgagaggtccgggccttcgtgggatcttgaaaattgaatgttctaatggagtccaagggtggcaagaagaagtctagcagtagtcgttcctccctgat

SEQ ID NO: 69648 - DNA, 249 bp, Zea mays
ggggagcggacaggagttctcctgtcatgaaattgtctttcctctcgaggcggccacgggtggtgagaaaccacatggatttcatagactggtgtactggacggacacattcttctgggctgtgaccgggtacctggaaagcgtatgtgtctcagtttatgttcctggtggtgaagtttgttccatcatggttgccggacataaagctggacacgctaaagaagatagcagctggacttcggagttggc

SEQ ID NO: 69649 - DNA, 253 bp, Zea mays
cagaaacacacctatcgaaggagctagcaacgtcctatcaacaatggctaccaagatattatccctctttgcgcttcttgccctttttgtgagcgcgacaactgcgttcattattccacaatgctcactgctccgagtgccattattccacagtgcctccctccagttacgtcaatgggcttcgaacacccagctgtgcacgcctacaggctacaacaaacgcttgcggcgagcgtcttacaacaaccaattg

SEQ ID NO: 69650 - DNA, 250 bp, Zea mays
ggactgtggatgcttcgctgccggtaccagtaacggattcaggatctttaactgtgagcctttcaaggagactttcaggagggatctcaagagtggcgggtttgcggattgttgagatgctgttcgttgcaacgtccttgctcttgtaggtggcggctccaatgtgctgtacccgccgaacaccgtgatgatctgggacgatctccagagccgttgcattggggagtttgcctttcgctctgatgtccga

SEQ ID NO: 69651 - DNA, 246 bp, Zea mays
cggaagcacacacagcccggtccccgatctccgatcccctcgtcgatccaagatgcagatcttcgtcaagaccctcactggaaagactatcaccctcgaggtggagtcttctgacaccattgacacgtcaaggccaagatccaggacaaggagggcattcccccggaccagcagcggctcatcttcgctggcaagcagctcgaggatgggcgcacacttgccgactacaacatccagaaggagagc

SEQ ID NO: 69652 - DNA, 180 bp, Zea mays
agcattcagaaacacaccaagcgaagacactagcaacgacctaacaacaatggctaccaagatattagccctccttgcgcttcttgccctttttgtgagcgcaacaaatgcgttcattattccacatgctcacttgctcctagtgccattattccacagttcctcccaccagttaacttc

SEQ ID NO: 69653 - DNA, 250 bp, Zea mays
caacaagcaacatagaaagtggaatccagtagcaacaacagagcaacaatggcgaccaagatattttccctccttatgctccttgctctttctgcatgtgttgctaacgcgacaattttccctcatgctcacaagctcctatagcttcccttcttcccccataccttccatcaatgatagcttcagtatgtgaaaacccagctcttcagccctataggctccaacaagcaatcgcagcaagcaacatacc

SEQ ID NO: 69654 - DNA, 227 bp, Zea mays
tcagaccattagctttatctactccagagcgcagaagaacccgatcgacaccatgagggtgttgctcgttgccctcgctctcctggctctcgctgcgagcgccacctccacgcatacaagcgctcctgcggctgccagccaccgccgccggttcatctaccgccgccggtgcatctgccaccgccggttcacctgccacctccggttcatctcccaccgacaggtcc

SEQ ID NO: 69655 - DNA, 186 bp, Zea mays
atttcttccattcaaccaactggcagcattgaactctcatgcttatgtacaacaacaacaactactaccattcagccagctagctgctgtgagccctgctgccttcttgacacagcaacattgttgccgttctacctgcacactgcgcctaacgttggcaccctcttacaactgcaacaattgctg

SEQ ID NO: 69656 - DNA, 248 bp, Zea mays
gcaatttcttccattcaaccaactggcagcattgaactctcctgcttatttacagcagcaacaactactaccattcagccagctagctggtgtgagccctgctaccttcttgatacaaccacgttgttgccgttctaccagcacgctgcgcctaacgctggcaccctcttacaactgcaacaattgctgccattcaaccaacttgctttgacaaacccagcagcgttctaccaacaacccatcattgg

SEQ ID NO: 69657 - DNA, 206 bp, Zea mays
ctcgagcgattcggctcaggataaaggtaagatgccagcactgattgccctattacatcagttacctttggtgcatttattggcacaaaacatcagggcacaacaactacaacaacttggctagcaaaccttgctgcctactctcagcaacagcagtttcttccattcaaccaactagctgcattgaactctgcttcttatttgca

SEQ ID NO: 69658 - DNA, 204 bp, Zea mays
cagaaacacaccaagcgaagtcactagcaacgacctaacaacaatggctaccaagatattagccctccttgcgcttcttgccctttttgtgagcgcaacaaatgcgttcattattccacaagctcacttgctcctagtgccattattccacagttcctcccacaagttacttacatgggcttcgaacacctagctgtgaaagcc

SEQ ID NO: 69659 - DNA, 259 bp, Zea mays
caaaaacacaccaagcgaagccatctagcaacgacctaacaccaatggctaccaagatattagccctccttgcgcttcttgcccttttagtgagcgcaacaaatgcgttcattattccacagtgctcacttgtcctagtgccagtattccacagttcctcccaccagttacttcaatgggcttcgaacatccagccgtgcaagcctacaggctacaactagcgcttgcggcgagcgccttacaacaaccaattgcccat

SEQ ID NO: 69660 - DNA, 174 bp, Zea mays
gaaagcacaatagtgtaccaacaatggcagccaaaatattttgcctccttatgctccttggtatttctgcaagtgctgctacggcgaccattttcccgcaatgctcacaagctcctatagcttccctcttcccccgtacctctcaccagcggtgtcttcggtatgtgaaaaccc

SEQ ID NO: 69661 - DNA, 93 bp, Zea mays
cttgctccgagtgccatgagtccacaggtcctccctccagttacttcaatgggcttcgtacacccagctgtgcaagcctataggctacaacaa

SEQ ID NO: 69662 - DNA, 245 bp, Zea mays
gagaccaacaagcaacatagaaagtggaatacagtagcaacaatagagcaacaatggcggccaagatattttccatccttatgctccttgctctttctgcatgtgttgctaacgcgaccattcctcctcaatactcacaagctcctatagctgcccttcttcccccataccttccatcaatgaccgcttcagtttgtgaaaacccagcccttcaaccctacaggctccaacaagcaatcgcaaca

SEQ ID NO: 69663 - DNA, 247 bp, Zea mays
agaccaactagcaacatagaaagcacaatagtgtaccaacaatggcagccaaaatattttgcctccttatgctccttggtctttctgcaagtgctgctacggcgaccattttcccgcaatgtcgcaagctcctatagcttcccttcttcccccgtacctctcaccagcggtgtcttcggtatgtgaaaacccaattcttcaaccctacaggatccaacaggcaatcacagctggcatcttaccttta

SEQ ID NO: 69664 - DNA, 243 bp, Zea mays
gttctagatcgcggccggctcgcgatctagaacgccctactgctcgcctcagtgccagtcgttgcggcacagtgttgccagcagctcacggcaggtggagccgcagcaccggtaccaggcgtcttcggcttggtcctccagtccatcctgcagcagcagccgcaaagcggccaggtcgcggggctgttggcggcgcagatagcgcagaactgacggcgatgtgcggcctgcagcagccgactc

SEQ ID NO: 69665 - DNA, 254 bp, Zea mays
caacaagcaacatagaaagtggaatccagtagcaacaatagagcaacaatggcgaccaagatactttccctccttatgctccttgctctttctgcatgtgttgctaacgcgacaattttccctcaatgctcacaagctcctatagcttcccttcttcccccataccttccatcaatgatagcttcagtatgtgaaaacccagctcttcaaccctataggctccaacaagcaatcgcagcaagcaacataccttt

SEQ ID NO: 69666 - DNA, 245 bp, Zea mays
cgtcctagatcgcggccggctcgcgatctagaacgccctactgctcgcctcagtgccagtcgttgcggcacagtgttgccagcagctcactgcaggtggagccgcagcaccggtaccaggcgatcttcggcttggtcctccagtccatcctgcagcagcagccgcaaagcgcccaggtcgcggggctgttggcggcgcagatagcgcagaactgacggcgatgtgcggcctgcagcagccgactc

SEQ ID NO: 69667 - DNA, 249 bp, Zea mays
gagaccaacaagcaacatagaaagtggaatacagtagcaacaatagagcaacaatggcggccaagatattttccatccttatgctccttgctctttctgcatgtgttgctaacgcgaccattttcctcaatactcacaagctcctatagctgcccttcttcccccataccttccatcaatgaccgcttcagtttgtgaaaacccagcccttcaaccctacaggctccaacaagcaatcgcaacaagcaa

SEQ ID NO: 69668 - DNA, 248 bp, Zea mays
cagaaacatacctatcgaagccattagcaacgacctaacaacaatggctaccaagatattatccctctttgcgcttcttgccctgtttttgagcgcaacaaatgcgttcattattccacaatgctcactgctcctagtgccattattccacagttcctccctccagttacttcaatgggcttcgaacacccagctgtgcaagcctagaggctacaacaagcgcttgcggcgagcgtcttacaacaacc

SEQ ID NO: 69669 - DNA, 255 bp, Zea mays
cgaacatccagccgtgcaagcctacaggctacaactagcgcttgcggcgagcgccttacaacaaccaattgcccaattgcaacaacaatccttggcacatctaaccctacaaaccattgcaacgcaacacagcaacaacaatttctaccagcactgagccaactagctgtggtgaaccctgtcgcctacttgcaacagcagttgcttgcatccaacccacttgctctggcaaacatagttgcataccaacaacaa

SEQ ID NO: 69670 - DNA, 255 bp, Zea mays
tattgagatcaactagcaacatagaaagcacaatagtgtaccaacaatggcagccaaaatattttgcttccttatgctccttggtctttctgcaagtgttgctaccgcaaccattttcccacaatgctcaaatctcctatagcttcccttcttcccccatacctctcaccagcggtgtcttcaatgtgtgaaaatccaattgttcaaccctacaggatccaacaggcaatcgcaacaggcatcttaccattatca

SEQ ID NO: 69671 - DNA, 99 bp, Zea mays
gcaacatagaaagtggaatccagtagcaacaatagagcaacaatggcgaccaagatactttccctccttatgctccttgctctttctgcatgtgttgct

SEQ ID NO: 69672 - DNA, 254 bp, Zea mays
agcaacgacctaacaacaatggcttccaagacattatccctccttgcgcttcttgccctttttgtgagtgcaacaaatgcgttcattattccacaatgctcacttgctccgagtgccattattccacattcctccctccagttacttcaatgggcttcgaacacccagctgtgcaagcctataggctacaacaagcgcttgcggcgagcgtcttagaacaaccaattgcccaattacaacaacaatccttagca

SEQ ID NO: 69673 - DNA, 251 bp, Zea mays
gcattcagaaacacacctagcgaaccatctagcaacgacctaacaacaatggcttccaagacattatccctccttgcgcttcttgccctttttgtgagtgcaacaaatgcgttcattattccacaagctcacttgctccgagtgccattattccacagttcctccctccagttacttcaatgggcttcgaacacccagctgtgcaagcctataggctacaacaagcgcttgcggcgagcgtcttagaacaa

SEQ ID NO: 69674 - DNA, 248 bp, Zea mays
ctcgagcgattcggctcacggctcgagaatcgccagccactatctttggtgcaatcattggtacaaaccatcacgggcacaacagctgcagcaactcgtgctacctctgatcaaccaagtagctcggcaaacctttctccctactctcagcaacaacaatttcttccattcaaccaactgtctacactgaaccctgctgcttatttgcagcaacaactattaccatttagccagctagctactgccta

SEQ ID NO: 69675 - DNA, 218 bp, Zea mays
ctggtagaaaggcagcagtttgcggctaaccccgcaaccctcttacaactacaacaattgttgccctttgtccaacttgctttgacagaccgagcggcctcctaccaacaacacatcattggtgggccctcttttagattgcttattagttgtaattcaataataaagttttttggatgatgtatgctgccaaccagaaataagaagttacatttcac

SEQ ID NO: 69676 - DNA, 250 bp, Zea mays
catagaaagcacaatagtgtaccaacaatggcagccaaaatattttgcctccttatgctccttggtctttctgcaagtgctgctacggcgaccattttcccacaatgctcacaagctcctatagctcccttcttcccccgaacttttaacaaccgtggcctcgggatgttgaaaccccattcttcaaccctattggatccaacaggcaatcgcagctggcatcttacctttatcacccttgttcctccaa

SEQ ID NO: 69677 - DNA, 218 bp, Zea mays
ctgttgcgttgcgatggtgaaccctatcgcctacttgcaatagcagatgcttgcatccaacccacttgctctggcaaacgtagctacataccaacaacaacaattgcaacagtttctaccagcgcttgtcaactagccatggtgaaccctgccgcctacctacaacagcaacaactgctttcatctagccctctcgctatggttaatgcacctacata

SEQ ID NO: 69678 - DNA, 250 bp, Zea mays
attttgagcattcagaaacacaccaagcgaacgtcactagcaacaacctaacaacaatggctaccaagatattatccctccttgcgcttcttgcgctttttgcgagcgcaacaaatgcgtccattattcacaatgctcacttgcccctagttccattattccacagttcctcccaccccttacttcaatggccttcgaacacccagctgtgcaagcctataggctacaacaagcgatgccggcgagcgtc

SEQ ID NO: 69679 - DNA, 260 bp, Zea mays
cgctcgagccgattcggctcgaggagctcgagcaactagcaacacagaaagcacaataacgtaccaacaatggcagcacaaatattacgcttccttatgctccttggtctttctgcaagtgttgctaccgcaacattttcccacaatgctcacaagctcctatagcttcccttcttcccccatacctctcaccagcggtgtcttcaatgtgtgaaaccccaattgttcaaccctacaggatccaacaggcaatcgcaaca

SEQ ID NO: 69680 - DNA, 253 bp, Zea mays
attcagaaacacaccaagcgaagccactagcaacaacctaacaacaatggctaccaagatattatccctccttgcgcttcttgcgctttttgcgagcgcaacaaatgcgtccattattccacaatgctcacttgctcctagttccattattccacagttcctcccaccagttacttcaatggccttcgaacacccagctgtgcaagcctataggctacaacaagcgattgcggcgagcgtcttacaacaacca

SEQ ID NO: 69681 - DNA, 216 bp, Zea mays
cagcatgcaacatagatagtagaatccattagcaacaatagagcaacaatggcgaccaagatattttccctcctcatgctccttgctctttctacatgtgttgctaacgcgacaattttccctcaatgtcacaagttcctatagcttcccttcttcccccataccttccatcaattatagcttcatcatgtgaaaacccagctcttcaaccatata

SEQ ID NO: 69682 - DNA, 249 bp, Zea mays
gcgaacgcactagcaacgacctaacaacaatggcttccaagacattatccctccttgcgcttcttgccctttttgtgagtgcaacaaatgcgttcattattccacaatgctcacttgctccgagtgcattattccacagttcctccctccagttacttcaatgggcttcgaacacccagctgtgcaagcctataggctacaacaagcgcttgcggcgagcgtcttagaacaaccaattgcccaattaca

SEQ ID NO: 69683 - DNA, 252 bp, Zea mays
gagaccaactagcaacatagaaagcacaatagtgtaccaacaatggcagccaaaatattttgcctccttatgctccttggtctttctgcaagtgctgctacggcgaccattttcccgcaatgctcgcagctcctatagcttcccttcttcccccgtacctctcaccagcggtgtcttcggtatgtgaaaacccaattcttcaaccctacaggatccaacaggcaatcacagctggcatcttacctttatcac

SEQ ID NO: 69684 - DNA, 254 bp, Zea mays
tagcaacatagaaagcacaatagtgtaccaacaatggcagccaaaatattttgcttccttatgctccttggtctttctgcaagtgttgctaccgcaaccattttcccacaatgctcacaagctcctatgcttcccttcttcccccatacctctcaccagcggtgtcttcaatgtgtgaaaacccaattgttcaaccctacaggatccaacaggcaatcgcaacaggcatcttaccattatcacccttgttcctc

SEQ ID NO: 69685 - DNA, 252 bp, Zea mays
cctcgcagccgcaaacgcgaaaccctagcctcgagctctatctccggccacagctggtcaggttagcgacgaaggatgagcaggcgctggagccgcacgatctacgtcgggaacctccccggcgactccgggagagggaggtggaggatctgttctacaagtatggtaaaattgttgacattgacctgaaggtccccccaagaccacctggttatgcttttgttgagtttgaagatcctcgtgatgctgagg

SEQ ID NO: 69686 - DNA, 275 bp, Zea mays
tcagaaacacaccaagcgaacacattagcaacaacctaacaacaatggctaccaagatattatccctccttgcgcttcttgcgctttttgcgagcgcaacaaatgcgttcattattccacaatgctcacttgctccaagttccattattacacagttcctcccaccagttacttcaatgggcttcgaacacccagctgtgcaagcctataggctacaacaagcaattgcggcgagcgtcttacaacaaccaatttcccagttgcaacaacaatcc

SEQ ID NO: 69687 - DNA, 260 bp, Zea mays
caactattaccattcagccagctagctactgcctactctcatcaacaacaacttcttccatttaaccaattggccgcactgaacctcgctgcttatttgcagcagcaaatattactaccatttagccagctagctgcagcaagccgtgcttccttcttgacacagcaacagttgctgcctttctaccagcagtttgcggctaaccccgcaaccctcttacaactacaacaattgttgccctttgtccaacttgctttgac

SEQ ID NO: 69688 - DNA, 260 bp, Zea mays
tcagaaacacaccaagcgaagacattagcaacaacctaacaacaatggctaccaagatattatccctccttgcgcttcttgcgctttttgcgagcgcaacaaatgcgttcattattccacaatgctcacttgctccaagttccattattacacagttcctcccaccagttacttcaatgggcttcgaacacccagctgtgcaagcctataggctacaacaagcaattgcggcgagcgtcttacaacaaccaatttcccag

SEQ ID NO: 69689 - DNA, 134 bp, Zea mays
attttgagcattcagaaacacaccaagcgaactcatgtagcaacaacctaacaacaatggctaccaagatattatccctccttgcgcttcttgcgtttttgcgagcgcaacaaatgcgttcattattccacaat

SEQ ID NO: 69690 - DNA, 223 bp, Zea mays
ggaacaagggtgataaaggtaagatgccagctgtgattgcctgttggatcagttacctttggtgcatttattggcacaaaacatcagggcacaacaactacaacaacttgtgctagcaaaccttgctgcctactctcagcaacagcagtttcttccattcaaccaactagctgcattgaactctgcttcttatttgcaacaacaacaactaccattcagccag

SEQ ID NO: 69691 - DNA, 246 bp, Zea mays
cattttgagcattcagaaacacacctagcgaagccactagcaacgacctaacaacaatggcttccaagacattatccctccttgcgcttcttgccctttttgtgagtgcaacaaatgcgttcattattccacaatgctcacttgctccgagtgccattattccacagttcctccctccagttacttcaatgggcttcgaacacccagctgtgcaagcctataggctacaacaagcgcttgcggcga

SEQ ID NO: 69692 - DNA, 253 bp, Zea mays
gcaacatagaaagcacaatagtgtaccaacaatggcagccaaaatattttgcctccttatgctccttggtctttctgcaagtgctgctacggcgaccattttcccgcaatgctcgcaagctcctatagcttcccttcttcccccgtacctctcaccagcggtgtcttcggtatgtgaaaacccaattcttcaaccctacaggatccaacaggcaatcacagctggcatcttacctttatcacccttgtccttc

SEQ ID NO: 69693 - DNA, 260 bp, Zea mays
cgaccaactagcaacatagaaagcacaatagtgtaccaacaatggcagccaaaatattttgcttccttatgctccttggtctttctgcaagtgctgctaccgcaaccattttcccacaatgctcacaagctcctatagcttcctttcttcccccatacctctcaccagcggtgtcttcagtatgtgaaaaccctattcttcaaccctacaggatccaacaggcaatcgcagcaggcatcttacctttatcacccttgttc

SEQ ID NO: 69694 - DNA, 263 bp, Zea mays
cgcaacatagaaagcacaatagtgtaccaacaatggcagctaaaatattttgcctccttatgctccttggtctttctgcaagtgctgctacggcgaccattttcccacaatgctcacaagctcctatagcttcccttcttcccccgtacctctcaccaacggtgtcttcggtatgtgaaaacccaattcttcaaccctacaggatccaacaggcaatcgcagctggcatcttacctttatcctcgttgttcctccaacaatca

SEQ ID NO: 69695 - DNA, 153 bp, Zea mays
ttcagcattcaaaaacacaccaagcgaagcgcactagcaacgacctaacaccaatggctaccaagatattagccctccttgcgcttcttgcccttttagtgagcgcaacaaatgcgttcattattccacagtgctcacttgctcctagtgcca

SEQ ID NO: 69696 - DNA, 266 bp, Zea mays
cgttttgatggattcttcggtgggaagtttgggctttgacgagacagaaagaagcactgtggatgtgctgcgttctgcatatccctgattcatctgagccgcggctttgattctcgtttgcttgagaaatttggggtgaaaagattatccttgattcgctgcagtggtcttgaaatgtgagtatgcagtccgtggcgagattgtcatccatgctcagcgcttgcagcaacaactacaaacacaaccagggtctcttccttttgatg

SEQ ID NO: 69697 - DNA, 261 bp, Zea mays
acttgctgcctactctcagcaacagcagtttcttccattcacaccaactaggttcattgaactctgcttcttatttgcaacaacaacaactaccattcagccagctacctgctgcctacccccagcaatttcttccattcaaccaactagcagcattgaactctcctgcttatttacagcagcaacaactactaccattcagccagctagctggtgtgagccctgctaccttcttgacacaaccacagttgttgccgttct

SEQ ID NO: 69698 - DNA, 258 bp, Zea mays
cgaaccgctgccagtccaaaccctacggccgccgccagcatcaagctccccgaccaaaccctactcgtaccccgccgccgccgcagccgcagccgcggccacaccagcaagcagaactagcagccatgccgcccaaattggacccctctcaggtggtggaggtcttcgtccgcgtgacgggaggcgaggtcggcgcggcgtcgtcgctggcccccaagatcggcccgctcggtctctccccgaagaagatcggcgagg

SEQ ID NO: 69699 - DNA, 252 bp, Zea mays
cgaccaactagcaacatagaaagcacaatagtgtaccaacaatggcagccaaaatattttgcctccttatgctccttggtctttctgcaagtgctgctacggcgaccattttcccgcaatgctcgcaagctcctatagcttcccttcttcccccgtacctctcaccagcggtgtcttcggtatgtgaaaacccaattcttcaaccctacaggatccaacaggcaatcgcagctggcatcttacctttatcac

SEQ ID NO: 69700 - DNA, 257 bp, Zea mays
accaaaccatggacatggctttggcgtctaaagcctcccctccgccatggaatgccaccgccgccgagcagccaattaccaaagcgtgacaaagccgctgcaaatgattcaacatacctcaatcctcaagctcatgatagtgttcttggaatcattctgggaggtggtgctgggactagattgtaccccttgacaaagaagcgtgccaagcctgcagtgccattgggtgccactatagactgattgatattcctgtc

SEQ ID NO: 69701 - DNA, 252 bp, Zea mays
cggcaagactatcaccctcgaggtggagtcttcagacaccatcgacaatgtcaaggccaagatccaggacaaggagggcatcccaccggaccagcagcgtttgatcttcgctggcaagcagctggaggatggccgcacccttgcggattacaacatccagaaggagagcaccctccacctggtgctccgtctcaggggtggtatgcagatctttgtgaagacactcactggcaagacaatcacccttgaggt

SEQ ID NO: 69702 - DNA, 257 bp, Zea mays
agaaagtggaatccagtagcaacaatagagcaacaatggcgaccaagatattttccctccttatgctccttgctctttctacatgtgttgctaacgcgacaattttccctcaatgctcacaagctcctatagcttcccttcttcccccataccttccatcaattatagcttcaatatgtgaaaacccagctcttcaaccatataggcttcaacaagcaatcgcagcaagcaacatacctttatcgcccttgttgttt

SEQ ID NO: 69703 - DNA, 264 bp, Zea mays
acaactagccacatagaaagcacaatagtgtaccaacaatggcagccaaaatattttgcctccttatgctccttggtctttctgcaagtgctgctacggcgaccattttcccacaatgctcacaagctcctatagcttcccttcttcccccgtacctctcaccagcggtgtcttcggtatgtgaaaacccaattcttcaaccctataggatccaacaggcaatcgcagctggcatcttacctttatcacccttgttcctccaat

SEQ ID NO: 69704 - DNA, 261 bp, Zea mays
ctgcaagggtccaggtcgccagcgacaacgggaccacggtgttcgacgacgtgctccgtgcggggcagctgctcatcgtaccccagggctacctcgtcgccaccaaggcgcagggagaaggcttccagtacatcgccttcgagacgaaccctgacaccatggtcagccacgtcgccgggaagaactccgtcctgagcgacttgccggccgccgtcatcgccagctcgtatgccatctccatggaggaagctgcagagctca

SEQ ID NO: 69705 - DNA, 243 bp, Zea mays
acacgatatttacttcagatgaagctattgctttgatgaggagaaggatactacagcgtgatgtggagatagaggttgaagcagttgacagcatcggaacattcataggttcgttgtgggagtccacgaccatccatagggctcaattgctccgagtgccagtattccacagtacctcccaccagttacttcaatgggcttcgaacatccagccgtgcaagcctaaaggcgacaactagcgct

SEQ ID NO: 69706 - DNA, 261 bp, Zea mays
cgaccaactagcaacatagaaagcacaatagtgtaccaacaatggcagccaaaatattttgcctccttatgctccttggtctttctgcaagtgctgctacggcgaccattttcccgcaatgctcgcaagctcctatagcttcccttcttcccccgtacctctcaccagcggtgtcttcggtatgtgaaaacccaattcttcaaccctacaggatccaacaggcattcacaggggtcttatcattatcatccatgttcctcc

SEQ ID NO: 69707 - DNA, 250 bp, Zea mays
cttgagaccaactagcaacatagaaagcacaatagtgtaccaacaatggcagccaaaatattttgcctccttatgctccttggtctttctgcaagtgctgctacggcgaccattttcccgcaatgctcgcaagctcctatagcttcccttcttcccccgtacctctcaccagcggtgtcttccgtatgtgaaaacccaattcttcaaccctacaggatccaacaggcaatcacagctggcatcttacctt

SEQ ID NO: 69708 - DNA, 257 bp, Zea mays
cgacactgtcactagctagttgctctactagagggcgggtatagagctgcctgcaatccgccgctgagaagggaggatcggaagcgacgatgaggtcgtttgctcctgtctttctgtcggcggtcgtggcctggctggagctggcgggcaccgcgcagggcggcaacttctaccaggacacagagatgacctggggcgatggccgcggcaaggtagtggacggcgggcgcgggctggacctgacgctggaccgcacg

SEQ ID NO: 69709 - DNA, 252 bp, Zea mays
gcgagggcgtgcagatccagatccggtgggcgggatggacttgatcgcccccaccaccatggccggcgcggtgtcggcgctcttcctgctggacatgaagggccgcgttctcgtctggcgcgactaccgcggcgatgtctccgcgctccaggccgagcgcttcttcaccaagctcctcgacaaggagggcgattcggaagtgcactcgcctgtggtctacgacgacgctggcgtcacttacatgttcatcca

SEQ ID NO: 69710 - DNA, 250 bp, Zea mays
cgttgttgttgcaactgtagcatttgggatgggtattgatagacaagatgttcgtattgttccccacttcaacttgcctaagtcaatggaatccttctaccaggagtcaggtcgagctggtcgtgatcaacgaccttcaaggagtgttttgtattacggattagatgaccggaggagaatggaattcattttgagaaaccccaaaactaagatatcacagccgtcttcctcttcaaatgagctttctgag

SEQ ID NO: 69711 - DNA, 113 bp, Zea mays
acttggaggtgccatcttttagattacatatgagatgtactcgacaatggtgccctcataccgacatgtgtttcctagaaataatcaatatattgattgagatttatctcgat

SEQ ID NO: 69712 - DNA, 233 bp, Zea mays
attggcacaaaacatcagggcacaacaactacaacaacttgtgctagcaaaccttgctgcctactctcagcaacaacagtttcttccattcaaccaactagctgcattgaactctgcttcttatttgcaacaacaacaactaccattcagccagctatctgctgcctacccccagcaatttcttccattcaaccaactgacagctttgaactctcctgcttatttacagcagc

SEQ ID NO: 69713 - DNA, 257 bp, Zea mays
caactagcaacatagaaagcacaatagtgtaccaacaatggcagccaaaatattttgcttccttatgctccttggtctttctgcaagtgctgctaccgcaaccattttcccacaatgctcacaagctcctatagcttcctttcttcccccatacctctcaccagcggtgtcttcagtatgtgaaaacccaattcttcaaccctacaggatccaacaggcaatcgcagcaggcatcttacctttatcacccttgttcc

SEQ ID NO: 69714 - DNA, 258 bp, Zea mays
atatgttcagcattcaaaaacacaccaagcgaagccactagcaacgacctaacaccaatggctaccaacatattagccctccttgcgcttcttgcccttttagtgagcgcaacatatgcgttcattatcccacagtgctcacttgctcctagtgccagtattccacagttcctcccaccagttacttcaatgggcttcgaacatccagccgtgcaagcctacaggctacaactagcgcttgctgcgagcgccttacaa

SEQ ID NO: 69715 - DNA, 246 bp, Zea mays
caaaaacacaccaagcgaagccactagcaacgacctaacaccaatggctaccaagatattagccctccttgcgcttcttgcccttttagtgagcgcaacaaatgcgttcattattccacagtgctcacttgctcctagtgccagtattccacagttcctcccaccagttacttcaatgggcttcgaacatccagccgtgcaagcctacaggctacaactaccgttcgcggagcgcgcttacaacaa

SEQ ID NO: 69716 - DNA, 255 bp, Zea mays
agttgttgttgcaactgtagcatttgggatgggtattgatagacaagatgttcgtattgtttgccacttcaacttgcctaagtcaatggaatccttctaccaggagtcaggtcgagctggtcgtgatcaacgaccttcaaggagtgttttgtattacggattagatgaccggaggagaatggaattcattttgagaaaccccaaaactaagaaatcacagccgtcttcctcttcaaatgagctttctgagaaggc

SEQ ID NO: 69717 - DNA, 253 bp, Zea mays
cttgagaccaactagcaacatagaaagcacaatagtgtaccaacaatggcagccaaaatattttgcctccttatgctccttggtctttctgcaagtgctgctacggcgaccattttcccacaatgctcacaagctcctatagcttcccttcttccccggaacttttcaccagcggtgtcttcggtatgtgaaaacccaattcttcaaccctataggatccaacagggcaatcgcagctggcatcttaccttta

SEQ ID NO: 69718 - DNA, 174 bp, Zea mays
cttgagaccaacaagcaacatagaaagtggaatccagtagcaacaacagagcaacaatggcgaccaagatattttccctccttatgctccttgctctttctgcatgtgttgctaacgcgacaattttccctcaatgctcacaagctcctatagcttcccttcttcccccatacc

SEQ ID NO: 69719 - DNA, 250 bp, Zea mays
ccttaacaacaatggctaccaagatattagccctccttgcgcttcttgccctttttgtgagcgcaacaaatgcgttcattattccacaatgctcacttgctcctagtgccattataccacagttcctccgaccagttacttcaatgggcttcgaacacctagctgtgcaagcctacaggctacaacaagcgcttgcggcgagcgtcttacaacaaccaattaaccaattgcaacaacaatccttggcaca

SEQ ID NO: 69720 - DNA, 247 bp, Zea mays
ttcagaaacacacctagcgaagccactagcaacgacctaacaacaatggctaccaagatattatccctctttgcgcttcttgccctttttgtgagcgcaacaaatgcgttcattattccacaatgctcacttgctcctagtgccattattccacagttcctccctccagttacttcaatgggcttcgaacacccagctgtgcaagcctacaggctacaacaagcgcttgcggcgagcgtcttacaac

SEQ ID NO: 69721 - DNA, 243 bp, Zea mays
caagaaccatggggttattcttattcctgagggccttgtggagagtattcctgaactatatgctctgcttcaggaaatccatggcctccatggcaaaggtgtttctgttgagaatatctcttctcagctttcaccttgggcatctgcactctttgagtttttgccccctatttatcaggaagcagctactactacatcctgaatctgatgattcagctcaactttcccagattgagactgaaa

SEQ ID NO: 69722 - DNA, 275 bp, Zea mays
tttgagcattcagaaacacaccaagcgaagccactagcaacgacctaacaacaatggctaccaagatattagccctccttgcgcttcttgccctttttgtgagcgcaacaaatgcgttcattattccacaatgctcacttgctcctagtgccattattccacagttcctcccaccagttacttcaatgggcttcgaacacctagctgtgcaagccaacatgcaacaacaagcgcttgcggcgagcgtcttacaacaaccaattgcccaattgcaa

SEQ ID NO: 69723 - DNA, 179 bp, Zea mays
ccagcaagcaacatagaaagtagaatccattagcaacaatagagcaacaatggcgaccaagatattttccctccttatgctccttgctctttctacatgtgttgctaacgcgacaattttccctcaatgctcacaagctcctatagcttcccttcttcccccataccttccatcaatta

SEQ ID NO: 69724 - DNA, 108 bp, Zea mays
atcttactgcattattacatatatagatagagagggatggatagacgacacacattatcatgtgtggtatgaccaataatatatgcatcataataaagttttggtttt

SEQ ID NO: 69725 - DNA, 250 bp, Zea mays
  unsure (1)..(250): unsure at all n locations
gattctgagattgatgattatgaaggaaaaatttatgcaagactgatgtcaggagatttaaaattaaataagaatggagaaaattacatttgtcccttctgtagcagcaagaagaagaattacagtaaaagtagcctggttcaacatgcctnaggagtcagtgcagcacctaatcgggagncaaaagaaaaagcagtccatcgcgccctcttcaaatatttgaagaatggtcttgctaaatcacctgaac

SEQ ID NO: 69726 - DNA, 173 bp, Zea mays
agcattgttctgatcggagggatgataccttacatttccgagacatttgccagaattctgttcctgagcaattcattgacgtttatgatggtttatgtctggagcaagcacaatcctttcatccatatgagctttctgggcctgttcacctttacggctgcatacttaccatg

SEQ ID NO: 69727 - DNA, 116 bp, Zea mays
gggtcttcagaccattagctttatctactccagagcgcagaagaacccgatcgacaccatgagggtgttgctcgttgccctcgctctcctggctctcgctgcgtgcgccacttcca

SEQ ID NO: 69728 - DNA, 256 bp, Zea mays
caacaacttgtgctagcaaaccttgctgcctactctcagcaacaacagtttcttccattcaaccaactagctgcattgaactctgcttcttatttgcaacaacaacaactaccattcagccagctatctgctgcctacccccagcaatttcttccattcaaccaactgacagctttgaactctcctgcttatttacagcagcaacaactactaccattcagccagctagctggtgtgagccctgctaccttcttga

SEQ ID NO: 69729 - DNA, 255 bp, Zea mays
gccatactcagatgaagctattgctttgatgaggagaaggatactatagcgtcaatggctaccatcatattagccctccttgcgcatcttgcccttttagtgagcgcaacaaatgcgttcattattccacagtgctcacttgctcctagtgccagtattccacagttcctcccaccagttacttcaatgggcttcgaacatccagccgtgcaagcctacaggctacaactagcgcttgcggcgagcgccttacaa

SEQ ID NO: 69730 - DNA, 246 bp, Zea mays
ccaacatagaaagcacaatagtataccaacaatggcagccaaaatattttgcctccttatgctccttggtctttctgcaagtgctgctacggcgaccattttcccgcaatgctcgcaagctcctatagcttcccttcttcccccgtacctctcaccagcggtgtcttcggtatctgaaaacccaattcttcaaccctacaggatccaacaggcaatcacagctggcatcttacctttatcaccctt

SEQ ID NO: 69731 - DNA, 76 bp, Zea mays
ataacttcttatttctggttggccacatacatcatccaaaaaactttattattgaattacaactaataagcaatct

SEQ ID NO: 69732 - DNA, 252 bp, Zea mays
caacaagcaacatagaaagtggaatccagtagcaacaatagagcaacaatggcgaccaagatactttccctccttatgctccttgctctttctgcatgtgttgctaacgcgacaattttccctcaatgctcacaagctcctatagcttcccttcttcccccataccttccatcaatgatagcttcagtatgtgaaaacccagctcttcaaccctataggctccaacaagcaatcgcagcaagcaacatacct

SEQ ID NO: 69733 - DNA, 247 bp, Zea mays
cgccgccgccgcctgctccggcgggcgggacccagctcgcagcgtctcccctgcggcgaggtacacgatggagggagcgggcagagatgccaaccctttgagcggttacagaattggcaaaaccctgggaattgggtcgttcggtaaagtgaagatcgcggaacatatattgactggtcataaggtggcgatcaagattctcaatcgcaagaagatcagaagcatggatatggaagagaaagttaag

SEQ ID NO: 69734 - DNA, 246 bp, Zea mays
caacaatggcagccaaaatattttgcctccttatgctccttggtctttctgcaagtgctgctacggcgaccattttcccgcaatgctcgcaagctcctatagcttcccttcttcccccgtacctctcaccagcggtgtcttcggtatgtgaaaacccaattcttcaaccctacaggatccaacaggcaatcacagtggcatcttaaccttaatcacccttgttcctccaacaatcatcagccctat

SEQ ID NO: 69735 - DNA, 81 bp, Zea mays
cttgagaccagcaagcaacatagaaagtagaatccattagcaacaatagagctacaatggcgaccaagatattttccctcc

SEQ ID NO: 69736 - DNA, 247 bp, Zea mays
ccaatattgattccactggtaaagtgcatttggacattctgaaggatggctggagtccagctttcactatttctaaggtgatattggccatcacagacatcatcagcaatccagatccatactccccacttatgatgagcatttcacgtcagtatctgactgatagagctaaacacgatgaaatagcagctgagtggacaatgagatttgcaagataggggatttgtttgtatctaagcatggttga

SEQ ID NO: 69737 - DNA, 233 bp, Zea mays
tcagcattcaaaaacacaccaagcgaagccactagcaacgacctaacaccaatggctaccaagatattagccctccttgcgcttcttgcccttttagtgagcgcaacaaatgcgttcattattccacagtgctcacttgctcctagtgccagtattccacagttcctcccaccagttacttcaatgggcttcgaacatccagccgtgcaagcctacaggctacaactagcgct

SEQ ID NO: 69738 - DNA, 253 bp, Zea mays
cagcaacatagaaagcacaatagtgtaccaacaatggcagccaaaatattttgcttccttatgctccttggtctttctgcaagtgctgctaccgcaaccattttcccacaatgctcacaagctcctatagcttcctttcttcccccatacctctcaccagcggtgtcttcagtatgtgaaaacccaattcttcaaccctacaggatccatccggcaatcgcagcaggcatcttacctttatcacccttgttcc

SEQ ID NO: 69739 - DNA, 259 bp, Zea mays
ccacaagcaacatagaaagtggaatccagtagcaacaatagagcaacaatggcgaccaagatattttccctccttatgctccttgctctttctacatgtgttgctaacgcgacaattttccctcaatgctcacaagctcctatagcttcccttcttcccccataccttccatcaattatagcttcaatatgtgaaaacccagctcttcaaccatataggcttcaacaagcaatcgcagcaagcaacatacctttatcgc

SEQ ID NO: 69740 - DNA, 295 bp, Zea mays
ggcaatcgcagctggcatcttacctttatcacccttgttcctccaacaatcatcagccctattacaacagttacctttagtgcatttattggcacaaaacatcagggcacaacaactacaacaacttgtgctagcaaaccttgctgcctactctcagcaacagcagtttcttccattcaaccaactaggttcattgaactctgcttcttatttgcaacaacaacaactaccattcagccagctacctgctgcctacccccagcaatttcttccattcaaccaactagcagcattg

SEQ ID NO: 69741 - DNA, 247 bp, Zea mays
tctcgagcgaatcggctcgagaccagcaagcaacatagatagtagaatccattagcaacaatagagcaacaatcgcgaccaagatattttccctccttatgctccttgctctttctacatgtgttgctaacgcgacaattttccctcaatgctcacaagctcctatagcttcccttcttcccccataccttccatcaattatagcttcagtatgtgaaaacccagctcttcaaccatataggcttca

SEQ ID NO: 69742 - DNA, 249 bp, Zea mays
gcaacatagaaagtagaatccattagcaacaatagagcaacaatggcgaccacgatattttccctccttatgctccttgctctttctacatgtgttgctaacgcgacaattttccctcaatgctcacaagctcctatagcttcccttcttcccccataccttccatcaattatagcttcagtatgtgaaatcccagctcttcaaccatataggcttcaacaagcaatcgcagcaagcaacataccttta

SEQ ID NO: 69743 - DNA, 246 bp, Zea mays
taaaaacactcgtttaatcacatgtgatcctcatgccagcaagcttgtggtaaactcagatactcctcaggaggttgaagccgggaaggaaatcatatttacctatgatgtaggcttcgaggagagtgatatcaagtgggcttctcgctgggacacctacttgttaatgatagatgatcaaattcactggttttctattgtgaactctctcatgatcgtactcttcttatctgggatggtggcaat

SEQ ID NO: 69744 - DNA, 247 bp, Zea mays
atgtaagtgagctggctgtggaggagctgagtgtttctgagtacttggcattcaaggaacagctggtggatggacaatccaacagcaactttgtgcttgagcttgattttgagcccttcaatgcctcctttcctcgtccttccatgtcgaagtccatcggaaatggagtgcaattccttaaccgacacctgtcgtccaagttgttccaggacaaggagagtttgtaccccttgctgaacttcctcaa

SEQ ID NO: 69745 - DNA, 245 bp, Zea mays
aactagcaacatagaaagcacaatagtgtaccaacaatggcaaccaaaatattttgcttccttatgctccttggtctttctgcaagtgctgctaccgcgaccattttcccgcaatgctcacaagctcctatagcttcccttcttcccccatacctctcaccagcggtgtcttcagtatgtgaaaacccaattcttcaaccctacaggatccaacaggcaatcgcagcaggcatcttacctttatc

SEQ ID NO: 69746 - DNA, 245 bp, Zea mays
caacaagcaacatagaaagtggaatccagtagcaacaatagagacacaatggcgaccaagatattttccctccttatgctccttgctctttctacatgtgttgctaacgcgacaattttccctcaatgctcacaagctcctatagcttcccttcttcccccataccttccatcaattatagcttcaatatgtgaaaacccagctcttcaaccatataggcttcaacaagcaatcgcagcaagcaa

SEQ ID NO: 69747 - DNA, 244 bp, Zea mays
accagctcttcaaccatataggcttcaacaagcaatcgcagcaagcaacatacctttatcgcccttgttgtttcaacaatcaccagccctatctttggtgcagtcattggtacaaaccatcagggcacaacagctgcagcaactcgtgctacctgtgatcaaccaagtagctctggcaaaccttcttccctactctcagcaacaacaatttcttccattcaaccaactgtctacactgaaccct

SEQ ID NO: 69748 - DNA, 245 bp, Zea mays
ccaacaagcaacatagaaagtggaatccagtagcaacaacagagcaacaatggcgaccaagatattttccctccttatgctccttgctctttctgcatgtgttgctaacgcgacaattttccctcaatgctcacaagctcctatagcttcccttcttcccccataccttccatcaatgatagcttcagtatgtgaaaacccagctcttcagccctataggctccaacaagcaatcgcagcaagca

SEQ ID NO: 69749 - DNA, 251 bp, Zea mays
agagcacgttagtgtagcaacaatggcagccaaattattttgcttcctcatgctccttagtctatctgcaagtgttgctaccgcaaccattttcccacaatgctcacaagctcctatagcttcccttcttcccccatacctctcaccagcggtgtctgcaatgtgtgaaaccccaattgttcaaccctacatgattcaacaggcaatcgcaacaggcatcttaccattatcacccttgttcctccaacaac

SEQ ID NO: 69750 - DNA, 278 bp, Zea mays
gccctgcaggccgaactcttcagggcgcggccacgttctccttggcgagcggcgcgatctcctcgccttcgacccctggctcgtcgccggcgaccccgaggctgagcagcacgttctcccagttcttggcaggggccttccaggagagatcctgggtcattgagttccttaacaatctcttcgaaggcggacgtgcggaccaccttgatggcgcgctgcaatgtggtggccaccttcttgacgtccgccggctccacgacgttacagtcgacgctgag

SEQ ID NO: 69751 - DNA, 247 bp, Zea mays
actcagcgctcgagccgaatcggctcagcaactaccaacatacatagtgaagttgcctagcatcatcttagcaccaatggcagccaagatttttgcgctccttgccctccttgctctttcagcaagtgttgctaccgcgactattattccacaatgctcacaacaatacctctctccagtgatagccgcgagatttgaatacccatctatacaatcctacaggctacaagaggccatcacagcaagc

SEQ ID NO: 69752 - DNA, 247 bp, Zea mays
cccagctcttcaaccatataggcttcaacaagcaatcgcagcaagcaacatacctttatcgcccttgttgtttcaacaatcaccagccctatctttggtgcagtcattggtacaaaccatcagggcacaacagctgcagcaactcgtgctacctgtgatcaaccaagtagctctggcaaacctttctccctactctcagcaacaacaatttcttccattcaaccaactgtctacactgaaccctgct

SEQ ID NO: 69753 - DNA, 244 bp, Zea mays
caactagcaacatagaaagcacaatagtgtaccaacaatggcagccaaaatattttgcctccttatgctccttggtatttctgcaagtgctgctacggcgaccattttcccgcaatgctcacaagctcctatagcttcccttcttcccccgtacctctcaccagcggtgtcttcggtatgtgaaaacccaattcttcaaccctacaggatccaacaggcaatcgcagctggcatcttaccttta

SEQ ID NO: 69754 - DNA, 242 bp, Zea mays
gccaagttacgaaggttccaagcctgatgacctccaagaaactggatgactccgccatggctgtatacaaggtgaagcttgtcgggcctgaaggtgaagagcacgagtttgatgctccagacgacgcctacatccttgacgcagccgagactgccggtgtggagttgccatactcgtgccgtgctggggcatgctccacctgtgccggcaaaatcgagtctggttcggttgaccagtcggat

SEQ ID NO: 69755 - DNA, 241 bp, Zea mays
aagcattcagaaacacaccaagcgaacatcattagcaacaacctaacaacaatggctaccaagatattatccctccttgcgcttcttgcgctttttgcgagcgcaacaaatgcgttcattattccacaatgctcacttgctccaagttccattattacacagttcctcccaccagttacttcaatgggcttcgaacacccagctgtgcaagcctataggctacaacaagcaattgcggcga

SEQ ID NO: 69756 - DNA, 243 bp, Zea mays
ccaacaagcaacatagaaagtggaatccagtagcaacaatagaagaacaatggcgaccaagatattttccctccttatgctccttgctctttctacatgtgttgctaacgcgacaattttccctcaatgctcacaagctcctatagcttcccttcttcccccataccttccatcaattatagcttcaatatgtgaaaacccagctcttcaaccatataggcttcaacaagcaatcgcagcaag

SEQ ID NO: 69757 - DNA, 265 bp, Zea mays
attcagatgtgtgtgtattcagtttacagagctcaatatgttacatcgaccttcccaacccgccggcagagcttaagaagctcaagcacaagaagtgcctcgtccagtccccccaactccttcatggatgtcaagtgccaacgatgcttcagcatgtccaattcgcttgtggcataggaatctcatcctagattggctagaggggctgcaatgccggcatcgccatagctggaaatcgagcactgacggacaccgggcgccgaga

SEQ ID NO: 69758 - DNA, 252 bp, Zea mays
caactagcaacatagaaagcacaatagtgtaccaacaatggcagccaaaatattttgcctccttatgctccttggtctttctgcaagtgctgctacggcgaccattttcccgcaatgctcgcaagctcctatagcttcccttcttcccccgtacctctcaccagcggtgtcttcggtatgtgaaaacccaattcttcaaccctacaggatccaacaggcaatcgcagctggcatcttacctttatcaccctt

SEQ ID NO: 69759 - DNA, 245 bp, Zea mays
attagctttatctactccagagcgcagaagaacccgatcgacaccatgagggtgttgctcgttgccctcgctctcctggctctcgctgcgagcgccacctccacgcatacaagctgcggctgcggctgccagccaccgccgccggttcatctaccgccgccggtgcatctgccacctccggttcacctgccacctccggtgcatctcccaccgccggtccacctgccgccgccggtccatgtgcc

SEQ ID NO: 69760 - DNA, 241 bp, Zea mays
cgggcagcagcacacagccccatcccaatcctagtcgatcttcttcccctcctcaaggaagaaaagaagctgaaccatggggaagagaaagtcagctgctaagccacctcctaagaagcggatggacaagcttgacactgtcttttcctgcccattctgcaaccacgggagtagtgttgagtgacttattgacatgaagaatctgattggcgaagatcttgtagaatctgtcaggaaaact

SEQ ID NO: 69761 - DNA, 244 bp, Zea mays
aattgagaccaacaagcaacatagacagtggaatccagtagcaacaatagagcaacaatggcgaccaagatattttccctccttatgctccttgctctttctacatgtgttgctaacgcgacaattttccctcaatgctcacaagctcctatagcttcccttcttcccccataccttccatcaattatagcttcaatatgtgaaaacccagctcttcaaccatataggcttcaacaagcaatcg

SEQ ID NO: 69762 - DNA, 243 bp, Zea mays
aagcattcagaaacacaccaagcgaagccactagcaacgacctaacaacaatggctaccaagatattagccctccttgcgcttcttgccctttttgtgagcgcaacaaatgcgttcattattccacaatgctcacttgctcctagtgccattattccacagttcctcccaccagttacttcaatgggcttcgaacacctagctgtgcaagccaacatgcaacaacaagcgcttgcggcgagcg

SEQ ID NO: 69763 - DNA, 239 bp, Zea mays
attgataccaactagcaacatagaaagctcaatagtgtaccaacaatggcagccaagatattttgcttccttatgctccttggtctttctgcaagtgttgctaccgcaaccattgtcccacaatgctcacaagctcctatagcttcccttcttcccccatacctctcaccagcggtgtcttcaatgtgtgataccccaattgttcaaccctacaggatccaacaggcaatcgcaacagg

SEQ ID NO: 69764 - DNA, 239 bp, Zea mays
agtttctgccagcgctcagtcaactagccatggtgaaccctgccgcctacctacaacagcaacaactgctttcatctagccctctcgttgtgggtaatgcacctacatacctgcaacaacaattgctgcaacagattgtaccagctctgactcagctagctgtggcaaaccctgctgcctacttgcaacagctgcttccattcaaccaactgactgtgtcgaactctgctgcgtaccta

SEQ ID NO: 69765 - DNA, 236 bp, Zea mays
caaccccgcaaccctcttacaactacaacaattgtagccctttgtccaacttgctttgacagacccagcggcctcctaccaacaactcatcattggtggtgccctcttttagattgcttattagttgcaattcaataataaagttttttggatgatgtatgtggccaaccagaaataagaagttacatttccagattctaaaaaataataataaaagaacaatgatataaaaatta

SEQ ID NO: 69766 - DNA, 258 bp, Zea mays
cattattgagaccaactagcaacatagaaagcacaatagtgtaccaacaatggcagccaaaatattttgcttccttatgctccttggtctttctgcaagtcttgctaccgcaaccattttcccacaatgctcacaagctcctatagcttcccttcttcccccatacctctcaccagcggtggtatcaatgtgtgaaaacccaattgttcaaccctacaggatccaacaggcaatcgcaacaggcatcttaccattatc

SEQ ID NO: 69767 - DNA, 247 bp, Zea mays
acaacatagaaagtggaatccagtagcaacaatagagcaacaatggcgaccaagatattttccctccttatgctccttgctctttctacatgtgttgctaacgcgacaattttccctcaatgctcacaagctcctatagcttcccttcttcccccataccttccatcaattatagcttcaatatgtgaaaacccagctcttcaaccatataggcttcaacaagcaatcgcagcaagcaacatacctt

SEQ ID NO: 69768 - DNA, 241 bp, Zea mays
cattgagaccaactagcaacatagaaagcacaatagtgtaccaacaatggcagccaaaatattttgcttccttatgctccttggtctttctgcaagtcttgctaccgcaaccattttcccacaatgctcacaagctcctatagcttcccttcttcccccatacctctcaccagcggtgtcttcaatgtgtgaaaacccaattgttcaaccctacaggatccaacaggcaatcgcaacaggc

SEQ ID NO: 69769 - DNA, 243 bp, Zea mays
tattgatacgaactagcaacatacatagtgaagtacactagcaacatcttagcaccaatggcagccaagatttttgccatccttgccctccttgctctttcagcaagcgttgctaccgcgactattattccacaatgctcacaacaatacctctctccggtgacagccgcgagatttgaatacccaactatacaatcctacaggctacaagaggccatcgcagcaagcatcttacggtcgtta

SEQ ID NO: 69770 - DNA, 240 bp, Zea mays
agcaacgcaacagcaacaacaattcctaccagcactgagccacctagccatggtgaaccctgccgcctacttgcaacagcagttgcttgcatcaaacccacttgctctggcaaacgtagttgcaaaccagccacaacaacagctgcaacagtttctgccagcgctcagtcaactagccatcctgaaccctgccgcctacctacaacagcaacaactgctttcatctagcccgctcgctgt

SEQ ID NO: 69771 - DNA, 237 bp, Zea mays
cgtcacctagcaattagctcatcgactccagattggagaactcgacaccatgaaggtgctgatcgttgcccttgctctcctggcgctcgctgcgagcgccgcctccagtacaagcggcggctgtggctgccagacaccaccgtttcatctaccgcctccgttctatatgccgcctccgttctatctgccgccgcagcagcagccgcagccatggcaatgacccactcaaccaccgca

SEQ ID NO: 69772 - DNA, 204 bp, Zea mays
acacgctgcgcctaacgctggcaccctcttacaactgcaacaattgctgccattcaaccaacttgctttgacaaacccaacagcattctaccaacaacccatcattggtggtgccctcttttagatttcttatgagttatagttcaataataaagttttttgtctgatgtttgtggcttcccagaaataagatagtacatttct

SEQ ID NO: 69773 - DNA, 243 bp, Zea mays
aagaccaacaagcaacatagaaagtggaatacagtagcaacaatagagcaacaatggcggccaagatattttccatccttatgctccttgctctttctgcatgtgttgctaacgcgaccatttttcctcaatactcacaagctcctatagctgcccttcttcccccataccttccatcaatgaccgcttcagtttgtgaaaacccagcccttcaaccctacaggctccaacaagcaatcgcaa

SEQ ID NO: 69774 - DNA, 262 bp, Zea mays
atggtgttagccctgctaccttcttgacacaaccacagttgttgccgttctaccagcacgttgcgcctaacgctggcaccctcttacaactgcaacaattgctgccattcaaccaacttgctttgacaaacccagcagtgttctaccaacaacccatcattggtggtgccctcttttagatttcttatgagtcatagttcaataataaagttttttatctgatgtttgtggcttcccagaaataagaaagtacatttctaaa

SEQ ID NO: 69775 - DNA, 253 bp, Zea mays
ccagcaagcaacatagaaagtagaatccattagcaacaatagagcaacaatggcgaccaagatattttccctccttatgctccttgctctttctacatgtgttgctaacgcgacaattttccctcaatgctcacaagctcctatagcttcccttcttcccccataccttccatcaattatagcttcagtatgtgaaaacccagctcttcaaccatataggcttcaacaagcaatcgcagcaagcaacatacct

SEQ ID NO: 69776 - DNA, 239 bp, Zea mays
attttgagcattcagaaacacacctagcgaagcgcactagcaacgacctaacaacaatggcttccaagacattatccctccttgcgcttcttgccctttttgtgagtgcaacaaatgcgttcattattccacaatgctcacttgctccgagtgccattattccacagttcctccctccagttacttcaatgggcttcgaacacccagctgtgcaagcctataggctacaacaagcgctt

SEQ ID NO: 69777 - DNA, 241 bp, Zea mays
ctcgagccgttttgagcattcagaaacacaccaagcgaacacattagcaacaacctaacaacaatggctaccaagatattatccctccttgcgcttcttgcgctttttgcgagcgcaacaaatgcgttcattattccacaatgctcacttgctccaagttccattattacacagttcctcccaccagttacttcaatgggcttcgaacacccagctgtgcaagcctataggctacaacaag

SEQ ID NO: 69778 - DNA, 236 bp, Zea mays
cctcgcagccgcaaacgcgaaaccctagcctcgagctctatctccggccacagctggtcaggttagcgacgaaggatgagcaggcgctggagccgcacgatctacgtcgggaacctccccggcgacatccgggagagggaggtggaggatctgttctacaagtatggtaaaattgttgacattgacctgaaggtccccccaagaccacctggttatgcttttgttgagtttgaaga

SEQ ID NO: 69779 - DNA, 238 bp, Zea mays
cgagtacaagttgaagggccatatccggtggatctcggcgcagatgaaccgcgtccgcaacggggagctgtaccgctacatttgcgatacgaagggcgcattcgtgcagcctgcgttctacgaagcgttcggcctgactgtgatcgagtccatgacgtgcggtctgccaacgatcgcgacctgccatggtggccctgctgagatcatcgtggacggggtatctggcctgcacattgac

SEQ ID NO: 69780 - DNA, 118 bp, Zea mays
cagaccattagctttatctactccagagcgcagaagagcccgatcgacaccatgagggtgttactcgttgccctcgctctcctgggtctcgctgcgagcgccacttccacacaacata

SEQ ID NO: 69781 - DNA, 244 bp, Zea mays
tcagaaacacacctagcgaagccactagcaacgacctaacaacaatggcttccaagacattatccctccttgcgcttcttgccctttttgtgagtgcaacaaatgcgttcattattccacaatgctcacttgctccgagtgccattattccacagttcctccctccagttacttcaatgggcttcgaacacccagctgtgcaagcctataggctacaacaagcgcttgcggcgagcgtcttaga

SEQ ID NO: 69782 - DNA, 247 bp, Zea mays
agcattcagaaacacaccaagcgaagtcactagcaacaacctaacaacaatggctaccaagatattatccctccttgcgcttcttgcgctttttgcgagcgcaacaaatgcgtccattattccacaatgctcacttgctcctagttccattattccacagttcctcccaccagttacttcaatggccttcgaacacccagctgtgcaagcctataggctacaacaagcgattacggcgagcgtctta

SEQ ID NO: 69783 - DNA, 244 bp, Zea mays
ccaactagcaacatagaaagcacaatagtgtaccaacaatggcagccaaaatattttgcctccttatgctccttggtctttctgcaagtgctgctacggcgaccattttcccgcaatgctcgcaagctcctatagcttcccttcttcccccgtacctctcaccagcggtgtcttcggtatgtgaaaacccaattcttcaaccctacaggatccaacaggcaatcacagctggcatcttaccttt

SEQ ID NO: 69784 - DNA, 240 bp, Zea mays
gcaaaatacatagtgaagtacactagcaacatcttagcaccaatgggagccaagattttttccctccttgccctccttgctctttcagcaagcgctgctacctctactattattccacaatgctcacaacaatacctctctccggtgacagccgcgggatttcaacacccaactatacaatcctacatgctacatgaggccatcgtagcaagcatcttacggtcattagcattaaccctc

SEQ ID NO: 69785 - DNA, 238 bp, Zea mays
gtcagttcaattctacttcgcttaaccgccatattcatcgtacataccttgaaggcgggatcaactttgctgatggatctgtacaggtattagcggctacacaaatgcctgaagagccagctggatggttccagggtacagcagactctatcagaaaatttatctgggtactcgaggattattacagtcacaaatccattgacaacattgtaatcttgagtggcgatcagctttatcg

SEQ ID NO: 69786 - DNA, 92 bp, Zea mays
atcgagccgttcttatgagttatagttcaataataaagtttattatctgatgtttgtagcttcccagaaataagaaagtacatttctagatt

SEQ ID NO: 69787 - DNA, 240 bp, Zea mays
agcaacatagaaagcacaatagtgtaccaacaatggcagccaaaatattttgcctccttatgctccttggtatttctgcaagtgctgctacggcgaccattttcccgcaatgctcacaagctcctatagcttcccttcttcccccgtacctctcaccagcggtgtcttcggtatgtgaaaacccaattcttcaaccctacaggatccaacaggcaatcgcagctggcatcttaactttat

SEQ ID NO: 69788 - DNA, 207 bp, Zea mays
cggagaattcctcccttgccccgccgtcgcatcctcttcgaagttcgaatcgaatcgcgccgcgatcacccacctcatggcggacaaggagcctgtcgtggagcggcagaggcgggtgaggaggaggaggcgcctcagtcgcgcgcgcggggaggggacacacggcgccaggtgctccatcgtgcggcttaggaggagcgtcacacg

SEQ ID NO: 69789 - DNA, 236 bp, Zea mays
agcattgttctgatcggagggatgataccttacatttctaagacatttgccagaattctgttcctgagcaattcattgacgtttatgatggtttatgtctggagcaagcacaatcctttcatccatatgagctttctgggcctgttcacctttacggctgcatacttaccatgggtcctattgggcttctctatcctggtgggaagcagcacatgggttgatctcttgggtatgat

SEQ ID NO: 69790 - DNA, 237 bp, Zea mays
atctggctcatcaggtggtggtgagggcgacgaggaagagccaatgttcgaccccgcgtggtgccacctgcagcttgtttatgagctcctgctgaaatttatcggatcctcgtccttggacgcgaaggtagggaagaagcactttgatcactcattcatcgtgaagctccttaatcttcttgacaccgaggatccaagagaaagggattgcttgaaaactattctgcacagggtata

SEQ ID NO: 69791 - DNA, 239 bp, Zea mays
ctcgagcacgatttagaccagcaagcaacatagaaagtagaatccattagcaacaatagagcaacaatggcgaccaagatattttccctccttatgctccttgctctttctacatgtgttgctaacgcgacaattttccctcaatgctcacaagctcctatagcttcccttcttcccccataccttccatcaattatagcttcagtatgtgaaaacccagctcttcaaccatataggct

SEQ ID NO: 69792 - DNA, 241 bp, Zea mays
ggcgacgccacgctgctcatccacgagggtgtcaaggccgaggaggattacgagaagaccggcaagatccccgacccggagtccaccgacaacgctgagttcaagatcgtgctcaccatcatccgcgacgggctcaaggctgaccccaagaagtaccgcaagatgaaggagaggcttgtcggcgtctctgaggagaccaccacgggtgtcaagaggctctaccagatgcaggagaccggcg

SEQ ID NO: 69793 - DNA, 184 bp, Zea mays
ttcggctcgagagaccaactagcaacatagaaagcacaatagtgtaccaacaatggcagtcaaaatattttgcctcttatgctccttggtctttctgcaagtgctgctacggcgaccattttcccgcaatgctcgcaagctcctatagcttcccttcttcccccgtacctctcacaaggggtgt

SEQ ID NO: 69794 - DNA, 198 bp, Zea mays
ttcggctcgagctcgagccgattcggctcgaggcaagttttaatgagctcgagtctattcccgagaacttctacttcgcaacttctctaataagactaaacgtcgggaataatttcgctgacctgcaatccctgcctcgttccattggcaaccttgagatgctggaagagttggatataagcaacaatcagatgaggg

SEQ ID NO: 69795 - DNA, 246 bp, Zea mays
cagtgacacacctagcgaagcgcactagcaacgacctaacaacaatggcttcccagacattatccctccttgcgcttcttgccctttttgtgagtgcaacaaatgcgttcattattccacaatgctcacttgctccgagtgccattattccacagttcctccctccagttacttcaatgggcttcgaacacccagctgtgcaagcctataggctacaacaagcgcttgcggcgagcgtcttagaac

SEQ ID NO: 69796 - DNA, 223 bp, Zea mays
attttgagcattcagatacacacctagcgaagcgtcactagcaacgacctaacaacaatggctaccaagatattatccctctttgcgcttcttgccctttttgtgagcgcaacaaatgcgttcattattccacaatgctcacttgctcctagtgccattattccacagttcctccctccagttacttcaatgggcttcgaacacccagctgtgcaagcctaca

SEQ ID NO: 69797 - DNA, 193 bp, Zea mays
caactagcaacatagaaagcacaatagtgtaccaacaatggcagccaaaatattttgctttccttatggttccttggtctttcctgcaatgctgctaccgcaaccattttcccacaatgctcacaagctcctatagcttcctttgttcccccatacctctcaccagcggtgtcttcagtatgtgaaaccccat

SEQ ID NO: 69798 - DNA, 188 bp, Zea mays
cccgcgacccgtaccccgcctcccggttcaaccaaatccctctcggctcattcccaacagcgcaaaacccgcctatcgtcttgtcctgagaagcaatggcgggccgtggcaaggcgattggcgctggtgccgcgaagaaggcaacgtcaaggagctccaaggctgggctgcagtttcccgtcggcagg

SEQ ID NO: 69799 - DNA, 122 bp, Zea mays
caactagcaacatagaaagcacaatagtgtaccaacaatgggaaccaaaaatatttgctttcctaaggctccttggtctttcctgcaatgttgctacggaaacaattttcccacaatgctca

SEQ ID NO: 69800 - DNA, 139 bp, Zea mays
ctcaaccgccccggcctcagcctcatccccagccacacccatgcccgttgcaacaagcggaatcaaagcccgtgcaagctgcagggaacctgcggcgttggcagcaccccgatcctgggcaagtgcgtcgagtttctga

SEQ ID NO: 69801 - DNA, 116 bp, Zea mays
cgcagtgcagcccgctggcggcggcgccctactacgccgggtgtgggcagacgagcggcaatgtacaagccgttccggcaacagtgctgcaagcagcagatgaggatgatggacgt

SEQ ID NO: 69802 - DNA, 300 bp, Zea mays
cagcattcaaaaacacaccaagcgaagcgcactagcaacgacctaacaccaatggctaccaagatattagccctcctgcgcttcttgcccttttagtgagcgcaacaaatgcgttcattattccacagtgctcacttgctcctagtgccattattccacagttcctcccaccagttacttcaatgggcttcgaacatccagccgtgcaagcctacaggctacaactagcgcttgcggcgagcgccttacaacaaccaattgcccaattgcaacaacaatccttggcacatctaaccctac

SEQ ID NO: 69803 - DNA, 301 bp, Zea mays
ctcccaccagttacttcaatgggcttcgaacatccagccgtgcaagcctacaggctacaactagcgcttgcggcgacgccttacaacaaacaattgccccatttgcaacaaaaatccttggaacttctaaccttacaaaccattgcaacgcaacaacaacaacaacagtttctgccatcactgagccacctagccgtggtgaaccctgtcacctacttgcaacagcagctgcttgcatccaacccacttgctctggcgaacgtagctgcataccagcaacaacaacagctgcttcagttta

SEQ ID NO: 69804 - DNA, 125 bp, Zea mays
attttcagcattcaaaaacacaccaagcgaacgcagctagcaacgacctaacaccaatggctaccaagatattagcctccttgcgcttcttgcccttttagtgagcggaacaaatgcggtcatta

SEQ ID NO: 69805 - DNA, 294 bp, Zea mays
attgagaccaacaagcaacatagaaagtggaatccagtagcaacaacagagcaacaatggcgaccaagatattttccctccttatgttctttgctcttcctgcatgtgttgctaacgcgacaattttccctcaatgctcacaagctcctatagcttcccttcttcccccataccttccatcaatgatagcttcagtatgtgaaaacccagctcttcagccctataggctccaacaagcaatcgcagcaagcaacatacctttatcacccttgttgtttcaacatcgccagccta

SEQ ID NO: 69806 - DNA, 301 bp, Zea mays
  unsure (1)..(301): unsure at all n locations
ctcgagccgctcgagccgattcggctcgagccaagatcaagatcgggatcaatgggttcgagtngatcgagtangtgttggcaagggtggcctgcagattgacgttgtcgagttcgtcgccgtgaacgaccccttcatcagcacggactacatgacctacatgttcaagtacgacactgtgcacggacagtggaagcaccatgaagtcaaggtgaaggactccaaaacccttctctttggtgagaaggaggttgctgtgtttggctgcaggaaccctgaggagatcccgtggggttcggtt

SEQ ID NO: 69807 - DNA, 304 bp, Zea mays
cctcaatgctcacaagctcctatagcttcccttcttcccccataccttccatcaattatagcttcaatatgtgaaaatcagctcgttaaccatattgggattaacaagcaattggaggaagcaaccttcctttaaccgcccttgttgtttcaacaatcgcaagccctaatctttggtgcagtcattggtacaaaccatcagggcacaacagctgcagcaactcgtgctacctctgatcaaccaagtagctctggcaaacctttctccctactctcagcaacaacaatttcttccattcaaccaa

SEQ ID NO: 69808 - DNA, 247 bp, Zea mays
attgagaccaactagcaacatagaaagcacaatagtgtaccaacaatggcagccaaaatattttgcctccttatgctcttggtcttcctgcagtgctgtaacgggacaattttccgaaatgttgcaagttctatagcttcccttcttcccccgtactctcacaacggtgtcttcggtatgtgaaacccatttttaaacctacgggtcaacgggcatcacagtggctcttactttatcaccttgttct

SEQ ID NO: 69809 - DNA, 147 bp, Zea mays
caactagcaacatagaaagcacaatagtgtaccaacaatggcagctaaaatattttgcctccttatgctccttggttttctgcaagtgctgctacggcgaccattttcccacaatgctcacaagctcctatagcttcccttcttccc

SEQ ID NO: 69810 - DNA, 123 bp, Zea mays
gagaccaactagcaacatagaaagcacaatagtgtaccaacaatggcagccaaaatattttgcttccttatgctcctggtctttctgcaagtgctgctaccgcaaccattttcccacaatgct

SEQ ID NO: 69811 - DNA, 123 bp, Zea mays
gtggaatccagtagcaacaacagagcaacaatggcgaccaagatattttccctccttatgctccttgctctttctgcatgtgttgctaacgggacaattttccctcaatgctcacaagctcct

SEQ ID NO: 69812 - DNA, 129 bp, Zea mays
agggcagcaaccttctaccaacaacacatcagtggcggtgccatcttttagattgcttattagttgtaattcataatgaagtttttggctgatgtatgtggcctcctagaaataagaagttacattccc

SEQ ID NO: 69813 - DNA, 87 bp, Zea mays
tacagcaccccgatcctgggccagtgcgtcgagtttctgaggcatcagtgcagcccgacggcgacgccctactgctcgcctcagtgc

SEQ ID NO: 69814 - DNA, 296 bp, Zea mays
gcaacatagaaagcacaatagtgtaccaacaatggcagccaaaatattttgcctccttatgctccttggtatttctgcaagtgctgctacggggacaattttcccgcattgttcacaagttcttatagcttcccttcttcccccgtacctctcaccagcggtgtcttcggtatgtgaaaacccaattcttcaaccgtacaggatccaacaggcaatcgcagctggcatcttacctttatgcaccttgttcctccaacaatcatcagccctattacagcagttacctttggtgcatt

SEQ ID NO: 69815 - DNA, 307 bp, Zea mays
ttgattgagaccaacaagcaacatagaaagtggaatccagtagcaacaacagagcaacaatggcgaccaagatattttccctctttatgctccttgctccttcctgcatgtgttgctaaggggacaattttccctcaatgctcacaagctcttatagcttcccttcttcccccataccttccatcaatgatagcttcagtatgtgaaaacccagctcttcagccctataggctccaacaagcaatcgcagcaagcaacatacctttatcacccttgttgtagtcacaatcgccagccctatctttgg

SEQ ID NO: 69816 - DNA, 151 bp, Zea mays
atcgcagcaagcaacatacctttatcgcccttgttgtttcaacaatcaccagccctatctttggtgcagtcattgtacaaaacatcaagggacaacagctgcacaaattgggttactctgatcaaccaagtagtctggcaaacctttctcc

SEQ ID NO: 69817 - DNA, 124 bp, Zea mays
ctcgagccgagaaagcacaatagtgtaccaacaatggcagccaatatattttgcctccttatgctccttggtctttctgcaagtgctgctaaggcgaccattttcccgcaaatgctcaaaggct

SEQ ID NO: 69818 - DNA, 101 bp, Zea mays
cacaccaagcgaagcgcactagcaacgacctaacaacaatggctaccaagatattagccctccttgcgcttctgccctttttgtgagcgcaacaaatgcgt

SEQ ID NO: 69819 - DNA, 298 bp, Zea mays
caacaagcaacatagaaagtggaatccagtagcaacaacagagcaacaatggcgaccaagatattttccctcttatgctccttgctctttctgcatgtgttgctaacgcgacaattttccctcaatgctcacaagctcctatagcttcccttcttcccccataccttccatcaatgatagcttcagtatgtgaaaacccagctcttcagccctataggctccaacaagcaatcgcagcaagcaacatacctttatcacccttgttgtttcaacaatcgccagccctatctttggtgca

SEQ ID NO: 69820 - DNA, 294 bp, Zea mays
ttcagaaacacacctagcgaacgcactagcaacgacctaacaacaatggcttccaagacattatccctcttgcgcttcttgccctttttgtgagtgcaacaaatgcgttcattattccacaatgctcacttgctccgagtgccattattccacagttcctccctcaagttacttcaatgggcttcgaacacccagctgtgcaagcctataggctacaacaagcgcttgcggcgagcgtcttagaacaaccaattgcccaattacaacaacaatccttggcacatctaaccatac

SEQ ID NO: 69821 - DNA, 104 bp, Zea mays
tttgagcattcagaaacacaccaagcgaagcacattagcaacaacctaacaacaatggctaccaagatatatccctccttgcgcttcctgcgctttttgcgagc

SEQ ID NO: 69822 - DNA, 296 bp, Zea mays
agatagcacaatagtgtaccaacaatggcagccaaaatattttgcttccttatgctccttggtctttctgcaagtggtgctaacgcaaccattttcccacaatgctcacaagttcttatagcttcccttcttcccccatacctctcaccagcggtgtcttcaatgtgtgaaaacccaattgttcaaccctacaggatccaacaggcaatcgcaacaggcatcttaccattatcacccttgttcctccaacaaccgtcagccctattacagcagttacctttggtccatttggtggc

SEQ ID NO: 69823 - DNA, 299 bp, Zea mays
caactagcaacatagaaagcacaatagtgtaccaacaatggcagccaaaatattttgcctccttatgctccttggtatttctgcaagtggtgctacggggaccattttcccgcaatgctcacaagttcttatagcttcccttcttcccccgtacctctcaccagcggtgtcttcggtatgtgaaaacccaattcttcaaccctacaggatccaacaggcaatcgcagctggcatcttacctttatcacccttgttcctccaacaatcatcagccctattacagcagttacctttggtgc

SEQ ID NO: 69824 - DNA, 148 bp, Zea mays
ctcgagccgattgagaccagcaagcaacatagaaagtagaatccattagcaacaatagagcagccaatggcgccaagatattttccctccttatgctccttgctctttctacatgtgttgctaacgcgacaatttccctccatgctca

SEQ ID NO: 69825 - DNA, 119 bp, Zea mays
gttgtgagcattgtggaataatacctctctccagtgatagccgcgagatttgaatgcccatctatacatcctacaggctacaagaggccatcacagcaagcatcttacggtcgttagca

SEQ ID NO: 69826 - DNA, 294 bp, Zea mays
ttgagaccaactagcaacatagaaagcacaatagtgtaccaacaatggcagccaaaatattttgcctcttatgctccttggtctttctgcaagtgctgctacggcgaccattttcccgcaatgctcgcaagctcctatagcttcccttcttcccccgtacctctcaccagcggtgtcttcggtatgtgaaaacccaattcttcaaccctacaggatccaacaggcaatcgcagctggcatcttacctttatcacccttgttcctccaacaatcatcagccctattacaacagtt

SEQ ID NO: 69827 - DNA, 118 bp, Zea mays
cggaaggcgaaagagtagcagcagcaggcggcgccgagtagcggctccccacctcgagcttgccaccaggctagaggattgaagaagcatttgaagaggctcaatgcgcccaagcatt

SEQ ID NO: 69828 - DNA, 105 bp, Zea mays
atcttacctttatcacccttgttcctccaacaatcatcagccctattacatcagttacctttggtgcattattggcacaaaacatcaggggcaaacaactacaac

SEQ ID NO: 69829 - DNA, 162 bp, Zea mays
  unsure (1)..(162): unsure at all n locations
ctccgagcacaagttcgtgctgaaggacaagaagaagccgatcatcttctcgatggcgcgtctcgaccggtgaagaacatgacaggcctggtggagatgtacggcaagaaacgcgcgccttgaagggacttggccgaccttcgtgaatcnttccgcgggtga

SEQ ID NO: 69830 - DNA, 294 bp, Zea mays
cagaaacacacctagcgaacgcactagcaacgacctaacaacaatggctaccaagatattatccctctttgcgctttcttgccttttttgtgagcgcaacaaatgcgttcattattccacaatgctcacttgctcctagtgccattattccacagttcctccctccagttacttcaatgggcttcgaacacccagctgtgcaagcctacaggctacaacaagcgcttgcggcgagcgtcttacaacaaccaattgcccaattacaacaacaatccttggcacatctaaccatac

SEQ ID NO: 69831 - DNA, 298 bp, Zea mays
tagcaacatagaaagcacaatagtgtaccaacaatggcagccaaaatattttgcttccttatgctccttggtctttctgcaagttgtgctaacggaaacaattttcccacaatgctcacaagttcttatagcttcccttcttcccccatacctctcaacagcggtgtcttcaatgtgtgaaaacccaattgttcaaccctacaggatccaacaggcaatcgcaacaggcatcttaccattatcacccttgttcctccaacaaccgtcagccctattacagcagttacctttggtccat

SEQ ID NO: 69832 - DNA, 104 bp, Zea mays
cagaaacacaccaagcgaagcacattagcaacaacctaacaacaatggctaccaagatattatccctcttgcgcttcttgcgctttttgcgagcgcaacaaatg

SEQ ID NO: 69833 - DNA, 254 bp, Zea mays
gaccaacaagcaacatagaaagtggaatccagtagcaacaacagagcaacaatggcgaccaagatatttccctccttatgctccttgctctttctgcatgtgttgctaacgcgacaattttccctcatgttcacaagctctatagcttccttcttcccccatactttccatcatgatagtttcgtatgtgaaacccactcttcagcctatagctcaaacagcatcgcagcaagcacatactttatcccttgtgt

SEQ ID NO: 69834 - DNA, 70 bp, Zea mays
agatagcacaatagtgtaccaacaatggcagccaaaatattttgcttccttatgctccttggtctttctg

SEQ ID NO: 69835 - DNA, 290 bp, Zea mays
attttcagcattcaaaaacacaccaagcgaagcgcactagcaacgacctaacaccaatggctaccagatattagcctccttgcgcttcttgcccttttagtgagcgcaacaaatgcgttcattattccacagtgctcacttgctcctagtgccagtattccacagttcctcccaccagttacttcaatgggcttcgaacatccagccgtgcaagcctacaggctacaactagcgcttgcggcgagcgccttacaacaaccaattgcccaattgcaacagcaatccttgga

SEQ ID NO: 69836 - DNA, 111 bp, Zea mays
cgagtttctgaggcatcagtgcagcccgacggcgacgccctactgctcgcctcagtgccagtcgttgcggcagcagtgttgccagcagctcaggcaggtggagccgcagca

SEQ ID NO: 69837 - DNA, 116 bp, Zea mays
agcattcagaaacacacctagcgaagcgcactagcaacgacctaacaacaatggctaccaagatatatccctctttgcgcttcctgccctttttgtgagcgcaacaaatgcgttca

SEQ ID NO: 69838 - DNA, 290 bp, Zea mays
gggttccgttctgtaagaagtacaacatagagcctagggctccggaatggtactttgctcagaaaatgattacttgaaagacaaagttcaaacttcatttgtgaaagaacgccgggccatgaagagagaatatgaagaattcaaagttcgtatcaatggtcttgtagccaatgcacaaaaagttcccgaggagggatggatcatgcaagatggtacaccttggcctgggaacaatactagggaccatcctggaatgattcaggttttcctgggtcacagtggagggcttg

SEQ ID NO: 69839 - DNA, 283 bp, Zea mays
gagaccaactagcaacatagaaagcacaatagtgtaccaacaatggcagccaaaatttttgcctccttatgctccttggtctttctgcaagtgctgctacggcgaccattttcccgcaatgctcgcaagctcctatagcttcccttcttcccccgtacctctcaccagcggtgtcttcggtatgtgaaaacccaattcttcaaccctacaggatccaacaggcaatcacagctggcatcttacctttatcacccttgttcctccaacaatcatcagccctatt

SEQ ID NO: 69840 - DNA, 128 bp, Zea mays
attttcagcattcaaaaacacaccaagcgaagcgcactagcaacgacctaacaccatggctaccaagatattagccctccttgcgcttcttgcccttttagtgagcgcaacaaatgcgttcattattc

SEQ ID NO: 69841 - DNA, 129 bp, Zea mays
caacatagaaagcacaatagtgtaccaacaatggcagccaaaatattttgcctcctatgctccttggtctttctgcaagtgctgctacggcgaccattttcccgcaatgctcgcaagctcctatagctt

SEQ ID NO: 69842 - DNA, 287 bp, Zea mays
gttgtttcaacaatcgccagccctatctttggtgcagtcattggtacaaaccatcagggcacacagctgcagcaactcgtgctacctgtgatcaaccaagtagctctggcaaacctttctccctactctcagcaacaacaatttcttccattcaaccaactgtctacactgaaccctgctgcttatttgcagcaacaactattaccattcagccagctagctactgcctactctcagcaacaacaacttcttccatttaaccaattggccgcactgaaccccgctgc

SEQ ID NO: 69843 - DNA, 150 bp, Zea mays
cagcgaaatccaatctagaagcacccctctccctctctctctcttcgccgtccgaagctccgcacccaatctaatcgacacctcaccgagatgggccgcaagttcttcgtcggtggcaactggaaatgcaatggaaccacagatcaggtc

SEQ ID NO: 69844 - DNA, 116 bp, Zea mays
attttgagcattcagaaacacaccaagcgaagcacattagcaacaacctaacaacaatggctaccagatattatccctccttgcgcttcttgcgctttttgcgagcgcaacaaatg

SEQ ID NO: 69845 - DNA, 188 bp, Zea mays
  unsure (1)..(188): unsure at all n locations
ctgaaatccagaggaacccctggtgattggagccatatcattaagcaaattgggatgtttactttcactggggctgaatagcgaacaagtcgcattcatgaggcaggaataccacatttatatgacatctgatgggaggatcagcatggccggtttgagcatgaggactgtgccccatcttnnagatg

SEQ ID NO: 69846 - DNA, 295 bp, Zea mays
cagaaacacaccaagcgaacacattagcaacaacctaacaacaatggctaccaagatattatcctcctgcgttcctgcgcttttgcgagcgccaccaaatgcggttcaattatttcccacattgctccacttgctcccaagttccattattacacagttcctcccaccagttacttcaatgggcttcgaacacccagctgtgcaagcctataggctacaacaagcaattgcggcgagcgtcttacaacaaccaatttcccagttgcaacaacaatccttggcacatctaacaata

SEQ ID NO: 69847 - DNA, 120 bp, Zea mays
cgttgttatcctgtctcctcatggctacttcgcccagtccaatgtgcttggataccctgacactggcggtcaggttgtgtacattctggatcaagtccgtgctttggaaaatgagattcc

SEQ ID NO: 69848 - DNA, 117 bp, Zea mays
ctcgagaactccatttcgatcccatttgaaatcaacccatcctcgtttcctccgtctagcagctctcaccctcatgggccagatcaagatcggggatcaatggggttggcaggatcg

SEQ ID NO: 69849 - DNA, 112 bp, Zea mays
accagcggtgtcttcaatgtgtgaaaccccaattgttcaaccctacaggatccaacaggcatcgcaacaggcatcttaccattatcaaccttgttcctccaacaaccgtcag

SEQ ID NO: 69850 - DNA, 240 bp, Zea mays
atttataccaactaccaacatacatagtgaagtacactagcaacatcttagcaccaatggcagccaagatttttgcgctccttgccctccttgctctttcagcaagtgttgctaccgcgactattattccacaatgctcacaacaatacctctctccagtgatagccgcgagatttgaatacccatctatacaatcctacaggctacaagaggccatcacagcagcatcttacggtcgtt

SEQ ID NO: 69851 - DNA, 295 bp, Zea mays
gtccaccatgagtacgccacaccctttggtttaacatcggaatatgcccacccagctgaaattttgttcctgggattcgccacagttgttggtcctgctcttactggccctcatctcttcaccctgtggctgtggatggtgttgagggttttggagacagttgaagctcacagcggctatcacttcccatggagcccatcaaatttcctgccgctgtatggcggctcggacttccatgactaccatcaccgtgtgctgtacacaaagtcagggaactatgcctcaacatttgttt

SEQ ID NO: 69852 - DNA, 288 bp, Zea mays
caatgatagcttcagtatgtgaaaacccagctcttcaaccctataggctccaacaagcaatcgcagcaagcaacatacctttatcacccttgtttcaacaatcgccagccctatctttggtgcagtcattggtacaaaccatcaaggcacagcagctgcagcaactcgtgctacctgtgatcaaccaagtagctctggcaaacctttctccctactatcagcaacaacaatttcttccattcaaccaactatctacactgaaccctgctgcttatttgcagcaacaac

SEQ ID NO: 69853 - DNA, 288 bp, Zea mays
aacaattgctgcaacagattgtaccagctctgactcagctagctgtggcaaaccctgctgcctacttgcaacagctgcttccattcaaccaactgactgtgtcgaactctgctgcgtacctacaacagcgacaacagttacttaatccactagcagtgcctaacccattggtcactgccttcctacagcagcaacaattgctaccatacagccagttctctttgatgaaccctgccttgtcgtggcagcaacccatcgttggaggtgccatcttttagattacatatg

SEQ ID NO: 69854 - DNA, 287 bp, Zea mays
cacacgaaagctttcatttgatgcctcctcaagtgaatcaaggggcacagaaccctcaacaagtatgtcaacagagaacacacctgtgtccatcaacgtcccaaagttggcagagggcattgaatttgggaggcaaccaatggtcacatcctccactttggtagagctaacaactagactagatttcttcaaggagcgaaggtcgcaactgatggaacaacttcatagccttgatttgggacgtggatctgctccgcaaggttttccattcaagccaccctctcctt

SEQ ID NO: 69855 - DNA, 288 bp, Zea mays
caacaagcaacatagaaagtggaatccagtagcaacaatagagcaacaatggcgaccaagatattttccctccttatgctccttgctctttctacatgtgttgctaacgcgacaattttccctcaatgctcacaagctcctatagcttcccttcttcccccataccttccatcaattatagcttcaatatgtgaaaacccagctcttcaaccatataggcttcaacaagcaatcgcagcaagcaacatacctttatcgcccttgttgtttcaacaatcgccagcccta

SEQ ID NO: 69856 - DNA, 289 bp, Zea mays
caccaacatagaaagcacaatagtgtaccaacaatggcagccaaaatattttgcttccttatgctccttggtctttctgcaagtcttgctaccgcaaccattttcccacaatgctcacaagctcctatagcttcccttcttcccccatacctctcatcagcggtgtcttcaatgtgtgaaaacccaattgttcaaccctacaggatccaacaggcaatcgcaacaggcatcttaccattatcacccttgttcctccaacaaccgtcagccctattacagcagttacctt

SEQ ID NO: 69857 - DNA, 288 bp, Zea mays
ataatattttgagcattcagaaacacacctagcgaactgcactagcaacgacctaacaacaatggcttccaagacattatccctccttgcgcttcttgccctttttgtgagtgcaacaaatgcgttcattattccacaatgctcacttgctccgagtgccattattccacagttcctccctccagttacttcaatgggcttcgaacacccagctgtgcaagcctataggctacaacaagcgcttgcggcgagcgtcttagaacaaccaattgcccaattacaacaaca

SEQ ID NO: 69858 - DNA, 291 bp, Zea mays
gcaacatagaaagcacaatagtgtaccaacaatggcagccaaaatattttgcctccttatgctccttggtctttctgcaagtgctgctacggcgaccattttcccgcaatgctcgcaagctcctatagcttcccttcttcccccgtacctctcaccagcggtgtcttcggtatgtgaaaacccaattcttcaaccctacaggatccaacaggcaatcacagctggcatcttacctttatcacccttgttcctccaacaatcatcagccctattacatcagttacctttggt

SEQ ID NO: 69859 - DNA, 285 bp, Zea mays
cgaatcggctcgagtcgacattgagcatacggatggcgagcggtactttacaagggatcattctgctttccacaatccagaggagatgcagcgaaagatagcagataaggggaggaagatggtcaccattgtggatccccacatcaagcgtgacagttcattccacctccacaaggaggcaacagacaaggggtactatgtgaaagatgcgaatgggaatgactttgatgggtggtgctggcctggatcatcatcctatcctgacatgttgaatcctgagatacg

SEQ ID NO: 69860 - DNA, 296 bp, Zea mays
attgagaccaactagcaacatagaaagcacaatagtgtaccaacaatggcagccaaaatattttgcttccttatgctccttggtctttctgcaagtgctgctaccgcaaccattttcccacaatgctcacaagctcctatagcttcctttcttcccccatacctctcaccagcggtgtcttcagtatgtgaaaacccaattcttcaaccctacaggatccaacaggcaatcgcagcaggcatcttacctttatcacccttgttcctccaacaaccgtcagccctattacagcagtt

SEQ ID NO: 69861 - DNA, 288 bp, Zea mays
gagaccaactagcaacatagaaagcacaatagtgtaccaacaatggcagccaaaatattttgcctccttatgctccttggtctttctgcaagtgctgctacggcgaccattttcccgcaatgctcgcaagctcctatagcttcccttcttcccccgtacctctcaccagcggtgtcttcggtatgtgaaaacccaattcttcaaccctacaggatccaacaggcaatcgcagctggcatcttacctttatcacccttgttcctccaacaatcatcagccctattacaa

SEQ ID NO: 69862 - DNA, 280 bp, Zea mays
attgagaccaactagcaacatagaaagcacaatagtgtaccaacaatggcagccaaaatattttgcctccttatgctccttggtctttctgcaagtgctgctacggcgaccattttcccgcaatgctcgcaagctcctatagcttcccttcttcccccgtacctctcaccagcggtgtcttcggtatgttctaacccaattcttcaaccctacaggatccaacaggcaatcacagctggcatcttacctttatcacccttgttcctccaacaatcatcag

SEQ ID NO: 69863 - DNA, 282 bp, Zea mays
tgcaaaccatggacatggctttggcgtctaaagcctcccctccgccatggaatgccaccgccgccgagcagccaattccaaagcgtgacaaagccgctgcaaatgatacaacatacctcaatcctcaagctcatgatagtgttcttggaatcattctgggaggtgtcgctgggactagattgtaccccttgacaaagaagcgtgccaagcctgcagtgccattgggtgccaactatagactgattgatattcctgtcagcaattgtctcaacagcaacatat

SEQ ID NO: 69864 - DNA, 281 bp, Zea mays
tggacatggctttggcgtctaaagcctcccctccgccatggaatgccaccgccgccgagcagccaattccaaagcgtgacaaagccgctgcacatgattcaacatacctcaatcctcaagctcatgatagtgttcttggaatcattctgggaggtggtgctgggactagattgtaccccttgacaaagaagcgtgccaagcctgcagtgccattgggtgccaactatagactgattgatattcctgtcagcaattgtctcaacagcaacatatccaagatc

SEQ ID NO: 69865 - DNA, 284 bp, Zea mays
aaaatattttgcttccttatgctccttggtctttctgcaagtgttgctaccgcaaccattttcccacaatgctcacaagctcctatagcttcccttcttcccccatacctctcaccagcggtgtcttcaatgtgtgaaaacccaattgttcaaccctacaggatccaacaggcaatcgcaacaggcatcttaccattatcacccttgttcctccaacaaccgtcagccctattacagcagttacctttggtccatttggtggcacaaaacatcagggcacaaca

SEQ ID NO: 69866 - DNA, 283 bp, Zea mays
gcaacatagaaagcacaatattgtaccaataatggcagccaaaatattttgcctcattatgctccttggtctttctgcaagtgctgctacggcgagcattttcccgcaatgctcacaagctcctatagcttcccttcttcccccatacctctcaccagcgatgtcttcagtatgtgaaaatccaattcttctaccctacaggatccaacaggcaatcgcagcaggcatcttacctttatcacccttgttcctccaacaatcatcagccctattacagcagtta

SEQ ID NO: 69867 - DNA, 282 bp, Zea mays
attttcagcattcaaaaacacaccaagcgaagcgcactagcaacgacctaacaccaatggctaccaagatattagccctccttgcgcttcttgcccttttagtgagcgcaacaaatgcgttcattattccacagtgctcacttgctcctagtgccattattccacagttcctcccaccagttacttcaatgggcttcgaacatccagccgtgcaagcctacaggctacaactagcgcttgcggcgagcgccttacaacaaccaattgcccaattgcgacaac

SEQ ID NO: 69868 - DNA, 283 bp, Zea mays
gatccatctcatcgacaccccctccgctctccttatcccttccattcgcccaaacccccgccgccgtgacccctgccagcccgcggccttcccctcgttctaggcttcaactgccggcctcgtgtcttctgggcaagtgaagagagagatggcgtcgccaataccgcgcgagtgggtcgggctgcagcagtttcctccggccacccagaccgagctgcacgagctcctcggcaagctcaaggaggaggatgtgagcacattgacaattctggtgatggggaaa

SEQ ID NO: 69869 - DNA, 285 bp, Zea mays
gagcattcagaaacacacctagcgaactgcactagcaacgacctaacaacaatggcttccaagacattatccctccttgcgcttcttgccctttttgtgagtgcaacaaatgcgttcattattccacaatgctcacttgctccgagtgccattattccacagttcctccctccagttacttcaatgggcttcgaacacccagctgtgcaagcctataggctacaacaagcgcttgcggcgagcgtcttagaacaaccaattgcccaattacaacaacaatcctta

SEQ ID NO: 69870 - DNA, 287 bp, Zea mays
ggggactggagagagcatcaatgagaaggaccgctgcccagggtgcaagggtgagaaggtcgttcaagagaagaaggttcttgaggttcatgttgagaaggggatgcaacacaaccagaagatcaccttccctggtgaagctgatgaagcgcctgatactgtcactggagacattgtattcgtcctccagcagaaggatcactccaaattcaaaagaaagggtgaagatctcttctatgagcacacttgtctctgaccgaagcactatgtgggttccaatttgttct

SEQ ID NO: 69871 - DNA, 291 bp, Zea mays
caacaaccaatttcccagttgcaacaacaatccttggcacatctaacaatacaaaccatcgcaacgcaacagcaacaacaattcctaccagcactgagccacctagccatggtgaaccctgccgcctacttgcaacagcagttgcttgcatcaaacccacttgctctggcaaacgtagttgcaaaccagccacaacaacagctgcaacagtttctgccagcgctcagtcaactagccatggtgaaccctgccgcctacctacaacagcaacaactgctttcatctagcccg

SEQ ID NO: 69872 - DNA, 290 bp, Zea mays
tagaaagtggaatccagtagcaacaatagagcaacaatggcgaccaagatattttccctccttatgctccttgctctttctacatgtgttgctaacgcgacaattttccctcaatgctcacaagctcctatagcttcccttcttcccccataccttccatcaattatagcttcaatatgtgaaaacccagctcttcaaccatataggcttcaacaagcaatcgcagcaagcaacatacctttatcgcccttgttgtttcaacaatcgccagccctatctttggtgcagtc

SEQ ID NO: 69873 - DNA, 286 bp, Zea mays
caaatgcgttcattattccacaatgctcacttgctccgagtgccattattccacagttcctccctccagttacttcaatgggcttcgaacacccagctgtgcaagcctataggctacaacaagcgcttgcggcgagcgtcttagaacaaccaattgcccaattacaacaacaatccttagcacatctaaccatacaaaccatcgcaacgcagcagcaacaagcactgagccacctagccgtggtgaaccctatcgcctacttgcaacaacagctgcttgcatccaa

SEQ ID NO: 69874 - DNA, 283 bp, Zea mays
gccttcaaatcgaactcctcccccgatcgatcccaatcgaacccaccaagccgataccctaaccctcgcccttctcgatgtcggccgccaccaccggcccagccccttcagtagccactccgatggcgccccctccgtcctacccggcctcctccacggcctcttcctccatctccgcgtccgccgagcaggaggaggacctctatggccgcctcaaatcgctccaacgccacatggagttcgtcgaaatccaggaggagtacgttaaagacgagcagaagaa

SEQ ID NO: 69875 - DNA, 282 bp, Zea mays
ttcaaaaacacaccaagcgaagccactagcaacgacctaacaccaatggctaccaagattttagccctccttgtgcttcttgcccttttagtgagcgcaacaaatgcgttcattattccacagtgctcacttgctcctagtgccagtattccacagttcctcccaccagttacttcaatgggcttcgaacatccagccgtgcaagcctacaggctacaactagcgcttgcggcgagcgccttacaacaaccaattgcccaattgcaacaacagtccttggca

SEQ ID NO: 69876 - DNA, 283 bp, Zea mays
gcacaatagtgtaccaacaatggcagccaaaatattttgcctccttatgctccttggtctttctgcaagtgttgctacggcgaccattttcccgcaatgctcgctcgctcctatagcttcccttcttcccccgtacctctcaccagcggtgtcttcggtatgtgaaaacccaattcttcaaccctacaggatccaacaggcaatcgcagctggcatcttacctttatcacccttgttcctccaacaatcatcagccctattacaacagttacctttggtgcat

SEQ ID NO: 69877 - DNA, 280 bp, Zea mays
ttcagaaacacaccaagcgaactacattagcaacaacctaacaacaatggctaccaagatattatccctccttgcgcttcttgcgctttttgcgagcgcaacaaatgcgttcattattccacaatgctcacttgctccaagttccattattacacagttcctcccaccagttacttcaatgggcttcgaacacccagctgtgcaagcctataggctacaacaagcaattgcggcgagcgtcttacaacaaccaatttcccagttgcaacaacaatccttg

SEQ ID NO: 69878 - DNA, 280 bp, Zea mays
gcaacatagaaagcacaatagtgtaccaacaatggcagccaaaatattttgcctccttatgctccttggtctttctgcaagtgctgctacggcgaccattttcccgcaatgctcgcaagctcctatagcttcccttcttcccccgtacctctcaccagcggtgtcttcggtatgtgaaaacccaattcttcaaccctacaggatccaacaggcaatcacagctggcatcttacctttatcacccttgttcctccaacaatcatcagccctattacatcag

SEQ ID NO: 69879 - DNA, 279 bp, Zea mays
gttcaagtatgacactgtgcacggacagtggaagcaccatgaggtcaaggtgaaggactccaagacccttctctttggtgagaaggaggttgctgtgtttggctgcaggaaccctgaggagatcccatggggttcggttggcgctgaatatgttgttgagtctactggtgttttcactgaccaggagaaggctgcagctcactagaagggtggtgccaagaaggttgtcatttctgctcctagcaaggatgcccccatgttcgttgttggtgtcaacga

SEQ ID NO: 69880 - DNA, 281 bp, Zea mays
tattgattgagcattcagaaacacacctagcgaactgcactagcaacgacctaacaacaatggcttccaagacattatccctccttgcgcttcttgccctttttgtgagtgcaacaaatgcgttcattattccacaatgctcacttgctccgagtgccattattccacagttcctccctccagttacttcaatgggcttcgaacacccagctgtgcaagcctataggctacaacaagcgcttgcggcgagcgtcttagaacaacaattgcccaattacaac

SEQ ID NO: 69881 - DNA, 281 bp, Zea mays
accccaacaggccaattgcaagctttatttttgctggtcccaccggcgttgggaagtctgagcttgcaaaggctcttgcagcctattactttggctctgaggaggctatgatccggcttgatatgagtgaattcatggagagacacacggtatccaagctgattggttcacctccaggatatgtaggatacactgagggtggccagctgacagaggcagttcgacggcggccatacacagttgtgctctttgatgagattgagaaggcacaccctgatgtc

SEQ ID NO: 69882 - DNA, 280 bp, Zea mays
caccccggcagccgcaaacgccttcgccgtcgcgtcccgctcctccgcccgcccgacgcgacccctaggacctggagagagaggtcggcatggctgccgcagtggtcgacgacgctggtatggacgccgttcagaagcgcctcatgttcgaagacgaatgcattttggtggacgagcaggacaatgttgttggccatgagtcaaagtacaactgccatttgatggaaaaagattgattctgagaatctgctacacttggcatcccccgtgttccttttca

SEQ ID NO: 69883 - DNA, 283 bp, Zea mays
cgcacaccaacaacaacaacaacaacaacagcaccaacaacaacatcaatgtgaaggccaacaacaacatcaccaacaatcacaaggccatgtgcaacaacacgaacagagccatgagcaacaccaaggacagagccatgagcaacaacatcaacaacaattccagggtcatgacaagcagcaacaaccacaacagcctcagcaatatcagcagggccaggaaaaatcacaacagcaacaatgtcattgccaggagcagcaacagactacaaggtgcagctat

SEQ ID NO: 69884 - DNA, 282 bp, Zea mays
cgaggatccacttcatgctctcctcctacgcaccggtgatctcttctgcgaaggccttccacgagcagctgtctgtggcggagatcaccagcagcgcgttcgagccggcttccatgatggtcaagtgcgacccacggcacggcaagtacatggcttgctgcctgatgtaccgcggcgacgtggtgcccaaggacgtgaacgccgcggtggccaccatcaagacgaagcgcaccatccagttcgtggactggtgcccgacggggttcaagtgcggcatcaact

SEQ ID NO: 69885 - DNA, 280 bp, Zea mays
tattgagaccaactagcaacatagaaagcacaatagtgtaccaacaatggcagccaaaatattttgcttccttatgctccttggtctttctgcaagttttgctaccgcaaccattttcccacaatgctcacaagctcctatagcttcccttcttcccccatacctctcaccagcggtgtcttcaatgtgtgaaaacccaattgttcaaccctacaggatccaacaggcaatcgcaacaggcatcttaccattatcaccttgttcctccaacaaccgtcag

SEQ ID NO: 69886 - DNA, 282 bp, Zea mays
gcgatttcgatctcgcagccaccttttttttgttctgttgtgtatctagtagttggaggagatatgcagtttgcacttgcattggacacgaactcaggtcctcaccagataagatcttgtgagggtgatgggattgacaggttggaaaaattaagtattgggggcagaaagcaggagaaagctttgagaaataggtgctttggtggtagagttgctgcaactacacaatgtattcttacctcagatgcttgtcctgaaactcttcattctcaaacacagtcc

SEQ ID NO: 69887 - DNA, 279 bp, Zea mays
cgaggatccacttcatgctctcctcctacgcaccggtgatctcttctgcgaaggccttccacgagcagctgtctgtggcggagatcaccagcagcgcgttcgagccggcttccatgatggtcaagtgcgacccacggcacggcaagtacatggcttgctgcctgatgtaccgcggcgacgtctctgcccaaggacgtgaacgccgcggtggccaccatcaagacgaagcgcaccatccagttcgtggactggtgcccgacggggttcaagtgcggcatc

SEQ ID NO: 69888 - DNA, 278 bp, Zea mays
caactagcaacatagaaagcacaatagtgtaccaacaatggcagccaaaatattttgcttccttatgctccttggtctttctgcaagtgttgctaccgcaaccattttcccacaatgctcacaagctcctatagcttcccttcttcccccatacctctcaccagcggtgtcttcaatgtgtgaaaccccacttgttcaaccctacaggatccaacaggcaatcgcaacaggcatcttaccattatcacccttgttcctccaacaaccgtcagccctat

SEQ ID NO: 69889 - DNA, 255 bp, Zea mays
gcgaacgcactagcaacgacctaacaccaatggctaccaagatattagccctccttgcgcttcctgcccttttagtgagcgcaacaaatgcgttcattattccacagtgctcaattgctcctagtgccagtattccacagttcctcccaacagttaactcaatgggcttcgaacatccagccgtgcaagcctacaggctacaactagcgcttgcggcgagcgccttacaacaaccaatttgccaattgcaacaac

SEQ ID NO: 69890 - DNA, 280 bp, Zea mays
gctgcttgcatccaacccacttgctttggcaaacgtagctgcataccaacaacaacaacagttgcaacagtttctaccagcgctcagtcaactagccatggtgaaccctatcgcctacctacaacagcaacaacttctttcatctagcccgctcgctatgggcaatgcacctacatacctgcaacaacagttgttgcaacaacagttgctgcaacaaattgtaccagctcttactcagctagctgtggcaaaccctgctgcctacttgcaacaactactt

SEQ ID NO: 69891 - DNA, 278 bp, Zea mays
ctcacgcagatgacctttggctacagcagggatgatgtggggaagttcatccccatttatctggctcagggcatcctccagcatgaccccttcgaggttctcgaccagagaggagtgggcgagctggttaagcttgctacagagaggggccgcaaagctaggcctaacttgaaggtgggcatttgtggagaacatggtggagagccttcatcggttgctttcttcgccaagactgggctggattacgtttcttgctcccctttcagggtcccgatcgc

SEQ ID NO: 69892 - DNA, 281 bp, Zea mays
  unsure (1)..(281): unsure at all n locations
tgagcattcagaaacacacctagcgaacgnactagcaacgacctaacaacaatggctaccaagatattatccctctttgcgcttcttgccctttttgtgagcgcaacaaatgcgttcattattccacaatgctcacttgctcctagtgccattattccacagttcctccctccagttacttcaatgggcttcgaacacccagctgtgcaagcctacaggctacaacaagcgcttgcggcgagcgtcttacaacaaccaattgcccaattacaacaacaatc

SEQ ID NO: 69893 - DNA, 281 bp, Zea mays
agcaaaatacatagtgaagtacactagcaacatcttagcaccaatgggagccaagattttttccctccttgccctccttgctctttcagcaagcgctgctacctctactattattccacaatgctcacaacaatacctctctccggtgacagccgcgggatttcaacacccaactatacaatcctacatgctacatgaggccatcgtagcaagcatcttacggtcattagcattaaccctccaacagccatatgccctattgcaacaaccatccttagtgc

SEQ ID NO: 69894 - DNA, 285 bp, Zea mays
aatattttcagcattcaaaaacacaccaagcgaagcgcactagcaacgacctaacaccaatggctaccaagatattagccctccttgcgcttcttgcccttttagtgagcgcaacaaatgcgttcattattccacagtgctcacttgctcctagtgccattattccacagttcctcccaccagttacttcaatgggcttcgaacatccagccgtgcaagcctacaggctacaactagcgcttgcggcgagcgccttacaacaaccaattgcccaattgcaacaac

SEQ ID NO: 69895 - DNA, 271 bp, Zea mays
attgagaccaactagcaacatagaaagcacaatagtgtaccaacaatggcagctaaaatattttgcctccttatgctccttggtctttctgcaagtgctgctacggcgaccattttcccacaatgctcacaagctcctatagcttcccttcttcccccgtacctctcaccaacggtgtcttcggtatgtgaaaacccaattcttcaaccctacaggatccaacaggcaatcgcagctggcatcttacctttatcacccttgttcctccaac

SEQ ID NO: 69896 - DNA, 273 bp, Zea mays
tcttgctccgcaaaccagcgcaagcccttccctgacagcggcggcgacatggtgctcgaggcgacgatgatctgcatagacaactcggagtggatgcggaacggcgactacgccccgtcgcggttccaggcgcaggccgatgccgtcaacctcatatgcggtgccaagacccagtcgaacccggagaacacagtaggcgtgatgacgatggccgggaagggcgtccgcgtgcttgtcactcccaccagcgacctcgggaagattctcgcctgt

SEQ ID NO: 69897 - DNA, 274 bp, Zea mays
caacaagcaacatagaaagtggaatccagtagcaacaacagagcaacaatggcgaccaagatattttccctccttatgctccttgctctttctgcatgtgttgctaacgcgacaattttccctcaatgctcacaagctcctatagcttcccttcttcccccataccttccatcaatgatagcttcagtatgtgaaaacccagctcttcagccctataggctccaacaagcaatcgcagcaagcaacatacctttatcacccttgttgtttcaac

SEQ ID NO: 69898 - DNA, 275 bp, Zea mays
gctgcatatgtgcaggttttagtgagattatggtaaccctttccaaaactgggttctttgatgctgcaaatcatccactgctgcaagatactagtcgtccaacatataagggtttccttgatgaactactgaataatatctccacaattaacacggacttagatattgaagcctctggtggatacgatgatgacctgattgccagactgttgaagctcgggtgttgcaaaaataaggaaatagctgttaagacagtcaaaaccatcaagttcttg

SEQ ID NO: 69899 - DNA, 277 bp, Zea mays
caacaagcaacatagaaagtggaatccagtagcaacaacagagcaacaatggcgaccaagatattttccctccttatgctccttgctctttctgcatgtgttgctaacgcgacaattttccctcaatgctcacaagctcctatagcttcccttcttcccccataccttccatcaatgatagcttcagtatgtgaaaacccagctcttcagccctataggctccaacaagcaatcgcagcaagcaacatacctttatcacccttgttgtttcaacaat

SEQ ID NO: 69900 - DNA, 279 bp, Zea mays
ccagcaagcaacatagaaagtagaatccattagcaacaatagagcaacaatggcgaccaagatattttccctccttatgctccttgctctttctacatgtgttgctaacgcgacaattttccctcaatgctcacaagctcctatagcttcccttcttcccccataccttccatcaattatagcttcagtatgtgaaaacccagctcttcaaccatataggcttcaacaagcaatcgcagcaagcaacatacctttatcgcccttgttgtttcaacaatc

SEQ ID NO: 69901 - DNA, 279 bp, Zea mays
tctcgagccgattcggctcgagcagaaacacaccaagcgaacgcacattgcaacaacctaacaacaatggctaccaagatattatccctccttgcgcttcttgcgctttttgcgagcgcaacaaatgcgtccattattccacaatgctcacttgctcctagttccattattccacagttcctcccaccagttacttcaatggccttcgaacacccagctgtgcaagcctataggctacaacaagcgattgcggcgagcgtcttacaacaaccaattgcc

SEQ ID NO: 69902 - DNA, 282 bp, Zea mays
caactagcaacatagaaagcacaatagtgtaccaacaatggcagccaaaatattttgcttccttatgctccttggtctttctgcaagtgttgctaccgcaaccattttcccacaatgctcacaagctcctatagcttcccttcttcccccatacctctcaccagcggtgtcttcaatgtgtgaaaacccgattgttcaaccctacaggatccaacaggcaatcgcaacaggcatcttaccattatcacccttgttcctccaacaaccgtcagccctattaca

SEQ ID NO: 69903 - DNA, 274 bp, Zea mays
tgggtcagtgcgtcgagttcctgaggcatcagtgcagcccgacggcgacgccctactgctcgcctcagtgccagtcgttgcggcagcagtgttgccagcagctcaggcaggtggagccgcagcaccggtaccaggcgatcttcggcttggtcctccagtccatcctgcagcagcagccgcaaagcggccaggtcgcggggctgttggcggcgcagatagcgcacaactgacggcgatgtgcggcctgcagcagccgactccatgaccctacgct

SEQ ID NO: 69904 - DNA, 274 bp, Zea mays
ctcgagccgctcgagccgcaccaagcgaagcgcactagcaacgacctaacaccaatggctaccgagatattagccctccttgcgcttcttgcccttttagtgagcgcaacaaatgcgttcattattccacagtgctcaattgctcctagtgccagtattccacagttcctcccaccaggttaattcaatgggcttcgaacatccagccgtgcaagcctacaggctacaactagcgcttgcggcgagcgccttacaacaaccaattgcccaattg

SEQ ID NO: 69905 - DNA, 268 bp, Zea mays
gaaacacaccaagcgaagctacctagcaacgacttaacaacaatggctaccaagatattagccctccttgcgcttcttgccctttttgtgagcgcaacaaatgcgttcattattccacaatgctcacttgctcctagtgccattataccacagttcctccgaccagttacttcaatggctctcgaacacctagctgtgcaagcctacaggctacaacaagcgcttgcggcgagcgtcttacaacaaccaattaaccaattgcaacaac

SEQ ID NO: 69906 - DNA, 201 bp, Zea mays
  unsure (1)..(201): unsure at all n locations
attttcagcattcaaaaacacaccaagcgaacgnactagcaacgcctaacaccaatggctacaagatattagcctcctgcgctctgcctttatgacgcacaatcgtcatatcacagtgtattgtctatgatatcaagtctccacagtaccatggtcgcatcacggcactaagtaactacgtcgcgacgctcacacatccat

SEQ ID NO: 69907 - DNA, 274 bp, Zea mays
caactagcaacatagaaagcacaatagtgtaccaacaatggcagccaaaatattttgcctccttatgctccttggtctttctgcaagtgctgctacggcgaccattttcccgcaatgctcgcaagctcctatagcttcccttcttcccccgtacctctcaccagcggtgtcttcggtatgtgaaaacccaattcttcaaccctacaggatccaacaggcaatcacagctggcatcttacctgtatcacccttgttcctccaacaatcatcagcc

SEQ ID NO: 69908 - DNA, 271 bp, Zea mays
ccgcagcaccggtaccaggcgatcttcggcttggtcctccagtccatcctgcagcagcagccgcaaagggccaggtcgcggggctgttggcggcgcagatagcgcacaactgacggcgatgtgcggcctgcagcagccgactccatgcccctacgctgctgccaccggtgtcccccactgaagaaactatgtgctgtagtatagccgctggctagctagctagttgagtcatttagcggcgatgattgagtaataatgtgtcacgcatcac

SEQ ID NO: 69909 - DNA, 274 bp, Zea mays
ccagcactgagccaactagctgtggtgaaccctgtcgcctacttgcaacagcagttgcttgcatccaacccacttgctctggcaaacatagttgcataccaacaacaacaacaattgcaacagtttctaccagcgctcagtcaactagccatggtgaaccctgccgcctacctacaacagcaacaactgatttcatctagccctctcgctgtggttaatgcacctacatacctgcaacaacagttgctgcaacagattgtaccagctctgactc

SEQ ID NO: 69910 - DNA, 277 bp, Zea mays
gcctggtataggaagaaaagggcagccgacccagctctattcaaatcactttaaagtcgctgtgaagagtacagaagacgtcttctttcactactatgtaaacctgaagtatgaggatgatcgacccgttgatggtaaagggatcggcagaaaggtgattgataaactgcagcagacatatcgtgcagagctttctaacaaggactttgcatatgatggagaaaagagcctgtttacagttggtggtcttccacaaaaaaagaatttcctcaccgtt

SEQ ID NO: 69911 - DNA, 275 bp, Zea mays
gttggcggcgcagatagcgcacaactgacggcgatgtgcggcctgcagcagccgactccatgcccctacgctgctgccggcggtgtcccccactgaagaaactatgtgctgtagtatagccgctggctagctagctagttgagtcatttagcggcgatgattgagtaataatgtgtcacgcatcaccatgggtggcagtgtcagtgtgagcaatgacctgaatgaacaattgaaatgaaaagaaaaaagtactccatctgttccaaattaaaatt

SEQ ID NO: 69912 - DNA, 277 bp, Zea mays
tagaaagcacaatagtgtaccaacaatggcagccaaaatattttgcttccttatgctccttggtctttctgcaagtgttgctaccgcaaccattttcccacaatgctcacaagctcctatagcttcccttcttcccccatacctctcaccagcggtgtcttcaatgtgtgaaaacccaattgttcaaccctacaggatccaacaggcaatcgcaacaggcatcttaccattatcacccttgttcctccaacaaccgtcagccctattacagcagtta

SEQ ID NO: 69913 - DNA, 279 bp, Zea mays
cacatttggtccaacgtttagggctgaaaattcaaacactgcaaggcatctggctgaatttggatgattgaacctgagcttgcctttgcggatctaaatgatgacatggcttgtgcaactgcatatctccagtatgtagtaaagtatattctagagaactgcaaagaggatatggatttcttcaatacatgggttgagaaaggcatcatagatcgattaaatgatgtagtagagaagaactttgttcacttgtcttacactgatgctgtcgagctacta

SEQ ID NO: 69914 - DNA, 175 bp, Zea mays
ctgaagccaatgactttggaagtgaggttattccaggtgcaaccagcattggaaagagggttcaggcttatctgtatgatggttactgggaagatatcggtaccattgcggcattttataatgcaaacttgggaataaccaagaagccaatgccagatttcagcttctatgaccg

SEQ ID NO: 69915 - DNA, 210 bp, Zea mays
  unsure (1)..(210): unsure at all n locations
atccatgactaaacgtaattncagcattcggctcgaggagaccaacaagcaacatagaaagtggaatccagtagcaacaacagagcaacaatggcgaccaagatattttccctccttatgctccttgctctttctgcatgtgttgctaacgcgacaattttccctcaatgctcacaagctcctatagcttcccttcttcccccatacctt

SEQ ID NO: 69916 - DNA, 92 bp, Zea mays
caggcagcaaggtttgctagcacaagttgttgtagttgttgtgccctgatgttttgtgcctactctcagcaacaacagtatcttccattcaa

SEQ ID NO: 69917 - DNA, 92 bp, Zea mays
cagaaacacacctagcgaagcgcactagcaacgacctaacaacaatggctaccaagatattatccctctttgcgcttcttgccctttttgtg

SEQ ID NO: 69918 - DNA, 114 bp, Zea mays
aacacaccaagcgaagtacctagcaacgacttaacaacaatggctaccaagatattagccctccttgcgcttcttgccctttttgtgagcgcaacaaatgcgttcattattcca

SEQ ID NO: 69919 - DNA, 267 bp, Zea mays
gcttcttgcgctttttgcgagcgcaacaaatgcgtccattattccacaatgctcacttgctcctagttccattattccacagttcctaccaccggttacttcaatggccttcgaacacccagctgtgcaagcctataggctacaacaagcgattgcggcgagcgtcttacaacaaccaattgcccaattgcaacaacaatccttggcacatctaacaatacaaaccatcgcaacgcaacagcaacaacagttcctaccagcactgag

SEQ ID NO: 69920 - DNA, 265 bp, Zea mays
  unsure (1)..(265): unsure at all n locations
tgagaatggcatcctccgcaagtggatctctcgttttgatgtctggccatacctggagacatacactgaggatgtttccagtgaaataatgaaaganatgcaggccaagcctgaccttatcattggcaactacagcgatggcaacctagtcgccactctgctcgcacacaagttgggagtcactcagtgtaccatcgctcatgccttggagaaaaccaaataccccaactcggacatctacttggacaagttcgacagccagtac

SEQ ID NO: 69921 - DNA, 261 bp, Zea mays
agcaacatagaaagcacaatagtgtaccaacaatggcagccaaaatattttgcctccttatgctccttggtatttctgcaagtgctgctacggcgaccattttcccgcaatgctcacaagctcctatagcttcccttcttcccccgtacctctcaccagcggtgtcttcggtatgtgaaaacccaattcttcaaccctacaggatccaacaggcaatcgcagctggcatcttacctttatcacccttgttcctccaacaat

SEQ ID NO: 69922 - DNA, 251 bp, Zea mays
cacccagctgtgcaagcctataggctacaacaagcaattgcggcgagcgtcttacaacaaccaatttcccagttgcaacaacaatccttggcacatctaacaatacaaaccatcgcaacgcaacagcaacaacaattcctaccagcactgagccacctagccatggtgacccctgccgcctacttgcaacagcagttgcttgcatcaaacccacttgctctggcaaacgtagttgcaaaccagccacaaca

SEQ ID NO: 69923 - DNA, 248 bp, Zea mays
agaccaacaagcaacatagaaagtggaatccagtagcaacaatagagcaacaatggcgaccaagatattttccctccttatgctccttgctctttctacatgtgttgctaacgcgacaattttccctcaatgctcacaagctcctatagcttcccttcttcccccataccttccatcaattatagcttcaatatgtgaaaacccagctcttcaaccatataggcttcaacaagcaatcgcagcaagca

SEQ ID NO: 69924 - DNA, 241 bp, Zea mays
ctcgagccgattgagaccaactagcaacatagaaagcacaatagtgtaccaacaatggcagccaaaatattttgcctccttatgctccttggtctttctgcaagtgctgctacggcgaccattttcccgcaatgctcgcaagctcctatagcttcccttcttcccccgtacctctcaccagcggtgtcttcggtatgtgaaaacccaattcttcaaccctacaggatccaacaggcaatca

SEQ ID NO: 69925 - DNA, 235 bp, Zea mays
caactagcaacatagaaagcacaatagtgtaccaacaatggcagccaaaatattttgcctccttatgctccttggtctttctgcaagtgctgctacggcgaccattttcccgcaatgctcgcaagctcctatagcttcccttcttcccccgtacctctcaccagcggtgtcttcggtatgtgaaaacccaattcttcaaccctacaggatccaacaggcaatcacagctggcatc

SEQ ID NO: 69926 - DNA, 269 bp, Zea mays
tgcagatcgttctgctgggcacgggcaagaagaagttcgagcgcatgctcatgagcgccgaggagaagttcccaggcaaggtgcgcgccgtggtcaagttcaacgcggcgctggcgcaccacatcatggccggcgccgacgtgctcgccgtcaccagccgcttcgagccctgcggcctcatccagctgcaggggatgcgatacggaacgccctgcgcctgcgcgtccaccggtggactcgtcgacaccatcatcgaaggcaagaccggg

SEQ ID NO: 69927 - DNA, 102 bp, Zea mays
cagaaacacaccaagcgaagcacattagcaacaacctaacaacaatggctaccaagatattatccctccttgcgcttcttgcgctttttgcgagcgcaacaa

SEQ ID NO: 69928 - DNA, 264 bp, Zea mays
ctgcgctgcgccgtccttcacctccgccgccgaatccgagactactgatctcgggttcaccgcagcgcacagagcacccccgactcccgtcccgatccgcgctctcctctacgacgcttcagtcatggcaggaatggcacccgagggttctcagtttgatgctaagcactatgattctaaaatgcaggagctgctgagcactggtgagactgaggagttcttcacttcatatgatgaagtttttgaaagttttgatgacatggg

SEQ ID NO: 69929 - DNA, 265 bp, Zea mays
gcaagcaatcgcaacaagcaacttacctttatcacacctgttctttcaacaatcgccagccctatctttggtgcagtcattggtacaaaccatcagggcagaacagttgcagcaactcgtgctaccagtgatcagccaagtagctctggaaaacttttccccctactctcagcaacaattttttcttccatacaaccaactgtctatactgaaccctgttgcttatatgcagcaacaacaactactaccattcagccagctagct

SEQ ID NO: 69930 - DNA, 264 bp, Zea mays
gaccaactagcaacatagaaagcacaatagtgtaccaacaatggcagccaaaatattttgcctccttatgctccttggtatttctgcaagtgctgctacggcgaccattttcccgcaatgctcacaagctcctatagcttcccttcttcccccgtacctctcaccagcggtgtcttcggtatgtgaaaacccaattcttcaaccctacaggatccaacaggcaatcgcagctggcatcttacctttatcacccttgttcctcca

SEQ ID NO: 69931 - DNA, 262 bp, Zea mays
attgagaccaacaagcaacatagaaagtggaatccagtagcaacaacagagcaacaatggcgaccaagatattttccctccttatgctccttgctctttctgcatgtgttgctaacgcgacaattttccctcaatgctcacaagctcctatagcttcccttcttcccccataccttccatcaatgatagcttcagtatgtgaaaacccagctcttcagccctataggctccaacaagcaatcgcagcaagcttcataccttt

SEQ ID NO: 69932 - DNA, 256 bp, Zea mays
gcaagatcgagatggcatgcttcctttcagttcccttctcgagtcgagccttttattgctgtggttgatctgacagttcctgtttcgtgatcatatgattgatatcatcagatctctgatgacatgaggcctcacccgatcgtggtcagcgctctgacgatggtttgtgctgttgcgcctagttggaaggtcatacccacacctgatatcattgacaaagtctgcaaagatccagagatgaggaaagaggttcgtt

SEQ ID NO: 69933 - DNA, 257 bp, Zea mays; identical to SEQ ID NO: 69713

SEQ ID NO: 69934 - DNA, 131 bp, Zea mays
attgagaccaacaagcaacatagaaagtggaatccagtagcaacaacagagcaacaatggcgaccaagatattttccctccttatgctccttgctctttctgcatgtgttgctaacgcgacaattttccct

SEQ ID NO: 69935 - DNA, 257 bp, Zea mays
cagcattcaaaaacacaccaagcgaagcgcactagcaacgacctaacaccaatggctaccaagatattagccctccttgcgcttcttgcccttttagtgagcgcaacaaatgcgttcattattccacagtgctcacttgctcctagtgccagtattccacagttcctcccaccagttacttcaatgggcttcgaacatccagccgtgcaagcctacaggctacaactagcgcttgcggcgagcgccttacaacaacc

SEQ ID NO: 69936 - DNA, 253 bp, Zea mays
ctagaattgcagccacaatattttgcctccttatgctccttggtctttctgcaagtgctgctacggcgaccattttcccgcaatgctcgcaagctcctatagcttcccttcttcccccgtacctctcaccagcggtgtcttcggtatgtgaaaacccaattcttcaaccctacaggatccaacaggcaatcacagctggcatcttacctttatcacccttgttcctccaacaatcatcagccctattacatca

SEQ ID NO: 69937 - DNA, 123 bp, Zea mays
caactagcaacatagaaagcacaatagtgtaccaacaatggcagccaaaatattttgcttccttatgctccttggtctttctgcaagtgttgctaccgcaaccattttcccacaatgctcaca

SEQ ID NO: 69938 - DNA, 264 bp, Zea mays
tagcaacatagaaagcacaatagtgtaccaacaatggcagccaaaatattttgcttccttatgctccttggtctttctgcaagtgttgctaccgcaaccattttcccacaatgctcacaagctcctatagcttcccttcttcccccatacctctcaccagcggtgtcttcaatgtgtgaaaacccaattgttcaaccctacaggatccaacaggcaatcgcaacaggcatcttaccattatcacccttgttcctccaacaaccg

SEQ ID NO: 69939 - DNA, 97 bp, Zea mays
gcttcctttcttcccccatacctctcaccagcggtgtcttcagtatgtgaaaacccaattcttcaaccctacaggatccaacaggcaatcgcagcag

SEQ ID NO: 69940 - DNA, 259 bp, Zea mays
cagaaacacaccaagcgaagcacattagcaacaacctaacaacaatggctaccaagatattatccctccttgcgcttcttgcgctttttgcgagcgcaacaaatgcgttcattattccacaatgctcacttgctccaagttccattattacacagttcctcccaccagttacttcaatgggcttcgaacacccagctgtgcaagcctaggggctacaacaagtaatggcggcgagcgtcttacaacaataccttcccag

SEQ ID NO: 69941 - DNA, 263 bp, Zea mays
gagaccaacaagcaacatagaaagtggaatccagtagcaacaacagagcaacaatggcgaccaagatattttccctccttatgctccttgctctttctgcatgtgttgctaacgcgacaatttcccctcaatgctcacaagctcctatagcttcccttcttcccccataccttccatcaatggtagcttcagtatgtgaaaacccagctcttcagccctataggctccaacaagcaatcgcagcaagcaacatacctttatca

SEQ ID NO: 69942 - DNA, 130 bp, Zea mays
agcgaaggcactagcaacgacctaacaccaatggctaccaagatattagccctccttgcgcttcttgcccttttagtgagcgcaacaaatgcgttcattattccacagtgctcacttgctcctagtgcca

SEQ ID NO: 69943 - DNA, 257 bp, Zea mays
caacaagcaacatagaaagtggaatccagtagcaacaacagagcaacaatggcgaccaagatattttccctccttatgctccttgctctttctgcatgtgttgctaacgcgacaattttccctcaatgctcacaagctcctatagcttcccttcttcccccataccttccatcaatgatagcttcagtatgtgaaaacccagctcttcagccctataggctccaacaagcaatcgcagcaagcaacatacctttatc

SEQ ID NO: 69944 - DNA, 253 bp, Zea mays
attgagaccaactagcaacatagagagcacaatagtgtaccaacaatggcagccaaaatattttgcctccttatgctccttggtctttctgcaagtgctgctacggcgaccattttcccgaaatgctcgcaagctcctatagcttcccttcttcccccgtacctctcaccagcggtgtcttcggtatgtgaaaacccaattcttcaaccctacaggatccaacaggcaatcacagctggcatcttacctttca

SEQ ID NO: 69945 - DNA, 254 bp, Zea mays
cagcattcaaaaacacaccaagcgaagcgcactagcaacgacctaacaccaatggctaccaagatattagccctccttgcgcttcttgcccttttagtgagcgcaacaaatgcgttcattattccacagtgctcacttgctgcctagtgccagtattccacagttcctcccaccagttacttcaatgggcttcgaacatccagccgtgcaagcctacaggctacaactagcgcttgcggcgagcgccttacaac

SEQ ID NO: 69946 - DNA, 118 bp, Zea mays
gctgggttttcacatactgaagctatcattgatggaaggtatgggggaagaagggaagctataggagcttgtgagcattgagggaaaattgtcgcgttagcaacacacctttatcacc

SEQ ID NO: 69947 - DNA, 239 bp, Zea mays
attgagaccaactagcaacatagaaagcacaatagtgtaccaacaatggcagccaaaatattttgcttccttatgctccttggtctttctgcaagtgttgctaccgcaaccattttcccacaatgctcacaagctcctatagcttcccttcttcccccatacctctcaccagcggtgtcttcaatgtgtgaaaacccaattgttcacccctacaggttccaacaggcaatcgcaacagg

SEQ ID NO: 69948 - DNA, 204 bp, Zea mays
attgagaccaactagcaacatagaaagcacaatattgtaccaataatggcagccaaaatattttgcctcattatgctccttggtctttctgcaagtgctgctacggcgagcattttcccgcaatgctcacaagctcctatagcttcccttcttcccccatacctctcaccagcgatgtcttcagtatgtgaaaatccaattctt

SEQ ID NO: 69949 - DNA, 258 bp, Zea mays
cccaaccaaaccctaaattcgccgccctcagctccggtcagaccctcccccttcgaagatgccgaacctcgagtgccggatgtatgagcagcggttcccggaggtggatgccgcggtgatgatccaggtgaagcacatcgctgacatgggcgcgtacgtctccctgctcgagtacaacaacatcgagggcatgatcctcttctccgagctctcccgccgtcgtatccgctccatctcctccctcatcaaggttggtcg

SEQ ID NO: 69950 - DNA, 261 bp, Zea mays
tattattgagaccaactagcaacatagaaagcacattattgtaccaataatggcagccacaatattttgcctcattatgctccttggtctttctgcaagtgctgctacggcgagcattttcccgcaatgctcacaagctcctatagcttcccttcttcccccatacctctcaccagcgatgtcttgagtatgtgaaaatccaattcttctaccctacaggatccaacaggcaatcgcagcaggcatcttacctttatcacc

SEQ ID NO: 69951 - DNA, 260 bp, Zea mays
agcaacatagaaagcacaatagtgtaccaacaatggcagccaaaatattttgcctccttatgctccttggtctttctgcaagtgctgctacggcgaccattttcccgcaatgctcgcaagctcctatagcttcccttcttcccccgtacctctcaccagcggtgtctgcggtatgtgaacccccttttcttccacccgacaggatccggcatgcaatcacagctggcatcttacctatcaccagcttgttcctccaacaa

SEQ ID NO: 69952 - DNA, 228 bp, Zea mays
tagcaacatagaaagcacaatagtgtaccaacaatggcagccaaaatattttgcctccttatgctccttggtctttctgcaagtgctgctacggcgaccattttcccacaatgctcacaagctcctatagcttcccttcttcccccgtacctctcaccagcggtgtcttcggtatgtgaaaacccaattcttcacccctataggctccaagaggatctcgctggggac

SEQ ID NO: 69953 - DNA, 256 bp, Zea mays
ttgagaccaactagtaacatagaaagcacaatagtgtaccaacaatggcagccaaaatattttgcttccttatgctccttggtctttctgcaagtgttgctaccgcaaccattttcccacaatgctcacaagctcctatagcttcccttcttcccccatacctctcaccagcggtgtcttcaatgtgtcaaaccccaattgttcaaccctacaggatccaacaggcaatcgcaacaggcatcttaccattatcacc

SEQ ID NO: 69954 - DNA, 252 bp, Zea mays
tgtacccctacgcggagtacctgaggcagccgcagtgcagcccgctggcggcggcgccctactacgccgggtgtgggcagccgagcgccatgttccagccgctccggcaacagtgctgccagcagcagatgaggatgctggacgtgcagtccgtcgcgcacagctgcagatgatgatgcagcttgagcgtgccgctgccgccagcagcagcctgtacgagccagctctgatgcagcagcagcagcagctgct

SEQ ID NO: 69955 - DNA, 126 bp, Zea mays
gcaacatagaaagtggaatccagtagcaacaacagagcaacaatggcgaccaagatattttccctccttatgctccttgctctttctgcatgtgttgctaacgcgacaattttccctcaatgctca

SEQ ID NO: 69956 - DNA, 241 bp, Zea mays
acagtgctcacttgctcctagtgccattattccacagttcctcccaccagttacttcaatgggcttcgaacatccagccgtgcaagcctacaggctacaactagcgcttgcggcgagcgccttacaacaaccaattgcccaattgcaacaacaatccttggcacttctacccctaaacattgttgcggcgcaacaacaacaacaacatagtttctgccatcactgagccacctagccgtgg

SEQ ID NO: 69957 - DNA, 159 bp, Zea mays
tgagcattcagaaacacaccaagcgaagcacattagcaacaacctaacaacaatggctaccaagatattatccctccttgcgcttcttgcgctttttgcgagcgcaacaaatgcgttcattattccacaatgctcacttgctccaagttccattattac

SEQ ID NO: 69958 - DNA, 253 bp, Zea mays
aagcaacatagaaagtggaatccagtagcaacaatagagcaacaatggcgaccaagatattttccctccttatgctccttgctctttctacatgtgttgctaacgcgacaattttccctcaatgctcacaagctcctatagcttcccttcttcccccataccttccatcaattatagcttcaatatgtgaaaacccagctcttcaaccatataggcttcaacaagcaatcgcagcaagcaacatacctttatc

SEQ ID NO: 69959 - DNA, 253 bp, Zea mays
ctcgagccgctagcaacatagaaagcacaatagtgtaccaacaatggcagccaaaatattatgcttccttatgctccttggtctttctgcaagttttgctaccgcaaccattttcccacaatgctcacaagctcctatagcttcccttcttcccccatacctctcaccagcggtgtcttcaatgtccgaaaccccaattgttcaaccctacaggatccaacaggcaatcgcaacaggcatcttaccattatca

SEQ ID NO: 69960 - DNA, 222 bp, Zea mays
acccatattatttataccaactaccaacatacatagtgaagtacactagcaacatcttagcaccaatggcagccaagatttttgcgctccttgccctccttgctctttcagcaagtgttgctaccgcgactattattccacaatgctcacaacaatacctctctccagtgatagccgcgagatttgaatacccatctatacaatcctacaggctacaggagg

SEQ ID NO: 69961 - DNA, 260 bp, Zea mays
gagcgaggaggaggccacccgcaggcacagcagcagggacggtcctctggagggtacggacggtgtactcagcaatcacctcaggggtcaccttcttggagtcggagcctggagtcaccatgttgggcttcaggagggtaccctccaggaggacatggtgctcgttgagcgccttgtagcaggcagcaaggacggtctcagtgacgtaagcgcagcgatgcaatgtcatgagggccatcaacaaggatctcaggctcaac

SEQ ID NO: 69962 - DNA, 252 bp, Zea mays
tgttgctatcaacttgtatcctaccaaaggactaaaaggagcttttgataaagctgaggaaatagtcctgagaacaccaaatgcgtatatgtttcagcagttcaacaatgaggcaaatagtgagatccactttcaaaccacaggcccagaaatatgggaagacacggggggttctgtagatatacttgttgcaagcataggaacaggcggtaccattagtggcactgggcgttacttgaaaaggatgaacaa

SEQ ID NO: 69963 - DNA, 259 bp, Zea mays
gagaccagcaagcaacatagaaagtagaatccattagcaacaatagagcaacaatggcgaccaagatattttccctccttatgctccttgctctttctacatgtgttgctaacgcgacaattttccctcaatgctcacaagctcctatagcttcccttcttcccccataccttccatcaattatagcttcagtatgtgaaaccccagctgcacaaccatagaggcttcaacaagcaatcgcagcaagcaacataccttt

SEQ ID NO: 69964 - DNA, 257 bp, Zea mays
gaccaacaagcaacatagaaagtggaatccagtagcaacaatagagcaacaatggcgaccaagatatgttccctccttatgctccttgctctttctacatgtgttgctaacgcgacaattttccctcaatgctcacaagctcctatagcttcccttcttcccccataccttccatcaattatagcttcaatatgtgaaaacccagctcttcaaccatataggcttcaacaagcaatcgcagcaagcaacataccttt

SEQ ID NO: 69965 - DNA, 125 bp, Zea mays
tccattggactgcttgctccctgttgaccattgggtattctgaaccatcgagccatggctgccaagctgactcgcctccacagtcttcgcgaacgccttggtgccaccttctcctcccatcccaa

SEQ ID NO: 69966 - DNA, 248 bp, Zea mays
gcaacatagaaagcacaatagtgtaccaacaatggcagccaaaatattttgcctccttatgctccttggtatttctgcaagtgctgctacggcgaccattttcccgcaatgctcacaagctcctatagcttcccttcttcccccgtacctctcaccagcggtgtcttcggtatgtgaaaccccaattcttcaaccctacaggatccaacaggcaatcgcagctggcatcttacctttatcacccttgt

SEQ ID NO: 69967 - DNA, 249 bp, Zea mays
ctcctatagcttcccttcttcccccataccttccatcaatgatagcttcagtatgtgaaaacccagctcttcaaccctataggctccaacaagcaatcgcagcaagcaacatacctttatcacccttgtttcaacaatcgccagccctatctttggtgcagtcattggtacaaaccatcaaggcacagcagctgcagcaactcgtgctacctgtgatcaaccaagtagctctggcaaacctttctccct

SEQ ID NO: 69968 - DNA, 124 bp, Zea mays
gctcctatagcttcccttcttcccccgtacctctcaccaacggtgtcttcggtatgtgaaaacccaattcttcaaccctacaggatccaacaggcaatcgcagctggcatcttacctttatcac

SEQ ID NO: 69969 - DNA, 210 bp, Zea mays
ctggcttcagtgctccggtaagagagcagatctacaaggtagcttcagtgaacctgtgctccaatatcactggtcaaatccttgcgagcctcgtcatgaatccaccaaaggttggggacgaatcatatgcttcctacaaggcagagaaagatggaatccttcagtctttagctcgccgtgcaaaggcactggaagatgcattcaacacgc

SEQ ID NO: 69970 - DNA, 253 bp, Zea mays
aatattttgagcattcaaaaacacacaaagggaagtgcactagcaacttcctaacaacaatggctaccaagatattagccctccttgcgctcctttccctttcagtgagcgcaacaactgcattcattattccacaatgctcacttgctgctaatgccattattccacagttcctcccatcagttacatcaatgggcatcgaacaccctattgtgcaagcctataggctacaacaagcgcttgcggcgagcgt

SEQ ID NO: 69971 - DNA, 103 bp, Zea mays
ataccaatgatgttcaatgttgttatcctttctcctcatggctacttcgctcagtccaatgtgcttggataccctgacactggcggtcaggttgtgtacattc

SEQ ID NO: 69972 - DNA, 126 bp, Zea mays
cagaaacacaccaagcgaagcacattagcaacaacctaacaacaatggctaccaagatattatccctccttgcgcttcttgcgctttttgcgagcgcaacaaatgcgttcattattccacaatgct

SEQ ID NO: 69973 - DNA, 246 bp, Zea mays
attttcagcattcaaaaacacaccaagcgaagcgcactagcaacgacctaacaccaatggctaccaagatattagccctccttgcgcttcttgcccttttagtgagcgcaacaaatgcgttcattattccacagtgctcacttgctcctagtgccagtattccacagttcctcccaccagttacttcagtgggcttcgaacatccagccgtgcaagcctacaggctacaactagcgcttgcggcga

SEQ ID NO: 69974 - DNA, 248 bp, Zea mays
cagaaacacaccaagcgaacacattagcaacaacctaacaacaatggctaccaagatattatccctccttgcgcttcttgcgctttttgcgagcgcaacaaatgcgttcattattccacaatgctcacttgctccaagttccattattacacagttcctcccaccagttacttcaatgggcttcgaacacccagctgtgcaagcctataggctacaacaagcaattgcggcgagcgtcttacaacaac

SEQ ID NO: 69975 - DNA, 246 bp, Zea mays
ctcgagccgatattttgagcattcagaaacacacctagcgaaggaactagcaacgacctaacaacaatggctaccaagatattatccctctttgcgcttcttgccctttttgtgagcgcaacaaatgcgttcattattccacaatgctcacttgctcctagtgccattattccacagttcctccctccagttacttcaatgggcttcgaacacccagctgtgcaagcctacaggctacaacaagcg

SEQ ID NO: 69976 - DNA, 99 bp, Zea mays
ctacaagcaacatagaaagtggaatccagtaagcacaacagagcaacaatggcgaccaagatattttccctccttatgctccttgctctttctgcatgt

SEQ ID NO: 69977 - DNA, 241 bp, Zea mays
cgaggcaacatagaaagtggaatccagtagcaacaacagagcaacaatggcgaccaagatattttccctccttatgctccttgctctttctgcatgtgttgctaacgcgacaattttccctcaatgctcacaagctcctatagcttcccttcttcccccataccttccatcaatgatagcttcagtatgtgaaaacccagttcttaacctctaggggctcaaacaagcaatcgcagcaagc

SEQ ID NO: 69978 - DNA, 241 bp, Zea mays
gcaacatagatagcacaatagtgtaccaacaatggcagccaaaatattttgcctccttatgctccttggtctttctgcaagtgctgctacggcgaccattttcccgcaatgctcgcaagctcctatagcttcccttcttcccccgtacctctcaccagcggtgtcttcggtatgtgaaaacccaattcttcaaccctacaggatccaacaggcaatcacagctggcatcttacctttatca

SEQ ID NO: 69979 - DNA, 242 bp, Zea mays
attttgagcattcagaaacacacctagcgaagcgcactagcaacgacctaacaacaatggcttccaagacattatccctccttgcgcttcttgccctttttgtgagtgcaacaaatgcgttcattattccacaatgctcacttgctccgagtgccattattccacagttcctccctccagttacttcgatgggcttcgaacacccagctgtgcaagcctataggctacaacaagcgcttgcg

SEQ ID NO: 69980 - DNA, 66 bp, Zea mays
tttcagcattcaaaaacacaccaagcgaaggaactagcaacgacctaacaccaatggctaccaaga

SEQ ID NO: 69981 - DNA, 237 bp, Zea mays
  unsure (1)..(237): unsure at all n locations
aatattttcagcattcaaaaacacaccaagcgaaggnactagcaacgacctaacaccaatggctaccaagatattagccctccttgcgcttcttgcccttttagtgagcgcaacaaatgcgttcattattccacagtgctcacttgctcctagtgccagtattccacagttcctcccaccagttacttcaatgggcttcgaacatccagccgtgcaagcctacaggctacaactagc

SEQ ID NO: 69982 - DNA, 237 bp, Zea mays
cagttcctaccagcactgagccacctagccatggtgaaccctgtcgcctacttgcaacagcagctgcttgcatccaacccacttgctctagcaaacgtagttgcaaaccagcaacaacaacaactgcaacagtttctgccagcgcttagtcaactagccatggtgaaccctgccgcctacctacaacagcaacaactgctttcatctagcccgctcgctgtggccaatgcacctaca

SEQ ID NO: 69983 - DNA, 259 bp, Zea mays
ccaacaagcaacatagaaagtggaatccagtagcaacaacagagcaacaatggcgaccaagatattttccctccttatgctccttgctctttctgcatgtgttgctaacgcgacaattttccctcaatgctcacaagctcctatagcttcccttcttcccccataccttccatcaatgatagcttcagtatgtgaaaacccagctcttcagccctataggctccaacaagcaatcgcagcaagcaacatacctttatca

SEQ ID NO: 69984 - DNA, 105 bp, Zea mays
gttctggaagtacgtgagcaacctggagaggcgcgagacccgccgctacattcgagatgttctacgccctgaagtaccgtagcctggcaagccaggttccgctgt

SEQ ID NO: 69985 - DNA, 251 bp, Zea mays
ttgagaccaacaagcaacatagaaagtggaatccagtagcaacaatagagcaacaatggcgaccaagatactttccctccttatgctccttgctctttctgcatgtgttgctaacgcgacaattttccctcaatgctcacaagctcctatagcttcccttcttcccccataccttccatcaatgatagcttcagtatgtgaaaacccagctcttcaaccctataggctccaacaagcaatcgcagcaagca

SEQ ID NO: 69986 - DNA, 245 bp, Zea mays
caacaagcaacatagaaagtggaatccagtagcaacaatagagcaacaatggcgaccaagatactttccctccttatgctccttgctctttctgcatgtgttgctaacgcgacaattttccctcaatgctcacaagctcctatagcttcccttcttcccccataccttccatcaatgatagcttcagtatgtgaaaacccagctcttcaaccctataggctccaacaagcaatcgcagcaagcaa

SEQ ID NO: 69987 - DNA, 243 bp, Zea mays
tgagaccaactagcaacatagaaagcacaatagtgtaccaacaatggcagccaaaatattttgcctccttatgctccttggtctttctgcaagtgctgctacggcgaccattttcccacaatgctcacaagctcctatagcttcccttcttcccccgtacctctcaccagcggtgtcttcggtatgtgaaaacccaattcttcaaccctataggatccaacaggcaatcgcagctggcatctt

SEQ ID NO: 69988 - DNA, 245 bp, Zea mays
atctaaccatacaaaccatcgcaacacaacagcaacaacagttcctaccagcactgagccaactagatgtggtgaaccctgtcgcctacttgcaacagcaggtgcttgcatccaacccacttgctctggcaaacgtagctgcataccaacaacaacaacaattgcaacagtttctgccagcgctcagtcaactagccatggtgaaccctgccgcctacctacaacagcaacaactgctttcatct

SEQ ID NO: 69989 - DNA, 240 bp, Zea mays
gccaccagatcaggcaggtggagccgctgcaccggtaccaggcgacatacggtgtggtcctgcagtccttcctgcagcagcagccgcagggcgagctcgcggcgctgatggcggcccaggtagcgcacagctgacggcgatgtgcggcctgcagctgcagcagccaggtccctgcccttgcaacgcagctgccggcggtgtctactactgaggaaactatgtactgtagtaataatgtaa

SEQ ID NO: 69990 - DNA, 241 bp, Zea mays
cgacagcacaatagtgtaccaacaatggcagccaaaatattttgcttccttatgctccttggtctttctgcaagtgttgctaccgcaaccattttcccacaatgctcacaagctcctatagcttcccttcttcccccatacctctcaccagcggtgtcttcaatgtgtgaaaccccaattgttcaaccctacaggatccaacaggcaatcgcaacaggcatcttaccattatcacccttgt

SEQ ID NO: 69991 - DNA, 128 bp, Zea mays
caacaaatgcgttcattattccacagtgctcacttgttgccctcactaaaagggcaagaagcgcaaggagggctaatatcttggtagccattggtgataggtcgttgctagtgcgcttcttgcccttt

SEQ ID NO: 69992 - DNA, 256 bp, Zea mays
ctcgagcgctcactagatgtggaattggacggctgttgttgtatgactacgacacggtcgagttggctaacatgaataggttgttctttcgcccagaacaggttggaatgaccaaaacagatgctgctgtacagacactttctggaataaatcctgatgttgtgttggagagctactcattgaatattactacagtcaaaggtttcgaaacatttttggcaagtttaaaagcacaaagttctcatgagcgtacact

SEQ ID NO: 69993 - DNA, 257 bp, Zea mays
catagaaagcacaatagtgtaccaacaatggcagccaaaatattttgcctccttatgctccttggtctttctgcaagtgctgctacggcgaccattttcccgcaatgctcgcaagctcctatagcttcccttcttcccccgtacctctcaccagcggtgtcttcggtatgtgaaaacccaattcttcaaccctacaggatccaacaggcaatcgcagctggcatcttacctttatcacccttgttcctccaacaatc

SEQ ID NO: 69994 - DNA, 244 bp, Zea mays
cagaaacacaccaagcgaacacattagcaacaacctaacaacaatggctaccaagatattatccctccttgcgcttcttgcgctttttgcgagcgcaacaaatgcgttcattattccacaatgctcacttgctccaagttccattattacacagttcctcccaccagttacttcaatgggcttcgaacacccagctgtgcaagcctataggctacaacaagcaattgcggcgagcgtcttacaa

SEQ ID NO: 69995 - DNA, 264 bp, Zea mays
agcaacatagacagcacaatagtgtaccaacaatggcagccaaaatattttgcctccttatgctccttggtatttctgcaagtgctgctacggcgaccattttcccgcaatgctcacaagctcctatagcttcccttcttcccccgtacctctcaccagcggtgtcttcggtatgtgaaaacccaattcttcaaccctacaggatccaacaggcaatcgcagctggcatcttacctttatcacccttgttcctccaacaatcat

SEQ ID NO: 69996 - DNA, 265 bp, Zea mays
gacagatcctgttaagttatctagtgcacatgcatggtcgtctgaggtctttgagacaaggacaggtgcatgtgggcccgataccttgcgaggttctgccacagtgcaacactatatcagggatctgaagtgcccccgaggctccttgttgtatggtggcagtgacgaagatgacttcctttactgtctgccagacaacaaagagatacatgtctgccaggaaatgatggtcaatataggatatccgaagcttgaacttggctta

SEQ ID NO: 69997 - DNA, 230 bp, Zea mays
agaccattagctttatctactccagagcgcagaagaacccgatcgacaccatgagggtgttgctcgttgccctcgctctcctggctctcgctgcgagcgccacctccacgcatacaagcggcggctgcggctgccagccaccgccgccggttcatctaccgccgccggtgcatctgccacctccggttcacctgccacctccggtgcatctcccaccgccggtccacctg

SEQ ID NO: 69998 - DNA, 257 bp, Zea mays
cagtccccaccccgaccggctgctcctcctcctttccccgcgccatcctcgaggcatcaccggcgccgcaacttcgttgaggaggaagcccgcacccgcccccgatccgatggccaacagcaacctcccgcggcggatcatcaaggagacgcagcgactgctcagcgagccagcgccggggatcagcgcgtcgccctcggaggagaacatgcgctacttcaacgttatgatccttgggccggcgcagtcgccctatg

SEQ ID NO: 69999 - DNA, 261 bp, Zea mays
atcgcaacgcaacagcaacaacaattcctaccagcactgagccacctagccatggtgaaccctgccgcctacttgcaacagcagttgcttgcatcaaacccacttgctctggcaaacgtagttgcaaaccagccacaacaacagctgcaacagtttctgccagcgctcagtcaactagccatggtgaaccctgccgcctacctacaacagcaacaactgctttcatctagcccgctcgctgtggccaatgcacctacatac

SEQ ID NO: 70000 - DNA, 262 bp, Zea mays
tagcaacatagaaagcacaatagtgtaccaacaatggcagccaaaatattttgcctccttatgctccttggtctttctgcaagtgctgctacggcgaccattttcccgcaatgctcgcaagctcctatagcttcccttcttcccccgtacctctcaccagcggtgtcttcggtatgtgaaaacccaattcttcaaccctacaggatccaacaggcaatcacagctggcatcttacctttatcacccttgttcctccaacaat

SEQ ID NO: 70001 - DNA, 248 bp, Zea mays
ttcagaaacacaccaagcgaagacattagcaacaacctaacaacaatggctaccaagatattatccctccttgcgcttcttgcgctttttgcgagcgcaacaaatgcgttcattattccacaatgctcacttgctccaagttccattattacacagttcctcccaccagttacttcaatgggcttcgaacacccagctgtgcaagcctataggctacaacaagcaattgcggcgagcgtcttacaaca

SEQ ID NO: 70002 - DNA, 246 bp, Zea mays
tgccattttacccacaggttgtgggaaacattaacgccttcttgcaacagcaacagttgctaccattctacccacaggatgtggcaaacaatgtcgccttcttacaacaacaacaattgctgccatttaaccaacttgctttgacgaatcctaccaccttattgcagcagcccaccattggtggtgccatcttctagatttttttatgctttatactgtaataataaagttctcatactgatatgt

SEQ ID NO: 70003 - DNA, 245 bp, Zea mays
attgagaccaactagcaacatagaaagcacaatagtgtaccaacaatggcagccaaaatattttgcttccttatgctccttggtctttctgcaagtgttgctaccgcaaccattttcccacaatgctcacaagctcctatagcttcccttcttcccccatacctctcaccagcggtgtcttcaatgtgtgaaaacccaattgttcaaccctacaggatccaacaggcaatcgcaacaggcatctt

SEQ ID NO: 70004 - DNA, 235 bp, Zea mays
attgagaccaacaagcaacatagaaagtggaatccagtagcaacaacagagcaacaatggcgaccaagatattttccctccttatgctccttgctctttctgcatgtgttgctaacgcgacaattttccctcaatgctcacaagctcctatagcttcccttcttcccccataccttccatcaatgatagcttcagtatgtgaaaacccagctcttcagccctataggctccaaca

SEQ ID NO: 70005 - DNA, 237 bp, Zea mays
attttcagcattcaaaaacacaccaagcgaacgcatctagcaacgacctaacaccaatggctaccaagatattagccctccttgcgcttcttgcccttttagtgagcgcaacaaatgcgttcattattccacagtgctcacttgctcctagtgccattattccacagttcctcccaccagttacttcaatgggcttcgaacatccagccgtgcaagcctacaggctacaactagcgc

SEQ ID NO: 70006 - DNA, 261 bp, Zea mays
caactagcaacatagaaagcacaatagtgtaccaacaatggcagccaaaatattttgcctccttatgctccttggtctttctgcaagtgctgctacggcgaccattttcccacaatgctcacaagctcctatagcttcccttcttcccccgtacctctcaccagcggtgtcttcggtatgtgaaaacccaattcttcaaccctataggatccaacaggcaatcgcagctggcatcttacctttatcacccttgttcctcca

SEQ ID NO: 70007 - DNA, 258 bp, Zea mays
cagttcctaccagcactgagccacctagccatggtgaaccctgtcgcctacttgcaacagcagctgcttgcatccaacccacttgctctagcaaacgtagttgcaaaccagcaacaacaacaactgcaacagtttctgccagcgcttagtcaactagccatggtgaaccctgccgcctacctacaacagcaacaactgctttcatctagcccgctcgctgtggccaatgcacctacatacctgcaacaagaattgttg

SEQ ID NO: 70008 - DNA, 253 bp, Zea mays
ctcgagccgttcagaaacacacctagcgaggcactagcaacgacctaacaacaatggctaccaagatattatccctctttgcgcttcttgccctttttgtgagcgcaacaaatgcgttcattattccacaatgctcacttgctcctagtgccattattccacagttcctccctccagttacttcaatgggcttcgaacacccagctgtgcaagcctacaggctacaacaagcgcttgcggcgagcgtcttaca

SEQ ID NO: 70009 - DNA, 238 bp, Zea mays
gcgatttcgatctcgcagccaccttttttttgttctgttgtgtatctagtagttggaggagatatgcagtttgcacttgcattggacacgaactcaggtcctcaccagataagatcttgtgagggtgatgggattgacaggttggaaaaattaagtattgggggcagaaagcaggagaaagctttgagaaataggtgctttggtggtagagttgctgcaactacacaatgtattctta

SEQ ID NO: 70010 - DNA, 238 bp, Zea mays
ggtagccattgttgttaggtcgttgctagtgcgcttcgcttggtgtgagcgcaacaaatgcgttcattattccacaatgctcacttgctcctagtgccattattccacagttcctcccaccagttacttcaatgggcttcgaacacctagctgtgcaagccaacatgcaacaacaagcgcttgcggcgagcgtcttacaacaaccaattgcccaattgcaacaacaatccttgccaca

SEQ ID NO: 70011 - DNA, 240 bp, Zea mays
gcaacatagaaagcacaatagtgtaccaacaatggcagccaaaatattttgcctccttatgctccttggtctttctgcaagtgctgctacggcgaccattttcccgcaatgctcgcaagctcctatagcttcccttcttcccccgtacctctcaccagcggtgtcttcggtatgtgaaaacccaattcttcaaccctacaggatccaacaggcaatcacagctggcatcttacctttatc

SEQ ID NO: 70012 - DNA, 236 bp, Zea mays
cagaaacacaccaagcgaacacattagcaacaacctaacaacaatggctaccaagatattatccctccttgcgcttcttgcgctttttgcgagcgcaacaaatgcgttcattattccacaatgctcacttgccccaagttccattattacacagttcctcccaccagttacttcaatgggcttcgaacacccagctgtgcaagcctataggctacaacaagcaattgcggcgagcg

SEQ ID NO: 70013 - DNA, 246 bp, Zea mays
gaccaacaagcaacatagaaagtggaatccagtagcaacaatagagcaacaatggcgaccaagatattttccctccttatgctccttgctctttctacatgtgttgctaacgcgacaattttccctcaatgctcacaagctcctatagcttcccttcttcccccataccttccatcaattatagcttcaatatgtgaaaacccagctcttcaaccatataggcttcaacaagcaatcgcagcaagc

SEQ ID NO: 70014 - DNA, 254 bp, Zea mays
ccttgctctttctgcatgtgttgctaacgcgacaattttccctcaatgctcacaagctcctatagcttcccttcttcccccataccttccatcaatgatagcttcagtatgtgaaaacccagctcttcaaccctataggctccaacaagcaatcgcagcaagcaacatacctttatcacccttgtttcaacaatcgccagccctatctttggtgcagtcattggtacaaaccatcaaggcacagcagctgcagc

SEQ ID NO: 70015 - DNA, 56 bp, Zea mays
ggttaataaaagaggcaatgctagcctgccctttcgatgaggaggtacatacacgc

SEQ ID NO: 70016 - DNA, 248 bp, Zea mays
cgggggatgaaatcaaagagatcgttattgatgacatggatcctgtagtgttcaaggctgtgcttcattttatctacagggacaatcttgttaatgatgacgagttgtctgcatcaagctctgactgctctatctttgatcgtttgtccgggaagttaatggctgcagcagacaaatatgagttgccaaggttaagattgttgtgtgaatcttacttgtgcaagcatatttctgtaaattccgtggca

SEQ ID NO: 70017 - DNA, 247 bp, Zea mays
gcaacatagaaagcacaatagtgtaccaacaatggcagccaaaatattttgcttccttatgctccttggtctttctgcaagtgttgctaccgcaaccattttcccacaatgctcacaagctcctatagcttcccttcttcccccatacctctcaccagcggtgtcttcaatgtgtgaaaccccaattgttcaaccctacaggatccaacaggcaatcgcaacaggcatcttaccattatcacccttg

SEQ ID NO: 70018 - DNA, 249 bp, Zea mays
gtgtaccaacaatggcagccaaaatattttgcttccttatgctccttggtctttctgcaagtgttgctaccgcaaccattttcccacaatgctcacaagctcctatagcttcccttcttcccccatacctctcaccagcggtgtcttcaatgtgtgaaaacccaattgttcaaccctacaggatccaacaggcaatcgcaacaggcatcttaccattatcacccttgttcctccaacaaccgtcagccc

SEQ ID NO: 70019 - DNA, 237 bp, Zea mays
cagaaacacaccaagcgaagccactagcaacaacctaacaacaatggctaccaagatattatccctccttgcgcttcttgcgctttttgcgagcgcaacaaatgcgtccattattccacaatgctcacttgctcctagttccattattccacagttcctcccaccagttacttcaatggccttcgaacacccagctgtgcaagcctataggctacaacaagcgattgcggcgagcgt

SEQ ID NO: 70020 - DNA, 233 bp, Zea mays
ctagcaacatagaaagcacaatattgtaccaataatggcagccaaaatattttgcctcattatgctccttggtctttctgcaagtgctgctacggcgagcattttcccgcaatgctcacaagctcctatagcttcccttcttcccccatacctctcaccagcgatgtcttcagtatgtgaaaatccaattcttctaccctacaggatccaacaggcaatcgcagcaggcatct

SEQ ID NO: 70021 - DNA, 238 bp, Zea mays
attcagaaacacaccaagcgaagctacctagcaacgacttaacaacaatggctaccaagatattagccctccttgcgcttcttgccctttttgtgagcgcaacaaatgcgttcattattccacaatgctcacttgctcctagtgccattataccacagttcctccgaccagttacttcaatgggcttcgaacacctagctgtgcaagcctacaggctacaacaagcgcttgcggcgag

SEQ ID NO: 70022 - DNA, 171 bp, Zea mays
ccagcgctcagtcaactagccatggtgaaccctgccgcctacctacaacagcaacaactgatttcatctagccctctcgctgtggttaatgcacctacatacctgcaacaacagttgctgcaacaattgtaccagctctgactcagctagctgtggcaaaccctgctgcct

SEQ ID NO: 70023 - DNA, 89 bp, Zea mays
gcaagtacatggcatgctgcctcatgtaccgtggtgatgtggttcccaaggacgtgaacgctgctgtggccacaatcaagaccaagcgc

SEQ ID NO: 70024 - DNA, 226 bp, Zea mays
cagagacaggcgtcttcgtactcgcctatctccgcgactcaaagctttccccaattcccccccttctcccatttctcaccaccgccgccgctccccccgttcaacaacaccatgagggaggcatctcgatccacatcggccaggctggtatccaggtcggaaacgcgtgctgggagctgtactgcctcgagcatggcattcaggctgatggccagatgcccggtga

SEQ ID NO: 70025 - DNA, 225 bp, Zea mays
ctcgagccgctcgagccgaatcggctcgagcaacaagcaacatagaaagtggaatccagtagctacaacaaggcaacaatggcgaccaagatattttccctccttatgctccttgctcttctgcatgtgttgctaacgcgacaattttccctcaatgctcacaagctcctatagcttcccttcttcccccataccttccatcaatgatagcttcagtatgtgaaa

SEQ ID NO: 70026 - DNA, 65 bp, Zea mays
caacaagcaacatagaaagtggaatacagtagcaaaaatagagcaacaatggcggccaagatatt

SEQ ID NO: 70027 - DNA, 146 bp, Zea mays
caacaactcgtgctagcaaaccttgctgcctactctcagcaacaacagtttctgccattcaaccaactagctgcattgaactctgctgcttatttgcagcaacaacaactactaccattcagccagctagctgctgcctacccccg

SEQ ID NO: 70028 - DNA, 185 bp, Zea mays
gaaaatccggaggaccgaattttcaagggccgccgggggcgcaccggacaccgcgcgatgtgcggtgctcttccggccgctggaccctacctccggctgaaccgattccagggttggcgggccgttaagcagaaaagataactcttccgaggcccccgccggcgtctccggacttcctaacgtcg

SEQ ID NO: 70029 - DNA, 247 bp, Zea mays
tggtcacaaagattttgtgccaaatatgatatctggtgcaacacaagctgatgcagctattcttgtcgttgatgcttcaactggttcttttgaagctggcatggatggcgaaggaggaaaaagtgttggccagactaaagagcatctcagcttgttagaagctttggtgttgaacagcttgttgtcgcagtcaacaagatggatgctgttgattatgcaaaagaaaggtttgatttcatcaagctac

SEQ ID NO: 70030 - DNA, 222 bp, Zea mays
agcaacatagaaagcacaatagtgtaccaacaatggcagccaaaatattttgcttccttatgctccttggtctttctgcaagtgctgctaccgcaaccattttcccacaatgctcacaagctcctatagttcctttcttcccccatacctctcaccagcggtgtcttcagtatgtgaaaacccaattcttcaaccctacaggatccaacaggcaatcgcagc

SEQ ID NO: 70031 - DNA, 227 bp, Zea mays
caacaatggctaccaagatattatccctctttgcgcttcttgccctttttgtgagcgcaacaaatgcgttcattattccacaatgctcacttgctcctagtgccattattccacagttcctccctcagttacttcaatgggcttcgaacacccagctgtgcaagcctacaggctacaacaagcgcttgcggcgagcgtcttacaacaaccaattgcccaattacaac

SEQ ID NO: 70032 - DNA, 227 bp, Zea mays
ttttcagcattcaaaaacacaccaagcgaaggcagctagcaacgacctaacaccaatggctaccaagatattagccctccttgcgcttcttgcccttttagtgagcgcaacaaatgcgttcattttccacagtgctcacttgctcctagtgccagtattccacagttcctcccaccagttacttcaatgggcttcgaacatccagccgtgcaagcctacaggctaca

SEQ ID NO: 70033 - DNA, 229 bp, Zea mays
actagcaacatacatagtgaagtacactagcaacatcttagcaccaatgggagccaagatttttgccctccttgcgctccttgctctttcagcaagcgctgctacctcgacttttattccacaatgctcacaacaatacctctctccggtgacagccgcgggatttcaatacccaactatacaatcctacatggtacaagagggcatccaagcaagcatcttacggtca

SEQ ID NO: 70034 - DNA, 232 bp, Zea mays
attccacagtgctcacttgctcctagtgccattattccacagttcctcccaccagttacttcaatgggcttcgaacatccagccgtgcaagcctacaggctacaactagcgcttgcggcgagcgcttacaacaaccaattgcccaattgcaacaacgatccttggcacatctaaccctacaaaccattgcaacgcaacaacaacaacaacaacagtttctgccatcactgag

SEQ ID NO: 70035 - DNA, 233 bp, Zea mays
ttcagaaacacacctagcgaaggcactagcaacgacctaacaacaatggctaccaagatattatccctctttgcgcttcttgccctttttgtgagcgcaacaaatgcgttcattattccacaatgtcacttgctcctagtgccattattccacagttcctccctccagttacttcaatgggcttcgaacacccagctgtgcaagcctacaggctacaacaagcgcttgcggcg

SEQ ID NO: 70036 - DNA, 237 bp, Zea mays
caacaactactaccattcagccagctagctggtgtgagccctgctaccttcttgacacaaccacagttgttgccgttctaccagcacgctgcgcctaacgctggcaccctcttacaactgcaacaattgctgccattcaacaacttgctttgacaaacccagcagcattctaccaacaacccatcattggtggtgccctcttttagatttcttatgagttatagttcaataataaag

SEQ ID NO: 70037 - DNA, 62 bp, Zea mays
cagaaacacaccaagcgaagcacattagcaacaacctaacaacaatggctaccaagatatta

SEQ ID NO: 70038 - DNA, 101 bp, Zea mays
aatattttcagcattcaaaaacacaccaagcgaagcgcactagcaacgacctaacaccaatggctaccaagatattagccctccttgcgcttcttgccctt

SEQ ID NO: 70039 - DNA, 246 bp, Zea mays
gcgagatgttcaacgaatggactctggaactgaaggccatggctgataggatcattaacatgaggcaacaactatttaatgcgctgaaatccagaggaacccctggtgattggagccatatcattaagcaaattggatgtttactttcactgggctgaatagcgaacaagtcgcattcatgaggcaggaataccacatttatatgacatctgatgggaggatcagcatgggccggtttgagcatga

SEQ ID NO: 70040 - DNA, 162 bp, Zea mays
tgaacatcaagggtctgctcgacctgacctgtcagactgttgctgacatgatcaagggcaagacaccagaagagattcgcaagaccttcaacatcaagaatgacttaaccctgaggagggagaggagatccgcacggagaaccagatgggccttcgagtaag

SEQ ID NO: 70041 - DNA, 244 bp, Zea mays
aatcattgatgcgcgcctgatgcaagcccgcgagatccttgaagatctgctaaagcctgtggatgaatcccaggactacttcaagaagcagcagctacgggagctcgcaatgcttaatggcacccttcgtgaggaagggagcagagatccggttcagcgtcccctttccacaacagccttgggatgaagagagccaagacaagggggtaatgaacaaagctgcaagcatcatgaaggcagaacc

SEQ ID NO: 70042 - DNA, 250 bp, Zea mays
caacaacaatttcttccattcaaccaactgtctacactgaaccctgctgcttatttacaacaacaacaactactaccattcagccagctagctactgcctactctcagcagcaacaatttcttccatttaaccaattggccgactgaacccctctgcttatttccagcagcaaatactactaccatttggccagctagctacaacaagccccacttcctttttgaaacaacaacaattgcttccgttcta

SEQ ID NO: 70043 - DNA, 241 bp, Zea mays
ctagcaacatagaaagcacaatagtgtaccaacaatggcagctaaaatattttgcctccttatgctccttggtctttctgcaagtgctgctacggcgaccattttcccacaatgctcacaagctcctatagctcccttcttcccccgtacctctcaccaacggtgtcttcggtatgtgaaaacccaattcttcaaccctacaggatccaacaggcaatcgcagctggcatcttacctttat

SEQ ID NO: 70044 - DNA, 222 bp, Zea mays
agaaactgatgttgctgagagtatgcagcaacaattaccattcagccagctagttgctgcctacccccagcaatttcttccattcaaccaactagcagcatagaactctgctgcttatttacagcagcaacaacactaccattcagccagctagctgatgtgagccctgctgccttcttgacacaacaacagttgttgccgttctacctgcacgctatgcct

SEQ ID NO: 70045 - DNA, 238 bp, Zea mays
ctatctttggtgcagtcattggtacaaaccatcagggcacaacagctgcagcaactcgtgctacctctgatcaaccaagtagctctggcaaacctttctccctactctcagcaacaacaatttcttccattcaaccaacttctacactgaaccctgctgcttatttgcagcaacaactattaccatttagccagctagctactgcctactctcatcaacaacaattcttccatttaac

SEQ ID NO: 70046 - DNA, 59 bp, Zea mays
attttgagcattcagaaacacacctagcggagcgcactagcaacgacctaaccacaatg

SEQ ID NO: 70047 - DNA, 237 bp, Zea mays
gttgcggtacagcacttgcagaaagaccaattcttcaaccctacaggatccaacaggcaatcgcagcaggcatcttacctttatcacccttgttcctccaacaaccgtcagccctattacagcagttacctttgggcatttgttggcacaaaacatcaaggcacaacaactacaacaacttgtgctaggaaaccttgctgcctattctcagcaacagcagtttcttccattcaacca

SEQ ID NO: 70048 - DNA, 269 bp, Zea mays
aggattctgctctcggttttcggctcgagtagaacgcaccatagtgtaccaacaatggcagccataatattttgcctccttatgctccttggtctttctgcaagtgctgctacggcgaccattttcccgcaatgctcgcaagctcctatagcttcccttcttccccgtacctctcaccagcggtgtcttcggtatgtgaaaacccaattcttcaaccctacaggatccaacaggcaatcacagctggcatcttacctttatcacccttg

SEQ ID NO: 70049 - DNA, 260 bp, Zea mays
tcacgcatttcggctcgaggcaacatagcaagcacaatagtgtaccaacaatggcagccaaaatattttgcctccttatgctccttggtctttctgcaagtgctgctacggcgaccattttcccgcaatgctcgcaagctcctatagcttccctcttcccccgtacctctcaccagcggtgtcttcggtatgtgaaaacccaattcttcaaccctacaggatccaacaggcaatcacagctggcatcttacctttatcac

SEQ ID NO: 70050 - DNA, 235 bp, Zea mays
caacaagcaacatagaaagtggaatccagtagcaacaatagagcaacaatggcgaccaagatattttccctccttatgctccttgctctttctacatgtgttgctaacgcgacaattttccctcaatgctcacaagctcctatagcttcccttcttcccccataccttccatcaattatagcttcaatatgtgaaaacccagctcttcaaccatataggcttcaacaagcaatcg

SEQ ID NO: 70051 - DNA, 243 bp, Zea mays
cggtattctactctagctacggcgaccattttcccgcaatgctcgcaagctcctatagcttcccttcttcccccgtacctctcaccagcggtgtcttcggtatgtgaaaacccaattcttcaaccctaaaagatccaacaggcatcgcagctggcatcttacctttatcacccctgttcctccaacaatcatcagccctattacaacagttacctttggtgcatttattgggacaaaacatca

SEQ ID NO: 70052 - DNA, 234 bp, Zea mays
gtgcgatttcgatctcgcagccaccttttttttttgttctgttgtgtatctagtagttggaggagatatgcagtttgcacttgcattggacacgaactcaggtcctcaccagataagatcttgtgaggtgatgggattgacaggttggaaaaattaagtattgggggcagaaagcaggagaaagctttgagaaataggtgctttggtggtagagttgctgcaactacacaatgt

SEQ ID NO: 70053 - DNA, 239 bp, Zea mays
atggacatggctttggcgtctaaagcctcccctccgccatggaatgccaccgccgccgagcagccaattccaaagcgtgacaaagccgctgcaaatgattcaacatacctcaatcctcaagctcatgatagtgtcttggaatcattctgggaggtggtgctgggactagattgaaccctgacaacaggaagcgtgccaagcctgcagtgccattgggtgccaactatagactgattgat

SEQ ID NO: 70054 - DNA, 234 bp, Zea mays
gagcaagtgggttggatgcaagcacctgctgttgcaacagtttctgccagcgctcagtcaactagccatggtgaaccctgccgcctacctacaacagcaacaactgctttcatctagccctctcgttgtgggtatgcacctacatacctgcaacaacaattgctgcaacagattgtaccagctctgactcagctagctgtggcaaaccctgctgcctacttgcaacagtgcttc

SEQ ID NO: 70055 - DNA, 239 bp, Zea mays
ctcgagccgttcggaaacaagtacccgaagcgccctcaccacagaggtgcgtcgatacctacataacggcgtcaagtatggatgcaaaggaggttacaaatggagggacacgaagaaggcaaaccctaacatccttgttggagcaatggtggctggccctgacaggcgtgacggctacaaagatgtccgcacgaactacaactacacagagcctacccttgcggcaaacgctggcctgg

SEQ ID NO: 70056 - DNA, 233 bp, Zea mays
attgagaccaactagcaacatagaaagcacaatagtgtaccaacaatggcagccaaaatattttgcctccttatgctccttggtctttctgcaagtgctgctacggcgaccattttcccgcaatgctcgcagctcctatagcttcccttcttcccccgtacctctcaccagcggtgtcttcggtatgtgaaaacccaattcttcaaccctacaggatccaacaggcaatcaca

SEQ ID NO: 70057 - DNA, 233 bp, Zea mays
gcaacatagaaagtggaatccagtagcaacaacagagcaacaatggcgaccaagatattttccctccttatgctccttgctctttctgcatgtgttgctaacgcgacaattttccctcaatgctcacaactcctatagcttcccttcttcccccataccttccatcaatgatagcttcagtatgtgaaaacccagctcttcagccctataggctccaacaagcaatcgcagca

SEQ ID NO: 70058 - DNA, 241 bp, Zea mays
attttcagcattcaaaaacacaccaagcgaaggtcactagcaacgacctaacaccaatggctaccaagatattagccctccttgcgcttcttgcccttttagtgagcgcaacaaatgcgttcattattccacatgctcacttgctcctagtgccagtattccacagttcctcccaccagttacttcaatgggcttcgaacatccagccgtgcaagcctacaggctacaactagcgcttgcg

SEQ ID NO: 70059 - DNA, 256 bp, Zea mays
acggaacactattgatagagcctaaaccacaggaaccaacaaaacaccagtatgactgggatgttgcgactacgtttgcttttctacagaagtacggtcttacaggagagttcaagattaatgttgagtgcaaccatgctactctatctggacacagctgccatcatgaattggagactgcacggattaatgggctgcttggaaatatcgatgcaaacactggtgatcctcaagttggttgggacacagatcagtt

SEQ ID NO: 70060 - DNA, 255 bp, Zea mays
tgccgcactgaaccccgctgcttatttgcagcagcaaatactactgccatttagcgagctagctgcagcaagtcgtgcttccttcttgacacagcaacagttgctgcctttctacaagcagtttgcggctaaccccgcaaccctcttacaactacaacaattgttgccctttgtccaacttgctttgacaaacccagcagcctcctaccaacaacacatcattggtggtgccctcttttagattgattattagtt

SEQ ID NO: 70061 - DNA, 250 bp, Zea mays
cccagcccttcaaccctacaggatccagcaagcaatcgcaacaagcaacttacctttatcacacctgttctttcaacaatcgccagccctatctttggtgcagtcattggtacaaaccatcagggcagaacagttgcagcaactcgtgctaccagtgatcagccaagtagctctggcaaacctttccccctactctcagcaacaacaatttcttccattcaaccaactgtctatactgaaccctgctgct

SEQ ID NO: 70062 - DNA, 246 bp, Zea mays
tattttgagcattcagaaacacaccaagcgaagcaactagcaacaacctaacaacaatggctaccaagatattatccctccttgcgcttcttgcgctttttgcgagcgcaacaaatgcgtccattattccacaatgctcacttgctcctagttccattattccacagttcctcccaccagttacttcaatggccttcgaacacccagctgtgcaagcctataggctacaacaagcgagtgcggcga

SEQ ID NO: 70063 - DNA, 221 bp, Zea mays
cacgtgcgcatccagcagcgtaatggtcgcaagagcctgactaccgtccagggattgaagaaggagttcagctacagcaagatcctcaaagatctcaagaaagagttctgctgcaatggtacagtggtccaggacccagaacttggacaggtcattcagctccagggtgatcagaggaagaacgtctcgaatttcctcgtcaagccggcattgtgaagaag

SEQ ID NO: 70064 - DNA, 242 bp, Zea mays
gggcaccattatcgagtacatctcatatgtaatctaaaagatggcacctccaacgatgggttgctgcctcgacaagacaggattcatcaaagagaaccggttgtatggcagcaattgttgctgctgtaggaaggcagcgaccaatgggttagccactgccaatggattaagtaactgttgtcgctgttgtaggtacgcaacagagttcgacatagtagttggttgaatggaagcagctgttg

SEQ ID NO: 70065 - DNA, 228 bp, Zea mays
  unsure (1)..(228): unsure at all n locations
cggnctccgagtggctacttcacncagtccaatgtgattggataccctgacactggccggtcaggntgtgtacattctggatcaggtccgtgctttggagaatgagatgcttctgaggattaagcagcaaggccttgatatcactccgaagatcctcattgttaccaggctgttgcctgatgctgctgggactacgtgcggtcagcggctggagaaggtcatggtatg

SEQ ID NO: 70066 - DNA, 232 bp, Zea mays
ttgagcattcagaaacacacctagcgaagccactagcaacgacctaacaacaatggctaccaagatattatccctctttgcgcttcttgccctttttgtgagcgcaacaaatgcgttcattattccacaatgctcacttgctcctagtgccattattccacagttcctccctccagttacttcaatgggcttcgaacacccagctgtgcaagcctacaggctacaacaacgc

SEQ ID NO: 70067 - DNA, 87 bp, Zea mays
gtggagccgcagcaccggtaccaggcgatcttcggcttggtcctccagtccatcctgcagcagcagccgcaaagcggcaggtcgcgg

SEQ ID NO: 70068 - DNA, 258 bp, Zea mays
taggcaagtgctgctaccgcaaccattttcccacaatgctcacaagctcctatagcttcctttcttcccccatacctctcaccagcggtgtcttcagtatgtgaaaacccaattcttcaaccctacaggatccaacaggcaatcgcagcaggcatcttacctttatcacccttgttcctccaacaaccgtcagccctattacagcagttacctttggtgcatttgttggcacaaaacatcaaggcacaacaactacaa

SEQ ID NO: 70069 - DNA, 246 bp, Zea mays
atttagaccaactagcaacatagaaagcacaatagtgtaccaacaatggcagccaaaatattttgcctccttatgctccttggtatttctgcaagtgctgctacggcgaccattttcccgcaatgctcacaagctcctatagcttcccttcttcccccgtacctctcaccagcggtgtcttcggtatgtgaaaacccaattcttcaaccctacaggatccaacaggcaatcgcagctggcatctta

SEQ ID NO: 70070 - DNA, 249 bp, Zea mays
attttcagcattcaaaaacacaccaagcgaaggtcactagcaacgacctaacaccaatggctaccaagatattagccctccttgcgcttcttgcccttttagtgagcgcaacaaatgcgttcattattccacagtgctcacttgctcctagtgccagtattccacagttcctcccaccagttacttcaatgggcttcgaacatccagccgtgcaagcctacaggctacaactagcgcttgcggcgagcg

SEQ ID NO: 70071 - DNA, 92 bp, Zea mays
caaatgcgttcattattccacagtgctcacttgctcctagtgccagtattccacagttcctcccaccagttacttcaatgggcttcgaacat

SEQ ID NO: 70072 - DNA, 133 bp, Zea mays
cgcagaagcaacatacctttatcacccttgtttcaacaatcgccagccctatctttggtgcagtcattggtacaaaccatcaaggcacagcagctgcagcaactcgtgctacctgtgatcaaccaagtagctc

SEQ ID NO: 70073 - DNA, 91 bp, Zea mays
aagcaacatagaaagtggaatccagtagcaacaacagagcaacaatggcgaccaagatattttccctccttatgctccttgctctttctgc

SEQ ID NO: 70074 - DNA, 249 bp, Zea mays
tggccctaaagctcggctggaggagaggaggaggaggctggcttgcgcttccattggggaatcggaccaccgcgtcttcctccgcatgcagcagctccaacttgttcgtcggcggtctttcctacgacactaacgagacagctctcaaggatgttttctctcaatgtggtgatgttattgcggcgaaggttatatgccatcccacaagcggcaagtcgaaaggatttggttttgtcaagttttcttcgc

SEQ ID NO: 70075 - DNA, 247 bp, Zea mays
caacaagcaacatagaaagtggaatccagtagcaacaacagagcaacaatggcgaccaagatattttccctccttatgctccttgctctttctgcatgtgttgctaacgcgacaattttccctcaatgctcacaagctcctatagcttcccttcttcccccataccttccatcaatgatagcttcagtatgtgaaaacccagctcttcagccctataggctccaacaagcaatcgcaacaagcaaca

SEQ ID NO: 70076 - DNA, 98 bp, Zea mays
agaccattagctttatctactccagagcgcagaagaacccgatcgacaccatgagggtgttgctcgttgccctcgctctcctggctctcgctgcgagc

SEQ ID NO: 70077 - DNA, 244 bp, Zea mays
ctcgagcgattcggctcagattttgagcattcagaaacagtcctagcgaaggcaagtagcaacgacctaacaaagatggcttccaagacattatccctccttgcgcttcttgccctttttgtgagtgcaacaaatgcgttcattattccacaatgctcacttgctccgagtgccattattccacagttcctccctccagttacttcaatgggcttcgaacacccagctgtgcaagcctataggc

SEQ ID NO: 70078 - DNA, 235 bp, Zea mays
  unsure (1)..(235): unsure at all n locations
tattttcagcattcaaaaacacaccaagcgaaggnagctagcaacgacctaacaccaatggctaccaagatattagccctccttgcgcttcttgcccttttagtgagcgcaacaaatgcgttcattattccacagtgctcacttgctcctagtgccattattccacagttcctcccaccagttacttcaatgggctcgaacatccagccgtgcaagcctacaggctacaactagc

SEQ ID NO: 70079 - DNA, 101 bp, Zea mays
gaagaaattagagtgctcaaagcaagccatcgctctggatacattagcatgggataacatcataggattccggtcctattgtgttggccttcgggatcgga

SEQ ID NO: 70080 - DNA, 133 bp, Zea mays
atcccgtcgcatcccatcccactaccacccatctcgtcgtctgccgattcgatccggttcttccaacccaggggctgtcttggcgacgaagaggagcgtgggcaccctcggcgaggcggatctgaaggggaag

SEQ ID NO: 70081 - DNA, 243 bp, Zea mays
tagcaacatagaaagcacaatagtgtaccaacaatggcagccaaaatattttgcctccttatgctccttggtctttctgcaagtgctgctacggcgaccattttcccgcaatgctcgcaagctcctatagcttcccttcttcccccgtacctctcaccagcggtgtcttcggtatgtgaaaacccaattcttcaaccctacaggatccaacaggcaatcacagctggcatcttacctttatca

SEQ ID NO: 70082 - DNA, 244 bp, Zea mays
ccaacatacatagtgaagtacactagcaacatcttagcaccaatggcagccaagatttttgcgctccttgccctccttgctctttcagcaagtgttgctaccgcgactattattccacaatgctcacaacaatacctctctccagtgatagccgcgagatttgaatacccatctatctcatcctacaggctacaagaggccatcacagcaagcatcttacggtcgttagcattgaccgtccaac

SEQ ID NO: 70083 - DNA, 101 bp, Zea mays
ctacaacaagccccgcttcctttttgtagctagctggccaaatggtagtagtatttgctgctggaaataagcagaggggttcagtgcggccaattggtcag

SEQ ID NO: 70084 - DNA, 250 bp, Zea mays
gctccctgttgaccattgggtattctgaaccatcgagccatggctgccaagctgactcgcctccacagtcttcgcgaacgccttggtgccaccttctcctcccatcccaatgaactgatagcactcttttccaggtatgttcaccagggcaagggaatgcttcagcgccatcagctgcttgcggagtttgatgccctgtttgatagtgacaaggagaagtatgcaccctttgaagacattcttcgtgctg

SEQ ID NO: 70085 - DNA, 222 bp, Zea mays
gcatgctttcatcactctttgcatgcagagagagttgtgtttcttccccggaagtgcttccgagaataaatttttcttatctgattgtctaaaacctataacgggtgtaatggtatcgtagtggttggttgagcatcaagtgactcatattttgtcaggtctatgtgtcatcgttaaacttttaacggtcattatatttcaaaagttttgcattttccactc

SEQ ID NO: 70086 - DNA, 245 bp, Zea mays
atttagactaactagcaacatagaaagcacaatagtgtaccaacaatggcagccaaaatattttgcctccttatgctccttggtatttctgcaagtgctgctacggcgaccattttcccgcaatgctcacaagctcctatagcttcccttcttcccccgtacctctcaccagcggtgtcttcggtatgtgaaaacccaattcttcaaccctacaggatccaacaggcaatcgcagctggcatctt

SEQ ID NO: 70087 - DNA, 245 bp, Zea mays
caccaagcgaagtcactagcaacaacctaacaacaatggctaccaagatattatccctccttgcgcttcttgcgctttttgcgagcgcaacaaatgcgtccattattccacaatgctcacttgctacctagttccattattccacagttcctcccaccagttacttcaatggccttcgaacacccagctgtgcaagcctataggctacaacaagcgattgcggcgagcgtcttacaacaacaatt

SEQ ID NO: 70088 - DNA, 222 bp, Zea mays; identical to SEQ ID NO: 70085

SEQ ID NO: 70089 - DNA, 99 bp, Zea mays
agaccattagctttatctactccagagcgcagaagaacccgatcgacaccatgagggtgttgctcgttgccctcgctctcctggctctcgctgcgagcg

SEQ ID NO: 70090 - DNA, 238 bp, Zea mays
acaagtttcgcttctcgtcgcgacgactgggcgagaccgccgccgccgcctgagttctgtagaaatggctgatggtgaggacatccagcctcttgtctgcgacaatggcactggaatggtcaaggctggttttgctggcgacgatgcaccaagggctgttttccctagtattgttggccgtcctcgccacactggtgttatggtagggagggacagaaggatgcgtatgttggcgacg

SEQ ID NO: 70091 - DNA, 244 bp, Zea mays
ctcgaccgtttcagcattcaaaaacacaccaagcgaagcgcactagcaacgacctaacaccaatggctaccaagatattagccctccttgcgcttcttgcccttttagtgagcgcaacaaatgcgttcattatcccacagtgctcacttgctcctagtgccagtattccacagttcctcccacaagttatttcaatggggcttcgaacatccagccgtgccaagcctacaggctacaactagcg

SEQ ID NO: 70092 - DNA, 245 bp, Zea mays
cagctttgaactctcctgcttatttacagcagcaacaactactaccattcagccagctagctggtgtgagccctgctaccttcttgacacaaccacaattgttgccgttctaccagcacgctgcgcctaacgctggcaccctcttacaactgcaacaattgctgccattcaaccaacttgctttgacaaacccaacagcattctaccaacaacccatcattggtggtgccctcttttagattcct

SEQ ID NO: 70093 - DNA, 240 bp, Zea mays
acaactactaccattcagccagctagctgctgtgagccctgctgccttcttgacacagcaacatttgttgccgttctacctgcacactgcgcctaacgttggcaccctcttacaactgcaacaattgctgccattcgaccaacttgctttgacaaacccagcagtgttctaccagcaacccatcattggtggtgccctcttttagattgcttatgagttatagttcaataataaagtttt

SEQ ID NO: 70094 - DNA, 240 bp, Zea mays
gccgcactgaaccccgctgcttatttgcagcagcaaatactactgccatttagcgagctagctgcagcaagtcgtgcttccttcttgacacagcaacagttgctgcctttctacaagcagtttgcggctaaccccgcaaccctcttacaactacaacaattgttgccctttgtccaacttgctttgacaaacccagcagcctcctaccaacaacacatcattggtggtgccctcttttag

SEQ ID NO: 70095 - DNA, 236 bp, Zea mays
ctacaacaagctccacttcctttttgtagctagctggccacattgtagtagtatttgctgctggatataagcagaggtgttcagtgtggtcaattggtcagctagctacgacaagccccacttcctttttgaaacaacaacaattgcttccgttctaccagcagtttgtggatagccccgcagccctcttacaactgcagcagttgatgccctttgtccaacttgctttgacatac

SEQ ID NO: 70096 - DNA, 240 bp, Zea mays
ggtgaggatccagttgggtgagggctctgctggtcaggtcacaaggaacatgcttgcaaatgagggtgtccgttctttctacaagggtttgtccgccggattgctgaggcaagcgacgtacacgactgctcgtcttggatcctttagggttctaactaacaaagcagttgaaaagaatgaagggaagccattgcctctatttcagaaagctttaatggtctgactgctggtgcaattggt

SEQ ID NO: 70097 - DNA, 98 bp, Zea mays
gcaacatagaaagcacaatagtgtaccaacaatggcagccaaaatattttgcttccttatgctccttggtctttctgcaagtgttgctaccgcaacca

SEQ ID NO: 70098 - DNA, 239 bp, Zea mays
ggggaattgcatattgtgtcaagggtggtccagataaagagctaggagcaatgcagtacttggagagaagagagtgtgagtacgaccagaagatatccattgatttctacaaggaaggagatcccttgaaaccagctgtgacaggcgtcttagtgctcgtttccactccagatcaattggcaacaagtactatctgtggccctgctcctttgcaggatatgcgcaaggcaattgctaca

SEQ ID NO: 70099 - DNA, 238 bp, Zea mays
ccggttattgcttgctcagtgaccagtaatgagggtagccagctgaaactacagatacagggtctcaaggactccattgagaagcttctcatctgatctgccgaagacctttcagtgtgatgggcctcatcgacacttttttcagaggcttggactggtgatggtgtcttgtttactttgcgcttttcaaactatatttgaacactgttaagtcgatcatacttgaattgtactgcat

SEQ ID NO: 70100 - DNA, 238 bp, Zea mays
ctcgagcgcaacaagcaacatagaaagtggaatccagtagcaacaacagagcaacaatggcgaccaagatattttccctccttatgctccttgctctttctgcatgtgttgctaacgcgacaattttccctcaatgctcacaagctcctatagcttcccttcttcccccataccttccatcaatgatagcttcagtatgtgaaaacccagctcttcagccctataggctccaacaagc

SEQ ID NO: 70101 - DNA, 130 bp, Zea mays
gaccaactagcaacatagaaagcacaatagtgtaccaacaatggcagccaaaatattttgcctccttatgctccttggtctttctgcaagtgctgctacggcgaccattttcccgcaatgctcgcaagct

SEQ ID NO: 70102 - DNA, 86 bp, Zea mays
cagaaacacaccaagcgaagacagttagcaacaacctaacaacaatggctaccaagatattatccctccttgcgcttcttgcgctt

SEQ ID NO: 70103 - DNA, 87 bp, Zea mays
cagcaagcaacatacctttatcgcccttgttgtttcaacaatcgccagccctatctttggtgcagtcattggtacaaaccatcaggg

SEQ ID NO: 70104 - DNA, 88 bp, Zea mays
gtggagccgcagcaccggtaccaggcgatcttcggcttggtcctccagtccatcctgcagtagcagccgcaaagcggcaggtcgcggg

SEQ ID NO: 70105 - DNA, 246 bp, Zea mays
gcaacatagaaagcacaatagtgtaccaacaatggcagccaaaatattttgcttccttatgctccttggtctttctgcaagtgttgctaccgcaaccattttcccacaatgctcacaagctcctatagcttcccttcttcccccatacctctcaccagcggtgtcttcaatgtgtgaaaccccaattgttcaaccctacaggatccaacaggcaatcgcaacaggcatcttaccattatcaccctt

SEQ ID NO: 70106 - DNA, 241 bp, Zea mays
ggggaattgcatattgtgtcaacggtggtccagataaagagctaggagcaatgcagtacttggagagaagagagtgtgagtacgaccagaagatatccattgattgtctacaaggaaggagatcccttgaaaccagctgtgacaggcgtcttagtgttcgtttccagtccagatccaattggcaacaagtactatcttggccctgctcctttgcaggatatggcaaggcaaattgctacag

SEQ ID NO: 70107 - DNA, 239 bp, Zea mays
tcggttattgcttgctccagtgaccagtaatgagggtacccagttgaaactacagatacagggtctcaaggactccattgagaagcttctcatctgatctgccgaagacctttcagtgtgatgggcctcatcgacacttttttcagaggcttggactggtgatggtgtcttgtttactttgcgcttttcaaactatatttgaacactgttaagtcgatcatacttgaattgtactgcat

SEQ ID NO: 70108 - DNA, 241 bp, Zea mays
ctcgagcgcaacaagcaacatagaaagtggaatccagtagcaacaacagagcaacaatggcgaccaagatattttccctccttatgctccttgctctttctgcatgtgttgctaacgcgacaattttccctcaatgctcacaagctcctatagcttcccttcttcccccataccttccatcaatgatagcttcagtatgtgaaaacccagctcttcagccctataggctccaacaagcaat

SEQ ID NO: 70109 - DNA, 231 bp, Zea mays
gaccaactagcaacatagaaagcacaatagtgtaccaacaatggcagccaaaatattttgcctccttatgctccttggtctttctgcaagtgctgctacggcgaccattttcccgcaatgctcgcaagctcctatagcttcccttcttcccccgtacctctcaccagcggtgtcttcggtatgtgaaaacccaattcttcaaccctacagatccaacaggcaatcacagtg

SEQ ID NO: 70110 - DNA, 240 bp, Zea mays
cagaaacacaccaagcgaagacattagcaacaacctaacaacaatggctaccaagatattatccctccttgcgcttcttgcgctttttgcgagcgcaacaaatgcgttcattattccacaatgctcacttgctccaagttccattattacacagttcctcccaccagttacttcaatgggcttcgaacacccagctgtgcaagcctataggctacaacaagcaattgcggcgagcgtctt

SEQ ID NO: 70111 - DNA, 240 bp, Zea mays
cagcaagcaacatacctttatcgcccttgttgtttcaacaatcgccagccctatctttggtgcagtcattggtacaaaccatcagggcacaacagctgcagcaactcgtgctacctctgatcaaccaagtagctctggcaaacctttctccctactctcagcaacaacaatttcttccattcaaccaactgtctacactgaaccctgctgcttatttgcagcaacaactattaccattca

SEQ ID NO: 70112 - DNA, 239 bp, Zea mays
attgagaccagcaagcaacatagaaagtagaatccattagcaacaatagagcaacaatggcgaccaagatattttccctccttatgctccttgctctttctacatgtgttgctaacgcgacaattttccctcaatgctcacaagctcctatagcttcccttcttcccccataccttccatcaattatagcttcagtatgtgaaaacccagctcttcaacatataggcttcaacaagcaa

SEQ ID NO: 70113 - DNA, 85 bp, Zea mays
gcaacatagaaagcacaatagtgtaccaacaatggcagccaaaatattttgcttccttatgctccttggtctttctgcaagtgct

SEQ ID NO: 70114 - DNA, 200 bp, Zea mays
cagaaacacaccaagcgaagccactagcaacgacctaacaacaatggctaccaagatattagccctccttgcgcttcttgccctttttgtgagcgcaacaaatgcgttcattattccacaatgctcacttgctcctagtgccattattccacagttcctcccaccagttacttcaatgggcttcgaacacctagctgtgc

SEQ ID NO: 70115 - DNA, 153 bp, Zea mays
ctactagcaacatagagagcacaatagtgtaccaagaatggcagccgaaatattttgcttccttatgcgccttggtcttgctgcaagtgctgctaccgcaaccattttcccacaatgctcacaagctcctatagcgtcctttcttcccccata

SEQ ID NO: 70116 - DNA, 268 bp, Zea mays
gttttgccgagtcgaagaaggagcttgatgcgcttcttgcagatgactcccttgcaaacgttcctttcctcatactgggcaacaagattgacatcccatacgcggcttcagaggaggagctgaggtactacctcggcctgagcaacttcacaaccgggaagggcaacgtgaacttggccgactccaatgtccggcccctggagatcttcatgtgcagtgtggtgcgcaagatgggctatggcgaaggcttcaaatggatgtctcagta

SEQ ID NO: 70117 - DNA, 265 bp, Zea mays
gcaacatagaaagcacaatagtgtaccaacaatggcagccaaaatattttgcctccttatgctccttggtctttctgcaagtgctgctacggcgaccattttcccgcaatgctcgcaagctcctatagcttcccttcttcccccgtacctctcaccagcggtgtcttcggtatgtgaaaacccaattcttcaaccctacaggatccaacaggcaatcacagctggcatcttacctttatcacccttgttcctccaacaatcatca

SEQ ID NO: 70118 - DNA, 262 bp, Zea mays
cgcagttcccccgcgcccgagacgcaaccccgcgccaggagtaagtttgttcttttatcgatattatcgatatggcgagggaggagaatgtctacatggccaagctggctgagcaggccgaaaggtatgaagagatggttgagtatatggagaaggtggctaagactgtagatgtggaagagctcactgttgaggagcgtaacctcttgtcggtcgcatacaagaatgtgattggggctcgccgtgcttcatggcgcattgt

SEQ ID NO: 70119 - DNA, 265 bp, Zea mays
ccttgttcctccaacaatcatcagccctattacagcagttacctttggtgcatttattggcacaaaacatcagggcacaacaactacaacaacttgtgctagcaaaccttgctgcctactctcagcaacagcagtttcttccattcaaccaactagctgcattgaactctgcttcttatttgcaacaacaacaactaccattcagccagctatctgctgcctacccccagcaatttcttccattcaaccaactgacagcattgaa

SEQ ID NO: 70120 - DNA, 262 bp, Zea mays
gggtacctcctgaagcccaacatggtgactcctggctccgactctaagaaggtgacacctgaggtgatcgcccagtacaccgtccgtaccctccagaggaccgtccctgctgctgtgcctgctgttgtcttcctctccggtggacagagcgaggaggaggccaccctgaatctcaatgccatgaacaagctcagcaccaagaagccatgggccctgtccttctccttcggccgtgccctccaggcgagcaccctcaaggcct

SEQ ID NO: 70121 - DNA, 263 bp, Zea mays
attgagaccaactagcaacatagaaagcacaatagtgtaccaacaatggcagctaaaatattttgcctccttatgctccttggtctttctgcaagtgctgctacggcgaccattttcccacaatgctcacaagctcctatagcttcccttcttcccccgtacctctcaccaacggtgtcttcggtatgtgaaaacccaattcttcaaccctacaggatccaacaggcaatcgcagctggcatcttacctttatcacccttgtt

SEQ ID NO: 70122 - DNA, 179 bp, Zea mays
  unsure (1)..(179): unsure at all n locations
tatgtactgtagtaataatgtaatggagccgctgactagctacctagctcgctagtttactcatttagcggcgatgagtaacgtagtgtcacccatcaccatgngtggcagtgngagcaatgacctgaatgnaccattgaaatggaaaggaataatatataaggaaaaaagatgattgg

SEQ ID NO: 70123 - DNA, 261 bp, Zea mays
attgagaccaactagcaacatagaaagcacaatagtgtaccaacaatggcagccaaaatattttgcctccttatgctccttggtctatctgcaagtgctgctacggcgaccattttcccgcaatgctcgcaagctcctatagcttcccttcttcccccgtacctctcaccagcggtgtcttcggtatgtgaaaacccaattcttcaaccctacaggatccaacaggcaatcacagctggcatcttacctttatcacccttg

SEQ ID NO: 70124 - DNA, 263 bp, Zea mays
gcattcagaaacacaccaagcgaagccactagcaacaacctaacaacaatggctaccaagatattatccctccttgcgcttcttgcgctttttgcgagcgcaacaaatgcgtccattattccacaatgctcacttgctcctagttccattattccacagttcctcccaccagttacttcaatggccttcgaacacccagctgtgcaagcctataggctacaacaagcgattgcggcgagcgtcttacaacaaccaattgccca

SEQ ID NO: 70125 - DNA, 264 bp, Zea mays
agcaagcaacatagaaagtagaatccattagcaacaatagagcaacaatggcgaccaagatattttccctccttatgctccttgctctttctacatgtgttgctaacgcgacaattttccctcaatgctcacaagctcctatagcttcccttcttcccccataccttccatcaattatagcttcagtatgtgaaaacccagctcttcaaccatataggcttcaacaagcaatcgcagcaagcaacatacctttatcgcccttgt

SEQ ID NO: 70126 - DNA, 226 bp, Zea mays
tgcagatgcaaagtacctggtcattttattcaacattgccccacaaatggggatgctagatatgatgtgaaaaggatgaaacccccaactggcattccaaaatcaatgctaatgcaaactccggatggttcatacgcactaccaagtggagctggtgctgttttgaagccaaatgaagctgcttttgagaaggagatagagggcctacctaccacacgtcctgttg

SEQ ID NO: 70127 - DNA, 219 bp, Zea mays
cccagccacacccatgcccgtgccaacagccgcatccaagcccgtgccagctgcagggaacctcggcgttggcagcaccccgatcctgggccagtgcgtcgagtttctgaggcatcagtgcagcccgacggcgacgccctactgctcgcctcagtgccagtcgttgcggcagcagtgttgccagcagctcatgcaggtggagccgcagcaccggtacca

SEQ ID NO: 70128 - DNA, 260 bp, Zea mays
ctcgagcgcattcagaaacacaccaagcgaacacattagcaacaacctaacaacaatggctaccaagatattatccctccttgcgcttcttgcgctttttgcgagcgcaacaaatgcgttcattattccacaatgctcacttgctccaagttccattattacacagttcctcccaccagttacttcaatgggcttcgaacacccagctgtgcaagcctataggctacaacaagcaattgcggcgagcgtcttacaacaac

SEQ ID NO: 70129 - DNA, 263 bp, Zea mays
attgagaccaactagcaacatagaaagcacaatagtgtaccaacaatggcagccaaaatattttgcctccttatgctccttggtctttctgcaagtgctgctacggcgaccattttcccgcaatgctcgcaagctcctatagcttcccttcttcccccgtacctctcaccagcggtgtcttcggtatgtgaaaacccaattcttcaaccctacaggatccaacaggcaatcacagctggcatcttacctttatcacccttgtt

SEQ ID NO: 70130 - DNA, 262 bp, Zea mays
ccaactagcaacatagaaagcacaatagtgtaccaacaatggcagccaaaatattttgcttccttatgctccttggtctttctgcaagtgctgctaccgcaaccattttcccacaatgctcacaagctcctatagcttcctttcttcccccatacctctcaccagcggtgtcttcagtatgtgaaaacccaattcttcaaccctacaggatccaacaggcaatcgcagcaggcatcttacctttatcacccttgttcctcca

SEQ ID NO: 70131 - DNA, 261 bp, Zea mays
caacaagcaacatagaaagtggaatccagtagcaacaacagagcaacaatggcgaccaagatattttccctccttatgctccttgctctttctgcatgtgttgctaacgcgacaattttccctcaatgctcacaagctcctatagcttcccttcttcccccataccttccatcaatgatagcttcagtatgtgaaaacccagctcttcagccctataggctccaacaagcaatcgcagcaagcaacatacctttatcaccc

SEQ ID NO: 70132 - DNA, 263 bp, Zea mays
cagaaacacaccaagcgaagtcactagcaacgacctaacaacaatggctaccaagatattagccctccttgcgcttcttgccctttttgtgagcgcaacaaatgcgttcattattccacaatgctcacttgctcctagtgccattattccacagttcctcccaccagttacttcaatgggcttcgaacacctagctgtgcaagccaacatgcaacaacaagcgcttgcggcgagcgtcttacaacaaccaattgcccaattga

SEQ ID NO: 70133 - DNA, 129 bp, Zea mays
atagaacatagagagcacaatagtgtaccaacaatggcagccaaaatattttgcctccttatgctccttggtctttctgcaagtgctgctacggggaccattttcccgcaatgctcgcaagctcctatg

SEQ ID NO: 70134 - DNA, 262 bp, Zea mays
cgagaccaacaagcaacatagaaagtggaatacagtagcaacaatagagcaacaatggcggccaagatattttccatccttatgctccttgctctttctgcatgtgttgctaacgcgaccatttttcctcaatactcacaagctcctatagctgcccttcttcccccataccttccatcaatgaccgcttcagtttgtgaaaacccagcccttcaaccctacaggctccaacaagcaatcgcaacaagcaacttacctttat

SEQ ID NO: 70135 - DNA, 185 bp, Zea mays
caccaccaatgatgggttgtttgtgctctcttttagattgcttatgagttatacttcattattgaagtataactcataagcatttccaaagagggcacaccaatgatgggttgtgagttatacttcaataatgaagttttttggatgatgtttgtggcttcccaggtataagaaagtacatttct

SEQ ID NO: 70136 - DNA, 149 bp, Zea mays
cgccgctgactagctacctagctcgctagtttactcatttagcggcgatgagtaacgtagtgtcacccatcaccatgggtggcagtgtgagcaatgacctgaatgaaccattgaaatggaaaggaataatatataaggcaaaaagatga

SEQ ID NO: 70137 - DNA, 256 bp, Zea mays
gagcattcaaaaacacacaaagggaagtgcactagcaacttcctaacaacaatggctaccaagatattagccctccttgcgctcctttccctttcagtgagcgcaacaactgcattcattattccacaatgctcacttgctcctaatgccattattccacagttcctcccatcagttacatcaatgggcatcgaacaccctattgtgcaagcctataggctacaacaagcgcttgcggcgaacgtcttacaacaac

SEQ ID NO: 70138 - DNA, 257 bp, Zea mays
gcaacatagaaagtggaatccagtagcaacaatagagcaacaatggcgaccaagatactttccctccttatgctccttgctctttctgcatgtgttgctaacgcgacaattttccctcaatgctcacaagctcctatagcttcccttcttcccccataccttccatcaatgatagcttcagtatgtgaaaacccagctcttcaaccctataggctccaacaagcaatcgcagcaagcaacatacctttatcaccctt

SEQ ID NO: 70139 - DNA, 267 bp, Zea mays
gcttcttgccctttttgtgagtgcaacaaatgcgttcattattccacaatgctcacttgctccgagtgccattattccacagttcctccctccagttacttcaatgggcttcgaacacccagctgtgcaagcctataggctacaacaagcgcttgcggcgagcgtcttagaacaaccaattgcccaattacaacaacaatccttggcacatctaaccatacaaaccatcgcaacgcagcagcaacaagcactgagccacctagccgt

SEQ ID NO: 70140 - DNA, 260 bp, Zea mays
gcaacatagaaagtggaatccagtagcaacaacagagcaacaatggcgaccaagatattttccctccttatgctccttgctctttctgcatgtgttgctaacgcgacaattttccctcaatgctcacaagctcctatagcttcccttcttcccccataccttccatcaatgatagcttcagtatgtgaaaacccagctcttcagccctataggctccaacaagcaatcgcagcaagcaacatacctttatcacccttgtt

SEQ ID NO: 70141 - DNA, 259 bp, Zea mays
cagcattcaaaaacacaccaagcgaagccactagcaacgacctaacaccaatggctaccaagatattagccctccttgcgcttcttgcccttttagtgagcgcaacaaatgcgttcattattccacagtgctcacttgctcctagtgccattattccacagttcctcccaccagttacttcaatgggcttcgaacatccagccgtgcaagcctacaggctacaactagcgcttgcggcgagcgccttacaacaaccaat

SEQ ID NO: 70142 - DNA, 254 bp, Zea mays
cggacgaggcgagggtgcggtacgagaaggccgtgtttaaagtggtggatctggatgactatgctcaggaggacgaggaatacgaggagaagctgaagaaggaaactgtggcgctgttcttcttagcaacatatggggttggagagccactgataaaggaagaagaatcctccaaatggttaactgagggaaaagagaaggaagtttggctgaaggatctaaaatatggtatttttggccttggaaacaggcag

SEQ ID NO: 70143 - DNA, 123 bp, Zea mays
aagaccaacaagcaacatagaaagtggaatacagtagcaacaatagagcaacaatggcggccaagatattttccatccttatgctccttgctctttctgcatgtgttgctaacgcgaccattt

SEQ ID NO: 70144 - DNA, 256 bp, Zea mays
ctaccaacatacatagtgaagtacactagcaacatcttagcaccaatggcagccaagatttttgcgctccttgccctccttgctctttcagcaagtgttgctaccgcgactattattccacaatgctcacaacaatacctctctccagtgatagccgcgagatttgaatacccatctatacaatcctacaggctacaagaggccatcacagcaagcatcttacggtcgttagcattgaccgtccaacaaccatatg

SEQ ID NO: 70145 - DNA, 259 bp, Zea mays
attgagaccaactagcaacatagaaagcacaatagtgtaccaacaatggcagccaaaatattttgcttccttatgctccttggtctttctgcaagtgctgctaccgcaaccattttcccacaatgctcacaagctcctatagcttcctttcttcccccatacctctcaccagcggtgtcttcagtatgtgaaaacccaattcttcaaccctacaggatccaacaggcaatcgcagcaggcatcttacctttatcaccct

SEQ ID NO: 70146 - DNA, 254 bp, Zea mays
caaaaacacaccaagcgaagctactagcaacgacctaacaccaatggctaccaagatattagccctccttgcgcttcttgcccttttagtgagcgcaacatatgcgttcattattccacagtgctcacttgctcctagtgccagtattccacagttcctcccaccagttacttcaatgggcttcgaacatccagccgtgcaagcctacaggctacaactagcgcttgcggcgagcgccttacaacaaccaattg

SEQ ID NO: 70147 - DNA, 254 bp, Zea mays
ctgcagcaactcgtgctacctctgatcaaccaagtagctctagcaaacctttctccctactctcagcaacaacaatttcttccattcaaccaactgtctacactgaaccctgctgcttatttgcagcaacaactattaccatttagccagctagctactgcctactctcagcaacaacaacttcttccatttaaccaattggccgcactgaaccccgctgcttatttgcagcagcaaatactactaccatttag

SEQ ID NO: 70148 - DNA, 74 bp, Zea mays
aaaacacaccaagcgaagccactagcaacgacctaacaacaatggctaccaagatattagccctccttgcgctt

SEQ ID NO: 70149 - DNA, 262 bp, Zea mays
attgagaccaactagcaacatagaaagcacaatagtgtaccaacaatggcagccaaaatattttgcctccttatgctccttggtctttctgcaagtgctgctacggcgaccattttcccgcaatgctcgctagctcctatagcttcccttcttcccccgtacctctcaccagcggtgtcttcggtatgtgaaaacccaattcttcaaccctacaggatccaacaggcaatcacagctggcatcttacctttatcacccttgt

SEQ ID NO: 70150 - DNA, 257 bp, Zea mays
ccaactagcaacatagaaagcacaatagtgtaccaacaatggcagccaaaatattttgcctccttatgctccttggtatttctgcaagtgctgctacggcgaccattttcccgcaatgctcacaagctcctatagcttcccttcttcccccgtacctctcaccagcggtgtcttcggtatgtgaaaacccaattcttcaaccctacaggatccaacaggcaatcgcagctggcatcttacctttatcacccttgttc

SEQ ID NO: 70151 - DNA, 120 bp, Zea mays
  unsure (1)..(120): unsure at all n locations
cagaaacacacctagcgaagcgcnactagcaacgacctaacaacaatggcttccaagacattatccctccttgcgcttcttgccctttttgtgagtgcaacaaatgcgttcattattcca

SEQ ID NO: 70152 - DNA, 257 bp, Zea mays
agctcaacaagtatatgtacctcactgggagggtggatatgaggcagattgagaagacaattcagtatcttattggctctggaatggatcctaggactgagaataatccttatcttggtttcatctacacctccttccaagagcgggcgaccttcatctcacacgggaacactgctcgtcacgccaaggactttggcgacttaaagcttgcacaaatctgcggcatcattgcctcggatgagaagcgacatgaaact

SEQ ID NO: 70153 - DNA, 258 bp, Zea mays
caacatagaaagcacaatagtgtaccaacaatggcagccaaaatattttgcttccttatgctccttggtctttctgcaagtgctgctaccgcaaccattttcccacaatgctcacaagctcctatagcttcctttcttcccccatacctctcaccagcggtgtcttcagtatgtgaaaacccaattcttcaaccctacaggatccaacaggcaatcgcagcaggcatcttacctttatcacccttgttcctccaacaa

SEQ ID NO: 70154 - DNA, 257 bp, Zea mays; identical to SEQ ID NO: 69713

SEQ ID NO: 70155 - DNA, 159 bp, Zea mays
cagcattcaaaaacacactaagcgaagccactagcaacgacctaacaccaatggctaccaagatattagccctccttgcgcttcttgcccttttagtgagcgcaacatatgcgttcattattccacagtgctcacttgctcctagtgccagtattccac

SEQ ID NO: 70156 - DNA, 117 bp, Zea mays
gagaagtgggtagatgggtgggatgatccccgcttgttgacactggctggtctccggcgacggggagtatcatcaactgcaataaattcctttattcgtggaatcgggataacgaga

SEQ ID NO: 70157 - DNA, 258 bp, Zea mays
ggtcgagccgagcgtattttgagcattcagaaacacacctagggaagcgcactagcaacgacctaacaacaatggctaccaagatattatccctccttgcgcttcttgccctttttgtgagcgcaacaaatgtgttcattattccacaatgctcacttgctcctagtgccattattccaaagttcctcccaccagttacttcaatgggcttcgaacacccagctgtgcaagcctacaggctacaacaagcgcttgcgg

SEQ ID NO: 70158 - DNA, 255 bp, Zea mays
gcaagtgctgctaccgcaaccattttcccacaatgctcacaagctcctatagcttcctttcttcccccatacctctcaccagcggtgtcttcagtatgtgaaaacccaattcttcaaccctacaggatccaacaggcaatcgcagcaggcatcttacctttatcacccttgttcctccaacaaccgtcagccctattacagcagttacctttggtgcatttgttggcacaaaacatcaaggcacaacaactacaa

SEQ ID NO: 70159 - DNA, 252 bp, Zea mays
aagaccaactagcaacatagaaagcacaatagtgtaccaacaatggcagccaaaatattttgcctccttatgctccttggtctttctgcaagtgctgctacggcgaccattttcccgcaatgctcgcaagctcctatagcttcccttcttcccccgtacctctcaccagcggtgtcttcggtatgtgaaaacccaattcttcaaccctacaggatccaacaggcaatcacagctggcatcttacctttatca

SEQ ID NO: 70160 - DNA, 256 bp, Zea mays
  unsure (1)..(256): unsure at all n locations
caacaaattgtaccagctctgactcagctagctgtggcaaaccctgctgcctacttacaacagttgcttccattcaaccaactggctgtgtcaaactctgctgcgtacctacancagcgacaacagttacttaatccattggcagtggctaacccattggtcgctaccttcctgcagcagcaacaacaattgctgccatacaaccagttctctttgatgaaccctgccttgcagcaacccatcgttggaggtgcca

SEQ ID NO: 70161 - DNA, 261 bp, Zea mays
gtcgaactctgctgcgtacctacaacagcgacaacagttacttaatccactagcggtggctaacccattggtcgctgccttcctacagcagcaacaattgctgccatacaaccagttctctttgatgaaccctgccttgtcgtggcagcaacccatcgttggtggtgccatcttttagattacatatgagatgtactcgataatggtgccctcatagcggcatgtgtttcctaaaaataatcaatatattgattgagattt

SEQ ID NO: 70162 - DNA, 256 bp, Zea mays
aaaacacaccaagcgaagccactagcaacaacctaacaacaatggctaccaagatattatccctccttgcgcttcttgcgctttttgcgagcgcaacaaatgcgtccattattccacaatgctcacttgctcctagttccattattccacagttcctcccaccagttacttcaatggccttcgaacacccagctgtgcaagcctataggctacaacaagcgattgcggcgagcgtcttacaacaaccaattgccca

SEQ ID NO: 70163 - DNA, 257 bp, Zea mays
aatgagaccaactagcaacatagaaagcacaatattgtaccaataatggcagccaaaatattttgcctcattatgctccttggtctttctgcaagtgctgctacggcgagcattttcccgcaatgctcacaagctcctatagcttcccttcttcccccatacctctcaccagcgatgtcttcagtatgtgaaaatccaattcttctaccctacaggatccaacaggcaatcgcagcaggcatcttacctttatcacc

SEQ ID NO: 70164 - DNA, 255 bp, Zea mays
ttctcgagcgaatcggctcgacaaaaacacaccaagcgaaccatctagcaacgacctaacaccaatggctaccaagatattagccctccttgcgcttcttgcccttttagtgagcgcaacaaatgcgttcattattccacagtgctcacttgctcctagtgccagtattccacagttcctcccaccagttacttcaatgggcttcgaacatccagccgtgcaagcctacaggctacaactagcgcttgcggcgag

SEQ ID NO: 70165 - DNA, 253 bp, Zea mays
ccttgttcctccaacaatcatcagccctattacagcagttacctttggtgcatttattggcacaaaacatcagggcacaacaactacaacaacttgtgctagcaaaccttgctgcctactctcagcaacagcagtttcttccattcaaccaactagctgcattgaactctgcttcttatttgcaacaacaacaactaccattcagccagctatctgctgcctacccccagcaatttcttccattcaaccaact

SEQ ID NO: 70166 - DNA, 248 bp, Zea mays
gtgcgtcgagttcctgaggcatcagtgcagcccgacggcgacgccctactgctcgcctcagtgccagtcgttgcggcagcagtgttgccagcagctcatgcaggtggagccgcagcaccggtaccaggcgatcttcggcttggtcctccagtccatcctgcagcagcagccgcaaagcgccaggtcgcggggctgttggcggcgcagatagcgcagaactgacggcgatgtgcggcctgcagcagccg

SEQ ID NO: 70167 - DNA, 257 bp, Zea mays
agtatgtgaaaacccagctcttcagccctataggctccaacaagcaatcgcagcaagcaacatacctttatcacccttgttgtttcaacaatcgccagccctatctttggtgcagtcattggtacaaaccatcagggcacagcagctgcagcaactcgtgctacctgtgatcaaccaagtagctctggcaaacctttctccctactctcagcaacaacaatttcttccattcaaccaactgtctacactgaaccctg

SEQ ID NO: 70168 - DNA, 282 bp, Zea mays
ctcgagcgatacctttatcacccttgtttcaacaatcgccagccctatctttggtgcagtcattggtacaaaccatcaaggcacagcagctgcagcaactcgtgctacctgtgatcaaccaagtagctctggcaaacctttctccctactatcagcaacaacaatttcttccattcaaccaactatctacactgaaccctgctgcttatttgcagcaacaactattaccattcagccagctagctactgcctactctcatcaacaacaacttcttccattta

SEQ ID NO: 70169 - DNA, 279 bp, Zea mays
aagcaacatagaaagtggaatccagtagcaacaacagagcaacaatggcgaccaagatattttccctccttatgctccttgctctttctgcatgtgttgctaacgcgacaattttccctcaatgctcacaagctcctatagcttcccttcttcccccataccttccatcaatgatagcttcagtatgtgaaaacccagctcttcagccctataggctccaacaagcaatcgcagcaagcaacatacctttatcacccttgttgtttcaacaatcgccag

SEQ ID NO: 70170 - DNA, 278 bp, Zea mays
gcgcttgcggcgagcgtcttacaacaaccaattgcccaattacaacaacaatccttggcacatctaaccatacaaaccatcgcaacgcaacagcaacaacaatttctaccagcactgagccaactagctgtggtgaaccctgtcgcctacttgcaacagcagttgcttgcatccaacccacttgctctggcaaacatagttgcataccaacaacaacaacaattgcaacagtttctaccagcgctcagtcaactagccatggtgaaccctgccgccta

SEQ ID NO: 70171 - DNA, 273 bp, Zea mays
acttagagatgcctttgcggagtttggtgaagttttgcatggtatggttctctccttcctttgctgttctttttgtgataaggattcgaagcttctcatttctcttacgactgcagctcgagttgtgaccgatcgtgtcagtgggttttctaagggatttggctttgtaaggtatgctacgaccgaagaggcagccaagggaatagaaggaaaggatggaaagttccttgatggatgggttatttttgcggaatacgctaaacccagaccacc

SEQ ID NO: 70172 - DNA, 276 bp, Zea mays
gagcattcagaaacacacctagcgaagcgcactagcaacgacctaacaacaatggcttccaagacattatccctccttgcgcttcttgccctttttgtgagtgcaacaaatgcgttcattattccacaatgctcacttgctccgagtgccattattccacagttcctccctccagttacttcaatgggcttcgaacacccagctgtgcaagcctataggctacaacaagcgcttgcggcgagcgtcttagaacaaccaattgcccaattacaacaa

SEQ ID NO: 70173 - DNA, 275 bp, Zea mays
tgcgatttcgatctcgcagccaccttttttttgttctgttgtgtatctagtagttggaggagatatgcagtttgcacttgcattggacacgaactcaggtcctcaccagataagatcttgtgagggtgatgggattgacaggttggaaaaattaagtattgggggcagaaagcaggagaaagctttgagaaataggtgctttggtggtagagttgctgcaactacacaatgtattcttacctcagatgcttgtcctgaaactcttcattctcaaa

SEQ ID NO: 70174 - DNA, 275 bp, Zea mays
caaaggtaactgctgtaatagggctgacggttgttggaggaacaagggtgataaaggtaagatgcctgctgcctacccccagcaatttcttccattcaaccaactggcagcattgaactctgctgcttatttacaacagcaacagctaccaccattcagccagctagctgatgtgagccctgttgccttcttgacacaacaacagttgttgccgttctacctgcacgctgcgcctaacgctggcaccctcttacaactgcaacaattgctgccat

SEQ ID NO: 70175 - DNA, 272 bp, Zea mays
cgggaggcaagtgcgatttcgatctcgcagccacctttttttttgttctgttgtgtatctagtagttggaggagatatgcagtttgcacttgcattggacacgaactcaggtcctcaccagataagatcttgtgagggtgatgggattgacaggttggaaaaattaagtattgggggcagaaagcaggagaaagctttgagaaataggtgctttggtggtagagttgctgcaactacacaatgtattcttacctcagatgcttgtcctgaaa

SEQ ID NO: 70176 - DNA, 276 bp, Zea mays
cagaaacacaccaagcgaagacattagcaacaacctaacaacaatggctaccaagatattatccctccttgcgcttcttgcgctttttgcgagcgcaacaaatgcgttcattattccacaatgctcacttgctccaagttccattattacacagttcctcccaccagttacttcaatgggcttcgaacacccagctgtgcaagcctataggctacaacaagcacttgcggcgagcgtcttacaacaaccaatttcccagttgcaacaacaatcctt

SEQ ID NO: 70177 - DNA, 276 bp, Zea mays
caacaactaccattcagccagctacctgctgcctacccccagcaatttcttccattcaaccaactggcagcattgaactctcctgcttatttacagcagcaacaactactaccattcagccagctagctggtgtgagccctgctaccttcttgacacaaccacagttgttgccgttctaccagcacgctgcgcctaacgctggcaccctcttacaactgcaacaattgctgccattcaaccaacttgctttgacaaacccagcagcattctaccaa

SEQ ID NO: 70178 - DNA, 280 bp, Zea mays
gagccctgctaccttcttgacacaaccacagttgttgccgttctaccagcacgctgcgcctaacgctggcaccctcttacaactgcaacaattgctgccattcaaccaacttgctttgacaaacccagcagcattctaccaacaacccatcattggtggtgccctcttttagatttcttatgagttatagttcaataataaagttttttgtctgatgtttgtggcttcccagaaataagatagtacatttctagaaaaaaaactttattattgaactata

SEQ ID NO: 70179 - DNA, 186 bp, Zea mays
caactagcaacatagtaagcacaatagtgtaccaacaatggcagccaaaatattttgcttccttatgctccttggtctttctgcaagtgctgctaccgcaaccattttcccacaatgctcacaagctcctatagcttcctttcttcccccatacctctcaccagcggtgtcttcagtatgtgaaaa

SEQ ID NO: 70180 - DNA, 279 bp, Zea mays
aaaacacaccaagcgaagacattagcaacaacctaacaacaatggctaccaagatattatccctccttgcgcttcttgcgctttttgcgagcgcaacaaatgcgttcattattccacaatgctcacttgctccaagttccattattacacagttcctcccaccagttacttcaatgggcttcgaacacccagctgtgcaagcctataggctacaacaagcaattgcggcgagcgtcttacaacaaccaatttcccagttgcaacaacaatccttggcac

SEQ ID NO: 70181 - DNA, 274 bp, Zea mays
atcaaagggaaaccagagtcatgtttagatttcactgcccgaaacaatactgtgatgactgtgcaacctagtcgaagaggctgaagcccatatcatcacagtattgtttcgggcagtgaaatcaaagggaaaccagagtcatgtttagattttaaccttattttatgttggaaagtactgcaaagactgctaattgtctctacatttggtaattcagctgtagattgctatgatggttgggatttactcgtgaaccagagtttttctatctaaa

SEQ ID NO: 70182 - DNA, 275 bp, Zea mays
caccaagcgaagccactagcaacaacctaacaacaatggctaccaagatattatccctccttgcgcttcttgcgctttttgcgagcgcaacaaatgcgtccattattccacaatgctcacttgctcctagttccattattccacagttcctcccaccagttacttcaatggccttcgaacacccagctgtgcaagcctataggctacgacaagcgattgcggcgagcgtcttacaacaaccaattgcccaattgcaacaacaatccttggcacat

SEQ ID NO: 70183 - DNA, 270 bp, Zea mays
ctggacgtcagcctagcaattagctcatcgactccagattggagaactcgacaccatgaaggtgctgatcgttgcccttgctctcctggcgctcgctgcgaggccgcctccagtacaagcggcggctgtggctgccagacaccaccgtttcatctaccgcctccgttctatatgccgcctcccctctatctgccgccgcagcagcagccgcagccatggcaataccccactcacacaccgcagctaagcccgtgccagcagttcggatcc

SEQ ID NO: 70184 - DNA, 269 bp, Zea mays
caagcaacatagaaagtggaatccagtagcaacaacagagcaacaatggcgaccaagatattttccctccttatgctccttgctctttctgcatgtgttgctaacgcgacaattttccctcaatgctcacaagctcctatagcttcccttcttcccccataccttccatcaatgatagcttcagtatgtgaaaacccagctcttcagccctataggctccaacaagcaatcgcagcaagcaacatacctttatcacccttgttgtttca

SEQ ID NO: 70185 - DNA, 272 bp, Zea mays
caggcttgtgtcccaggtcatctcatccctgactgcttccctgaggttcgatggtgctctgaacgttgatgtgaacgagttccagaccaacctggtgccctaccctaggatccacttcatgctttcgtcctacgctccagtcatttctgctgagaaggcctaccacgagcagctgtccgtggccgaaatcaccaacagcgccttcgagccatcctccatgatggccaagtgcgacccccgccatggcaagtacatggcatgctgcctcatgt

SEQ ID NO: 70186 - DNA, 273 bp, Zea mays
agcccttctaaccttgctcgacccttgcccgccgcctgaactcgcctcccccgcggccggtcccctgcatctgttcgccgcgccgcaacccggaggagactacgactacgagcaccaccaggtagcagcaactgttttgctgcaatctgacaaagtggagggtttaagagtcgctgcttcttttatgtctgaacaatctttgctttatttgggattgctgggagagtattcttgcgcgacgaggaaaaggcacaagtttctgctccactgcat

SEQ ID NO: 70187 - DNA, 274 bp, Zea mays
tagcaacatagaaagcacaatagtgtaccaacaatggcagccaaaatattttgcctccttatgctccttggtatttctgcaagtgctgctacggcgaccattttcccgcaatgctcacaagctcctatagcttcccttcttcccccgtacctctcaccagcggtgtcttcggtatgtgaaaacccaattcttcaaccctacaggatccaacaggcaatcgcagctggcatcttacctttatcacccttgttcctccaacaatcatcagccctat

SEQ ID NO: 70188 - DNA, 274 bp, Zea mays
gaccaacaagcaacatagaaagtggaatccagtagcaacaacagagcaacaatggcgaccaagatattttccctccttatgctccttgctctttctgcatgtgttgctaacgcgacaattttccctcaatgctcacaagctcctatagcttcccttcttcccccataccttccatcaatgatagcttcagtatgtgaaaacccagctcttcagccctataggctccaacaagcaatcgcagcaagcaacatacctttatcacccttgttgtttc

SEQ ID NO: 70189 - DNA, 275 bp, Zea mays
ctcgagccgatcggctcgagcaactgctggcccatctagtagcaacagaaatgataaacagaacgaaagaaggaaggtacaagggaaggaagttcagttcagtatgtcatttctttggatatcaggctcgaggatctacaccatcaaatttcgactgtgactatgcttatgctcttggacgtatctccctgcatatgattgcagttggattgactggctacatggcaactgtggctaatctgaaagaccctgttgacaaatggagatgtgctgct

SEQ ID NO: 70190 - DNA, 279 bp, Zea mays
attcagaaacacacctagcgaagcgcactagcaacgacctaacaacaatggctaccaagatattatccctctttgcgcttcttgccctttttgtgagcgcaacaaatgcgttcattattccacaatgctcacttgctcctagtgccattattccacagttcctccctccagttacttcaatgggcttcgaaacatcagctgtgcaagcctacaggctacaacaagcgcttgcggcgagcgtcttacaacaaccaattgcccaattacaacaacaatcct

SEQ ID NO: 70191 - DNA, 181 bp, Zea mays
catgggtccttcggaaccgttttccaggccaagtgtcttgaaactggtgagaccgtagctataaaaaaggttcttcaagacaagagatacaagaatcgtgagctgcaaaccatgcgagtgcttgaccacccaaatgtggtggctctaaagcactgtttcttctcaaagactgagaaagagg

SEQ ID NO: 70192 - DNA, 277 bp, Zea mays
gctctggcaaacgtagctgcataccaacaacaacaacaattgcaacagtttctgccagcgctcagtcaactagccatggtgaaccctgccgcctacctacaacagcaacaactgctttcatctagccctctcgttgtgggtaatgcacctacatacctgcaacaacaattgctgcaacagattgtaccagctctgactcagctagctgtggcaaaccctgctgcctacttgcaacagctgcttccattcaaccaactgactgtgtcgaactctgctg

SEQ ID NO: 70193 - DNA, 274 bp, Zea mays
acgactccgagccccgccgcgccgcgctacctccgctcctctcttcgcccctgacggcgtcgaggccgaagcgaaggcgagcatgcatcacgaccccaaccccttcgacgagggcagcgccgaggacaaccccttctcagatatcaagaggagggaagaggcgctgaagaatgctggcgtgccaatggaggagaagaactggccaccattcttccccatcatccaccatgatattgccaatgagataccagcaaatgtgcagaagttgcagtat

SEQ ID NO: 70194 - DNA, 271 bp, Zea mays
gcattcagaaacacacctagcgaagcgcactagcaacgacctaacaacaatggcttccaagacattatccctccttgcgcttcttgccctttttgtgagtgcaacaaatgcgttcattattccacaatgctcacttgctccgagtgccattattccacagttcctccctccagttacttcaatgggcttcgaacacccagctgtgcaagcctataggctacaacaagcgcttgcggcgagcgtcttagaacaaccaattgcccaattacaa

SEQ ID NO: 70195 - DNA, 266 bp, Zea mays
ggcattttcagttattgcgaattcacctctacgtattgatctctcgtgtgtcctggatcatgttgtttctgagctcacagctttccttcgcaaggccaacagagctcttaggcaggcgacgttgggaactctaaattctttggttgtcacatatggtggtcagattggctcttcttcgtatgagacaataatcgcggaactttcaaccctcataagtgacatggatttgcatatgaccgctcttgcattggaactttgttgcacaa

SEQ ID NO: 70196 - DNA, 173 bp, Zea mays
caaagaatgctcgtggccagcaaggctcatatccaattaagctgttctacacttcaaacatgcccatcactcttcactctgcgctgattaccaacctctattttatatcccagcttctctacaggaagtacagtggaaacttccttgttaaccttcttgggaagtggaaggag

SEQ ID NO: 70197 - DNA, 270 bp, Zea mays
tgagaccaactagcaacatagaaagcacaatagtgtaccaacaatggcagccaaaatattttgcctccttatgctccttggtctttctgcaagtgctgctacggcgaccattttcccacaatgctcacaagctcctatagcttcccttcttcccccgtacctctcaccagcggtgtcttcggtatgtgaaaacccaattcttcaaccctataggatccaacaggcaatcgcagctggcatcttacctttatcacccttgttcctccaaca

SEQ ID NO: 70198 - DNA, 269 bp, Zea mays
tgagcattcagaaacacacctagcgaagccactagcaacgacctaacaacaatggcttccaagacattatccctccttgcgcttcttgccctttttgtgagtgcaacaaatgcgttcattattccacaatgctcacttgctccgagtgccattattccacagttcctccctccagttacttcaatgggcttcgaacacccagctgtgcaagcctataggctacaacaagcgcttgcggcgagcgtcttagaacaaccaattgcccaatt

SEQ ID NO: 70199 - DNA, 277 bp, Zea mays
attttgagcattcagaaacacaccaagcgaacatcattagcaacaacctaacaacaatggctaccaagatattatccctccttgcgcttcttgcgctttttgcgagcgcaacaaatgcgttcattattccacaatgctcacttgctccaagttccattattacacagttcctcccaccagttacttcaatgggcttcgaacacccagctgtgcaagcctataggctacaacaagcaattgcggcgagcgtcttacaacaaccaatttcccagttgca

SEQ ID NO: 70200 - DNA, 187 bp, Zea mays
tagaaagcacaatagtgtaccaacaatggcagccaaaatattttgcctccttatgctccttggtctttctgcaagtgctgctacggcgaccattttcccgcaatgctcgcaagctcctatagcttcccttcttcccccgtacctctcaccagcggtgtcttcggtatgtgaaaacccaattcttcaa

SEQ ID NO: 70201 - DNA, 271 bp, Zea mays
cccaccagttacttcaatgggcttcgaacatccagccgtgcaagcctacaggctacaactagcgcttgcggcgagcgccttacaacaaccaattgcccaattgcaacaacaatccttggcacatctaaccctacaaaccattgcaacgcaacaacaacaacaacaacagtttctgccatcactgagccacctagccgtggtgaaccctgtcacctacttgcaacagcagctgcttgcatccaacccacttgctctggcgaacgtagctgca

SEQ ID NO: 70202 - DNA, 270 bp, Zea mays
cacctagcgaagccactagcaacgacctaacaacaatggcttccaagacattatccctccttgcgcttcttgccctttttgtgagtgcaacaaatgcgttcattattccacaatgctcacttgctccgagtgccattattccacagttcctccctccagttacttcaatgggcttcgaacacccagctgtgcaagcctataggctacaacaagcgcttgcggcgagcgtcttagaacaaccaattgcccaattacaacaacaatccttgg

SEQ ID NO: 70203 - DNA, 270 bp, Zea mays
gcaacatagaaagcacaatagtgtaccaacaatggcagccaaaatattttgcctccttatgctctttggtctttctgcaagtgctgctacggcgaccattttcccacaatgctcacaagctcctatagcttcccttcttcccccgtacctctcaccaacggtgtcttcggtatgtgaaaacccaattcttcaaccctataggatccaacaggcaatcgcagctggcatcttacctttatcacccttgttcctccaacaatcatcagccct

SEQ ID NO: 70204 - DNA, 268 bp, Zea mays
gagcattcagaaacacacctagcgaagcgcactagcaacgacctaacaacaatggcttccaagacattatccctccttgcgcttcttgccctttttgtgagtgcaacaaatgcgttcattattccacaatgctcacttgctccgagtgccattattccacagttcctccctccagttacttcaatgggcttcgaacacccagctgtgcaagcctataggctacaacaagcgcttgcggcgagcgtcttagaacaaccaattgcccaat

SEQ ID NO: 70205 - DNA, 267 bp, Zea mays
ctactctcagcaacagcagtttcttccattcaaccaactggctgcattgaactctgctgcttatttgcaacaacaactaccattcagccaactagctgttgtctacccccagcaatttcttccattcaaccaactagcaacattgaactctgctgcttatttacaacagcaacagctaccaccattcaaccagctagctgatgtgagccctgctgccttcttgacacaacaatagttgttgtcgttctacctgcacgctgcgcctaa

SEQ ID NO: 70206 - DNA, 266 bp, Zea mays
ctcgagccgttcaaaaacacaccaagcgaaggcactagcaacgacctaacaccaatggctaccaagatattagccctccttgcgcttcttgcccttttagtgagcgcaacaaatgcgttcattattccacagtgctcacttgctcctagtgccagtattccacagttcctcccaccagttacttcaatgggcttcgaacatccagccgtgcaagcctacaggctacaactagcgcttgcggcgagcgccttacaacaaccaattgc

SEQ ID NO: 70207 - DNA, 270 bp, Zea mays
gcaacatagaaagcacaatagtgtaccaacaatggcagccaaaatattttgcttccttatgctccttggtctttctgcaagtgctgctaccgcaaccattttcccacaatgctcacaagctcctatagcttcctttcttcccccatacctctcaccagcggtgtcttcagtatgtgaaaacccaattcttcaaccctacaggatccaacaggcaatcgcagcaggcatcttacctttatcacccttgttcctccaacaaccgtcagccct

SEQ ID NO: 70208 - DNA, 267 bp, Zea mays
  unsure (1)..(267): unsure at all n locations
tcagcattcaaaaacacaccaagcgaagcntactagcaacgacctaacaccaatggctaccaagatattagccctccttgcgcttcttgcccttttagtgagcgcaacaaatgcgttcattattccacagtgctcacttgctcctagtgccagtattccacagttcctcccaccagttacttcaatgggcttcgaacatccagccgtgcaagcctacaggctacaactagcgcttgcggcgagcgccttacaacaaccaattgccca

SEQ ID NO: 70209 - DNA, 84 bp, Zea mays
agatagagagggatggatagaggagacacattatcatgtgtggtatgaccaataatatatgcatcataataaagttttggtttt

SEQ ID NO: 70210 - DNA, 269 bp, Zea mays
aagcaacatagaaagtggaatccagtagcaacaacagagcaacaatggcgaccaagatattttccctccttatgctccttgctctttctgcatgtgttgctaacgcgacaattttccctcaatgctcacaagctcctatagcttcccttcttcccccataccttccatcaatgatagcttcagtatgtgaaaacccagctcttcagccctataggctccaacaagcaatcgcagcaagcaacatacctttatcacccttgttgtttcaa

SEQ ID NO: 70211 - DNA, 269 bp, Zea mays
attttgagcattcagaaacacacctagcgaagcgcactagcaacgacctaacaacaatggcttccaagacattattcctccttgcgcttcttgccctttttgtgagtgcaacaaatgcgttcattattccacaatgctcacttgctccgagtgccattattccacagttcctccctccagttacttcaatgggcttcgaacacccagctgtgcaagcctataggctacaacaagcgcttgcggcgagcgtcttagaacaaccaattgcc

SEQ ID NO: 70212 - DNA, 268 bp, Zea mays
  unsure (1)..(268): unsure at all n locations
cttcttcgtcgacaagcaggggagttaggtctcacatgcatgcttcatcacattgttgactgcataacgaaacacatcgtcgtcggatcggagatgatgagttccgtcgtcgtggatgctgctgctaccagcagcagcgagaagaagacgtcgtggccggaggtggtgggcatgtccatcaaggaggcgacggagactattctcaaggacatgcccaacgcgtacatccaggtgctgcctgttgggtacancgtgacgctggaccttc

SEQ ID NO: 70213 - DNA, 268 bp, Zea mays
gcaacatagaaagtggaatccagtagcaacaacagagcaacaatggcgaccaagatattttccctccttatgctccttgctctttctgcatgtgttgctaacgcgacaattttccctcaatgctcacaagctcctatagcttcccttcttcccccataccttccatcaatgatagcttcagtatgtgaaaacccagctcttcagccctataggctccaacaagcaatcgcagcaagcaacatacctttatcacccttgttgtttcaaa

SEQ ID NO: 70214 - DNA, 267 bp, Zea mays
caacaactaccatgcagccagctacctgctgcctacccccagcaatttcttccattcaaccaactggcagcattgaactctcctgcttatttacagcagcaacaactactaccattcagccagctagctggtgtgagccctgctaccttcttgacacaaccacagttgttgccgttctaccagcacgctgcgcctaacgctggcaccctcttacaactgcaacaattgctgccattcaaccaacttgctttgacaaacccagcagca

SEQ ID NO: 70215 - DNA, 263 bp, Zea mays
ccaactagcaacatagaaagcacaatagtgtaccaacaatggcagccaaaatattttgcctccttatgctccttggtatttctgcaagtgctgctacggcgaccattttcccgcaatgctcacaagctcctatagcttcccttcttcccccgtacctctcaccagcggtgtcttcggtatgtgaaaacccaattcttcaaccctacaggatccaacaggcaatcgcagctggcatcttacctttatcacccttgttcctccaa

SEQ ID NO: 70216 - DNA, 265 bp, Zea mays
attgagaccaacaagcaacatagaaagtggaatccagtagcaacaatagagcaacaatggcgaccaagatactttccctccttatgctccttgctctttctgcatgtgttgctaacgcgacaattttccctcaatgctcacaagctcctatagcttcccttcttcccccataccttccatcaatgatagcttcagtatgtgaaaacccagctcttcaaccctataggctccaacaagcaatcgcagcaagcaacatacctttatc

SEQ ID NO: 70217 - DNA, 267 bp, Zea mays
tctcgagccgattcggctcgagattgataccaactagcaaaatacacagtgaagtacactagctacatcttagcaccaatggccgccaagattttttccctccttgccctccttgctctttcagcaagcgctgctacctctactattattccacaatgctcacaacaatacctctctccggtgacagccgcgggatttcaacacccaactagacaatcctacatgctacatgaggccatcgtagcaagcatcttacggtcattagca

SEQ ID NO: 70218 - DNA, 264 bp, Zea mays
gcgaaggcactagcaacgacctaacaccaatggctaccaagatattagccctccttgcgcttcttgcccttttagtgagcgcaacaaatgcgttcattattccacagtgctcacttgctcctagtgccagtattccacagttcctcccaccagttacttcaatgggcttcgaacatccatccgtgcaagcctacaggctacaactagcgcttgcggcgagcgccttacaacaaccaattgcccaattgcaacaacaatccttgg

SEQ ID NO: 70219 - DNA, 126 bp, Zea mays
caactagcaacatagaaagcacaatagtgtaccaacaatggcagccaaaatattttgcctccttatgctccttggtctttctgcaagtgctgctacggcgaccattttcccgcaatgctcgcaagc

SEQ ID NO: 70220 - DNA, 266 bp, Zea mays
caacaagcaacatagaaagtggaatccagtagcaacaatagagcaacaatggcgaccaagatattttccctccttatgctccttgctctttctacatgtgttgctaacgcgacaattttccctcaatgctcacaagctcctatagcttcccttcttcccccataccttccatcaattatagcttcaatatgtgaaaacccagctcttcaaccatataggcttcaacaagcaatcgcagcaagcaacatacctttatcgcccttgtt

SEQ ID NO: 70221 - DNA, 264 bp, Zea mays
tattttgagcattcagaaacacacctagcgaagcgcactagcaacgacctaacaacaatggctaccaagatattatccctctttgcgcttcttgccctttttgtgagcgcaacaaatgcgttcattattccacaatgctcacttgctcctagtgccattattccacagttcctccctccagttacttcaatgggcttcgaacacccagctgtgcaagcctacaggctacaacaagcgcttgcggcgagcgtcttacaacaacca

SEQ ID NO: 70222 - DNA, 267 bp, Zea mays
tccgacatcgtcccttcgtccccacgagcaaccgataatccgccggcgttgagatgttggtttatcaggatctcctatctggcgacgagctcctgtcggattcattcacctacaaggagctcgagaacggcgtcctgtgggaggtcgagggaaagtgggtcacccaaggtcctgttgatgtggacattggtgccaatccatccgccgagggtggtgaggacgaaagcgttgatgacacagctgtgaaggtggttgatattgttgaca

SEQ ID NO: 70223 - DNA, 270 bp, Zea mays
caccaagcgaagccactagcaacgacctaacaccaatggctaccaagatattagccctccttgcgcttcttgcccttttagtgagcgcaacaaatgcgttcattattccacagtgctcacttgctcctagtgccagtattccacagttcctcccaccagttacttcaatgggcttcgaacattcagccgtgcaagcctacaggctacaactagcgcttgcggcgagcgccttacaacaaccaattgcccaattgcaacaacaatccttgg

SEQ ID NO: 70224 - DNA, 265 bp, Zea mays
cacgtgggtgggggaaatgctgcgtctcgggatgctcaggcattcgcgtaaacgatgcggagaagctcgtgacgatcggaggccatgtgctgcgcgaaggtgagtggctgtcgctgaatgggtcgactggtgaggtgatccttgggaagcagccgctttccccaccagcccttagtggtgatctgggaactttcatggcctgggtggatgatgttagaaagctcaaggtcctggctaacgccgatacccctgatgatgcattgac

SEQ ID NO: 70225 - DNA, 262 bp, Zea mays
ctcgagccgctcgagccgtggctttggcgtctaaagcctcccctacgccatggaatgccaacgccgccgaccagccaattccaaagcgtgacaaagccgctgcaaatgattcaacatacctcaatcctcaagctcatgatagtgttcttggaatcattctgggaggtggtgctgggactagattgtaccccttgacaaagaagcgtgccaagcctgcagtgccattgggtgccaactatagactgattgatattcctgtcag

SEQ ID NO: 70226 - DNA, 263 bp, Zea mays
gtgaaaacccaattcttcaaccctacaggatccaacaggcaatcgcagctggcatcttacctttatcacccttgttcctccaacaatcatcagccctattacaacagttacctttggtgcatttattggcacaaaacatcagggcacaacaactacaacaacttgtgctagcaaaccttgctgcctactctcagcaacagcagtttcttccattcaaccaactaggttcattgaactctgcttcttatttgcaacaacaacaa

SEQ ID NO: 70227 - DNA, 265 bp, Zea mays; identical to SEQ ID NO: 69368

SEQ ID NO: 70228 - DNA, 171 bp, Zea mays
  unsure (1)..(171): unsure at all n locations
ctcgagncgcagaaacacaccaagcgaactaccctagcaacgacttaacaacatatggctacgccgatattagccctccttgcgcttcttgccctttttgtgagcgcaacaaatgcgttcattattccacaatgctcacttgctcctagtgccattataccacagttcctc

SEQ ID NO: 70229 - DNA, 177 bp, Zea mays
ctagcaacatagaaagcacaatagtgtaccaacaatggcagccaaaatattttgcctccttatgctccttggtctttctgcaagtgctgctacggcgaccattttcccgcaatgctcgcaagctcctatagcttcccttcttcccccgtacctctcaccagcggtgtcttcggtatg

SEQ ID NO: 70230 - DNA, 257 bp, Zea mays
caacaagcaacatagaaagtggaatccagtagcaacacagagcaacaatggcgaccaagatattttccctccttatgctccttgctctttctgcatgtgttgctaacgcgacaattttccctcaatgctcacaagctcctatagcttcccttcttcccccataccttccatcaatgatagcttcagtatgtgaaaatccagctcttcagccctataggctccaacaagcaatcgcagcaagcaacatacctttatca

SEQ ID NO: 70231 - DNA, 210 bp, Zea mays
attttgagcattcagaaacacacctagcgaacgcactagcaacgacctaacaacaatggcttccaagacattatccctccttgcgcttcttgccctttttgtgagtgcaacaaatgcgttcattattccacaatgctcacttgctccgagtgccattattccacagttcctccctccagttacttcaatgggcttcgaacacccagctgt

SEQ ID NO: 70232 - DNA, 254 bp, Zea mays
gtccatgatcacacagatcctcgagagggagaaggagggcctggagcagttcaccgccaccgatggctacgactacgaaggcgggagcaacgtgctcaaggtgctcggctactacagcatgattggcctcctcaggatacactgcctccttggggattaccacactggcctcaagtgcctcggtcccatcgacctcaaccagcaaggggtctacagcattgtcatcgggagccacatttccaccatctatcact

SEQ ID NO: 70233 - DNA, 141 bp, Zea mays
agctgaggcacttaagatggaaattattccaaacccaaggaagttgatggtgtgaaagtccttcaacttgaaactgcagctggtgcagctattcgtttctttgacaaagcgattggaattaatgttccccgctcaagattt

SEQ ID NO: 70234 - DNA, 252 bp, Zea mays
ataccatcaatcatcattcatcttagtagtataggcaccaaatcaaatctgcaacatcaattatctaactccaaaaaccatgatgctggtgcttgtagttcttgctttcattgctttagtatcaagtgtttcttgtacacagacaggcggctgcagctgtggtcaacaacaaagccatgagcagcaacatcatccacaacaacatcatccacaaaaacaacaacatcaaccaccaccacaacatcaccagca

SEQ ID NO: 70235 - DNA, 241 bp, Zea mays
cagaaacacacctagcgaacgcactagcaacgactaacaacaatggctaccaagatattatccctctttgcgcttcttgccctttttgtgagcgcaacaaatgcgttcattattccacaatgctcacttgctcctagtgccattattccacagttcctccctccagttacttcaatgggcttcgaacacccagctgtgcaagcctacaggctacaacaagcgcttgcggcgagcgtcttac

SEQ ID NO: 70236 - DNA, 227 bp, Zea mays
ctacaggatccaacaggcaatcgcagctggcacttacctttatcacccttgttcctccaacaatcatcagccctattagaacagttacctttggtgcatgtattggcagaaaacatcagggcacaagaagtagaacaacttgtgctagcaaaccttgctgcctagtctgaggaagaggtgtttcttccactcaacgaactaggtccattgaactctgctacttattt

SEQ ID NO: 70237 - DNA, 200 bp, Zea mays
aattagctcatcgactccagattggagaactcgacaccatgaaggtgctgatcgttgcccttgctctcctggcgctcgctgcgagcgccgcctccagtacaagcggcggctgtggctgccagacaccaccgtttcatctaccgcctccgttctatatgctgcctcggttctatctgctgccgcagcagcagcgggagcta

SEQ ID NO: 70238 - DNA, 203 bp, Zea mays
caacaacaacaacagtttctgccatcactgaccacctagccgtggtgaaccctgtcacctacttgcaacagcagctgcttgcatccaacccacttgctctggcgaacgtagctgcataccagcaacaacaacagctgcaacagtttatgccagtgctcagtcaactagccatggtgaaccctgccgtctacctacaactactt

SEQ ID NO: 70239 - DNA, 138 bp, Zea mays
cagcaagcaacatagaaagtagaatccattagcaacaatagagcaacaatggcgaccaagatattttccctccttatgctccttgctctttctacatgtgttgctaacgcgacaattttccctcaatgctcacaagct

SEQ ID NO: 70240 - DNA, 249 bp, Zea mays
cgatgagcacctctccggccgcgtccgctgcgcgtcgcctccgccgcctattgcttacgccgccgaggcctcgcgggcgacggagacgttggtggtcgacgagacggtcgcctcacacgtggacccgttcctcgtagaggcgctcgagaaccctcgccaccgcctcatggttctacggatggaactggatatacgaaactttatgcagaaccctcagctgcaggagttcgaattccagatctttccgac

SEQ ID NO: 70241 - DNA, 109 bp, Zea mays
agctgaatggtagtgccctcttttagatttctatgagttagagttcaagaataaagttttttgtctgatgtttgtggcttcccagaaataagaaagtacagttctagag

SEQ ID NO: 70242 - DNA, 142 bp, Zea mays
ccaactagcaacatagaaagcacaatagtgtacaacaatggcagccaaaatattttgcctccttatgctccttggtctttctgcaagtgctgctacggcgaccattttcccgcaatgctcgcaagctcctatagcttccctt

SEQ ID NO: 70243 - DNA, 189 bp, Zea mays
caactagcaacatagaaagctcaatagtgaccaacaatggcagccaaaatattttgcctccttatgctccttggtctttctgcaagtgctgctacggcgaccattttcccgcaatgctcgcaagctcctatagcttcccttcttcccccgtacttctcaccagcggtgtcttcggtatgtgaaaaccca

SEQ ID NO: 70244 - DNA, 206 bp, Zea mays
gcttccaacaatcaatcaagtagttgcacgaaccttgctgcttacctccagcaacaacaatttcttccattcaatcaactagctggggtgaaccctgctgcttacttgcaggcacaacagctactaccattcaaccaacttgtcaggagccctgctgccttcttactgcagcaacagttgcttccattccatctacaagttgtggc

SEQ ID NO: 70245 - DNA, 244 bp, Zea mays
agaccaacaagcaacatagaaagtggatccagtagcaacaacagagcaacaatggcgaccaagatattttccctccttatgctccttgctctttctgcatgtgttgctaacgcgacaattttccctcaatgctcacaagctcctatagcttcccttcttcccccataccttccatcaatgatagcttcagtatgtgaaaacccagctcttcagccctataggctccaacaagctatcgcagcaa

SEQ ID NO: 70246 - DNA, 241 bp, Zea mays
aacacaccaagcgaagccactagcaacgacctaacaccaatggctaccaagatattagccctccttgcgcttcttgcccttttagtgagcgcaacaaatgcgttcattattccacagtgctcacttgctcctagtgccattattccacagttcctcccaccagttacttcaatgggcttcgaacatccagccgtgcaagcctacaggctacatctagcgcttgcggcgagcgccttacaac

SEQ ID NO: 70247 - DNA, 140 bp, Zea mays
aaattttaaatctataatactttattagtgatatgttgcacagatcagcatgagaactttattatgacagtataaatcataaagttctcatgctgatatgtgcgacctctcagtaataaagtattatagatctgattttg

SEQ ID NO: 70248 - DNA, 137 bp, Zea mays
gcaacaagcaacttaccttcatcacacctgttctttgaagaagcgccagccctatctttggtgcagtcattggtacaaaccatcagggcagaacagttgcagcaactcgtgctaccagtgatcagcctcgtagctct

SEQ ID NO: 70249 - DNA, 83 bp, Zea mays
caccaagcgaagccactagcaacgacctacaccaatggctaccaagatattagccctccttgcgcttcttgcccttttagtga

SEQ ID NO: 70250 - DNA, 251 bp, Zea mays
  unsure (1)..(251): unsure at all n locations
gganactgctggagagggtgagagcnagggagcagcggtcgggcagccatggggcaccactgctgcngcnagcaganggtgaagcgtgggctgtgatcgccggnggnggacgagaagcttgtcaagtacatcancgcccnnggccanagctgctggancgccgttcccangcatgccgggctgcagcgttgcngcaagagctgccgcctccggtggatcaactacctccggccggacctgaagcgcggaac

SEQ ID NO: 70251 - DNA, 219 bp, Zea mays
gctgctacggcgaccattttcccgcaagctcgcaagctcctatagcttcccttcttcccccgtacctctcaccagcggtgtcttcggtatgtgaaaacccaattcttcaaccctacaggatctaacaggcaatcacagctggcatcttacctttatcacccttgttcctccaacaatcagcagccctattacatcagttacctttggggattttttggg

SEQ ID NO: 70252 - DNA, 133 bp, Zea mays
agaacatagtaagcacaatagtggacaacaatggcagccacattacggtgccgccttatactccttggtctttctgcaagtgctgctacggcgaccattgtcccgcaatgctcgcaagctcctatagcttccc

SEQ ID NO: 70253 - DNA, 181 bp, Zea mays
attttgagcattcaaaaacacacaaatggaagtgcactagcaacttcctaacaacaatggctaccaagatattagccctccttgcgctcctttccctttcagtgagcgcaacaactgcattcattattccacaatgctcacttgctcctaatgccattattccacagttcctcccatcagt

SEQ ID NO: 70254 - DNA, 108 bp, Zea mays
tagcaacatagagagcacaatagtgtccaacaatggcagccaaaatattttgcctcctgatgctccttggtctttctgcaagtgctgctacggcgaccattttcccgc

SEQ ID NO: 70255 - DNA, 175 bp, Zea mays
agaaagtggaatccagtagcaacaatagagcaacaatggcgaccaagatactttccctccttatgctccttgctctttctgcatgtgttgctaacgcgacaattttccctcaatgctcacaagctcctatagcttcccttcttcccccataccttccatcaatgatagcttcagt

SEQ ID NO: 70256 - DNA, 246 bp, Zea mays
gcaacatagaaagtggaatccagtagcaacaacagagcaacaatggcgaccaagatattttccctccttatgctccttgctctttctgcatgtgttgctaacgcgacaattttccctcaatgctcacaagctcctatagcttcccttcttcccccataccttccatcaatgatagcttcagtatgtgaaaacccagctcttcagccctataggctccaacaagcaatcgcagcaagcaacatacct

SEQ ID NO: 70257 - DNA, 130 bp, Zea mays
atattattgagaccaacaagcaacaagaaagtggaatacagtagcaaaaatagagcaacaatggcggccaagatattttccatccttatgctccttgctctttctgcatgtgttgctaacgcgacttttt

SEQ ID NO: 70258 - DNA, 178 bp, Zea mays
cacgaacagagccatgagcaacaccaaggacagagccatgagcaacaacatcaacaacaattccagggtcatgacaagcagcaacaaccacaacagcctcagcaatatcagcagggccaggaaaaatcacaacagcaacaatgtcattgccaggagcagcaccagactacaaggtgca

SEQ ID NO: 70259 - DNA, 249 bp, Zea mays
  unsure (1)..(249): unsure at all n locations
anggaaatgctgcgtctcgggatgctaggcattcgcgtaancgatgcggagnagctcgtgacgatgcggnggccatgtgctgcgcgaaggtgagtngctgtcgctgaatgggtcgactggtgaggtgatccttgggangcngccgctttccccacgagcccttagtngtgatctgggaactttcntggtctgggtggatgatgttagaaagctcaaggtctggctaacgcngataccccgatgangcat

SEQ ID NO: 70260 - DNA, 246 bp, Zea mays
acgaacgcactagcaacgacctacaccaatggctaccaagatattagccctccttgcgcttcttgcccttttagtgagcgcaacaaatgcgttcagtattccacagtgctcacttgctcctagtgccattattccacagttcctcccaccagttacttcaatgggcttcgaacatccagccgtgcaagcctacaggctacaactagcgcttgcggcgagcgccttacaacaaccaattgcccaatt

SEQ ID NO: 70261 - DNA, 178 bp, Zea mays
acaacatagaaagcacaatagtgaccaacaatggcagccaaaatattttgcctccttatgctccttggtctttctgcaagtgctgctacggcgaccattttcccacaatgctcacaagctcctatagcttcccttcttcccccgtacctctcaccagcggtgtcttcggtatgtgaaa

SEQ ID NO: 70262 - DNA, 172 bp, Zea mays
ggaaatgacaaagctctctggcactctgaaatcatccccgagatggagatctgcgattttgacttcgaaccctgtggctactccatgaatgcgatccatggctctgcattctccacaatccatgtgacgcccgaggacggtttcagctacgcaagttacgaggttatgggct

SEQ ID NO: 70263 - DNA, 202 bp, Zea mays
caacagttgcaacagtttctgccgcgctcagtcaactagccatggtgaaccctatcgcctacctacaacagcaacaacttctttcatctagcccgctcgctatgggcaatgcacctacatacctgctacaacagttgttgcaacagcagctgctgcaacaaattgtaccagctgtgactcagctagctgtggcaaaccctgc

SEQ ID NO: 70264 - DNA, 211 bp, Zea mays
attgagaccaactagcaacatagaaagcacaatagtgtaccaacaatggcagccataatatgttgcctccttatgctccttggtctttctgcaagtgctgctacggcgaccattttcccgcaatgctcgcaagctcctatagcttcccttcttcccccgtacctctcaccagcggtgtcttcggtatgtgaaaacccaattcttcaaccct

SEQ ID NO: 70265 - DNA, 193 bp, Zea mays
aagcacaatagtgtaccaacatggcagccaaaatattttgcttccttatgctccttggtctttctgcaagtgctgctaccgcaaccattttcccacaatgctcacaagctcctatagcttcctttcttcccccatacctctcaccagcggtgtcttcagtatgtgaaaacccaattcttcaaccctacaggat

SEQ ID NO: 70266 - DNA, 171 bp, Zea mays
attgagaccaactagcaacatagaaagcacaatagtgtaccaacaatggcagccaaaatattttgcttccttatgctccttggtctttctgcaagttttgctaccgcaaccattttcccacaatgctcacaagctcctatagcttcccttcttccccaatacctctcacca

SEQ ID NO: 70267 - DNA, 118 bp, Zea mays
aaaaaagaatatgatggcaagttgctgacgtttggtcatgtggtgtaaccctctatgtaatggttgttggcgcatatccttttgaagatccagaagagcctaggactctgccgcaaga

SEQ ID NO: 70268 - DNA, 126 bp, Zea mays
gaccaacaagcaacatagaagtggaatccagtagcaacaatagagcaacaatggcgaccaagatactttccctccttatgctccttgctctttctgcatgtgttgctaacgcgacaattttccctc

SEQ ID NO: 70269 - DNA, 210 bp, Zea mays
tagaaagtggaatccagtacaacaatagagcaacaatggcgaccaagatattttccctccttatgctccttgctctttctacatgtgttgctaacgcgacaattttccctcaatgctcacaagctcctatagcttcccttcttcccccataccttccatcaatgatatcttcaatatgtgaaaacccagctcttcaaccagataggcttc

SEQ ID NO: 70270 - DNA, 127 bp, Zea mays
ttctcgagccgaatcggctcgacagaaacacaccaagcgaaggcactagcaacaacctaacaacaatggctaccaagatattatccgtccttgcgcttcttgcgctttttgcgagcgcaacaaatgc

SEQ ID NO: 70271 - DNA, 90 bp, Zea mays
ttgagaccaactagcaacatagaaagcacaatagtgtaccaacaatggcagccaaaatattttgcttccttatgctccttggtctttctg

SEQ ID NO: 70272 - DNA, 61 bp, Zea mays
gaaacacacctagcgaagcgcactagcaacgacctaacaacaatggctaccaagatattat

SEQ ID NO: 70273 - DNA, 93 bp, Zea mays
aactaccaacatacatagtgaagtacactagcaacatcttagcaccaatggcagccaagatttttgcgctccttgccctccttgctctttcag

SEQ ID NO: 70274 - DNA, 104 bp, Zea mays
caacaagcaacatagaaagtggaatacagtagcaacaatagagcaacaatggcggccaagatattttccatccctatgctccttgctctttctgcatgtgttgc

SEQ ID NO: 70275 - DNA, 101 bp, Zea mays
caactagcaacatagaaagcacaatagtgtaccaacaatggcagccaaaatattttgcctccttatgctccttggtctttctgcaagtgctgctacggcga

SEQ ID NO: 70276 - DNA, 90 bp, Zea mays
ctagtgccattataccacagttcctccgaccagttacttcaatgggcttcgaacacctagctgtgcaagcctacaggctacaacaagcgc

SEQ ID NO: 70277 - DNA, 102 bp, Zea mays
aacaagcaacatagaaagtggaatacagtagcaacaatagagcaacaatggcggccaagatattttccatccttatgctccttgctctttctgcatgtgttg

SEQ ID NO: 70278 - DNA, 95 bp, Zea mays
ttcagagacacaccaagcgaagacgattagcaacaacctaacgacaatggctaccaagatattatccctccttgcgcttcttgcgctttttgcga

SEQ ID NO: 70279 - DNA, 291 bp, Zea mays
caagcaacatagaaagtggaatccagtagcaacaacagagcaacaatggcgaccaagatattttccctccttatgctccttgctctttctgcatgtgttgctaacgcgacaattttccctcaatgctcacaagctcctatagcttcccttcttcccccataccttccatcaatgatagcttcagtatgtgaaaacccagctcttcagccctataggctccaacaagcaatcgcagcaagcaacatacctttatcacccttgttgtttcaacaatcgccagcccctatcttg

SEQ ID NO: 70280 - DNA, 94 bp, Zea mays
gcaacatagaaagtggaatccagtagcaacaatagagcaacaatggcgaccaagatattttccctccttatgctccttgctctttctacatgtg

SEQ ID NO: 70281 - DNA, 102 bp, Zea mays
  unsure (1)..(102): unsure at all n locations
gtggaatacagtagcaacaatagagcaacaatggcggccaagatattttccatccttatgctccttgctctntctgcatgtgttgctaacgcgacaattttt

SEQ ID NO: 70282 - DNA, 79 bp, Zea mays
ctcgagccgaatcggctcgaggcgaacgcactagcaacgacctacacaacaatggcttccacagacattatccctcctt

SEQ ID NO: 70283 - DNA, 98 bp, Zea mays
atattattgagaccaactagcaacatagaaagcacaatagtgtaccaacaatggcagccaaaatattttgcttccttatgctccttggtctttctgca

SEQ ID NO: 70284 - DNA, 289 bp, Zea mays
attgatacgaactagcaacatacatagtgaagtacactagcaacatcttagcaccaatggcagccaagatttttgccatccttgccctccttgctctttcagcaagcgttgctaccgcgactattattccacaatgctcacaacaatacctctctccggtgacagccgcgagatttgaatacccaactatacaatcctacaggctacaagaggccatcgcagcaagcatcttacggtcgttagcattgaccgtccaacaaccatatgccctattgcaacaaccatcctt

SEQ ID NO: 70285 - DNA, 282 bp, Zea mays
  unsure (1)..(282): unsure at all n locations
aaaaattctcccgcttcctggtgatgttgatgtcatttgtggaggcccaccatgtcaaggtataagtgggtttaatcggttcaggaaccgtgatgagccacttaaagatgagaaaaacaagcaaatggtgactttcatggatattgtggcatacttgaagcccaagtatgttctcatggaaaatgttgtggacatactgaaatttgctgatggctacctagganaatatgctttgagctgcctagttgctatgaagtacacagcacgccttggaatgatggt

SEQ ID NO: 70286 - DNA, 109 bp, Zea mays
ataaacacaccaagcgaagcgcactagcaacgacctaacaccaatggctaccaagatattagccctccttgcgcttcttgcccttttagtgagcgcaacaaatgcgttc

SEQ ID NO: 70287 - DNA, 95 bp, Zea mays
cttatttagaccaactagcaacatagaaagcacaatagtgtaccaacaatggcagccaaaatattttgcctccttatgctccttggtatttctgc

SEQ ID NO: 70288 - DNA, 98 bp, Zea mays
ctagctatgatccgaattgagaacctcccagtgaaggtctttgtgctaaacaaccagcacctggggacggtggtgcagtgggaggacaggttctataa

SEQ ID NO: 70289 - DNA, 72 bp, Zea mays
tgccgcttcgaacacccagctgtgcaagcctacaggctacaacaagcgcttgcggcgagcgtcttacaacaa

SEQ ID NO: 70290 - DNA, 96 bp, Zea mays
cttttagtgagcgcaacaaatgcgttcattattccacagtgctcacttgctcctagtgccagtattccacagttcctcccaccagttacttcaatg

SEQ ID NO: 70291 - DNA, 99 bp, Zea mays
ccagaagagcggcggcgcgggcggacaatgatcaggcggaggatgagttgtgccaagccacaatgggtatctcgcgtgactcgatgcacaagcgctgag

SEQ ID NO: 70292 - DNA, 144 bp, Zea mays
attttcagcattcaaaaacacaccaagcgaagcgcactagcaacgacctaacaccaatggctaccaagatattagccctccttgcgcttcttgcccttttagtgagcgcaacaaatgcgttcattattccacagtgctcacttg

SEQ ID NO: 70293 - DNA, 147 bp, Zea mays
catttccgatggacttcgacatggagtgcaattccttgtcctggaacaacttggacgaggagagtttgtaccccttgctgaacttcctcaaggctcataactacaagggcacgacgaatgatgttgaatgacagaatccaaagcctt

SEQ ID NO: 70294 - DNA, 95 bp, Zea mays
gcacaatagtgtaccaacaatggcagccaaaatattttgcttccttatgctccttggtctttctgcaagtgctgctaccgcaaccattttcccac

SEQ ID NO: 70295 - DNA, 289 bp, Zea mays
aatattttgagcattcagaaacacaccaagcgaacacattagcaacaacctaacaacaatggctaccaagatattatccctccttgcgcttcttgcgcttttttgcgagcgcaacaaatgcgttcattattccacaatgctcacttgctccaagttccattattacacagttcctcccaccagttacttcaatgggcttcgaacacccagctgtgcaagcctataggctacaacaagcaattgcggcgagcgtcttacaacaaccaatttcccagttgcaacaacaatc

SEQ ID NO: 70296 - DNA, 106 bp, Zea mays
attccacaatgctcacttgctccgagtgccattattccgcagttcctccctccagttacttcaatgggcttcgaacacccagctgtgcaagcctataggctacaac

SEQ ID NO: 70297 - DNA, 99 bp, Zea mays
gtactgtagtaataatgtaatggagccgctgactagctacctagctcgctagtttactcatttagcggcgatgagtaacgtagtgtcaaccctcaccat

SEQ ID NO: 70298 - DNA, 286 bp, Zea mays
attttgagcattcagaaacacaccaagcgaactacattagcaacaacctaacaacaatggctaccaagatattatccctccttgcgcttcttgcgctttttgcgagcgcaacaaatgcgttcattattccacaatgctcacttgctccaagttccattattacacagttcctcccaccagttacttcaatgggcttcgaacacccagctgtgcaagcctataggctacaacaagcaattgcggcgagcgtcttacaacaaccaatttcccagttgcaacaacaatc

SEQ ID NO: 70299 - DNA, 284 bp, Zea mays
attgagaccaactagcaacatagaaagcacaatagtgtaccaacaatggcagccaaaatattttgcttccttatgctccttggtctttctgcaagtgttgctaccgcaaccattttcccacaatgctcacaagctcctatagcttcccttcttcccccatacctctcaccagcggtgtcttcaatgtgtgaaaacccaattgttcaaccctacaggatccaacaggcaatcgcaacaggcatcttaccattatcacccttgttcctccaacaaccgtcagccct

SEQ ID NO: 70300 - DNA, 149 bp, Zea mays
tgctagcctgccctttcgatgaagctaggaagttcggttgcactgaatttgtgaacccaaaagaccacaacaagccagtgcaggaggtacttgctgagatgaccaacggaggggtcgaccgcagtgtggactgcactggcaacattaat

SEQ ID NO: 70301 - DNA, 93 bp, Zea mays
  unsure (1)..(93): unsure at all n locations
tccatcgcccataatattttgagcattcanaaacacacaaagggaagtgcactagcaacttcctaacaacaatggctaccaagatattagccc

SEQ ID NO: 70302 - DNA, 102 bp, Zea mays
  unsure (1)..(102): unsure at all n locations
attgagaccaactagcaacatagaaagcacaatagtgtaccaacaatggcagccanaatattttgcctccttatgctccttggtctttctgcaagtgctgct

SEQ ID NO: 70303 - DNA, 103 bp, Zea mays
attgagaccaacaagcaacatagaaagtggaatccagtagcaacaacagagcaacaatggcgaccaagatattttccctccttatgctccttgctctttctgc

SEQ ID NO: 70304 - DNA, 121 bp, Zea mays
attgagaccaactagcaacatagaaagcacaatagtgtaccaacaatggcagccaaaatattttgcttccttatgctccttggtctttctgcaagtgttgctaccgcaaccattttcccac

SEQ ID NO: 70305 - DNA, 95 bp, Zea mays
ccctatcgcctacctacaacagcaacaacttctttcatctagcccgctcgctatgggcaatgcacctacatacctgcaacaacagttgttggcac

SEQ ID NO: 70306 - DNA, 100 bp, Zea mays
tagaaagtggaatccagtagcaacaatagagcaacaatggcgaccaagatattttccctccttatgctccttgctctttctacatgtgttgctaacgcga

SEQ ID NO: 70307 - DNA, 121 bp, Zea mays
ttttatttgcaggcgtcgctgaataaggctggttgtctctcccttgacatgaaatccaaataactcacaattaaccatgagtgttccgtttggtcccagtttcgaaggtattgttaatcat

SEQ ID NO: 70308 - DNA, 287 bp, Zea mays
ctcggcggcggcggcggcggcttttctgcctgcgaagagagaaaacaaggagaggggcaactcggaagagggcgaggatgcctcggccggagttccaggcgccgccggatgtgttctacaacgagtcggaggcccgcaagtacaccacctcctcccgtatcatcgaaatccagtctaggatttccgagagggcgctggagttgcttgctctccccaacgatggcgtccccaagctacttctcgacataggatgtggttctggacttagtggtgagacattgacggag

SEQ ID NO: 70309 - DNA, 140 bp, Zea mays
attttgagcattcagaaacacaccaagcgaagcgcactagcaacaacctaacaacaatggctaccaagatattatccctccttgcgcttcttgcgctttttgcgagcgcaacaaatgcgtccattattccacaatgctca

SEQ ID NO: 70310 - DNA, 97 bp, Zea mays
ccaactagcaacatagaaagcacaatagtgtaccaacaatggcagccaaaatattttgcttccttatgctccttggtctttctgcaagtggtgctac

SEQ ID NO: 70311 - DNA, 283 bp, Zea mays
ctacaacaacagttgctgcaacaaattgtaccagctctgactcagctagctgtggcaaaccctgctgcctacttacaacagttgcttccattcaaccaactggctgtgtcaaactctgctgcgtacctacaacagcgacaacagttacttaatccattggcagtggctaacccattggtcgctaccttcctgcagcagcaacaacaattgctgccatacaaccagttctcctttgatgaaccctgccttgcagcaacccatcgttggaggtgccatcttttag

SEQ ID NO: 70312 - DNA, 282 bp, Zea mays
acgcaacaacaacaacaacaacagtttctgccatcactgagccacctagccgtggtgaaccctgtcacctacttgcaacagcagctgcttgcatccaacccacttgctctggcgaacgtagctgcataccagcaacaacaacagctgcaacagtttatgccagtgctcagtcaactagccatggtgaaccctgccgtctacctacaactactttcatctagcccgctcgcggtgggcaatgcacctacgtacctacaacaacagttgctgcaacaaattgta

SEQ ID NO: 70313 - DNA, 102 bp, Zea mays
tccatcgcccataatattttgagcattcaaaaacacacaaagggaagtgcactagcaacttcctaaacacaatgggctacaagatatcagccctccttgcgc

SEQ ID NO: 70314 - DNA, 254 bp, Zea mays; identical to SEQ ID NO: 69516

SEQ ID NO: 70315 - DNA, 100 bp, Zea mays
tgagcattcagaaacacaccaagcgaagacattagcaacaacctaacaacaatggctaccaagatattatcgctccttgcgcttcttgcgctttttgcga

SEQ ID NO: 70316 - DNA, 61 bp, Zea mays
gttgctgcctacccccagcaattgcttccattcaaccaactagcggcattgaactctgctg

SEQ ID NO: 70317 - DNA, 97 bp, Zea mays
  unsure (1)..(97): unsure at all n locations
caacaagcaacatagaaagtggaatccagtagcaacaatagagcaacaatggcgaccaagatactttccctccttatgctccttgctctntctgcat

SEQ ID NO: 70318 - DNA, 202 bp, Zea mays
taacaacaatggcttccaagacattatccctccttgcgcttcttgccctttttgtgagtgcaacaaatgcgttcattattccacaatgctcacttgctccgagtgccattattccacagttcctccctccagttacttcaatgggcttcgaacacccagctgtgcaagcctataggctacaacaagcgcttgcggcgagcgt

SEQ ID NO: 70319 - DNA, 280 bp, Zea mays
ttcagaaacacaccaagcgaagacattagcaacaacctaacaacaatggctaccaagatattatccctccttgcgcttcttgcgctttttgcgagcgcaacaaatgcgttcattattccacaatgctcacttgctccaagttccattattacacagttcctcccaccagttacttcaatgggcttcgaacacccagctgtgcaagcctataggctacaacaagcaattgcggcgagcgtcttacaacaaccaatttcccagttgcaacaacaatccttgg

SEQ ID NO: 70320 - DNA, 281 bp, Zea mays
caactagcaacatagaaagcacaatagtgtaccaacaatggcagctaaaatattttgcctccttatgctccttggtctttctgcaagtgctgctacggcgaccattttcccacaatgctcacaagctcctatagcttcccttcttcccccgtacctctcaccaacggtgtcttcggtatgtgaaaacccaattcttcaaccctacaggatccaacaggcaatcgcagctggcatcttacctttatcacccttgttcctccaacaatcatcagccctattaa

SEQ ID NO: 70321 - DNA, 226 bp, Zea mays
attcagaaacacaccaagcgaagcgcactagcaacgacctaacaacaatggctaccaagatattagccctccttgcgcttcttgccctttttgtgagcgcaacaaatgcgttcattattccacaatgctcacttgctcctagtgccattattccacagttcctcccaccagttacttcaatgggcttcgaacacctagctgtgcaagccaacatgcaacaacaagc

SEQ ID NO: 70322 - DNA, 144 bp, Zea mays
agaaacacacctagcgaaggtaactagcaacgacctaacaacaatggcttccaagacattatccctccttgcgctccttgcccttttagtgagtgcagcaaatgcgaccattattccacaatgctcacttgatccgagtgccat

SEQ ID NO: 70323 - DNA, 318 bp, Zea mays
caaaaacacaccaagcgaaggcactagcaacgacctaacaccaatggctaccaagatattagccctccttgcgcttcttgcccttttagtgagcgcaacaaatgcgttcattattccacagtgctcacttgctcctagtgccattattccacagttcctcccaccagttacttcaatgggcttcgaacatccagccgtgcaagcctacaggctacaactagcgcttgcggcgagcgccttacaacaaccaattgcccaattgcaacaacaatccttggcacatctaaccctacaaaccattgcaacgcaacaacaaca

SEQ ID NO: 70324 - DNA, 324 bp, Zea mays
  unsure (1)..(324): unsure at all n locations
cgagttcaaaaacacaccaagcgaaggnactagcaacgacctaacaccaatggctaccaagatattagccctccttgcgcttcttgcccttttagtgagcgcaacaaatgcgttcattattccacagtgctcacttgctcctagtgccagtattccacagttcctcccaccagttacttcaatgggcttcgaacatccagccgtgcaagcctacaggctacaactagcgcttgcggcgagcgccttacaacaaccaattgcccaattgtaacaacaatccttggcacatctaaccctacaaaccattgcaacgcaacaacaaca

SEQ ID NO: 70325 - DNA, 317 bp, Zea mays
ggaatcgggtggcatcaatagagcaacaatggcgaccaagatattttccctgggtatgctccttgctctttctacatgtgttgctaacgcgacaattttccctcaatgctcacaagctcctatagcttcccttcttcccccataccttccatcagttatagcttcaatatgtgaaaacccagctcttcaaccatataggcttcaacaagcaatcgcagcaagcaacatacctttatcgcccttgttgtttcaacaatcgccagccctatctttggtgcagtcattggtacaaaccatcagggcacaacagctgcagc

SEQ ID NO: 70326 - DNA, 303 bp, Zea mays
ctcgcgacgtatcaacgacctaacaacaatggcttccaagacattatccctccttgcgcttcttgccctttttgtgagtgcaacaaatgcgttcattattccacaatgctcacttgctccgagtgccattattccacagttcctccctccagttacttcaatgggcttcgaacacccagctgtgcaagcctataggctacaacaagcgcttgcggcgagcgtcttagaacaaccaattgcccaattacaacaacaatccttagcacatctaaccatacaaaccatcgcaacgcagcagcaaca

SEQ ID NO: 70327 - DNA, 315 bp, Zea mays
aaaatattttgcctccttatgctccttggtatttctgcaagtgctgctacggcgaccattttcccgcaatgctcacaagctcctatagcttcccttcttcccccgtacctctcaccagcggtgtcttcggtatgtgaaaacccaattcttcaaccctacaggatccaacaggcaatcgcagctggcatcttacctttatcacccttgttcctccaacaatcatcagccctattacagcagttacctttggtgcatttattggcacaaaacatcagggcacaacaactacaacaacttgtgctagcaaaccttgtg

SEQ ID NO: 70328 - DNA, 320 bp, Zea mays
gaccaactagcaacatagaaagcacaatagtgtaccaacaatggcagccaaaatattttgcctccttatgctccttggtctttctgcaagtgctgctacggcgaccattttcccgcaatgctcgcaagctcctatagcttcccttcttcccccgtacctctcaccagcggtgtcttcggtatgtgaaaacccaattcttcaaccctacaggatccaacaggcaatcacagctggcatcttacctttatcacccttgttcctccaacaatcatcagccctattacatcagttacctttggtgcatttattggcacaaaaca

SEQ ID NO: 70329 - DNA, 315 bp, Zea mays
gggacgcggcctgttgtcccggcttttagacgcaacttccatcgctgcgaagtatccattcgtgttcgtcatggccgccagcgtcaccgtggaaaacctcaaccccaaggtcttaaaatgtgagtatgcagtccgtggggagattgtcatccatgctcagcgcctgcagcaacaactacaaacacaaccagggtctcttccttttgatgagatcctctattgcaacattgggaatccccaatctcttggtcagcaacctgtgacattcttcagggaggttcttgctctttgtgatcatccgtgcctcttggaaaa

SEQ ID NO: 70330 - DNA, 329 bp, Zea mays
gcacaatagtgtaccaacaatggcagccaaaatattttgcttccttatgctccttggtctttctgcaagtgctgctaccgcaaccattttcccacaatgctcacaagctcctatagcttcctttcttcccccatacctctcaccagcggtgtcttcagtatgtgaaaacccaattcttcaaccctacaggatccaacaggcaatcgcagcaggcatcttacctttatcacccttgttcctccaacaaccgtcagccctattacagcagttacctttggtgcatttgttggcacaaaacatcaaggcacaacaactacaacaacttgtgc

SEQ ID NO: 70331 - DNA, 315 bp, Zea mays
tagcaacatagaaagcacaatattgtaccaataatggcagccaaaatattttgcctcattatgctccttggtctttctgcaagtgctgctacggcgagcattttcccgcaatgctcacaagctcctatagcttcccttcttcccccatacctctcaccagcgatgtcttcagtatgtgaaaatccaattcttctaccctacaggatccaacaggcaatcgcagcaggcatcttacctttatcacccttgttcctccaacaatcatcagccctattacagcagttacctttggtgcatttattggcacaaaacatc

SEQ ID NO: 70332 - DNA, 319 bp, Zea mays
cggctcgagtattattgagaccagcaagcaacatagaaagtagaatccattagcaacaatagagcaacaatggcgaccaagatattttccctccttatgctccttgctctttctacatgtgttgctaacgcgacaattttccctcaatgctcacaagctcctatagcttcccttcttcccccataccttccatcaattatagcttcagtatgtgaaaacccagctcttcaaccatataggcttcaacaagcaatcgcagcaagcaacatacctttatcgcccttgttgtttcaacaatcaccagccctatctttggtgc

SEQ ID NO: 70333 - DNA, 309 bp, Zea mays
gcatgtgttgctaacgcgacaattttccctcaatgctcacaagctcctatagcttcccttcttcccccataccttccatcaatgatagcttcagtatgtgaaaacccagctcttcagccctataggctccaacaagcaatcgcagcaagcaacatacctttatcacccttgttgtttcaacaatcgccagccctatctttggtgcagtcattggtacaaaccatcagggcacagcagctgcagcaactcgtgctacctgtgatcaaccaagtagctctggcaaactttctccctactctcagcaacaac

SEQ ID NO: 70334 - DNA, 312 bp, Zea mays
gctaatgaccgtaagatgcttgcttgcaacagccatccttagtgcatctgtatctccaaagaatcgcggcacaacaactacaacaacagttgctaccaacaatcaatcaagtagttgcagcgaaccttgctgcttacctccagcaacaacagtttcttccattcaatcaactagctggggtgaaccctgctatctacttgcaggcacaacagctactaccatttaaccaacttgtcgggagcccttatgccttcttactgcaacaacagcttctgccattccatctgcagctgtggcaaacatgttgctttc

SEQ ID NO: 70335 - DNA, 317 bp, Zea mays
cttttagtgagcgcaacaaatgcgttcattattccacagtgctcacttgctcctagtgccagtattccacagttcctcccaccagttacttcaatgggcttcgaacatccagccgtgcaagcctacaggctacaactagcgcttgcggcgagcgccttacaacaaccaattgcccaattgcaacaacaatccttggcacatctaaccctacaaaccattgcaacgcaacaacaacaacaacagtttctgccatcactgagccacctagccgtggtagaacctgtcacctacttgcaacagcagctgcttgcatccaa

SEQ ID NO: 70336 - DNA, 315 bp, Zea mays
tagcaacatagaaagcacaatagtgtaccaacaatggcagccaaaatattttgcttccttatgctccttggtctttctgcaagtgctgctaccgcaaccattttcccacaatgctcacaagctcctatagcttcctttcttcccccatacctctcaccagcggtgtcttcagtatgtgaaaacccaattcttcaaccctacaggatccaacaggcaatcgcagcaggcatcttacctttatcacccttgttcctccaacaaccgtcagccctattacagcagttacctttggtgcatttgttggcacaaaacatc

SEQ ID NO: 70337 - DNA, 321 bp, Zea mays
ctagcaacatagaaagcacaatagtgtaccaacaatggcagccaaaatattttgcttccttatgctccttggtctttctgcaagtgttgctaccgcaaccattttcccacaatgctcacaagctcctatagcttcccttcttcccccatacctctcaccagcggtgtcttcaatgtgtgaaaccccaattgttcaaccctacaggatccaacaggcaatcgcaacaggcatcttaccattatcacccttgttcctccaacaaccgtcagccctattacagcagttacctttggtccatttggtggcacaaaacatcagggc

SEQ ID NO: 70338 - DNA, 324 bp, Zea mays
  unsure (1)..(324): unsure at all n locations
gccgacaactctctctaccgtccgataccccaagcaccagcgcggcggcggcgaccatggctgtcggaaagaacaagaggatctccaagggaaagaagggtggcaagaaaaagaccgtcgaccctttctctaagaaggattggtatgacatcaaggcaccgtcggtgttcagtgtgcgcaacatcgggaagactctcgtatccaggacacagggtaccaggattgcttctgagggtctgaagcacagagtctttgaggtttgcctagctgatcttcagggcgacgaggatcaagtntacaggaaaatcaggctccgtgctgaag

SEQ ID NO: 70339 - DNA, 321 bp, Zea mays
cgcaatgctcgcaagctcctatagcttcccttcttcccccgtacctctcaccagcggtgtcttcggtatgtgaaaacccaattcttcaaccctacaggatccaacaggcaatcgcagctggcatcttacctttatcacccttgttcctccaacaatcatcagccctattacaacagttacctttggtgcatttattggcacaaaacatcagggcacaacaactacaacaacttgtgctagcaaaccttgctgcctactctcagcaacagcagtttcttccattcaaccaactaggttcattgaactctgcttcttatttgc

SEQ ID NO: 70340 - DNA, 316 bp, Zea mays
  unsure (1)..(316): unsure at all n locations
ctcgagccgctcgagccgaatcggctcgagtagcaacatagaaagcacaatagtgtaccggcaatggcggccanaatattttgcttccttatgctgcttggtctttctgcaagtgctgctaccgcaaccatgttcccacaatgctcacaagctcctatagcttcctttcttcccccatacctctcaccagcggtgtcttcagtatgtgaaaacccaattcttcaaccctacaggatccaacaggcaatcgcagcaggcatcttatattntatcacccttgttcctccaacaatcatcagccctattacagcagtta

SEQ ID NO: 70341 - DNA, 313 bp, Zea mays
cagcaagcaacatagaaagtagaatccattagcaacaatagagcaacaatggcgaccaagatattttccctccttatgctccttgctctttctacatgtgttgctaacgcgacaattttccctcaatgctcacaagctcctatagcttcccttcttcccccataccttccatcaatgatagcttcagtatgtgaaaacccagctcttcaaccctataggctccaacaagcaatcgcagcaagcaacatacctttatcacccttgtttcaacaatcgccagccctatctttggtgcagtcattggtacaaacca

SEQ ID NO: 70342 - DNA, 311 bp, Zea mays
caccacacctcctcgcttgcactccgctcgtctgacatctcgtcacgtcctttcgtttcgaagcctcgcgagccccgacgatggccaccaccgcggtgtcggtcgacgagaagctcgataagcttcgcgccgaggtcgccaagctcgaccagatcagcgagaacgagaagtccgggttcatcagcctcgtgtcacggtacctcagtggggaggcggacagatcgagtggagcaagatccagacccctacggatgaggtggtggtgccctacgataccgtcgcgtacgctcccgaagatctcgaggagacga

SEQ ID NO: 70343 - DNA, 314 bp, Zea mays
attcagaaacacacctagcgaaggtcactagcaacgacctaacaacaatggcttccaagacattatccctccttgcgcttcttgccctttttgtgagtgcaacaaatgcgttcattattccacaatgctcacttgctccgagtgccattattccacagttcctccctccagttacttcaatgggcttcgaacacccagctgtgcaagcctataggctacaacaagcgcttgcggcgagcgtcttagaacaaccaattgcccaattacaacaacaatccttagcactctaaccatacaaaccatcgcaacgcagc

SEQ ID NO: 70344 - DNA, 315 bp, Zea mays
taatatcttggtagccattggtgttagccctccttgcgcttcttgcccttttagtgagcgcaacaaatgcgttcattattccacagtgctcacttgctcctagtgccattattccacagttcctcccaccagttacttcaatgggcttcgaacatccagccgtgcaagcctacaggctacaactagcgcttgcggcgagcgccttacaacaaccaattgcccaattgcaacaacaatccttggcacatctaaccctacaaaccattgcaacgcaacaacaacaacaacaacagtttctgccatcactgagccact

SEQ ID NO: 70345 - DNA, 307 bp, Zea mays
atttcttccattcaaccaactagcagcattgaactctcctgcttatttacagcagcaacaactactaccattcagccagctagctggtgtgagccctgctaccttcttgacacaccacagttgttgccgttctaccagcacgttgcgcctaacgctggcaccctcttacaactgcaacaattgctgccattcaaccaacttgctttgacaaacccagcagtgttctaccaacaacccatcattggtggtgcctcttttagattcttatgagttatagttcaataataagtttttatctgatgttgtg

SEQ ID NO: 70346 - DNA, 313 bp, Zea mays
cagcaagcaacatagaaagtagaatccattagcaacaatagagcaacaatggcgaccaagatattttccctccttatgctccttgctctttctacatgtgttgctaacgcgacaattttccctcaatgctcacaagctcctatagcttcccttcttcccccataccttccatcaattatagcttcagtatgtgaaaacccagctcttcaaccatataggcttcaacaagcaatcgcagcaagcaacatacctttatcgcccttgttgtttcaacaatcaccagcgctatctttggtgcagtcattggtacaaa

SEQ ID NO: 70347 - DNA, 309 bp, Zea mays
aagcaacatagaaagtggaatacagtagcaaaaatagagcaacaatggcggccaagatattttccatccttatgctccttgctctttctgcatgtgttgctaacgcgaccatttttcctcaatactcacaagctcctatagctgcccttcttcccccataccttccatcaatgaccgctttagtatgtgaaaacccagcccttcaaccctacaggatccagcaagcaatcgcaacaagcaacttacctttatcacacctgttctttcaacaatcgccagccctatctttggtgcagtcattggtacaaa

SEQ ID NO: 70348 - DNA, 306 bp, Zea mays
catccttctatcagtaccatcaatcatcattcatcttagtagtataggcaccaaatcaaatctgcaacatcaattatctaactccaaaaaccatgaagctggtgcttgtggttcttgctttcattgctttagtatcaagtgtttcttgtacacagacaggcggctgcagctgtggtcaacaacaaagccatgagcagcaacatcatccacaacaacatcaaccatattattgagaccaacaagcaacatagaaagtggaatacagtagcaacaatagagcaacaatggcggccaagatattttcca

SEQ ID NO: 70349 - DNA, 312 bp, Zea mays
atcggcaggaggttcagtgatgcgtctgtccagagtgatatcaagttgtggcccttcaaggtcatttctgggcctggtgagaagccaatgattgttgtccagcacaagggtgaggagaagcagtttgcagctgaagagatctcctctatggttcttatcaagatgcgtgagattgctgaagcttaccttggtagcacgatcaagaatgctgtggtcacagtccctgcctacttcaatgactcacagaggcaggccacaaaggatgctggggtgattgctggccttaatgtgctgcgtatcatcaacgagcca

SEQ ID NO: 70350 - DNA, 320 bp, Zea mays
atattttcagcattcaaaaacacaccaagcgaagcgcactagcaacgacctaacaccaatggctaccaagatattagccctccttgcgcttcttgcccttttagtgagcgcaacaaatgcgttcattattccacagtgctcacttgctcctagtgccattattccacagttcctcccaccagttacttcaatgggcttcgaacatccagccgtgcaagcctacaggctacaactagcgcttgcggcgagcgccttacaacaaccaattgcccaattgcaacaacaatccttggcacatctaaccctacaaaccattgcaa

SEQ ID NO: 70351 - DNA, 320 bp, Zea mays
agcaaggtgataggtaccgtgaattggcccatagggtggatgatgctcttgggttcatgactgcatcggggcttacagtcgaccacccgataatgacgactactgacttctggacctcgcacgagtgccttctcttaccctacgagcaggctcttacccgtgaggattccaccagtggccttttctatgattgttcggcccacatgttgtgggttggtgagcgcactcgacaactcgatggagctcatgttgaattcctccgtggtgttgccaaccctctgggcataaaggtgagcgacaaaatgaaccccagtgagttg

SEQ ID NO: 70352 - DNA, 311 bp, Zea mays
attgagaccaacaagcaacatagaaagtggaatacagtagcaacaatagagcaacaatggcggccaagatattttccatccttatgctccttgctctttctgcatgtgttgctaacgcgaccatttttcctcaatactcacaagctcctatagctgcccttcttcccccataccttccatcaatgaccgcttcagtttgtgaaaacccagcccttcaaccctacaggctccaacaagcaatcgcaacaagcaacttacctttatcacccctgttctttcaacaatcgccagccctatctttggtgcagtca

SEQ ID NO: 70353 - DNA, 301 bp, Zea mays
ctcgagctacccgactccgccgccgctcgccgctccgcctcagcgcatagcccgctgcgacctcatcgatcaccttcaactttcaatcatggcggacgtcgatttcgaaccggagcttgccgccggagctcccaagaagaggacgttccgcaagtacagctaccgcggcgtcgacctagatgcgcttctcgacatgtccacggacgacctcgtccagctcttgtccgcgcgcgccacgacaaggttccagaggggtctgaagaggaagcccatggcgctcatcaagaagctgcgcaaggcg

SEQ ID NO: 70354 - DNA, 309 bp, Zea mays
tacacatccttcaagatgggataccattggcgtgttcttcaaaaaaaaacttgactcttcgactctgtgtaggttttattttgatttcagcccaacctatattggatgtggtcttatttgtccgcatattgttaattgttctacacttcttggtgccataatatcgtggggtattctttggccatatatctccacaaaagctggggactggtatccagctgaccttggaagcaatgacttcaaaggactctatggatacaaggtttttatatctgtatctgtgatacttggggatggtctttataactc

SEQ ID NO: 70355 - DNA, 307 bp, Zea mays
attgagaccaactagcaacatagaaagcacaatagtgtaccaacaatggcagccaaaatattttgcctccttatgctccttggtctttctgcaagtgctgctacggcgaccattttcccgcaatgctcgcaagctcctatagcttcccttcttcccccgtacctctcaccagcggtgtcttcggtatgtgaaaacccaattcttcaaccctacaggatccaacaggcaatcacagctggcatcttacctttatcacccttgttcctccaacaatcatcagccctattacatcagttacctttggtgc

SEQ ID NO: 70356 - DNA, 310 bp, Zea mays
gtgctcacttgctcctagtgccagtattccacagttcctcccaccagttacttcaatgggcttcgaacatccagccgtgcaagcctacaggctacaactagcgcttgcggcgagcgccttacaacaaccaattgcccaattgcaacaacaatccttggcacatctaaccctacaaaccattgcaacgcaacaacaacaacaacagtttctgccatcactgagccacctagccgtggtgaaccctgtcacctacttgcaacagcagctgcttgcatccaacccacttgctctggcgaacgtagctgcatac

SEQ ID NO: 70357 - DNA, 312 bp, Zea mays
cagaaacacaccaagcgaaggcactagcaacgacctaacaacaatggctaccaagatattagccctccttgcgcttcttgccctttttgtgagcgcaacaaatgcgttcattattccacaatgctcacttgctcctagtgccattattccacagttcctcccaccagttacttcaatgggcttcgaacacctagctgtgcaagccaacatgcaacaacaagcgcttgcggcgagcgtcttacaacaaccaattgcccaattgcaacaacaatccttgccacatctaacaatacaagccatcacaacgcaaca

SEQ ID NO: 70358 - DNA, 312 bp, Zea mays
cctaactcagtgcttcgttttgcttttatcgagtttgctgatgacgttgctgcacaagcagcactagcacttggtggaaccgtgcttggcttttatcctgtcaaggttctgccatcaaagacagcaattttacctgtgaaccctaaatttcttcctcacactgatgatgagaaagaaatggtatccaggactgtgtattgtactaacattgacaagaagatcgcagaagatgaagtgaagcaattctttgagggaacatgtggtgaagtttctcgtctgaggctacttggtgattatgtgcactccacatgc

SEQ ID NO: 70359 - DNA, 313 bp, Zea mays
tcatgatcaagcattagtcggcgacaagactattgcgttttggttgatggacaaggatatgtatgatttcatggccctcgatagaccttcaactcctaccattgatcgtgggatagcattacataagatgattagacttatcacaatgggtttaggaggagagggctatcttaatttcatgggaaatgagtttggacatcctgaatggatagattttccaagaggtccgcaaagacttccaagtggtaagtttattccagggaataacaacagttatgacaaatgtcgtcgaagatttgacctgggtgatgca

SEQ ID NO: 70360 - DNA, 207 bp, Zea mays
ctcgagccgggctaacccattggtcgctgccttcctacagcagcaacaattgctgccatagaaccagttctctttgatgaaccctgccttgtcgtggcagcaacccatcgttggtggtgccatctagtagattacatatgagatgtactcgataatggtgccctcatagcggcatgtgtttcctaaaaataatcaatatattgattg

SEQ ID NO: 70361 - DNA, 323 bp, Zea mays
tattattgagaccaactagcaacatagaaagcacaatagtgtaccaacaatggcagccaaaatattttgcctccttatgctccttggtctttctgcaagtgctgctacggcgaccattttcccgcaatgctcgcaagctcctatagcttcccttcttcccccgtacctctcaccagcggtgtcttcggtatgtgaaaacccaattcttcaaccctacaggatccaacaggcaatcgcagctggcatcttacctttatcacccttgttcctccaacaatcatcagccctattacaacagttacctttggtgcatttattggcac

SEQ ID NO: 70362 - DNA, 310 bp, Zea mays
caattggccgcactgaaccccgctgcttatttgcagcagcacatactactaccatttagccagctagctgcagcaaaccgtgcttccttcttgacacagcaacagttgctgcctttctaccagcagtttgcggctaaccccgcaaccctcttacaactacaacaattgttgccctttgtccaacttgctttgacagacccagcggtctcctaccaacaacacatcattggtggtgcctcttttagattgcttattagttgtaattcaataataaagttttttggatgatgtatgtggccaaccagaaata

SEQ ID NO: 70363 - DNA, 300 bp, Zea mays
ccaactagcaacatagaaagcacaatagtgtaccaacaatggcagccaaaatattttgcctccttatgctccttggtctttctgcaagtgctgctacggcgaccattttcccgcaatgctcgcaagctcctatagcttcccttcttcccccgtacctctcaccagcggtgtcttcggtatgtgaaaacccaattcttcaaccctacaggatccaacaggcaatcgcagctggcatcttacctttatcacccttgttcccccaacaatcatcagccctattacaacagttacctttggtgc

SEQ ID NO: 70364 - DNA, 308 bp, Zea mays
ccaaggagtccaaagagacgcagcacttcaaggtctcctcctaggagacgtggtagatcaaggtcaagggataggagtcggtccaggagcccagatgatagaaatccagggaataacctttatgtaactggattgtctactcgtgtaacggaagatgatcttgagaagttctttagtaaagaaggaaaggttaagaactgtcatgttgttcttgatcctaggacaaaagaatcccgtggctttgccttcgtgactatggatactcttgaaggtgcaagacgctccatcaagtatctgcaccgcactgt

SEQ ID NO: 70365 - DNA, 311 bp, Zea mays
gaccaactagcaacatagaaagcacaatagtgtaccaacaatggcagccaaaatattttgcttccttatgctccttggtctttctgcaagtgttgctaccgcaaccattttcccacaatgctcacaagctcctatagcttcccttcttcccccatacctctcaccagcggtgtcttcaatgtgtgaaaacccaattgttcaaccctacaggatccaacaggcaatcgcaacaggcatcttaccattatcacccttgttcctccaacaaccgtcagccctattacagcagttacctttggtccatttggtgg

SEQ ID NO: 70366 - DNA, 310 bp, Zea mays
attttcagcattcaaaaacacaccaagcgaaggtcactagcaacgacctaacaccaatggctaccaagatattagccctccttgcgcttcttgcccttttagtgagcgcaacaaatgcgttcattattccacagtgctcacttgctcctagtgccattattccacagttcctcccaccagttacttcaatgggcttcgaacatccagccgtgcaagcctacaggctacaactagcgcttgcggcgagcgccttacaacaaccaattgcccaattgcaacaacaatccttggcacatctaaccctacaaac

SEQ ID NO: 70367 - DNA, 305 bp, Zea mays
  unsure (1)..(305): unsure at all n locations
cagctgcttgcatccaacccacttgctttggcaaacgtagctgcataccaacaacaacaacagttgcaacagtttctgccagcgctcagtcaactagccatggtgaaccctatcgcctaccggcaacagcaacaacttctttcatctagcccgctcgctatgggcaatgcacctacatacctgcaacaacagttgttgcaacaacagttgctgcagccaattgtaccagctcttactcagataacggagaaanacctgctgcctacttgcaacaactacttcccattcaccaactgactgtgtcg

SEQ ID NO: 70368 - DNA, 135 bp, Zea mays
  unsure (1)..(135): unsure at all n locations
atttagaccaactagcaacatagaaagcacaatagtgtaccaacaatggcagccanaatatgttgcctccttatgctccttggtatttctgcaagtgctgctacggcgaccattttcccgcaatgctcacaagct

SEQ ID NO: 70369 - DNA, 306 bp, Zea mays
tttagaccaactagcaacatagaaagcacaatagtgtaccaacaatggcagccaaaatattttgcctccttatgctccttggtatttctgcaagtgctgctacggcgaccattttcccgcaatgctcacaagctcctatagcttcccttcttcccccgtacctctcaccagcggtgtcttcggtatgtgaaaacccaattcttcaaccctacaggatccaacaggcaatcgcagctggcatcttacctttatcacccttgttcctccaacaatcatcagccctattacagcagttacctttggtgc

SEQ ID NO: 70370 - DNA, 306 bp, Zea mays
ctggtccatgtacgatacctgggcgaggaacggacgttcacctcaacccagctgcttgccatggtgctgtccaatttgaagggcattgctgagggtaacctgaatgctgcagttgttgattgttgcattggtattccagtctactttacggatctgcagcgcagggctgttcttgatgctgctactattgcgggtctccagccattgcgattgttccatgagacaacagccactgcactggcatatggtatttataagactgatctcccggagaatgaccagttgaacgttgcatttgttgatgtc

SEQ ID NO: 70371 - DNA, 127 bp, Zea mays
  unsure (1)..(127): unsure at all n locations
gcaacatagaaagcacaatagtgtaccaacaatggcagccanaatattttgcttccttatgctccttggtctttctgcaagtgctgctaccgcaaccattttccccaaatgctccaaagctcctata

SEQ ID NO: 70372 - DNA, 111 bp, Zea mays
aacaagcaacatagaaagtcgaatccagtagcaacaacagagcaacaatggcgaccaagatattgtccctccttatgctccatgctctatctgcatgtgatgctaacgcga

SEQ ID NO: 70373 - DNA, 283 bp, Zea mays
cagcagtttcttccattcaaccaactagctgcattgaactctgcttcttatttgcaacaacaacaactaccattcagccagctatctgctgcctacccccagcaatttcttccattcaaccaactgacagcattgaactctcctgcttatttacagcagcaacaactactaccattcagccagctagctggtgtgagccctgctaccttcttgacacaaccacagttgttgccgttctaccagcacgctgcgcctaacgctggcaccctcttacaactgcaac

SEQ ID NO: 70374 - DNA, 305 bp, Zea mays
atcacccataatattttgagcattcagaaacacacctagcgaaggcactagcaacgacctaacaacaatggctaccaagatattatccctctttgcgcttcttgccctttttgtgagcgcaacaaatgcgttcattattccacaatgctcacttgctcctagtgccattattccacagttcctccctccagttacttcaatgggcttcgaacacccagctgtgcaagcctacaggctacaacaagcgcttgcggcgagcgtcttacaacaaccaattgcccaattacaacaacaatccttggcac

SEQ ID NO: 70375 - DNA, 308 bp, Zea mays
attttgagcattcagaaacacaccaagcgaagacattagcaacaacctaacaacaatggctaccaagatattatccctccttgcgcttcttgcgctttttgcgagcgcaacaaatgcgttcattattccacaatgctcacttgctccaagttccattattacacagttcctcccaccagttacttcaatgggcttcgaacacccagctgtgcaagcctataggctacaacaagcaattgcggcgagcgtcttacaacagaccatttcccagttgcaacaacaatccttggcacatctaacaatacaaa

SEQ ID NO: 70376 - DNA, 307 bp, Zea mays
attttgagcattcagaaacacaccaagcgaaggcactagcaacaacctaacaacaatggctaccaagatattatccctccttgcgcttcttgcgctttttgcgagcgcaacaaatgcgtccattattccacaatgctcacttgctcctagttccattattccacagttcctcccaccagttacttcaatggccttcgaacacccagctgtgcaagcctataggctacaacaagcgattgcggcgagcgtcttacaacaaccaattgcccaattgcaacaacaatccttggcacatctaacaatacaa

SEQ ID NO: 70377 - DNA, 304 bp, Zea mays
  unsure (1)..(304): unsure at all n locations
ggactgcttgctccctgttgaccattgggtattctgaaccatcgagccatggctgccaagctgactcgcctccacagtcttcgcgaacgccttggtgccaccttcncctcccatcccaatgaactgatagcactcttttccaggtatgttcaccagggcaagggaatgcttcagcgccatcagctgcttgcggagtttgatgccctgtttgatagtgacaaggagaagtatgcaccctttgaagacattcttcgtgctgctcaggaagcaatgtgctccccccatgggttgcattgctatcagg

SEQ ID NO: 70378 - DNA, 306 bp, Zea mays
tctcgagccgaatcggctcgagctagcaacatagaaagcacaatagtagtaccaacaatggcagccaaaatattttgcttccagatgctccttggtctttctgcaagtgttgctaccgcaaccattttcccacaatgctcacaagctcctatagcttcccttcttcccccatacctctcaccagcggtgtcttcaatgtgtgaaaacccaattgttcaaccctacaggatccaacaggcaatcgcaacaggcatcttaccattatcacccttgttcctccaacaaccgtcagccctattacagcag

SEQ ID NO: 70379 - DNA, 291 bp, Zea mays
aaggtgcactcgcacttcgaccgctccctagagtccgggccgtacaccctcaagtaccgcggatccatgtggggctacaaaaggttctttcggcgtactgctcttgagcaatcagattttcttaaagatgattgcttgaagataaactgtactgtgggtgttgtagtatcaactatggattattctaggccacattcaatagaggttccagagtctgacataggctttcattttggaacgcttttggacactcaggaaggtgtagatgttatttttagtgtagcaggagag

SEQ ID NO: 70380 - DNA, 309 bp, Zea mays
  unsure (1)..(309): unsure at all n locations
ctgcagcaactcgtgctacctctgatcaaccaagtagctctggcaacctttctccctactctcagcaacaacaatttcttccattcaaccaactgtctacactgaaccctgctgcttatttgcagcaacaactattaccatttagccagctagctactgcctactctcagcaacaacaacttcttccatttaaccaattggccgcactgaaccccgctgcttatttgcagcagcaaatactactaccatttagccagctagctgcagcanaccgtgcttccttcttgacacagcaacagttgctgcctt

SEQ ID NO: 70381 - DNA, 301 bp, Zea mays
gaccaactagcaacatagaaagcacaatagtgtaccaacaatggcagccaaaatattttgcctccttatgctccttggtctttctgcaagtgctgctacggcgaccattttcccgcaatgctcgcaagctcctatagcttcccttcttcccccgtacctctcaccagcggtgtcttcggtatgtgaaaacccaattcttcaaccctacaggatccaacaggcaatcgcagctggcatcttacctttatcaccttgttcctccaacaatcatcagccctattacaacagttacctttggtgc

SEQ ID NO: 70382 - DNA, 87 bp, Zea mays
gttcggagcgcacacacacgcaaccagatctcccccaaatccagccgtcggcacctccgcttcaagatgcagatctttgtgaaaacc

SEQ ID NO: 70383 - DNA, 250 bp, Zea mays
gctgagagtaggcagcagcagtttcttccattcaaccaactagctgcattgaactctgcttcttatttgcaacaacaacaactaccattcagccagctatctgctgcctacccccagcaatttcttccattcaaccaactgacagcattgaactctcctgcttatttacagcagcaacaactactaccattcagccagctagctggtgtgagccctgctaccttcttgacacaaccacagttgttgccgt

SEQ ID NO: 70384 - DNA, 249 bp, Zea mays
agaaagcacaatagtgtaccaacaatggcagccaaaatattttgcctccttatgctccttggtctttctgcaagtgctgctacggcgaccattttcccgcaatgctcgcaagctcctatagcttcccttcttcccccgtacctctcaccagcggtgtcttcggtatgtgaaaacccaattcttcaaccctacaggatccaacaggcaatcacagctggcatcttacctttatcacccttgttcctccaa

SEQ ID NO: 70385 - DNA, 247 bp, Zea mays
gagcattcagaaacacaccaagcgaacgcactagcaacgacctaacaacaatggctaccaagatattagccctccttgcgcttcttgccctttttgtgagcgcaacaaatgcgttcattattccacaatgctcacttgctcctagtgccattattccacagttcctcccaccagttacttcaatgggcttcgaacacctagctgtgcaagccaacatgcaacaacaagcgcttgcggcgagcgtctt

SEQ ID NO: 70386 - DNA, 246 bp, Zea mays
gagcattcagaaacacacctagcgaacgcactagcaacgacctaacaacaatggcttccaagacattatccctccttgcgcttcttgccctttttgtgagtgcaacaaatgcgttcattattccacaatgctcacttgctccgagtgccattattccacagttcctccctccagttacttcaatgggcttcgaacacccagctgtgcaagcctataggctacaacaagcgcttgcggcgagcgtct

SEQ ID NO: 70387 - DNA, 251 bp, Zea mays
tgctgcctacccccagcaatttcttccattcaaccaactagcagcattgaactctgctgcttatttacagcagcaacaactactaccattcagccagctagctgatgtgagccctgctgccttcttgacacaacaacagttgttgccgttctacctgcacgctatgcctaacgctggcaacctcttacaactgcaacaattgctgccattcaaccaacttgctttgacaaacccaacagtgttctaccaac

SEQ ID NO: 70388 - DNA, 238 bp, Zea mays
agccgccgccgctgctcatctcacatccctcgagaagacgcctgctcctcgccgatcgatacgatggccgtcttctccgacctccacaccgccgacggcctcaagtccctcgaggctcacctcgccggcaaaacctatgtgtctggtgactccattactaaggatgacattaaggtcttcgccgcggtgccgtcgaagcctggcgctgagtttcctaatgccgcccgctggtacgaga

SEQ ID NO: 70389 - DNA, 246 bp, Zea mays
ccgccgcctgccgcactctcctgcgacgccacaaccacacgttcacggtagcgagagcttatcgtcgtcggcggtgaagatggtgtcgctgaagctgcagaagcggctcgccgctagcgtcctcaagtgtgggaaaggcaaagtctggcttgaccccaatgaagtcagcgagatctccatggctaactcccgccagaacatccggaagttggttaaggatgggtttatcatcaggaagcctcagaa

SEQ ID NO: 70390 - DNA, 247 bp, Zea mays
gaccaactagcaacatagaaagcacaatagtgtaccaacaatggcagccaaaatattttgcttccttatgctccttggtctttctgcaagttttgctaccgcaaccattttcccacaatgctcacaagctcctatagcttcccttcttcccccatacctctcaccagcggtgtcttcaatgtgtgaaaccccaattgttcaaccctacaggatccaacaggcaatcgcaacaggcatcttaccatta

SEQ ID NO: 70391 - DNA, 247 bp, Zea mays
tgctgcctacccccagcaatttcttccattcaaccaactagcagcattgaactctgctgcttatttacagcagcaacaactactaccattcagccagctagctgatgtgagccctgctgccttcttgacacaacaacagttgttgccgttctacctgcacgctatgcctaacgctggcacgctcttacaactgcaacaattgctgccattcaaccaacttgctttgacaaacccaacagtgttctac

SEQ ID NO: 70392 - DNA, 249 bp, Zea mays
aatattttcagcattcaaaaacacaccaagcgaagcgcactagcaacgacctaacaccaatggctaccaagatattagccctccttgcgcttcttgcccttttagtgagcgcaacaaatgcgttcattattccacagtgctcacttgctcctagtgccagtattccacagttcctcccaccagttacttcaatgggcttcgaacatccagccgtgcaagcctacaggctacaactagcgcttgcggcga

SEQ ID NO: 70393 - DNA, 247 bp, Zea mays
attattgagaccaacaagcaacatagaaagtggaatccagtagcaacaatagagcaacaatggcgaccaagatattttccctccttatgctccttgctctttctacatgtgttgctaacgcgacaattttccctcaatgctcacaagctcctatagcttcccttcttcccccataccttccatcaattatagcttcaatatgtgaaaacccagctcttcaaccatataggcttcaacaagcaatcgc

SEQ ID NO: 70394 - DNA, 244 bp, Zea mays
agaccaactagcaacatagaaagcacaatagtgtaccaacaatggcagccaaaatattttgcttccttatgctccttggtctttctgcaagtgttgctaccgcaaccattttcccacaatgctcacaagctcctatagcttcccttcttcccccatacctctcaccagcggtgtcttcaatgtgtgaaaccccaattgttcaaccctacaggatccaacaggcaatcgcaacaggcatcttacc

SEQ ID NO: 70395 - DNA, 243 bp, Zea mays
gctgagagtaggcagcagcagtttcttccattcaaccaactagctgcattgaactctgcttcttatttgcaacaacaacaactaccattcagccagctatctgctgcctacccccagcaatttcttccattcaaccaactgacagcattgaactctcctgcttatttacagcagcaacaactactaccattcagccagctagctggtgtgagccctgctaccttcttgacacaaccacagttg

SEQ ID NO: 70396 - DNA, 122 bp, Zea mays
caacaagcaacatagaaagtggaatccagtagcaacaacagagcaacaatggcgaccaagatattttccctccttatgctccttgctctttctgcatgtgttgctaacgcgacaattttccc

SEQ ID NO: 70397 - DNA, 245 bp, Zea mays
aagcaacatagaaagtggaatccagtagcaacaatagagcaacaatggcgaccaagatattttccctccttatgctccttgctctttctacatgtgttgctaacgcgacaattttccctcaatgctcacaagctcctatagcttcccttcttcccccataccttccatcaattatagcttcaatatgtgaaaacccagctcttcaaccatataggcttcaacaagcaatcgcagcaagcaacata

SEQ ID NO: 70398 - DNA, 246 bp, Zea mays
gagaccaacaagcaacatagaaagtggaatccagtagcaacaacagagcaacaatggcgaccaagatattttccctccttatgctccttgctctttctgcatgtgttgctaacgcgacaattttccctcaatgctcacaagctcctatagcttcccttcttcccccataccttccatcaatgatagcttcagtatgtgaaaacccagctcttcagccctataggctccaacaagcaatcgcagcaa

SEQ ID NO: 70399 - DNA, 245 bp, Zea mays
tagcaacatagaaagcacaatagtgtaccaacaatggcagccaaaatattttgcctccttatgctccttggtctttctgcaagtgctgctacggcgaccattttcccgcaatgctcgcaagctcctatagcttcccttcttcccccgtacctctcaccagcggtgtcttcggtatgtgaaaacccaattcttcaaccctacaggatccaacaggcaatcgcagctggcatcttacctttatcacc

SEQ ID NO: 70400 - DNA, 246 bp, Zea mays
gaccaactagcaacatagaaagcacaatattgtaccaataatggcagccaaaatattttgcctcattatgctccttggtctttctgcaagtgctgctacggcgagcattttcccgcaatgctcacaagctcctatagcttcccttcttcccccatacctctcaccagcgatgtcttcagtatgtgaaaatccaattcttctaccctacaggatccaacaggcaatcgcagcaggcatcttaccttt

SEQ ID NO: 70401 - DNA, 247 bp, Zea mays
ccaactagcaacatagaaagcacaatagtgtaccaacaatggcagccaaaatattttgcctccttatgctccttggtctttctgcaagtgctgctacggcgaccattttcccgcaatgctcgcaagctcctatagcttcccttcttcccccgtacctctcaccagcggtgtcttcggtatgtgaaaacccaattcttcaaccctacaggatccaacaggcaatcgcagctggcatcttacctttatc

SEQ ID NO: 70402 - DNA, 243 bp, Zea mays
tagcaacatagaaagcacaatagtgtaccaacaatggcagccaaaatattttgcctccttatgctccttggtctttctgcaagtgctgctacggcgaccattttcccacaatgctcacaagctcctatagcttcccttcttcccccgtacctctcaccagcggtgtcttcggtatgtgaaaacccaattcttcaaccctataggatccaacaggcaatcgcagctggcatcttacctttatca

SEQ ID NO: 70403 - DNA, 242 bp, Zea mays
ggctaccaagatattatccctctttgcgcttcttgccctttttgtgagcgcaacaaatgcgttcattattccacaatgctcacttgctcctagtgccattattccacagttcctccctccagttacttcaatgggcttcgaacacccagctgtgcaagcctacaggctacaacaagcgcttgcggcgagcgtcttacaacaaccaattgcccaattacaacaacaatccttggcacatctaa

SEQ ID NO: 70404 - DNA, 244 bp, Zea mays
gagaccaactagcaacatagaaagcacaatagtgtaccaacaatggcagctaaaatattttgcctccttatgctccttggtctttctgcaagtgctgctacggcgaccattttcccacaatgctcacaagctcctatagcttcccttcttcccccgtacctctcaccaacggtgtcttcggtatgtgaaaacccaattcttcaaccctacaggatccaacaggcaatcgcagctggcatcttac

SEQ ID NO: 70405 - DNA, 246 bp, Zea mays
attttcagcattcaaaaacacaccaagcgaagcgcactagcaacgacctaacaccaatggctaccaagatattagccctccttgcgcttcttgcccttttagtgagcgcaacaaatgcgttcattattccacagtgctcacttgctcctagtgccagtattccacagttcctcccaccagttacttcaatgggcttcgaacatccagccgtgcaagcctacaggctacaactagcgcttgcggcga

SEQ ID NO: 70406 - DNA, 131 bp, Zea mays
caacaagcaacatagaaagtggaatccagtagcaacaatagagcaacaatggcgaccaagatactttccctccttatgctccttgctctttctgcatgtgttgctaacgcgacaattttccctcaatgctc

SEQ ID NO: 70407 - DNA, 246 bp, Zea mays
attgagaccaacaagcaacatagaaagtggaatccagtagcaacaatagagcaacaatggcgaccaagatattttccctccttatgctccttgctctttctacatgtgttgctaacgcgacaattttccctcaatgctcacaagctcctatagcttcccttcttcccccataccttccatcaattatagcttcaatatgtgaaaacccagctcttcaaccatataggcttcaacaagcaatcgcag

SEQ ID NO: 70408 - DNA, 127 bp, Zea mays
cgggtctacagatcaatagctttatctactccagagctcagcagtacccgatcgacatcatgagggtgttgcacgttgaccgcgatctcctggctctcgctgcgatcgccacatccacacaagatat

SEQ ID NO: 70409 - DNA, 244 bp, Zea mays
attgagaccaactagcaacatagaaagcacaatagtgtaccaacaatggcagccaaaatattttgcctccttatgctccttggtctttctgcaagtgctgctacggcgaccattttcccgcaatgctcgcaagctcctatagcttcccttcttcccccgtacctctcaccagcggtgtcttcggtatgtgaaaacccaattcttcaaccctacaggatccaacaggcaatcacagctggcatct

SEQ ID NO: 70410 - DNA, 241 bp, Zea mays
gaccaactagcaacatagaaagcacaatagtgtaccaacaatggcagccaaaatattttgcttccttatgctccttggtctttctgcaagtgttgctaccgcaaccattttcccacaatgctcacaagctcctatagcttcccttcttcccccatacctctcaccagcggtgtcttcaatgtgtgaaaccccaattgttcaaccctacaggatccaacaggcaatcgcaacaggcatctta

SEQ ID NO: 70411 - DNA, 238 bp, Zea mays
cctccgcgtcacccctctcgtcgcctcttgcggcgaccggcggcggatcgtccgcggcgcaacgcgaccatggggctcttcaccgttccgaagaaggtcaccatccccttcgaaggccagaagcccggtacctccggcctccgcaagaaggttactgtattccagcagcctcattagctgcagagctttgtcgagtcaacattcaatgtccttcctgcagaccaagtaaaatgtgcac

SEQ ID NO: 70412 - DNA, 180 bp, Zea mays
cagcaattgctgccatttagccaactcgctttgacgaatcctaccaccttattgcatcagcccaccattggtggtaccatcttctagattttttatgctttatactgtaataataaatttctcatactgatatgtgcaacttctcagtaataaaagattagagatctatattttaagttc

SEQ ID NO: 70413 - DNA, 242 bp, Zea mays
  unsure (1)..(242): unsure at all n locations
attttcagcattcaaaaacacaccaagcgaaggngactagcaacgacctaacaccaatggctaccaagatattagccctccttgcgcttcttgcccttttagtgagcgcaacaaatgcgttcattattccacagtgctcacttgctcctagtgccagtattccacagttcctcccaccagttacttcaatgggcttcgaacatccagccgtgcaagcctacaggctacaactagcgcttgcg

SEQ ID NO: 70414 - DNA, 124 bp, Zea mays
tgggtcttcagaccattagctttatctactccagagcgcagaagaacccgatcgacaccatgagggcgttgctcgttgccctcgctctcctggctctcgctgcgagcgccacttccacacaaca

SEQ ID NO: 70415 - DNA, 240 bp, Zea mays
caagcaacatagaaagtggaatccagtagcaacaatagagcaacaatggcgaccaagatattttccctccttatgctccttgctctttctacatgtgttgctaacgcgacaattttccctcaatgctcacaagctcctatagcttcccttcttcccccataccttccatcaattatagcttcaatatgtgaaaacccagctcttcaaccatataggcttcaacaagcaatcgcagcaagc

SEQ ID NO: 70416 - DNA, 224 bp, Zea mays
ctggacgtcagcctagcaattagctcatcgaatccagattggagaactcgacaccatgtaggtgctgatcgttgcccttgctctcctggcgctcgctgcgagcgcgcctccagtacaagcggcggctgtggctgccagacaccaccgtttcatctaccgcctccgttctatatgccgcctccgttctatctgccgccgcagcagcagccgcagccatggcaata

SEQ ID NO: 70417 - DNA, 239 bp, Zea mays
catagaaagtggaatccagtagcaacaacagagcaacaatggcgaccaagatattttccctccttatgctccttgctctttctgcatgtgttgctaacgcgacaattttccctcaatgctcacaagctcctatagcttcccttcttcccccataccttccatcaatgatagcttcagtatgtgaaaacccagctcttcagccctataggctccaacaagcaatcgcagcaagcaacata

SEQ ID NO: 70418 - DNA, 247 bp, Zea mays
gagcaactagcagcatagaaagcacaatagtgtaccaataatggcagccaaaatattttgcctcattatgctgcagggtctttctgcaagtgctgctacggcgagcattttcccgcaatgctcacaagctcctatagcttcccttcttcccccatacctctcaccagcgatgtcttcagtatgtgacaatccaattcttctaccctacaggatccaacaggcaatcgcagcaggcatcttaccttta

SEQ ID NO: 70419 - DNA, 242 bp, Zea mays
agcaaaccgtgcttccttcttgacacagcaacagttgctgcctttctaccagcagtttgcggctaaccccgcaaccctcttacaactacaacaattgttgccctttgtccaacttgctttgacagaccgagcggcctcctaccaacaacacatcattggtggtgccctcttttagattgcttattagttgtaattcaataataaagttttttggatgatgtatgtggccaaccagaaataag

SEQ ID NO: 70420 - DNA, 236 bp, Zea mays
aagcacaccgctgccctgcaacaactgatcacacatattattgagaccaactagcaacatagaaagcacaatagtgtaccaacaatggcagccaaaatattttgcctccttatgctccttggtctttctgcaagtgctgctacggcgaccattttcccacaatgctcacaagctcctatagcttcccttcttcccccgtacctctcaccagcggtgtcttcggtatgtgaaaaccc

SEQ ID NO: 70421 - DNA, 239 bp, Zea mays
ctcgagccgcttctgcgcctccatttcggcctctgtcccttgcaagttcaatctcacctcagaccatgggtaaagagaagtcccacatcaacattgtggttattggccatgtcgactctggcaagtcgaccaccacaggacaccttatctacaagcttggaggcattgacaagcgtgtgatcgagaggtttgagaaggaggctgctgaaatgaacaagcggtccttcaagtacgcgtgg

SEQ ID NO: 70422 - DNA, 239 bp, Zea mays
ccaactagcaacatagaaagcacaatagtgtaccaacaatggcagccaaaatattttgcttccttatgctccttggtctttctgcaagtgctgctaccgcaaccattttcccacaatgctcacaagctcctatagcttcctttcttcccccatacctctcaccagcggtgtcttcagtatgtgaaaacccaattcttcaaccctacaggatccaacaggcaatcgcagcaggcatctta

SEQ ID NO: 70423 - DNA, 242 bp, Zea mays
aacagcaacaacagttcctaccagcactgagccaactagatgtggtgaaccctgtcgcctacttgcaacagcaggtgcttgcatccaacccacttgctctggcaaacgtagctgcataccaacaacaacaacaattgcaacagtttctgccagcgctcagtcaactagccatggtgaaccctgccgcctacctacaacagcaacaactgctttcatctagccctctcgttgtgggtaatgca

SEQ ID NO: 70424 - DNA, 244 bp, Zea mays
acaagctcctatagcttcccttcttcccccgtacctctcaccaacggtgtcttcggtatgtgaaaacccaattcttcaaccctacaggatccaacaggcaatcgcagctggcatcttacctttatcacccttgttcctccaacaatcatcagccctattacagcagttacctttggtgcatttattggcacaaaacatcagggcacaacaactacaacaacttgtgctagcaaaccttgctgcc

SEQ ID NO: 70425 - DNA, 236 bp, Zea mays
attttcagcattcaaaaacacaccaagcgaaggcagctagcaacgacctaacaccaatggctaccaagatattagccctccttgcgcttcttgcccttttagtgagcgcaacaaatgcgttcattattccacagtgctcacttgctcctagtgccagtattccacagttcctcccaccagttacttcaatgggcttcgaacatccagccgtgcaagcctacaggctacaactagcg

SEQ ID NO: 70426 - DNA, 240 bp, Zea mays
attttgagcattcagaaacacacctagcgaagcgcactagcaacgacctaacaacaatggcttccaagacattatccctccttgcgcttcttgccctttttgtgagtgcaacaaatgcgttcattattccacaatgctcacttgctccgagtgccattattccacagttcctccctccagttacttcaatgggcttcgaacacccagctgtgcaagcctataggctacaacaagcgcttg

SEQ ID NO: 70427 - DNA, 239 bp, Zea mays
agaccaactagcaacatagaaagcacaatagtgtaccaacaatggcagccaaaatattttgcctccttatgctccttggtctttctgcaagtgctgctacggcgaccattttcccgcaatgctcgcaagctcctatagcttcccttcttcccccgtacctctcaccagcggtgtcttcggtatgtgaaaacccaattcttcaaccctacaggatccaacaggcaatcgcagctggcatc

SEQ ID NO: 70428 - DNA, 267 bp, Zea mays
caacaagcaacatagaaagtggaatccagtagcaacaatagagcaacaatggcgaccaagatactttccctccttatgctccttgctctttctgcatgtgttgctaacgcgacaattttccctcaatgctcacaagctcctatagcttcccttcttcccccataccttccatcaatgatagcttcagtatgtgaaaacccagctcttcaaccctataggctccaacaagcaatcgcagcaagcaacatacctttatcacccttgttt

SEQ ID NO: 70429 - DNA, 261 bp, Zea mays
attttgagcattcagaaacacacctagcgaagcgcactagcaacgacctaacaacaatggcttccaagacattatccctccttgcgcttcttgccctttttgtgagtgcaacaaatgcgttcattattccacaatgctcacttgctccgagtgccattattccacagttcctccctccagttacttcaatgggcttcgaacacccagctgtgcaagcctataggctacaacaagcgcttgcggcgagcgtcttagaacaac

SEQ ID NO: 70430 - DNA, 272 bp, Zea mays
aaaggtctagcataacctttagttgatcgaatagatgttcacaatagattcagacttcgtctctatcgcccatcaactgttaccacggaatacagagaacatgtgaaagatctttcttgcgtgtcaaaagatttcggcaggattgtcattgtcgacaacaatccgttcagtttcattcttcagcctttgaatggaataccttgtgttccattttcagctggacaacattctgatgaccagctcatgatggttatatttccactcctgaagca

SEQ ID NO: 70431 - DNA, 271 bp, Zea mays
gcaacatagaaagcacaatagtgtaccaacaatggcagccaaaatattttgcctccttatgctccttggtctttctgcaagtgctgctacggcgaccattttcccgcaatgctcgcaagctcctatagcttcccttcttcccccgtacctctcaccagcggtgtcttcggtatgtgaaaacccaattcttcaaccctacaggatccaacaggcaatcacagctggcatcttacctttatcacccttgttcctccaacaatcatcagcccta

SEQ ID NO: 70432 - DNA, 266 bp, Zea mays
cttccattcaaccaactagctgcattgaactctgcttcttattggcaacaacaacaactaccattcagccagctatctgctgcctacccccagcaatttcttccattcaaccaactgacagctttgaactctcctgcttatttacagcagcaacaactactaccattcagccagctagctggtgtgagccctgctaccttcttgacacaaccacaattgttgccgttctaccagcacgctgcgcctaacgctggcaccctcttaca

SEQ ID NO: 70433 - DNA, 269 bp, Zea mays
caacaagcaacatagaaagtggaatccagtagcaacaatagagcaacaatggcgaccaagatactttccctccttatgctccttgctctttctgcatgtgttgctaacgcgacaattttccctcaatgctcacaagctcctatagcttcccttcttcccccataccttccatcaatgatagcttcagtatgtgaaaacccagctcttcaaccctataggctccaacaagcaatcgcagcaagcaacatacctttatcacccttgtttca

SEQ ID NO: 70434 - DNA, 270 bp, Zea mays
gagaccaactagcaacatagaaagcacaatagtgtaccaacaatggcagccaaaatattttgcctccttatgctccttggtctttctgcaagtgctgctacggcgaccattttcccgcaatgctcgcaagctcctatagcttcccttcttcccccgtacctctcaccagcggtgtcttcggtatgtgaaaacccaattcttcaaccctacaggatccaacaggcaatcacagctggcatcttacctttatcacccttgttcctccaacaa

SEQ ID NO: 70435 - DNA, 166 bp, Zea mays
aagtctaatgaaggtctgagttcggctcgagattattgagaccaactagcaacatagaaagcacaatagtgtaccaacaatggcagccaaaatattttgcctccttatgctccttggtctttctgcaagtgctgctacggcgaccattttcccgcaatgctcgcaa

SEQ ID NO: 70436 - DNA, 263 bp, Zea mays
gcgactattattccacaatgctcacaacaatacctctctccagtgatagccgcgagatttgaatacccatctatacaatcctacaggctacaagaggccatcacagcaagcatcttacggtcgttagcattgaccgtccaacaaccatatgccctattgcaacaaccatccttagtgaatctgtatctccaaagaatcacagcacaacaactacaacaacggttgcttccaacaattaatcaagtagttgcagcgaaccttgc

SEQ ID NO: 70437 - DNA, 263 bp, Zea mays
attttgagcattcagaaacacacctagcgaacgcactagcaacgacctaacaacaatggcttccaagacattatccctccttgcgcttcttgccctttttgtgagtgcaacaaatgcgttcattattccacaatgctcacttgctccgagtgccattattccacagttcctccctccagttacttcaatgggcttcgaacacccagctgtgcaagcctataggctacaacaagcgcttgcggcgagcgtcttagaacaaccaa

SEQ ID NO: 70438 - DNA, 265 bp, Zea mays
caacaatggcagccaaaatattttgcttccttatgctccttggtctttctgcaagtgctgctaccgcaaccattttcccacaatgctcacaagctcctatagcttcctttcttcccccatacctctcaccagcggtgtcttcagtatgtgaaaacccaattcttcaaccctacaggatccaacaggcaatcgcagcaggcatcttacctttatcacccttgttcctccaacaaccgtcagccctattacagcagttacctttggt

SEQ ID NO: 70439 - DNA, 271 bp, Zea mays
ccaacaagcaacatagaaagtggaatccagtagcaacaacagagcaacaatggcgaccaagatattttccctccttatgctccttgctctttctgcatgtgttgctaacgcgacaattttccctcaatgctcacaagctcctatagcttcccttcttcccccataccttccatcaatgatagcttcagtatgtgaaaacccagctcttcagccctataggctccaacaagcaatcgcagcaagcaacatacctttatcacccttgttgttt

SEQ ID NO: 70440 - DNA, 271 bp, Zea mays
atttataccaactaccaacatacatagtgaagtacactagcaacatcttagcaccaatggcagccaagatttttgcgctccttgccctccttgctctttcagcaagtgttgctaccgcgactattattccacaatgctcacaacaatacctctctccagtgatagccgcgagatttgaatacccatctatacaatcctacaggctacaagaggccatcacagcaagcatcttacggtcgttagcattgaccgtccaacaaccatatgccct

SEQ ID NO: 70441 - DNA, 112 bp, Zea mays
gaccattagctttatctactccagagcgcagaagaacccgatcgacaccatgagggtgttgctcgttgccctcgctctcctggctctcgctgcgagcgccacttccacacaa

SEQ ID NO: 70442 - DNA, 268 bp, Zea mays
gggagtgtttgagttcgagaagtttgcagctggcactgaggcgattgccaagaagctagctgagcttacaaccacgaagggtgtcactaccatcatcggcggcggcgactctgttgctgctgtcgagaaggctgggctggccgacaagatgagccacatttcgaccggcggcggtgcgagcttggaactcttggaaggcaagactctacctggtgtccttgccctcgatgacgcctagatccgctgctgctgctgctactcaggttct

SEQ ID NO: 70443 - DNA, 191 bp, Zea mays
attttcagcattcaaaaacacaccaagcgaaggcactagcaacgacctaacaccaatggctaccaagatattagccctccttgcgcttcttgcccttttagtgagcgcaacaaatgcgttcattattccacagtgctcacttgctcctagtgccagtattccacagttcctcccaccagttacttcaatgg

SEQ ID NO: 70444 - DNA, 267 bp, Zea mays
gcaacatagaaagcacaatattgtaccaataatggcagccaaaatattttgcctcattatgctccttggtctttctgcaagtgatgctacggcgagcattttcccgcaatgctcacaagctcctatagcttcccttcttcccccatacctctcaccagcgatgtcttcagtatgtgaaaatccaattcttctaccctacaggatccaacaggcaatcgcagcaggcatcttacctttatcacccttgttcctccaacaatcatcagc

SEQ ID NO: 70445 - DNA, 261 bp, Zea mays; identical to SEQ ID NO: 69397

SEQ ID NO: 70446 - DNA, 260 bp, Zea mays
gttattattgatgcaaacacaggccgttccaggggctatggatttgtcaggtttggagacgacaacgacaaatctcatgccatgtctgaaatgaatggtgtatattgctctacgaggccaattcgtataggacctgcgactcccagaagatcttcaggtgattctggctcctcgactcctggtcattcagatggtgattcttctaacagaacggtatatgttggtgggcttgaccccaatgtcagtgaagatgaactgag

SEQ ID NO: 70447 - DNA, 258 bp, Zea mays
attgagaccaactagcaacatagaaagcacaatagtgtaccaacaatggcagccaaaatattttgcctccttatgctccttggtctttctgcaagtgctgctacggcgaccattttcccgcaatgctcgcaagctcctatagcttcccttcttcccccgtacctctcaccagcggtgtcttcggtatgtgaaaacccaattcttcaaccctacaggatccaacaggcaatcacagctggcatcttacctttatcaccc

SEQ ID NO: 70448 - DNA, 268 bp, Zea mays
attgagaccaactagcaacatagaaagcacaatagtgtaccaacaatggcagccaaaatattttgcttccttatgctccttggtctttctgcaagtgctgctaccgcaaccattttcccacaatgctcacaagctcctatagcttcctttcttcccccatacctctcaccagcggtgtcttcagtatgtgaaaacccaattcttcaaccctacaggatccaacaggcattcgtagcaggcatcttacctttatcacccttgttcctcc

SEQ ID NO: 70449 - DNA, 264 bp, Zea mays
cataattaactcatgggtgcatagagatatgccgccgacgacccatatctatgggtccctccccttgcactgcatcttcttcttcctcctcctcgacctccttcaattattcctagtgtttgcttctcccttccttgacctttgcttggaaccattgatagttacttattgggcatggagcacgtcatctcaatggaggagatcctcgggcccttctgggagctgctgccagcgccagcgccagagccagagccggagcagcct

SEQ ID NO: 70450 - DNA, 264 bp, Zea mays
gtgaaaacccagctcttcaaccctataggctccaacaagcaatcgcagcaagcaacatacctttatcacccttgtttcaacaatcgccagccctatctttggtgcagtcattggtacaaaccatcaaggcacagcagctgcagcaactcgtgctacctgtgatcaaccaagtagctctggcaaacctttctccctactatcagcaacaacaatttcttccattcaaccaactatctacactgaaccctgctgcttatttgcagc

SEQ ID NO: 70451 - DNA, 261 bp, Zea mays
ctcgagccgctcgagccgctcgagcggtcagaagcaacataaccagtggaatccagtagcaacaacaccgcaacaatggcgaccaagaacattttccctccttatgctccttgctctttctgcatgtgttgctaacgcgacaattttccctcaatgctcacaagctcctatagcttcccttcttcccccataccttccatcaatgatagcttcagtatgtgaaaacccagctcttcagccctataggctccaacaagcaat

SEQ ID NO: 70452 - DNA, 265 bp, Zea mays
gtggaatccagtagcaacaatagagcaacaatggcgaccaagatattttccctccttatgctccttgctctttctacatgtgttgctaacgcgacaattttccctcaatgctcacaagctcctatagcttcccttcttcccccataccttccatcaattatagcttcaatatgtgaaaacccagctcttcaaccatataggcttcaacaagcaatcgcagcaagcaacatacctttatcgcccttgttgtttcaacaatcgccag

SEQ ID NO: 70453 - DNA, 258 bp, Zea mays
ctcgagccgtttcagcattcaaaaacacaccaagcgaaggtactagcaacgacctaacaccaatggctaccaagatattagccctccttgcgcttcttgcccttttagtgagcgcaacaaatgcgttcattattccacagtgctcacttgctcctagtgccagtattccacagttcctcccaccagttacttcaatgggcttcgaacatccagccgtgcaagcctacaggctacaactagcgcttgcggcgagcgcct

SEQ ID NO: 70454 - DNA, 266 bp, Zea mays
gaaacacaccaagcgaagcacattagcaacaacctaacaacaatggctaccaagatattatccctccttgcgcttcttgcgctttttgcgagcgcaacaaatgcgttcattattccacaatgctcacttgctccaagttccattattacacagttcctcccaccagttacttcaatgggcttcgaacacccagctgtgcaagcctataggctacaacaagcaattgcggcgagcgtcttacaacaaccaatttcccagttgcaaca

SEQ ID NO: 70455 - DNA, 263 bp, Zea mays
gaccaactagcaacatagaaagcacaatagtgtaccaacaatggcagccaaaatattttgcttccttatgctccttggtctttctgcaagtgctgctaccgcaaccattttcccacaatgctcacaagctcctatagcttcctttcttcccccatacctctcaccagcggtgtcttcagtatgtgaaaacccaattcttcaaccctacaggatccaacaggcaatcgcagcaggcatcttacctttatcacccttgttcctcc

SEQ ID NO: 70456 - DNA, 261 bp, Zea mays; identical to SEQ ID NO: 69090

SEQ ID NO: 70457 - DNA, 258 bp, Zea mays; identical to SEQ ID NO: 69202

SEQ ID NO: 70458 - DNA, 263 bp, Zea mays
caggcattgcccatagagcttatgatcttgaaggaaaaactgttgggactgttgaggctggtcgtattggcaggctcttgcttcagcgtcttaagccctttaactgcaacctgctttaccatgacagacttcagattgacccagagcttgagaaagaaattggggccaaatttgaggaggacctggatgctatgcttccaaagtgtgatgtgattgtgatcaacacacctcttacggagaaaacaagaggcatgtttaacaaa

SEQ ID NO: 70459 - DNA, 270 bp, Zea mays
caactagcaacatagaaagcacaatagtgtaccaacaatggcagctaaaatattttgcctccttatgctccttggtctttctgcaagtgctgctacggcgaccattttcccacaatgctcacaagctcctatagcttcccttcttcccccgtacctctcaccaacggtgtcttcggtatgtgaaaacccaattcttcaaccctacaggatccaacaggcaatcgcagctggcatcttacctttatcacccttgttcctccaacaatcatc

SEQ ID NO: 70460 - DNA, 273 bp, Zea mays
accagcaagcaacatagaaagtagaatccattagcaacaatagagcaacaatggcgaccaagatattttccctccttatgctccttgctctttctacatgtgttgctaacgcgacaattttccctcaatgctcacaagctcactatagcttcccttcttccaccatacctaccatcaattatagctatcagtatgtgagaacccagctcttcaaccatataggcttcaacaagcaatcgcagcaagcaacatacctatatcgcccttgttgta

SEQ ID NO: 70461 - DNA, 263 bp, Zea mays
tacaaaccatcagggcacagcagctgcagcaactcgtgctacctgtgatcaaccaagtagctctggcaaacctttctccctactctcagcaacaacaatttcttccattcaaccaactgtctacactgaaccctgctgcttatttgcagcaacaactattaccattcagccagctagctactgcctactctcagcaacaacaacttcttccatttaaccaattggccgcactgaaccccgctgcttatttgcagcagcaaata

SEQ ID NO: 70462 - DNA, 262 bp, Zea mays
cagggcacagcagctgcagcaactcgtgctacctgtgatcaaccaagtagctctggcaaacctttctccctactctcagcaacaacaatttcttccattcaaccaactgtctacactgaaccctgctgcttatttgcagcaacaactattaccattcagccagctagctactgcctactctcagcaacaacaacttcttccatttaaccaattggccgcactgaaccccgctgcttatttgcagcagcaaatactactacca

SEQ ID NO: 70463 - DNA, 261 bp, Zea mays
gaaagtggaatccagtagcaacaacagagcaacaatggcgaccaagatattttccctccttatgctccttgctctttctgcatgtgttgctaacgcgacaattttccctcaatgctcacaagctcctatagcttcccttcttcccccataccttccatcaatgatagcttcagtatgtgaaaacccagctcttcagccctataggctccaacaagcaatcgcagcaagcaacatacctttatcacccttgttgtttcaaca

SEQ ID NO: 70464 - DNA, 256 bp, Zea mays
tttatatctgaagcagtcaacttgtgcgaccaggtacctaaggaaggcatttttgagaacatacatactatggaagatttgctaaagatgactgaatggacagaagataggccactacgtgttgttactggatttggatatgtatgatccaaactcaagcagtctaattcctgctccacgccccaccagttcaccactactacacacttgtgcgcttactgctttgctgattattcaccccagttacattattgtg

SEQ ID NO: 70465 - DNA, 255 bp, Zea mays
ttgagaccaactagcaacatagaaagcacaatagtgtaccaacaatggcagccaaaatattttgcctccttatgctccttggtctttctgcaagtgctgctacggcgaccattttcccgcaatgctcgcaagctcctatagcttcccttcttcccccgtacctctcaccagcggtgtcttcggtatgtgaaaacccaattcttcaaccctacaggatccaacaggcaatcacagctggcatcttacctttatcac

SEQ ID NO: 70466 - DNA, 258 bp, Zea mays
agaaagcacaatagtgtaccaacaatggcagccaaaatattttgcctccttatgctccttggtatttctgcaagtgctgctacggcgaccattttcccgcaatgctcacaagctcctatagcttcccttcttcccccgtacctctcaccagcggtgtcttcggtatgtgaaaacccaattcttcaaccctacaggatccaacaggcaatcgcagctggcatcttacctttatcacccttgttcctccaacaatcatca

SEQ ID NO: 70467 - DNA, 258 bp, Zea mays
gaccagttcccctctcctgatcgtcctgttcctcacagcagcagccatggcggccgagccggagaagcaggcggcccccgcggcacaggagacggccgtgcacatcgtgtacgttgaccgccccgaggacgccgaccctgaggagttccacatccgcaccctcacccccgtcctcggcagcgaacagaaggccagggacgcagtgctctaccactacaagaacgccgccagcggcttctccgcgaactcaccccccag

SEQ ID NO: 70468 - DNA, 260 bp, Zea mays
tagaaagtggaatccagtagcaacaacagagcaacaatggcgaccaagatattttccctccttatgctccttgctctttctgcatgtgttgctaacgcgacaattttccctcaatgctcacaagctcctatagcttcccttcttcccccataccttccatcaatgatagcttcagttcgtgaaaacccagctcttcagccctataggctccaacaagcaatcgcagcaagcaacatacctttatcacccttgttgtgtca

SEQ ID NO: 70469 - DNA, 258 bp, Zea mays
ctcgagccgcttccagagccccccgccgccgctgcgccctcctctcggtcctgccgtccgtcgaggtaaaaggacagcatggtgagggtcagcgtgctcaatgatgctctcaagtccatgtacaatgctgaaaagatagggaaacgtcaggtcatgatcaggccgtcatccaaggtgatcatcaagttcctgacggtcatgcagcgccatggttacattggcgagttcgagtacgtggatgaccacagagctgggaag

SEQ ID NO: 70470 - DNA, 273 bp, Zea mays
attcagatgtgtgtgtattcagtttacagagctcaatatgttacatcgaccttcccaacccgccggcagagcttaagaagctcaagcacaagaagtgcctcgtccagtccccccaactccttcatggatgtcaagtgccaacgatgcttcagcatgtccaattcgcttgtggcataggaatctcatcctagattcaatagaggggctgcaatgccggcatcgccatagctggaaatcgagcactgacggacaccgggcgccgagatgggccgt

SEQ ID NO: 70471 - DNA, 270 bp, Zea mays
gcccgacggcgacgccctactgctcgcctcagtgccagtcgttgcggcacagtgttgccagcagctcaggcaggtggagccgcagcaccggtaccaggcgatcttcggcttggtcctccagtccatcctgcagcagcagccgcaaagcggccaggtcgcggggctgttggcggcgcagatagcgcacaactgacggcgatgtgcggcctgcagcagccgactccatgcccctacgctgctgccggcggtgtcccccactgaagaaactat

SEQ ID NO: 70472 - DNA, 258 bp, Zea mays
ccaacatgcaacatagaaagtggaatccagtagcaacaatagagcaacaatggcgaccaagatattttccctccttatgctccttgctctttctacatgtgttgctaacgcgacaattttctctcaatgctcacaagctcctatagcttcccttcttcccccataccttccatcaattatagcttcaatatgtgaaaacccagctcttcaaccatataggcttcaacaagcaatcgcagcaagcactctacctttatc

SEQ ID NO: 70473 - DNA, 258 bp, Zea mays
attgagaccaacaagcaacatagaaagtggaatacagtagcaaaaatagagcaacaatggcggccaagatattttccatccttatgctccttgctctttctgcatgtgttgctaacgcgaccatttttcctcaatactcacaagctcctatagctgcccttcttcccccataccttccatcaatgaccgctttagtatgtgaaaacccagcccttcaaccctacaggatccagcaagcaatcgcaacaagcaacttac

SEQ ID NO: 70474 - DNA, 261 bp, Zea mays
caattgcccaattgcaacaacaatccgtgccacgtctgactatacaacccatcacaacgcaacagcaacaacagtacctaccagcactgagccacctagccatggtgaaccctgccgcctacttgcaagagcagctgcttgcatccaacccacttgctctggcgaacgtagttgcaaaccagcaacaacaacagctacaacagtttctgccaacgctcagtcaactagccatggtgaaccctgccgcctacgtacaacaac

SEQ ID NO: 70475 - DNA, 252 bp, Zea mays
attttcagcattcaaaaacacaccaagcgaacgcactagcaacgacctaacaccaatggctaccaagatattagccctccttgcgcttcttgcccttttagtgagcgcaacaaatgcgttcattattccacagtgctcacttgctcctagtgccagtattccacagttcctcccaccagttacttcaatgggcttcgaacatccagccgtgcaagcctacaggctacaactagcgcttgcggcgagcgcctt

SEQ ID NO: 70476 - DNA, 257 bp, Zea mays
gttaatccatcacccatattatttataccaactaccaacatacatagtgaagtacactagcaacatcttagcaccaatggcagccaagatttttgcgctccttgccctccttgctctttcagcaagtgttgctaccgcgactattattccacaatgctcacaacaatacctctctccagtgatagccgcgagatttgaatacccatctatacaatcctacaggctacaagaggccatcacagcaagcatcttacggt

SEQ ID NO: 70477 - DNA, 257 bp, Zea mays
caacatagaaagcacaatagtgtaccaacaatggcagccaaaatattttgcctccttatgctccttggtatttctgcaagtgctgctacggcgaccattttcccgcaatgctcacaagctcctatagcttcccttcttcccccgtacctctcaccagcggtgtcttcggtatgtgaaaacccaattcttcaaccctacaggatccaacaggcaatcgcagctggcatcttacctttatcacccttgttcctccaaca

SEQ ID NO: 70478 - DNA, 258 bp, Zea mays
aaataacaataagttggaggttaacaaggtagatactaatgaagacaacagtggcaaccaaagcttctctgccactaatagaaacatgtctgcaaatattgaattaactgatggatggtattcacttgatgcatcattggatgtggcacttctggaacaactagagaaaagaaagcttttcgtagggcagaagcttcggatatggggagcttctttatgtggttggtctgggcctgtgtcatttcatgaggtgtctgg

SEQ ID NO: 70479 - DNA, 264 bp, Zea mays
caactagcaacatagaaagcacaatagtgtaccaacaatggcagccaaaatattttgcttccttatgctccttggtctttctgcaagtgctgctaccgcaaccattttcccacaatgctcacaagctcctatagcttcctttcttcccccatacctctcaccagcggtgtcttcagtatgtgaaaacccaattcttcaaccctacaggatccaacaggcaatcgcagcaggcatcttacctttatcacccttgttcctccaaca

SEQ ID NO: 70480 - DNA, 251 bp, Zea mays
attgataccaactagcaaaatacatagtgaagtacactagcaacatcttagcaccaatgggagccaagattttttccctccttgccctccttgctctttcagcaagcgctgctacctctactattattccacaatgctcacaacaatacctctctccggtgacagccgcgggatttcaacacccaactatacaatcctacatgctacatgaggccatcgtagcaagcatcttacggtcattagcattaacc

SEQ ID NO: 70481 - DNA, 253 bp, Zea mays
ccaactaccaacatacatagtgaagtacactagcaacatcttagcaccaatggcagccaagatttttgcgctccttgccctccttgctctttcagcaagtgttgctaccgcgactattattccacaatgctcacaacattacctctctccagtgatagccgcgagatttgaatacccatctatacaatcctacaggctacaagaggccatcacagcaagcatcttacggtcgttagcattgaccgtccaacaa

SEQ ID NO: 70482 - DNA, 253 bp, Zea mays; identical to SEQ ID NO: 27776

SEQ ID NO: 70483 - DNA, 250 bp, Zea mays
ctagcaacatagaaagcacaatagtgtaccaacaatggcagccaaaatattttgcctccttatgctccttggtatttctgcaagtgctgctacggcgaccattttcccgcaatgctcacaagctcctatagcttcccttcttcccccgtacctctcaccagcggtgtcttcggtatgtgaaaacccaattcttcaaccctacaggatccaacaggcaatcgcagctggcatcttacctttatcacccttg

SEQ ID NO: 70484 - DNA, 247 bp, Zea mays
ggaaaagtgatgacccgttttccaccagaacctaatggatatcttcatattggtcatgccaaggctatgtttatcgattttggtctggctaaggagcgaaatggccattgctaccttaggtttgacgacacaaatccggaagctgaaaagaaagaatacatagatcacattcaagaaattgtccattggatgggatgggaaccctacaaagtaacatacacgagtgattatttccaacctttgtatg

SEQ ID NO: 70485 - DNA, 249 bp, Zea mays
caacaagcaacatagaaagtggaatccagtagcaacaacagagcaacaatggcgaccaagatattttccctccttatgctccttgctctttctgcatgtgttgctaacgcgacaattttccctcaatgctcacaagctcctatagcttcccttcttcccccataccttccatcaatgatagcttcagtatgtgaaaacccagctcttcagccctataggctccaacaagcaatcgcagcaagcaacata

SEQ ID NO: 70486 - DNA, 247 bp, Zea mays
ccaactagcaacatagaaagcacaatagtgtaccaacaatggcagctaaaatattttgcctccttatgctccttggtctttctgcaagtgctgctacggcgaccattttcccacaatgctcacaagctcctatagcttcccttcttcccccgtacctctcaccaacggtgtcttcggtatgtgaaaacccaattcttcaaccctacaggatccaacaggcaatcgcagctggcatcttacctttatc

SEQ ID NO: 70487 - DNA, 252 bp, Zea mays
attcaaccaactagctgcattgaactctgcttcttatttgcaacaacaacaactaccattcagccagctacctgttgcctacccccagcaatttcttccattcaaccaactggcagcattgaactctcctgcttatttacagcagcaacaactactaccattcagccagctagctggtgtgagccctgctaccttcttgacacaaccacagttgttgccgttctaccagcacgctgcgcctaacgctggcac

SEQ ID NO: 70488 - DNA, 259 bp, Zea mays
attgagaccaactagcaacatagaaagcacaatagtgtaccaacaatggcagccaaaatattttgcttccttatgctccttggtctttctgcaagtgttgctaccgcaaccattttcccacaatgctcacaagctcctatagcttcccttcttcccccatacctctcaccagcggtgtcttcaatgtgtgaaaacccaattgttcaaccctacaggatccaacaggcaatcgcaacaggcatcttaccattatcaccct

SEQ ID NO: 70489 - DNA, 252 bp, Zea mays
gaaacacacctagcgaagcagctagcaacgacctaacaacaatggcttccaagacattatccctccttgcgcttcttgccctttttgtgagtgcaacaaatgcgttcattattccacaatgctcacttgctccgagtgccattattccacagttcctccctccagttacttcaatgggcttcgaacacccagctgtgcaagcctataggctacaacaagcgcttgcggcgagcgtcttagaacaaccaattg

SEQ ID NO: 70490 - DNA, 249 bp, Zea mays
ctcaaacttcaatggtgaccatggttccagaaagtttgcaagcatcaaaacctgagcgatggagcattttcagggagagaactgggatttggggtaaaaatgactttgtccggaatggatttgtggaccatattaatacgacaaaggactccaccgactacctatggtacacaacaagttttagtgtggatggaagttactcctcaaaagggagccatgctgtccttaatatcgactccaatggccatg

SEQ ID NO: 70491 - DNA, 251 bp, Zea mays
gcaacatagaaagcacaatagtgtaccaacaatggcagccaaaatattttgcctccttatgctccttggtctttctgcaagtgctgctacggcgaccattttcccgcaatgctcgcaagctcctatagcttcccttcttcccccgtacctctcaccagcggtgtcttcggtatgtgaaaacccaattcttcaaccctacaggatccaacaggcaatcacagctggcatcttacctttatcacccttgttcc

SEQ ID NO: 70492 - DNA, 250 bp, Zea mays
cgcacatatctactatactatactctaggaagcaaggacaccaccgccatggcagccaagatgcttgcattgttcgctctcctagctctttgtgcaagcgccactagtgcgacccatattccagggcacttgccaccagtcatgccattgggtaccatgaacccatgcatgcagtactgcatgatgcaacaggggcttgccagcttgatggcgtgtccgtccctgatgctgcagcaactgttggccttac

SEQ ID NO: 70493 - DNA, 248 bp, Zea mays
taccattcagccagctagttgctgcctacccccagcaatttcttccattcaaccaactagcagcattgaactctgctgcttatttacagcagcaacaactactaccattcagccagctagctgatgtgagccctgctgccttcttgacacaacaacagttgttgccgttctacctgcacgctatgcctaacgctggcaccctcttacaactgcaacaattgctgccattcaaccaacttgctttgaca

SEQ ID NO: 70494 - DNA, 253 bp, Zea mays
gtctacactgaaccctgctgcttatttgcagcaacaactattaccatttagccagctagctactgcctactctcagcaacaacaacttcttccatttaaccaattggccgcactgaaccccgctgcttatttgcagcagcaaatactactgccatttagcgagctagctgcagcaagtcgtgcttccttcttgacacagcaacagttgctgcctttctacaagcagtttgcggctaaccccgcaaccctctta

SEQ ID NO: 70495 - DNA, 254 bp, Zea mays
gcagaaactgttgttgctgagagtaggcaatttcttccattcaaccaactggcagcattgaactctcatgcttatgtacaacaacaacaactactaccattcagccagctagctgctgtgagccctgctgccttcttgacacagcaacatttgttgccgttctacctgcacactgcgcctaacgttggcatctcttacaactgcaacaattgctgccattcgaccaacttgctttgacaaacccagcagtgttc

SEQ ID NO: 70496 - DNA, 257 bp, Zea mays
gcgcgacgaaggtaagatgttcctgcggaggatcctgaccggcgggggcggcctggcggccctgagggcggcgcgcgccgtgaaggagacgacggggatcgtgggccttgaggtggtgcctaacgcgcgagaggttctggtagggctctacgagcgcacgctcaaagagatcaaggccgtccccgaagacgagggttaccgcaaggccgttgaatccttcaccggtcaccgcctccagatctgccaggaggaggagg

SEQ ID NO: 70497 - DNA, 252 bp, Zea mays
cgtcaggtcagcgcgacgtctggcgaccgccacccccaccccgcgccacgtgccgagggcttcgccgggcccttcgccgctcgccggtgacgagcacacaccaggagcaagaagacgatgttgaaaacatttcatttccaaaaagtttggtggagagcaactagattatccttttcatggaatcatggatgaacatgaactgttatttgtatttatttatgttctatttctggtggacagcaacagcatgga

SEQ ID NO: 70498 - DNA, 250 bp, Zea mays
caccaagcgaagccactagcaacgacctaacaccaatggctaccaagatattagccctccttgcgcttcttgcccttttagtgagcgcaacaaatgcgttcattattccacagtgctcacttgctcctagtgccagtattccacagttcctcccaccagttacttcaatgggcttcgaacatccagccgtgcaagcctacaggctacaactagcgcttgcggcgagcgccttacaacaaccaattgccca

SEQ ID NO: 70499 - DNA, 250 bp, Zea mays
cggctcgagcaactagcaacatagaaagcacaatagtgtaccaacaatggcagccaaaatattttgcttccttatgctccttggtctttctgcaagtgctgctaccgcaaccattttcccacaatgctcacaagctcctatagcttcctttcttcccccatacctctcaccagcggtgtcttcagtatgtgaaaacccaattcttcaaccctacaggatccaacaggcaatcgcagcaggcatcttacct

SEQ ID NO: 70500 - DNA, 249 bp, Zea mays
gcaacatagaaagtggaatacagtagcaaaaatagagcaacaatggcggccaagatattttccatccttatgctccttgctctttctgcatgtgttgctaacgcgaccatttttcctcaatactcacaagctcctatagctgcccttcttcccccataccttccatcaatgaccgctttagtatgtgaaaacccagcccttcaaccctacaggatccagcaagcaatcgcaacaagcaacttaccttta

SEQ ID NO: 70501 - DNA, 231 bp, Zea mays
  unsure (1)..(231): unsure at all n locations
ggcacgacgatgatgttgaatgacagaatccaaagccttcgtggtctccantcatccctgagaaaggcagaggagtatctactgagtgttcctcaagacactccctactcggagttcaaccataggttccaagagcttggtttggagaagggttggggtgacactgcgaacgtgtactcgacacactccacttgcttcttgaccttcttgaggcccctgatcctgccaact

SEQ ID NO: 70502 - DNA, 253 bp, Zea mays
gagaccaactagcaacatagaaagcacaatagtgtaccaacaatggcagccaaaatattttgcctccttatgctccttggtctttctgcaagtgctgctacggcgaccattttcccgcaatgctcgcaagctcctatagcttcccttcttcccccgtacctctcaccagcggtgtcttcggtatgtgaaatcccaattcttcaaccctacaggatccaacaggcaatcgcagctggcatcttacctttatcac

SEQ ID NO: 70503 - DNA, 252 bp, Zea mays
agaaggtgcaaggattgctggagcgtcaaggatcattggtgtcgacctgaaccccagcagattcgaagaagctaggaagttcgagttgcactgaatttgtgaacccaaaagaccacaacaagccagtgcaggaggtacttgctgagatgaccaacggaggggtcgaccgcagtctggaatgcactggcaacagcaatgctatgatccaagctttcgaatgtgatcatgatggctggggtgttgctgtgctcg

SEQ ID NO: 70504 - DNA, 253 bp, Zea mays
gaccagcaagcaacatagaaagtagaatccattagcaacaatagagcaacaatggcgaccaagatattttccctccttatgctccttgctctttctacatgtgttgctaacgcgacaattttccctcaatgctcacaagctcctatagcttcccttcttcccccataccttccatcaattatctcttcagtatgtgaaaacccagctcttcaaccatataggcttcaacaagcaatcgcagcaagcaacatac

SEQ ID NO: 70505 - DNA, 249 bp, Zea mays
ctagcaacatagaaagcacaatagtgtaccaacaatggcagccaaaatattttgcctccttatgctccttggtctttctgcaagtgctgctacggcgaccattttcccacaatgctcacaagctcctatagcttcccttcttcccccgtacctctcaccagcggtgtcttcggtatgtgaaaacccaattcttcaaccctataggatccaacaggcaatcgcagctggcatcttacctttatcaccctt

SEQ ID NO: 70506 - DNA, 249 bp, Zea mays
ttttgagcattcagaaacacacctagcgaaggcatctagcaacgacctaacaacaatggcttccaagacattatccctccttgcgcttcttgccctttttgtgagtgcaacaaatgcgttcattattccacaatgctcacttgctccgagtgccattattccacagttcctccctccagttacttcaatgggcttcgaacacccagctgtgcaagcctataggctacaacaagcgcttgcggcgagcgt

SEQ ID NO: 70507 - DNA, 248 bp, Zea mays
cggctcgagcaactagcaacatagaaagcacaatagtgtaccaacaatggcagccaaaatattttgcttccttatgctccttggtctttctgcaagtgctgctaccgcaaccattttcccacaatgctcacaagctcctatagcttcctttcttcccccatacctctcaccagcggtgtcttcagtatgtgaaaacccaattcttcaaccctacaggatccaacaggcaatcgcagcaggcatcttac

SEQ ID NO: 70508 - DNA, 248 bp, Zea mays
atagaaagcacaatagtgtaccaacaatggcagctaaaatattttgcctccttatgctccttggtctttctgcaagtgcctgctacggcgaccattttcccacaatgctcacaagctcctatagcttcccttcttcccccgtacctctcaccaacggtgtcttcggtatgtgaaaacccaattcttcaaccctacaggatccaacaggcaatcgcagctggcatcttacctttatcacccttgttcct

SEQ ID NO: 70509 - DNA, 249 bp, Zea mays
ccaactagcaacatagaaagcacaatagtgtaccaacaatggcagccaaaatattttgcttccttatgctccttggtctttctgcaagtgctgctaccgcaaccattttcccacaatgctcacaagctcctatagcttcctttcttcccccatacctctcaccagcggtgtcttcagtatgtgaaaacccaattcttcaaccctacaggatccaacaggcaatcgcagcaggcatcttacctttatcac

SEQ ID NO: 70510 - DNA, 250 bp, Zea mays
tgagaatctaattaggaccgagaatgaagccgatgtagctgcagcgcaagatgctggatatgagaaatttttggttgatagattgaccctaaagccaggaaagatatcagccctcgcgaaatccattcgcactcttgcacgtatggaagacccaatcaaccaaatactcaagagaacagagattgctgaaaatttaattctcgagaaaacatcatgtcctttgggtgtcctattggttatatctgagtcc

SEQ ID NO: 70511 - DNA, 151 bp, Zea mays
cgctggcaccctcttacaactgcaacaattgctgccattcaaccaacttgctttgacaaactcaacagtgttctaccaacaacccatcattggtggtgccctcttttagattgcttatgagttatagttcaataatgaagttttttggatg

SEQ ID NO: 70512 - DNA, 252 bp, Zea mays
tgtcgcacatatctactatactatactctaggaagcaaggacaccaccgccatggcagccaagatgcttgcattgttcgctctcctagctctttgtgcaagcgccactagtgcgacccatattccagggcacttgccaccagtcatgccattgggtaccatgaacccatgcatgcagtactgcatgatgcaacaggggcttgccagcttgatggcgtgtccgtccctgatgctgcagcaactgttggcctta

SEQ ID NO: 70513 - DNA, 253 bp, Zea mays
gccgatcgcaatgaggaagctttcaatgaatactttgcaaagatgccatggttggctgtccctgtttctgacagtgaaggccgagatgcacttgatggccggttcaaggtctctggtatcccacaccttgtcatccttgatgcaaaaactggtgaagtttacactgaagatggtgttgacttcgtgagtgagtatggcgtggaggcttaccctttcacaccagatcggatcaatgaactgaaggaacaggaaa

SEQ ID NO: 70514 - DNA, 250 bp, Zea mays
attttgagcattcagaaacacaccaagcgaactacattagcaacaacctaacaacaatggctaccaagatattatccctccttgcgcttcttgcgctttttgcgagcgcaacaaatgcgttcattattccacaatgctcacttgccccaagttccattattacacagttcctcccaccagtttcttcaatgggcttcgaacacccagctgtgcaagcctataggctacaacaagcaattgcggcgagcgt

SEQ ID NO: 70515 - DNA, 248 bp, Zea mays
cagaaacacaccaagcgaactacattagcaacaacctaacaacaatggctaccaagatattatccctccttgcgcttcttgcgctttttgcgagcgcaacaaatgcgttcattattccacaatgctcacttgctccaagttccattattacacagttcctcccaccagttacttcaatgggcttcgaacacccagctgtgcaagcctataggctacaacaagcaattgcggcgagcgtcttacaacaa

SEQ ID NO: 70516 - DNA, 248 bp, Zea mays
attttgagcattcagaaacacacctagcgaagcgcactagcaacgacctaacaacaatggcttccaagacattatccctccttgcgcttcttgccctttttgtgagtgcaacaaatgcgttcattattccacaatgctcacttgctccgagtgccattattccacagttcctccctccagttacttcaatgggcttcgaacacccagctgtgcaagcctataggctacaacaagcgcttgcggcgagc

SEQ ID NO: 70517 - DNA, 246 bp, Zea mays
attgagaccaactagcaacatagaaagcacaatagtgtaccaacaatggcagccaaaatattttgcttccttatgctccttggtctttctgcaagtgttgctaccgcaaccattttcccacaatgctcacaagctcctatagcttcccttcttcccccatacctctcaccagcggtgtcttcaatgtgtgaaaacccaattgttcaaccctacaggatccaacaggcaatcgcaacaggcatctta

SEQ ID NO: 70518 - DNA, 246 bp, Zea mays
gagaccaactagcaacatagaaagcacaatagtgtaccaacaatggcagccaaaatattttgcctccttatgctccttggtctttctgcaagtgctgctacggcgaccattttcccgcaatgctcgcaagctcctatagcttcccttcttcccccgtacctctcaccagcggtgtcttcggtatgtgaaaacccaattcttcaaccctacaggatccaacaggcaatcacagctggcatcttacct

SEQ ID NO: 70519 - DNA, 249 bp, Zea mays
gagcattcagaaacacaccaagcgaagcgcactagcaacaacctaacaacaatggctaccaagatattatccctccttgcgcttcttgcgctttttgcgagcgcaacaaatgcgtccattattccacaatgctcacttgctcctagttccattattccacagttcctcccaccagttacttcaatggccttcgaacacccagctgtgcaagcctataggctacaacaagcgattgcggcgagcgtctta

SEQ ID NO: 70520 - DNA, 250 bp, Zea mays
atagaaagcacaatagtgtaccaacaatggcagccaaaatattttgcctccttatgctccttggtctttctgcaagtgctgctacggcgaccattttcccgcaatgctcgcaagctcctatagcttcccttcttcccccgtacctctcaccagcggtgtcttcggtatgtgaaaacccaattcttcaaccctacaggatccaacaggcaatcacagctggcatcttacctttatcacccttgttcctcca

SEQ ID NO: 70521 - DNA, 251 bp, Zea mays
gatccaacaggcaatcacagctggcatcttacctttatcacccttgttcctccaacaatcatcagccctattacatcagttacctttggtgcatttattggcacaaaacatcagggcacaacaactacaacaacttgtgctagcaaaccttgctgcctactctcagcaacagcagtttcttccattcaaccaactagctgcattgaactctgcttcttatttgcaacaacaacaactaccattcagccagc

SEQ ID NO: 70522 - DNA, 184 bp, Zea mays
cgtgcaaggattgctggagcgtcaaggatcattggtgtcgacctgaaccccagcagattcgaagaagctaggaagttcggttgcactgaatttgtgaacccaaaagaccacaacaagccagtgcaggaggtacttgctgagatgaccaacggaggggtcgaccgcagtgtggaatgcactggca

SEQ ID NO: 70523 - DNA, 249 bp, Zea mays
agaccaactagcaacatagaaagcacaatagtgtaccaacaatggcagccaaaatattttgcctccttatgctccttggtctttctgcaagtgctgctacggcgaccattttcccgcaatgctcgcaagctcctatagcttcccttcttcccccgtacctctcaccagcggtgtcttcggtatgtgaaaacccaattcttcaaccctacaggatccaacaggcaatcgcagctggcatcttacctttat

SEQ ID NO: 70524 - DNA, 245 bp, Zea mays
ccaacaagcaacatagaaagtggaatacagtagcaacaatagagcaacaatggcggccaagatattttccatccttatgctccttgctctttctgcatgtgttgctaacgcgaccatttttcctcaatactcacaagctcctatagctgcccttcttcccccataccttccatcaatgaccgcttcagtttgtgaaaacccagcccttcaaccctacaggctccaacaagcaatcgcaacaagca

SEQ ID NO: 70525 - DNA, 247 bp, Zea mays
agaaagcacaatagtgtaccaacaatggcagccaaaatattttgcctccttatgctccttggtctttctgcaagtgctgctacggcgaccattttcccgcaatgctcgcaagctcctatagcttcccttcttcccccgtacctctcaccagcggtgtcttcggtatgtgaaaacccaattcttcaaccctacaggatccaacaggcaatcacagctggcatcttacctttatcacccttgttcctcc

SEQ ID NO: 70526 - DNA, 247 bp, Zea mays
tagaaagcacaatagtgtaccaacaatggcagccaaaatattttgcctccttatgctccttggtatttctgcaagtgctgctacggcgaccattttcccgcaatgctcacaagctcctatagcttcccttcttcccccgtacctctcaccagcggtgtcttcggtatgtgaaaacccaattcttcaaccctacaggatccaacaggcaatcgcagctggcatcttacctttatcacccttgttcctc

SEQ ID NO: 70527 - DNA, 245 bp, Zea mays
attttgagcattcagaaacacaccaagcgaacacattagcaacaacctaacaacaatggctaccaagatattatccctccttgcgcttcttgcgctttttgcgagcgcaacaaatgcgttcattattccacaatgctcacttgctccaagttccattattacacagttcctcccaccagttacttcaatgggcttcgaacacccagctgtgcaagcctataggctacaacaagcaattgcggcga

SEQ ID NO: 70528 - DNA, 249 bp, Zea mays
ccaactagcaacatagaaagcacaatagtgtaccaacaatggcagctaaaatattttgcctccttatgctccttggtctttctgcaagtgctgctacggcgaccattttcccacaatgctcacaagctcctatagcttcccttcttcccccgtacctctcaccaacggtgtcttcggtatgtgaaaacccaattcttcaaccctacaggatccaacaggcaatcgcagctggcatcttacctttatcac

SEQ ID NO: 70529 - DNA, 251 bp, Zea mays
  unsure (1)..(251): unsure at all n locations
ccttcaagcagctatagctagcataattaactcatgggtgcatagagatatgccgccgacgacccatatctatgggtncctccccttgcannnnnnnnnnnnnnnnnnnnnnnnnnnnnnnnnnnaattattcctagtgtttgcttctcccttccttganctttgcncngaaccattgatagttacntattgggcatggagcacgtcatctcaatggaggagatcctcgggcccttctgggagctgctgcc

SEQ ID NO: 70530 - DNA, 244 bp, Zea mays
caagcttccaaggatgacttggctgtctacacttcgttttcgtctgctccctcgtccaagtatatcaacgtagcaaggtggtttaatcacattgatgcgctcgtgaggctgagcggaattactgcagagggccaaggtgtgaaggttgaatcgtcagcagttccttcagccccaactccagatgttgctgaagcacaggccccagttgctgaagaggacgacgacgatgatgttgacctttttg

SEQ ID NO: 70531 - DNA, 243 bp, Zea mays
cagcattcaaaaacacaccaagcgaagcaactagcaacgacctaacaccaatggctaccaagatattagccctccttgcgcttcttgcccttttagtgagcgcaacaaatgcgttcattattccacagtgctcacttgctcctagtgccagtattccacagttcctcccaccacttacttcaatgggcttcgaacatccagccgtgcaagcctacaggctacaactagcgcttgcggcgagcg

SEQ ID NO: 70532 - DNA, 244 bp, Zea mays
gaccaactagcaacatagaaagcacaatagtgtaccaacaatggcagccaaaatattttgcctccttatgctccttggtctttctgcaagtgctgctacggcgaccattttcccgcaatgctcgcaagctcctatagcttcccttcttcccccgtacctctcaccagcggtgtcttcggtatgtgaaaacccaattcttcaaccctacaggatccaacaggcaatcgcagctggcatcttacct

SEQ ID NO: 70533 - DNA, 247 bp, Zea mays
attgagaccaactagcaacatagaaagcacaatagtgtaccaacaatggcagccaaaatattttgcctccttatgctccttggtctttctgcaagtgctgctacggcgaccattttcccgcaatgctcgcaagctcctatagcttcccttcttcccccgtacctctcaccagcggtgtcttcggtatgtgaaaacccaattcttcaaccctacaggatccaacaggcaatcacagctggcatcttac

SEQ ID NO: 70534 - DNA, 247 bp, Zea mays
ggacgaatagcagaagacttcccttcgtctgcttcccagagacccagccatggcgatctcccagatctcacgcatattcctggccatccttctcctggccgccgccttcgccgccgccccagctgcgcttgcggacggcgacgacgtggtggcccttaccgaatccacgttcgagaaggaggtcggaaaggaccgcggcgccctcgtcgagttctacgccccctggtgtggtcactgcaagaagctt

SEQ ID NO: 70535 - DNA, 244 bp, Zea mays
gagcattcagaaacacacctagcgaaggcagctagcaacgacctaacaacaatggcttccaagacattatccctccttgcgcttcttgccctttttgtgagtgcaacaaatgcgttcattattccacaatgctcacttgctccgagtgccattattccacagttcctccctccagttacttcaatgggcttcgaacacccagctgtgcaagcctataggctacaacaagcgcttgcggcgagcg

SEQ ID NO: 70536 - DNA, 243 bp, Zea mays
ctcgagccgaatcggctcgagcccgatcctgggccagtgcgtacagttcctgaggcatccgtgcagcccgacggcgacgccctactgctcgcctcagtgccagtcgttgcggcagcagtgttgccagcagctcaggcaggtggagccgcagcaccggtaccaggcgatcttcggcttggtcctccagtccatcctgcagcagcagccgcaaagcggccaggtcgcggggctgttggcggcgca

SEQ ID NO: 70537 - DNA, 244 bp, Zea mays
atgagtgtttactacccgtatacggaaaccgacaagagactcactgccttccatcctgaaatcgaggagctcatctacagcgacgtcgagaactccgagcacaagttcgtgctgaaggacaagaagaagccgatcatcttctcgatggcgcgtctcgaccgcgtgaagaacatgacaggcctggtcgagatgtacggcaagaacgcgcgcctgagggagctggcgaacctcgtgatcgttgccg

SEQ ID NO: 70538 - DNA, 244 bp, Zea mays
aacatagaaagcacaatagtgtaccaacaatggcagccaaaatattttgcttccttatgctccttggtctttctgcaagtgctgctaccgcaaccattttcccacaatgctcacaagctcctatagcttcctttcttcccccatacctctcaccagcggtgtcttcagtatgtgaaaacccaattcttcaaccctacaggatccaacaggcaatcgcagcaggcatcttacctttatcaccctt

SEQ ID NO: 70539 - DNA, 246 bp, Zea mays
  unsure (1)..(246): unsure at all n locations
gaattcgatatttgccatcatcaccaaacacgatagtaaaaatgtcacagagtggcaaaattccaattattatttcacctaaacccctctgctctcaaacctagctcgctcccggcggaccgacgatgccgaaggcgngcggcggggcggcggacgaagaggagttccgcgccgaggtggaggagcgcctcatcaacgaggagtacaagatctggaagaagaacacacccttcctctacgacctcg

SEQ ID NO: 70540 - DNA, 245 bp, Zea mays
acaagctcctatagcttccctacttcacccgtacctctcaccagcggtgtcttcggtatgtgaaaacccaattcttcaaccctataggatccaacaggcaatcgcagctggcatcttacctttatcacccttgttcctccaacaatcatcagccctattacagcagttacctttggtgcatttattggcacaaaacatcagggcacaacaactacaacaacttgtgctagcaaaccttgctgcct

SEQ ID NO: 70541 - DNA, 245 bp, Zea mays
  unsure (1)..(245): unsure at all n locations
gggagacaatgttgaacttgggatcgaaaaccgacaagagactcactgnnttcnatcctgaaatcgaggagctcatcaacagcgacgtcgagaactccgagcacaagttcgtgctgaaggacaagaagaagccgatcatcttctcgatggcgcgtctcgaccgcgtgaagaacatgacaggcctggtggagatgtacggcaagaacgcgcgcctgagggagctggcgaacctcgtgatcgtcgcc

SEQ ID NO: 70542 - DNA, 246 bp, Zea mays
gtggaatccagtagcaacaatagagcaacaatggcgaccaagatactttccctccttatgctccttgctctttctgcatgtgttgctaacgcgacaattttccctcaatgctcacaagctcctatagcttcccttcttcccccataccttccatcaatgatagcttcagtatgtgaaaacccagctcttcaaccctataggctccaacaagcaatcgcagcaagcaacatacctttatcacccttg

SEQ ID NO: 70543 - DNA, 242 bp, Zea mays
gaaacacaccaagcgaagacattagcaacaacctaacaacaatggctaccaagatattatccctccttgcgcttcttgcgctttttgcgagcgcaacaaatgcgttcattattccacaatgctcacttgctccaagttccattattacacagttcctcccaccagttacttcaatgggcttcgaacacccagctgtgcaagcctataggctacaacaagcaattgcggcgagcgtcttacaa

SEQ ID NO: 70544 - DNA, 242 bp, Zea mays
caacaactaccattcagccagctatctgctgcctacccccagcaatttcttccattcaaccaactgacagctttgaactctcctgcttatttacagcagcaacaactactaccattcagccagctagctggtgtgagccctgctaccttcttgacacaaccacaattgttgccgttctaccagcacgctgcgcctaacgctggcaccctcttacaactgcaacaattgctgccattcaacca

SEQ ID NO: 70545 - DNA, 242 bp, Zea mays
gtggaatacagtagcaacaatagagcaacaatggcggccaagatattttccatccttatgctccttgctctttctgcatgtgttgctaacgcgaccatttttcctcaatactcacaagctcctatagctgcccttcttcccccataccttccatcaatgaccgcttcagtttgtgaaaacccagcccttcaaccctacaggctccaacaagcaatcgcaacaagcaacttacctttatcacc

SEQ ID NO: 70546 - DNA, 242 bp, Zea mays
ctcgagccgtgagaccaacaagcaacatagaaagtggaatccagtagcaacaacagagcaccaatggcgaccaagatattttccctccttatgctccttgctctttctgcatgtgttgctaacgcgacaattttccctcaatgctcacaagctacaatagcttcccttcttcccccataccttccatcaatgatagcttcagtatgtgaaaacccagctcttcagccctataggctccaaca

SEQ ID NO: 70547 - DNA, 243 bp, Zea mays
ccaactagcaacatagaaagcacaatagtgtaccaacaatggcagccaaaatattttgcctccttatgctccttggtctttctgcaagtgctgctacggcgaccattttcccgcaatgctcgcaagctcctatagcttcccttcttcccccgtacctctcaccagcggtgtcttcggtatgtgaaaacccaattcttcaaccctacaggatctaacaggcaatcgcagctggcatcttacctt

SEQ ID NO: 70548 - DNA, 242 bp, Zea mays
gcaacatagaaagcacaatattgtaccaataatggcagccaaaatattttgcctcattatgctccttggtctttctgcaagtgctgctacggcgagcattttcccgcaatgctcacaagctcctatagcttcccttcttcccccataccttccatcaattatagcttcaatatgtgaaaacccagctcttcaaccatataggcttcaacaagcaatcgcagcaagcaacatacctttatcgc

SEQ ID NO: 70549 - DNA, 245 bp, Zea mays
agcaagcaacatagaaagtagaatccattagcaacaatagagcaacaatggcgaccaagatattttccctccttatgctccttgctctttctacatgtgttgctaacgcgacaattttccctcaatgctcacaagctcctatagcttcccttcttcccccataccttccatcaattatagcttcagtatgtgaaaacccagctcttcaaccatataggcttcaacaagcaatcgcagcaagcaac

SEQ ID NO: 70550 - DNA, 246 bp, Zea mays
caacatagaaagcacaatagtgtaccaacaatggcagccaaaatattttgcttccttatgctccttggtctttctgcaagtgctgctaccgcaaccattttcccacaatgctcacaagctcctatagcttcctttcttcccccatacctctcaccagcggtgtcttcagtatgtgaaaacccaattcttcaaccctacaggatccaacaggcaatcgcagcaggcatcttacctttatcacccttg

SEQ ID NO: 70551 - DNA, 243 bp, Zea mays
ctcgagccgcaacaagcaacatagaaagtggaatacagtagcaaaaatagagcaacaatggcggccaagatattttccatccttatgctccttgctctttctgcatgtgttgctaacgcgaccatttttcctcaatactcacaagctcctatagctgcccttcttcccccataccttccatcaatgaccgctttagtatgtgaaaacccagcccttcaaccctattcgatccagcaagcaatc

SEQ ID NO: 70552 - DNA, 240 bp, Zea mays
cttcgggaggcaagtgcgatttcgatctcgcagccacctttttttttgttctgttgtgtatctagtagttggaggagatatgcagtttgcacttgcattggacacgaactcaggtcctcaccagataagatcttgtgagggtgatgggattgacaggttggaaaaattaagtattgggggcagaaagcaggagaaagctttgagaaataggtgctttggtggtagagttgctgcaactac

SEQ ID NO: 70553 - DNA, 242 bp, Zea mays
attttgagcattcagaaacacacctagcgaagcgcactagcaacgacctaacaacaatggctaccaagatattatccctctttgcgcttcttgccctttttgtgagcgcaacaaatgcgttcattattccacaatgctcacttgctcctagtgccattattccacagttcctccctccagttacttcaatgggcttcgaacacccagctgtgcaagcctacaggctacaacaagcgcttgcg

SEQ ID NO: 70554 - DNA, 243 bp, Zea mays; identical to SEQ ID NO: 26979

SEQ ID NO: 70555 - DNA, 242 bp, Zea mays
gcaacatagaaagcacaatagtgtaccaacaatggcagctaaaatattttgcctccttatgctccttggtctttctgcaagtgctgctacggcgaccattttcccacaatgctcacaagctcctatagcttcccttcttcccccgtacctctcaccaacggtgtcttcggtatgtgaaaacccaattcttcaaccctacaggatccaacaggcaatcgcagctggcatcttacctttatcac

SEQ ID NO: 70556 - DNA, 242 bp, Zea mays
ccgtccttcacctccgccgccgaatccgagactctgatctcgggttcaccgcagcgcacagagcacccccgactcccgtcccgatccgcgctcccctctacgacgcttcagtcatggcaggaatggcatccgagggttctcagtttgatgctaagcactatgattctaaaatgcaggagctgctgagcactggtgagactgaggagttcttcacttcatatgatgaagtttgtgaaagtttt

SEQ ID NO: 70557 - DNA, 241 bp, Zea mays
gggtgactactacagataccttgctgagttcaagactggagctgagagaaaggacgctgctgagaacaccatggtggcatacaaggctgcccaggacattgctttggctgagcttgctccaactcaccctattaggcttggactggcactcaacttctcagtgttctactatgagattctcaactcacccgatcgcgcctgcagtcttgcaaagcaggcttttgacgaggccatctcggaa

SEQ ID NO: 70558 - DNA, 241 bp, Zea mays
cttgataccaactagcaaaatacatagtgaagtacactagcaacatcttagcaccaatgggagccaagattttttccctccttgccctccttgctctttcagcaagcgctgctacctctactattattccacaatgctcacaacactacctctctccggtgacagccgcgggatttcaacacccaactatacaatcctacatgctacatgaggccatcgtagcaagcatcttacggtcatt

SEQ ID NO: 70559 - DNA, 239 bp, Zea mays
attttcagcattcaaaaacacaccaagcgaagcgcactagcaacgacctaacaccaatggctaccaagatattagccctccttgcgcttcttgcccttttagtgagcgcaacaaatgcgttcattattccacagtgctcacttgctcctagtgccattattccacagttcctcccaccagttacttcaatgggcttcgaacatccagccgtgcaagcctacaggctacaactagcgctt

SEQ ID NO: 70560 - DNA, 243 bp, Zea mays
gagaccaactagcaacatagaaagcacaatagtgtaccaacaatggcagccaaaatattttgcttccttatgctccttggtctttctgcaagtgttgctaccgcaaccattttcccacaatgctcacaagctcctatagcttcccttcttcccccatacctctcaccagcggtgtcttcaatgtgtgaaaccccaattgttcaaccctacaggatccaacaggcaatcgcaacaggcatctta

SEQ ID NO: 70561 - DNA, 245 bp, Zea mays
ttcagaaacacaccaagcgaagatcattagcaacaacctaacaacaatggctaccaagatattatccctccttgcgcttcttgcgctttttgcgagcgcaacaaatgcgttcattattccacaatgctcacttgctccaagttccattattacacagttcctcccaccagttacttcaatgggcttcgaacacccagctgtgcaagcctataggctacaacaagcaattgcggcgagcgtcttac

SEQ ID NO: 70562 - DNA, 239 bp, Zea mays
gcaacatagaaagtggaatccagtagcaacaacagagcaacaatggcgaccaagatattttccctccttatgctccttgctctttctgcatgtgttgctaacgcgacaattttccctcaatgctcacaagctcctatagcttcccttcttcccccataccttccatcaatgatagcttcagtatgtgaaaacccagctcttcagccctataggctccaacaagcaatcgcagcaagcaa

SEQ ID NO: 70563 - DNA, 238 bp, Zea mays
gagaccaacaagcaacatagaaagtggaatccagtagcaacaatagagcaacaatggcgaccaagatactttccctccttatgctccttgctctttctgcatgtgttgctaacgcgacaattttccctcaatgctcacaagctcctatagcttcccttcttcccccataccttccatcaatgatagcttcagtatgtgaaaacccagctcttcaaccctataggctccaacaagcaat

SEQ ID NO: 70564 - DNA, 240 bp, Zea mays
gaaacaacaacaattgcttccgttctaccagcagtttgtggctaaccccgtaaccctcttacaactgcaacagttcgctgccctttgtccaacttgctttgacaaacccagcagccttctaccaacaacacatcattggcggtgccatcttttagattgcttattagttgtaattcaataatgacgttttttggctgatgtatgtggcctcctagaaataagaagttacatttccaaaaa

SEQ ID NO: 70565 - DNA, 240 bp, Zea mays
aagcaacatagaaagtggaatacagtagcaacaatagagcaacaatggcggccaagatattttccatccttatgctccttgctctttctgcatgtgttgctaacgcgaccatttttcctcaatactcacaagctcctatagctgcccttcttcccccataccttccatcaatgaccgcttcagtttgtgaaaacccagcccttcaaccctacaggctccaacaagcaatcgcaacaagca

SEQ ID NO: 70566 - DNA, 240 bp, Zea mays
attttcagcattcaaaaacacaccaagcgaacgtacctagcaacgacctaacaccaatggctaccaagatattagccctccttgcgcttcttgcccttttagtgagcgcaacaaatgcgttcattattccacagtgctcacttgctcctagtgccattattccacagttcctcccaccagttacttcaatgggcttcgaacatccagccgtgcaagcctacaggctacaactagcgcttg

SEQ ID NO: 70567 - DNA, 241 bp, Zea mays
aaacacaccaagcgaagccactagcaacgacctaacaacaatggctaccaagatattagccctccttgcgcttcttgccctttttgtgagcgcaacaaatgcgttcattattccacaatgctcacttgctcctagtgccattattccacagttcctcccaccagttacttcaatgggcttcgaacacctagctgtgcaagccaacatgcaacaacaagcgcttgcggcgagcgtcttacaa

SEQ ID NO: 70568 - DNA, 240 bp, Zea mays
ctcgagccgttttgagcattcagaaacacaccaagcgaacgcactagcaacaacctaacaacaatggctaccaagatattatccctccttgcgcttcttgcgctttttgcgagcgcaacaaatgcgtccattattccacaatgctcacttgctcctagttccattattccacagttcctcccaccagttacttcaatggccttcgaacacccagctgtgcaagcctataggctacaacaa

SEQ ID NO: 70569 - DNA, 238 bp, Zea mays
attgataccaactagcataatacatagtgaagtacactagcaacatcttagcaccaatgggagccaagattttttccctccttgccctccttgctctttcagctagcgctgctacctctactattattccacaatgctcacaacagtacctctctccggtgacagccgcgggatttcaacacccaactatacaatcctacatgctacatcctgccatcgtagcaagcatcttacggtc

SEQ ID NO: 70570 - DNA, 239 bp, Zea mays
gagaccaacaagcaacatagaaagtggaatccagtagcaacaatagagcaacaatggcgaccaagatattttccctccttatgctccttgctctttctacatgtgttgctaacgcgacaattttccctcaatgctcacaagctcctatagcttcccttcttcccccataccttccatcaattatagcttcaatatgtgaaaacccagctcttcaaccatataggcttcaacaagcaatc

SEQ ID NO: 70571 - DNA, 241 bp, Zea mays
atgacatctgatgggaggatcagcatggccggtttgagcatgaggactgtgccccatcttgcagatgccatacacgctgcagttactcaactgaaatgaggatagtatcgcagctttcgtgaataaaacctgaatcacccacaacaatgttctaagtactcaaccagtggtatttactggttgacctactgtagtttgcgtcggaatagatatgtttttttactcttcgtggggcagtttt

SEQ ID NO: 70572 - DNA, 238 bp, Zea mays
ggcaagtgcgattttgatcttgcagccacctttttttgttctgttgtgtatctagtagttggaggagatatgcagtttgcacttgcattggacacgaactcaggtcctcaccagataagatcttgtgagggtgatgggattgacaggttggaaaaattaagtattgggggcagaaagcaggtgaaagctttgagaaataggtgctttggtggtagagttgctgcaactacacaatgta

SEQ ID NO: 70573 - DNA, 240 bp, Zea mays
gaattcgatatttgccatcatcaccaaacacgatagtaaaaatgtcacagagtggcaaaattccaattattatttcacctaaacccctctgctctcaaacctagctcgctcccggcggaccgacgatgccgaagagcgcggcggggcggcggacgaagaggagttccgcgccgaggtggaggagcgcctcatcaacgaggagtacaagatctggaagaagaacacacccttcctctacga

SEQ ID NO: 70574 - DNA, 253 bp, Zea mays
attgagaccaactagcaacatagaaagcacaatagtgtaccaacaatggcggctaaaatattttgcctccttatgctccttggtctttctgcaagtgctgctacggcgaccattttcccacaatgctcacaagctcctatagcttcccttcttcccccgtacctctcaccaacggtgtcttcggtatgtgaaaacccaattcttacaaccctacaggatccaacaggcaatcgcagctggcatcttaccttta

SEQ ID NO: 70575 - DNA, 189 bp, Zea mays
caactagcaacatagaaagcacaatagtgtaccaacaatggcagccaaaatattttgcttccttatgctccttggtctttctgcaagttttgctaccgcaaccattttcccatcatgctcacaagctcctatagcttccctgctgctcccatacctctcaccagcggtgtcttcaatgtgtgatacccc

SEQ ID NO: 70576 - DNA, 184 bp, Zea mays
tgatagcacaatagtgtaccaacaatggcagccaaaatattttgcttccttatgctccttggtctttctgcaagtgttgctaccgcaaccattttcccacaatgctcacaagctcctatagcttcccttcttcccccatacctctcaccagcggtgtcttcaatgtgtgaaaccccaattgttc

SEQ ID NO: 70577 - DNA, 242 bp, Zea mays
caacatagaaagtggaatccagtagcaacaatagagcaacaatggcgaccaagatattttccctccttatgctccttgctctttctacatgtgttgctaacgcgacaattttccctcaatgctcacaagctcctatagcttcccttcttcccccataccttccatcaattatagcttcaatatgtgaaaacccagctcttcaaccatataggcttcaacaagcaatcgcagcaagcaacata

SEQ ID NO: 70578 - DNA, 241 bp, Zea mays
actacaacaacttgtgctagcaaaccttgctgcatactctcagcaacatcagtttcttccattcaaccaactggctgcattgaactctgctgcttatttgcaacaacaattaccattcagccagctagttgctgcctacccccagcaatttcttccattcaaccaactagcagcattgaactctgctgcttatttacagcagcaacaactactaccattcagccagctagctgatgtgagc

SEQ ID NO: 70579 - DNA, 247 bp, Zea mays
agacaacaaatacacaaccgtgcagtttacaggcgaggttttgaaaactcctgtctcactcgatatgcttgggcgcatttttaatggttctggaaaacctattgacaatggccccccgatattacctgaagcctacttggatatctctggaagttctattaatcccagtgagagaacctatccagaggagatgatccaaactgggatatccaccattgatgtgatgaactccattgctcgtgggcaa

SEQ ID NO: 70580 - DNA, 248 bp, Zea mays
cttcttcccccatacctctcaccagcggtgtcttcaatgtgtacaaccccaattgttcaaccctacaggatccaacaggcaatcgcaacaggcatcttaccattatcacccttgttcctccaacaaccgtcagccctattacagcagttacctttggtccatttggtggcacaaaacatcagggcacaacaactacaacaacttgtgctagcaaaccttgctgcatactctcagcaacatcagtttct

SEQ ID NO: 70581 - DNA, 246 bp, Zea mays
ctcgagcgtttttggatgatgtcctgtggcttcccagataacatcattattgaactatacactctaagcactctaaaagcgggtatgccaatgctgggttgttggtagaacgttgttgggtttgtcaaagcaagttggttgaatggcagcaacccatcattggcggtgccctcttttagattgcttatgagttatagttcaataatgaagttttttggatgatgtttgtggcttcccagaaataag

SEQ ID NO: 70582 - DNA, 250 bp, Zea mays
  unsure (1)..(250): unsure at all n locations
ccaactaccaacatacatagtgaagtacactagcaacatcttagcaccaatggcagccaagatttttgcgctccttgccctccttgctctttcagcaagtgttgctaccgcgactattattccacaatgctcacaacaatacctctctccagtgatagccgcgagatttgaatacccatctatacaatcctcaangctacaagaggccatcacagcaagcatcttacggtcgttagcattgaccgtccaa

SEQ ID NO: 70583 - DNA, 255 bp, Zea mays; identical to SEQ ID NO: 27753

SEQ ID NO: 70584 - DNA, 221 bp, Zea mays
tgcgagccatctagcaacgacctaacaccaatggctaccaagatattggggctccttgcgcttcttgcccttttagtgagcgcaacaaatgcgttcattattccacagtgctcacttgcccctagtgccagtattccacagttcctcccaccacttacttcaatgggcttcgaacatccagccgtgcaagcctacaggctacaactagcgcttgcggcgag

SEQ ID NO: 70585 - DNA, 214 bp, Zea mays
gcaacatagaaagcacaatagtgtaccaacaatggcagccaaaatattttgcttccttatgctccttggtctttctgcaagtgttgctaccgcaaccattttcccacaatgctcacaagctcctatagcttcccttcttcccccatacctctcaccagcggtgtcttcaatgtgtgaaaacccaattgttcaaccctacaggatccaacaggca

SEQ ID NO: 70586 - DNA, 243 bp, Zea mays
cagaaacacaccaagcgaacaccattagcaacaacctaacaacaatggctaccaagatattatccctccttgcgcttcttgcgctttttgcgagcgcaacaaatgcgttcattattccacaatgctcacttgctccaagttccattattacacagttcctcccaccagttacttcaatgggcttcgaacacccagctgtgcaagcctataggctacaacaagcaactgcggcgagcgtcttac

SEQ ID NO: 70587 - DNA, 245 bp, Zea mays
  unsure (1)..(245): unsure at all n locations
gtctactgatagtcctgtcctgtttcactctcgccagccaaagacgaccacgccctccgtgctccagccattccccatgatttcgccgacgaatctcctcccggcgcggaagatcacccctgtctcaaatggcggcgcagcgacggcgagcccctcttctccctcggtggccgcacggcatcgncgactcccttcaggcctccaatctgtgactggtagagggaaggtttccttggcagccatca

SEQ ID NO: 70588 - DNA, 241 bp, Zea mays
ctacatagaaagcacaatagtgtaccaacaatggcagccaaaatattttgcctccttatgctccttggtatttctgcaagtgctgctacggcgaccattatcccgcaatgctcacaagctcctatagcttcccttcttcccccgtacctctcaccagcggtgtcttcggtatgtgaaaacccaattcttcactactacaggatccaacaggcaatcgcagctggcatcttacctttatcac

SEQ ID NO: 70589 - DNA, 248 bp, Zea mays
caatcatcagccctattacagcagttacctttggtgcaactattggcacaaaacatcagggcacaacaactacaacaacttgtgctagcaaaccttgctgcctactctcagcaacaacagtttcttccattcaaccaactagctgcattgaactctgcttcttatttgcaacaacaacaactaccattcagccagctatctgctgcctacccccagcaatttcttccattcaaccaactgacagcttt

SEQ ID NO: 70590 - DNA, 249 bp, Zea mays
cggctcgagattgagaccaactagcaacatagaaagcacaatagtgtaccaacaatggcagccaaaatattttgcctccttatgctccttggtctttctgcatgtgctgctacggcgaccattttcccgcaatgctcgcaagctcctatagcttcccttcttcccccgtacctctcaccagcggtgtcttcggtatgtgaaaacccaattcttcaaccctacaggatccaacaggcaatcacagctggc

SEQ ID NO: 70591 - DNA, 251 bp, Zea mays; identical to SEQ ID NO: 69143

SEQ ID NO: 70592 - DNA, 254 bp, Zea mays
caactagcaacatagaaagcacaatagtgtaccaacaatggcagccaaaatattttgcttccttatgctccttggtctttctgcaagtgctgctaccgcaaccattttcccacaatgctcacaagctcctatagcttcctttcttcccccatacctctcaccagcggtgtcttcagtatgtgaaaacccaattcttcaaccctacaggatccaacaggcaatcgcagcaggcatcttacctttatcaccttgtt

SEQ ID NO: 70593 - DNA, 261 bp, Zea mays
taccaacaatggcagccaaaatattttgcctccttatgctccttggtctttctgcaagtgctgctacggcgaccattttcccgcaatgctcgcaagctcctatagcttcccttcttcccccgtacctctcaccagcggtgtcttcggtatgtgaaaacccaattcttcaaccctacaggatccaacaggcaatcgcagctggcatcttacctttatcacccttgttcctccaacaatcatcagccctattacaacagttac

SEQ ID NO: 70594 - DNA, 136 bp, Zea mays
caacaagcaacatagaaagtggaatccagtagcaacaatagagcaacaatggcgaccaagatactttccctccttatgctccttgctctttctgcatgtgttgctaacgcgacaattttccctcaatgctcacaag

SEQ ID NO: 70595 - DNA, 239 bp, Zea mays
ggcttcttcattgacatcaaagtgggtaggagaagctgaaaaacttgtcaggacacttttcatggttgcaattgatagacaaccatctgttatttttatggacgagattgatagtgtcatgtctacaaggttagctaatgagaatgactctagcaggcgtctgaaatctgaatttcttatccagtttgatggggtgtcctcaaacccagatgatctagtaattgttataggggctacta

SEQ ID NO: 70596 - DNA, 160 bp, Zea mays
gtgctgtagtatagccgctggctagctagctagttgagtcatttagcggcgatgattgagtaataatgtgtcacgcatcaccatgggtggcagtgtcagtgtgagcaatgacctgaatgaacaattgaaatgaaaagaaaaaaagtactccatctgttcc

SEQ ID NO: 70597 - DNA, 249 bp, Zea mays
  unsure (1)..(249): unsure at all n locations
gaacacaccaagcgaacgcnactagcaacgacctaacaccaatggctaccaagatattagccctccttgcgcttcttgcccttttagtgagcgcaacaaatgcgttcattattccacagtgctcacttgctcctagtgccagtattccacagttcctcccaccagttacttcaatgggcttcgaacatccagccgtgcaagcctacaggctacaactagcgcttgcggcgagcgccttacaacaaccaa

SEQ ID NO: 70598 - DNA, 196 bp, Zea mays
ctcacttgctccaagttccattattacacagttcctcccaccagttacttcaatgggcttcgaacacccagctgtgcaagcctataggctacaacaagcaattgcggcgagcgtcttacaacaaccaatttcccagttgcaacaacaatccttggcacatctaacaatacaaaccatcgcaacgcaacagcaacaa

SEQ ID NO: 70599 - DNA, 242 bp, Zea mays
gcaacatagaaagtggaatccagtagcaacaacagagcaacaatggcgaccaagatattttccctccttatgctccttgctctttctgcatgtgttgctaacgcgacaattttccctcaatgctcacaagctcctatagcttcccttcttcccccataccttccatcaatgatagcttcagtatgtgaaaacccagctcttcagccctataggctccaacaagcaatcgcagcaagcaacat

SEQ ID NO: 70600 - DNA, 245 bp, Zea mays
gtgttgctaacgcgacaattttccctcaatgctcacaagctcctatagcttcccttcttcccccataccttccatcaatgatagcttcagtatgtgaaaacccagctcttcaaccctataggctccaacaagcaatcgcagcaagcaacatacctttatcacccttgtttcaacaatcgccagccctatctttggtgcagtcattggtacaaaccatcaaggcacagcagctgcagcaactcgtg

SEQ ID NO: 70601 - DNA, 244 bp, Zea mays
tgaacattcagaaacacacctagcgaagccactagcaacgacataacaacaatggctactaagatattatccctccttgcgcttcttgccctttttgttagcgcaacaaatgcgttcattattccacaatgctcacttgctcctagtgccattattccacagttcctcccaccagttagttcaatgggcttcgaacatccagctgtgcaagcctacaggctacaacaagcgcttgcggcgagcg

SEQ ID NO: 70602 - DNA, 248 bp, Zea mays
caacaagcaacatagaaagtggaatacagtagcaaaaatagagcaacaatggcggccaagatattttccatccttatgctccttgctctttctgcatgtgttgctaacgcgaccatttttcctcaatactcacaagctcctatagctgcccttcttcccccataccttccatcaatgaccgctttagtatgtgaaaacccagcccttcaaccctacaggatccagcaagcaatcgcaacaagcaactt

SEQ ID NO: 70603 - DNA, 254 bp, Zea mays
gcaatacaagccatcacaacgcaacagcaacaacagttcctaccagcactgagccacctagccatggtgaaccctgccgcctacttgcaagagcagctgcttgcatccaacccacttgctctggcgaacgtagttgcaaaccagcaacaacaacagctacaacagtttctgccaacgctcagtcaactagccatggtgaaccctgccgcctacgtacaacaacaacaactgctttcatctagcccgctcgctgt

SEQ ID NO: 70604 - DNA, 153 bp, Zea mays
tgaacattcagaaacacacctagcgaagcgcactagcaacgacataacaacaatggctactaagatattatccctccttgcgcttcttgccctttttgttagcgcaacaaatgcgttcattattccacaatgctcacttgctcctagtgccat

SEQ ID NO: 70605 - DNA, 254 bp, Zea mays
attttcagcattcaaaaacacaccaagcgaagcgcactagcaacgacataagaccaatggctaccaagatattagccctccttgcgcttcttgcccttttagtgagcgcaacaaatgcgttcattattccacagtgctcacttgctcctagtgccagtattccacagttcctcccaccagttacttcaatgggcttcgaacatccagccgtgcaagcctacaggctacaactagcgcttgcggcgagcgcctta

SEQ ID NO: 70606 - DNA, 241 bp, Zea mays
cgcggtctgctcgttcgatctgtgcagcagatctgaggtcccgggcgaccgtgaagcagcttcaatcgtcggcatggcgctcgtattgcatagtggggctggaaacaagaatgccttcaaagcacttattgctgcagaatacagtgggatcaaggttgagttgaccaaggattttgagatgggtgtctccaacaagacccctgagtttcttaagatgaaccccttgggaaggttctgttct

SEQ ID NO: 70607 - DNA, 209 bp, Zea mays
cttccatttaaccaattggccgcactgaaccccgctgcttatacgcagcagcaaatactactgccatttagcgagctagctgcagcaagtcgtgcttccttcttgacacagcaacagttgctgcctttctacaagcagtttgcggctaaccccgaaacccccttacaactacaacaattgtggccctttgtacaacttgttttgacaaa

SEQ ID NO: 70608 - DNA, 236 bp, Zea mays
gagcattcagaaacacaccaagcgaagatcattagcaacaacctaacaacaatggctaccaagatattatccctccttgcgcttcttgcgctttttgcgagcgcaacaaatgcgttcattattccacaatgctcacttgctccaagttccattattacacagttcctcccaccagttacttcaatgggcttcgaacacccagctgtgcaagcctataggctacaacaagcaattgc

SEQ ID NO: 70609 - DNA, 243 bp, Zea mays
aacacaccaagcgaaccaactagcaacaacctaacaacaatggctaccaagatattatccctccttgcgcttcttgcgctttttgcgagcgcaacaaatgcgtccattattccacaatgctcacttgctcctagttccattattccacagttcctcccaccagttacttcaatggccttcgaacacccagctgtgcaagcctataggctacaacacgcgattgcggcgagcgtcttacaacaa

SEQ ID NO: 70610 - DNA, 241 bp, Zea mays
ctacaacctggccaagcaccccaagcttgatgtgcccaacttggcggtgattaagctcatgcagagcttcaagtcgaaggagtatgtgagggaaaccttctcatggcagtactactactggtacctcaccaacgatggcattgagcacctccgcagcttcctcaacctgccatcagaggttgtgcctaataccctcaagaagtcttccaagcccccgtctcgccccttcggctctggccca

SEQ ID NO: 70611 - DNA, 243 bp, Zea mays
tgagaccaacaagcaacatagaaagtggaatccagtagcaacaatagagcaacaatggcgaccaagatattttccctccttatgctccttgctctttctacatgtgttgctaacgcgacaattttccctcaatgctcacaagctcctatagcttcccttcttcccccataccttccatcaattatagcttcaatatgtgaaaacccagctcttcaaccatataggcttcaacaagcaatcgca

SEQ ID NO: 70612 - DNA, 245 bp, Zea mays
  unsure (1)..(245): unsure at all n locations
attttcagcattcaaaaacacaccaagcgaacgnactagcaacgacctaacaccaatggctaccaagatattagccctccttgcgcttcttgcccttttagtgagcgcaacaaatgcgttcattattccacagtgctcacttgctcctagtgccagtattccacagttcctcccaccagttacttcaatgggcttcgaacatccagccgtgcaagcctacaggctacaactagcgcttgcggcga

SEQ ID NO: 70613 - DNA, 245 bp, Zea mays
gtacaagcaacatagaaagtggaatccagtagcaacaatagagcaacaatggcgaccaagatattttccctccttatgctccttgctctttctacatgtgttgctaacgcgacaattttccctcaatgctcacaagctcctatagcttcccttcttcccccataccttccatcaattatagcttcaatatgtgaaaacccagctcttcaaccatataggtgtcaacaagcaatcgcagcaagcaa

SEQ ID NO: 70614 - DNA, 260 bp, Zea mays
gtcacttgctcctagtgccattattccacagttcctcccaccagttacttcaatgggcttcgaacatccagccgtgcaagcctacaggctacaactagcgcttgcggcgagcgccttacaacaaccaattgcccaattgcaacaacaatccttggcacatctaaccctacaaaccattgcaacgcaacaacaacaacaacaacagtttctgccatcactgagccacctagccgtggtgcaaccctgtcacctacttgcaa

SEQ ID NO: 70615 - DNA, 216 bp, Zea mays
tatctccaaagaatcgcggcacaccaactacaacaacagtcgactaccaacaatcaatcaagtagttgcagcgaaccttgctgcttacctccagcaacaacagtttcttccattcaatcaactagctggggtgaaccctgctatctacttgcaggcacaacagctactatcatccaactttttggggggccttaagtctgttttctcacaaaaaga

SEQ ID NO: 70616 - DNA, 243 bp, Zea mays
cagaaacacacctagcgaagccactagcaacgacctaacaacaatggctaccaagatattatccctctttgcgcttcttgccctttttgtgagcgcaacaaatgcgttcattattccacaatgctcacttgctgcctagtgccattattccacagttcctccctccagttacttcaatgggcttcgaacacccagctgtgcaagcctacaggctactacaagcgcttgcggcgagcgtcttac

SEQ ID NO: 70617 - DNA, 247 bp, Zea mays
ggatagtagaatccattagcaacaatagagcaacaatggcgaccaagatattttccctccttatgctccttgctctttctacatgtgttgctaacgcgacaattttccctcaatgctcacaagctcctatagcttcccttcttcccccataccttccatcaattatagcttcagtatgtgaaaacccagctcttcaaccatataggcttcaacaagcaatcgcagcaagcaacatacctttatcgcc

SEQ ID NO: 70618 - DNA, 240 bp, Zea mays
ccagaccaccaaacaagtgccagcgccctctcgcagtcgccgcaatggagagcaccttcatcatgatcaagcctgacggcgtccagagggggctcattggtgagatcatcagccgttttgagaagaagggcttctacctcaaggtcttgatgcttgtcaacgtggagaggtcgtttgccgagaagcactacgccgatctcgcctccaagcgcttcttccagggcctcgtggactacatca

SEQ ID NO: 70619 - DNA, 250 bp, Zea mays
gcattcaaaaacacaccaagcgaacgtactagcaacgacctaacaccaatggctaccaagatattagccctccttgcgcttcttgcccttttagtgagcgcaacaaatgcgttcattattccacagtgctcacttgctcctagtgccagtattccacagttcctcccaccagttacttcaatgggcttcgaacatccagccgtgcaagcctacaggctacaactagcgcttgcggcgagcgccttacaac

SEQ ID NO: 70620 - DNA, 273 bp, Zea mays
agaccaactagcaacatagaaagcacaatagtgtaccaacaatggcagccaaaatattttgcctccttatgctccttggtctttctgcaagtgctgctacggcgaccattttcccgcaatgctcgcaagctcctatagcttcccttcttcccccgtacctctcaccagcggtgtcttcggtatgtgaaaacccaattcttcaaccctacaggatccaacaggcaatcacagctggcatcttacctgtatcacccttgttcctccaacaatcat

SEQ ID NO: 70621 - DNA, 269 bp, Zea mays
aagggctacaagcgcacctttaatctcgcgcgcattgaccacagaggcacaccggagcatccggcgaggacctgcacgcttgaaaccgacgacgaggccatatgctggggaattgcatattgtgtcaaggggggtccagaaaaagagctaaaagcaatgcagtacttggagagaagagagtgtgattacgaccagaagatatccattgatttctacaaggaaggagatcccttgaaaccagctgaacaaggcgtcttagtgttcgtttc

SEQ ID NO: 70622 - DNA, 243 bp, Zea mays
cagaaacacacctagcgaagcgcactagcaacgacctaacaacaatggctaccaagatattatccctctttgcgcttcttgccctttttgtgagcgcaacaaatgcgttcattattccacaatgctcacttgctcctagtgccattattccacagttcctccctccagttacttcaatgggcttcgaacacccagctgtgcaagcctacaggctacaacaagcgcttgcggcgagcgtcttac

SEQ ID NO: 70623 - DNA, 268 bp, Zea mays
gaccaactagcaacatagaaagcacaatagtgtaccaacaatggcagccaaaatattttgcttccttatgctccttggtctttctgcaagtgttgctaccgcaaccattttcccacaatgctcacaagctcctatagcttcccttcttcccccatacctctcaccagcggtgtcttcaatgtgtgaaaacccaattgttcaaccctacaggatccaacaggcaatcgcaacaggcatcttaccattatcacccttgttcctccaacaa

SEQ ID NO: 70624 - DNA, 262 bp, Zea mays
acgtattaggttaatggaagtggccaattctgtggcgtggctgagatgattggacctgttgatttcgacagaagtgttgattactggcagcaggataagtggagtggccagttccctgtgaagtggcacataattaaggatgtaccgaacaatcttctgcgacacatcattcttgagaacaatgacaataaacctgtcacaaatagcagggacacacaggaggttcaattaggttggcatgatgctggtacctatgacaaga

SEQ ID NO: 70625 - DNA, 263 bp, Zea mays
agcattcagaaacacacctagcgaacgcactagcaacgacctaacaacaatggctaccaagatattatccctctttgcgcttcttgccctttttgtgagcgcaacaaatgcgttcattattccacaatgctcacttgctcctagtgccattattccacagttcctccctccagttacttcaatgggcttcgaacacccagctgtgcaagcctacaggctacaacaagcgcttgcggcgagcgtcttacaacaaccaattgccc

SEQ ID NO: 70626 - DNA, 267 bp, Zea mays
agaccaactagcaacatagaaagcacaatagtgtaccaacaatggcagccaaaatattttgcttccttatgctccttggtctttctgcaagtgttgctaccgcaaccattttcccacaatgctcacaagctcctatagcttcccttcttcccccatacctctcaccagcggtgtcttcaatgtgtgaaaacccaattgttcaaccctacaggatccaacaggcaatcgcaacaggcatcttaccattatcacccttgttcctccaac

SEQ ID NO: 70627 - DNA, 267 bp, Zea mays
caccagcggtgtcttcagtatgtgaaaacccaattcttcaaccctacaggatccaacaggcaatcgcagcaggcatcttacctttatcacccttgttcctccaacaaccgtcagccctattacagcagttacctttggtgcatttgttggcacaaaacatcaaggcacaacaactacaacaacttgtgctaggaaaccttgctgcctactctcagcaacagcagtttcttccattcaaccaactggctgcattgaactctgctgctt

SEQ ID NO: 70628 - DNA, 264 bp, Zea mays
cagaaacacacctagcgaagcgcactagcaacgacctaacaacaatggcttccaagacattatccctccttgcgcttcttgccctttttgtgagtgcaacaaatgcgttcattattccacaatgctcacttgctccgagtgccattattccacagttcctccctccagttacttcaatgggcttcgaacactcagctgtgcaagcctatagctacaacaagcgcttgcggcgagcgtcttagaacaaccaattgcccaattaca

SEQ ID NO: 70629 - DNA, 262 bp, Zea mays
cggctcgagatggcatagcagaatgtggtaccgatgctctacgctttgcactgatatcgtacacttcccagtctgacaggataaatcttgatattaagagggtggttggatacagacagtggtgcaacaaattatggaatgccatccgttttgcgatgggcaaactgggtgaccattacattccgccggcaactgttgatgtgtctcttatgccaccaatctgcaagtggatactctcggtgcttagcaaggccgttgggaa

SEQ ID NO: 70630 - DNA, 262 bp, Zea mays
attggactgcttgctccctgttgaccattgggtattctgaaccatcgagccatggctgccaagctgactcgcctccacagtcttcgcgaacgccttggtgccaccttctcctcccatcccaatgaactgatagcactcttttccaggtatgttcaccagggcaagggaatgcttcagcgccatcagctgcttgcggagtttgatgccctgtttgatagtgacaaggagaagtatgcaccctttgaagacattcttcgtgctg

SEQ ID NO: 70631 - DNA, 259 bp, Zea mays
ttctcgtcaagctttgtctcttgatgaagcattatggagagtgcgggcctttgctgacgctggagcagatgttctattcattgatgcccttgcctcaagagaagaaatgaaggcattttgcgccatcgcacctggagttccaaaaatggccaacatgttagaaggtggtggtaaaactcctattctgagccctgttgaactggaagaaataggttataaaatcatagcctatccattatctctaattggtgtatcgatg

SEQ ID NO: 70632 - DNA, 100 bp, Zea mays
aaagagggcaccaccaatgatgggttgtagttcaataataaagttttttgtctgatgtttgtggcttcccagaaataagaaagtacatttctagattctt

SEQ ID NO: 70633 - DNA, 260 bp, Zea mays
attgagaccaactagcaacatagaaagcacaatagtgtaccaacaatggcagccaaaatattttgcctccttatgctccttggtctttctgcaagtgctgctacggcgaccattttcccgcaatgctcgcaagctcctatagcttcccttcttcccccgtacctctcaccagcggtgtcttcggtatgtgaaaacccaattcttcaaccctacaggatccaacaggcaatcgcagctggcatcttacctttatcaccctt

SEQ ID NO: 70634 - DNA, 257 bp, Zea mays
gacggctcgcggtgggcaatgcacgtacgtacctacaacaacagttgcggcaacagattgtaccagctctgactcagctagctgtggcaaaccctgctgcctacttacaacagttgcttccattcaaccaactggctgtgtcaagctctgctgcgtacctacaacagcgacaacagtgacttaagccagtggcagtggctaacccatgggtcgctaccttcctgcagcagcagcaacaattgctgccatacaaccag

SEQ ID NO: 70635 - DNA, 262 bp, Zea mays
caactagcaacatagaaagcacaatagtgtaccaacaatggcagccaaaatattttgcctccttatgctccttggtctttctgcaagtgctgctacggcgaccattttcccacaatgctcacaagctcctatagcttcccttcttcccccgtacctctcaccagcggtgtcttcggtatgtgaaaacccaattcttcaaccctataggatccaacaggcaatcgcagctggcatcttacctttatcacccttgttcctccaa

SEQ ID NO: 70636 - DNA, 259 bp, Zea mays
tattatttagaccaactagcaacatagaaagcacaatagtgtaccaacaatggcagccaaaatattttgcctccttatgctccttggtatttctgcaagtgctgctacggcgaccattttcccgcaatgctcacaagctcctatagcttcccttcttcccccgtacctctcaccagcggtgtcttcggtatgtgaaaacccaattcttcaaccctacaggatccaacaggcaatcgcagctggcatcttacctttatca

SEQ ID NO: 70637 - DNA, 261 bp, Zea mays
aaaacacaccaagcgaacgcactagcaacgacctaacaccaatggctaccaagatattagccctccttgcgcttcttgcccttttagtgagcgcaacaaatgcgttcattattccacagtgctcacttgctcctagtgccagtattccacagttcctcccaccagttacttcaatgggcttcgaacatccagccgtgcaagcctacaggctacaactagcgcttgcggcgagcgccttacaacaaccaattgcccaattgc

SEQ ID NO: 70638 - DNA, 260 bp, Zea mays
cattcctccccaaaacacatcctgcgatcctcgaagcctccgccgagcatcgatcatgtcggcctactgcggcaagtacgcggatgagctcatcaagaatgctgcctacatcggcacccctggcaagggtatccttgctgctgatgagtcaactggcaccattggcaagcgcctttccagcatcaatgtcgagaacgtggaggagaacggcgggctctccgtgagctcctgttctgctgccctggtgccctccagtacat

SEQ ID NO: 70639 - DNA, 258 bp, Zea mays
gcaacatagaaagcacaatagtgtaccaacaatggcagccaaaatattttgcctccttatgctccttggtctttctgcaagtgctgctacggcgaccattttcccgcaatgctcgcaagctcctatagcttcccttcttcccccgtacctctcaccagcggtgtcttcggtatgtgaaaacccaattcttcaaccctacaggatccaacaggcaatcgcagctggcatcttacctttatcacccttgttcctccaaca

SEQ ID NO: 70640 - DNA, 253 bp, Zea mays
gttcaacgcggcgctggcgcaccacatcatggccggcgccgacgtgctcgccgtcaccagccgcttcgagccctgcggcctcatccagctgcaggggatgcgatacggcacgccctgcgcctgcgcgtccaccggtggactcgtcgacaccatcatcgaaggcaagaccgggttccacatgggccgcctcagcgtcgactgtaacgtcgtggagcaggcggacgtcaagaaggtggccaccacattgcagcgc

SEQ ID NO: 70641 - DNA, 115 bp, Zea mays
cagaccattagctttatctactccagagcgcagaagaacccgatcggcaccatgagggtgtcgctcgttgccctcgctctcctggctctcgctgcgagcgccacctccacgcata

SEQ ID NO: 70642 - DNA, 257 bp, Zea mays
ctagcaacatagaaagcacaatagtgtaccaacaatggcagccaccatatttggcttccttatgctccttggtctttctgcaagtgctgctaccgcaaccattttcccacaatgctcacaagctcctatagcttccttgcttcccccatacctctcaccagcggtgtcttcagtatgtgagaacccaattcttcaaccctacaggatccaacaggcaatcgcagcaggcatcgtacctttatcaggcgtggtcctcc

SEQ ID NO: 70643 - DNA, 258 bp, Zea mays
gaccaactagcaacatagaaagcacaatagtgtaccaacaatggcagccaaaatattttgcttccttatgctccttggtctttctgcaagtgctgctaccgcaaccattttcccacaatgctcacaagctcctatagcttcctttcttcccccatacctctcaccagcggtgtcttcagtatgtgaaaacccaattcttcaaccctacaggatccaacaggcaatcgcagcaggcatcttacctttatcacccttgtt

SEQ ID NO: 70644 - DNA, 260 bp, Zea mays
ctcgagccgaatcggctcgagggtgcccgacggggttcaagtgacgcatcaactaccaggacgccgacagtggtgccgggacccgacctcgccaaggtgcagcgcgcggtgtgcatgatctccaactccaccagcgtcgtcgaggtgttctcccgcatcaacagcaagttcgacctcatgtacgccaacagcgcgttcgtgcactggtacgtcggcgagggcatggaggagggggagttctccgaggcacgcgaggacct

SEQ ID NO: 70645 - DNA, 263 bp, Zea mays
gcaacatagaaagcacaatagtgtaccaacaatggcagccaaaatattttgcctccttatgctccttggtctttctgcaagtgctgctacggcgaccattttcccgcaatgctcgcaagctcctatagcttcccttcttcccccgtacctctcaccagcggtgtcttcggtatgtgaaaacccaattcttcaaccctacaggatccaacaggcaatcgcagctggcatcttacctttatcacccttgttcctccaacaatcat

SEQ ID NO: 70646 - DNA, 261 bp, Zea mays
gagaccaacaagcaacatagaaagtggaatccagtagcaacaatagagcaacaatggcgaccaagatactttccctccttatgctccttgctctttctgcatgtgttgctaacgcgacaattttccctcaatgctcacaagctcctatagcttcccttcttcccccataccttccatcaatgatagcttcagtatgtgaaaacccagctcttcaaccctataggctccaacaagcaatcgcagcaagcaacatacctttat

SEQ ID NO: 70647 - DNA, 256 bp, Zea mays
agcgaagccactagcaacgacctaacaccaatggctaccaagatattagccctccttgcgcttcttgcccttttagtgagcgcaacagatgcgttcattattccacagtgctcacttgctcctagtgccagtattccacagttcctcccaccagttacttcaatgggcttcgaacatccagccgtgcaagcgtacaggctacaactagcgcttgcggcgagcgccttgacacaaccaattgccgaattgcgacaac

SEQ ID NO: 70648 - DNA, 258 bp, Zea mays
cagaccaactagcaacatagaaagcacaatagtgtaccaacaatggcagccgtgatattttgcctccttatgctccttggtctttctgcaagtgctgctacggcgaccattttcccacaatgctcacaagctcctatagcttcccttcttcccccgtacctctcaccagcggtgtcttcggtatgtgaaaacccaattcttcaaccctataggatccaacaggcaatcgcagctggcatcttagcgttatcacccttg

SEQ ID NO: 70649 - DNA, 257 bp, Zea mays; identical to SEQ ID NO: 69943

SEQ ID NO: 70650 - DNA, 255 bp, Zea mays
aaaaatttgtctgagtctaccacaaaggaagatttactcaaaatctttggtgaatatggggatattacaagtgctgttgtgatgattggtatggatggtaaatcaaggtgttttggtttcatcaattttgagaatccagatgcagcttcccatgctgttcaggaacttaatggtaagaagataaatgacaaagagtggtatgttggaagagctcagaagaagtcagaaagagagatggaactaaaaaggagattt

SEQ ID NO: 70651 - DNA, 211 bp, Zea mays
ccgcctgcagatcagaagaacaacgcagcaagggacactgcatcttggactatcggcgcggtgctggcgatcgtgtgcctcttgtcgtgaagggtttaagcttagatagattgacgccgattgggatccgtcatctcgccgccaataccagtgtacactgaagacaatgtttatgggcatgcattggccaaaataatattattctgcttcc

SEQ ID NO: 70652 - DNA, 242 bp, Zea mays
gtcttcagaccattagctttatctactccagagcgcagaagaacccgatcgacaccatgagggtgttgctcgttgccctcgctctcctggctctcgctgcgagcgccacctccacgcatacaagcggctgctgcggctgccagccaccgccgccggttcatctaccgccgccggtatatctctgacctccggaacacctgccgcctccgctgcatctcccaccgcaggtacacctgtggcag

SEQ ID NO: 70653 - DNA, 255 bp, Zea mays
atacgaactagcaacatacatagtgaagtacactagcaacatcttagcaccaatggcagccaagatttttgccatccttgccctccttgctctttcagcaagcgttgctaccgcgactattattccacaatgctcacaacaatacctctctccggtgacagccgcgagatttgaatacccaactatacaatcctacaggctacaagaggccatcgcagcaagcatcttacggtcgttagcattgaccgtccaaca

SEQ ID NO: 70654 - DNA, 255 bp, Zea mays
ttgagaccaactagcaacatagaaagcacaatagtgtaccaacaatggcagccaaaatattttgcctccttatgctccttggtctttctgcaagtgctgctacggcgaccattttcccgcaatgctcgcaagctcctatagcttcccttcttcccccgtacctctcaccagcggtgtcttcggtatgtgaaaacccaattcttcaaccctacaggatccaacaggcaatcgcagctggcatcttacctttatcac

SEQ ID NO: 70655 - DNA, 257 bp, Zea mays
agaccaacaagcaacatagaaagtggaatacagtagcaacaatagagcaacaatggcggccaagatattttccatccttatgctccttgctctttctgcatgtgttgctaacgcgaccatttttcctcaatactcacaagctcctatagctgcccttcttcccccataccttccatcaatgaccgcttcagtttgtgaaaacccagcccttcaaccctacaggctccaacaagcaatcgcaacaagcaacttacctt

SEQ ID NO: 70656 - DNA, 260 bp, Zea mays
aaaagtggaatccagtagcaacaacagagcaacaatggcgaccaagatattttccctccttatgctccttgctctttctgcatgtgttgctaacgcgacaattttccctcaatgctcacaagctcctatagcttcccttcttcccccataccttccatcaatgatagcttcagtatgtgaaaacccagctcttcagccctataggctccaacaagcaatcgcagcaagcaacatacctttatcacccttgttgtttcaac

SEQ ID NO: 70657 - DNA, 257 bp, Zea mays
gcgtcgagttcctgaggcaccagtgcagcccggcggcgacgccctacggctcgccacagtgccaggcgctgcagcagcagtgctgccaccagatcaggcaggtggagccgctgcaccggtaccaggcgacatacggtgtggtcctgcagtccttcctgcagcagcagccgcagggcgagctcgcggcgctgatggcggcccaggtagcgcacagctgacggcgatgtgcggtctgcagctgcagcagccaggtccct

SEQ ID NO: 70658 - DNA, 254 bp, Zea mays
cggcacgattctcctcctccgtccgcgtactctcggtttcggcgatgtcggggcgcggcaagggcggcaaggggctgggcaagggcggcgccaagcgccaccgcaaggtgctgcgcgacaacatccagggcatcacgaagccggcgatccgtaggctggccaggaggggcggcgtcaagcgcatttctgggctcatctacgaggagacccgcggcgtgctcaagatcttcctcgagaacgtcatccgcgacgcc

SEQ ID NO: 70659 - DNA, 257 bp, Zea mays
attttcagcattcaaaaacacaccaagcgaagcgcactagcaacgacctaacaccaatggctaccaagatattagccctccttgcgcttcttgcccttttagtgagcgcaacaaatgcgttcattattccacagtgctcacttgctcctagtgccagtattccacagttcctcccaccagttacttcaatgggcttcgaacatccagccgtgcaagcctacaggctacaactagcgcttgcggcgagcgccttacaa

SEQ ID NO: 70660 - DNA, 257 bp, Zea mays
ccaacaagcaacatagaaagtggaatccagtagcaacaatagagcaacaatggcgaccaagatactttccctccttatgctccttgctctttctgcatgtgttgctaacgcgacaattttccctcaatgctcacaagctcctatagcttcccttcttcccccataccttccatcaatgatagcttcagtatgtgaaaacccagctcttcaaccctataggctccaacaagcaatcgcagcaagcaacatacctttat

SEQ ID NO: 70661 - DNA, 257 bp, Zea mays
gcctataggcttgcacagctgggtgttcgaagccacttgctttggcaaacgtagctgcataccaacaacaacaacagttgcaacagtttctgccagcgctcagtcaactagccatggtgaaccctatcgcctacctacaacagcaacaacttctttcatctagcccgctcgctatgggcaatgcacctacatacctgcaacaacagttgttgcaacaacagttgctgcaacaaattgtaccagctcttactcagcta

SEQ ID NO: 70662 - DNA, 253 bp, Zea mays
acaattgctgccattttacccacaggttgtgggaaacattaacgccttcttgcaacaacaacaattgctgccattctacccacaggatgtggcaaacattgtcgccttcttacaacaacagcaattgctgccatttagccaactcgctttgacgaatcctaccaccttattgcatcagcccaccattggtggtaccatcttctagattttttatgctttatactgtaataataaatttctcatactgatatga

SEQ ID NO: 70663 - DNA, 249 bp, Zea mays
aacaaacccaacagtgttctaccaacaacccatcattggtggtgccctcttttagattgcttatgagttatagttcaataatgaagttttttggatgatgtttgtggcgtcccagaaataagaaagtacatttctagattcttaaaaaaaaaaaaaaaaaaaaaaaaaaaaaaaaaaaaaaaaaaaaaaaaaaaaaaaaaaaaaaaaaaaaaaaaaaaaaaaaaaaaaaagaaaaaagaagagaaagaa

SEQ ID NO: 70664 - DNA, 155 bp, Zea mays
gttctctttgatgaaccctgccttgtcgtggcagcaacccatcgttggtggtgccatcttttagattacatatgagatgtactcgataatggtgccctcatagcggcatgtgtttcctaaaaataatcaatatattgattgagatttatctcgat

SEQ ID NO: 70665 - DNA, 257 bp, Zea mays
aagcaacatagaaagtggaatccagtagcaacaacagagcaacaatggcgaccaagatattttccctccttatgctccttgctctttctgcatgtgttgctaacgcgacaattttccctcaatgctcacaagctcctatagcttcccttcttcccccataccttccatcaatgatagcttcagtatgtgaaaacccagctcttcagccctataggctccaacaagcaatcgcgtctagcaacatacctttatcaccc

SEQ ID NO: 70666 - DNA, 253 bp, Zea mays
gcctgctcgttctatctgtccagcagacttgaggttccgagcggccggaaaccagcggcaaccgtcggcatggcgctcgtattgcattctggggctggaaacaaaaatgccttcaaggcacttattgctgcagaatacagtggggtcaaggttgagttgaccaaggattttgagatgggtgtctcgaacaagacccctgagtttctaaagatgaacccccttgggaaggttcctgttctggagactcctgatg

SEQ ID NO: 70667 - DNA, 106 bp, Zea mays
taatcgcgagcggcgcccttttttagattgcttatgagttatagttcaataatgaagttttttgagcgatgtttgtggcttcccagaaataagaaagtacatttct

SEQ ID NO: 70668 - DNA, 254 bp, Zea mays
cccgagtggtcgacctgatccgccacatgaacatcaccaagtaaatgaacaaactgatgaaaacatgcaaagagtgatgaaagcatgcagagagagttgtgtttcttccccggaagtgcttccgagaataaatttttcttatctgattgtctaaaacctataacgggtgtaatggtatcgtagtggttggttgagcatcaagtgactcatattttgtcaggtctatgtgtcatcgttaaacttttaacggtcat

SEQ ID NO: 70669 - DNA, 251 bp, Zea mays
ctcgagccgcagaaacacaccaagcgaagcgcatctagcaacaacctaacaacaatggctaccacagatattatccctccttgcgcttcttgcgctttttgcgagcgcaacaaatgcgtccattattccacaatgctcacttgctcctagttccattattccacagttcctcccaccagttacttcaatggccttcgaacacccagctgtgcaagcctataggctacaacaagcgattgcggcgagcgtct

SEQ ID NO: 70670 - DNA, 253 bp, Zea mays
ctcgagccgttttgagcattcagaaacacacctagcgaacgcactagcaacgacctaacaacaatggcttccaagacattatccctccttgcgcttcttgccctttttgtgagtgcaacaaatgcgttcattattccacaatgctcacttgctccgagtgccattattccacagttcctccctccagttacttcaatgggcttcgaacacccagctgtgcaagcctataggctacaacaagcgcttgcggcga

SEQ ID NO: 70671 - DNA, 253 bp, Zea mays
attttcagcattcaaaaacacaccaagcgaaggcagctagcaacgacctaacaccaatggctaccaagatattagccctccttgcgctttttgcccttttagtgagcgcaacaaatgcgttcattattccacagtgctcacttgctcctagtgccattattccacagttcctcccaccagttacttcaatgggcttcgaacatccagccgtgcaagcctacaggctacaactagcgcttgcggcgagcgcctt

SEQ ID NO: 70672 - DNA, 250 bp, Zea mays
agcaaaccatggacatggctttggcgtctaaagcctcccctccgccatggaatgccaccgccgccgagcagccaattccaaagcgtgacaaagccgctgcaaatgattcaacatacctcaatcctcaagctcatgatagtgttcttggaatcattctgggaggtggtgctgggactagattgtaccctctgacaaagaagcgtgccaagcctgcagtgccattgggtgccaactatagactgattgatat

SEQ ID NO: 70673 - DNA, 189 bp, Zea mays
gcaacaattgctgccatacaaccggttctctttgatgaatcctgtcttgtcgaggcagcaacccatcgttggaggtgccatcttttagattacatatgagatgtactcgataatggtgccctcataccggcatgtgtttcctagaaataatcaatatattggttgagatttatctcgatatatttcaat

SEQ ID NO: 70674 - DNA, 248 bp, Zea mays
tgtgacttcaatggaagaaaacagtgatacttttgtgctgcattcggagcaagaaaggaaaggcaaagtaaaacctgtgcatattgttgatgttcctggtcatgctaggctcaagcccaagcttgatgaagtcctgcctaaagctgctggggttgtctttattgttgatgctcaggatttcttgtctagcatgcaagctgctgcagagtacctttatgacattctgacaaaagcatctgtagttaaga

SEQ ID NO: 70675 - DNA, 253 bp, Zea mays
caactagcaacatagaaagcacaatagtgtaccaagaatggcagccaaaatattttgcttccttatgctccttggtctttctgcaagtgctgctaccgcaaccattttcccacaatgctcacaagctcctatagcttcctttcttcccccatacctctcaccagcggtgtcttcagtatgtgaaaacccaattcttcaaccctacaggatccaacaggcaatcgcagcaggcatcttacctttatcacccttg

SEQ ID NO: 70676 - DNA, 189 bp, Zea mays
tagcaacatagaaagcacaatagtgtaccaacaatggcagccaaaatattttgcctccttatgctccttggtctttctgcaagtgctgctacggcgaccattttcccgcaatgctcgcaagctcctatagcttcccttcttcccccgtacctctcaccagcggtgtcttcggtatgtgaaaacccaatt

SEQ ID NO: 70677 - DNA, 281 bp, Zea mays
cagaaacacaccaagcgaacacattagcaacaacctaacaacaatggctaccaagatattatccctccttgcgcttcttgcgctttttgcgagcgcaacaaatgcgttcattattccacaatgctcacttgctccaagttccattattacacagttcctcccaccagttacttcaatgggcttcgaacacccagctgtgcaagcctataggctacaacaagcacttgcggcgagcgtcttacaacaaccaatttcccagttgcaacaacaatccttggcac

SEQ ID NO: 70678 - DNA, 277 bp, Zea mays
attattgagaccaactagcaacatagaaagcacaatagtgtaccaacaatggcagccaaaatattttgcttccttatgctccttggtctttctgcaagtgttgctaccgcaaccattttcccacaatgctcacaagctcctatagcttcccttcttcccccatacctctcaccagcggtgtcttcaatgtgtgcaaacccaattgttcaaccctacaggatccatcaggcaatcgcaacatgcatcttaccattatcacccttgttcctccaacaac

SEQ ID NO: 70679 - DNA, 278 bp, Zea mays
gagaccaacaagcaacatagaaagtggaatccagtagcaacaatagagcaacaatggcgaccaagatactttccctccttatgctccttgctctttctgcatgtgttgctaacgcgacaattttccctcaatgctcacaagctcctatagcttcccttcttcccccataccttccatcaatgatagcttcagtatgtgaaaacccagctcttcaaccctataggctccaacaagcaatcgcagcaagcaacatacctttatcacccttgtttcaacaa

SEQ ID NO: 70680 - DNA, 278 bp, Zea mays
gctccttgctctttctgcatgtgttgctaacgcgacaattttccctcaatgctcacaagctcctatagcttcccttcttcccccataccttccatcaatgatagcttcagtatgtgaaaacccagctcttcagccctataggctccaacaagcaatcgcagcaagcaacatacctttatcacccttgttgtttcaacaatcgccagccctatctttggtgcagtcattggtacaaaccatcagggcacagcagctgcagcaactcgtgctacctgtga

SEQ ID NO: 70681 - DNA, 273 bp, Zea mays
gcgtattaggttaatggaagtggccaattctgtggcgtggctgagatgattggacctgttgattaacgaagaagtgttgattactggcagcaggataagtggagtggccagttccctgtgaagtggcacataattaaggatgtaccgaacaatcttctgtgacacatcattcttgagaacaatgacaataaacctgtcacaaatagcagggacacacaggaggttcaattaggttggcatgatgctggtacctatgacaagaacattatcgag

SEQ ID NO: 70682 - DNA, 268 bp, Zea mays
cagaaacacacctagcgaacgcactagcaacgacctaacaacaatggcttccaagacattatccctccttgcgcttcttgccctttttgtgagtgcaacaaatgcgttcattattccacaatgctcacttgctccgagtgccattattccacagttcctccctccagttacttcaatgggcttcgaacacccagctgtgcaagcctataggctacaacaagcgcttgcggcgagcgacttaggacagccaattgcccaattacaacat

SEQ ID NO: 70683 - DNA, 269 bp, Zea mays
  unsure (1)..(269): unsure at all n locations
ccaactagcaacatagaaagcacaatagtgtaccaactatggcagccaaaatattttgcctccttatgctccttggtcgttctgcaagtgctgctacggcgaccattttcccgcaatgctcgtaagctcctatagcttcccttcttcccccgtacctctcactagcggtgtcttcggtatgtgaactaatnattcttcaancctacaggatccaacaggcaatcacagctggcatcttacctttatcacccttgttcctccaacaatca

SEQ ID NO: 70684 - DNA, 271 bp, Zea mays
cagaaacacaccaagcgaacgcactagcaacgacctaacaacaatggctaccaagatattagccctccttgcgcttcttgccctttttgtgagcgcaacaaatgcgttcattattccacaatgctcacttgctcctagtgccattattccacagttcctcccaccagttacttcaatgggcttccccacctagctgtgcaagccaacatgcaacaacaagcgcttgctgcgagcgtcttacaacaaccaattgcccaattgcaacaacaat

SEQ ID NO: 70685 - DNA, 275 bp, Zea mays
aagcaacatagaaagtggaatccagtagcaacaatagagcaacaatggcgaccaagatactttccctccttatgctccttgctctttctgcatgtgttgctaacgcgacaattttccctcaatgctcacaagctactatagcttcccttcttcccccataccttccatcaatgatagcttcagtatgtgaaaacccagctcttcaaccctataggctccaacaagcaatcgcagcaagcaacatacctttatcacccttgtttcaacatcgccag

SEQ ID NO: 70686 - DNA, 272 bp, Zea mays
cacaacccagtcgctcaaaaccctagagctctcgcctgctcgcctccgccgccggagcgagctccccatcttcatccgtcaaccatggcgacccagatcagcaagaagaagaagttcgtcagcgacggtgttttctacgccgagctcaatgcgatgctgacgcgggagctggcggacgatggctactcaaccgaagaggtgcgcgtcacgccgatgcgcacggagatcatcatccgcgccacggcacgcagaacgtgctcggcgagaagggc

SEQ ID NO: 70687 - DNA, 275 bp, Zea mays
atttataccaactaccaacatacatagtgaagtacactagcaacatcttagcaccaatggcagccaagatttttgcgctccttgccctccttgctctttcagcaagtgttgctaccgcgactattattccacaatgctcacaacaatacctctctccagtgatagccgcgagatttgaatacccatctatacaatcctacaggctacaagaggccatcacagcaagcatcttacggtcgttagcattgaccgtccaacaaccatatgccctattg

SEQ ID NO: 70688 - DNA, 158 bp, Zea mays
ctgccattcaaccaacttgctttgacaaacccagcagcgttctaccaacaacccatcattggtggtgccctcttttagatttcttatgagttatagttcaataataaagttttttgtctgatgtttgtggcttcccagaaataagaaagtacatttct

SEQ ID NO: 70689 - DNA, 273 bp, Zea mays
gaccaactagcaacatagaaagcacaatagtgtaccaacaatggcagccaaaatattttgcctccttatgctccttggtctttctgcaagtgctgctacggcgaccattttcccgcaatgctcgcaagctcctatagcttcccttcttcccccgtacctctcaccagcggtgtcttcggtatgtgaaaacccaattcttcaaccctacaggatccaacaggcaatcacagctggcatcttacctttatcacccttgttcctccaacaatcatc

SEQ ID NO: 70690 - DNA, 273 bp, Zea mays
gcaacatagaaagcacaatagtgtaccaacaatggcagccaaaatattttgcttccttatgctccttggtctttctgcaagtgctgctaccgcaaccattttcccacaatgctcacaagctcctatagcttcctttcttcccccatacctctcaccagcggtgtcttcagtatgtgaaaacccaattcttcaaccctacaggatccaacaggcaatcgcagcaggcatcttacctttatcacccttgttcctccaacaaccgtcagccctatt

SEQ ID NO: 70691 - DNA, 272 bp, Zea mays
tgcgttcattattccacaatgctcacttgctcctagtgccattattccacagttcctccctccagttacttcaatgggcttcgaacacccagctgtgcaagcctacaggctacaacaagcgcttgcggcgagcgtcttacaacaaccaattgcccaattacaacaacaatccttggcacatctaaccatacaaaccatcgcaacgcaacagcaacaacaatttctaccagcactgagccaactagctgtggtgaacctgtcgcctacttgca

SEQ ID NO: 70692 - DNA, 271 bp, Zea mays
gcgaacgcactagcaacgacctaacaccaatggctaccaagatattagccctccttgcgcttcttgcccttttagtgagcgcaacaaatgcgttcattattccacagtgctcacttgctcctagtgccagtattccacagttcctcccaccagttacttcaatgggcttcgaacatccagccgtgcaagcctacaggctacaactagcgcttgcggcgagcgccttacaacaaccaattgcccaattgcaacaacaatccttggcacatct

SEQ ID NO: 70693 - DNA, 270 bp, Zea mays
caaggtcctgtttgtatgcgaacgagaaaagtaggaccctttttatgtagcagcaaacaaaaatgaatataaagaactatatttatgaatgtaggttgtatgtatgtcgatatttattatcattcattcgaatatggacggaaaatggactaaaaactatattttagaacagatagagtaatactcatcataaaccactaacacgtaacgatcaccttgcatattatacacttagcactcattaaactattagcgtacacgttacaacta

SEQ ID NO: 70694 - DNA, 281 bp, Zea mays
  unsure (1)..(281): unsure at all n locations
actgcttgctccctgttgaccattgggtattctgaaccatcgagccattgctgccaagctgncttcgcctccacagtcttcgcgaacnccttggtgccaccttctcctcccatcccaatgaactgatagcactcttttccagggnatgttcaccagggcaagggaatgcttcagcgccatcaggctgcttgcggagtttgatgccctgtttgatagtgacaaggagaagtatgcaccctttgaagacattctttcgtgctgctcaggaacaattgtgcttc

SEQ ID NO: 70695 - DNA, 272 bp, Zea mays
agcattcagaaacacaccaagcgaagcgcactagcaacgacctaacaacaatggctaccaagatattagccctccttgcgcttcttgccctttttgtgagcgcaacaaatgcgttcattattccacaatgctcacttgctcctagtgccattattccacagttcctcccaccagttacttcaatgggcttcgaacacctagctgtgcaagccaacatgcaacaacaagcgcttgcggcgagcgtcttacaacaaccaattgcccaattgcaa

SEQ ID NO: 70696 - DNA, 276 bp, Zea mays
tattgataccaactagcaaaatacatagtgaagtacactagcaacatcttagcaccaatgggagccaagattttttccctccttgccctccttgctctttcagcaagcgctgctacctctactattattccacaatgctcacaacaatacctctctccggtgacagccgcgggatttcaacactcaactatacaatcctacatgctacatgaggccatcgtagcaagcatcttacggtcattagcattaaccctccaacagccatatgccctattg

SEQ ID NO: 70697 - DNA, 270 bp, Zea mays
tttcaccgtgtacccatccccccaggtgtccacatccgtggttgagccatacaacagtgtcctgtccacccactctctcctcgagcacactgatgttgctgtcctgctcgacaatgaggccatctatgacatctgccgccgctcccttgacattgagcgcccaacctacaccaacctcaacaggcttgtctcccaggtcatctcatccctgacggcttccctgaggttcgatggtgctctgaacgttgatgtgaacgagttccagaccaa

SEQ ID NO: 70698 - DNA, 273 bp, Zea mays
aaaggtctagcataacctttagttgatcgaatagatgttcacaatagattcagacttcgtctctatcgcccatcaactgttaccacggaatacagagaacatgtgaaagatctttcttgcgtgtcaaaagatttcggcaggattgtcattgtcgacaacaatccgttcagtttcattcttcagcctttgaatggaataccttgtgttccattttcagctggacaacattctgatgaccagctcatgatggttatatttccactcctgaagcat

SEQ ID NO: 70699 - DNA, 270 bp, Zea mays
tcagcattcaaaaacacaccaagcgaagcgcactagcaacgacctaacaccaatggctaccaggatattagccctccttgcgcttcttgcccttttagtgagcgcaacaaatgcgttcattattccacagtgctcacttgctcctagtgccagtattccacagttcctcccaccagttacttcaatgggcttcgaacatccagccgtgcaagcctacaggctacaactagcgcttgcggcgagcgccttacaacaaccaattgcccaatt

SEQ ID NO: 70700 - DNA, 270 bp, Zea mays
ggctttggcgtctaaagcctcccctccgccatggaatgccaccgccgccgagcagccaattccaaagcgtgacaaagccgctgcaaatgattcaacatacctcaatcctcaagctcatgatagtgttcttggaatcattctgggaggtggtgctgggactagattgtaccccttgacaaagaagcgtgccaagcctgcagtgccattgggtgccaactatagactgattgatattcctgtcagcaattgtctcaacagcaacatatccaa

SEQ ID NO: 70701 - DNA, 272 bp, Zea mays
accaactagcaacatagaaagcacaatagtgtaccaacaatggcagccaaaatattttgcctccttatgctccttggtctttctgcaagtgctgctacggcgaccattttcccgcaatgctcgcaagctcctatagcttcccttcttcccccgtacctctcaccagcggtgtcttcggtatgtgaaaacccaattcttcaaccctacaggatccaacaggcaatcgcagctggcatcttacctttatcacccttgttcctccaacaatcatc

SEQ ID NO: 70702 - DNA, 271 bp, Zea mays
attggtacaaaccatcagggcacaacagctgcaacaactcgtgctaccagtgatcagccaagtagctctggcaaacctttctccctactctcagcaacaacaatttcttccattcaaccaactgtctacactgaaccctgctgcttatttacaacaacaacaactactaccattcagccagctagctactgcctactctcagcagcaacaatttcttccatttaaccaattggccgcactgaacccctctgcttatttccagcagcaaata

SEQ ID NO: 70703 - DNA, 271 bp, Zea mays
gctggattgatttctagcaagctttcaagatctgatatgaatatcccagaagatgttcatgacaatcatatcttgttttcccctgagagtcctttgtcacgtcaagaccttgtgagttggaaaatggccctggataagagacaactgcctgaagttgacagaaattgtttgttcaaactatctggctacatagacatcgataagataaacacagctgcctggccagctttggctgcagacttggatgctggagaccagagcattacagctc

SEQ ID NO: 70704 - DNA, 158 bp, Zea mays; identical to SEQ ID NO: 70688

SEQ ID NO: 70705 - DNA, 271 bp, Zea mays
actcgagccgattcggctcgagagctgcatagaaagcacaatagtgtaccaacaatggcagctcacaatattttgcctcctactgctccttggtctttctgcaagtgctgctacggcgaccattttcccgcactgctcgcaagctcctatagcttcccttcttcccccgtacctctcaccagcggtgtcttcggtatgtgaaaacccaattcttcaaccctacaggatccaacaggcaatcgcagctggcatcttacctttatcacccttg

SEQ ID NO: 70706 - DNA, 266 bp, Zea mays
ctgctcgagcggctcgagcagaaacacaccaagcgaagcgcactagcaacgacctaacaacaatggctaccaagatattagccctccttgcgcttcttgccctttttgtgagcgcaacaaatgcgttcattattccacaatgctcacttgctcctagtgccattattccacagttcctcccaccagttacttcaatgggcttcgaacacctagctgtgcaagccaacatgcaacaacaagcgcttgcggcgagcgtcttacaacaa

SEQ ID NO: 70707 - DNA, 266 bp, Zea mays
gcaacatagaaagtagaatccattagcaacaatagagcaacaatggcgaccaagatattttccctccttatgctccttgctctttctacatgtgttgctaacgcgacaattttccctcaatgctcacaagctcctatagcttcccttcttcccccataccttccatcaattatagcttcagtatgtgaaaacccagctcttcaaccatataggcttcaacaagcaatcgcagcaagcaacatacctttatcgcccttgttgattca

SEQ ID NO: 70708 - DNA, 268 bp, Zea mays
ccaacaagcaacatagaaagtggaatccagtagcaacaacagagcaacaatggcgaccaagatattttccctccttatgctccttgctctttctgcatgtgttgctaacgcgacaattttccctcaatgctcacaagctcctatagcttcccttcttcccccataccttccatcaatgatagcttcagtatgtgaaaacccagctcttcagccctataggctccaacaagcaatcgcagcaagcaacatacctttatcacccttgttg

SEQ ID NO: 70709 - DNA, 268 bp, Zea mays
caactagcaacatagaaagcacaatagtgtaccaacaatggcagccaaaatattttgcttccttatgctccttggtctttctgcaagtgctgctaccgcaaccattttcccacaatgctcacaagctcctatagcttcctttcttcccccatacctctcaccagcggtgtcttcagtatgtgaaaacccaattcttcaaccctacaggatccaacaggcaatcgcagcaggcatcttacctttatcacccttgttcctccaacaaccg

SEQ ID NO: 70710 - DNA, 269 bp, Zea mays
tagcaacatagaaagcacaatagtgtaccaacaatggcagccaaaatattttgcttccttatgctccttggtctttctgcaagtgctgctaccgcaaccattttcccacaatgctcacaagctcctatagcttcctttcttcccccatacctctcaccagcggtgtcttcagtatgtgaaaacccaattcttcaaccctacaggatccaacaggcaatcgcagcaggcatcttacctttatcaccttgttcctccaacaaccgtcagcc

SEQ ID NO: 70711 - DNA, 269 bp, Zea mays
tagaaagcacaatagtgtaccaacaatggcagccaaaatattttgcctccttatgctccttggtctttctgcaagtgctgctacggcgaccattttcccgcaatgctcgcaagctcctatagcttcccttcttcccccgtacctctcaccagcggtgtcttcggtatgtgaaaacccaattcttcaaccctacaggatccaacaggcaatcgcagctggcatcttacctttatcacccttgttcctccaacaatcatcagccctattac

SEQ ID NO: 70712 - DNA, 275 bp, Zea mays
tattttgagcattcagaaacacaccaagcgaacatcattagcaacaacctaacaacaatggctaccaagatattatccctccttgcgcttcttgcgctttttgcgagcgcaacaaatgcgttcattattccacacagctcacttgctccaagttccattattacacagttcctcccaccagttacttcaatgggcttcgaacacccagctgtgcaagcctataggctacaacaagcaattgcggcgagcgtcttacaacaaccaatttcccagtt

SEQ ID NO: 70713 - DNA, 265 bp, Zea mays
attgagaccaactagcaacatagaaagcacaatagtgtaccaacaatggcagctaaaatattttgcctccttatgctccttggtctttctgcaagtgctactacggcgaccattttcccacaatgctcacaagctcctatagcttcccttcttcccccgtacctctcaccaacggtgtcttcggtatgtgaaaacccaattcttcaaccctacaggatccaacaggcaatcgcagctggcatcttacctttatcaccttgttcct

SEQ ID NO: 70714 - DNA, 266 bp, Zea mays
gcgaacgcactagcaacgacctaacaccaatggctaccaagatattagccctccttgcgcttcttgcccttttagtgagcgcaacaaatgcgttcattattccacagtgctcacttgctcctagtgccagtattccacagttcctcccaccagttacttcaatgggcttcgaacatccagccgtgcaagcctacaggctacaactagcgcttgcggcgagcgccttacaacaaccaattgcccaattgcaacaacaatccttggca

SEQ ID NO: 70715 - DNA, 268 bp, Zea mays
attttcagcattcaaaaacacaccaagcgaacgctactagcaacgacctaacaccaatggctaccaagatattagccctccttgcgcttcttgcccttttagtgagcgcaacaaatgcgttcattattccacagtgctcacttgctcctagtgccagtattccacagttcctcccaccagttacttcaatgggcttcgaacatccagccgtgcaagcctacaggctacaactagcgcttgcgtgcgagcgccttacaacaaccaattg

SEQ ID NO: 70716 - DNA, 263 bp, Zea mays
ctagcatcataggaagcacaatagtgtaccaacaatggcagccaaaatattttgcctccttatgctccttggtctttctgcaagtgctgctacggcgaccattttcccgcaatgctcgcaagctcctatagcttcccttcttcccccgtacctctcaccagcggtgtcttcggtatgtgaaaacccaattcttcaaccctacaggatccaacaggcaatcacagctggcatcttacctttatcacccgtgctcctccaacaat

SEQ ID NO: 70717 - DNA, 263 bp, Zea mays
gagaccaacaagcaacatagacagtggtatccagtagcaacaatagagcaacaatggcgaccaagatactttccctccttatggtccttgctctttctgcatgtggtgctaacgcgacaattttccctcaatgctcacaagctcctatagcttcccttcttcccccataccttccatcaatgatagcttcagtatgtgaaaacccagctcttcaaccctataggcttcaacaagcaatcgcagcaagcaacatacctttatca

SEQ ID NO: 70718 - DNA, 264 bp, Zea mays
gttcaggatccacatcttcccgagcgagttcttggttgacctcttcccccttcggaccacctccaaggctcttggtgtagcttgccactctcaccaatcaagttttcatgtctgatctcgacattcagatcccaactgccttcgatcccttcgctgaggccaatgctggggactctggtgcggcagcagggtcaaaggactacgttcacgtgcgcatccagcagcgtaatggtcgcaagagcctgactaccgtccagggattga

SEQ ID NO: 70719 - DNA, 264 bp, Zea mays
caactagcaacatagaaagcacaatagtgtaccaacaatggcagctaaaatattttgcctccttatgctccttggtctttctgcaagtgctgctacggcgaccattttcccacaatgctcacaagctcctatagcttcccttcttcccccgtacctctcaccaacggtgtcttcggtatgtgaaaacccaattcttcaaccctacaggatccaacaggcaatcgcagctggcatcttacctttatcacccatgttcctccaaca

SEQ ID NO: 70720 - DNA, 269 bp, Zea mays
tctcgagccgattcggctcgagcgcgaggttagtgagttcttttcactctctggtcctatagagcatatagaacttatcagatcagaaggatacggtgccactgcttatgtgacattcaaggaacgctttgccttggaaactgcagtattgctcagtggggctactattgtggatcagccagtatgcataacctattggggacaacctgagggatctttaaatttctgggacaggccatcttgggaggttgaagaggaaatcgaataca

SEQ ID NO: 70721 - DNA, 266 bp, Zea mays
cgcctgtccactttccccgtgcttctccgccgtcgaggccgcgtcccagtgcgaagagactccgactcagatggccagccgctgggtccggcccgaggtgtacccgctgttcgcggcgacgggcgtggccgtcggcatctgcgggtttcagctcttccggaacatcactggcaacccggaagtcagggtaaacaaggcagggagggcagctggtgtgcttgagaaccatgaggaggggagacgttacgccatgcatggcctaagaa

SEQ ID NO: 70722 - DNA, 255 bp, Zea mays
ctcgagccgctcgagccgaatcggctcgaggcagggttcagtatagacagttggttatttacagcaacaacatactactaccattcagccagctagcagctgcctactctcagcagcaacaatttcttccatttaaccaattggccgcactgaacccctctgcttatttaccacagcaaatactactaccatttggccagctagctacaacaagccccgcttccttcttgacacaacaacaagtgcttccgttct

SEQ ID NO: 70723 - DNA, 267 bp, Zea mays
tagcaacatagaaagcacaatagtgtaccaacaatggcagccaaaatattttgcctccttatgctccttggtctttctgcaagtgctgctacggcgaccattttcccgcaatgctcgcaagctcctatagcttcccttcttcccccgtacctctcaccagcggtgtcttcggtatgtgaaaacccaattcttcaaccctacaggatccaacaggcaatcgcagctggcatcttacctttatcacccttgttcctccaacaatcatca

SEQ ID NO: 70724 - DNA, 267 bp, Zea mays; identical to SEQ ID NO: 69236

SEQ ID NO: 70725 - DNA, 264 bp, Zea mays
gaaagcacaatagtgtaccaacaatggcagccaaaatattttgcctccttatgctccttggtctttctgcaagtgctgctacggcgaccattttcccacaatgctcacaagctcctatagcttcccttcttcccccgtacctctcaccagcggtgtcttcggtatgtgaaaacccaattcttcaaccctataggatccaacaggcaatcgcagctggcatcttacctttatcacccttgttcctccaacaatcatcagccctat

SEQ ID NO: 70726 - DNA, 263 bp, Zea mays
agcaacatagaaagtggaatccagtagcaacaacagagcaacaatggcgaccaagatactttccctccttatgctccttgctctttctgcatgtgttgctaacgcgacaattttccctcaatgctcacaagctcctatagcttcccttcttcccccataccttccatcaatgatagcttcagtatgtgaaaacccagctcttcaaccctataggctccaacaagcaatcgcagcaagcaacatacctttatcacccttgtttc

SEQ ID NO: 70727 - DNA, 262 bp, Zea mays; identical to SEQ ID NO: 68707

SEQ ID NO: 70728 - DNA, 258 bp, Zea mays
attttgagcattcagaaacacaccaagcgaagagcattagcaacaacctaacaacaatggctaccaagatattatccctccttgcgcttcttgcgctttttgcgagcgcaacaaatgcgttcattattccacaatgctcacttgctccaagttccattattacacagttcctcccaccagttacttcaatgggcttcgaacacccagctgtgcaagcctataggctacaacaagcaattgcggcgagcgtcttacaac

SEQ ID NO: 70729 - DNA, 267 bp, Zea mays
caacaagcaacatagaaagtggaatccagtagcaacaacagagcaacaatggcgaccaagatattttccctccttatgctccttgctctttctgcatgtgttgctaacgcgacaattttccctcaatgctcacaagctcctatagcttcccttcttcccccataccttccatcaatgatagcttcagtatgtgaaaacccagctcttcagccctataggctccaacaagcaatcgcagcaagcaacatacctttatcacccttgttg

SEQ ID NO: 70730 - DNA, 272 bp, Zea mays
atttagaccaactagcaacatagaaagcacaatagtgtaccaacaatggcagccaaaatattttgcctccttatgctccttggtatttctgcaagtgctgctacggcgaccattttcccgcaatgctcacaagctcctatagcttcccttcttcccccgtacctctcaccagcggtgtcttcggtatgtgaaaacccaattcttcaaccctacaggatccaacaggcaatcgcagctggcatcttacctttatcacccttgttcctccaaca

SEQ ID NO: 70731 - DNA, 271 bp, Zea mays
actatactctaggaagcaaggacaccaccgccatggcagccaagatgcttgcattgttcgctctcctagctctttgtgcaagcgccactagtgcgacccatattccagggcacttgccaccagtcatgccattgggtaccatgaacccatgcatgcagtactgcatgatgcaacaggggcttgccagcttgatggcgtgtccgtccctgatgctgcagcaactgttggccttaccgcttcagacgatgccagtgatgatgccacagatgat

SEQ ID NO: 70732 - DNA, 269 bp, Zea mays
ccatcgagttggattgggttcaaagttgggcttttggacagctgtggtgtgcacggcagctctgtgacttgtgaggaggaagggaggaagaaagcggatccatggcgtcgaagcggatcctcaaggagcacaaggacctgcagaaggatcctaccacctcttgcagcgcaagccctgttgccgaagatatgttctactggcaggcgacgattatggggccatcagatagcccatacgctggtgacgtattttagagtcatattcacttt

SEQ ID NO: 70733 - DNA, 270 bp, Zea mays
caactagcaacatagaaagcacaatagtgtaccaacaatggcagccaaaatattttgcctccttatgctccttggtctttctgcaagtgctgctacggcgaccattttcccgcaatgctcgcaagctcctatagcttcccttcttcccccgtacctctcaccagcggtgtcttcggtatgtgaaaacccaattcttcaaccctacaggatccaacaggcaatcacagctggcatcttacctttatcacccttgttcctccaacaatcatc

SEQ ID NO: 70734 - DNA, 264 bp, Zea mays
ctttgccaaggatattcatttcagaacttcttgtggatgagttgactactcaaagccaggaaattatacataaatacattaaaacttctggcaatggaaataatcatgctgctattgcaagtacatctggggagctaacatgggagaagcccatttattcagatttccagattttgtctaggaaaagtgaatatgctgcatggactcttgttaatggctatgcactaaatcatgccacaattgccacccatcgcctagaatcag

SEQ ID NO: 70735 - DNA, 269 bp, Zea mays
acaacatagaaagcacaatagtgtaccaacaatggcagccaaaatattttgcctccttatgctccttggtctttctgcaagtgctgctacggcgaccattttcccgcaatgctcgcaagctcctatagcttcccttcttcccccgtacctctcaccagcggtgtcttcggtatgtgaaaacccaattcttcaaccctacaggatccaacaggcaatcacagctggcatcttacctttatcacccttgttcctccaacaatcatcagccc

SEQ ID NO: 70736 - DNA, 269 bp, Zea mays
attttcagcattcaaaaacacaccaagcgaagcgcactagcaacgacctaacaccaatggctaccaagatattagccctccttgcgcttcttgcccttttagtgagcgcaacaaatgcgttcattattccacagtgctcacttgctcctagtgccattattccacagttcctcccaccagttacttcaatgggcttcgaacatccagccgtgcaagcctacaggctacaactagcgcttgcggcgagcgccttacaacaaccaattgcc

SEQ ID NO: 70737 - DNA, 267 bp, Zea mays
cttgctcctagttccattattccacagttcctcccaccagttacttcaatggccttcgaacacccagctgtgcaagcctataggctacaacaagcgattgcggcgagcgtcttacaacaaccaattgcccaattgcaacaacaatccttggcacatctaacaatacaaaccatcgcaacgcaacagcaacaacatccgctaccagcactgagccacctagccatggtgaaccctgtcgcctacttgcaacagcagctgcttgcatcc

SEQ ID NO: 70738 - DNA, 267 bp, Zea mays
agcattcagaaacacacctagcgaagcgcactagcaacgacctaacaacaatggcttccaagacattatccctccttgcgcttcttgccctttttgtgagtgcaacaaatgcgttcattattccacaatgctcacttgctccgagtgccattattccacagttcctccctccagttacttcaatgggcttcgaacacccagctgtgcaagcctataggctacaacaagcgcttgcggcgagcgtcttagaacaaccaattgcccaat

SEQ ID NO: 70739 - DNA, 266 bp, Zea mays
gcaacatagaaagcacaatagtgtaccaacaatggcagccaaaatattttgcctccttatgctccttggtctttctgcaagtgctgctacggcgaccattttcccgcaatgctcgcaagctcctatagcttcccttcttcccccgtacctctcaccagcggtgtcttcggtatgtgaaaacccaattcttcaattctacaggatccaacaggcaatcgcagctggcatcttacctttatcacccttgttcctccaacaatcatcag

SEQ ID NO: 70740 - DNA, 267 bp, Zea mays
gccacctcctcccgtctcgcacgttccttcccaactccgcagtcgtacctctccgcggcgcgatccagatccaggtttttcagcatgggcctggtgaaggaaggcatcgacatggaggagggaacccttgagatcggcatggagtacaggactgtatctggtgttgctgggcctctggtcatattggataaagtaaagggcccaaagtaccaagaaattgtaaacatccgacttggagatggcaccaatcgccgtggtcaagtcctg

SEQ ID NO: 70741 - DNA, 273 bp, Zea mays
tatctagccgattcggctcgagtagcaacatagaaagcacaataacttaccaacaatggcagtcaaaatattttgcttccatatgctccttggtctttctgcaagttttgctaccgcaaccattttcccacaatgctcacaagctcctatagcttcccttcttcccccatacctctcaccagcggtgtcttcaatgtgtgaaaacccaattgttcaaccctacaggatccaacaggcaatcgcaacaggcatcttaccattatcacccttgtt

SEQ ID NO: 70742 - DNA, 272 bp, Zea mays
attttgagcattcagaaacacaccaagcgaacatcattagcaacaacctaacaacaatggctaccaagatattatccctccttgcgcttcttgcgctttttgcgagcgcaacaaatgcgttcattattccacaatgctcacttgctccaagttccattattacacagttcctcccaccagttacttcaatgggcttcgaacacccagctgtgcaagcctataggctacaacaagcaattgcggcgagcgtcatacaacaaccaatttcccag

SEQ ID NO: 70743 - DNA, 267 bp, Zea mays
attcagaaacacacctagcgaaggcactagcaacgacctaacaacaatggctaccaagatattatccctctttgcgcttcttgtcctttttgtgagcgcaacaaatgcgttcattattccacaatgctcacttgctactagtgccattattccacagttcctccctccagttacttcaatgggcttcgaacacccagctgtgcaagcctacaggctacaacaagcgcttgcggcgagcgtcttacaacaaccaattgcccaatcaca

SEQ ID NO: 70744 - DNA, 136 bp, Zea mays
aggtcagtcagcaacatagatagtagaatgcattagccatcatagataagccatggcgaccttgatcatctccctgctcatgttacttgcgctagctacatgtgtggctaaggcgacaattttccctgaatgctca

SEQ ID NO: 70745 - DNA, 266 bp, Zea mays
attgagaccaacaagcaacatagaaagtggactccagtagcaacaacagagcaatgatggcgaccaagatattttccctccttatgctccttgctctttttgcatgtgttgctaacgcgacaattttccctcaatgctcacaagctcctatagcttcccttcttcccccataccttccatcaatgatagcttcagtatgtgaaaacccagctcttcagccctataggctctaacaagcaatcgcagcaagcaacatacctttatca

SEQ ID NO: 70746 - DNA, 265 bp, Zea mays
cggctcgaggcaacatagaaagcacaatagtgtatcaacaatggcagccaaaatattttgcttgcttatgctccttggtctttctgcaagttttgctaccgcaaccattttcccacaatgctcacaagctcctatagcttcccttcttcccccatacctctcaccagcggtgtcttcaatgtgtgaaaacccaattgttcaaccctacaggatccaacaggcaatcgcaacaggcatcttaccattatcacccttgttcctccaa

SEQ ID NO: 70747 - DNA, 265 bp, Zea mays
attgagaccaacaagcaacatagaaagtggaatccagtagcaacaacagagcaacaatggcgaccaagatattttccctccttatgctccttgctctttctgcatgtgttgctaacgcgacaattttccctcaatgctcacaagctcctatagcttcccttcttcccccataccttccatcaatgatagcttcagtatgtgaaaacccagctcttcagccctataggctccaacaagcaatcgcagcaagcaacatacctttatc

SEQ ID NO: 70748 - DNA, 232 bp, Zea mays
gtaaaatacatagtgaagtacactagcaacatcttagcaccattgggagccaagattttttccctccttgacctccttgctctttcaggaagcgctgctacctctactattatcccacaatgctcactacaatacctctctccggtgacagttgcgggatttcaacacccagctatacaatcctacatgctacatgaggccatcgtagcaagcatcatacggtcattagcat

SEQ ID NO: 70749 - DNA, 273 bp, Zea mays
atctacagaatacatagacagaacaatagtatgccaatagcagcgacctaacaccaatggctaccaagatattagccctccttgcgcttcttgcccttttagtgagcgcaacacatgcgttcattattccacagtgctcacttgctcctagtgacagtataccacagttcctcccaccagttacttcaatgggcttcgaacatccagccgtgcaagcctacacgctacaactagcgcttgcggcgagcgccttacaacaaccaattgcccaat

SEQ ID NO: 70750 - DNA, 263 bp, Zea mays
ttgcagcaacaattaccattcagccagctagttgctgcctacccccagcaatttcttccattcaactaactagcagcattgtactctgctgcttatttacagcagcaacaactactaccattcagccagctagctgatgtggagccctgctgccttcttgacaccacaacagttgttgcatatctacctgcacgctatgcctaccgctggcaccctcttacaactgccacaattgctgtcgtacaaccaacttgctttgacaa

SEQ ID NO: 70751 - DNA, 266 bp, Zea mays
ccaactagcaacatagaaagcacaatagtgtaccaacaatggcagccaaaatattttgcttccttatgctccttggtctttctgcaagtgctgctaccgcaaccattttcccacaatgctcacaagctcctatagcttcctttcttcccccatacctctcaccagcggtgtcttcagtatgtgaaaacccaattcttcaaccctacaggatccaacaggcaatcgcagcaggcatcttacctttatcacccttgttcctccaacaa

SEQ ID NO: 70752 - DNA, 262 bp, Zea mays
atcagtaccatcaatcatcattcatcttagtagtataggcaccaaatcaaatctgcaacatcaattatctaactccaaaaaccatgatgctggtgcttgtggttcttgctttcattgctttagtatcaagtgtttcttgtacacagacaggcggctgcagctgtggtcaacaacaaagccatgagcagcaacatcatccacaacaacatcatccacaagaacaacaacatcaaccaccaccacaacatcaccagcagcagca

SEQ ID NO: 70753 - DNA, 265 bp, Zea mays
atttgagcattcagaaacacacctagcgaactagcaacgacctaacaacaatggcttccaagacattatccctccttgcgcttcttgccctttttgtgagtgcaacaaatgcgttcattattccacaatgctcacttgctccgagtgccattattccacagttcctccctccagttacttcaatgggcttcgaacacccagctgtgcaagcctataggctacaacaagcgcttgcggcgagcgtcttagaacaaccaattgccca

SEQ ID NO: 70754 - DNA, 263 bp, Zea mays
cagcattcaaaaacacaccaagcgaagcgcactagcaacgacctaacaccaatggctaccaagatattagccctccttgcgcttcttgcccttttagtgagcgcaacaaatgcgttcattattccacagtgctcacttggccctagtgccagtattccacagttcctcccaccacttacttcaatgggcttcgcacatccagccgtgcaagcctacaggctacaactagcgcttgcgtgcgagcgccttacaacaaccaattg

SEQ ID NO: 70755 - DNA, 263 bp, Zea mays
  unsure (1)..(263): unsure at all n locations
caagcctgaccttatcattggcaactacagcgatggcaacctagtcgccactctgctcgcacacaagttgggagtcactcagtgtaccatcgctcatgccttggagaaaaccaaataccccaactcggacatctacttggacaagttcgacagccagtaccacttctcttgccagttcacagtctgaccttattgccatgaaccacactgatttcatcatcaccagcacattccnnnnatccccgggaagcaaggacaccgtg

SEQ ID NO: 70756 - DNA, 264 bp, Zea mays
gagaccaacaagcaacatagaaagtggaatccagtagtcacaatagagcaacaatggcgaccaagatactttccctccttatgctccttgctctttctgcatgtgttgctaacgcgacaattttccctcaatgctcacaagctcctatagcttcccttcttcccccataccttccatcaatgatagcttcagtatgtgaaaacccagctcttcaaccctataggctccaacaagcaatcgcagcaagcaacatacctttatcac

SEQ ID NO: 70757 - DNA, 262 bp, Zea mays
cttcaagcagctaacataattaactcatgggtgcatagagatatgccgccgacgacccatcatatctatggttacttattattgggcatggagcacgtcatctcaatggaggagatcctcgggcccttctgggagctgctaccaccgccagcgccagagccagagccagagcgagagcagcctccggtaaccggcatcgtcgtcggcagtgtcatagacgttgctgctgctggtcacggtcatggtggcggcgacatgatgg

SEQ ID NO: 70758 - DNA, 260 bp, Zea mays
attcagaaacacacctagcgaagcgcactagcaacgacctaacaacaatggcttccaagacattatccctccttgcgcttcttgccctttttgtgagtgcaacaaatgcgttcattattccacaatgctcacttgctccgagtgccattattccacagttcctccctccagttacttcaatgggcttcgaacacccagctgtgcaagcctataggctacaacaagcgcttgcggcgagcgtcttagaacaaccaattgcc

SEQ ID NO: 70759 - DNA, 254 bp, Zea mays
ctgggtcttcagaccattagctttatctactccagagcgcagaagaacccgatcgacaccatgagggtgttgctcgttgccctcgctctcctggctctcgctgcgagcgccacctccacgcatacaatcggctcgctgcggctgccagccaccgccgccggttcatctactgccgacggtgcatctgccacctccggttcacctatcacctcaggtgcatctcccaccgcaggactacctgctgccgccggacc

SEQ ID NO: 70760 - DNA, 165 bp, Zea mays
caccactgggtcttcagaccattagctttatctactccagagcgcagaagaacccgatcgacaccatgagggtgttgctcgttgccctcgctctcctggctctcgctgcgagcgccacctccacgcatacaagcggccgctgcggctgccagcctccgccgccgg

SEQ ID NO: 70761 - DNA, 261 bp, Zea mays
acttgttgtttcaacaatcgccagccctatctttggtgcagtcattggtacaaaccatcagggcacaacagctgcagcaactcgtgctacctctgatcaaccaagtagctctggcaaacctttctccctactctcagcaacaacaatttcttccattcaaccaactgtctacactgaaccctgctgcttatttgcagcaacaactattaccatttagccagctagctactgcctactctcagcaacaacaacttcttccat

SEQ ID NO: 70762 - DNA, 266 bp, Zea mays
aagcaagcaacatagaaagtagaatccattagcaacaatagagcaacaatggcgaccaagatattttccctcattatgctccttgctctttctacatgtgttgctaacgcgacaattttccctcaatgctcacaagctcctatagcttcccttcttcccccataccttccatcaattatagcttcagtatgtgaaaacccagctcttcaaccatataggcttcaacaagcaatcgcagcaagcaacatacctttatcgcccttgtt

SEQ ID NO: 70763 - DNA, 263 bp, Zea mays
atagcaacatagaaagcacaatattgtaccaataatggcagccaaaatattttgcctcattatgctccttggtctttctgcaagtgctgctacggcgagcattttcccgcaatgctcacaagctcctatagcttcccttcttcccccatacctctcaccagcgatgtcttcagtatgtgaaaatccaattcttctaccctattccatccaacaggcaatcgcagcaggcatcttacctttatcacccttgttcctccaacaat

SEQ ID NO: 70764 - DNA, 260 bp, Zea mays
ctcgagccgcaccaagcgaactacctagcaacgacttaacaacaatggctaccaagatattagccctccttgcgcttcttgccctttttgtgagcgcaacaaatgcgttcattattccacaatgctcacttgctcctagtgccattataccacagttcctccgaccagttacttcaatgggcttcgaacacctagctgtgcaagcctacaggctacaacaagcgcttgcggcgagcgtcttacaacaaccaattaaccaa

SEQ ID NO: 70765 - DNA, 262 bp, Zea mays
  unsure (1)..(262): unsure at all n locations
tctcgagccgctcgagccgctcgagccgctcgagccgattcggctcacgnatattttgagcatatcagaaacacaccaagcgaagacattagcaccatcctaacaacaatggctaccaagatattatccctcctagcgcttcttgcgctttttgcgagcgcaacaaatgcgttcattattccacaatgctcacttgctccaagttccattattacacagttcctcccaccagttacttcaatgggcttcgaacacccagctg

SEQ ID NO: 70766 - DNA, 171 bp, Zea mays
caacaagcaacatagaaagtggaatccagtagcaacaatagagcaacaatggcgaccaagatactttccctccttatgctccttgctctttctgcatgtgttgctaacgcgacaattttccctcaatgctcacaagctcctatagcttcccttcttcccccataccttcca

SEQ ID NO: 70767 - DNA, 259 bp, Zea mays
attttcagcattcaaaaacacaccaagcgaagcgcactagcaacgacctaacaccaatggctaccaagatattagccctccttgcgcttcttgcccttttagtgagcgcaacaaatgcgttcattattccacagtgctcacttgctcctagtgccattattccacagttcctcccaccagttacttcaatgggcttcgaacatccagccgtgcaagcctacaggctacaactagcgcttgcggcgagcgccttacaaca

SEQ ID NO: 70768 - DNA, 256 bp, Zea mays
tatcgagccgaatcggctcgagttgagaccagcaagcaacatagaacttagaatccattagcaacaatagagcaacaatggcgaccaagatattttccctccttatgctccttgctctttctacatgtgttgctaacgcgacaattttccctcaatgctccaagctcctatagcttcccttcttcccccataccttccatcaattatagcttcagtatgtgaaaacccagctcttcaaccatataggcttcaacaa

SEQ ID NO: 70769 - DNA, 261 bp, Zea mays
ggagctgggtttacctataaggcctgatgttcctctgattggctttattggaagattggattatcagaaaggcattgatctcattcaacttatcataccagatctcatacgggaagatgttcaatttgtcatgcttggatctggtgacccagagcttgaagattggatgagatctacagagtcgatcttcaaggataaatttcgtggatgggttggatcgagtgttccagtttcccaccgaataactgccggctgcgatat

SEQ ID NO: 70770 - DNA, 217 bp, Zea mays
agtcacgatgctagtagcactataagtgaggtatccacatcgaattacaatccttcgtggataccacgagagtcggcagatcacacatgtgtatggattctacgacgaatgcctacgacagtgagtttgtttaggtgcttaaagttcaagttacatttctaagcgtacttggttcctacatagcacatactgtcatcattactgtgtgagaagacta

SEQ ID NO: 70771 - DNA, 259 bp, Zea mays
gcagattgacaatctgaaaacaaatcacaggggtacctttgtccttcaagataaccgttttcagtggcttactcgtgtttctctagatccacgtacagagaacacagattcaactgaaaatgattctgcagcattgggtgatactgcagcccaaacgactaccatgcttctgtatttcccatgcgggttgataagaggtgccttgaccaacttaggaatttcgtgttctgtctctgctgactcgtcaaaccttccagca

SEQ ID NO: 70772 - DNA, 258 bp, Zea mays
acaacaagcaacatagaaagtggaatccagtagcaacaacagagcaacaatggcgaccaagatattttccctccttatgctccttgctctttctgcatgtgttgctaacgcgacaattttccctcaatgctcacaagctcctatagcttcccttcttcccccataccttccatcaatgatagcttcagtatgtgaaaacccagctcttcagccctataggctacaacaagcaatcgcagcaagcaacatacctttatc

SEQ ID NO: 70773 - DNA, 255 bp, Zea mays
attgagaccaactagcaacatagaaagcacaatagtgtaccaacaatggcagctaaaatattttgcctccttatgctccttggtctttctgcaagtgctgctacggcgaccattttcccacaatgctcacaagctcctatagcttccttcttcccccgtacctctcaccaacggtgtcttcggtatgtgaaaacccaattcttcaaccctacaggatccaacaggcaatcgcagctggcatcttacctttatcac

SEQ ID NO: 70774 - DNA, 250 bp, Zea mays
gccacctcctcccgtctcgcacgttccttcccaactccgcagcgtagctctccgcggcgcgatccagatccaggtttttcagcatgggcctggtgaaggaaggcatcgacatggaggagggaacccttgagatcggcatggagtacaggactgtatctggtgttgctgggcctctggtcatattggataaagtaaagggcccaaagtaccaagaaattgtaaacatccgacttggagatggcaccaatcg

SEQ ID NO: 70775 - DNA, 250 bp, Zea mays
atctcagcaacaacaatttcttccattcaaccaactgtctacactgcaccctgctgcttatttgcagcaacaactattaccatttagccagctagctactgcctactctcagcaacaacaacttcttccatttaaccaattggccgcactgaaccccgctgcttatttgcagcagcaaatactactgccatttagcgagctagctgcagcaagtcgtgcttccttcttgacacagcaacagttgctgcct

SEQ ID NO: 70776 - DNA, 287 bp, Zea mays
gttggcagcaccccgatcctgggccagtgcgtcgagtttctgaggcatcagtgcagcccgacggcgacgccctactgctcgcctcagtgccagtcgttgcggcagcagtgttgccagcagctcaggcaggtggagccgcagcaccggtaccaggcgatcttcggcttggtcctccagtccatcctgcagcagcagccgcaaagcggccaggtcgcggggctgttggcggcgcagatagcgcacaactgacggcgaaccgcggcctgcagcagccgactccatgcccc

SEQ ID NO: 70777 - DNA, 287 bp, Zea mays
tatagacagcacaatagtgtaccaacaatggcagccaaaatattttgcctccttatgctccttggtctttctgcaagtgctgctacggcgaccattttcccgcaatgctcgctagctcctatagcttcccttcttcccccgtacctctcactagcggtgtcttcggtatgtgataacccaattcgtctaccctacaggatcctacaggcattcgcagctggcatcttacctttatcacccgtgttcctccaacaatcatcagccctattacaacagttacctttggt

SEQ ID NO: 70778 - DNA, 281 bp, Zea mays
  unsure (1)..(281): unsure at all n locations
gaccaaccagggcgttcaagtctttccagagataatggttcctcttgttggaacaccgcaggaattgggacatcaggtggccctatccgtcaagtcgctaacaaagttttcaccagtatgggtaaaactattgggtacaagatcgggacgatgattgagattcccagggcagctctagtggctgacgagatcgcggacaggctgaattcttctcctttggaacgaacgacctcacgcagatgacctttggctacagcagggatgatgtggggaattcntcc

SEQ ID NO: 70779 - DNA, 283 bp, Zea mays
tctcgagccgctcgagccgcttacctttatcacccttgttcctccaacaatcatcagccctattacatcaagtacctttggtgcatttattggcacaaaacatcagggcacaacaactacaacaacttgtgctagcaaaccttgctgcctactctcagcaacagcagtttcttccattcaaccaactagccgcattgaactctgcttcttatttgcaacaacaacaactaccattcagccagctacctgctgcctacccccagcaatttcttccattcaacca

SEQ ID NO: 70780 - DNA, 278 bp, Zea mays
tgagcattcagaaacacaccaagcgaagcgcactagcaacgacctaacaacaatggctaccaagatattagccctccttgcgcttcttgccctttttgtgagcgcaacaaatgcgttcattattccacaatgctcacttgctcctagtgccattattccacagttcctcccaccagttacttcaatgggcttcgaacacctagctgtgcaagccaacatgcaacaacaagcgcttgcggcgagcgtcttacaacaaccaattgcccaattgcaacaac

SEQ ID NO: 70781 - DNA, 278 bp, Zea mays
gcagaaacatgtcgaggacgatgctgatatcactatatcatgtgctcctgttgatgagagccgagcttctaaaaatgggctagtgaagattgatcatactggacgtgtacttcaattctttgaaaaaccaaagggtgctgatttgaattctatgagagttgagaccaacttcctgagctatgctatagatgatgcacagaaatatccataccttgcatcaatgggcatttatgtcttcaagaaagatgcacttttagaccttctcaagtcaaaatata

SEQ ID NO: 70782 - DNA, 280 bp, Zea mays
cgccacaccgccgcatcaccgaaggttcgcaaagatggcggtgccgctgctgacgcagaagatcgtgaagaagagggtcaagcagttcaagaggccccatcttgatcgctacaagtgccttaagccaagctggcgcaggcccaagggtatcgactcccgcgtcaggcgtaagttcaagggatgcaccttgatgcccaacattggatatggctccgacaagaagaccaggcactaccttcccaacaagttcaaaaagtttgttgttcacaatgtctccgag

SEQ ID NO: 70783 - DNA, 275 bp, Zea mays
ggcggccaccgctggtgcctcccacccgccttactttgagatgatcaaggaggctatcacggcgctaaaggagaggaccggctccagctcgcaagcgatcgccaagtatgtgggggacaagcacggcgcgtctctgccggccaacttcaagaagatgctttccatccagctccgtgggtccgcagccaagggcaagctcgtgaaggtcaaggcctcgtacaagctatcggacgccgccaagaaggcatcgcccaagaccaaggccaagccggcaa

SEQ ID NO: 70784 - DNA, 279 bp, Zea mays
accaatatacatagtgaagtacactagcaacatcttagcaccaatggcagccaagatttttgcgctccttgccctccttgctctttcagcaagtgttgctaccgcgactattattccacaatgctcacaacaatacctctctccagtgatagccgcgagatttgaatacccatctatacaatcctacaggctacaagaggccatcacagcaagcatcttacggtcgttagcattgaccgtccaacaaccatatgccctattgcaacaaccatccttagt

SEQ ID NO: 70785 - DNA, 278 bp, Zea mays
ctcgagccgttcagaaacactccaagcgaagcgcactagcaacaacctaacaacaatggctaccaagatattatccctccttgcgcttcttgcgctttttgcgagcgcaacaaatgcgtccattattccacaatgctcacttgctcctagttccattattccacagttcctcccaccagttacttcaatcgccttcgaacacccagctgtgcaagcctataggctacaacaagcgattgcggcgagcgtcatacaacaaccaattgcccaattgcaac

SEQ ID NO: 70786 - DNA, 279 bp, Zea mays
gaccaactagcaacatagaaagcacaatagtgtaccaacaatggcagccaaaatattttgcttccttatgctccttggtctttctgcaagtgctgctaccgcaaccattttcccacaatgctcacaagctcctatagcttcctttcttcccccatacctctcaccagcggtgtcttcagtatgtgaaaacccaattcttcaaccctacaggatccaacaggcaatcgcagcaggcatcttacctttatcacccttgttcctccaacaaccgtcagccct

SEQ ID NO: 70787 - DNA, 278 bp, Zea mays
gggagatgctatgcgcccacatctaccacgccgccttcatattgctcaagctcgcgctccgcaactcctgccccatctgccaccatgagatgcccaccgatgctgccctgcgggctgccgccagcgtcggcgttgccgaacgcgccgccggggaggaacaagcgtgggatgcgccccacgcgcgcgactttcacctgcctcccaatttgatccgtgagttcaccaggaccaggcttctatgcttacatattcagtgctgttcgctcgtgctgtatctg

SEQ ID NO: 70788 - DNA, 117 bp, Zea mays
atcaatatacatagtgaagtacactagcagcatcttagcaccaatggcagccaagatttttgcgcaccttgccctccttgctctttcagcaagtgttgctaccgcgactattattcc

SEQ ID NO: 70789 - DNA, 114 bp, Zea mays
  unsure (1)..(114): unsure at all n locations
cacacctagcgaacgnactagcaacgacctaaccccaatggcttccaagacattatccctccttgcgcttcttgccctttttgtgagtgcaacaaatgcgttcattattccaca

SEQ ID NO: 70790 - DNA, 279 bp, Zea mays
cagcaacatagaaagtggaatccagtagcaacaacagagcaacaatggcgaccaagatattttccctccttatgctccttgctctttctgcatgtgttgctaacgcgacaattttccctcaatgctcacaagctcctatagcttcccttcttcccccataccttccatcaatgatagcttcagtatgtgcaaacccagctcttcagccctataggctccaacaagcaatcgcagcaagcaacatacctttatcacccttgttgtttcaacaatcgccag

SEQ ID NO: 70791 - DNA, 276 bp, Zea mays
ctagttgctgcctacccccagcaatttcttccattcaaccaactagcagcattgaactctgctgcttatttacagcagcaacaactactaccattcagccagctagctgatgtgagccctgctgccttcttgacacaacaacagttgttgccgttctacctgcacgctatgcctaacgctggcaccctcttacaactgcaacaattgctgccattcaaccaacttgctttgacaaacccaacagtgttctaccaacaacccatcattggtggtgcc

SEQ ID NO: 70792 - DNA, 159 bp, Zea mays
tgccattcaaccaacttgctttgacaaacccaacaacgttctaccaacaacccatcattggcggtgccctcttttagattgcttatgagttatagttcaataatgaagttttttggatgatgtttgtggcttcccagaaataagaaagtacatttctag

SEQ ID NO: 70793 - DNA, 205 bp, Zea mays
gggtcttcagaccattagctttatctactccagagcgcagaagaacccgatcgacaccatgagggtgttgctcgttgccctcgctctcctggctctcgctgcgagcgtcatctccacacaacatacgagtcccaccctcatggtgtcgatcgggttcttctgcgctctggagtagattaagctaatggtctgaagacccctcccc

SEQ ID NO: 70794 - DNA, 275 bp, Zea mays
attgagaccaactagcaacatagaaagcacaatagtgtaccaacaatggcagccaaaatattttgcctccttatgctccttggtctttctgcaagtgctgctacggcgaccattttcccgcaatgctcgcaagctcctatagcttcccttcttcccccgtacctctcaccagcggtgtcttcggtatgtgaaaacccaattcttcaaccctacaggatccaacaggcaatcgcagctggcatcttacctttatcacccttgttcctccaacaatc

SEQ ID NO: 70795 - DNA, 279 bp, Zea mays
gcaacatagaaagcacaatagtgtaccaacaatggcagccaaaatattttgcctccttatgctccttggtctttctgcaagtgctgctacggcgaccattttcccgcaatgctcgcaagctcctatagcttcccttcttcccccgtacctctcaccagcggtgtcttcggtatgtgaaaacccaattcttcaaccctacaggatccaacaggcaatcgcagctggcatcttacctttatcacccttgttcctccaacaatcatcagccctattacaaca

SEQ ID NO: 70796 - DNA, 108 bp, Zea mays
ggtcttgagagcattagctttatctactccagagcgcagaagaacccgatcgccaccatgagggtgttgctcgttgccctcgctctcctggctctcgctgcgagcggg

SEQ ID NO: 70797 - DNA, 284 bp, Zea mays
aatattttgagcattcagaaacacacctagcgaagcgcactagcaacgacctaacaacaatggcttccaagacattatccctccttgcgcttcttgccctttttgtgagtgcaacaaatgcgttcattattccacaatgctcacttgctccgagtgccattattccacagttcctccctccagttacttcaatgggcttcgaacacccagctgtgcaagcctataggctacaacaagcgcttgcggcgagcgtcttagaacaaccaattgcccaattacaacaa

SEQ ID NO: 70798 - DNA, 280 bp, Zea mays
ttgagaccaacaagcaacatagaaagtggaatccagtagcaacaatagagcaacaatggcgaccaagatattttccctccttatgctccttgctctttctacatgtgttgctaacgcgacaattttccctcaatgctcacaagctcctatagcttcccttcttcccccataccttccatcaattatagcttcaatatgtgaaaacccagctcttcaaccatataggcttcaacaagcaatcgcagcaagcaacatacctttatcgcccttgttgtttcaa

SEQ ID NO: 70799 - DNA, 279 bp, Zea mays
cagctcttcgttcgttcccctctcgccgcccgtctcccccgcggtcgaggagccgccaatagcaaggagagggtttcctcctccctccacggctccaccgagctccccgatccctccgccccaaatcccacacacccggttggccaccgcctcgccatggatttggatctgtggatctccatcgtcaaggagggtcagcacctcgccgagcacgagcttcagtccctctgcgaatatgtgaaggagatcctcatcgaagagtcgaacgtgcaaccagtg

SEQ ID NO: 70800 - DNA, 278 bp, Zea mays
tagcaacatagaaagcacaatagtgtaccaacaatggcagccaaaatattttgcctccttatgctccttggtctttctgcaagtgctgctacggcgaccattttcccgcaatgctcgcaagctcctatagcttcccttcttcccccgtacctctcaccagcggtgtcttcggtatgtgaaaacccaattcttcaaccctacaggatccaacaggcaatcacagctggcatcttacctttatcacccttgttcctccaacaatcatcagccctattaca

SEQ ID NO: 70801 - DNA, 275 bp, Zea mays
attgagaccaacaagcaacatagaaagtggaatccagtagcaacaacagagcaacaatggcgaccaagatattttccctccttatgctccttgctctttctgcatgtgttgctaacgcgacaattttccctcaatgctcacaagctcctatagcttcccttcttcccccataccttccatcaatgatagcttcagtatgtgaaaacccagctcttcagccctataggctccaacaagcaatcgcagcaagcaacatacctttatcacccttgttg

SEQ ID NO: 70802 - DNA, 276 bp, Zea mays
ctagcaacatagaaagcacaatagtgtaccaacaatggcagccaaaatattttgcttccttatgctccttggtctttctgcaagtgttgctaccgcaaccattttcccacaatgctcacaagctcctatagcttcccttcttcccccatacctctcaccagcggtgtcttcaatgtgtgaaaactcaattgttcaaccctacaggatccaacaggcaatcgcaacaggcatcttaccattatcacccttgttcctccaacaaccgtcagccctatt

SEQ ID NO: 70803 - DNA, 275 bp, Zea mays
tagaaactgttgcaactgttgttgttgttggtatgcacctacatacctgcaacaacagttgttgcaacaacagttgctgcaacaaattgtaccagctcttactcagctagttgctgcctacccccagcaatttcttgcattcaaccaactagcagcattgaactctgctgcttatttacagcagtaacaactactaccattcagccagctagctgatgtgagccctgctgccttcttgacacaacaacagttgttgccgttctacctgcacgcta

SEQ ID NO: 70804 - DNA, 275 bp, Zea mays
ctcgagccgttgagaccaactagcaacatagaaagcacaatagtgtaccaacaatggcagccaaaatattttgcttccttatgctccttggtctttctgcaagtgctgctaccgcaaccattttcccacaatgctcacaagctcctatagcttcctttcttcccccatacctctcaccagcggtgtcttcagtatgtgaaaacccaattcttcaaccctacaggatccaacaggcaatcgcagcaggcatcttacctttatcacccttgttcctc

SEQ ID NO: 70805 - DNA, 276 bp, Zea mays
attgagaccaactagcaacatagaaagcacaatagtgtaccaacaatggcagctaaaatattttgcctccttatgctccttggtctttctgcaagtgctgctacggcgaccattttcccacaatgctcacaagctcctatagcttcccttcttcccccgtacctctcaccaacggtgtcttcggtatgtgaaaacccaattcttcaaccctacaggatccaacaggcaatcgcagctggcatcttacctttatcacccttgttcctccaacaatca

SEQ ID NO: 70806 - DNA, 281 bp, Zea mays
agatagcacaatagtgtaccaacaatggcagctaaaatattttgcctccttatgctccttggtctttctgcaagtgctgctacggcgaccattttcccacaatgctcacaagctcctatagcttcccttcttcccccgtacctctcaccaacggtgtcttcggtatgtgaaaacccaattcttcaaccctacaggatccaacaggcaatcgcagctggcatcttacctttatcacccttgttcctccaacaatcatcagccctattacagcagttaccttt

SEQ ID NO: 70807 - DNA, 281 bp, Zea mays
caactagcaacatagaaagcacaatagtgtaccaacaatggcagccaaaatattttgcctccttatgctccttggtatttctgcaagtgctgctacggcgaccattttcccgcaatgctcacaagctcctatagcttcccttcttcccccgtacctctcaccagcggtgtcttcggtatgtgaaaacccaattcttcaaccctacaggatccaacaggcaatcgcagctggcatcttacctttatcacccttgttcctccaacaatcatcagccctattac

SEQ ID NO: 70808 - DNA, 279 bp, Zea mays
cacatatctactatactatactctaggaagcaaggacaccaccgccatggcagccaagatgcttgcattgttcgctctcctagctctttgtgcaagcgccactagtgcgacccatattccagggcacttgccaccagtcatgccattgggtaccatgaacccatgcatgcagtactgcatgatgcaacaggggcttgccagcttgatggcgtgtccgtccctgatgctgcagcaactgttggccttaccgcttcagacgatgccagtgatgatgccaca

SEQ ID NO: 70809 - DNA, 277 bp, Zea mays
gcaacatagaaagcacaatagtgtaccaacaatggcagctaaaatattttgcctccttatgctccttggtctttctgcaagtgctgctacggcgaccattttcccacaatgctcacaagctcctatagcttcccttcttcccccgtacctctcaccaacggtgtcttcggtatgtgaaaacccaattcttcaaccctacaggatccaacaggcaatcgcagctggcatcttacctttatcacccttgttcctccaacaatcatcagccctattacag

SEQ ID NO: 70810 - DNA, 277 bp, Zea mays
ttttcagcattcaaaaacacaccaagcgaagcgcactagcaacgacctaacaccaatggctaccaagatattagccctccttgcgcttcttgcccttttagtgagcgcaacaaatgcgttcattattccacagtgctcacttgcctctagtgccagtattccacagttcctcccaccggttacttcaatgggcttcgaacatccagccgtgcaagcctacaggctacaactagcgcttgcggcgagcgccttacaacaaccaattgcccaattgcaa

SEQ ID NO: 70811 - DNA, 275 bp, Zea mays
gagccacctagccgtggtgaaccctatcgcctacttgcaacaacagctgcttgcatccaacccacttgctttggcaaacgtagctgcataccaacaacaacaacagttgcaacagtttctgccagcgctcagtcaactagccatggtgaaccctatcgcctacctacaacagcaacaacttccttcatctagcccgctcgctatgggcaatgcacctacatacctgcaacaacagttgttgcaacaacagttgctgcaacaaattgtaccagctc

SEQ ID NO: 70812 - DNA, 275 bp, Zea mays
tttgagcattcagaaacacaccaagcgaagcgcactagcaacgacctaacaacaatggctaccaagatattagccctccttgcgcttcttgccctttttgtgagcgcaacaaatgcgttcattattccacaatgctcacttgctcctagtgccattattccacagttcctcccaccagttacttcaatgggcttcgaacacctagctgtgcaagccaacatgcaacaacaagcgcttgcggcgagcgtcttacaacaaccaattgcccaattgca

SEQ ID NO: 70813 - DNA, 273 bp, Zea mays
gcagcagctagctgctatagcgccaacacttgagcagttgactaaacagaaaaatgaaagagaaagagagtttgttaatgtacaatcacaaattgatcaaatatgtggtgaaatcgctggcaccatagaggtgggtgagcaaatgacaacaccccaagtcaatgaggatgacttaacacttgagaggcttgaagattttcggtctcagctcaaggatcttgaaaaagagaagagtaataggttggagaaggttcttgattatgtaggcatagt

SEQ ID NO: 70814 - DNA, 274 bp, Zea mays
cctccgccgcctgccgcactctcctgcgacgccacaaccacacgttcacggtagcgagagcttatcgtcgtcggcggtgaagatggtgtcgctgaagctgcagaagcggctcgccgctagcgtcctcaagtgtgggaaaggcaaagtctggcttgaccccaatgaagtcagcgagatctccatggctaactcccgccagaacatccggaagttggttaaggatgggtttatcatcaggaagcctcagaaggttcactctaggtcccgtgcaaga

SEQ ID NO: 70815 - DNA, 273 bp, Zea mays
tattttcagcattcaaaaacacaccaagcgaagcgcactagcaacgacctaacaccaatggctaccaagatattagccctccttgcgcttcttgcccttttagtgagcgcaacaaatgcgttcattattccacagtgctcacttgctcctagtgccagtattccacagttcctcccaccagttactttcatgggcttcgaacatccagccgtgcaagcctacaggctacaactagcgcttgcggcgagcgccttacaacaaccaattgcccaa

SEQ ID NO: 70816 - DNA, 262 bp, Zea mays
gcaacatagaaagcacaatagtgtaccaacaatggcagccaaaatattttgcttccttatgctccttggtctttctgcaagttttgctaccgcaaccattttcccacaatgctcacaagctcctatagcttcccttcttcccccatacctctcaccagcggtgtcttcaatgtgtgaaaccccaattgttcaaccctacaggatccaacaggcaatcgcaacaggcatcttaccattatcacccttgttcctccaacaaccg

SEQ ID NO: 70817 - DNA, 274 bp, Zea mays
caccaagcgaacacattagcaacaacctaacaacaatggctaccaagatattatccctccttgcgcttcttgcgctttttgcgagcgcaacaaatgcgttcattattccacaatgctcacttgccacaagttccattattacacagttcctcccaccagttacttcaatgggcttcgaacacccagctgtgcaagcctataggctacaacaagcattgtcggcgagcgtcttacaacaaccaatttcccagttgcaacaacaatccttggcaca

SEQ ID NO: 70818 - DNA, 279 bp, Zea mays
tttgagcattcagaaacacacctagcgaagcgcactagcaacgacctaacaacaatggcttccaagacattatccctccttgcgcttcttgccctttttgtgagtgcaacaaatgcgttcattattccacaatgctcacttgctccgagtgccattattccacagttcctccctccagttacttcaatgggcttcgaacacccagctgtgcaagcctataggctacaacaagcgcttgcggcgagcgtcttagaacaaccaattgcccaattacaacaa

SEQ ID NO: 70819 - DNA, 274 bp, Zea mays
cctgttgcatactctcagcaacatcagtttcttccattcaaccaactggctgcattgaactctgctgcttatttgcaacaacaattaccattcagccagctagttgctgcctacccccagcaatttcttccattcaaccaactagcagcattgaactctgctgcttatttacagcagcaacaactactaccattcagccagctagctgatgtgagccctgctgccttcttgacacaacaacagttgttgccgttctacctgcacgctatgccta

SEQ ID NO: 70820 - DNA, 270 bp, Zea mays
attgagcccaactagcaacatagaaagcacaatagtgtaccaacaatggcagctaaaatattttacctccttatgctccttggtctttctgcaaatgctgctacggcgaccattttcccacaatgctcacaagctcctatagcttcccttcttcccccgtacctctcaccaacggcgtcttcggtatgtgaaaacccaattcttcaaccctacaggatccaataggcactcgcagctggcatcttacacttttcacccttgttcctccaa

SEQ ID NO: 70821 - DNA, 274 bp, Zea mays
ccccgtcatcgatctcgtttcaaatccatccatcctcgtttcctccgtcccgcagcatctcaaccccatggccaagatcaagatcgggatcaatgggttcggcaggatcggaaggctggtggccagggtggccctgcagagtgacgatgtcgagctcgtcgccgtgaacgaccccttcatcagcaccgactacatgacctacatgttcaagtacgacactgtgcacggacagtggaagcaccatgaagtcaaggtgaaggactccaaaaccctt

SEQ ID NO: 70822 - DNA, 273 bp, Zea mays
gcagtttgctgcagctagctactgcctactctcagcaacaacaacttcttccatttaaccaattggccgcactgaaccccgctgcttatttgcagcagcaaatactactaccatttagccagctagctgcagcaaaccgtgcttccttcttgacacagcaacagttgctgcctttctaccagcagtttgcggctaaccccgcaatcttcttacaactacaacaattgttgccctttgtccaacttgctttgacagaccgagcggcctcctacc

SEQ ID NO: 70823 - DNA, 273 bp, Zea mays
ctacaagcaacatagaaagtggaatacagtagcaaaaatagagcaacaatggcggccaagatattttccatccttatgctccttgctctttctgcatgtgttgctaacgcgaccatttttcctcaatactcacaagctcctatagctgcccttcttcccccataccttccatcaatgaccgctttagtatgtgaaaacccagcccttcaaccctacaggatccagcaagcaatcgcaacaagcaacttacctttatcacacctgttctttcaa

SEQ ID NO: 70824 - DNA, 271 bp, Zea mays
cgacgatgaattcaacagcaaggtttctgattttgggttggctaaacttctgaattctgacaaaagtcatatcaatacaagagtgatgggaacatatgggtatgtagcacctgagtacgcaaacagtgggatgctaaatgaaaaaagtgacatctacagttttggagtggtgttgttagaatgtgtgacagctagggatccagttgattacagtaagcctgcagatgaggtgaatctcatagagtggcttaagatgatggttaccagtaag

SEQ ID NO: 70825 - DNA, 270 bp, Zea mays
ttgagaccaactagcaacatagaaagcacaatagtgtaccaacaatggcagccaaaatattttgcctccttatgctccttggtctttctgcaagtgctgctacggcgaccattttcccacaatgctcacaagctcctatagcttcccttcttcccccgtacctctcaccagcggtgtcttcggtatgtgaaaacccaattcttcaaccctataggatccaacaggcaatcgcagctggcatcttacctttatcaccctttctcctccaaa

SEQ ID NO: 70826 - DNA, 270 bp, Zea mays
ctcgagccgcagaaacacacctagcgaacgcactagcaacgacctaacaacaatggctaccaagatattatccctctttgcgcttcttgccctttttgtgagcgcaacaaatgcgttcattattccacaatgctcacttgctcctagtgccattattccacagttcctccctccagttacttcaatgggcttcgaacacccagctgtgcaagcctacaggctacaacaagcgcttgcggcgagcgtcttacaacaaccaattgcccaatt

SEQ ID NO: 70827 - DNA, 269 bp, Zea mays
  unsure (1)..(269): unsure at all n locations
cagaccattagctttatctactccagagcgcagaagaacccgatcgacaccatgagggtgttgctcgttgccctcgctctcctggctctcgctgcgagcgccacctccacgcatacaagcggcggctgcggctgccagccaccgccgccggttcatctaccgccgccggtgcatctgccantctcgttcacctgccacctccggtgcatctcccaccgccggtccacctgccgccgccggtccacctgccaccgccggtccatgtgccg

SEQ ID NO: 70828 - DNA, 278 bp, Zea mays
gtggaatccagtagcaacaacagagcaacaatggcgaccaagatattttccctccttatgctccttgctctttctgcatgtgttgctaacgcgacaattttccctcaatgctcacaagctcctatagcttcccttcttcccccataccttccatcaatgatagcttcagtatgtgaaaacccagctcttcagccctataggctccaacaagcaatcgcagcaagcaacatacctttatcacccttgttgtttcaacaatcgccagccctatctttggt

SEQ ID NO: 70829 - DNA, 261 bp, Zea mays
aacacaccaagcgaagtacctagcaacgacttaacaacaatggctaccaagatattagccctccttgcgcttcttgccctttttgtgagcgcaacaaatgcgttcattattccacaatgctcacttgctcctagtgccattataccacagttcctccgaccagttacttcaatgggcttcgaacacctagctgtgcaagcctacaagctacaacaagcgcttgcggcgagcgtcttacaacaacaattaaccaattgcaac

SEQ ID NO: 70830 - DNA, 278 bp, Zea mays
agcaacatagaaagtggaatccagtagcaacaacagagcaacaatggcgaccaagatattttccctccttatgctccttgctctttctgcatgtgttgctaacgcgacaattttccctcaatgctcacaagctcctatagcttcccttcttcccccataccttccatcaatgatagcttcagtatgtgaaaacccagctcttcagccctataggctccaacaagcaatcgcagcaagcaacatacctttatcacccttgttgtttcaacaatcgccag

SEQ ID NO: 70831 - DNA, 275 bp, Zea mays
gaccaactagcaacatagaaagcacaatagtgtaccaacaatggcagccaaaatattttgcttccttatgctccttggtctttctgcaagtgctgctaccgcaaccattttcccacaatgctcacaagctcctatagcttcctttcttcccccatacctctcaccagcggtgtcttcagtatgtgaaaacccaattcttcaaccctacaggatccaacaggcaatcgcagcaggcatcttacctttatcacccttgttcctccaacaaccgtcag

SEQ ID NO: 70832 - DNA, 272 bp, Zea mays
gtatgggggaagaagggaagctataggagcttgtgagcaatcgcagcaagcaacatacctttatcacccttgtttcaacaatcgccagccctatctttggtgcagtcattggtacaaaccatcaaggcacagcagctgcagcaactcgtgctacctgtgatcaaccaagtagctctggcaaacctttctccctactatcagcaacaacaatttcttccattcaaccaactatctacactgaaccctgctgcttatttgcagcaacaactatt

SEQ ID NO: 70833 - DNA, 271 bp, Zea mays
tattattgagaccaactagcaacatagaaagcacaatagtgtaccaacaatggcagccaaaatattttgcttccttatgctccttggtctttctgcaagtgctgctaccgcaaccattttcccacaatgctcacaagctcctatagcttcctttcttcccccatacctctcaccagcggtgtcttcagtatgtgaaaacccaattcttcaaccctacaggatccaacaggcaatcgcagcaggcatcttacctttatcacccttgttcctc

SEQ ID NO: 70834 - DNA, 271 bp, Zea mays
tagcaacatagaaagcacaatagtgtaccaacaatggcagccaaaatattttgcctccttatgctccttggtatttctgcaagtgctgctacggcgaccattttcccgcaatgctcacaagctcctatagcttcccttcttcccccgtacctctcaccagcggtgtcttcggtatgtgaaaacccaattcttcaaccctacaggatccaacaggcaatcgcagctggcatcttacctttatcacccttgttcctccaacaatcatcagccc

SEQ ID NO: 70835 - DNA, 270 bp, Zea mays
ttttgagcattcaaaaacacacaaagggaagtgcactagcaacttcctaacaacaatggctaccaagatattagccctccttgcgctcctttccctttcagtgagcgcaacaactgcattcattattccacaatgctcacttgctcctaatgccattattccacagttcctcccatcagttacatcaatgggcatcgaacaccctattgtgcaagcctataggctacaacaagcgcttgcggcgagcgtcttacaacaaccgtttgccca

SEQ ID NO: 70836 - DNA, 270 bp, Zea mays
attgagaccaactagcaacatagaaagcacaatattgtaccaataatggcagccaaaatattttgcctcattatgctccttggtctttctgcaagtgctgctacggcgagcattttcccgcaatgctcacaagctcctatagcttcccttcttcccccatacctctcaccagcgatgtcttcagtatgtgaaaatccaattcttctaccctacaggatccaacaggcaatcgcagcaggcatcttacctttatcacccttgttcctccaa

SEQ ID NO: 70837 - DNA, 271 bp, Zea mays
gacacgaaaccgagcaacaattgagcgatcgatccttcgcctctctctcactctctctcagcaatctatccgcaacaactaagcattcgattctccgacaacaacaagcagggcaatggcgtctgcggacgtgcacatggctggcggtgcggagacggagaccttcgcattccaggccgagatcaaccagctgctctccctcatcatcaataccttctactcgaacaaggagatcttcctcagagagctcatctccaacgcatcggatgcg

SEQ ID NO: 70838 - DNA, 273 bp, Zea mays
aacaagcaacatagaaagtggaatacagtagcaacaatagagcaacaatggcggccaagatattttccatccttatgctccttgctctttctgcatgtgttgctaacgcgaccatttttcctcaatactcacaagctcctatagctgcccttcttcccccataccttccatcaatgaccgcttcagtttgtgaaaacccagcccttcaaccctacaggctccaacaagcaatcgcaacaagcaacttacctttatcacccctgttctttcaac

SEQ ID NO: 70839 - DNA, 269 bp, Zea mays
ctcgagccgtgagcattcagaaacacaccaagcgaagcacattagcaacaacctaacaacaatggctaccaagatattatccctccttgcgcttcttgcgctttttgcgagcgcaacaaatgcgttcattattccacaatgctcacttgctccaagttccattattacacagttcctcccaccagttacttcaatgggcttcgaacacccagctgtgcaagcctataggctacaacaagcaattgcggcgagcgtcttacaacaaccaa

SEQ ID NO: 70840 - DNA, 268 bp, Zea mays
tagcaacatagaaagcacaatagtgtaccaacaatggcagccaaaatattttgcttccttatgctccttggtctttctgcaagtgctgctaccgcaaccattttcccacaatgctcacaagctcctatagcttcctttcttcccccatacctctcaccagcggtgtcttcagtatgtgaaaacccaattcttcaaccctacaggatccaacaggcaatcgcagcaggcatcttacctttatcacccttgttcctccaacaaccgtcag

SEQ ID NO: 70841 - DNA, 268 bp, Zea mays
ttcagaaacacacctagcgaacgcactagcaacgacctaacaacaatggcttccaagacattcatccctccttgcgcttcttgccctttttgtgagtgcaacaaatgcgttcattattccacaatgctcacttgctccgagtgccattattccacagtacctccctccagttacttcaatgggcttcgaacacccagctgtgcaagcctataggctacaacaagcgcttgcggcgagcgtcttagaacaaccaattgcccaattacaa

SEQ ID NO: 70842 - DNA, 268 bp, Zea mays
ttcagaaacacaccaagcgaacgcactagcaacaacctaacaacaatggctaccaagatattatccctccttgcgcttcttgcgctttttgcgagcgcaacaaatgcgtccattattccacaatgctcacttgctcctagttccattattccacagttcctcccaccagttacttcaatggccttcgaacacccagctgtgcaagcctataggctacaacaagcgattgcggcgagcgtcttacaacaaccaattgcccaattgcaac

SEQ ID NO: 70843 - DNA, 270 bp, Zea mays
tagcaacatagaaagcacaatagtgtaccaacaatggcagccaaaatattttgcttccttatgctccttggtctttctgcaagtgttgctaccgcaaccattttcccacaatgctcacaagctcctatagcttcccttcttcccccatacctctcaccagcggtgtcttcaatgtgtgaaaccccaattgttcaaccctacaggatccaacaggcaatcgcaacaggcatcttaccattatcacccttgttcctccaacaaccgtcagcc

SEQ ID NO: 70844 - DNA, 269 bp, Zea mays
tgaccaactagcaacatagaaagcacaatagtgtaccaacaatggcagccaaaatattttgcctccttatgctccttggtctttctgcaagtgctgctacggcgaccattttcccgcaatgctcgcaagctcctatagcttcccttcttcccccgtacctctcaccagcggtgtcttcggtatgtgaaaacccaattgcttcaaccctacaggatccaacaggcaatcacagctggcatcttacctttatcacccttgttcctccaaca

SEQ ID NO: 70845 - DNA, 268 bp, Zea mays
gtctggtgcgccgacgcgcaccgggacagggtgctcccggccctccgccggacgctcagcaatctccagatggaatacgtggacctagtacatggtgcactggcccgtgaccatgaaggccgggaggttcacggcccccttcacgcccgaggactacgagccgttcgacatgcgggccgtgtgggaggccatggaggagtgccaccgcctgggcctggccaaggccatcggcgtgtgcaacttctcctgcaagaagctcgagaccctg

SEQ ID NO: 70846 - DNA, 252 bp, Zea mays
gttgccttcttgacacaacaacagttgttgccgttctacctgcacgctgcgcctaacgctggcaccctcttacaactgcaacaattgctgccattcaaccaacttgctttgacaaacccaacaacgttctaccaacaacccatcattggcggtgccctcttttagattgcttatgagttatagttcaataatgaagttttttggatgatgtttgtggcttcccagaaataagaaagtacatttctagattct

SEQ ID NO: 70847 - DNA, 271 bp, Zea mays
tgcaaaccatggacatggctttggcgtctaaagactccactccgccatggaatgccaccgccgccgagcagccaattccaaagcgtggacaaagccgctgcaaatgattcaacatacctcaatcctcaagctcatgatagtgttcttggaatcattctgggaggtggtgctgggactagattgtaccccttgacaaagaagcgtgccaagcctgcagtgccattgggtgccaactatagactgattgatattcctgtcagcaattgtctca

SEQ ID NO: 70848 - DNA, 265 bp, Zea mays
gcgtacctctcaccaacggtgtcttcggtatgtgaaaacccaattcttcaaccctacaggatccaacaggcaatcgcagctggcatcttacctttatcacccttgttcctccaacaatcatcagccctattacagcagttacctttggtgcatttattggcacaaaacatcagggcacaacaactacaacaacttgtgctagcaaaccttgctgcctactctcagcaacagcagtttcttccattcaaccaactagctgcattga

SEQ ID NO: 70849 - DNA, 265 bp, Zea mays
cagttgcacaccttttgcaaaatggtaatatgtatgggaaagagatatcttcagtaaggccagatgaaatgacagatgaagtctgggatttcgtgttttgtgatggcccggcaccaaaaagcgagatccctgccgctctgttgaacaagatgaaacatgaatttaagtattggtatccatttgatatccgtgtgtctggtaaagaccttattccgtaccatttgacattctgcatatacaatcatacagcacttcttcctgagca

SEQ ID NO: 70850 - DNA, 269 bp, Zea mays
tatatattttgcctccttatgctccttggtctttctgcaagtgctgctacggcgaccattttcccacaatgctcacaagctcctatagcttcccttcttcccccgtacctctcaccagcggtgtcttcggtatgtgaaaacccaattcttcaaccctataggctccaacaggcaatcgcagctggcatcttacctttatcacccttgttcctccagcaatcatcagccctattacagcagttacctttggtgcatttattggcacaaaa

SEQ ID NO: 70851 - DNA, 94 bp, Zea mays
cggtagcgctcagtcaactagccatggtgaaccctgccgcctacctacaacagcaacaactgatttcatctagccctctcgctgtggttaatgc

SEQ ID NO: 70852 - DNA, 266 bp, Zea mays
caactagcaacatagaaagcacaatagtgtacgaacaatggctgccaaaatatattgcttcgttatgctccttggtctttctgcaagtgctgctaccgcaaccattttcccacaatgctcacaagctcctatagcttcctttcttcccccatacctctcaccagcggtgtcttcagtatgtgattctaaattcttcaaccctacaggatccaacaggcaatcgcagcaggcatcttacctttatcacccttgttcctccaacaacg

SEQ ID NO: 70853 - DNA, 265 bp, Zea mays
cggctcgaggtgcgatttcgatctcgcagccacctttttctttgttctgttgtgtatctagtagctggacgagatatgcagtgtgcacttgcattggacacgaactcaggtcctcaccagataagatcttgtgagggtgatgggattgacaggttggaaaaattaagtattgcgggcagaaagcaggagaaagctttgagccataggtgctttggtggtagagttgctgcaactacacaatgtattcttacctcagatgcttgtc

SEQ ID NO: 70854 - DNA, 263 bp, Zea mays
  unsure (1)..(263): unsure at all n locations
attgatctataactcataagagatctaaaagagggcacatcaatgatnggttgttggtagaactctcctgcttatttacagcagcaacaactactaccattcagccagctagctggtgtgagccctgctaccttcttgacacaaccacagttgttgccgttctacgtgcacgttgcgcctaacgctggcaccctcttacaactgcaacaattgctgccattcaaccaacttgctttgacaaacccagcagtgttctaccaaga

SEQ ID NO: 70855 - DNA, 265 bp, Zea mays
caagcccgtgccagctgcagggaacctgcggcgttggcagcaccccgatcctgggccagtgcgtcgagttcctgaggcatcagtgcagcccgacggcgacgccctactgctcgcctcagtgccagtcgttgcggcagcagtgttgccagcagctcaggcaggtggagccgcagcaccggtaccaggcgatcttcggcttggtcctccagtccatcctgcagcagcagccgcaaagcggccaggtcgcggggctgttggcggcgca

SEQ ID NO: 70856 - DNA, 271 bp, Zea mays
gtattattgagaccagcaagcaacatagaaagtagaatccattagcaacaatagagcaacaatggcgaccaagatattttccctccttatgctccttgctctttctacatgtgttgctaacgcgacaattttccctcaatgctcacaagctcctatagcttcccttcttcccccataccttccatcaattatagcttcagtatgtgaaaacccagctcttcaaccagctaggtggtcacaagcaatcgcagcaagcaacatacctttatcg

SEQ ID NO: 70857 - DNA, 266 bp, Zea mays
ctacaggcaatcgcagctggcatcttacctttatcacccttgttcctccaacaatcatcagccctattacagcagttacctttggtgcatttattggcacaaaacatcagggcacaacaactacaacaacttgtgctagcaaaccttgctgcctactctcagcaacagcagtttcttccattcaaccaactagctgcattgaactctgcttcttatttgcaacaacaacaactaccattcagccagctatctgctgcctaccccca

SEQ ID NO: 70858 - DNA, 168 bp, Zea mays
ggcaagtgcgatttcgatctcgcagccaccttctatcagttctgttgtgtatctagtagttgaaatgagatatgcagtttgcacttgcattggagacgaactcaggtcctcaccagataagatcttgtgatggtgatgggattgacaggttcgacaacttaactattg

SEQ ID NO: 70859 - DNA, 262 bp, Zea mays
ataaaacacaccaagcgaacgcactagcaacgacctaacaccaatggctaccaagatattagccctccttgcgcttcttgcccttttagtgaccgcaacaaatgcgttcattattccacagtgctcacttgctcctagtgccagtattccacagttcctcccaccagttacttcaatgggcttcgaacatccagccgtgcaagcctacaggctacaactagcgcttgcggcgagcgccttacaacaaccaattgcccaattg

SEQ ID NO: 70860 - DNA, 262 bp, Zea mays
gtgcgaaccaagcagaccacagcaagaagcgtagtcgtcgccggaaggaaaggcgcggagcaagatgtcgtggcaggcgtacgtcgatgagcacctgatgtgcgagatcgaaggacaacatctcagcgccgccgccatcgtcggtcacgacggcagcgcttgggcgcagtccgagagcttccccgagttaaagcctgaggaggttgctggtatcataaaggactttgatgaacctggtactcttgcaccaactggtcttttc

SEQ ID NO: 70861 - DNA, 265 bp, Zea mays
cgtgactcctagtccctacccagatcggcgcccgacgcaaggccgagcaggcgatggccgcagcggcgtcaatggggcacccttacgcgccagccgagctggaccttcctggtttcgtgccgctgaagctgtcccaggtcgagatcctcgtgtcctacctcggcgcctccgtcttcgttttcctcgccgtctggctcgtctccggaagatgtgtcagattatccaagaccgaccgtctgctcatgtgctggtgggcattcacagg

SEQ ID NO: 70862 - DNA, 270 bp, Zea mays
cagcaagcaacatagatagtagaatccattagcaacaatagagcaacaatggcgacgatcttattttccctccttatgctccttgctctttctacatgtgttgctaacgcgacaattttccctcaatgctcacaagctcctatagcttcccttcttcccccataccttccatcaattatagcgtcagtatgtgaaaacccagctcttcaaccatataggcttcaacaagcaatcgcagcaagcaacatacctttatcgcccttgttgttt

SEQ ID NO: 70863 - DNA, 268 bp, Zea mays
gtaacatagaaagcacaatagtgtaccaacaatggcagccaaaatattttgcttccttatgctccttggtctttctgcaagtgttgctaccgcaaccattttcccacaatgctcacaagctcctatagcttcccttcttcccccatacctctcaccagcggtgtcttcaatgtgtgataacccaattgttcaaccctacaggatccaacaggcaatcgcaacaggcatcttaccattatcacccttgttcctccaacaaccgtcagcc

SEQ ID NO: 70864 - DNA, 265 bp, Zea mays
gtagcaacatagaaagtggaatccagtagcaacaacagagcaacaatggcgaccaagatattttccctccttatgctccttagctctttctgcatgtgttgctaacgcgacaattttccctcaatgctcacaagctcctatagcgtcccttcttcccccataccttccatcaatgatagcttcaggttgtgaaaacccagctcttcagccctataggcttcaacaagcaatcgcagcatgcaacatacctttatcacccttgttg

SEQ ID NO: 70865 - DNA, 267 bp, Zea mays
gcaagtgctgctaccgcaaccattttcccacaatgctcacaagctcctatagcttcctttcttcccccatacctctcaccagcggtgtcttcagtatgtgaaaacccaattcttcaaccctacaggatccaacaggcaatcgcagcaggcatcttacctttatcacccttgttcctccaacaaccgtcagccctattacagcagttacctttggtgcatttgttggcacaaaacatcaaggcacaacaactacaacaacttgtgcta

SEQ ID NO: 70866 - DNA, 266 bp, Zea mays
gtgcgaaccaagcagaccacagcaagaagcgtagtcgtcgccggaaggaaaggcgcggagcaagatgtcgtggcaggcgtacgtcgatgagcacctgatgtgcgagatcgaaggacaacatctcagcgccgccgccatcgtcggtcacgacggcagcgcttgggcgcagtccgagagcttccccgagttaaagcctgaggaggttgctggtatcataaaggactttgatgaacctggtactcttgcaccaactggtcttttcgttg

SEQ ID NO: 70867 - DNA, 169 bp, Zea mays
attgagaccaactagcaacatagaaagcacaatagtgtaccaacaatggcagctaaaatattttgcctccgtatgctccttggtctttctgcaagtgctgctacggcgaccattttcccacaatgctcacaagctcctatagcttcccttcttcccccgtacctctcac

SEQ ID NO: 70868 - DNA, 270 bp, Zea mays; identical to SEQ ID NO: 38438

SEQ ID NO: 70869 - DNA, 263 bp, Zea mays
gcgtacctacaacagcgacaacagttacttaatccattggcagtggctaacccattggtcgctaccttcctgcagcagcaacaacaattgctgccatacaaccagttctctttgatgaaccctgccttgcagcaacccatcgttggaggtgccatcttttagattacatatgagatgtactcgacaatggtgccctcataccgacatgtgtttcctagaaataatcaatatattgattgagatttatctaaaaagcacaaaaa

SEQ ID NO: 70870 - DNA, 264 bp, Zea mays
gtgaccaactagcaacatagatagcacaatagtgtaccaacaatggcagccaaaatattttgcttccttatgctccttggtctttctgcaaactttgctaacgcaaccattttcccacaatgctcacaagctcctatagcttcccttcttcccccatacctctcaccagcggtgtcttcaatgtgtgaaaccccaattgttcaaccctacaggatccatcaggcaatcgctacagacatcttaccattatcacccttgttcctc

SEQ ID NO: 70871 - DNA, 262 bp, Zea mays
ctaaaacacaccaagcgaacgcactagcaacgacctaacaccaatggctaccaagatattagccctccttgcgcttcttgcccttttagtgagcgcaacaaatgcgttcattattccacagtgctcacttgctcctagtgccagtattccacagttcctcccaccagttacttcaatgggcttcgaacatccagccgtgcaagcctacaggctacaactagcgcttgcggcgagcgccttacaacaaccaattgcccaattg

SEQ ID NO: 70872 - DNA, 95 bp, Zea mays
gagagagatggatagaggagtaagacgacacacattatcatgtgtggtatgaccaataatatatgcatggtcataataaagttttggttttaatg

SEQ ID NO: 70873 - DNA, 255 bp, Zea mays
gccgtctacctacaactactttcatctagcccgctcgcggtgggcaatgcacctacgtacctacaacaacagttgctgcaacaaattgtaccagctctgactcagctagctgtggcaaaccctgctgcctacttacaacagttgcttccattcaaccaactggctgtgtcaaactctgctgcgtacctacaacagcgacaacagttacttaatccattggcagtggctaacccattggtcgctaccttcctgcag

SEQ ID NO: 70874 - DNA, 265 bp, Zea mays
attgagaccagcaagcaacatagatagtagaatccattagcaacaatagagcaacaatggcgaccaagatattttccctccttatgctccttgctctttctacatgtgttgctaacgcgacaattttccctcaatgctcacaagctcctatagcttcccttcttcccccataccttccatcaattatagcttcagtatgtgaaaacccagctcttcagccatataggcttcaacaagcaatcgcagcaagcaacatacctttatc

SEQ ID NO: 70875 - DNA, 168 bp, Zea mays
ttgagaccaacaagcaacatagaaagtggaatccagtagcaacaacagagcaacaatggcgaccaagatattttccctccttatgctccttgctctttctgcatgtgttgctaacgcgacaattttccctcaatgctcacaagctcctatagcttcccttcttccccc

SEQ ID NO: 70876 - DNA, 267 bp, Zea mays
gccgtctacctacaactactttcatctagcccgctcgcggtgggcaatgcacctacgtacctacaacaacagttgctgcaacaaattgtaccagctctgactcagctagctgtggcaaaccctgctgcctacttacaacagttgcttccattcaaccaactggctgtgtcaaactctgctgcgtacctacaacagcgacaacagttacttaatccattggcagtggctaacccattggtcgctaccttcctgcagcagcaacaacaa

SEQ ID NO: 70877 - DNA, 266 bp, Zea mays
gttgagaccaacaagcaacatagaaagtggaatccagtagcaacaacagagcaacaatggcgaccaagatattttccctccttatgctccttgctctttctgcatgtgttgctaacgcgacaattttccctcaatgctcacaagctcctatagcttcccttcttcccccataccttccatcaatgatagcttcagtatgtgaaaacccagctcttcagccctataggctccaacaagcaatcgcagcaagcaacatacctttatca

SEQ ID NO: 70878 - DNA, 264 bp, Zea mays
gccaccagttcgaagcggaggcgaccggcaacctgcggcggagatgtcaggcaggggcaagggcggcaagggctcgggagggcggcgcgaactcaccggaaggtgctgcgcgacaacatccaggggatcacgaagccggcgatccggaggctggcgaggaggggtggcgtgaagcgcatctccgggctgatctacgaggagacccgcggcgtgctcaagatctttctcgagaatgtcatccgcgacgctgtgacctacacggag

SEQ ID NO: 70879 - DNA, 263 bp, Zea mays
ggagtcctctgacaccattgacaacgtcaaggccaagatccaggacaaggagggcatccctccagaccagcagcggctcatctttgctgggaagcagcttgaggacgggcgcacgcttgccgactacaacatccagaaggagagcaccctccacttggtgctgcgcctcaggggaggcatgcagatcttcgtgaagaccctgaccggcaagactatcaccctcgaggtggagtcttcagacaccatcgacaacgtcaaggcca

SEQ ID NO: 70880 - DNA, 261 bp, Zea mays
gttcttcttcttcttctttccccgtactaatcgaaggagaagcccaggccggagaaccatcgcctgcatttcgatctgtttcaccgcaattcgcattgttagttgtgtattggagttatgtgttcttggaaaccaagtacacataactccaatacacgactaacaatgcgaattggagttatgtgtacttggtttccaagaactttggttccttgtttttttttctttcttgtttgagcgtttttgggcagcgctggcctg

SEQ ID NO: 70881 - DNA, 264 bp, Zea mays
atcagcaaagcggcagtgcgtagagaggatcgtcgaacagaacagcatgaagatggtcatcgttctcgtcgtgtgcctggctctgtcagctgccagcgcctctgcaatgcagatgccctgcccctgcgcggggctgcagggcttgtacggcgctggcgccggcctgacgacgatgatgggcgccggcgggctgtacccctacgcggagtacctgaggcagccgcagtgcagcccgctggcggcggcgccctactacgccgggtg

SEQ ID NO: 70882 - DNA, 267 bp, Zea mays
gtaacatagaaagtggaatccagtagcaacaatagagcaacaatggcgaccaagatattttccctccttatgctccttgctctttctacatgtgttgctaacgcgacaattttccctcaatgctcacaagctcctatagcttcccttcttcccccataccttccatcaattatagcttcaatatgtgaaaacccagctcttcaaccatataggcttcaacaagcaatcgcagcaagcaacatacctttatcgcccttgttgtttcaa

SEQ ID NO: 70883 - DNA, 264 bp, Zea mays
agtggatggacaacgaagttgttaacctcatgctaaggttgtttacttcttgtaatgctactcttgttaccttaatccatgagaatcctaggtacgagaagatgactctagaggaggtgcttgaaagttccttggccatgagatgatggttaaggactccaagcacattgaggatttggctcaaggaaacgtgaccaccatggagccacaaccgaccgccttgaaggccacaagtaaaaaggaggagccccaagaaacaaggaa

SEQ ID NO: 70884 - DNA, 266 bp, Zea mays
cgacacctgctgaggacccactaaaactagaagaatgccgtcttgctgggaagtatctcttagagttgctaaagatggatttgaagcctaaggacattatcactgagaagtcattgcgaaatgcaatggttattgttatggcacttggtggttcgactaatgctgttctgcatttgattgccatctgctcggtccgtaggtttgcatttgactcttgatgatttccagaaggtcagtgaccaagttcctttccttgcagacctcaa

SEQ ID NO: 70885 - DNA, 265 bp, Zea mays
gttctagatcgcgagcgtcttacaacaaccaattgcccaattgcaacaacaatccttggcacatctaacaatagaaaccatcgcaacgcaacagcaacaacagttcctaccagcactgagccacctagccatggtgaaccctgtcgcctacttgcaacagcagctgcttgcatccaacccacttgctctagcaaacgtagttgcaaaccagcaacaacaacaactgcaacagtttctgccagcgcttagtcaactagccatggtg

SEQ ID NO: 70886 - DNA, 262 bp, Zea mays
gagaaagcactatagtgtaccaacaatggcagccaaaatattttgcctccttatgctccttggtctttctgcaagtgctgctacggcgaccattttcccgcaatgctcgcaagctcctatagcttcccttcttcccccgtacctctcaccagcggtgtcttcggtatgtgaaaacccaattcttcaactctacaggatccaacaggcaatcacagctggcatcttacctttatcacccttgttcctccaacaatcatcagcc

SEQ ID NO: 70887 - DNA, 169 bp, Zea mays
cggcgactctgtcgctgctgtcgagaaggctgggctggcggacaagatgagccacatttcgaccggcggcggtgcgagagtggaactcttggaaggcaagactctacctggtgtccttgccctcgatgacgcctagatccgctgctgctgctgctgctgctactcaggt

SEQ ID NO: 70888 - DNA, 268 bp, Zea mays
gtaactcgtgctacctctgatcaaccaagtagctctggcaaacctttctccctactctcagcaacaacaatttcttccattcaaccaactgtctacactgaaccctgctgcttatttgcagcaacaactattaccatttagccagctagctactgcctactctcagcaacaacaacttcttccatttaaccaattggccgcactgaaccccgctgcttatttgcagcagcaaatactactaccatttagccagctagctgcagcaaac

SEQ ID NO: 70889 - DNA, 272 bp, Zea mays
attgagaccaacaagcaacatagaaagtggaatccagtagcaacaacagagcaacaatggcgaccaagatattttccctccttatgctccttgctctttctgcatgtgttgctaacgcgacaattttccctcaatgctcacaagctcctatagcttcccttcttcccccataccttccatcaatgatagcttcagtatgtgaaaacccagctcttcagccctataggcttcaacaagcaatcgcagcaagcaacatacctttatcacccttg

SEQ ID NO: 70890 - DNA, 260 bp, Zea mays
caactagcaacatagaaagcacaatagtgtaccaacaatggcagccaaaatattttgcttccttatgctccttggtctttctgcaagtgctgctaccgcaaccattttcccacaatgctcacaagctcctatagcttcctttcttcccccatacctctcaccagcggtgtcttcagtatgtgaaaacccaattcttcaaccctacaggatccaacaggcaatcgcagcaggcatcttacctttatcaccttgttcctcca

SEQ ID NO: 70891 - DNA, 261 bp, Zea mays
aatattttgagcattcagaaacacaccaagcgaagcgcactagcaacgacctaacaacaatggctaccaagatattagccctccttgcgcttcttgccctttttgtgagcgcaacaaatgcgttcattattccacaatgctcacttgctcctagtgccattattccacagttcctcccaccagttacttcaatgggcttcgaacacctagctgtgcaagccaacatgcaacaacaagcgcttgcggcgagcgtcttacaac

SEQ ID NO: 70892 - DNA, 262 bp, Zea mays
  unsure (1)..(262): unsure at all n locations
ttgcaacatagaaagcacaatagtgtaccaacaatggcagccaaaatattttgcctccttatgctccttggtctttctgcaagtgctgctacggcgaccattttcccgcaatgctcgcaagctcctatagcttcccttcttcccccgtacctctcaccagcggtgtcttcggtatgtgaaaacccaattcttcaaccctacaggatccaacaggcaatcacagctggcatctagcgcnttatcacccttgttcctccaacaa

SEQ ID NO: 70893 - DNA, 264 bp, Zea mays
aattcttcaaccctacaggatccaacaggcaatcgcagctggcatcttacctttatcacccttgttcctccaacaatcatcagccctattacagcagttacctttggtgcatttattggcacaaaacatcagggcacaacaactacaacaacttgtgctagcaaaccttgctgcctactctcagcaacagcagtttcttccattcaaccaactagctgcattgaactctgcttcttatttgcaacaacaacaactaccattcag

SEQ ID NO: 70894 - DNA, 261 bp, Zea mays
ctcgagccgattcagaaacacacctagcgaacgtcactagcaacgacctaacaacaatggcttccaagacattatccctccttgcgcttcttgccctttttgtgagtgcaacaaatgcgttcattattccacaatgctcacttgctccgagtgccattattccacagttcctccctccagttacttcaatgggcttcgaacacccagctgtgcaagcctataggctacaacaagcgcttgcggcgagcgtcttagaacaac

SEQ ID NO: 70895 - DNA, 260 bp, Zea mays
attttgagcattcagaaacacaccaagcgaagcacattagcaacaacctaacaacaatggctaccaagatattatccctccttgcgcttcttgcgctttttgcgagcgcaacaaatgcgttcattattccacaatgctcacttgctccaagttccattattacacagttcctcccaccagacgggcatcaatgggcttcgaacacccagctgtgcaagcctataggctacaacaagcaattgcggcgagcgtcttacaac

SEQ ID NO: 70896 - DNA, 264 bp, Zea mays
gtattcagaaacacaccaagcgaagtcacctagcaacgacttaacaacaatggctaccaagatattagccctccttgcgcttcttgccctttttgtgagcgcaacaaatgcgttcattattccacaatgctcacttgctcctagtgccattataccacagttcctccgaccagttacttcaatgggcttcgaacacctagctgtgcaagcctacaagctacaacaagcgcttgcggcgagcgtcttacaacaaccaattaacca

SEQ ID NO: 70897 - DNA, 262 bp, Zea mays
attttgagcattcaaaaacacacaaagggaagtgcactagcaacttcctaacaacaatggctaccaagatattagccctccttgcgctcctttccctttcagtgagcgcaacaactgcattcattattccacaatgctcacttgctcctaatgccattattccacagttcctcccatcagttacatcaatgggcatcgaacaccctattgtgcaagcctataggctacaacaagcgcttgcggcgagcgtcttacaacaacc

SEQ ID NO: 70898 - DNA, 264 bp, Zea mays
gcaacatagaaagcacaatagtgtaccaacaatggcagccaaaatattttgcttccttatgctccttggtctttctgcaagtgttgctaccgcaaccattttcccacaatgctcacaagctcctatagcttcccttcttcccccatacctctcaccagcggtgtcttcaatgtgtgaaaacccaactgttcaaccctacaggatccaacaggcaatcgcaacaggcatcttaccattatcacccttgttcctccaacaaccgtc

SEQ ID NO: 70899 - DNA, 262 bp, Zea mays; identical to SEQ ID NO: 70897

SEQ ID NO: 70900 - DNA, 266 bp, Zea mays
agaccaactagcaacatagaaagcacaatagtgtaccaacaatggcagccaaaatattttgcttccttatgctccttggtctttctgcaagtgttgctaccgcaaccattttcccacaatgctcacaagctcctatagcttcccttcttcccccatacctctcaccagcggtgtcttcaatgtgtcaaaccccaattgttcaaccctacaggatccaacaggcaatcgcaacaggcatcttaccattatcacccttgttcctccaa

SEQ ID NO: 70901 - DNA, 170 bp, Zea mays
ggaatccagtagcaacaacagagcaacaatggcgaccaagatattttccctccttatgctccttgctctttctgcatgtgttgctaacgcgacaattttccctcaatgctcacaagctcctatagcttcccttcttcccccataccttccatcaatgatagcttcagtat

SEQ ID NO: 70902 - DNA, 154 bp, Zea mays
ctcgagccgttgagaccaactagcaacatagacagcacaatagtgtaccaacaatggcagccataatattttgcctccttatgctccttggtcttcctgcaagtgctgctacggcgaccattgacccgcaatgctcgcaagctcctatagcttc

SEQ ID NO: 70903 - DNA, 256 bp, Zea mays
ctccttttgacaagaaatcatttgtctcttacattaaaaaatacatcaagaatctcactgctgtgttggagccagagaaagcggatgagttcaaaaagggtgtcgagggtgcaaccaagtttctccttagcaagctgaaggaccttcaattttttgttggtgagagcatgaaggatgatgcgtccgtggtattcgcctattacaaggatggtgccactaatccgacattcctctatttctctcatggtcttaagga

SEQ ID NO: 70904 - DNA, 261 bp, Zea mays
gcaacatagaaagcacaatagtgtaccaacaatggcagccaaaatattttgcctccttatgctccttggtctttctgcaagtgctgctacggcgaccattttcccgcaatgctcgcaagctcctatagcttcctttcttcccccgtacctctcaccagcggtgtcttcggtatgtgaaaacccaattcttcaaccctacaggatccaacaggcaatcacagctggcatcttacctttatcacccttgttcctccaacaatc

SEQ ID NO: 70905 - DNA, 256 bp, Zea mays
tcgacgacaaaatcctcggcttcatcaagggctacaagcgcacctttaatctcgcttgcattgaccacagaggcacaccggagcatccggcgaggacctgcacgcttgaaaccgacgacgaggccatatgctggggaattgcatattgtgtcaagggtggtccagaaaaagagctaaaagcaatgcagtacttggagagaagagagtgtgagtacgaccagaagatatccattgatttctacaaggaaggagatcc

SEQ ID NO: 70906 - DNA, 255 bp, Zea mays
tcgacgacaaaatcctcggcttcatcaagggctacaagcgcacctttaatctcgcttgcattgaccacagaggcacaccggagcatccggcgaggacctgcacgcttgaaaccgacgacgaggccatatgctggggaattgcatattgtgtcaagggtggtccagaaaaagagctacaagcaatgcagtacttggagagaagagagtgtgagtacgaccagaagatatccattgatttctacaatgaaggagatc

SEQ ID NO: 70907 - DNA, 259 bp, Zea mays
aagctggtgaggcccgcgctccccgtcctggacgacctcgtggcggacaaggagcagcacgggtcgttcgacttcgccttcgtggacgccgacaaggacaactacctcagctaccacgagcggctcctgaagctggtgaggcccggcggcctcatcggctacgacaacacgctgtggaacggctccgtcgtgctccccgacgacgcgcccatgcgcaagtacatccgcttctaccgcgacttcgtcctcgcactcaaca

SEQ ID NO: 70908 - DNA, 153 bp, Zea mays
agcattcagaaacacacctagcgaaggcactagcaacgacctaacaacaatggctaccaagatattatccctctttgcgcttcttgccctttttgtgagcgcaacaaatgcgttcattattccacaatgctcacttgctcctagtgccattat

SEQ ID NO: 70909 - DNA, 153 bp, Zea mays
atttagaccaactagcaacatagaaagcacaatagtgtaccaacaatggcagccaaaatattgtgcctccttatgctccttggtatttctgcaagtgctgctacggcgaccattttcccgcaatgctcacaagctcctatagcttcccttctt

SEQ ID NO: 70910 - DNA, 265 bp, Zea mays
atacgaactagcaacatacatagtgaagtacactagcaacatcttagcaccaatggcagccaagatttttgccatccttgccctccttgctctttcagcaagcgttgctaccgcgactattattccacaatgctcacaacaatacctctctccggtgacagccgcgagatttgaatacccaactatacaatcctacaggctacaagaggccatcgcagcaagcatcttacggtcgttagcattgaccgtccaacaaccatatgcc

SEQ ID NO: 70911 - DNA, 260 bp, Zea mays
ctctcctccggcatcgacgaggcgaaaccctagcgcccgagtccctctccctgctcccacaacccatggcggcggatatggcgtacgcgccgccgatgaaggctggcaaggccgggttcgaggctggcatgatggatccacagcacaggatccgcatcacgctctcctccaagagcgtcaagaacctcgagaaagtctgcggggatctggtgaagggcgccaagggtaaggagctcaaggtcaagggccccgtgcggatg

SEQ ID NO: 70912 - DNA, 244 bp, Zea mays
gaaacacaccaagcgaagctacctagcaacgacttaacaacaatggctaccaagatattagccctccttgcgcttcttgccctttttgtgagcgcaacaaatgcgttcattattccacaatgctcacttgctcctagtgccattataccacagttcctccgaccagttacttcaatgggcttcgaacacctagctgtgcaagcctacaagctacaacaagcgcttgcggcgagcgtcttacaac

SEQ ID NO: 70913 - DNA, 260 bp, Zea mays
gcgactattattccacaatgctcacaacaatacctctctccagtgatagccgcgagatttgaatacccatctatacaatcctacaggctacaagaggccatcacagcaagcaacatacctttatcacccttgttgtttcaacaatcgccagccctatctttggtgcagtcattggtacaaaccatcagggcacagcagctgcagcaactcgtgctacctgtgatcaaccaagtagctctggcaaacctttctccctactc

SEQ ID NO: 70914 - DNA, 261 bp, Zea mays
caacaagcaacatagaaagtggaatccagtagcaacaatagagcaacaatggcgaccaagatattttccctccttatgctccttgctctttctacatgtgttgctaacgcgacaattttccctcaatgctcacaagctcctatagcttcccttcttgtcccatatcttccatcaattatagcttcaatatgtgagaacccagctcgtcatccatataggcttcaacaagcaatcgcagctagcaacatacctttatcgagc

SEQ ID NO: 70915 - DNA, 260 bp, Zea mays
taaaaaggtgggcgtgcaactttcccttccttcgccgaagccgcgcgacggaaaccccaaacccaacctcatctcttttctcggcctctaccgccccctcgatcggtcggccggtcagctatgacgccgggaagctcggccgacggatccggcgtcgtcgttcctcggaacttcaggctcctagaatagcttgaacgtggagagaagggcattggagatgggacagtgagctatggaatggatgacgcatatgacatcta

SEQ ID NO: 70916 - DNA, 268 bp, Zea mays
actcgagccgattcggctcgagctagacgaagcaagcatgatagatataagaccatgaggagaactatgtcgagggtgaaaatgcttcacatggatccacacctgaatctaaacaaaagcaaattctcaaggttgttgtcacggaagttcttggtggtgggaagttttatgttcagacaatgggtgaccagagggtggcttcaattcaacagcagcttgcatctttgaaacttaaagatgcgccggtcattggtgcttctaatcctgt

SEQ ID NO: 70917 - DNA, 256 bp, Zea mays
caacatagaaagcacaatagtgtaccaacaatggcagccaaaatattttgcctccttatgctccttggtctttctgcaagtgctgctacggcgaccattttcccgcaatgctcgcaagctcctatagcttcccttcttcccccgtacctctcaccagcggtgtcttcggtatgtgaaaacccaattcttcaaccctacaggatccaacaggcaatcgcagctggcatcttacctttatcacccttgttcctccaac

SEQ ID NO: 70918 - DNA, 260 bp, Zea mays
gccgcactgaaccccgctgcttatttgcagcagcaaatactactaccatttagccagctagctgcagcaaaccgtgcttccttcttgacacagcaacagttgctgcctttctaccagcagtttgcggctaaccccgcaaccctcttacaactacaacaattgttgccctttgtccaacttgctttgacagaccgagcggcctcctaccaacaacacatcattggtggtgccctcttttagattgcttattagttgtaatt

SEQ ID NO: 70919 - DNA, 259 bp, Zea mays
attttgagcattcagaaacacaccaagcgaagtgcactagcaacaacctaacaacaatggctaccaagatattatccctccttgcgcttcttgcgctttttgcgagcgcaacaaatgcgtccattattccacaatgctcacttgctgctagttccattattccacagttcctcccaccatctacttcaatggccttcgaacacccagctgtgcaagcctataggctacaacaagcgattgcggcgagcgtcttacaaca

SEQ ID NO: 70920 - DNA, 152 bp, Zea mays
cccgactcgtcagacgtcagccagcagttcgataccaaggatcgatccaggagcttccggaaggctacgcgcgcgcgcaggttcgaagtgctggtgccggtgccgcccatggatcgggctcgcggatccgcgttcctgctcggcgtcctgct

SEQ ID NO: 70921 - DNA, 152 bp, Zea mays
aggagaagcagccgccgttgctgctgccgcgtccacagaatggggggtttcgtgaagacccataagaccaatgcgtatttcaaacgtttccaagtgaaattcaagagaaggcgggctggcaagacagactacagggccaggataaggctgat

SEQ ID NO: 70922 - DNA, 80 bp, Zea mays
tggcgaacgtagctgcataccagcaacaacaacagctgcaacagtttatgccagtgctcagtcaactagccatggtgaac

SEQ ID NO: 70923 - DNA, 150 bp, Zea mays
agcagctcaggcaggtggagccgcagcaccggtaccaggcgatcttcggcttggtcctccagtccatcctgcagcagcagccgcaaagcgccaggtcgcggggctgttggcggcgcagatagcgcacaactgacggcgatgtgcggcctg

SEQ ID NO: 70924 - DNA, 153 bp, Zea mays
ctcgagccgaatcggctcgaggaccaacaagcaacatagaaagaggaatacagtagcaagcatagagcaacaatggcggccaagatattttccatccttatgctccttgctctttctgcatgtgttgctaacgcgaccatttttcctcaatac

SEQ ID NO: 70925 - DNA, 257 bp, Zea mays
ctcgagccgaatcggctcgaggtattagttagataaccgtgctagtgcttattgattgtcaagtcccactgttcttgctctaaatctgtgtctgttgttttgcagatgagctcatcaagaatgctgcctacatcggcacccctggcaagggtatccttgctgctgatgagtcaactggcaccagtggcaagcgcctttccagcatcaatgtcgagtacgtggaggagaaccggcgggctctccgtgagctcctgttc

SEQ ID NO: 70926 - DNA, 260 bp, Zea mays
tttgagcattcagaaacacaccaagcgaagtgacctagcaacgacttaacaacaatggctaccaagatattagccctccttgcgcttcttgccctttttgtgagcgcaacaaatgcgttcattattccacaatgctcacttgctcctagtgccattataccacagttcctccgaccagttacttcaatgggcttcgaacacctagctgtgcaagcctacaggctacaacaagcgcttgcggcgagcgtcttacaacaacc

SEQ ID NO: 70927 - DNA, 260 bp, Zea mays
aagcaacatagaaagtggaatccagtagcaacaacagagcaacaatggcgaccaagatattttccctccttatgctccttgctctttctgcatgtgttgctaacgcgacaattttccctcaatgctcacaagctcctatagcttcccttcttcccccataccttccatcaatgatagcttcagtatgtgaaaacccagctcttcagccctataggctccaacaagcaatcgcagcaagcaacatacctttatcacccttg

SEQ ID NO: 70928 - DNA, 257 bp, Zea mays
gacgagggctggggcgccgtcatcgccaagactgtgtcattggatgctgaaaaagttatcaacgttactcctcgttatgcaaagcttcgggcagaaccaaatggggctgccatggggcgcatcattggctggcagaacattgaactcatcagtgacaggcctctggagaccatgctgaatgagttcaagcagttgaagaaagagtatcctgacaggatacttatcggttcaattatggaggagtacaacaaagctgc

SEQ ID NO: 70929 - DNA, 255 bp, Zea mays
gcagcaacaatgttgtcatgatcttaggcagattgagccacaatacattcaccaagcaatctacaacatggttcaatccataatccaggaggagcaacaacaacaaccatgtgagttatgtggatctcaacaagctactcaaagtgcggtggcaatcttgacagcagcacaatacctaccatcaatgtgcggcttgtaccactcatactaccacaataatccatgcagcagcaatgacattagtggtgtttgcaa

SEQ ID NO: 70930 - DNA, 257 bp, Zea mays
tagcaacatagaaagcacaatagtgtaccaacaatggcagccaaaatattttgcttccttatgctccttggtctttctgcaagtgctgctaccgcaaccattttcccacaatgctcacaagctcctatagcttcctttcttcccccatacctctcaccagcggtgtcttcagtatgtgaaaacccaattcttcaaccctacaggatccaacaggcaatcgcagcaggcatcttacctttatcacccttgttcctcca

SEQ ID NO: 70931 - DNA, 256 bp, Zea mays
attgagaccaactagcaacatagaaagcacaatagtgtaccaacaatggcagccaaaatattttgcctccttatgctccttggtctttctgcaagtgctgctacggcgaccattttcccgcaatgctcgcaagctcctatagcttcccttcttcccccgtacctctcaccagcggtgtcttgcgtatgtgaaaacccaattcttcaaccctacaggatccaacaggcaatcacagctggcatcttacctttatcac

SEQ ID NO: 70932 - DNA, 81 bp, Zea mays
agaaagcacaatagtgtaccaacaatggcagccaaaatattttgcctccttatgctccttggtatttctgcaagtgctgct

SEQ ID NO: 70933 - DNA, 252 bp, Zea mays
gctagcacaagttgttgtagttgttgtgccctgatgttttgtgccagcaaaccttgctgcctactctcagcaacagcagtttcttccattcaaccaactagctgcattgaactctgcttcttatttgcaacaacaacaactaccattcagccagctacctgttgcctacccccaacaatttcttccattcaaccaactggcagcattgaactctcctgcttatttacagcagcaacagctactaccattcag

SEQ ID NO: 70934 - DNA, 258 bp, Zea mays
tagcaacatagaaagcacaatagtgtaccaacaatggcagccaaaatattttgcctccttatgctccttggtctttctgcaagtgctgctacggcgaccattttcccgcaatgctcgcaagctcctatagcttcccttcttcccccgtacctctcaccagcggtgtcttcggtatgtgaaaacccaattcttcaaccctacaggatccaacaggcaatcacagctggcatcttacctttatcacccttgttcctccaa

SEQ ID NO: 70935 - DNA, 255 bp, Zea mays
agatattatccctccttgcgcttcttgcgctttttgcgagcgcaacaaatgcgttcattattccacaatgctcacttgctccaagttccattattacacagttcctcccaccagttacttcaatgggcttcgaacacccagctgtgcaagcctataggctacaacaagcaattgcggagaaaaccatacaacaaccaatttcccagttgcaacaacaatccttggcacatctaacaatacaaaccatcgcaacgc

SEQ ID NO: 70936 - DNA, 152 bp, Zea mays
ggcagtggctaacccattggtcgctaccttcctgcagcagcaacaacaattgctgccatacaaccagttctctttgatgaaccctgccttgcagcaacccatcgttggaggtgccatcttttagattacatatgagatgtactcgacaatgg

SEQ ID NO: 70937 - DNA, 260 bp, Zea mays
agaaagcacaatagtgtaccaacaatggcagccaaaatattttgcttccttatgctccttggtctttctgcaagtgttgctaccgcaaccattttcccacaatgctcacaagctcctatagcttcccttcttcccccatacctctcaccagcggtgtcttcaatgtgtgaaaccccaattgttcaaccctacaggatccaacaggcaatcgcaacaggcatcttaccattatcacccttgttcctccaacaaccgtcagc

SEQ ID NO: 70938 - DNA, 259 bp, Zea mays
ataccaactagcaaaatacatagtgaagtacactagcaacatcttagcaccaatgggagccaagattttttccctccttgccctccttgctctttcagcaagcgctgctacctctactattattccacaatgctcacaacaatgactctctccggtgacagccgcgggatttcaacacccaactatacaatcctacatgctacatgaggccatcgtagcaagcatcttacggtcattagcattaaccctccaacagcca

SEQ ID NO: 70939 - DNA, 258 bp, Zea mays
gttgcagcgaaccttgctgcttaccttcagcaacaacaatttcttccattcaatcaactagctggggtgaaccctgctgcttacttgcaggcacaacagctactaccattcaaccaacttgtcgggagccctgctgccatcttattgcagcaacagttgctgccattccgtctacaagttgttgcaaacattgctgctttcttgcaacaacaacaattgctgccattttacccacaggttgtgggaaacattaacgcc

SEQ ID NO: 70940 - DNA, 258 bp, Zea mays
cctattcaatctcaaggttggcctatggctttgaagggtagggacctgattggtatcgctcaaacaggctcagggaaaacattatcttatctgttacctgggttggttcatgttggtgcccagcctcggctagaacaaggcgatggcccaattgtattaattctcgctcccacgagagaactggctgttcaaatacaggaagaatctacaaaatttggatcatattcaagaactagaagcacatgtgtctatggtggt

SEQ ID NO: 70941 - DNA, 80 bp, Zea mays
cccagctgtgcaagcctataggctacaacaagcgcttgcggcgagcgtcttagaacaaccaattgcccaattacaacaac

SEQ ID NO: 70942 - DNA, 263 bp, Zea mays
ctcgagccgcacttgctcctagttccattattccacagttcctcccaccagttacttcaatggccttcgaacacccagctgtgcaagcctataggctacaacaagcgattgcggcgagcgtcttacaacaaccaattgcccaattgcaacaacaatccttggcacatctaacaatacaaaccatcgcaacgcaacagcaacaacagttcctaccagcactgagccacctagccatggtgaaccctgtcgcctacttgcaacag

SEQ ID NO: 70943 - DNA, 261 bp, Zea mays
tgagaccaactagcaacatagaaagcacaatagtgtaccaacaatggcagccaaaatattttgcttccttatgctccttggtctttctgcaagtgctgctaccgcaaccattttcccacaatgctcacaagctcctatagcttcctttcttcccccatacctctcaccagcggtgtcttcagtatgtgaaaacccaattcttcaaccctacaggatccaacaggcaatcgcagcaggcatcttacctttatcacccttgtt

SEQ ID NO: 70944 - DNA, 256 bp, Zea mays
gcctgagctgctggcaggtggagccgcagcaccggtaccaggcgatcttcggcttggtcctccagtccatcctgcagcagcagccgcaaagcggccaggtcgcggggctgttggcggcgcagatagcgcacaactgacggcgatgtgcggcctgcagcagccgactccatgcccctacgctgctggcggcggtgtcccccactgaagaaactatgtgctgtagtatagccgctggctagctagctagttgagtcat

SEQ ID NO: 70945 - DNA, 254 bp, Zea mays
ctcgagccgttgagaccaactagcaacatagaaagcacaatagtgtaccaacaatggcaaccaaaatattttgcctccttatgctccttggtctttctgcaagtgctgctacggcgaccattttcccgcaatgctcgcaagctcctatagcttcccttcttcccccgtacctctcaccaaaacagtcttcggtatgtgaaaacccaattcttcaaccctacaggatccaacaggcaatcgcagctggcatctta

SEQ ID NO: 70946 - DNA, 257 bp, Zea mays
gaacttgcatttgacgatgtcacacctgaagatcctgattttccattcatacaaggcctagcagaagctggattgatttctagcaagctttcaagatctgatatgaatatcccagaagatgttcatgacaatcatatcttgttttcccctgagagtcctttgtcacgtcaagaccttgtgagttggaaaatggccctggataagagacaactgcctgaagttgacagaaattgtttgttcaaactatctggctacat

SEQ ID NO: 70947 - DNA, 258 bp, Zea mays
tcagcattcaaagacacaccaagcgaagctactagcaacgacctatcaccaatggctaccaagatattagccctccttgcgcttcttgcccttttggatgagcgcaacaaatgcgtacattattccacagtgctctattgctcctagtgccagtattccacagttcctcccaccagttacttcaatgggcttcgaacatccagccgtgcaagcctacaggctacaactagcgcttgcggcgagcgccttacaacaacc

SEQ ID NO: 70948 - DNA, 256 bp, Zea mays
gatgaaagggttctttaagcagtttggggatattaagaggcttaggatcgctcgtaaccgcaagacaggaaagtccaagcactatggattcattgagtttgagaaccctgctgtggcaaaggtcgtagcagatgagatgaataactatctcttgtttgagcgcaccttgcaagttgcacttgttgagccagagaaagttcatcctaaattatggaaaggggtgcgaaggggatttatacctgttgatcgagtagca

SEQ ID NO: 70949 - DNA, 256 bp, Zea mays
accaactagcaacatagaaagcacaatagtgtaccaacaatggcagccaaaatattttgcctccttatgctccttggtatttctgcaagtgctgctacggcgaccattttcccgcaatgctcacaagctcctatagcttcccttcttcccccgtacctctcaccagcggtgtcttcggtatgtgaaaacccaattcttcaaccctacaggatccaacaggcaatcgcagctggcatcttacctgtatcacccttgt

SEQ ID NO: 70950 - DNA, 152 bp, Zea mays
tagcaacatagaaagcacaatagtgtaccaacaatggcagccaaaatattttgcttccttatgctgcctgggctttctgcaagtgctgctaccgcaaccattttcccacaatgctcacaagctcctatagcttgctatcttcccccatacct

SEQ ID NO: 70951 - DNA, 261 bp, Zea mays
aattagctcatcgactccagattggtcgaactcgacaccatgaaggtgctgatcgttgcccttgctctcctggcgctcgctgcgagcgccgcctccagtacaagcggcggctgtggctgccagacaccaccgtttcatctaccgcctccgttctatatgccgcctccgttctatctgccgccgcagcagcagccgcagccatggcattcagctctcaaccaccgcagctaagcccgtgccagcagttcggattctgcggcg

SEQ ID NO: 70952 - DNA, 149 bp, Zea mays
tgagaccaacaagcaacatagaaagtggaatccagtagcaacaatagagcaacaatggcgaccaagatattttccctccttatgctccttgctctttctacatgtgttgctaacgcgacaattttccctcaatgctcacaagctcctat

SEQ ID NO: 70953 - DNA, 258 bp, Zea mays
gcaagttcaatctcacctccaaccatgggtaaagagaagtcccacatcaacattgtggttattggtcatgtcgactctggcaagtcgaccaccacaggacaccttatctacaagcttggaggcattgacaagcgtgtgatcgagaggttcgagaaggaggctgctgaaatgaacaagcggtccttcaagtacgcgtgggtgctcgacaagctcaaggctgagcgtgagagatgtatcaccatagatatcgctctgtgg

SEQ ID NO: 70954 - DNA, 254 bp, Zea mays
attgagaccaacaagcaacatagaaagtggaatccagtagcaacaacagagcaacaatggcgaccaagatattttccctccttatgctccttgctctttctgcatgtgttgctaacgcgacaattttccctcaatgctcacaagctcctatagcttcccttcttcccccataccttccatcaatgatagcttcagtatgtgaaaacccagctcttcagccctataggctccaacaagcaatcgcagcaagcaac

SEQ ID NO: 70955 - DNA, 254 bp, Zea mays
aaaaacacaccaagcgaagcgcactagcaacgacctaacaccaatggctaccaagatattagccctccttgcgcttcttgcccttttagtgagcgcaacaaatgcgttcattattccacagtgctcacttgctcctagtgccagtattccacagttcctcacaccagttacttcaataagggacgaacatccagccgtgcaagcctacaggctacaactagcgcttgcggcgagcgccttacaacaaccaattg

SEQ ID NO: 70956 - DNA, 256 bp, Zea mays
gtacaaaccatcagggcacaacagctgcagcaactcgtgctacctgtgatcaaccgagtagctctggcaaacctttctccctactctcagcaacaacaatttcttccattcaaccaactgtctacactgaaccctgctgcttatttgcagcaacaactattaccatttagccagctagctactgcctactctcagcaacaacaacttcttccatttaaccaattggccgcactgaaccccgctgcttatttgcagc

SEQ ID NO: 70957 - DNA, 256 bp, Zea mays
gcgggaagcaaggacaccgtggggcagtacgagtcccacatcgcgttcactcttcctgggctctaccgtgtcgtccatggcatcgatgttttcgatcccaagttcaacattgtctcccctggagcagacatgagtgtttactacccgtatacggaaaccgacaagagactcactgccttccatcctgaaatcgaggagctcatctacagcgacgtcgagaactccgagcacaagttcgtgctgaaggacaagaaga

SEQ ID NO: 70958 - DNA, 255 bp, Zea mays
gcgcctctacatttcttctctctctgctcctccgcctccgcctgatccatccaagacagggatcgccatgtcggactcggtggagcaccacttcgaatcgaaggccgccgctggggcgtccaagacctacccgcagcaggctggcaccgtccgtaagaacggcttcatcgtcatcaagaaccgtccctgcaaggttgtggaggtttctacctccaagactggtaagcatggccacgccaaatgccactttgtcgc

SEQ ID NO: 70959 - DNA, 253 bp, Zea mays
aagcgaacacattagcaacaacctaacaacaatggctaccaagatattatccctccttgcgcttcttgcgctttttgcgagcgcaacaaatgcgttcattattccacaatgctcacttgctccaagttccattattacacagttcctcccaccagttacttcaatgggcttcgaacacccagctgtgcaagcctataggctacaacaagcaattgcggcgagcgtcttacaacaaccaatttcccagttgcaa

SEQ ID NO: 70960 - DNA, 254 bp, Zea mays
caacaactgctttcatctagcccgctcgctgtgggcaatgcacctacatacctgcaacaacaattgttgcaacagattgtaccagctctgactcaactagctgtggcaaaccctgttgcctacttgcaacagctgcttccattcaaccaactgactctgtcgaactctgctgcgtacctacaacagcgacaacagttacttaatccattggtagtggctaacccattggtcgccgccttcctacagcagcaaca

SEQ ID NO: 70961 - DNA, 256 bp, Zea mays
gaaagtggaatacagtagcaacaatagagcaacaatggcggccaagatattttccatccttatgctccttgctctttctgcatgtgttgctaacgcgaccatttttcctcaatactcacaagctcctatagctgcccttcttcccccataccttccatcaatgaccgcttcagtttgtgaaaacccagcccttcaaccctacaggctccaacaagcaatcgcaacaagcaacttacctttatcacccctgttcttt

SEQ ID NO: 70962 - DNA, 255 bp, Zea mays
tagggagaaaggtttgccagagctactgcctactctcagcaacaacaacttcttccatttaaccaattggccgcactgaaccccgctgcttatttgcagcagcaaatactactgccatttagcgagctagctgcagcaagtcgtgcttccttcttgacacagcaacagttgctgtctttctacaagcagtttgcggctaaccccgcaaccctcttacaactacaacaatgttgccctttgtccaactgtgctttg

SEQ ID NO: 70963 - DNA, 261 bp, Zea mays
cttcggttgggaaatcaacattgttgaacaagctaacagggacattttcagaggttgcttcctacgagtttacaactttaacatgtattcctggagttatcatgtataagggtgctaaaatccagcttctagatctcccagggatcatcgaaggtgctaaagatggaaagggcagaggaagacaggttatcagcacagctaggacatgcaatgttattttgattgttcttgatgccataaaaccaataactcacaagcgtc

SEQ ID NO: 70964 - DNA, 260 bp, Zea mays
atagaaagcacaatagtgtaccaacaatggcagccaaaatattttgcctccttatgctccttggtctttctgcaagtgctgctacggcgtccattttcccgcaatgctcgcatgctcctatagcttcccttcttcccccgtacctctcaccagcggtgtcttcggtatgtgaaaacccaattcttcaaccctacaggatccaacaggcaatcgcagctggcatcttacctttatcacccttgttcctccaacaatcatca

SEQ ID NO: 70965 - DNA, 237 bp, Zea mays
gcgggcagtctaacagcaccccctcctcgctcgcactccgttcgtctgacatctcctcccgtcctttcctttctgaggctcgcgaaccccgacaatggccgcaaccgcggtgtcggtcgacgagaagctcgacaagcttcgcgccgaggtcgccaaactcagccagatcagcgagaacgagaaggccgggttcatcagcctcgtgtcacgctacctcagtgggggagcgggacagat

SEQ ID NO: 70966 - DNA, 243 bp, Zea mays
tagcaacatagaaagcacaatagtgtaccaacaatggcagccaaaatattttgcctccttatgctccttggtctttctgcaagtgctgctacggcgaccattttcccgcaatgctcgcaagctcctatagcttcccttcttcccccgtacctctcaccagcggtgtcttcggtatgtgaaaacccaattcttcaaccctacaggatccaacaggcaatcgcagctggcatcttacctttatca

SEQ ID NO: 70967 - DNA, 260 bp, Zea mays
attttgagcattcaaaaacacaccaagcgaagcacattagcaacaacctaacaacaatggctaccaagatattatccctccttgcgcttcttgcgctttttgcgagcgcaacaaatgcgttcattattccacaatgctcacttgctccaagttccattattacacagttcctcccaccagttacttcaatgggcttcgaacacccagctgtgcaagcctataggctacaacaagcaattgcggcgagcgtcttacaacaa

SEQ ID NO: 70968 - DNA, 258 bp, Zea mays
cagaaacacacctagcgaacgcactagcaacgacctaacaacaatggcttccaagacattatccctccttgcgcttcttgccctttttgtgagtgcaacaaatgcgttcattattccacaatgctcacttgctccgagtgccattattccacagttcctccctccagttacttcaatgggcttcgaacacccagctgtgcaagcctataggctacaacaagcgcttgcggcgagcgtcttagaacaaccaattgccca

SEQ ID NO: 70969 - DNA, 258 bp, Zea mays
atcgagccgaatcggctcgaggaacaattgaaatgaaaagaaagaagtattgttcattcaggtcattgctcacactgacactgccacccatggtgatgcgtgacacattattactcaatcatcgccgctaaatgactcaactagctagctagccagcggctatactacagcacatagtttcttcagtcggggacaccgccggcagcagcgtaggggcatggagtcggctgctgcaggccgcacatcgccatgggtggc

SEQ ID NO: 70970 - DNA, 248 bp, Zea mays
tgactaccaggcctttctaatggcatcaagttcatacaacagaacttggtagaattgtccctcactgacgccatccctgtagaatatgatcctctttggtttctgtccagttgccctcccattcccatgtactgtgggatgagaacaactttacggctgatgggttgcaaactctcaccaacaacttgtgttacacgtatgctaggtgcacacgctcagtatcgattgttctgccggcatactatgct

SEQ ID NO: 70971 - DNA, 256 bp, Zea mays
ctcgagcgaatcggctcagattttgagcattcagaaacacatgaagcgaagtacctagcaacgacttaacaacaattgctaccaagatattagccctccttgcgcttcttgccctttttgtgagcgcaacaaatgagttcattattccacaatgctcacttgctcctagtgccattataccacagttcctccgaccagttacttcaatgggcttcgaacacctagctgtgcaagcctacaggctacaacaagcgct

SEQ ID NO: 70972 - DNA, 257 bp, Zea mays
cataaatccgccgcccctctccctcagtaaacccctctcttcttcccgcggtctgctcgttcgatctgtgcagcagatctgaggtcccgggcgaccgtgaagcagcttcaatcgtcggcatggcgctcgtattgcatagtggggctggaaacaagaatgccttcaaagcacttattgctgcagaatacagtgggatcaaggttgagttgaccaaggattttgagatgggtgtctccaacaagacccctgagtttctt

SEQ ID NO: 70973 - DNA, 258 bp, Zea mays
ctagcaacatagaaagcacaatagtgtaccaacaatggcagccaaaatattttgcctccttatgctccttggtctttctgcaagtgctgctacggcgaccattttcccgcaatgctcgcaagctcctatagcttcccttcttcccccgtacctctcaccagcggtgtcttcggtatgtgaaaacccaattcttcaaccctacaggatccaacaggcaatcgcagctggcatcttacctttatcacccttgttcctcca

SEQ ID NO: 70974 - DNA, 254 bp, Zea mays
  unsure (1)..(254): unsure at all n locations
caacaagccacataggtaatggactcgagtagcaacaagagagtcatagtggcgaccacgctatatacaaaacaanatgctccttgctctttctgcatgtgttgctaacgcgacaattatccctcaatgctcacaagctcctatagcttcccttcttcccccataccttccatcaatgatagcttcagtatgtgaaaacccagctcttcagccctataggctccaacaagcaatcgcagcaagcaacatacctt

SEQ ID NO: 70975 - DNA, 251 bp, Zea mays
gcggtgtcttcagtatgtgaaaacccaattcttcaaccctacaggatccaacaggcaatcgcagcaggcatcttacctttatcacccttgttcctccaacaaccgtcagccctattacagcagttacctttggtgcatttgttggcacaaaacatcaaggcacaacaactacaacaacttgtgctaggaaaccttgctgcctactctcagcaacagcagtttcttccattcaaccaactggctgcattgaa

SEQ ID NO: 70976 - DNA, 256 bp, Zea mays
ctagcaacatagaaagcacaatagtgtaccaacaatggcagccaaaatattttgcctccttatgctccttggtctttctgcaagtgctgctacggcgaccattttcccgcaatgctcgcaagctcctatagcttcccttcttcccccgtacctctcaccagcggtgtcttcggtatgtgaaaacccaattcttcaaccctacaggatccaacaggcaatcacagctggcatcttacctttatcaccttgttcctcc

SEQ ID NO: 70977 - DNA, 249 bp, Zea mays
gtgaagtacactagcaacatcttagcaccaatggcagccaagatttttgcgctccttgccctccttgctctttcagcaagtgttgctaccgcgactattattccacaatgctcacaacaatacctctctccagtgatagccgcgagatttgaatacccatctatacaatcctacaggctacaagaggccatcacagcaagcatcttacggtcgttagcattgaccgtccaacaaccatatgccctattg

SEQ ID NO: 70978 - DNA, 255 bp, Zea mays; identical to SEQ ID NO: 68733

SEQ ID NO: 70979 - DNA, 256 bp, Zea mays
caactagcaacatagaaagcacaatagtgtaccaacaatggcagccaaaatattttgcttccttatgctccttggtctttctgcaagtgctgctaccgcaaccattttcccacaatgctcacaagctcctatagcttcctttcttcccccatacctctcaccagcggtgtcttcagtatgtgaaaacccaattcttcaaccctacaggatccaacaggcaatcgcagcaggcatcttacctttatcacccttgttc

SEQ ID NO: 70980 - DNA, 254 bp, Zea mays
agcattcagaaacacacctagcgaacgcagctagcaacgacctaacaacaatggctaccaagatattatccctctttgcgcttcttgccctttttgtgagcgcaacaaatgcgttcattattccacaatgctcacttgctcctagtgccattattccacagttcctccctccagttacttcaatgggcttcgaacacccagctgtgcaagcctacaggctacaacaagcgcttgcggcgagcgtcttacaacaa

SEQ ID NO: 70981 - DNA, 250 bp, Zea mays
  unsure (1)..(250): unsure at all n locations
ctgagagtaggcagcaacaactaccattcagtcagctagctgctgcctacccccagcaatttcttccattcaaccaactggcagcattgaactctgctgcttatttacaacagcaacagctaccaccattcagccagctagctgatgtgagccctgttgccttcttgacacaacaacagttgttgccgttctacctgcacgctgcgcctaacgctggcaccctcttacaactgcaacaattgctgnccat

SEQ ID NO: 70982 - DNA, 254 bp, Zea mays
caactagcaacatagaaagcacaatagtgtaccaacaatggcagccaaaatattttgcctccttatgctccttggtctttctgcaagtgctgctacggcgaccattttcccgcaatgctcgcaagctcctatagcttcccttcttcccccgtacctctcaccagcggtgtcttcggtatgtgaaaacccaattcttcaaccctacaggatccaacaggcaatcacagctggcatcttacctttatcacccttgt

SEQ ID NO: 70983 - DNA, 257 bp, Zea mays
gaccaactagcaacatagaaagcacaatagtgtaccaacaatggcagccaaaatattttgcttccttatgctccttggtctttctgcaagtgctgctaccgcaaccattttcccacaatgctcacaagctcctatagcttcctttcttcccccatacctctcaccagcggtgtcttcagtatgtgaaaacccaattcttcaaccctacaggatccaacaggcaatcgcagcaggcatcttacctttatcacccttgt

SEQ ID NO: 70984 - DNA, 256 bp, Zea mays
atcagtaccatcaatcatcattcatcttagtagtataggcaccaaatcaaatctgcaacatcaattatctaactccaaaaaccatgatgctggtgcttgtggttcttgctttcattgctttagtatcaagtgtttcttgtacacagacaggcggctgcagctgtggtcaacaacaaagccatgagcagcaacatcatccacaacaacatcatccacaaaaacaacaacatcaaccaccaccacaacatcaccagca

SEQ ID NO: 70985 - DNA, 256 bp, Zea mays
atttcatactcatattgcgggagctagaaactcatggctcgaacttgacagaagagcagcttgaaacacacactatatctgcatggaaagaggctaagcggcaaactaatggaagaaatgatggtcagtggcgaccgcaacagcatctagtgcatgccaccccttatgagtccttgagggacattgcagtaaagcttttgcaaaatggcatttctacagtgccagttatttattcatcatcatcagatggatcatt

SEQ ID NO: 70986 - DNA, 102 bp, Zea mays
gattattgagaccaacaagcaacatgagaaagtggaatccagtagcaacaatagagcaacaatggcgaccaagagatggtccctccttatgctccttgctct

SEQ ID NO: 70987 - DNA, 255 bp, Zea mays
atcttagcaccaatggcagccaagatttttgccatccttgccctccttgctctttcagcaagcgttgctaccgcgactattattccacaatgctcacaacaatacctctctccggtgacagccgcgagatttgaatacccaactatacaatcctacaggctacaagaggccatcgcagcaagcatcttacggtcgttagcattgaccgtccaacaaccatatgccctattgcaacaaccatccttaatgaatcta

SEQ ID NO: 70988 - DNA, 260 bp, Zea mays
attgagaccaactagcaacatagaaagcacaatagtgtaccaacaatggcagctaaaatattttgcctccttatgctccttggtctttctgcaagtgctgctacggcgaccattttcccacaatgctcacaagctcctatagcttcccttcttcccccgtacctctcaccaacggtgtcttcggtatgtgaaaacccaattcttcaaccctacaggatccaacaggcaatcgcagctggcatcttacctttatcaccctt

SEQ ID NO: 70989 - DNA, 255 bp, Zea mays
attccacaatgctcacttgctcctaatgccattattccacagttcctcccatcagttacatcaatgggcatcgaacaccctattgtgcaagcctataggctacaacaagcgcttgcggcgagcgtcttacaacaaccgtttgcccaattacaacaacaatccttggcacatctaaccatacaaaccatcgcaacacaactagagcaacagtttgtgcccgcattgagccaactagccgcagtgaaccctgtctcc

SEQ ID NO: 70990 - DNA, 255 bp, Zea mays
catagaaagcacaatagtgtaccaacaatggcagccaaaatattttgcctccttatgctccttggtatttctgcaagtgctgctacggcgaccattttcccgcaatgctcacaagctcctatagcttcccttcttcccccgtacctctcaccagcggtgtcttcggtatgtgaaaacccaattcttcaaccctacaggatccaacaggcaatcgcagctggcatcttacctttatcacccttgttcctccaacaa

SEQ ID NO: 70991 - DNA, 256 bp, Zea mays
attttgagcattcaaaaacacacaaagggaagtgcactagcaacttcctaacaacaatggctaccaagatattagccctccttgcgctcctttccctttcagtgagcgcaacaactgcattcattattccacaatgctcacttgctcctaatgccattattccacagttcctcccatcagttacatcaatgggcatcgaacaccctattgtgcaagcctataggctacaacaagcgcttgcggcgagcgtcttaca

SEQ ID NO: 70992 - DNA, 254 bp, Zea mays
ctcgagccggcaaaagcgcaaacgcgaccacagacagagcgcgcttcaaggcctttttttgttgagataacaaggaggagaggaggagatggcggtcacgatcacctgggtgaaggcgaggcagatcttcgacagccgcggcaaccccaccgtcgaggtggacgtgggcctcagcgacggcagctacgcgaggggggccgtacccagcggcgcatccactggaatatatgaggccttggagttgagggatggag

SEQ ID NO: 70993 - DNA, 254 bp, Zea mays
attgagaccaactagcaacatagaaagcacaatagtgtaccaacaatggcagccaaaatattttgcctccttatgctccttggtctttctgcaagtgctgctacggcgaccattttcccgcaatgctcgcaagctcctatagcttcccttcttcccccgtacctctcaccagcggtgtcttcggtatgtgaaaacccaattcttcaaccctacaggatccaacaggcaatcacagctggcatcttacctttatc

SEQ ID NO: 70994 - DNA, 255 bp, Zea mays
gagccacctagccgtggtgaaccctatcgcctacttgcaacaacagctgcttgcatccaacccacttgctttggcaaacgtagctgcataccaacaacaacaacagttgcaacagtttctgccagcgctcagtcaactagccatggtgaaccctatcgcctacctacaacagcaacaacttctttcatctagcccgctcgctatgggcaatgcacctacatacctgcaacaacagttgttgcaacaacagttgct

SEQ ID NO: 70995 - DNA, 256 bp, Zea mays
gagccacctagccgtggtgaaccctatcgcctacttgcaacaacagctgcttgcatccaacccacttgctttggcaaacgtagctgcataccaacaacaacaacagttgcaacagtttctgccagcgctcagtcaactagccatggtgaaccctatcgcctacctacaacagcaacaacttctttcatctagcccgctcgctatgggcaatgcacctacatacctgcaacaacagttgttgcaacaacagttgctg

SEQ ID NO: 70996 - DNA, 254 bp, Zea mays
gactagcaacatagaaagcacaatagtgtaccaacaatggcagccaaaatattttgcctccttatgctccttggtctttctgcaagtgctgctacggcgaccattttcccgcaatgctcgcaagctcctatagcttcccttcttcccccgtacctctcaccagcggtgtcttcggtatgtgaccagacaattcttcaaccctacaggatccaacaggcaatcacagctggcatcttacctttatcacccttgtt

SEQ ID NO: 70997 - DNA, 254 bp, Zea mays
cagcaacaacaacaactgcaacagtttctgccagcgcttagtcaactagccatggtgaaccctgccgcctacctacaacagcaacaactgctttcatctagcccgctcgctgtggccaatgcacctacatacctgcaacaagaattgttgcaacagattgtaccagctctaactcagctagctgtggcaaaccctgttgcctacttgcaacagctgcttccattcaaccaactaactatgtcgaactctgttgc

SEQ ID NO: 70998 - DNA, 253 bp, Zea mays
attatttataccaactaccaacatacatagtgaagtacactagcaacatcttagcaccaatggcagccaagatttttgcgctccttgccctccttgctctttcagcaagtgttgctaccgcgactattattccacaatgctcacaacaatacctctctccagtgatagccgcgagatttgaatacccatctatacaatcctacaggctacaagaggccatcacagcaagcatcttacggtcgttagcattgac

SEQ ID NO: 70999 - DNA, 101 bp, Zea mays
ctcgagccgattttcagcattcaaaaacacaccaagcgaagcgcactagcaacgacctaacatcaatggctaccaagatattagccctccttgcgcttctt

SEQ ID NO: 71000 - DNA, 253 bp, Zea mays
ggctgtacccctacgcggagtacctgaggcagccgcagtgcagcccgctggcggcggcgccctactacgccgggtgtgggcagacgagcgccatgtaccagccgctccggcaacagtgctgccagcagcagatgaggatgatggacgtgcagtccgtcgcgcagagctgcagatgatgatgcagcttgagcgtgccgctgccgccagcagcagcctgtacgagccagctctgatgcagcagcagcagcagctg

SEQ ID NO: 71001 - DNA, 252 bp, Zea mays
gttgcagcgaaccttgctgcttaccttcagcaacaacaatttcttccattcaatcaactagctggggtgaaccctgctgcttacttgcaggcacaacagctactaccattcaaccaacttgtcgggagccctgctgccatcttattgcagcaacagttgctgccattccgtctacaagttgttgcaaacattgctgctttcttgcaacaacaacaagtgctgccattttacccacaggttgtgggaaacatt

SEQ ID NO: 71002 - DNA, 252 bp, Zea mays
tacagcagcaacaattgctgccatacaaccagttctctttgatgaatcctgtcttgtcgaggcagcaacccatcgttggaggtgccatcttttaggtgactcagaggattaagattaattcagcacggtgcccctaataacttgctatcagatccaagtcgctgcagaagggagcaaacaaagggagatgaagctcagagtcgtgtgcaggaagctgtatgactatgtgcggtatgacctcaaggagatagc

SEQ ID NO: 71003 - DNA, 251 bp, Zea mays
atcgagttggattgggttcaaagttgggcttttggacagctgtggtgtgcacggcagctctagtgacttgtgaggaggaagggaggaagacagcggatccatggcgtcgaagcggatcctcaaggagctcaaggacctgcagaaggatcctcccacctcttgcagcgcaggccctgttgccgaagatatgttctactggcaggcgacgattatggggccatcagatagcccatacgctggtggcgtatttt

SEQ ID NO: 71004 - DNA, 257 bp, Zea mays
cttccagccgccgccgcgtccgcctcgccaagcgcagcagccgccgcagcacatcgctctctagatctcagccatggcggaggtggagcagcaacaggacacgccgaagctcttcaaccgctggaccttcgatgatgtccaggtgaacgacatctcgctgaacgactacctcgctgtgaacgcgacgaagcacgcgatgtacctgccgcacaccgcggggcgctactccaagaagcggttccgcaaggcgcagtgcc

SEQ ID NO: 71005 - DNA, 249 bp, Zea mays
  unsure (1)..(249): unsure at all n locations
tcagcattcaaaaacacaccaagcgaagcgcactagcaacgacctaacaccaatggctaccaagatattagccctccttgcgcttcttgcccttttggtgagcgcaacaaatgcgttcattattccacagtgctcacttgctcctagtgccagtattccacagttcctcccaccagttacttcaatgggcttcgaacatccagccgtgcaagcctacaggctacnctagcgctgcggcgagcgccttac

SEQ ID NO: 71006 - DNA, 265 bp, Zea mays
actcggctcgagtcagcattcaaaaacacaccaagcgaagcgcactagcaacgacctaacaccaatggctaccaagatattagccctccttgcgcttcttgcccttttggtgagcgcaacaaatgcgttcattattccacagtgctcacttgctcctagtgccagtattccacagttcctcccaccagttacttcaatgggcttcgaacatccagccgtgcaagcctacaggctacaactagcgcttgcggcgagcgccttacaa

SEQ ID NO: 71007 - DNA, 253 bp, Zea mays
ccagcaagcaacatagaaagtggaatccagtagcaacaacagagcaacaatggcgaccaagatattttccctccttatgctccttgctctttctgcatgtgttgctaacgcgacaattttccctcaatgctcacaagctcctatagcttcccttcttcccccataccttccatcaatgatagcttcagtatgtgaaaacccagctcttcagccctataggctccaacaagcaatcgcagcaagcaacatacct

SEQ ID NO: 71008 - DNA, 251 bp, Zea mays
aacacacctagcgaacgcactagcaacgacctaacaacaatggcttccaagacattatccctccttgcgcttcttgccctttttgtgagtgcaacaaatgcgttcattattccacaatgctcacttgctccgagtgccattattccacagttcctccctccagttacttcaatgggcttcgaacacccagctgtgcaagcctataggctacaacaagcgcttgcggcgagcgtcttagaacaaccaattgc

SEQ ID NO: 71009 - DNA, 255 bp, Zea mays
gcaagcaacatagaaagtagaatccattagcaacaatagagcaacaatggcgaccaagatattttccctccttatgctccttgctctttctacatgtgttgctaacgcgacaattttccctcaatgctcacaagctcctatagcttcccttcttcccccataccttccatcaattatagcttcagtatgtgaaaacccagctcttcaaccatataggcttcaacaagcaatcgcagcaagcaacatacctttatc

SEQ ID NO: 71010 - DNA, 249 bp, Zea mays
tttgagcattcagaaacacaccaagcgaagcacattagcaacaacctaacaacaatggctaccaagatattatccctccttgcgcttcttgcgctttttgcgagcgcaacaaatgcgttcattattccacaatgctcacttgctccaagttccattattacacagttcctcccaccagttacttcaatgggcttcgaacacccagctgtgcaagcctataggctacaacaagcaattgcggcgagcgtc

SEQ ID NO: 71011 - DNA, 250 bp, Zea mays
cggctcgagcaacaagcaacatagaaagtggaatccagtagcaacaacagagcaacaatggcgaccaagatattttccctccttatgctccttgctctttctgcatgtgttgctaacgcgacaattttccctcaatgctcacaagctcctatagcttcccttcttcccccataccttccatcaatgatagcttcagtatgtgaaaacccagctcttcagccctataggctccaacaagcaatcgcagcaa

SEQ ID NO: 71012 - DNA, 250 bp, Zea mays
cagcctagccattagctcatcgactccagattggcgaactcgacaccatgaaggtgctgatcgttgcccttgctctcctggcgctcgctgcgagcgccgcctccagtacaagcggcggctgtggctgccagacaccaccgtttcatctaccgcctccgttctatatgccgcctccgttctatctgccgccgcagcagcagccgcagccatggcaataccccactcaaccactgcagctaagcccgtgcca

SEQ ID NO: 71013 - DNA, 251 bp, Zea mays
tgtagttctgttcctccccactcactcctgcgcttcctcgccgcgcggttccttctccctgatcctcctttggcttcgcggttcatggcgatgtggagggccgccgctaggcagctggtcgaccgggcgctcggctcaagggccgcgcacacgtctacaggcagcaaaaagatagtcggggtgttctacaaggccggggagtatgccgacaagaaccccaacttcgtcggctgcgtcgagggtgcactcgg

SEQ ID NO: 71014 - DNA, 252 bp, Zea mays
caacctggggcctcaacgaccaagtggccgccggctggcggccaagagcggggaccgttcgctacgactcttccgccgcttcctcgacatgttcggcaacgtcgtgatggacatcccccacgcgctgttcgaagagaagcttgaagccatgaagaaagccaaggggctgaagaacgacaccgacctgaccgccaccgacctcaaagagctggtgggccagtacaaggacgtctacgtggaggtaagggagag

SEQ ID NO: 71015 - DNA, 247 bp, Zea mays
  unsure (1)..(247): unsure at all n locations
tattttcagcattcaaaaacacaccaagcgaacgnactagcaacgacctaacaccaatggctaccaagatattagccctccttgcgcttcttgcccttttagtgagcgcaacaaatgcgttcattattccacagtgctcacttgctcctagtgccattattccacagttcctcccaccagttacttcaatgggcttcgaacatccagccgtgcaagcctacaggctacaactagcgcttgcggcgag

SEQ ID NO: 71016 - DNA, 241 bp, Zea mays
attttgagcattcagaaacacaccaagcgaagcgcactagcaacaacctaacaacaatggctaccaagatattatccctccttgcgcttcttgcgctttttgcgagcgcaacaaatgcgtccattattccacaatgctcacttgctcctagttccattattccacagttcctcccaccagttacttcaatggccttcgaacacccagctgtgcaagcctataggctacaacaagcgattgg

SEQ ID NO: 71017 - DNA, 239 bp, Zea mays
ccaacatgcaacatagaaagtggaatccagtagcaacaacagagcaacaatggcgaccaagatattttccctccttatgctccttgctctttctgcatgtgttgctaacgcgacaattttccctcaatgctcacaagctcctatagtttcccttcttcccccataccttcgatctctgatagcttcagtatgtgaaaagccagctcttcagccctataggctccaacaagcaatcgcag

SEQ ID NO: 71018 - DNA, 135 bp, Zea mays
gttccttagggctggtcaaattgcgattttagatatgcgccgtgctgagattttggacaacgctgcacggcacattcaaggccgtttcagaacatttatcacacgcaaagaatttgtgaaaacaagggaggcttc

SEQ ID NO: 71019 - DNA, 210 bp, Zea mays
  unsure (1)..(210): unsure at all n locations
tgcaccaccaatgatgggttgttggtgccctcttttagatttattattgaactataactcataagatatctaaaagagggcaccaccactgatgggttgttggtagaacactgctgggtttgtcaaagcaagttggttgtgccctcttttagatttctactgagtnatagttcaataataaagttttttatctgatgtttgtggcttccc

SEQ ID NO: 71020 - DNA, 231 bp, Zea mays
gaaggaatccatgaggtcaaggccacagctggtgacacccatcttggtggtgcggactttgacaacaggatggtcaaccacttcgtccaggagttcaagaggaagaacaagaaggatatcactggcaaccccagggctctccggaggctgaggaccgcttgtgagagggcgaagaggactctgtcttccactgcccagaccacgattgagattgactcgctgtatgaggga

SEQ ID NO: 71021 - DNA, 83 bp, Zea mays
gatttcttatgagttatagttcaataataaagttttttgtctgatgtttgtggcttcccagaaataagaaagtacatttctag

SEQ ID NO: 71022 - DNA, 246 bp, Zea mays
taggagcttgtgagcattgtgggaaaacccaattgttcaaccctacaggatccaacaggcaatcgcaacaggcatcttaccattatcacccttgttcctccaacaaccgtcagccctattacagcagttacctttggtccatttggtggcacaaaacatcagggcacaacaactacaacaacttgtgctagcaaaccttgctgcatactctcagcaacatcagtttcttccattcaaccaactggt

SEQ ID NO: 71023 - DNA, 240 bp, Zea mays
gagaccaacaagcaacatagaaagtggaatccagtagcaacaatagagcaacaatggcgaccaagatattttccctccttatgctccttgctctttctacatgtgttgctaacgcgacaattttccctcaatgctcacaagctcctatagcttcccttcttcccccataccttccatcaattatagcttcaatatgtgaaaacccagctcttcaaccatataggcttcaacaagcaatcg

SEQ ID NO: 71024 - DNA, 235 bp, Zea mays
ccgcggtctgctcgttcgatctgtgcagcagatctgaggtcacgggcgaccgtgaagcagcttcaatcgtcggcatggcgctcgtattgcatagtggggctggaagcaagaatgccttcaaagcacttattgctgcagaatacagtgggatcaaggttgagttgaccaaggattttgagatgggtgtctccaacaagacccctgagtttcttaagatgaacccccgtgggaaggt

SEQ ID NO: 71025 - DNA, 124 bp, Zea mays
ctttatcgcccttgttgtttcaacaatcgccagccctatctttggtgcagtcattggtacaaaccatcagggcacaacagctgcagcaactcatgctacctctgatcaaccaagtagctctggc

SEQ ID NO: 71026 - DNA, 238 bp, Zea mays
attgagaccaactagcaacatagaaagcacaatagtgtaccaacaatggcagccaaaatattttgcttccttatgctccttggtctttctgcaagtgttgctaccgcaaccattttcccacaatgctcacaagctcctatagcttcccttcttcccccatacctctcaccagcggtgtcttcaatgtgtgaaaacccaattgttcaaccctacaggatccaacaggcaatcgcaacag

SEQ ID NO: 71027 - DNA, 235 bp, Zea mays
ctcgagccgcttatatatgtgcggtgatgccaagggaatggctagagatgtacacaaaatgcttcatacaatagtccaagagcagagatctttggatagctccaaaaccgagagctatgtaaagagcatgcagatggaaggagcacgagattagcgcgttgatgtacttagtactgtgaaatcaaactggaggaggctgcaattctgcattacacctacaaaaaattctcaaacc

SEQ ID NO: 71028 - DNA, 235 bp, Zea mays
attttgagcattcagaaacacaccaagcgaagcacattagcaacaacctaacaacaatggctaccaagatattatccctccttgcgcttcttgcgctttttgcgagcgcaacaaatgcgttcattattccacaatgctcacttgctccaagttccattattacacagttcctcccaccagttacttcaatgggcttcgaacacccagctgtgcaagcctataggctacaacaagc

SEQ ID NO: 71029 - DNA, 238 bp, Zea mays
acaatagtgtaccaacaatggcagccaaaatattttgcctccttatgctccttggtctttctgcaagtgctgctacggcgaccattttcccacaatgctcacaagctcctatagcttcccttcttcccccgtacctctcaccagcggtgtcttcggtatgtgaaaacccaattcttcaaccctataggatccaacaggcaatcgcagctggcatcttacctttatcacccttgttcct

SEQ ID NO: 71030 - DNA, 237 bp, Zea mays
caagcaacatagaaagtggaatccagtagcaacaacagagcaacaatggcgaccaagatattttccctccttatgctccttgctctttctgcatgtgttgctaacgcgacaattttccctcaatgctcacaagctcctatagcttcccttcttcccccataccttccatcaatgatagcttcagtatgtgaaaacccagctcttcagccctataggctccaacaagcaatcgcagca

SEQ ID NO: 71031 - DNA, 235 bp, Zea mays
ctagcaacatagaaagcacaatagtgtaccaacaatggcagcatcaatattttgcctccttatgctccttggtctttctgcaagtgctgctacggcgaccattcccacaatgctcacaagctcctatagcttcccttcttcccccgtacctctcaccagcggtgtcttcggtatgtgaaaacccaattcttcaaccctataggatccaacaggcaatcgcagctggcatcttacc

SEQ ID NO: 71032 - DNA, 235 bp, Zea mays
aactagcaacatagaaagcacaatagtgtaccaacaatggcagccaaaatattttgcttccttatgctccttggtctttctgcaagtgctgctaccgcaaccattttcccacaatgctcacaagctcctatagcttcctttcttcccccatactcctcaccagcggtgtcttcagtatgtgaaaacccaattcttcaaccctacaggatccaacaggcaatcgcagcaggcatct

SEQ ID NO: 71033 - DNA, 130 bp, Zea mays
gcaacagcaagtggcggaaacggtgcatctcttgcgtgcccctcattttcaaagtggagccaagggcggccccaggaagggtttccgtgctcaaggacggctccgtagtggtggaggtcggaggaatcga

SEQ ID NO: 71034 - DNA, 141 bp, Zea mays
gggtcttcagaccattagctttatctactccagagcgcagaagaacccgatcgacaccatgagggtgtagctcgttgccctcgctctcctggctctcgctgcgagcgccacctccacacaacatacgagcaaaagcctcat

SEQ ID NO: 71035 - DNA, 107 bp, Zea mays
  unsure (1)..(107): unsure at all n locations
ctgggtcttcagaccattagctttatctactccagagcgcagaagaactcgatcgacnacatgagggtggagctcgttgccctcgctctcctggctctcgctgcgag

SEQ ID NO: 71036 - DNA, 237 bp, Zea mays
cgaactagcaacatacatagtgaagtacactagcaacatcttagcaccaatggcagccaagatttttgccatccttgccctccttgctctttcagcaagcgttgctaccgcgactattattccacaatgctcacaacaatacctctctccggtgacagccgcgagatttgaatacccaactatacaatcctacaggctacaagaggccatcgcagcaagcatcttacggtcgttagc

SEQ ID NO: 71037 - DNA, 239 bp, Zea mays
  unsure (1)..(239): unsure at all n locations
ctccttcaagcagctatagctagcataattaactcatgggtgcatagagatatgccgccgacgacccatatctatgggtccctccccttgcannnnnnnnnnnnnnnnnnnnnnnnnnnnnnnnnnnaattattcctagtgtttgcttctcccttccttgacctttgcttggacccattgatagttacttattnngcatggagcacgtcatctcaatggaggagatcctcgggcccttc

SEQ ID NO: 71038 - DNA, 235 bp, Zea mays
ttctagctccatagctagcgcaatagtgtaccaacaatggcagccaaaatattttgcttccttatgcaccttggtctttctgcaagtgctgctaccgcaaccattttcccacaatgctcacaagctcctatagcttcctttcttcccccatacctctcaccagcggtgtcttcagtatgtgaaaacccaattcttcaaccctacaggatccaacaggcaatcgcagcaggcatct

SEQ ID NO: 71039 - DNA, 235 bp, Zea mays
ccaacaagcaacatagaaagtggaatacagtagcaaaaatagagcaacaatggcggccaagatattttccatccttatgctccttgctctttctgcatgtgttgctaacgcgaccatttttcctcaatactcacaagctcctatagctgcccttcttcccccataccttccatcaatgaccgctttagtatgtgaaaacccagcccttcaaccctacaggatccagcaagcaatc

SEQ ID NO: 71040 - DNA, 234 bp, Zea mays
ttttgagcattcagaaacacacctagcgaagcgcactagcaacgacctaacaacaatggctaccaagatattatccctctttgcgcttcttgccctttttgtgagcgcaacaaatgcgttcattattccacaatgctcacttgctcctagtgccattattccacagttcctccctccagttacttcaatgggcttcgaacacccagctgtgcaagcctacaggctacaacaagc

SEQ ID NO: 71041 - DNA, 232 bp, Zea mays
gcaacatagaaagcacaatagtgtaccaacaatggcagccaaaatattttgcttccttatgctccttggtctttctgcaagtgctgctaccgcaaccattttcccacaatgctcacaagctcctatagcttcctttcttcccccatacctctcaccagcggtgtcttcagtatgtgaaaacccaattcttcaaccctacaggatccaacaggcaatcgcagcaggcatctta

SEQ ID NO: 71042 - DNA, 233 bp, Zea mays
tagatctcgcgcgtggtgcaaagatgttgggacatcttcttatatatgctgtttcgtttatgtgatatggacaagtatgtgtagctgcttgcttgtgctagtgtaatgtagtgtagtggtggccagtggcacaacctaataagcgcatgaactaattgcttgcgtgtgtagttaagtaccgatcggtaattttatattgcgagtaaataaatggacctgtagtggtggagtaa

SEQ ID NO: 71043 - DNA, 141 bp, Zea mays
gcgaagtctagcttggcaaacgcacgggtggtattcaccatccacaatcttgaatttggagcgcatcatattggcaaagcaatgagatattgtgataaagcaacaactgtctctaatacatattcaaaggaagtgtcaggt

SEQ ID NO: 71044 - DNA, 233 bp, Zea mays
cagaaacacaccaagcgaagacattagcaacaacctaacaacaatggctaccaagatattatccctccttgcgcttctagcgctttttgcgagcgcaacaaatgcgttcattattccacaatgctcacttgcaccaagttccattattacacagttcctcccaccagttacttcaatgggcttcgaacacccagctgtgcaagcctataggctacaacaagcaattgcggcga

SEQ ID NO: 71045 - DNA, 233 bp, Zea mays
agaccagcaagcaacatagaaagtagaatccattagcaacaatagagcaacaatggcgaccaagatattttccctccttatgctccttgctctttctacatgtgttgctaacgcgacaattttccctcaatgctcacaagctcctatagcttcccttcttcccccataccttccatcaattatagcttcagtatgtgaaaacccagctcttcaaccatataggcttcaacaag

SEQ ID NO: 71046 - DNA, 233 bp, Zea mays
tgagaccaactagcaacatagaaagcacaatagtgtaccaacaatggcagccaaaatattttgcttccttatgctccttggtctttctgcaagtgctgctaccgcaaccattttcccacaatgctcacaagctcctatagcttcctttcttcccccatacctctcaccagcggtgtcttcagtatgtgaaaacccaattcttcaaccctacaggatccaacaggcaatcgcag

SEQ ID NO: 71047 - DNA, 103 bp, Zea mays
gaccaacaagcaacatagaaagtggaatacagtagcaacaatagagcaacaatggcggccaagatattttccatccttatgctccttgctctttctgcatgtg

SEQ ID NO: 71048 - DNA, 237 bp, Zea mays
gagaccaactagcaacatagaaagcacaatagtgtaccaacaatggcagccaaaatattttgcttccttatgctccttggtctttctgcaagtgctgctaccgcaaccattttcccacaatgctcacaagctcctatagcttcctttcttcccccatacctctcaccagcggtgtcttcagtatgtgaaaacccaattcttcaaccctacaggatccaacaggcaatcgcagcaggc

SEQ ID NO: 71049 - DNA, 233 bp, Zea mays
ctcgagccgctcgagccgctcgagccgccgcaagttgcccttccagcgcctcgtccgtgagctcgcgcacgacttcaagaccgactctccgcttccagtcctccgccgtcgccgcgctgcaggaggccgccgaggcctaccttgtggggctctttgaggacactaacctctgtgccatccacgccaagcgcgtcaccatcatgcccaaggacatccagctcgcgcgccgtatc

SEQ ID NO: 71050 - DNA, 232 bp, Zea mays
aacacaccaagcgaacacattagcaacaacctaacaacaatggctaccaagatattatccctccttgcgcttcttgcgctttttgcgagcgcaacaaatgcgttcattattccacaatgctcacttgctccaagttccattattacacagttcctcccaccagttacttcaatgggcttcgaacacccagctgtgcaagcctataggctacaacaagcaattgcggcgagcg

SEQ ID NO: 71051 - DNA, 230 bp, Zea mays
caacaagcaacatagaaagtggaatccagtagcaacaatagagcaacaatggcgaccaagatactttccctccttatgctccttgctctttctgcatgtgttgctaacgcgacaattttccctcaatgctcacaagctcctatagcttcccttcttcccccataccttccatcaatgatagcttcagtatgtgaaaacccagctcttcaaccctataggctccaacaagc

SEQ ID NO: 71052 - DNA, 128 bp, Zea mays
agcgccggcagtcgccgtcatcgatcgatcgccggaaaactaacccctaacgatgtctggagccggcgaggaggacaagaaccacgcggagggcggcgaccacatcaaccttaaggtcaagggacagg

SEQ ID NO: 71053 - DNA, 107 bp, Zea mays
agaccattagctttatctactccagagcgcagaagaacccgatcgacaccatgagggtgttgctcgttgccctcgctctcctggctctcgctgcgagggccacctcc

SEQ ID NO: 71054 - DNA, 109 bp, Zea mays
ctactatactatactctaggaagcaaggacaccaccgccatggcagccaagatgcttgcattgttcgctctcctagctctttgtgcaagcgccactagtgcgacccata

SEQ ID NO: 71055 - DNA, 235 bp, Zea mays
gcagatagctggctacccccagcaatttcttccattcaaccaactgacagctttgaactctcctgcttatttacagcagcaacaactactaccattcagccagctagctggtgtgagccctgctaccttcttgacacaaccacaattgttgccgttctaccagcacgctgcgcctaacgctggcaccctcttacaactgcaacaattgctgccattcaaccaacttgctttgaca

SEQ ID NO: 71056 - DNA, 68 bp, Zea mays
attgagaccaactagcaacatagaaagcacaatagtgtaccaacaatggcagcccaaatagtttggct

SEQ ID NO: 71057 - DNA, 249 bp, Zea mays
tcggaaatcggctcgagtcaaactgctgtttttgtcctttcatccctccaacaaattgaccctgttgcgggtcaggtagcagcacttgtactgtgccacacaagggaactggcttatcagatatgccacgaatttgagacgttcagcaaatatcttactgaagttaaagttgctgtcttctatggaggtgttcacatcaggaagcataaagatttgttgaagaatgaatgccctcatattgtggttggc

SEQ ID NO: 71058 - DNA, 107 bp, Zea mays
attagctttatctactccagagcgcagaagaacccgatcgacaccatgagggtgttgctcgttgccctcgctctcctggctctcgctgcgagcgccacctccacgca

SEQ ID NO: 71059 - DNA, 231 bp, Zea mays
ctagcaacatagaaagcacaatagtgtaccaacaatggcagccaaaatattttgcttccttatgctccttggtctttctgcaagttttgctaccgcaaccattttcccacaatgctcacaagctcctatagcttcccttcttcccccatacctctcaccagcggtgtcttcaatgtgtgaaaccccaattgttcaaccctacaggatccaacaggcaatcgcaacaggcat

SEQ ID NO: 71060 - DNA, 232 bp, Zea mays
cttgggataccctgacactggcggtcaggttgtgtacattctggatcaggtccgtgctttggagaatgagatgcttctgaggattaagcagcaaggccttgatatcactccgaagatcctcattgttaccaggctgttggcctgatgctgctgggactacgtgcggtcagcggctggagaaggtcattggtactgagcacacagacatcattcgcgttcccttcagaaatga

SEQ ID NO: 71061 - DNA, 228 bp, Zea mays
gaccaactagcaacatagaaagcacaatagtgtaccaacaatggcagccataatattttgcctccttatgctccttggtctttctgcaagtgctgctacggcgaccattttcccacaatgctcacaagctcctatagcttcccttcttcccccgtacctctcaccagcggtgtcttcggtatgtgaaaacccaattcttcaaccctataggatccaacaggcaatcgc

SEQ ID NO: 71062 - DNA, 231 bp, Zea mays
caacaagcaacatagaaagtggaatccagtagcaacaatagagcaacaatggcgaccaagatactttccctccttatgctccttgctctttctgcatgtgttgctaacgcgacaattttccctcaatgctcacaagctcctatagcttcccttcttcccccataccttccatcaatgatagcttcagtatgtgaaaacccagctcttcaaccctataggctccaacaagca

SEQ ID NO: 71063 - DNA, 230 bp, Zea mays
gaaggaatctttgaggtcaaggccacagctggtgacacccatcttggtggtgaggactttgacaacaggatggtcaaccacttcgtccaggagttcaagaggaagaacaagaaggatatcactggcaaccccagggctctccggaggctgaggaccgcttgtgagagggcgaagaggactctgtcttccactgcccagaccacgattgagattgactcgctgtatgaggg

SEQ ID NO: 71064 - DNA, 101 bp, Zea mays
atttagaccaactagcaacatagaaagcacaatagtgtaccaacaatggcagccaaaatattttgcctccttatgctccttggtatttctgcaagtgctgc

SEQ ID NO: 71065 - DNA, 271 bp, Zea mays
gcaacatagaaagcacaatagtgtaccaacaatggcagccaaaatattttgcctccttatgctccttggtctttctgcaagtgctgctacggcgaccattttcccgcaatgctcgcaagctcctatagcttcccttcttccccgtacctctcaccagcggtgtcttcggtatgtgaaaacccaattcttcaaccctacaggatccaacaggcaatcacagctggcatcttacctttatcacccttgttcctccaacaatcatcagccctat

SEQ ID NO: 71066 - DNA, 168 bp, Zea mays
gcaatccgaattctctgcgatttctctagatctcgaccacccctactagttttggttacctcctttcgttcgagagagcgtttctagtggcaatggcgaagagcgagggtccggcgatcgggatcgacctcggcaccacctactcgtgcgtcggcgtgtggcagcacg

SEQ ID NO: 71067 - DNA, 272 bp, Zea mays
gatgcttctgaggacagacaaagatttaatgcaattctcgaggagcttcaaattgaacagccaaagggagggattgcaagtagtgagtctgatgccttggcaatcgcctcagaagtaggttaccctgttgtggtccgtccatcatatgttcttggtggacgggcaatggagattgtgtacaacgacgaaaaactgatcaagtacctcgcaaccggtgtgcaagtagatccagaaaggcctgttttagtggacaaatatctaattgatgcagt

SEQ ID NO: 71068 - DNA, 144 bp, Zea mays
attgagaccaactagcaacatagaaagcacaatagtgtaccaacaatggcagccaaaatattttgcttccttatgctccttggtctttctgcaagtgctgctaccgcaaccattttcccacaatgctcacaagctcctatactt

SEQ ID NO: 71069 - DNA, 166 bp, Zea mays
attgagaccaactagcaacatagaaagcacaatagtgtaccaacaatggcagccaaaatattttgcctccttatgctccttggtctttctgcaagtgctgctacggcgaccattttcccacaatgctcacaagctcctatacttcccttcttcccctgtacctctc

SEQ ID NO: 71070 - DNA, 269 bp, Zea mays
cagaaacacacctagcgaagccactagcaacgacctaacaacaatggcttccaagacattatccctccttgcgcttcttgccctttttgtgagtgcaacaaatgcgttcattattccacaatgctcacttgctccgagtgcattattccacagttcctccctccagttacttcaatgggcttcgaacacccagctgtgcaagcctataggctacaacaagcgcttgcggcgagcgtcttagaacaaccaattgcccaattacaacaaca

SEQ ID NO: 71071 - DNA, 274 bp, Zea mays
attttgagcattcagaaacacacctagcgaaggcatctagcaacgacctaacaacaatggcttccaagacattatccctccttgcgcttcttgccctttttgtgagtgcaacaaatgcgttcattattccacaatgctcacttgctccgagtgccattattccacagttcctccctccagttacttcaatgggcttcgaacacccagctgtgcaagcctataggctacaacaagcgcttgcggcgagcgtcttagaacaaccaattgcccaatt

SEQ ID NO: 71072 - DNA, 271 bp, Zea mays
caacaagcaacatagaaagtggaatacagtagcaacaatagagcaacaatggcggccaagatattttccatccttatgctccttgctctttctgcatgtgttgctaacgcgaccatttttcctcaatactcacaagctccatagctgcccttcttcccccataccttccatcaatgaccgcttcagtttgtgaaaacccagcccttcaaccctacaggctccaacaagcaatcgcaacaagcaacttacctttatcacccctgttctttca

SEQ ID NO: 71073 - DNA, 265 bp, Zea mays
tctcgagcgaatcggctcgaggagaccaactagcaacatacatagcacaatagtgtatcaacaatggcagccaaaatagttttgcttccttatgctccttggtctttctgcaagtgttgctaccgcaaccattttcccacaagctcacaagctcctatagcttcccttcttcccccatacctctcaccagcggtgtcttcaatgtgtgaaaacccaattgttcaaccctacaggatccaacaggcaatcgcaagaggcatcttac

SEQ ID NO: 71074 - DNA, 274 bp, Zea mays
cggctcgagcggctcgagtagcaacatagaaagcacaatagtgtaccaacaatggcagccacaatattttgcttccttatgctccttggtctttctgcaagtgttgctaccgcaaccattttcccacaatgctcacaagctctatagcttcccttcttcccccatacctctcaccagcggtgtcttcaatgtgtgaaaccccaattgttcaaccctacaggatccaacaggcaatcgcaacaggcatcttaccattatcacccttgttcctcca

SEQ ID NO: 71075 - DNA, 274 bp, Zea mays
agaaagtggaatacagtagcaacaatagagcaacaatggcggccaagatattttccatccttatgctccttgctctttctgcatgtgttgctaacgcgaccatttttcctcaatactcacaagctcctatagctgcccttttcccccataccttccatcaatgaccgcttcagtttgtgaaaacccagcccttcaaccctacaggctccaacaagcaatcgcaacaagcaacttacctttatcacccctgttctttcaacaatcgccagcccta

SEQ ID NO: 71076 - DNA, 109 bp, Zea mays
caactagcaacatagaaagcacaatagtgtaccaacaatggcagccaaaatattttgcctccttatgctccttggtctttctgcaagtgctgctacggcgaccattttc

SEQ ID NO: 71077 - DNA, 99 bp, Zea mays
agtgagggaacctggtaaggattggttttgtcgaaataccgtgggagagggggtgataaggacggtggggggtttctatgttgaagtcgtggtcatgga

SEQ ID NO: 71078 - DNA, 265 bp, Zea mays
ccaacaagcaacatagaaagtggaatacagtagcaacaatagagcaacaatggcggccaagatattttccatccttatgctccttgctctttctgcatgtgttgctaacgcgaccatttttcctcaatactcacaagctcctatagctgcccttcttcccccataccttccatcaatgaccgcttcagtttgtgaaaacccagcccttcaccctacaggctccacaagcaatcgcaacaagcaacttacctttatcaccctgttc

SEQ ID NO: 71079 - DNA, 99 bp, Zea mays
caacaagcaacatagaaagtggaatccagtagcaacaatagagcaacaatggcgaccaagatactttccctccttatgctccttgctctttctgcatgt

SEQ ID NO: 71080 - DNA, 164 bp, Zea mays
ccaactagcaacatagaaagcacaatagtgtaccaacaatggcagccaaaatattttgcttccttatgctccttggtctttctgcaagtgttgctaccgcaaccattttcccacaatgctcacaagctcctatagcttccttcttcccccatacctctcaccag

SEQ ID NO: 71081 - DNA, 96 bp, Zea mays
attgagaccaactagcaacatagaaagcacaatagtgtaccaacaatggcagccaaaatattttgctctccttatgctccttggtctttctgcaag

SEQ ID NO: 71082 - DNA, 200 bp, Zea mays
tcagcattcaaaaacacaccaagcgaagcgcactagcaacgacctaacaccaatggctaccaagatattagccctccttgcgcttcttgcccttttagtgagcgcaacaaatgcgttcattattccacagtgctcacttctactagtgccattattccacagttcctcccaccagttacttcaatgggcttcgaacatcc

SEQ ID NO: 71083 - DNA, 243 bp, Zea mays
atttataccaactaccaacatacatagtgaagtacactagcaacatcttagcaccaatggcagccaagatttttgcgctccttgccctccttgctctttcagcaagtgttgctaccgcgactattattccacaatgctcaaacaatacctctctccagtgatagccgcgagatttgaatacccatctatacaatcctacaggctacaagaggccatcacagcaagcatcttacggtcgttagc

SEQ ID NO: 71084 - DNA, 277 bp, Zea mays
attttgagcattcagaaacacaccaagcgaacacgattagcaacaacctaacaacaatggctaccaagatattatccctccttgcgcttcttgcgctttttgcgagcgcaacaaatgcgttcattattccacaatgctcactgctccaagttccattattacacagttcctcccaccagttacttcaatgggcttcgaacacccagctgtgcaagcctataggctacaacaagcaattgcggcgtgcgtcttacaacaaccaatttcccagttgcaa

SEQ ID NO: 71085 - DNA, 100 bp, Zea mays
gagaccaacaagcaacatagaaagtggaatccagtagcaacaatagagcaacaatggcgaccaagatattttccctccttatgctccttgctctttctac

SEQ ID NO: 71086 - DNA, 120 bp, Zea mays
gttcggagcgcacacacacacaaccagatctcccccaaatccacccgtcggcacctctgcttcaagatgcagatctttgtgaaaaccctgactggcaagactatcaccctcgaggtggag

SEQ ID NO: 71087 - DNA, 91 bp, Zea mays
caacaagcaacatagaaagtggaatccagtagcaacaatagagcaacaatggcgaccaagatactttccctccttatgctccttgctcttt

SEQ ID NO: 71088 - DNA, 107 bp, Zea mays
gagaccaactagcaacatagaaagcacaatagtgtaccaacaatggcagccaaaatattttgcttccttatgctccttggtctttctgcaagtgttgctaccgcaac

SEQ ID NO: 71089 - DNA, 174 bp, Zea mays
gaaggaagcacggtttgctgcagctagctggctaaatggtagtagtatttgctgctgcaaataagcagcggggttcagtgcggctaaccccgcaaccctcttacaactacaacaattgttgccctttgtgcaacttctttgacagaccgagcggcctcctaccaacaacacatc

SEQ ID NO: 71090 - DNA, 267 bp, Zea mays
caacaatgtttgctgttatgaaagacacagactatgcggccaagccaacattcattgataactttttcactgattggagaaaagttcttggtaaaaatcatattattaagaacttcgagctttgtgatttcacacaatatatgactggcacctcagagagaaggagaggaagaagcagatgacaacagaggagaaaaaaacattgcgggaagacaaattgaaacaagaggagaagtaatggtgggctgttgtagatggtgttaaaga

SEQ ID NO: 71091 - DNA, 106 bp, Zea mays
caaggacagcactttgatcatgcagctccttcgtgataacttgaccctatggacctctgacatctcggaggaccctgctgaagagattagggaggcgcccaagcgg

SEQ ID NO: 71092 - DNA, 168 bp, Zea mays
  unsure (1)..(168): unsure at all n locations
atcactcncgaagatcctcattgttaccaggctgttgcctgatgctgctgggactacgtgcggtcagcggctggagaaggtcattggtactgagcacacagacatcattcgcgttccgttcagaaatgagaatggcatcctccgcaagtggatctctcgttttgatgt

SEQ ID NO: 71093 - DNA, 101 bp, Zea mays
ctcgagccgatttgcagcagcaaatactactgccatttagcgagctagctgcagcaagtcgtgcttccttcttgacacagcaacagttgctgcctttctac

SEQ ID NO: 71094 - DNA, 95 bp, Zea mays
caactagcaacatagaaagcacaatagtgtaccaacaatggcagccaaaatattttgcctccttatgctccttggtctttctgcaagtgctgcta

SEQ ID NO: 71095 - DNA, 137 bp, Zea mays
aacacaccaagcgaagacattagcaacaacctaacaacaatggctaccaagatattatccctccttgcgcttcttgcgctttttgcgagcgcaacaaatgcgttcattattccacaatgctcacttgctccaagtcc

SEQ ID NO: 71096 - DNA, 117 bp, Zea mays
gtatttagccagctagctgcagcaaaccgtgcttccttcttgacacagcaacagttgctgcctttctaccagcagtttgcggctaaccccgcaaccctcttacaactacaacaattg

SEQ ID NO: 71097 - DNA, 264 bp, Zea mays
ttgagaccaactagcaacatagaaagcacaatagtgtaccaacaatggcagccaaaatattttgcttccttatgctccttggtctttctgcaagtgctgctaccgcaaccattttcccacaatgctcacaagctctatagcttcctttcttcccccatacctctcaccagcggtgtcttcagtatgtgaaaacccaattcttcaaccctacaggatccaacaggcaatcgcagcaggcatcttacctttatcacccttgttcct

SEQ ID NO: 71098 - DNA, 268 bp, Zea mays
attgagaccaactagcaacatagaaagcacaatagtgtaccaacaatggcagccaaaatattttgcctccttatgctccttggtctttctgcaagtgctgctacggcgaccattttcccgcaatgctcgcaagctcctatagcttcccttcttcccccgtacctctcaccagcggtgtcttcgttatgtgaaaacccaattcttcaaccctacaggatccaacaggcaatcgcagctggcatcttacctttatcacccttgttcctcc

SEQ ID NO: 71099 - DNA, 220 bp, Zea mays
agcattcagaaacacacctagcgaaggcatctagcaacgacctaacaacaatggcttccaagacattatccctccttgcgcttcttgccctttttgtgagtgcaacaaatgcgttcattattccacaatgctcactgctccgagtgccattattccacagttcctccctccagttacttcaatgggcttcgaacacccagctgtgcaagcctataggcta

SEQ ID NO: 71100 - DNA, 153 bp, Zea mays
attttgagcattcagaaacacaccaagcgaagacattagcaacaacctaacaacaatggctaccaagatattatccctccttgcgcttcttgcgctttttgcgagcgcaacaaatgcgttcattattccacaatgctcacttgctccaagttc

SEQ ID NO: 71101 - DNA, 263 bp, Zea mays
gctcgagcggctcgagcaactagcaacatagaaagcacaatagtgtaccaacaatggcagccaaaatattttgcctccttatgctccttggtctttctgcaagtgctgctacggcgaccattttcccgcaatgctgcaagctcctatagcttcccttcttcccccgtacctctcaccagcggtgtcttcggtatgtgaaaacccaattcttcaaccctacaggatccaacaggcaatcgcagctggcatcttacctttatcac

SEQ ID NO: 71102 - DNA, 115 bp, Zea mays
ttcagaaacacaccaagcgaagcgcagtagcaacaacctaacaacaatggctaccaagatattatccctccttgcgcttcttgcgctttttgcgagcgcaacaaatgcgtccatt

SEQ ID NO: 71103 - DNA, 271 bp, Zea mays
ctttggtgcagtcattggtacaaaccatcagggcacaacagctgcagcaactcgtgctacctgtgatcaaccaagtagctctggcaaacctttctccctactctcagcaacaacaatttcttccattcaaccaactgtctacactgaaccctgctgcttatttgcagcaacaactattaccatttagccagctagctactgcctactctcagcaacaacaacttcttccatttaaccaattggccgcactgaaccccgctgcttatttgca

SEQ ID NO: 71104 - DNA, 181 bp, Zea mays
gtgtttactacccgtatacggaaaccgacaagagactcactgccttccatcctgaaatcgaggagctcatctacagcgacgtcgagaactccgagcacaagttcgtgctgaaggacaagaagaagccgatcatcttctcgatggcgcgtctcgaccgcgtgaagaacatgacaggcctggt

SEQ ID NO: 71105 - DNA, 92 bp, Zea mays
ctcgagccgattaagaccaactagcaacatagaaagcacaatagtgtaccaacaatggcatccagaatattttgcttccttatgctccttgg

SEQ ID NO: 71106 - DNA, 226 bp, Zea mays
gaaacacacctagcgaaggcactagcaacgacctaacaacaatggcttccaagacattatccctccttgcgcttcttgccctttttgtgagtgcaacaaatgcgttcattattccacaatgctcacttgcccgagtgccattattccacagttcctccctccagttacttcaatgggcttcgaacacccagctgtgcaagcctataggctacaacaagcgcttgcg

SEQ ID NO: 71107 - DNA, 114 bp, Zea mays
ccaagcgaaggcactagcaacgacctaacaacaatggctaccaagatattagccctccttgcgcttcttgccctttttgtgagcgcaacaaatgcgttcattattccacaatgc

SEQ ID NO: 71108 - DNA, 270 bp, Zea mays
gcttcttgcgctttttgcgagcgcaacaaatgcgttcattattccacaatgctcacttgctccaagttccattattacacagttcctcacaccagttacttcaatgggcttcgaacacccagctgtgcaagcctataggctacaacaagcaattgcggcgagcgtcttacaacaaccaatttcccagttgcaacaactatccttggcacatctaacaatacaaaccatcgcaacgcaacagcaacaacaattcctacagcactgagccac

SEQ ID NO: 71109 - DNA, 265 bp, Zea mays
gcagacccttctgttttcttgatgggagaagaggttggcgagtaccaaggtgcatacaagatatccaagggtttgcttgacaagtatggcccggatagggttctcgatactccgatcactgaggcgggcttcactggcattggtgttggtgccgcttaccatggtcttcgacctattgtagagttcatgacatttaacttttcgatgcaggcaattgatcacataattaattcagctgccaagtcgaactactgtctgctgggca

SEQ ID NO: 71110 - DNA, 266 bp, Zea mays
gagaccaactagcaacatagaaagcacaatagtgtaccaacaatggcagccaaaatattttgcctccttatgctccttggtctttctgcaagtgctgctacggcgaccattttcccgcaatgctcgcaagctcctatagcttcccttcttcccccgtacctctcaccagcggtgtcttcggtatgtgaaaacccaattcttcaaccctacaggatccaacaggcaatcacagctggcatcttacctttatcaccttgttcctccaa

SEQ ID NO: 71111 - DNA, 265 bp, Zea mays
gttgctgggcttagtgttcgggatcctttcctgttaccacaggaaaagaaggatttggcaggaacagcaaaagctagattctcagcaaaggattatagtgatcatatggcccttgttcgggcttatgaaggatggaaggatgcagagagagaagggtctgcttatgaatactgctggagaaatttcctttcttctcaaacactacaagccattcactctctccggaagcaattcagctatattttgaaggattcggtttgataga

SEQ ID NO: 71112 - DNA, 262 bp, Zea mays
ctcgagccgctcgagccgagcaccggtaccaggcgatcttcggcttggtcctccagtccatcctgcagcagcagccgcaaagcgccaggtcgcggggctgttggcggcgcagatagcgcacaactgacggcgatgtgcggcctgcagcagccgactccatgcccctacgctgctgccggcggtgtcccccactgaagaaactatgtgctgtagtatagccgctggctagctagctagttgagtcatttagcgcgatgattga

SEQ ID NO: 71113 - DNA, 267 bp, Zea mays
aagaacttccagctcgtcgcctctgttgatccttccctaaacatccccgcagcggagcaggagaaggtgatcctccagtttgggaagataggtaaggatatattcaccatggactaccggtacccactctcggcgttccaggcctttgcgatctgcctgaccagcttcgacactaaaccggcctgcgaatgattgacggtagtttaaaatcccgggtggtggagtcttgtgtacgtccgtgttcttccagggcgatgtaaattcttt

SEQ ID NO: 71114 - DNA, 264 bp, Zea mays
agaccaactagcaacatagaaagcacaatagtgtaccaacaatggcagctaaaatattttgcctccttatgctccttggtctttctgcaagtgctgctacggcgaccattttcccacaatgctcacaagctcctatagcttcccttcttcccccgtacctctcaccaacggtgtcttcggtatgtgaaaacccaattcttcaaccctacaggatccaacaggcaatcgcagctggcatcttacctttatcaccttgttcctcca

SEQ ID NO: 71115 - DNA, 269 bp, Zea mays
gatacgaactagcaacatacatagtgaagtacactagcaacatcttagcaccaatggcagccaagatttttgccatccttgccctccttgctctttcagcaagcgttgctaccgcgactattattccacaatgctcacaacaatacctctctccggtgacagccgcgagatttgaatacccaactatacaatcctacaggctacaagaggccatcgcagcaagcatcttacggtcgttagcattgaccgtccaacaccatatgccctat

SEQ ID NO: 71116 - DNA, 266 bp, Zea mays
attgagaccaacaagcaacatagaaagtggaatccagtagcaacaacagagcaacaatggcgaccaagatattttccctccttatgctccttgctctttctgcatgtgttgctaacgcgacaattttccctcaatgctcacaagctcctatagcttcccttcttcccccataccttccatcaatgatagcttcagtatgtgaaaacccagctcttcagccctataggctccaacaagcaatcgcagcaagcaaatacctttatcac

SEQ ID NO: 71117 - DNA, 80 bp, Zea mays
cagaccattagctttatctactccagagcgcagaagaacccgatcgacaccatgagggtgttgctcgtagcgctcgctct

SEQ ID NO: 71118 - DNA, 265 bp, Zea mays
tagaaagcacaatagtgtaccaacaatggcagccaaaatattttgcctccttatgctccttggtctttctgcaagtgctgctacggcgaccattttcccgcaatgctcgcaagctcctatagcttcccttcttcccccgtacctctcaccagcggtgtcttcggtatgtgaaaacccaattcttcaaccctacaggatccaacaggcaatcacagctggcatcttacctttatcacccttgttcctccaacatcatcagccctat

SEQ ID NO: 71119 - DNA, 262 bp, Zea mays
ttcagaaacacacctagcgaacgcactagcaacgacctaacaacaatggcttccaagacattatccctccttgcgcttcttgccctttttgtgagtgcaacaaatgcgttcattattccacaatgctcacttgctccgagtgccattattccacagttcctccctccagttacttcaatgggcttcgaacacccagctgtgcaagcctataggctacaacaagcgcttgcggcgagcgtcttagaacaaccattgcccaatt

SEQ ID NO: 71120 - DNA, 267 bp, Zea mays
tgagcattcagaaacacacctagcgaagcgcactagcaacgacctaacaacaatggcttccaagacattatccctccttgcgcttcttgccctttttgtgagtgcaacaaatgcgttcattattccacaatgctcacttgctccgagtgccattattccacagttcctccctccagttacttcaatgggctacgaacacccagctgtgcaagcctataggctacaacaagcgcttgcggcgagcgtcttagaacaccaattgcccaa

SEQ ID NO: 71121 - DNA, 263 bp, Zea mays
ccaactagcaacatagaaagcacaatagtgtaccaacaatggcagccaaaatattttgcctccttatgctccttggtctttctgcaagtgctgctacggcgaccattttcccgcaatgctcgcaagctcctatagcttcccttcttcccccgtacctctcaccagcggtgtcttcggtatgtgaaaacccaattcttcaaccctacaggatccaacaggcaatcacagctggcatcttacctttatcaccctgttcctccaac

SEQ ID NO: 71122 - DNA, 264 bp, Zea mays
gagaccaacaagcaacatagaaagtggaatacagtagcaacaatagagcaacaatggcggccaagatattttccatccttatgctccttgctctttctgcatgtgttgctaacgcgaccatttttcctcaatactcacaagctcctatagctgcccttcttcccccataccttccatcaatgaccgcttcagtttgtgaaaacccagcccttcaaccctacaggctccaacaagcaatcgcaacaagcaacttcctttatcacc

SEQ ID NO: 71123 - DNA, 265 bp, Zea mays
ctcgagccgattcggctcgagattttcagcattcaaaaacacaacaagcgaacgcactagtcaacgacctaacaccaatagctaccaagatattagccctccttgcgcttcttgcccttttagtgagcgcaacaaatgcgttcattattccacagtgctcacttgctcctagtgccagtattccacagttcctcccaccagttacttcaatgggcttcgaacatccagccgtgcaagcctacaggctacaactagcgcttgcggc

SEQ ID NO: 71124 - DNA, 271 bp, Zea mays
tgcatgctcattggcttctatagcatctcttcttcccctcataccttccatcaattatagcttcaatatgtgaaaacccagctcttcaaccatataggcttcaacaagcaatcgcagcaagcaacatacctttatcgcccttgttgtttcaacaatcgccagccctatctttggtgcagtcattggtacaaaccatcagggcacaacagctgcagcaactcgtgctacctctgatcaaccaagtagctctggcaaaccttctcgctactct

SEQ ID NO: 71125 - DNA, 265 bp, Zea mays
caagcaacatagaaagtggaatacagtagcaaaaatagagcaacaatggcggtcaagatattttccatccttatgctccttgctctttctgcatgtgttgctaacgcgaccatttatcctcgatactcacaagctcctatagatgcgcttcttccgccataccttccatcaatgaccgactaagtatgtgaaaaagcagcgcttctacactacaggatccagcaagcattcggaacaagcaacttacgcttacacaccggttctt

SEQ ID NO: 71126 - DNA, 245 bp, Zea mays
gaccaacaagcaacatagaaagtggaatacagtagcaacaatagatcaacaatggcggccaagatagtttccatccttatgctccttggtctttcggcatgtgttgctagcgcgatcatgtttgctcaatactcacaagctcctatagctgcccttcttcgcccataccttccatcaatgaccgcttcagtttgtgaaaacccagcccttcatccctacatgctccattcagctatcgcaactag

SEQ ID NO: 71127 - DNA, 263 bp, Zea mays
gagcattcagaaacacaccaagcgaagcgcactagcaacgacctaacaacaatggctaccaagatattagccctccttgcgcttcttgccctttttgtgagcgcaacaaatgcgttcattattccacaatgctcacttgctcctagtgccattattccacagttcctcccaccagttacttcaatgggcttcgaacacctagctgtgcaagccaacatgcaacaacaagcgcttgcggcgagcgtcttacacaaccaattgcc

SEQ ID NO: 71128 - DNA, 265 bp, Zea mays
gcaacatagaaagtggaatccagtagcaacaatagagcaacaatggcgaccaagatattttccctccttatgctccttgctctttctacatgtgttgctaacgcgacaattttccctcaatgctcacaagctcctatagcttcccttcttcccccataccttccatcaattatagcaacaatatgtgaaaacccagctcttcaaccatataggcttcaacaagcaatcgcagcaagcaacatacctttatcgccttgttgtttca

SEQ ID NO: 71129 - DNA, 264 bp, Zea mays
caactagcaacatagacagcacaatagtgtaccaacaatggcagccacgatattttgcctccttatgctccttggtctttctgcaagtgctgctacggcgaccattttcccgcaatgctcggaagctcctatagcttcgcttcttcgctcgtacctctcaccagcggtgtcttcggtatgtgaaaacccaattcttcaacgctacaggatccaacaggcaatcacagctggcatcttagctttatcagcctgttcctccaacaa

SEQ ID NO: 71130 - DNA, 260 bp, Zea mays
caaggacagcactttgatcgagcagctccttcgtgataacttgaccctatggacctctgacatctcggaggaccctgctgaagagattagggaggcgcccaagcgggactcgagtgaggggcagtaaagccggctttatgtgcctagaaactagtagctagtgtttgctgctgtcgaatgacactatgcaatgtgatctggaacctggtttcttgggtgcgacgcttgtagccgtgttatgactgtcgccgtaaaatttg

SEQ ID NO: 71131 - DNA, 263 bp, Zea mays
gtgtcgtaactggtgagggactgagggtctcggagtggattgatttgggattctgttcgaagatttgcggaggggggcaatggcgaccgcggggaaggtgatcaagtgcaaagctgcggtggcatgggaggccggcaagccactgtcgatcgaggaggtggaggtagcgcctccgcaggccatggaggtgcgcgtcaagatcctcttcacctcgctctgccacaccgacgtctacttctgggaggccaagggcagactcccgt

SEQ ID NO: 71132 - DNA, 263 bp, Zea mays
ttgagaccaacaagcaacatagaaagtggaatccagtagcaacaacagagcaacaatggcgaccaagatattttccctccttatgctccttgctctttctgcatgtgttgctaacgcgacaattttccctcaatgctcacaagctcctatagcttcccttcttcccccataccttccatcaatgatagcttcagtatgtgaaaacccagctcttcagccctataggctccaacaagcaatcgcagcaagcaacatacctttat

SEQ ID NO: 71133 - DNA, 260 bp, Zea mays
ccaacatacatagtgaagtacactagcaacatcttagcaccaatggcagccaagatttttgcgctccttgccctccttgctctttcagcaagtgttgctaccgcgactattattccacaatgctcacaacaatacctctctccagtgatagccgcgagatttgaatacccatctatacaatcctacaggctacaagaggccatcacagcaagcatcttacggtcgttagcattgaccgtccaacaacatatgccctattg

SEQ ID NO: 71134 - DNA, 259 bp, Zea mays
  unsure (1)..(259): unsure at all n locations
tttcagcattcaaaaacacaccaagcgaaggngactagcaacgtcctaacaccaatggctaccaagatattagccctccttgcgcttcttgcccttttagtgagcgcaacaaatgcgttcattattccacagtgctcacttgctcctagtgccattattccacagttcctcccaccagttacttcaatgggcttcgaacatccagccgtgcaagcctacaggctacaactagcgcttgcggcgagcgcttacaacaacc

SEQ ID NO: 71135 - DNA, 264 bp, Zea mays
aagcggcacgcgctcgagccgaatcggctcgagcagaaacacacctagcgacgcgcactagcaccgtcctaaaaccaatggcttccaagacattatccctacttgcgcttcttgccctttttgtgagtgcaacaaatgcgttcattattccacaatgctcacttgctccgagtgccattattccacagttcctccctccagttacttcaatgggcttcgaacacccagctgtgcaagcctataggctacaacagcgcttgcggc

SEQ ID NO: 71136 - DNA, 263 bp, Zea mays
gcaacatagaaagcacaatagtgtaccaacaatggcagccaaaatattttgcttccttatgctccttggtctttctgcaagtgttgctaccgcaaccattttcccacaatgctcacaagctcctatagcttcccttcttcccccatacctctcaccagcggtgtcttcaatgtgtgaaaacccaattgttcaaccctacaggatcctacaggcaatcgcaacaggcatcttaccattatcacccttgttctccaacaaccgtc

SEQ ID NO: 71137 - DNA, 262 bp, Zea mays
gaccaactagcaacatagaaagcacaatagtgtaccaacaatggcagccaaaatattttgcttccttatgctccttggtctttctgcaagtgttgctaccgcaaccattttcccacaatgctcacaagctcctatagcttcccttcttcccccatacctctcaccagcggtgtcttcagctgtgttaaccccaattgttcaaccctacaggatccaacaggcaatcgcaacaggcatcttaccattatacccttgttcctcc

SEQ ID NO: 71138 - DNA, 295 bp, Zea mays
gcacgtacgcgtacgcaagatccggctccagctcgaggtggcattatcccacagttcctccctccagttacttcaatgggcttcgaacacccagctgtgcaagcctataggctacaacaagcgcttgcggcgagcgtcttagaacaaccaattgcccaattacaacaacaatccttggcacatctaaccatacaaaccatcgcaacgcagcagcaacaagcactgagccacctagccgtggtgaaccctatcgcctacttgcaacaacagctgcttgcatccaaccacttgcttt

SEQ ID NO: 71139 - DNA, 263 bp, Zea mays
agcttcccttcttcccccatacctctcaccagcggtgtcttcaatgtgtgaaaccccaattgttcaaccctacaggatccaacatgcaatcgcaacaggcatcttaccattatcacccttgttcctcctacaaccgttagctctattagatgacagccgcgagatttgaatacccaactatacaatccttcaggctacaagaggccatcgcagcaagcatcttacggtcgttagcattgaccgtccaacaccatatgccctat

SEQ ID NO: 71140 - DNA, 257 bp, Zea mays
attttcagcattcaaaaacacaccaagcgaacgcagctagcaacgacctaacaccaatggctaccaagatattagccctccttgcgcttcttgcccttttagtgagcgcaacaaatgcgttcattattccacagtgctcacttgctcctagtgccagtattccacagttcctcccaccagttacttcaatgggcttcgaacatccagccgtgcaagcctacaggctacaactagcgcttgcggcgagcgcttacaac

SEQ ID NO: 71141 - DNA, 260 bp, Zea mays
gtcagcctagcaattagctcatcgactccagattggagaactcgacaccatgaaggtgctgatcgttgcccttgctctcctggcgctcgctgcgagcgccgcctccagtacaagcggcggctgtggctgccagacaccaccgtttcatctaccgcctccgttctatatgccgcctccgttctatctgccgccgcagcagcagccgcagccatggcaataccccactcaaccaccgcagctaagcctggccagcagttcgg

SEQ ID NO: 71142 - DNA, 259 bp, Zea mays
tagaaagtggaatccagtagcaacaatagagcaacaatggcgaccaagatattttccctccttatgctccttgctctttctacatgtgttgctaacgcgacaattttccctcaatgctcacaagctcctatagcttcccttcttcccccataccttccatcaattatagcttcaatatgtgaaaacccagctcttcaaccatataggcttcaacaagcaatcgcagcaagcaacatacctttatcgccttgttgtttca

SEQ ID NO: 71143 - DNA, 259 bp, Zea mays
tgggcccagatggctttccttccctgattcctgcacttcgctggtctccttgaatttcgcttgcatcaaaggggaggtgaattctggtgcgttggagagacttgttgctaggtctccaaatctacgcagtttgaggttgaatcgttctgtttcagtagacacactctcaaagatactattgcgagccccaaatttggaagacttggggacaggtaatctgacagatgagttccaagctgagtcctatccaggcttacta

SEQ ID NO: 71144 - DNA, 72 bp, Zea mays
tgggtcttcagaccattagctttatctactccagatcgcagaagaacccgatcgacaccatgagggtgttgc

SEQ ID NO: 71145 - DNA, 252 bp, Zea mays
tctcgagccgattcggctcgacggctcgaggagaccaacaagcaacatagaaagtggaatcacactagcaacaacagagcaagtatggcgagcaagatattttccctccttatgctccttgctctttctgcatgtgttgctaacgcgacaattttccctcaatgctcacaagctcctatagcttcccttcttcccccataccttccatcaatgatagcttcagtatgtgaaaacccagctcttcagcctata

SEQ ID NO: 71146 - DNA, 246 bp, Zea mays
attttgagcattcagaaacacacctagcgaaggcatctagcaacgacctaacaacaatggcttctaagacattatccctccttgcgcttcttgccctttcttgtgagtgcaacaaatgcgatcattattccacaatgctcacttgctccgagtgctattaatccacagttcctccatccagttatttcaatgggcttcgatcatccagctgtgcaagactatcagctacaaccagcgcttgaggag

SEQ ID NO: 71147 - DNA, 259 bp, Zea mays
agaccaactagcaacatagaaagcacaatagtgtaccaacaatggcagccataatattttgcttccttatgctccttggtctttctgcaagtgctgctaccgcaaccattttcccacaatgctcacaagctcctatagcttcctttcttcccccatacctctcaccagcggtgtcttcagtatgtgaaaacccaattcttcaaccctacaggatccaacaggcaatcgcagcaggcatcttaccttatcacccttgttc

SEQ ID NO: 71148 - DNA, 259 bp, Zea mays
catagaaagcacaatagtgtaccaacaatggcagccaaaatattttgcctccttatgctccttggtctttctgcaagtgctgctacggcgaccattttcccgcaatgctcgcaagctcctatagcttcccttcttcccccgtacctctcaccagcggtgtcttcggtatgtgaaaacccaattcttcaaccctacaggatccaacaggcaatcgcagctggcatcttacctttatcacccttgttctccaacaatcatc

SEQ ID NO: 71149 - DNA, 255 bp, Zea mays
caacatagaaagcacaatagtgtaccaacaatggcagctaagctattttgcctccttatgctccttggtctttctgcaagtgctgctacggcgaccattttcccacaatgctcacaagctcctatagcttcccttcttcccccgtacctctcaccaacggtgtcttcggtatgtgaaaacccaattcttcaaccctacaggatccaacaggcaatcgcagctggcatcttacctttatcacccggttcctccaac

SEQ ID NO: 71150 - DNA, 257 bp, Zea mays
ctcgagccgtgggtattgaaatcctacatggtacaagaggccatccaagcaagcatcttacggtcattagcattaaccctccaacaaccatatgctctattgcaacagccatccttagtgcatctgtatctccaaagaatcgcggcacaacaactacaacaacagttgctaccaacaatcaatcaagtagttgcagcgaaccttgctgcttacctccagcaacaacagtttcttccattcaatcactagctggggtg

SEQ ID NO: 71151 - DNA, 257 bp, Zea mays
ctcgagccgcaactagcaacatagaaagcacaatagtgtaccaacaatggcagccaaaatattttgcctccttatgctccttggtctttctgcaagtgctgctacggcgaccattttcccgcaatgctcgcaagctcctatagcttcccttcttcccccgtacctctcaccagcggtgtcttcggtatgtgaaaacccaattcttcaaccctacaggatccaacaggcaatcacagctggcatctacctttatcacc

SEQ ID NO: 71152 - DNA, 258 bp, Zea mays
caacaacaacatcaatgtgaaggccaacaacaacatcaccaacaatcacaaggccatgtgcaacaacacgaacagagccatgagcaacaccaaggacagagccatgagcaacaacatcaacaacaattccagggtcatgacaagcagcaacaaccacaacagcctcaatatcagcagggccaggaaaaatcacaacagcaacaatgtcattgccaggagcagcaacagactacaaggtgcagctatactactatagca

SEQ ID NO: 71153 - DNA, 251 bp, Zea mays
ctcgagccgctcgagccgtttgagcattcagaaacacaccaagcgaagtacctagctaagacttatcaacaatggctaccaagatattagccctccttgcgcttcttgccctttttgtgagcgcaacaaatgcgttcattattccacaatgctcacttgatactagtgccattataccacagttcctccgaccagttacttcaatgggcttcgaacacctagctgtgcaagcctacaagctacaaaagcgc

SEQ ID NO: 71154 - DNA, 259 bp, Zea mays
caactagcaaaatacatagtgaagtacactagcaacatcttagcaccaatgggagccaagattttttccctccttgccctccttgctctttcagcaagcgctgctacctctactattattccacaatgctcacaacattacctctctccggtgacagccgcgggctttcaacacccaactatacaatcctacatgctacatgaggccatcgtagcaagcatcttacggtcattagcattaaccctcaacagccatatgc

SEQ ID NO: 71155 - DNA, 257 bp, Zea mays
cgagtctctccggattccagagaggcccaactgccgaagctctcgatcgccgccacctcttcgagcagactagttgagaatggctgacgaggatatacagcctatcgtatgtgacaatggcactggaatggtcaaggccggtttcgctggtgatgatgcgccaagagctgtcttccccagcattgtgggaagaccacgccacaccggtgtcatggtcggcatgggccaaaaggatgcctacgtagtgatgaggctca

SEQ ID NO: 71156 - DNA, 258 bp, Zea mays
ccgtacctctcaccagcggtgtcttcggtatgtgaaaacccaattcttcaaccctacaggatccaacaggcaatcacagctggcatcttacctttatcacccttgttcctccaacaatcatcagccctattacatcagttacctttggtgcatttattggcacaaaacatcagggcacaacaactacaacaacttgtgctagcaaaccttgctgcctactctcagcaacagcagtttcttccattaaccaactagctg

SEQ ID NO: 71157 - DNA, 242 bp, Zea mays
cagtccattagctttatctactccagagcgcagaagaacccgatcgacaccatgaggatgttgctcgttgccctcgctctcctggctctcgctgcgagcgccacctccacgcatacaagcggctgctgcggctgccagccaccgccgccggttcatctaccgctgtcggttcatctgccacctacggttcaactgctacctccggtgcatctccaacggcaggtccatctttcaccgccggt

SEQ ID NO: 71158 - DNA, 125 bp, Zea mays
tgccgccgccaccatgccactaccctactcaactgcaacggtgtcagcctcatcggcagccagactcatgcccgtgtcaacagccgcatgcgagcccgtgccagctgcagggtaactgtggcgtt

SEQ ID NO: 71159 - DNA, 254 bp, Zea mays
tgagcattcagaaacacaccaagcgaagacattagcaacaacctaacaacaatggctaccaagatattatccctccttgcgcttcttgcgctttttgcgagcgcaacaaatgcgttcattattccacaatgctcacttgctccaagttccattattacacagttcctcccaccagttacttcaatgggcttcgaacacccagctgtgcaagcctataggctacaacaagcaattgcggcgagcgtcttacaaca

SEQ ID NO: 71160 - DNA, 258 bp, Zea mays
tagcaacatagacagcacaatagtgtaccaacaatggcagccaaaatatcttgcctccttatgctccttggtctttctgcaagtgctgctacggcgaccattttcccgcaatgctcgcaagctcctatagcttcccttcttcccccgtacctctcaccagcggtgtcttcggtatgtgacaacccaattcttcaaccctacaggatccaacaggcaatcacagctggcatcttacctttatcacccttgtacctccaa

SEQ ID NO: 71161 - DNA, 258 bp, Zea mays
  unsure (1)..(258): unsure at all n locations
gcaacatagaaagcacaatagtgtactaacaatggcagccaaaatattttgcctccttatgctccttggtctttctgcaagtgctgctacggcgaccattttcccgcaatgctcgcaagctcctatagcttcccttcttcccccgtacctctcaccagcggtgtcttcggtatgtgaaaacccaattaggccancctacaggatccaacaggcaatcacagctggcatcttacctttatcacccttgttcctccaaca

SEQ ID NO: 71162 - DNA, 259 bp, Zea mays
accaactagcaacatagaaagcacaatagtgtaccaacaatggcagccaaaatattttgcttccttatgctccttggtctttctgcaagtgctgctaccgcaaccattttcccacaatgctcacaagctcctatagcttcctttcttcccccatacctctcaccagcggtgtcttcagtatgtgaaaacccaattcttcaaccctacaggatccaacaggcaatcgcagcaggcatcttacctttatcacccttgttcc

SEQ ID NO: 71163 - DNA, 260 bp, Zea mays
cagcaacaacaatttcttccattcaaccaactgtctacactgaaccctgctgcttatttgcagcaacaactattaccatttagccagctagctactgcctactctcagcaacaacaacttcttccatttaaccaattggccgcactgaaccccgctgcttatttgcagcagcaaatactactgccatttagcgagctagctgcagcaagtcgtgcttccttcttgacacagcaacagttgctgcctttctacaagcagtt

SEQ ID NO: 71164 - DNA, 258 bp, Zea mays
tgccgcatccaagcccgtgccagctgcagggaacctgcggcgttagcagcaccccgatcctgggccagtgcgtcgagtttctgaggcatcagtgcagctagacggcgacgccctactgctcgcctcagtgacagtcgttgctgcagcagtgttgctagcagctcaggcaggtggagccgcagcagcggtaccaggcgatctacggcttggtcctccagtccatcctgcagtagcagccgcaaagcgtccaggtcgcgg

SEQ ID NO: 71165 - DNA, 259 bp, Zea mays
ttctgctgcagcgcctccgccgccgccgccgcatctaacgcagttccctccgccgcagcccgaggcaagatggttctccagaacgacattgatctgctcaacccgccggcagaactcgagaagctcaagcacaagaaaaagagactcgtccagtcgcccaactccttcttcatggatgttaagtgccaggggtgcttcagcataaccactgttttcagccactcccagactgttgttgtgtgccctggctgccaaactg

SEQ ID NO: 71166 - DNA, 160 bp, Zea mays
ctttgtccaacttgctttgacagaccgagcggcctcctaccaataacacatcattggtggtgccctcttttagattgcttatgagttgtaattcaataataaagttttttggatgatgtatgtggccaaccagaaataagaagttacatttccagatttt

SEQ ID NO: 71167 - DNA, 249 bp, Zea mays
tgaacattgatccgaggacagaaacaactgtattattgttagagaagcttgtgcagctagcagttacccctactcagaagcaaatagcttttcatcaacttgcatgcattagacttttgagaaaggaatatagtgaagctgaacaccaatttgaggttgccttctctgccggtcatgtgtattcaattgctagtattgctatagtcgctggcattcaaggccaaaaggctttggcttatgagaagctca

SEQ ID NO: 71168 - DNA, 253 bp, Zea mays
gatccctctccctgtcggatctgtgctagtcctgaatggcaatggtgctgatgtagcaaaacattgtgtcccagcagtccctaccaaaaggatatccattacattcagaaaaatggacccagcaaagcgtccatttggctttgaagatgacccggaactacttaatcttgctcctctagggacagttgtacaagaaactggcatatcatcagatgaaggcaagggcaagctacctgacgtccaaataacaaat

SEQ ID NO: 71169 - DNA, 255 bp, Zea mays
tttgcctccttatgctccttggtctttctgcaagtgctgtcacggcgaccattttcccgcaatgctcgcaagctcctatagcttcccttcttcccccgtagctctcaccagcggtgtcatcggtatgtgaaaacccgtttcttcaaccctacaggatccaacaggcaatcgcagctggcatcttacctttatcacgcttgttcctccaacaatcatcagccctattacaacagttagctttggtgcattcattgg

SEQ ID NO: 71170 - DNA, 257 bp, Zea mays
agacagcacaatagtgtaccaacaatggcagctaaaatattttgcctccttatgctccttggtctttctgcaagtgctgctacggcgaccattttcccacaatgctcacaagctcctatagcttcccttcttcccccgtacctctcaccaacggtgtcttcggtatgtgaaaacccaattcttcaacaccccaggatccaacaggcaatcgcagctggcatcttacctttatcacccttgttcctccaacaatcatc

SEQ ID NO: 71171 - DNA, 258 bp, Zea mays; identical to SEQ ID NO: 25449

SEQ ID NO: 71172 - DNA, 255 bp, Zea mays
aatattttgagcattcagaaacacaccaagcgaactacctagcaacgacttaacactcatggctaccaagatattagccctccttgcgcttcttgccctttatgtgagcgcaacaaatgcgttcattattccacaatgctcacttgctcctagtgccattataccacagttcctccgaccagttacttcaatgggcttcgaacacctagctgtgcaagcctacaggctacaacaagcgcttgcggcgagcgtctt

SEQ ID NO: 71173 - DNA, 200 bp, Zea mays
caactaccaacatcgaaagcacattagtgtaccaacagtgggagacagaatactttgccttcttatgctccttggtattccttgaagtgctgctacggcgaccattttcccgcaatgctcataagctcctatagcttccgttcttcccccgtacttgctcaccagcggtgtgttcggtatgtgaaaacccaattcttcaa

SEQ ID NO: 71174 - DNA, 254 bp, Zea mays
gctgcctactctcagcaactgcagtttcttccattcaaccaactaggttcattgaactctgcttcttatttgcaacaacaacaactaccattcagccagctacctgctgcctacccccagcaatttcttccattcaaccaactagcagcattgaactctcctgcttatttacagcagcaacaactactaccattcagccagctagctggtgtgagccctgctaccttcttgacacaaccacagttgttgccgtt

SEQ ID NO: 71175 - DNA, 256 bp, Zea mays
gaccaactagcaacatagaaagcacaatagtgtaccaacaatggcagctaatatattttgcttccttatgctccttggtctttctgcaagtcttgctaccgcaaccattttcccacaatgctcacaagctcctatagcttcccttcttcccccatacctctcaccagcggtgtcttcaatgtgtgaaaccccaattgttcaaccctacatgatccaacaggcaatcgcaacaggcatcttaccattatcacccttg

SEQ ID NO: 71176 - DNA, 180 bp, Zea mays
aaaacacaccaagcgaacgcatctagcaacgacctaacaccaatggctaccaagatattagccctccttgcgcttcttgcccttttagtgagcgcaacaaatgcgttcattattccacagtgctcacttgctcctagtgccagtattccacagttcctcccatcagttacttcaatgggc

SEQ ID NO: 71177 - DNA, 254 bp, Zea mays
attgagaccaactagcagcatagaaagcacgatagtgtatcaacaatggcagctaaaatatattgcctccttatgctccttggtctttctgcaagtgctgctacggcgaccattttcccacaatgctcacaagctcctatagcttcccttcttcccccgtacctctcaccaacggtgtcttcggtatgtgaaaacccaattcttcaaccctacaggatccaacaggcaatcgcagctggcgtcttacctttatc

SEQ ID NO: 71178 - DNA, 256 bp, Zea mays
cccgtacctctcaccagcggtgtcttcggtatgtgaaaacccaattcttcaaccctacaggatccaacaggcaatcacagctggcatcttacctttatcacccttgttcctccaacaatcttcagccctattacatcagttacctttggtgcatttattggcacaaaacatcagggcacaacaactacaacaacttgtgctagcaaaccttgctgcctactctcagcaacagcagtttttcccattcaaccaacta

SEQ ID NO: 71179 - DNA, 247 bp, Zea mays
gcaacagttgctgcctttctaccagcagtttgcggctaaccccggatccctcttacgactacgacaattgttgccctttgtccaacttgctttgacaaacccagcagcctcctaccaacaacacattattggtggtgccctcttttagattgcttattagttgtaattcaataatagagttttgtggatgatgtatgtggccaaccagatataagaagttacatttccagattctacaaaataaaaa

SEQ ID NO: 71180 - DNA, 164 bp, Zea mays
gcacaatactgtaccaacaatggcagctaaaatattttgcctccttatgctccatggtctttctgcaagtgctgctacggcgaccattttcccacaatgctcacaagctcctatagcttcccttcttcccccgtacctctcaccaacggtgtcttcggtatgtg

SEQ ID NO: 71181 - DNA, 237 bp, Zea mays
gaggatcggcaaggcgagggctgcattttgagggacgactgaagtacgacattggtcgtgttgatgctgaagatcaattagaaggggctgagtggttaataaaggagggcgttgcaatacctggccatattggtatctgtggctggagctacggaggatttctctcagcaatgtgcctcgcaaggtttccagacagattctgttgtgcggtgtctggtgctccggtaacagcatggg

SEQ ID NO: 71182 - DNA, 253 bp, Zea mays
ctagcaacatagaaagcacaatagtgtaccaacaatggcagctaaaatattttgcctccttatgctccttggtctttctgcaagtgctgctacggcgaccattttcccacaatgctcacaagctcctatagcttcccttcttcccccgtacctctcaccaacggtgtcttcggtatgtgaaaacccaattcttcaaccctacaggatccaacaggcaatcgcagctggcatcttacctttatcacccttgttc

SEQ ID NO: 71183 - DNA, 248 bp, Zea mays
tctcgagccgattcggctccccgcagaaatcttctccggcaccgacagcgcccaaatccggcaatccgatgctccgtatggactcaggttacaatccccggacggtggaggaggtgttccgggacttcaagggccgtcgtgccgggataatccgcgcgctcaccactgatgcggaggatttcttcaagcaatgcgacccggaaaaagaaaacttgtgcctgtatgggtttcctaatgagagctgggaa

SEQ ID NO: 71184 - DNA, 254 bp, Zea mays
gctgcctactctcagcaacagcagtttcttccattcaaccaactaggttcattgaactctgcttcttatttgcaacaacaacaactaccattcagccagctacctgctgcctacccccagcaatttcttccattcaaccaactagcagcattgaactctcctgcttatttacagcagcaacaactactaccattcagccagctagctggtgtgagccctgctaccttcttgacacaaccacagttgttgccgtt

SEQ ID NO: 71185 - DNA, 256 bp, Zea mays
ctcgagccgagcattcagaaacacacctagggaagcgcactagcaacgacctaacaacaatacgctaccaagatattatccctccttgcgcttcttgccctttttgtgagcgcaacaaatgtgttcattattccacaatgctcacttgctcctagtgccattattccaaagttcctcccatcagttacttcaatgggcttcgaacacccagctgtgcaagcctacaggctacaacaagcgcttgcggcgagcgtct

SEQ ID NO: 71186 - DNA, 252 bp, Zea mays
attgagaccaacaagctttatagaaagtggaatccagtagcaacaatagagcaacaatggcgaccaagatactttccctccttatgctccttgctctttctgcatgtgttgctaacgcgacaattttccctcaatgctcacaagctcctatagcttcccttcttcccccataccttccatcaatgatagcttcagtatgtgaaaacccagctcttcaaccctataggctccaacaagcaatcgcagcaagca

SEQ ID NO: 71187 - DNA, 249 bp, Zea mays
atcattttagctgttgatacaaagagaagggaatggccgagataaccctagagccgagtcatcttatggcgcacacaaagaatagaatagtgccaaagttcactgaaatcttccccttggatgacgcgaactaaccttacagcgccgtcatcgcgtcgggccggcaagacgtgatcacacactgcaccgatcatgaagggatctttcagctcgtactgccaccggagaagaaggtctcggagctatcgt

SEQ ID NO: 71188 - DNA, 252 bp, Zea mays
gtaaaatgcatagtgaagtacactagcaacatcttagcaccaatgggagccaagattttttccctccttgccctccttgctctttcagcaagcgctgctacctctactattattccacaatgctcacaacaatacctctctccggtgacagccgcgggatttcaacacccaactatacaatcctacatgctacatgaggccatcgtagcaagcatcttacggtcattagcattaaccctccaacagccatat

SEQ ID NO: 71189 - DNA, 250 bp, Zea mays
caactagcaacatagaaagcacaatagtgtaccaacaatggcagccaaaatattttgcctccttatgctccttggtatttctgcaagtgctgctacggcgaccattttcccgcaatgctcacaagctcctatagcttcccttcttcccccgtatttctcaccagcggtgtcttcggtatgtgaaaacccaattcttcaaccctacaggatccaacaggcaatcgcagctggcatcttacctttatcaccc

SEQ ID NO: 71190 - DNA, 154 bp, Zea mays
taaatttctcatactgatatgtgcaacttctcagtaatagcatatagatctctaatcttttatgaccgagaagttgcacatatcagtatgagacatttattattacagtatacagcgtaaaaattctctcatactgatatgtgcaacttctcag

SEQ ID NO: 71191 - DNA, 205 bp, Zea mays
caactagcaacatagaaagcacaatagtgtaccaacaatgtcagccaaaatatgctgcttccttatgctccttggtctttctgcaagtgctgctaccgcaaccattttcccacaatgctcacaagctcctatagcttcctttcttccctcatacctctcaccagcggtgtcttcagtatgtgaacacccaattcttcaaacctac

SEQ ID NO: 71192 - DNA, 254 bp, Zea mays
cagaaacacaccaagcgaacacattagcaacaacctaacaacaatggctaccaagatattatccctccttgcgcttcttgcgctttttgcgagcgcaacaaatgcgttcattattccacaatgctcacttgccccaagttccattattacacagttcctcccaccagttacttcaatgggcttcgaacacccagctgtgcaagcctataggctacaacaagcaatgccggcgagcgtcttacaacaaccaattt

SEQ ID NO: 71193 - DNA, 250 bp, Zea mays
ggagtacctgaggcagccgcagtgcagcccgctggcggcggcgccctactacgccgggtgtgggcagacgagcgccatgtaccagccgctccggcaacagtgctgccagcagcagatgaggatgatggacgtgcagtccgtcgcgcacagctgcagatgatgatgcagcttgagcgtgctgctgccgccagcagcagcctgtacgagccagctctgatgcagcagcagcagcagctgctggcagcccagg

SEQ ID NO: 71194 - DNA, 249 bp, Zea mays
ttctcgagccgattcggctcatcgcagaaatcttctccggcaccgtcagcgcccaaatccgacaatccgctgctccgaatggactcaggttacaatccccggacggtggaggaggtgttccgggacttcaagggccgtcgtgccgggataatccgcgcgctcaccactgatgcggaggatttcttcaagcattgcgacccggaaaaagaaaacttgtgcctgtatgggtttcctaatgagagctgggaa

SEQ ID NO: 71195 - DNA, 251 bp, Zea mays
gagagacttgcttcataagatttcacgctggacctccatacgaggatattgctttccgtattgtgaacaaggagtgggaatactcacacaagaaggggttcaagtgtacttttgagcgtgggattctccatctctatttcaacttcaagcgttaccgttacaggcgctgaaatggctcaagagggggagtactggatcgattggactggtgcgtcatgattctgctgtatgctgtggcatggataccagtc

SEQ ID NO: 71196 - DNA, 124 bp, Zea mays
tatcgagccgaatcggctcgaggctgtggttaatgcacctacatgattgcgacaactgttgctgcaacagattggatcagctttgactcagctagctgtggcaaaccctgctgcctacttgcaa

SEQ ID NO: 71197 - DNA, 254 bp, Zea mays
tagcaacatacatagtgaagtacactagcaacatcttagcaccaatggcagccaagatttttgccatccttgccctccttgctctttcagcaagcgttgctaccgcgactattattccacaatgctcacaacaatacctctctccggtgacagccgcgagatttgaatacccaactatacgatcctacaggctactagaggccatcgcagctagcatcttacggtcgttagcattgaccgtccaacaaccatat

SEQ ID NO: 71198 - DNA, 258 bp, Zea mays
ccaactagcaacatagaaagcacaatagtgtaccaacaatggcagccaaaatattttgcttccttatgctccttggtctttctgcaagtgctgctaccgcaaccattttcccacaatgctcacaagctcctatagcttcctttcttcccccatacctctcaccagcggtgtcttcagtatgtgaaaacccaattcttcaaccctacaggatccaacaggcaatcgcagcaggcatcttacctttatcacccgtgttcc

SEQ ID NO: 71199 - DNA, 240 bp, Zea mays
ctcgagccgcaacaacagttgttgccgttctacctgcacgctgcgcctaacgctggcacccagcttacaactgcaacaattgctgccattcaaccaacttgctttgacaaacccaacaacgttctaccaacaacccatcattggcggtgccctctcttagattgcttatgagttatagttcaataatgaagttttttggatgatgtttgtggcttcccagaaataagaaagtacatttct

SEQ ID NO: 71200 - DNA, 254 bp, Zea mays
tatctccaaagaatcgcggcacaacaactacaacaacagttgctaccaacaatcaatcaagtagttgcagcgaaccttgctgcttacctccagcaacaacagtttcttccattcaatcaactagctggggtgaaccctgctatctacttgcaggcacaacagctactaccatttaaccaacttgtcgggagcccttatgccttcttactgcaacaacagcttctgccattccatctgcaagctgtggcaaacat

SEQ ID NO: 71201 - DNA, 253 bp, Zea mays
cagaaacacacctagcgaacgcactagcaacgacctaacaacaatggctaccaagatattatccctctttgcgcttcttgccctttttgtgagcgcaacaaatgcgttcattattccacaatgctcacttgcccctagtgccattattccacagttcctccctcccgttacttcaatgggcttcgaacacccagctgtgcaagcctacaggctacaacaagcgcttgcggcgagcgtcttacaacaaccaatt

SEQ ID NO: 71202 - DNA, 257 bp, Zea mays; identical to SEQ ID NO: 69424

SEQ ID NO: 71203 - DNA, 253 bp, Zea mays
cagaaacacacctagcgaagcgcactagcaacgacctaacaacaatggctaccaagatattatccctctttgcgcttcttgccctttttgtgagcgcaacaaatgcgttcattattccacaatgctcacttgctcctagtgccattattccacagttcctccctccagttacttcaatgggcttcgaacacccagctgtgcaagcctacaggctacaacaagctctgcggcgagcgtcttacaacaaccaatt

SEQ ID NO: 71204 - DNA, 257 bp, Zea mays
aatattttgagcattcaaaaacacacaaagggaagtgcactagcaacttcctaacaacaatggctaccaagatattagccctccttgcgctcctttccctttcagtgagcgcaacaactgcattcattattccacaatgctcacttgctcctaatgccattattccacagttcctcccatcagttgcatcaatgggcatcgaacaccctattgtgcaagcctataggctacaacaagcgcttgcggcgagcgtctta

SEQ ID NO: 71205 - DNA, 254 bp, Zea mays
aagcaacatagaaagtggaatccagtagcaacaatagagcaacaatggcgaccaagatactttccctccttatgctccttgctctttctgcatgtgttgctaacgcgacaattttccctcaatgctcacaagctcctatagcttcccttcttcccccataccttccatcaatgatagcttcagtatgtgaaaacccagctcttcaaccctataggctccaacaagcaatcgcagcaagcaacatacctttatca

SEQ ID NO: 71206 - DNA, 257 bp, Zea mays
attgagaccaacaagcaacatagaaagtggaatccagtagcaacaatagagcaacaatggcgaccaagatactttccctccttatgctccttgctctttctgcatgtgttgctaacgcgacaattttccctcaatgctcacaagctcctatagcttcccttcttcccccataccttccatcaatgatagcttcagtatgtgaaaacccagctcttcaaccctataggctccaacaagcaatcgcagcaagcaacata

SEQ ID NO: 71207 - DNA, 85 bp, Zea mays
ttgagcattcagaaacacaccaagcgaagcacattagcaacaacctaacaacaatggctaccaagatattatccctccttgcgct

SEQ ID NO: 71208 - DNA, 242 bp, Zea mays
gacgatccttcccgacctcgaagcctaccccccttccagctgcggccatggcgaccgtcatgcagaagatcaaggacatcgaggacgagatggcaaggacacagaagaataaagccactgctcaccatcttggtcttcttaaggctaaacttgcaaaattgcggcgggagtcgctcactccaacatccaaaggtggtggtggtgcaggtgaaggatttgatgcgacgacgcgtggagatgca

SEQ ID NO: 71209 - DNA, 255 bp, Zea mays
gcaacatagaaagcacaatagtgtaccaacaatggcagccaaaatattttgcctccttatgctccttggtctttctgcaagtgctgctacggcgaccattttcccgtcctgctcgcaagctcctatagcttcccttcttcccccgtacctctcaccagcggtgtcttcggtatgtgaaaacccaattcttcaaccctacaggatccaacaggcaatcacagctggcatcttacctttatcacccttgttcctcca

SEQ ID NO: 71210 - DNA, 253 bp, Zea mays
gtagaaactgttgcaattgttgttgttgttggtatgcaactatgtttgccagagcaagtgggttggatgcaagcaactgctgttgcaagtaggcgacagggttcaccacagctagttggctcagtgctcagtcaactagccatggtgaaccctgccgcctacctacaacagcaacaactgatttcatctagccctctcgctgtggttaatgcacctacatacctgcaacctctgttgctgcaacagattgtac

SEQ ID NO: 71211 - DNA, 256 bp, Zea mays
ctcgagccgtcaattatagcttcagtatgtgaaaacccagctcttcaaccatataggcttcaacaagcaatcgcagcaagcaacatacctttatcgcccttgttgtttcaacaatcaccagccctatctttggtgcagtcattggtacaaaccatcagggcacaacagctgcagcaactcgtgctacctgtgatcaaccaagtagctctggcaaacctttctccctactctcagcaacaacaatttcttccattca

SEQ ID NO: 71212 - DNA, 253 bp, Zea mays
tagcgagcgcactagcaacgacctaacaacaatggctaccaagatattatccctctttgcgcttcttgccctttttgtgagcgcaacaaatgcgttcattattccacaatgctcacttgctcctagtgccattattccacagttcctccctccagttacttcaatgggcttcgaacacccagctgtgcaagcctacaggctacaacaagcgcttgcggcgagcgtcttacaacaaccaattgcccaattacaa

SEQ ID NO: 71213 - DNA, 84 bp, Zea mays
agaccattagctttatctactccagagcgcagaagaacccgatcgacaccatgagggtgtcgctcgttgccctcgctctcctgg

SEQ ID NO: 71214 - DNA, 254 bp, Zea mays; identical to SEQ ID NO: 69116

SEQ ID NO: 71215 - DNA, 129 bp, Zea mays
ctgggtcttcagaccattagctttatctactccagagcgcagaagaacccgatcgacaccatgagggtgtcgctcgttgccctcgctctcctggctctcgctgcgagcgccacctccacacaacatagg

SEQ ID NO: 71216 - DNA, 258 bp, Zea mays
aacgcgaacgcagaacgccgccggcccgtcgtgcactcgtgtttcccttcctccacttgccttcgtgttcgtgattcgtgatttcgccgccggaaagccgagggagagggagcgatatggggttcgtcggagacacgatggagtcgatccgctccatgcagatccgccaagtgctcatgcagatcatcagcctcggtatgattgttacctctgcattaatcatatggaagggtttgatagttttcacggggagcgagt

SEQ ID NO: 71217 - DNA, 261 bp, Zea mays
ctcgagccgctcgagccgcaacaagcaacatagaaagtggaatccagtagcaacaatagtgcaacaatggcgaccaagatactttccctccttatgctccttgctctttctgcatgtgttgctaacgcgacaattttccctcaatgctcacaagctcctatagcttcccttcttcccccataccttccatcaatgatagcttcagtatgtgaaaacccagctcttcaaccctataggctccaacaagcaatcgcagcaagc

SEQ ID NO: 71218 - DNA, 255 bp, Zea mays
atattttgagcattcagaaacacaccaagcgaacgcactagcaacgacctaacaacaatggctaccaagatattagccctccttgcgcttcttgccctttttgtgagcgcaacaaatgcgttcattattccacaatgctcacttgctcctagtgccattattccacagttcctcccaccagttacttcaatgggcttcgaacacctagctgtgcaagccaacatgcaacaacaagcgcttgcggcgagcgtctta

SEQ ID NO: 71219 - DNA, 257 bp, Zea mays
caactagctacatagaaagctcaatagtgtaccaacaatggcagccaaaatattttgcttccttatgctccttggtctttctgcaagttttgctaccgcaaccattttcccacaatgctcacaatctcctatagcttcccttcttcccccatacctctcaccagcggtgtcttcaatgtgtgaaaccccaattgttcaaccctacaggatccaacaggcaatcgcaacaggcatcttaccattatcacccttgttca

SEQ ID NO: 71220 - DNA, 252 bp, Zea mays
atccgttgcaaggtgaagagactcatctatactagttcacctagtgtcgtgtttgatggagttcatggaatttttaatgcagatgaatcaatgccttacccagataagtttaatgattcatattcagaaacgaaagcggatgcagaaaagcttgtgatgagagctaatggtagggaagggcttcttacatgctgtatacgcccaagtagcatttttggccctggtgataagctaatggttccatctttggtt

SEQ ID NO: 71221 - DNA, 83 bp, Zea mays
gttcttatgagttatagttcaataataaagttttttgtctgatgtttgtggcttcccagaaataagaaagtacatttctaaaa

SEQ ID NO: 71222 - DNA, 130 bp, Zea mays
agctcatcgactccagattggagaactcgacaccatgaaggtgaggatcgttgcccttgctctcctggcgttcgctgcgagcgccgcatccagtacaagcggcggctgtggctgccagacaccaccgttt

SEQ ID NO: 71223 - DNA, 259 bp, Zea mays
gagaccaacaagcaacatagaaagtggaatccagtagcaacaacagagcaacaatggcgaccaagatattttccctccttatgctccttgctctttctgcatgtgttgctaacgcgacaattttccctcaatgctcacaagctcctatagcttcccttcttcccccataccttccatcaatgatagcttcagtatgtgaaaacccagctcttcagccctataggctccaacaagcaatcgcagcaagcaacataccttt

SEQ ID NO: 71224 - DNA, 260 bp, Zea mays
cagcaagcaacatagaaagtagaatccattagcaacaatagagcaacaatggcgaccaagatattttccctccttatgctccttgctctttctacatgtgttgctaacgcgacaattttccctcaatgctcacaagctcctatagcttcccttcttcccccataccttccatcaattatagcttcagtatgtgaaaacccagctcttcaaccatataggcttcaacaagcaatcgcagcaagcaacatacctttatcgcc

SEQ ID NO: 71225 - DNA, 258 bp, Zea mays
caacaagcaacatagaaagtgagctccagtagcaacaacagagcaacaatggcgaccaagatattttccctctctatgctccttgctctttctgcatgtgttgctaacgcgacaattttccctcaatgctcacaagctcctatagcttcccttcttcccccataccttccatcaatgatagcttcagtatgtgaaaacccagctcttcagccctataggctccaacaagcaatcgcagcaagcaacatacctttatca

SEQ ID NO: 71226 - DNA, 255 bp, Zea mays
gaactagcaacatacatagtgaagtacactagcaacatcttagcaccaatggcagccaagatttttgccatccttgccctccttgctctttcagcaagcgttgctaccgcgactattattccacaatgctcacaacaatacctctctccggtgacagccgcgagatttgaatacccaactatacaatcctacaggctacaagaggccatcgcagcaagcatcttacggtcgttagcattgaccgtccaacaacca

SEQ ID NO: 71227 - DNA, 253 bp, Zea mays
ggggaagaagggaagctataggagcttgtgctagcaaaccttgctgcatactctcagcaacatcagtttcttccattcaaccaactggctgcattgaactctgctgcttatttgcaacaacaattaccattcagccagctagttgctgcctacccccagcaatttcttccattcaaccaactagcagcattgaactctgctgcttatttacagcagcaacaactactaccattcagccagctagctgatgtga

SEQ ID NO: 71228 - DNA, 252 bp, Zea mays
ccaacaagcaacatagaaagtggaatccagtagcaacaatagagcaacaatggcgaccaagatattttccctccttatgctccttgctctttctacatgtgttgctaacgcgacaattttccctcaatgctcacaagctcctatagcttcccttcttcccccataccttccatcaattatagcttcaatatgtgaaaacccagctcttcaaccatataggcttcaacaagcaatcgcagcaagcaacatacc

SEQ ID NO: 71229 - DNA, 255 bp, Zea mays
caactagcaacatagaaagcacaatattgtaccaataatggcagccaaaatattttgcctcattatgctccttggtctttctgcaagtgctgctacggcgagcattttcccgcaatgctcacaagctcctatagcttcccttcttcccccatacctctcaccagcgatgtcttcagtatgtgaaaatccaattcttctaccctacaggatccaacaggcaatcgcagcaggcatcttacctttatcacccttgtt

SEQ ID NO: 71230 - DNA, 253 bp, Zea mays
gcaacatagaaagtggaatccagtagcaacaatagagcaacaatggcgaccaagatattttccctccttatgctccttgctctttctacatgtgttgctaacgcgacaattttccctcaatgctcacaagctcctatagcttcccttcttcccccataccttccatcaattatagcttcaatatgtgaaaacccagctcttcaaccatataggcttcaacaagcaatcgcagcaagcaacatacctttatcgc

SEQ ID NO: 71231 - DNA, 239 bp, Zea mays
ctcgctttggatcgattggtttcgtaactggtgagggactgagggtctcggagtggattgatttgggattctgttcgaagatttgcggaggggggcaatggcgaccgcggggaaggtgatcaagtgcaaagctgcggtggcatgggaggccggcaagccactgtcgatcgaggaggtggaggtagcgcctccgcaggccatggaggtgcgcgtcaagatcctcttcacctcgctctgcc

SEQ ID NO: 71232 - DNA, 254 bp, Zea mays
ctagcaacatagaaagcacaatagtgtaccaacaatggcagccaacatattttgcctccttatgctccttggtctttctgcaagtgctgctacggcgaccattttcccgcaatgctcgcaagctcctatagcttcccttcttcccccgtacctctcaccagcggtgtcttcggtatgtgaaaacccaattcttcaaccctacaggatccaacaggcaatcacagctggcatcttacctttatcacccttgttcc

SEQ ID NO: 71233 - DNA, 251 bp, Zea mays
ttgagaccaacaagcaacatagaaagtggaatccagtagcaacaacagagcaacaatggcgaccaagatattttccctccttatgctccttgctctttctgcatgtgttgctaacgcgacaattttccctcaatgctcacaagctcctatagcttcccttcttcccccataccttccatcaatgatagcttcagtatgtgaaaacccagctcttcagccctataggctccaacaagcaatcgcagcaagca

SEQ ID NO: 71234 - DNA, 252 bp, Zea mays
tgcaaacattgctgctttcttgcaacaacaacaattgctgccattttacccacaggttgtgggaaacattaacgccttcttgcaacaacaacaattgctgccattctacccacaggatgtggcaaacattgtcgccttcttacaacaacagcaattgctgccatttagccaactcgctttgacgaatcctaccaccttattgcatcagcccaccattggtggtaccatcttctagattttttatgctttata

SEQ ID NO: 71235 - DNA, 255 bp, Zea mays
tgagaccaacaagcaacatagaaagtggaatccagtagcaacaacagagcaacaatggcgaccaagatattttccctccttatgctccttgctctttctgcatgtgttgctaacgcgacaattttccctcaatgctcacaagctcctatagcttcccttcttcccccataccttccatcaataccaagcttcagtatgtgaaaacccagctcttcagccctataggctccaacaagcaatcgcagcaagcaacat

SEQ ID NO: 71236 - DNA, 249 bp, Zea mays
ggcgccgacagccgcgtgaggagtcggggccggggctgggacgcgacacgaagagcggcggcggtggcaaggaccgggagcgggacggactggcgagcctgaacatcagccagtgcacggcgctgaccccgcccgcggtgcaggcggtgtgcgactcgttcccggcgctgcacacgtgcccggagcggcactcgctcaacatcagcgggtgcctcagcctaacctccgtgcactgcgcctgtgcgctgc

SEQ ID NO: 71237 - DNA, 256 bp, Zea mays
gaaagcacaatagtgtaccaacaatggcagctaaaatattttgcctccttatgctccttggtctttctgcaagtgctgctacggcgaccattttcccacaatgctcacaagctcctatagcttcccttcttcccccgtacctctcaccaacggtgtcttcggtatgtgaaaacccaattcttcaaccctacaggatccaacaggcaatcgcagctggcatcttacctttatcacccttgttcctccaacaatcatc

SEQ ID NO: 71238 - DNA, 254 bp, Zea mays
  unsure (1)..(254): unsure at all n locations
ggaaatccaagagtaacaccagaggttacacgggatgtatgcttgttggcgagaatgatggctgctaacttgtacttctctcagattgaagatttaatgtttgagctgtctatgtggcgctgcagtgatgaacttcggatccgtgtcgnatgaactacatcgctcttcaagaaaagctgcaaagcactatatagaattctggaagcaagttccgccaaatgaaccatatcgtgtcatacttggtgatgtcaggg

SEQ ID NO: 71239 - DNA, 129 bp, Zea mays
cagcacgctgcgcctaacgctggcaccctcttacaattgttgccgttctaccagcacgctgcgcctaacgctggcaccctcttacaactgcaacaattgctgccattcaaccaacttgctttgacaaac

SEQ ID NO: 71240 - DNA, 251 bp, Zea mays
  unsure (1)..(251): unsure at all n locations
attttcagcattcaaaaacacaccaagcgaacgnactagcaacgacctaacaccagtggctaccaagatattagccctccttgcgcttcttgcccttttagtgagcgcaacaaatgcgttcattattccacagtgctcacttgctcctagtgccagtattccacagttcctcccaccagttacttcaatgggcttcgaacatccagccgtgcaagcctacaggctacaactagcgcttgcggcgagcgcct

SEQ ID NO: 71241 - DNA, 251 bp, Zea mays
gaccaactagcaacatagaaagcacaatagtgtaccaacaatggcagccaaaatattttgcttccttatgctccttggtctttctgcaagtgctgctaccgcaaccattttcccacaatgctcacaagctcctatagcttcctttcttcccccatacctctcaccagcggtgtcttcagtatgtgaaaacccaattcttcaaccctacaggatccaacaggcaatcgcagcaggcatcttacctttatcac

SEQ ID NO: 71242 - DNA, 251 bp, Zea mays
cttgagaccaactagcaacatagaaagcacaatagtgtaccaacaatggcagccaaaatattttgcctccttatgctccttggtctttctgcaagtgctgctacggcgaccattttcccgcaatgctcgcaagctcctatagcttcccttctccccccgtacctctcaccagcggtgtcttcggtatgtgaaaacccaattcttcaaccctacaggatccaacaggcaatcacagctggcatcttaccttt

SEQ ID NO: 71243 - DNA, 248 bp, Zea mays
gaaacacaccaagcgaagacattagcaacaacctaacaacaatggctaccaagatattatccctccttgcgcttcttgcgctttttgcgagcgcaacaaatgcgttcattattccacaatgctcacttgctccaagttccattattacacagttcctcccaccagttacttcaatgggcttcgaacacccagctgtgcaagcctataggctacaacaagcaattgcggcgcgcgtcttacaacaacca

SEQ ID NO: 71244 - DNA, 248 bp, Zea mays
caccaagcgaacacattagcaacaacctaacaacaatggctaccaagatattatccctccttgcgcttcttgcgctttttgcgagcgcaacaaatgcgttcattattccacaatgctcacttgctccaagttccattattacacagttcctcccaccagttacttcaatgggcttcgaacacccagctgtgcaagcctataggctacaacaagcaattgtcggcgacgtctcgcaacaaccaatttcc

SEQ ID NO: 71245 - DNA, 245 bp, Zea mays
cagaaacacacctagcgaacgcactagcaacgacctaacaacaatggctaccaagatattatccctctttgcgcttcttgccctttttgtgagcgcaacaaatgcgttcattattccacaatgctcacttgctcctagtgccattattccacagttcctccctccagttacttcaatggggctcgaacacccagctgtgcaagcctacaggctacaacaagcgcttgcggcgagcgtcttacaac

SEQ ID NO: 71246 - DNA, 251 bp, Zea mays
gtttgcaacaacaactaccattcagtcagctagctgctgcctacccccagcaatttcttccattcaaccaactggcagcattgaactctgctgcttatttacaacagcaacagctaccaccattcagccagctagctgatgtgagccctgttgccttcttgacacaacaacagttgttgccgttctacctgcacgctgcgcctaacgctggcaccctcttcacaactgcagcaattgctgccattcaacca

SEQ ID NO: 71247 - DNA, 250 bp, Zea mays
cagaaacacacctagcgaacgcactagcaacgacctaacaacaatggctaccaagatattatccctctttgcgcttcttgccctttttgtgagcgcaacaaatgcgttcattattccacaatgctcacttgctcctagtgccattattccacagttcctccctccagttacttcaatgggcttcgaacacccagctgtgcaagcctacaggctacaacaagcgcttgcggcgagcgtcttacaacaacca

SEQ ID NO: 71248 - DNA, 256 bp, Zea mays
tgcaattgggcacatctaacaatacaaaccatcgcaacgcaacagcaacaacagttcctaccagcactgagccacctagccatggtgaaccctgtcgcctacttgcaacagcagctgcttgcatccaacccacttgctctagcaaacgtagttgcaaaccagcaacaacaacaactgcaacagtttctgccagcgcttagtcaactagccatggtgaaccctgccgcctacctacaacagcaacaactgctttcat

SEQ ID NO: 71249 - DNA, 87 bp, Zea mays
caagcaacatagaaagtggaatccagtagcaacaatagagcaacaatggcgtccaagatattttccctccttatgctccttgctctt

SEQ ID NO: 71250 - DNA, 118 bp, Zea mays
agaccattagctttatctactccagagcgcagaagaacgcgatcgacaccatgagggtgtggctcgttgccctcgctctcctggctctcgctgcgagcgccacctccacacaacatac

SEQ ID NO: 71251 - DNA, 118 bp, Zea mays
attcagagacacaccaagcgaaggcactagcaacgacctaacaacaatggctaccaagatattagccctccttgcgcttcttgcccttcttgtgagcgcaacaaatgcgttcattatt

SEQ ID NO: 71252 - DNA, 83 bp, Zea mays
gaccaactagcaacatagaacgcacaatagtgtaccaagaatggcagccacaatattttgcctccttatgctccttggtcttt

SEQ ID NO: 71253 - DNA, 253 bp, Zea mays
cattttcccgcaatgctcgcaagctcctatagcttcccttcttcccccgtacctctcaccagcggtgtcttcggtatgtgaaaacccaattcttcaaccctacaggatccaacaggcaatcacagctggcatcttacctttatcacccttgttcctccaacaatcatcagccctattacatcagttacctttggtgcatttattggcacaaaagatcagggcacaacaactacaacaacttgtgctagcaaac

SEQ ID NO: 71254 - DNA, 119 bp, Zea mays
  unsure (1)..(119): unsure at all n locations
cagcattcaaaaacacaccaagcgaaggnactagcaacgacctaacaccaatggctaccaagatattagccctccttgcgcttcttgcccttttagtgagcgcaacaaatgcgttcatt

SEQ ID NO: 71255 - DNA, 227 bp, Zea mays
tgcagatcgttctgctgggcacgggcaagaagaagttcgagcgcatgctcatgagcgccgaggagaagttcccaggcaaggtgcgcgccgtggtcaagttcaacgcggcgctggcgcaccacatcatggccggcgccgacgtgctcgccgtcaccagccgcttcgagccctgcggcctcatccagctgcaggggatgcgatacggaacgcctgcgcctgcgcgtcca

SEQ ID NO: 71256 - DNA, 252 bp, Zea mays
attgagaccaactagcaacatagaaagcacaatagtgtaccaacaatggcagccaaaatattttgcttccttatgctccttggtctttctgcaagtgttgctaccgcaaccattttcccacaatgctcacaagctcctatagcttcccttcttcccccatacctctcaccagcggtgtcttcaatgtgtgaaaccccaattgttcaaccctacaggatccaacaggcaatcgcaacaggcatcttaccatta

SEQ ID NO: 71257 - DNA, 89 bp, Zea mays
tggaccattagctttatctactccagagcgcagaagaacgggatcgacaccatgagggtgaggctcgttgccctcgctctcctggctct

SEQ ID NO: 71258 - DNA, 119 bp, Zea mays
gaggcgatgacgcgtacggaagttcggctcgagcagaccattagctttatctactccagagcgcagaagaacgcgatcgacaccatgagggtgtggctcgttgccctcgctctcctggt

SEQ ID NO: 71259 - DNA, 85 bp, Zea mays
caccagcggtgtcttcagtatgtgaaaacccaattcttcaaccctacaggatccaacaggcaatcgcagcaggcatcttaccttt

SEQ ID NO: 71260 - DNA, 117 bp, Zea mays
aaactatgtactgtagtaataatgtaatggagccgctgactagctacctagctcgctagtttactcatttagcggcgatgagtaacgtagtgtcacccatcaccatgggtggcagtg

SEQ ID NO: 71261 - DNA, 251 bp, Zea mays
gagcattcagagacacacctagcgaagcgcactagcaacgacctaacaacaatggctaccaagatattatccctctttgcgcttcttgccctttttgtgagcgcaacaaatgcgttcattattccacaatgctcacttgctcctagtgccattattccacagttcctccctccagttacttcaatgggcttcgaacacccagctgtgcaagcctacaggctacaacaagcgcttgcggcgagcgtcttaca

SEQ ID NO: 71262 - DNA, 86 bp, Zea mays
  unsure (1)..(86): unsure at all n locations
attttcagcattcaaaaacacaccaagcgaaggncactagcaacgacctaacaccaatggctaccaagatattagccctccttgcg

SEQ ID NO: 71263 - DNA, 120 bp, Zea mays
cagaaggagccttgagcaggagaagcaaaagaatgctatcaaatcgagtcatcttaaattggcaacattagagcagcagaaagctgatgagaatgtgctgaagcttgtggaagaacaaaa

SEQ ID NO: 71264 - DNA, 250 bp, Zea mays
caaaaacacaccaagcgaagcgcactagcaacgacctaacaccaatggctaccaagatattagccctccttgcgcttcttgcccttttagtgagcgcaacaaatgcgttcattattccacagtgctcacttgctcctagtgccattattccacagttcctcccaccagttacttcaatgggcttcgaacatccagccgtgcaagcctacaggctacaactagcgcttgcggcgagcgccttacaacaacc

SEQ ID NO: 71265 - DNA, 250 bp, Zea mays
agttaatccatcgcccataatattttgagcattcaaaaacacacaaagggaagtgcactagcaacttcctaacaacaatggctaccaagatattagccctccttgcgctcctttccctttcagtgagcgcaacaactgcattcattattccacaatgctcacttgctcctaatgccattattccacagttcctcccatcagttacatcaatgggcatcgaacaccctattgtgcaagcctataggctaca

SEQ ID NO: 71266 - DNA, 250 bp, Zea mays
gcactactgagagcgacaaagctagctctctccagggatcggattcggatcaccatgccgtccaccgtgaactccgcgtccctcgaccagaaccttgagctcgccaagcaatgctcgcgagaggccgccctcgcagggttcaaggcagcagctgtcgcgaccgtcgcctctgcagttcccaccctggctagcgtcaggatgctgccatgggccaaggccaacatcaaccccgctggccaggccctcatcg

SEQ ID NO: 71267 - DNA, 120 bp, Zea mays
cagaaacacacctagcgaaggcactagcaacgacctaacaacaatggcttccaagacattatccctccttgcgcttcttgccctttttgtgagtgcaacaaatgcgttcattattccaca

SEQ ID NO: 71268 - DNA, 113 bp, Zea mays
cccttcccgtgctccgcaaccgctgagtgagaagaagagatggccggcaagggcgatggcccggctatcggcatcgatctcggcacgacgtactcttgcgtcggcgtgtggca

SEQ ID NO: 71269 - DNA, 115 bp, Zea mays
gacggctcgcggtgggcaatgcacctacgtacctacaacaacagttgctgcaacaaattgtaccagctctgactcagctagctgtggcaaaccctgctgcctacttacaacagtt

SEQ ID NO: 71270 - DNA, 233 bp, Zea mays
attttgagcattcagaaacacaccaagcgaagcgcactagcaacaacctaacaacaatggctaccaagatattatccctccttgcgcttcttgcgctttttgcgagcgcaacaaatgcgtccattattccacaatgctcacttgctcctagttccattattccacagttcctcccaccagttacttcaatggccttcgaacacccagctgtgcaagcctataggctacaacaa

SEQ ID NO: 71271 - DNA, 236 bp, Zea mays
tattacacagttcctcccaccagttacttcaatgggcttcgaacacccagctgtgcaagcctataggctacaacaagcaattgcggcgagcgtcttacaacaaccaatttcccagttgcaacaacaatccttggcacatctaacaatacaaaccatcgcaacgcaacagcaacaacaattcctaccagcactgagccacctagccatggtgaaccctgccgcctacttgaaacagc

SEQ ID NO: 71272 - DNA, 119 bp, Zea mays
cacctcgccgcgatctccgtagcctccgtcgcgtcgagcatcgatcatgtcggcctactgcggaaagtacaaggatgagctcatcaagaatgctgcctacattggcacccctggcaagg

SEQ ID NO: 71273 - DNA, 250 bp, Zea mays
cagaaacacaccaagcgaacacattagcaacaacctaacaacaatggctaccaagatattatccctccttgcgcttcttgcgctttttgcgagcgcaacaaatgcgttcattattccacaatgctcacttgctccaagttccattattacacagttcctcccaccagttacttcaatgggcttcgaacacccagctgtgcaagcctataggctacaacaagcaattgcggcgagcgtcttacaacaacca

SEQ ID NO: 71274 - DNA, 242 bp, Zea mays
attgagaccaactagcaacatagaaagcacaatagtgtaccaacaatggcagctaaaatattttgcctccttatgctccttggtctttctgcaagtgctgctacggcgaccattttcccacaatgctcacaagctcctatagcttcccttcttcccccgtacctctcaccaacggtgtcttcggtatgtgaaaacccaattcttcaaccctacaggatccaacaggcaatcgcagctggcat

SEQ ID NO: 71275 - DNA, 250 bp, Zea mays
  unsure (1)..(250): unsure at all n locations
ctcatgccttggagaaaaccaaataccccaactcggacatatacttggacaaattcgacagccagtaccacttctcttgccagttcacagctgaccttattgccatgaaccacacngntttcatcatcaccagcacatnnnngnnnnnnnngggaagcaaggacaccgtggggcagtacgagtcccacatcgcgttcactcttcctgggctctaccgtgtcgtccatggcatcgagttttcgnancccaa

SEQ ID NO: 71276 - DNA, 119 bp, Zea mays
  unsure (1)..(119): unsure at all n locations
attgggactgcttgctccctgttgaccattgggtattctgaaccatcgagccatncgctgccaagctgactcgcctccacagtcttcgcgaacgccttggtgccaccttctcctcccat

SEQ ID NO: 71277 - DNA, 114 bp, Zea mays
gttggttgaatggaagaaattgtctacactgaaccctgctgcttatttgcagcaacaactattaccattcagccagctagctactgcctactctcagcaacaacaacttcttcc

SEQ ID NO: 71278 - DNA, 244 bp, Zea mays
gccggagctcgacaaggacgaccgacgacgcacgcggagatccggcgtactgcaaattttgaaaactgaactgtaagatggcatcagcagagctttcccgtgaggaaaatgtgtacatggcgaactcgctgagcaggcggagaggtacgaggagatggttgagttcatggagaaggtagccaagactgttgactcggaggagctcactgtggaggagcgaaacctcttgtctgttgcatacaag

SEQ ID NO: 71279 - DNA, 113 bp, Zea mays
ttgagaccaacaagcaacatagaaagtggaatccagtagcaacaatagagcaacaatggcgaccaagatactttccctccttatgctccttgctctttctgcatgtgttgcta

SEQ ID NO: 71280 - DNA, 114 bp, Zea mays
gaccaactagcaacatagaaagcacaatagtgtaccaacaatggcagccaaaatattttgcttccttatgctccttggtctttctgcaagtgttgctaccgcaaccattttccc

SEQ ID NO: 71281 - DNA, 245 bp, Zea mays
gttggttgaatggaagaaattgtctacactgaaccctgctgcttatttgcagcaacaactattaccattcagccagctagctactgcctactctcagcaacaacaacttcttccatttaaccaattggccgcactgaaccccgctgcttatttgcagcagcaaatactactaccatttagccagctagctgcagcaaaccgtgcttcctatcaacacagcaacagttgctgcctttctaccagca

SEQ ID NO: 71282 - DNA, 116 bp, Zea mays
gccggagctcgacaaggacgaccgacgacgcacgcggagatccggcgtactgcaaattttgaaaactgaactgtaagatggcatcagcagagctttcccgtgaggaaaatgtgtac

SEQ ID NO: 71283 - DNA, 248 bp, Zea mays
ttgagaccaacaagcaacatagaaagtggaatccagtagcaacaatagagcaacaatggcgaccaagatactttccctccttatgctccttgctctttctgcatgtgttgctaacgcgacaattttccctcaatgctcacaagctcctatagcttcccttcttcccccataccttccatcaatgatagcttcagtatgtgaaaacccagctcttcaaccctataggctccaacaagcaatcgcagcaa

SEQ ID NO: 71284 - DNA, 118 bp, Zea mays
gaccaactagcaacatagaaagcacaatagtgtaccaacaatggcagccagaatattttgcttccttatgctccttggtctttctgcaagtgttgctaccgcaaccattttcccacaa

SEQ ID NO: 71285 - DNA, 113 bp, Zea mays
attttgagcattcagaaacacaccaagcgaagcgcactagcaacgacctaacaacaatggctaccaagatattagccctccttgcgcttcttgccctttttgtgagcgcaaca

SEQ ID NO: 71286 - DNA, 246 bp, Zea mays
ggtcttcagaccattagctttatctactccagagcgcagaagaacccgatcgacaccatgagggtgttgctcgttgccctcgctctcctggctctcgctgcgagcgccacctccacgcatacaagcggcggctgcggctgccagccaccgccgccggttcatctaccgccgccggtgcatctgccacctccggttcacctgccacctccggtgcatctcccaccgccggtccacctgccgccgccg

SEQ ID NO: 71287 - DNA, 112 bp, Zea mays
agaaagtggaatccagtagcaacaacagagcaacaatggcgaccaagatattttccctccttatgctccttgctctttctgcatgtgttgctaacgcgacaattttccctca

SEQ ID NO: 71288 - DNA, 114 bp, Zea mays
gttttggttttaatgaaaactttattatgaccatgcatatattattgactctaccacacatgataatgtgtgtcgtcttactgcattattacctgtatagatagagagagatgg

SEQ ID NO: 71289 - DNA, 113 bp, Zea mays
cacccataatattttgagcattcagaaacacacctagcgaagcgcactagcaacgacctaacaacaatggcttccaagacattatccctccttgcgcttcttgccctttttgt

SEQ ID NO: 71290 - DNA, 246 bp, Zea mays
tagagagttcttgtatcatattctaggggaagtcataaaagctggagctacgactctcaatatcccggacactgtcggatacaatcttccttatgaatttggaaagttgattgctgatataaaggcaaacactcctggaattgaaaaggctatcatttccactcattgtcagaatgaccttggtcttgcgactgccaacacactagcgggcgctcgtgcaggagcacggcagttagaggttactat

SEQ ID NO: 71291 - DNA, 111 bp, Zea mays
gggtcttcagaccattagctttatctactccagagcgcagaagaacccgatcgacaccatgagggtgttgctcgttgccctcgctctcgtggctctcgctgcgagcgccac

SEQ ID NO: 71292 - DNA, 113 bp, Zea mays
atttcaatcaaacatggtctccctgagattgaaatatattgctacttgcttgcactgatttttcttattgatcagaagaaatacgatgaggctaaagtatgtgcaagtgtgag

SEQ ID NO: 71293 - DNA, 114 bp, Zea mays
ctagcaacatagaaagcacaatagtgtaccaacaatggcagccaaaatattttgcctccttatgctccttggtctttctgcaagtgctgctacggcgaccattttcccgcaatg

SEQ ID NO: 71294 - DNA, 247 bp, Zea mays
gatcagcaagcaacatagaaagtagaatccattagcaacaatagagcaacaatggcgaccaagatattttccctccttatgctccttgctctttctacatgtgttgctaacgcgacaattttccctcaatgctcacaagctcctatagcttcccttcttcccccataccttccatcaattatagcttcagtatgtgaaaacccagctcttcaaccatataggcttcaacaagcaatcgcagcaagca

SEQ ID NO: 71295 - DNA, 273 bp, Zea mays
ttcggctcgagattattgataccaactagcaaaatacatagtgaagtacactagcaacatcttagcaccaatgggagccaagattttttccctccttgccctccttgctctttcagcaagcgctgctacctctactattattccacaatgctcacaaccctacctctctccggtgacagccgcgggatttcaacacccaactatacaatcctacatgctacatgaggccatcgtagcaagcatcttacggcatttagcattaaccctccaaca

SEQ ID NO: 71296 - DNA, 253 bp, Zea mays
attattgagaccaactagcaacatagaaagcacaatagtgtaccaacaatggcagccaaaatattttgcttccttatgctccttggtctttctgcaagtgttgctaccgcaaccattttcccacaatgctcacaagctcctatagcttcccttcttcccccatacctctcaccagcggtgtcttcaatgtgtgaaaacccaattgttcaaccctacaggatccaacaggcaatcgcaacaggcatcttaccat

SEQ ID NO: 71297 - DNA, 251 bp, Zea mays
ggcatcttacctttatcacccttgttcctccaacaaccgtcagccctattacagcagttacctttggtgcatttgttggcacaaaacatcaaggcacaacaactacaacaacttgtgctaggaaaccttgctgcctactctcagcaacagcagtttcttccattcaaccaactggctgcattgaactctgctgcttatttgcaacaacaactaccattcagtcagctagctgctgcctacccccagcaatt

SEQ ID NO: 71298 - DNA, 245 bp, Zea mays
cttgagaccaactagcaacatagaaagcacaatagtgtaccaacaatggcagccaaaatattttgcttccttatgctccttggtctttctgcaagtgctgctaccgcaaccattttcccacaatgctcacaagctcctatagcttcctttcttcccccatacctctcaccagcggtgtcttcagtatgtgaaaacccaattcttcaaccctacaggatccaacaggcaatcgcagcaggcatctt

SEQ ID NO: 71299 - DNA, 246 bp, Zea mays
caacaagcaacatagaaagtggaatccagtagcaacaatagagcaacaatggcgaccaagatattttccctccttatgctccttgctctttctacatgtgttgctaacgcgacaattttccctcaatgctcacaagctcctatagcttcccttcttcccccataccttccatcaattatagcttcaatatgtgaaaacccagctcttcaaccatataggcttcaacaagcaatcgcagcaagcaac

SEQ ID NO: 71300 - DNA, 239 bp, Zea mays
cttgagaatcattttcacaagacaaacgtctaggctctcgtagaattgaacgtgatcaagaaccttgtcgtttcagtggagctcttgggggtttcaatgcccatgcaagtaacattgtggtagccatcttcattgctactggtcaggaccctgcatagaacgtggagagttcccagtgcatcaccatgttggaagctataaatgatggcaaagatctccacatctccgtgactatgcca

SEQ ID NO: 71301 - DNA, 249 bp, Zea mays
gaccaacaagcaacatagaaagtggaatccagtagcaacaatagagcaacaatggcgaccaagatactttccctccttatgctccttgctctttctgcatgtgttgctaacgcgacaattttccctcaatgctcacaagctcctatagcttcccttcttcccccataccttccatcaatgatagcttcagtatgtgaaaacccagctcttcaaccctataggctccaacaagcaatcgcagcaagcaac

SEQ ID NO: 71302 - DNA, 213 bp, Zea mays
ctgggtcttcagaccattagctttatctactccagagcgcagaagaacccgatcgacaccatgagggtgtcgctcgttgccctcgctctcctggctctcgctgcgagcgccacctccacacaacatacgagccacaccctcatggtgtcgatcgggttcttctgcgctctggagtagactaagctaatggtctgaagatccagctcgagccga

SEQ ID NO: 71303 - DNA, 251 bp, Zea mays
cgagagcgtagaaagcagttcggtcggagaagcggaagttcgcgttgctttgctgatccaatgggggagaccaacgagctaccgccgccacccgtggccgcgccgccgcccatgatgccgatgcagtccatgatggtcggcgcaggcgccatccacccgccccacgagcagttccaccatctcaactactgcgtccactcaaatccatcctgggttcaggtggcagcacttgcattccttcactatcttgt

SEQ ID NO: 71304 - DNA, 248 bp, Zea mays
agcttcagtatgtgaaaccccaattgttcaaccctacaggatccaacaggcaatcgcaacaggcatcttaccattatcacccttgttcctccaacaaccgtcagccctattacagcagttacctttggtccatttggtggcacaaaacatcagggcacaacaactacaacaacttgtgctagcaaaccttgctgcatactctcagcaacatcagtttcttccattcaaccaactggctgcattgaact

SEQ ID NO: 71305 - DNA, 109 bp, Zea mays
gggtcttcagaccattagctttatctactccagggcgcagaagaacgcgatcgacaccatgagggtgtggctcgttgccctcgctctcctggctctcgctgcgagcgcc

SEQ ID NO: 71306 - DNA, 243 bp, Zea mays
ctcgagccgcattcggtcgagaccggcggcctcggcgacgtcctcggcggcctgccgcgaccatcgccgcgaacgggcaccgtgtcatggtcgtctctcgccgctacgaccagtacaaggacgcctgggacaccagcgtcgtgtccgagatcaagatgggagacgggtacgagacggtcaggttcttccactgctacaagcgcggagtggaccgcgtgttcgttgaccacccactgttcctgg

SEQ ID NO: 71307 - DNA, 245 bp, Zea mays
agatagtggaatacagtagcaacaatagagcaacaatggcggccaagatattttccatccttatgctccttgctctttctgcatgtgttgctaacgcgaccatttttcctcaatactcacaagctcctatagctgcccttcttcccccataccttccatcaatgaccgcttcagtttgtgaaaacccagcccttcaaccctacaggctccaacaagcaatcgcaacaagcaacttacctttatca

SEQ ID NO: 71308 - DNA, 245 bp, Zea mays
ctttcctcgaattccccattctataaattccagttaaacttaatatcgtaagatcaatcataattctcgagttgcaaaccatggacatggctttggcgtctaaagcctcccctccgccatggaatgccaccgccgccgagcagccaattccaaagcgtgacaaagccgctgcaaatgattcaacatacctcaatcctcaagctcatgatagtgttcttggaatcattctgggaggtggtgctggg

SEQ ID NO: 71309 - DNA, 256 bp, Zea mays
ttcctccctccagttacttcaatgggcttcgaacacccagctgtgcaaccctacaggctacaacaagcgcttgcggcgagcgtcttacaacaaccaattgcccaattacaacaacaatccttggcacatctaaccatacaaaccatcgcaacgcaacagcaacaacaatttctaccagcactgagccaactagctgtggtgaaccctgtcgcctacttgcaacagcagttgcttgcatccaacccacttgctctgg

SEQ ID NO: 71310 - DNA, 250 bp, Zea mays
tattttcagcattcaaaaacacaccaagcgaacgacctagcaacgacctaacaccaatggctaccaagatattagccctccttgcgcttcttgcccttttagtgagcgcaacaaatgcgttcattattccacagtgctcacttgctcctagtgccagtattccacagttcctcccaccagttacttcaatgggcttcgaacatccagccgtgcaagcctacaggctacaactagcgcttgcggcgagcgc

SEQ ID NO: 71311 - DNA, 250 bp, Zea mays
atttggtggcacaaaacatcagggcacaacaactacaacaacttgtgctagcaaaccttgctgcatactctcagcaacatcagtttcttccattcaaccaactggctgcattgaactctgctgcttatttgcaacaacaattaccattcagccagctagttgctgcctacccccagcaatttcttccattcaaccaactagcagcattgaactctgctgcttatttacagcagcaacaactactaccatt

SEQ ID NO: 71312 - DNA, 248 bp, Zea mays
caacaaccaattgcccaattacaacaacaatccttggcacatctaacaatacaaaccatcgcaatgcaacagcaacagcaacaacagttcctactagcactgagccacctagccatggtgaaccctggcgccgacttgtaacaacaactgcttgcatccaacccacttgctctggcaaacgcagttgcaaaccagcaacaacaacagctgcaacagtttctgccagcgctcagtcaactagccatggt

SEQ ID NO: 71313 - DNA, 245 bp, Zea mays
gcaaaccgaacgaacccaaccgaagcgagagctgagcaaggcagaggcgtcgtgaccggcgatggagcggctgcagcggatctttggcgcctccggcatggggcagccgccgacggactcgccgctgctcgattcctccgagcaggtctacatctcctccctagcgcttctcaagatgctcaagcacgggagggctggggtgcccatggaggtcatgggcctcatgctcggcgagttcgttgacg

SEQ ID NO: 71314 - DNA, 243 bp, Zea mays; identical to SEQ ID NO: 69507

SEQ ID NO: 71315 - DNA, 244 bp, Zea mays
cattcagaaacacacctagcgaacgaactagcaacgacctaacaacaatggctaccaagatattatccctctttgcgcttcttgccctttttgtgagcgcaacaaatgcgttcattattccacaatgctcacttgctcctagtgccattattccacagttcctccctccagttacttcaatgggcttcgaacacccagctgtgcaagcctacaggctacaacaagcgcttgcggcgagcgtctt

SEQ ID NO: 71316 - DNA, 243 bp, Zea mays
gcgaagaacagcaatcggaattctctgcgatttctctagatctcgactaccccccactagttttggttcctcctttcgttcgagagagcgattctggtggcaatggcgaagagcgagggtccggcgatcgggatcgacctcggcaccacctactcgtgcgtcggcgtgtggcagcacgaccgggtggagatcatcgccaacgaccaggggaaccgcaccacgccgtcctatgtcggcttcacc

SEQ ID NO: 71317 - DNA, 246 bp, Zea mays
caactagcaacatagaaagcacaatagtgtaccaacaatggcagccaaaatattttgcttccttatgctccttggtctttctgcaagtgctgctaccgcaaccattttcccacaatgctcacaagctcctatagcttcctttcttcccccatacctctcaccagcggtgtcttcagtatgtgaaaacccaattcttcaaccctacaggatccaacaggcaatcgcagcaggcatcttacctttatc

SEQ ID NO: 71318 - DNA, 245 bp, Zea mays
ggtgagggaacctggtaaggattggttttgtcgaaataccgtgggagagggggtgataaggacggtggggggtttctatgttgaagtcgtggtcatggacaatttgtgattttttctcctttatgccatgttttggaatttttgtagctgcctaggccttgtggtaatgtgctgctgtgggggttcattagtatgaagaggaagacgctgctggcgcggagtctttttctctttattagtatttt

SEQ ID NO: 71319 - DNA, 254 bp, Zea mays
caactagcaacatagaaagcacaatagtgtaccaacaatggcagctaaaatattttgcctccttatgctccttggtctttctgcaagtgctgctacggcgaccattttcccacaatgctcacaagctcctatagcttcccttcttcccccgttcctctcaccaacggtgtcttcggtatgtgaaaacccaattcttcaaccctacaggatccaacaggcaatcgcagctggcatcttacctttatcacccttgt

SEQ ID NO: 71320 - DNA, 247 bp, Zea mays
gcacctacatacctgcaacaacagttgctgcaacagattgtaccagctctgactcagctagctgtggcaaaccctgctgcctacttgcaacagctgcttccattcaaccaactgactgtgtcgaactctcctgcgtacctacaacagcgacaacagttacttaatccactagcggtggctaacccattggtcgctgccttcctacagcagcaacaattgctgccatacaaccagttctctttgatga

SEQ ID NO: 71321 - DNA, 249 bp, Zea mays
ctcccggcggcggcgcaggagcagcagcacccgaggatggtgaagttcctcaagcccggcaaggccgtgatcctcctgcagggccggttcgccggcaggaaggcggtgatcgtgcgcgtgttcgaggagggcacccgcgaccgcccctacggcacatgcctcgtcgccggcctcgccaagtaccccaagaaggtggtccgcagggactcggccaagaagacagcgaagaagtcgcgcgtcaagtgcttc

SEQ ID NO: 71322 - DNA, 246 bp, Zea mays
attttcagcattcaaaaacacaccaagcgaacgcactagcaacgacctaacaccaatggctaccaagatattagccctccttgcgcttcttgcccttttagtgagcgcaacaaatgcgttcattattccacagtgctcacttgctcctagtgccagtattccacagttcctcccaccagttacttcaatgggcttcgaacatccagccgtgcaagcctacaggctacaactagcgcttgcggcgag

SEQ ID NO: 71323 - DNA, 246 bp, Zea mays
agaaacacacctagcgaagcgcactagcaacgacctaacaacaatggctaccaagatattatccctctttgcgcttcttgccctttttgtgagcgcaacaaatgcgttcattattccacaatgctcacttgctcctagtgccattattccacagttcctccctccagttacttcaatgggcttcgaacacccagctgtgcaagcctacaggctacaacaagcgcttgcggcgagcgtcttacaaca

SEQ ID NO: 71324 - DNA, 231 bp, Zea mays
ggacgtcagcctagcaattagctcatcgactccagattggagaactcgacaccatgaaggtgccgatcgttgcccttgctctcctggcgctcgctgcgagcgccgcctccagtacaagcggcggccgtggctcccagacaccaccgtttcatctaccgcctccgttctatatgccgcctccgttctatctgccgccgcagcagcagccgcagccatggcaataccccacac

SEQ ID NO: 71325 - DNA, 243 bp, Zea mays
caatagtgtaccaacaatggcagccaaaatattttgcttccttatgctccttggtctttctgcaagtgctgctaccgcaaccattttcccacaatgctcacaagctcctatagcttcctttcttcccccatacctctcaccagcggtgtcttcagtatgtgaaaacccaattcttcaaccctacaggatccaacaggcaatcgcagcaggcatcttacctttatcacccttgttcctccaaca

SEQ ID NO: 71326 - DNA, 238 bp, Zea mays
tgcacttttagaccttctcaagtcaaaatatattcaattacatgactttggatctgaaatcctcccaagagctgtactagatcatagtgtgcaggcatgcatttttacgggctattgggacgatgttggaacaatcaaatcattctttgatgcaaacttggccctcactgagcagccttccaagtttgatttttatgatccaaaaacacctttcttcactgcaccccgatgcttgcct

SEQ ID NO: 71327 - DNA, 244 bp, Zea mays
ctagcaacatagaaagcacaatagtgtaccaacaatggcagccaaaatattttgcctccttatgctccttggtctttctgcaagtgctgctacggcgaccattttcccgcaatgctcgcaagctcctatagcttcccttcttcccccgtacctctcaccagcggtgtcttcggtatgtgaaaacccaattcttcaaccctacaggatccaacaggcaatcgcagctggcatcttacctttatca

SEQ ID NO: 71328 - DNA, 247 bp, Zea mays
attttcagcattcaaaaacacaccaagcgaaccaactagcaacgacctaacaccaatggctaccaagatattagccctccttgcgcttcttgcccttttagtgagcgcaacaaatgcgttcattattccacagtgctcacttgctcctagtgccagtattccacagttcctcccaccagttacttcaatgggcttcgaacatccagccgtgcaagcctacaggctacaactagcgcttgcggcgagc

SEQ ID NO: 71329 - DNA, 247 bp, Zea mays
attgagaccaactagcaacatagaaagcacaatagtgtaccaacaatggcagccaaaatattttgcttccttatgctccttggtctttctgcaagttttgctaccgcaaccattttcccacaatgctcacaagctcctatagcttcccttcttcccccatacctctcaccagcggtgtcttcaatgtgtgaaaccccaattgttcaaccctacaggatccaacaggcaatcgcaacaggcatcttac

SEQ ID NO: 71330 - DNA, 246 bp, Zea mays
atccggtcggtgggacttcctctcgaatcgccccgatcgagaccctagttgccccacgaaccgaggatccaagatgagtttcctgttcgggaagcggaagacgcccgccgagctgttaagagaaaacaagagaatgctggatcgatccatcagggaaattgagcgagagaggcaaggattgcaggcccaggagaaaaagctcatcactgagatcaagaaaacagctaaagaaggccagatgggagc

SEQ ID NO: 71331 - DNA, 244 bp, Zea mays
ggaacatagaacgtggcatccagtagctacaatagagcaacaatggcgaccaagatactttccctccttatgctccttgctctttctgcatgtgttgctaacgcgagaattttccctcaatgctcacaagctcctatagcttcccttacttcccccataccttccatcaatgatagcttcagtatgtgaaaagccagctctatcaacctataggctccaacaagcaatcgcagcaagcaacata

SEQ ID NO: 71332 - DNA, 239 bp, Zea mays
gaaagaccaaggagcataaggaggcaaaatattttggctgccattgttggtacactattgtgctttctatgttgctagttggtctctctgcaagtgctgctacggcgaccattttcccacaatgctcacaagctcctatagcttcccttcttcccccgtacctctcaccagcggtgtcttcggtatgtgaaaacccaattcttcaaccctataggatccaacaggcaatcgcagctggc

SEQ ID NO: 71333 - DNA, 243 bp, Zea mays
tctcgagccgcaactagcaacatagaaagcacaatagtgtaccaacattggcagccataatatgttgcttcgctatgctccttggtctttgctgctgtgctgctaccgcaaccattttcccacaatgctcacaagctcctatagcttcctttctttccccatacctctcaccagcggtgtcttcagtatgtgaaaacccaattcttcaaccctacaggatccaacaggcaatcgcagcaggca

SEQ ID NO: 71334 - DNA, 243 bp, Zea mays
gcgaacgcactagcaacgacctaacaccaatggctaccaagatattagccctccttgcgcttcttgcccttttagtgagcgcaacaaatgcgttcattattccacagtgctcacttgctcctagtgccagtattccacagttcctcccaccagttacttcaatgggcttcgaacatccagccgtgcaagcctacaggctacaactagcgcttgcggcgagcgccttacaacaaccaattgccc

SEQ ID NO: 71335 - DNA, 248 bp, Zea mays
attgagaccaacaagcaacatagaaagtggaatccagtagcaacaacagagcaacaatggcgaccaagatattttccctccttatgctccttgctctttctgcatgtgttgctaacgcgacaattttccctcaatgctcacaagctcctatagcttcccttcttcccccataccttccatcaatgatagcttcagtatgtgaaaacccagctcttcagccctataggctccaacaagcaatcgcagca

SEQ ID NO: 71336 - DNA, 245 bp, Zea mays
tgagaccaactagcaacatagaaagcacaatagtgtaccaacaatggcagctaaaatattttgcctccttatgctccttggtctttctgcaagtgctgctacggcgaccattttcccacaatgctcacaagctcctatagcttcccttcttcccccgtacctctcaccaacggtgtcttcggtatgtgaaaacccaattcttcaaccctacaggatccaacaggcaatcgcagctggcatcttac

SEQ ID NO: 71337 - DNA, 245 bp, Zea mays
  unsure (1)..(245): unsure at all n locations
catttcgcgatattgatattggaatccagtagcaacaacagagcaacaatggcgaccaagatattttccctccttatgctccttgctctttctgcatgtgttgctaacgcgacaattttccctcaatgctcacaagctcctatagcttcccttcttcccccataccttccatcaatgatagcttcagtatgtgaatacccagctcttcagnccccatcgctccaacaagcaatcgcagcaagcaa

SEQ ID NO: 71338 - DNA, 245 bp, Zea mays
caacaagcaacatagaaagtggaatccagtagcaacaacagagcaacaatggcgaccaagatattttccctccttatgctccttgctctttctgcatgtgttgctaacgcgacaattttccctcaatgctcacaagctcctatagcttcccttcttcccccataccttccatcaatgatagcttcagtatgtgaaaacccagctcttcagccctataggctccaacaagcaatcgcagcaagcaa

SEQ ID NO: 71339 - DNA, 234 bp, Zea mays
tcgagccgaatcggctcgaggagctcgagttgagaccaactagacacatagatagcacaatagtgtaccaacaatggcagtcaaaatatcttgcctccttatgctccttggtctttctgcaagtgctgctacggcgaccattttcccacaatgctcacaagctcctatagcttcccttcttcctccgtacctctcaccagcggtgtcttcggtatgtgaaaacccaattcttca

SEQ ID NO: 71340 - DNA, 238 bp, Zea mays
gagaccaactagcaacatagaaagcacaatagtgtaccaacaatggcagccaaaatattttgcctccttatgctccttggtctttctgcaagtgctgctacggcgaccattttcccgcaatgctcgcaagctcctatagcttcccttcttcccccgtacctctcaccagcggtgtcttcggtattcgaaaacccaattcttcaaccctacaggatccaacaggcaatcacagctggca

SEQ ID NO: 71341 - DNA, 239 bp, Zea mays
cggctcgagcgatctcatttgaaatcaacccatcctcgtttcctccgtctagcagcctctcaccctcatggccaagatcaagatcgggatcaatgggtttggcaggatcggaaggctggtggccagggtggccctgcagagcgacgacgtcgagctcgtcgccgtgaacgaccccttcatcagcaccgattacatgacctacatgttcaagtatgacactgtgcacggacagtggaagc

SEQ ID NO: 71342 - DNA, 240 bp, Zea mays
ggaatctcatagtgaagaggccgatgacggcgatgagagtaatggccacgataacgatgatccttcagctccaaagaaaccaagggttctctggtcagttgaactgcaccgaaaatttgttgctgctgtcaatcagctaggaattgacaaagctgtgccaaaaaggatacttgagctcatgaatgttgagagactcaccagggaaaatgttgcaagtcacctgcagaagtatagactcta

SEQ ID NO: 71343 - DNA, 269 bp, Zea mays
ttcggctcgagagaccaacaagcaacatagaaagtggaatccagtagcaacaatagagcaacaatggcgaccaagatattttccctccttatgctccttgctctttctacatgtgttgctaacgcgacaattttccctcaatgctcacaagctcctatagcttcccttcttcccccataccttccatcaattatagcttcaatatgtgaaaacccagctcttcaaccatataggcttcaacaagcaatcgcagcaagcaacataccttt

SEQ ID NO: 71344 - DNA, 250 bp, Zea mays
gcagcgagcgtctctcctctcccacgcatcgcgccaaggaagagagagagatcgccgctccccttctcggcgtcggtggtgcgggtgccctccctcctcgagcgagatctgtctggtcacagatctatctgacaaaatggtgaagatctgctgcatcggtgctggctatgtcggtggcccaaccatggccgtcattgccctcaagtgcccagacattgaggtcgtcgtcgttgacatctccaagccccgc

SEQ ID NO: 71345 - DNA, 251 bp, Zea mays
caatagtgtaccaacaatggcagccacaatattttgcctccttatgctccttggtctttctgcaagtgctgctacggcgaccattttcccgcaatgctcgcaagctcctatagcttcccttcttcccccgtacctctcaccagcggtgtcttcggtatgtgaaaacccaattcttcaaccctacaggatccaacaggcaatcacagctggcatcttacctttatcacccttgttcctccaacaatcatcag

SEQ ID NO: 71346 - DNA, 252 bp, Zea mays
cggctcgaggcaaaatacatagtgaagtacactagcaacatcttagcaccaatgggagccaagattttttccctccttgccctccttgctctttcagcaagcgctgctacctctactattattccacaatgctcacaacattacctctctccggtgacagacgcgggatttcaacacccaactatacaatcctacatgctacatgaggccatcgtagcaagcatcttacggtcattagcattaaccctccaa

SEQ ID NO: 71347 - DNA, 114 bp, Zea mays
cagaccattagctttatctactccagagcgcagaagaacttgatcgacaccatgagggtgttgctcgttgccctcgctctcctggctctcgctgcgagcgccacctccacacaa

SEQ ID NO: 71348 - DNA, 256 bp, Zea mays
caacaagcaacatagatagtggaatccagtagcaacaatagagcaacaatggcgaccaagatactttccctccttatgctccttgctctttctgcatgtgttgctaacgcgacaattttccctcaatgctcacaagctcctatagcttcccttcttcacccataccttccatcaatgatagcttcagtatgtgaaaacccagctcttcaaccctataggctccaacaagcaatcgcagcaagcaacatacctttat

SEQ ID NO: 71349 - DNA, 255 bp, Zea mays
gaatctatcaatgctttgcctacatataaattcaaaatcaagaaacgtcgccatggttcaggcagtgaaactgaaggccaggaaggagggatattggctgcaggaactgacaaggagcgatcactctctgctgaagacgcagtttgctgcatctgtcttgcaaaatatgcgcacaatgatgagctccgtgaacttccatgtgcacactgtttccacaaggactgtgttgataaatggctcaagataaatgcactt

SEQ ID NO: 71350 - DNA, 256 bp, Zea mays
caactagcaacatagaaagcacaatagtgtaccaacaatggcagccaaaatattttgcttccttatgctccttggtctttctgcaagtgttgctaccgcaaccattttcccacaatgctcacaagctcctatagcttcccttcttcccccatacctctcaccagcggtgtcttcaatgtgtgaaaacccaattgttcaaccctacaggatccaacaggcaatcgcaacaggcatcttaccattatcacccttgttc

SEQ ID NO: 71351 - DNA, 253 bp, Zea mays
  unsure (1)..(253): unsure at all n locations
cttctggtacaggtgtatgtaattttgaagtaacaaaggatttggnacccagccctctgttctccaccaccgcttcgaagtttgccgcaggtaatggtggtggcacggaacttcatggatatggtggctgctcttcctgcgggcaagcttgatatgctctatgactcagcctttatctgtgaggcagtactcaggtcacttcccccactggcaaagaagtatgcactgcagatgttgtatgtgctggcaccag

SEQ ID NO: 71352 - DNA, 253 bp, Zea mays
gcaacatagaaagcacaatagtgtaccaacaatggcagccaaaatattttgcctccttatgctccttggtctttctgcaagtgctgctacggcgaccattttcccgcaatgctcgcaagctcctatagcttcccttcttcccccgtacctctcaccagcggtgtcttcggtatgtgaaaacccaattcttcaatcctacaggatccaacaggcaatcacagctggcatcttacctttatcacccttgttcctc

SEQ ID NO: 71353 - DNA, 254 bp, Zea mays
attgataccaactagcaaaatacatagtgaagtacactagcaacatcttagcaccaatgggagccaagattttttccctccttgccctccttgctctttcagcaagcgctgctacctctactattattccacaatgctcacaacattacctctctccggtgacagccgcgggatttcaacacccaactatacaatcctacatgctacatgaggccatcgtagcaagcatcttacggtcattagcattaaccctc

SEQ ID NO: 71354 - DNA, 252 bp, Zea mays; identical to SEQ ID NO: 27549

SEQ ID NO: 71355 - DNA, 249 bp, Zea mays
tgagcattcagaaacacaccaagcgtaggcactagcaacgacctaacaacaatggctaccaagatattagccctccttgcgcttcttgccctttttgtgagcgcaacaaatgcgttcattattccacaatgctcacttgctcctagtgccattattccacagttcctcccacctgttacttcaatgggcttcgaacacctagctgtgcaagccaacatgcaacaacaagcgcttgcggcgagcgtctta

SEQ ID NO: 71356 - DNA, 253 bp, Zea mays
gaaagtggaatacagtagcaacaatagagcaacaatggcgtccaagatattttccatccttatgctccttgctctttctgcatgtgttgctaacgcgaccatttttcctcaatactcacaagctcctatagctgcccttcttcccccataccttccatcaatgaccgcttcagtttgtgaaaacccagcccttcaaccctacaggctccaacaagcaatcgcaacaagcaacttacctttatcacccctgttc

SEQ ID NO: 71357 - DNA, 252 bp, Zea mays
ggacgatcaagtgtcggcatctcaaatacttaatacaatgtggaattcattgaaaggacggccagttctgggtcgtatataccaagggaaggagccaccacagtttgttgctcttttccagcccatgattatcttgaagggtggaattggatctggattcaagaagctcatagaagaaaagggtgcgacgggtgagacttatactactgaaggcatagctctaattcgagtatctgggacatctatccacaa

SEQ ID NO: 71358 - DNA, 248 bp, Zea mays
ctcgatggcgcgtctcgagaagatgatcggcttcttcttgatggcgcgtctcgaccgcgtgaagaacatgacaggcctggtggagatgtacggcaagaacgcgcgcctgagggagctggcgaacctcgtgatcgtcgccggtgaccacggcaaggagtccaaggacagggaggagcaggcggagttcaagaagatgtacagcctcatcgacgagtacaagttgaagggccatatccggtggatctcgg

SEQ ID NO: 71359 - DNA, 238 bp, Zea mays
gtagtatagccgctggctagctagctagttgagtcatttagcggcgatgattgagtaataatgtgtcacgcatcaccatgggtggcagtgtcagtgtgagcaatgacctgaatgaacaattgaaatgaaaagaaaaaaagtactccatctgttccaaattaaaaaaattttaaaaaataaaaaaaaaaaaaaaaaaagggcggccgccaataagggaccccgtcaccccgggaattaa

SEQ ID NO: 71360 - DNA, 250 bp, Zea mays
ctcgagccgattgttgttgcctaccccatgcaatttcttccattcaaccaactagcagcatagaactctgctgcttatttacagcagcaacaactactaccattcagccagctagctgatgtgagccctgctgccttcttgacacaacaacagttgttgccgttctacctgcacgctatgtttaacgctggcaccctcttacaactgcaacaattgctgccattcaaccaacttgctttgacaaacccaa

SEQ ID NO: 71361 - DNA, 247 bp, Zea mays
gaccaactagcaacatagaaagcacaatagtgtaccaacaatggcagccaaaatattttgcttccttatgctccttggtctttctgcaagtgctgctaccgcaaccattttcccacaatgctcacaagctcctatagcttcctttcttcccccatacctctcaccagcggtgtcttcagtatgtgaaaacccaattcttcaaccctacaggatccaacaggcaatcgcagcaggcatcttaccttta

SEQ ID NO: 71362 - DNA, 246 bp, Zea mays
cagcacgctgcgcctaacgctggcaccctcttacaattgttgccgttctaccagcacgctgcgcctaacgctggcaccctcttacaactgcaacaattgctgccattcaaccaacttgctttgacaaacccaacagcattctaccaacaacccatcattggtggtgccctcttttagatttcttatgagttatagttcaataataaagttttttgtctgatgtttgtggcttcccagaaataagaa

SEQ ID NO: 71363 - DNA, 246 bp, Zea mays
caactagcaacatagaaagcacaatagtgtaccaacaatggcagccaaaatattttgcttccttatgctccttggtctttctgcaagtgttgctaccgcaaccattttcccacaatgctcacaagctcctatagcttcccttcttcccccatacctctcaccagcggtgtcttcaatgtgtgaaaacccaattgttcaaccctacaggatccaacaggcaatcgcaacaggcatcttaccattatc

SEQ ID NO: 71364 - DNA, 252 bp, Zea mays
gagaccaactagcgacatagaaagcacaatagtgtaccaacaatggcagccaaaatattttgcttccttatgctccttggtctttctgcaagtgttgctaccgcaaccattttcccacaatgctcacaagctcctatagcttcccttcttcccccatacctctcaccagcggtgtcttcaatgtgtgaaaacccaattgttcaaccctacaggatccaacaggcaatcgcaacaggcatcttaccattatca

SEQ ID NO: 71365 - DNA, 250 bp, Zea mays
gtgaaaacccagctcttcaaccctataggctccaacaagcaatcgcagcaagcaacatacctttatcacccttgtttcaacaatcgccagccctatctttggtgcagtcattggtacaaaccatcaaggcacagcagctgcagcaactcgtgctacctgtgatcaaccaagtagctctggcaaacctttctccctactatcagcaacaacaatttcttccattcaaccaactatctacactgaaccctgc

SEQ ID NO: 71366 - DNA, 252 bp, Zea mays
  unsure (1)..(252): unsure at all n locations
gaaatgcaagcccgtgccatctttgaagctgctatagcgatgaccaaccagggcgttcaagtctttccagagataatggttcctcttgttggaacaccgcaggaattgggacatcaggtggcccttatccgtcaagtcgctaacaaagttttcaccagtatggggaaaactattgggtacaagatcggaacgatgattganattcccagggcagctctagtggctgacgagatcgcggacaggctgaattct

SEQ ID NO: 71367 - DNA, 272 bp, Zea mays
aagcaacatagaaagtagaatccattagcaacaatagagcaacaatggcgaccaagatattttccctccttatgctccttgctctttctacatgtgttgctaacgcgacaattttccctcaatgctcacaagctcctatagcttcccttcttcccccataccttccatcaattatagcttcagtatgtgaaaacccagctcttcaaccatataggcttcaacaagcaatcgcagcaagcaacatacctttatcgcccttgttgtttcaacaa

SEQ ID NO: 71368 - DNA, 264 bp, Zea mays
cagaaacacaccaagcgaagccactagcaacgacctaacaacaatggctaccaagatattagccctccttgcgcttcttgccctttttgtgagcgcaacaaatgcgttcattattccacaatgctcacttgctcctagtgccattattccacagttcctcccaccagttacttcaatgggcttcgaacacctagctgtgcaagccaacatgcaacaacaagcgcttgcggcgagcgtcttacaacaaccaattgcccaattgca

SEQ ID NO: 71369 - DNA, 263 bp, Zea mays
cgctcaccctctcaccaaatccttctcctccgcgccgccacagccgggcgcgcctccccgatcgagatccaggagatatgcctcgttatgatgatcgccatgggaatacacgcttgtatgttggaagattggcccctcgcacccgttcccgcgacctagaatatcttttcagcaaatatggaagaatacgtgaagtggagttgaagcgtgactatgcattcattgaattcagtgacccccgtgatgctgatgatgcgcagtac

SEQ ID NO: 71370 - DNA, 258 bp, Zea mays
tgcaacatagaaagtggaatacagtagcaacaatagagcaacaatggcggccaagatattttccatccttatgctccttgctctttctgcatgtgttgctaacgcgaccatttttcctcaatactcacaagctcctatagctgcccttcttcccccataccttccatcaatgaccgcttcagtttgtgaaaacccagcccttcaaccctacaggctccaacaagcaatcgcatcaagcaacttacctttatcacccct

SEQ ID NO: 71371 - DNA, 256 bp, Zea mays
ctccgctcgccaccagctttgaccgcctcccctcccctccgctcctgttactccataccccacccccccgcaggagcggcgcggcggcggcggcggcaaagccaaaggcaagatgttcgggcgcgcgccgaagaagagcgacaacaccaagtactacgagatcctcagggtgcccaagtcggtctcccaggacgacctcaagaaggcctaccgcaaggcagctatcaagaaccaccccgacaagggcggtgacccc

SEQ ID NO: 71372 - DNA, 258 bp, Zea mays
gcaacaactactaccattcagccagctagctgatgtgagccctgctgccttcttgacacaacaacagttgttgccgttctacctgcacgctatgcctaacgctggcaccctcttacaactgcaacaattgctgccattcaaccaacttgctttgacaaacccaacagtgttctaccaacaacccatcattggtggtgccctcttttagattgcttatgagttatagttcaataatgaagttttttggatgatgtttgt

SEQ ID NO: 71373 - DNA, 258 bp, Zea mays
ttttgagcattcagaaacataccaagcgaacacattagcaacaacctaacaacaatggctaccaagatattatccctccttgcgcttcttgcgctttttgcgagcgcaacaaatgcgttcattattccacaatgctcacttgctccaagttccattattacacagttcctcccaccagttacttcaatgggcttcgaacacccagctgtgcaagcctataggctacaacaagcaattgcggcgagcgtcttacaacaa

SEQ ID NO: 71374 - DNA, 261 bp, Zea mays; identical to SEQ ID NO: 68728

SEQ ID NO: 71375 - DNA, 260 bp, Zea mays
ggcaaacgtagctgcataccaacaacaacaacagttgcaacagtttctgccagcgctcagtcaactagccatggtgaaccctatcgcctacctacaacagcaacaacttctttcatctagcccgctcgctatgggcaatgcacctacatacctgcaacaacagttgttgcaacaacagttgctgcaacaaattacaccagctcttactcagctagctgtggcaaaccctgctgcctacttgcaacaactacttccattca

SEQ ID NO: 71376 - DNA, 267 bp, Zea mays
cgcactagcaacgacctaacaacaatggctaccaagatattagccctccttgcgcttcttgccctttttgtgagcgcaacaaatgcgttcattattccacaatgctcacttgctcctagtgccattattccacagttcctcccaccagttacttcaatgggcttcgaacacctagctgtgcaagccaacatgcaacaacaagcgcttgcggcgagcgtcttacaacaaccaattgcccaattgcaacaacaatccttgccacatcta

SEQ ID NO: 71377 - DNA, 258 bp, Zea mays
tttcagcattcaaaaacacaccaagcgaagcgcactagcaacgacctaacaccaatggctaccaagatattagccctccttgcgcttcttgcccttttagtgagcgcaacaaatgcgttcattattccacagtgctcacttgctcctagtgccagtattccacagttcctcccaccagttacttcaatgggcttcgaacatccagccgtgcaagcctacaggctacaactagcgcttgcggcgagcgccttacaacaa

SEQ ID NO: 71378 - DNA, 258 bp, Zea mays
caacaagcaacatagaaagtggaatccagtagcaacaatagagcaacaatggcgaccaagatactttccctccttatgctccttgctctttctgcatgtgttgctaacgcgacaattttccctcaatgctcacaagctcctatagcttcccttcttcccccataccttccatcaatgatagcttcagtatgtgaaaacccagctcttcaaccctataggctccaacaagcaatcgcagcaagcaacatacctttatca

SEQ ID NO: 71379 - DNA, 254 bp, Zea mays
gcaacatagagagcactatagtgtaccatcaatggcagccaatatattttgcctccttatgctccttggtctttctgcaagtgctgctacggcgaccattttcccgcaatgctcgcaagctcctatagcttcccttcttcccccgtacctctcaccagcggtgtcttcggtatgtgaaaacccaattcttcaaccctacaggatccaacaggcaatcgcagctggcatcttacctttatcacccttgttcctcc

SEQ ID NO: 71380 - DNA, 254 bp, Zea mays
gagaccaactagcaacatagaaagcacaatagtgtaccaacaatggcagccaaaatattttgcttccttatgctccttggtctttctgcaagtgttgctaccgcaaccattttcccacaatgctcacaagctcctatagcttcccttcttcccccatacctctcaccagcggtgtcttcaatgtgtgaaaacccaattgttcaaccctacaggatccaacaggcaatcgcaacaggcatcttaccattatcacc

SEQ ID NO: 71381 - DNA, 255 bp, Zea mays
atcccggtcggcggcggcgactcgtcgatgaggatgtgcacgccggggcagagcggcgcctgctcccccgcgatcccgggcatgccacggcactcggacgtccacatgatggatgtggtctcggacgagttcgcgttcgggagcagcaccaacggcgcgcacaggccgccgggctggtgagggcctgggagggcgagcggatccacgaggactctgggtccgacgacctggagctgaccctgaagctctagggca

SEQ ID NO: 71382 - DNA, 260 bp, Zea mays
atcgatcgccacagccaacaccacccgccgaggcgacgcgacagccgccaggaggaaggaataaactcactgccagccagtgaagggggagaagtgtactgctccgtcgaccagtgcgcgcaccgcccggcagggctgctcatctcgtcgacgaccagatcaagatgggagacgggtacgagacggtcaggttcttccactgctacaagcgcggagtggaccgcgtgttcgttgaccacccactgttcctggagagggtt

SEQ ID NO: 71383 - DNA, 258 bp, Zea mays
cagcaacaatttcttccatttaaccaattggccgcactgaacccctctgcttatttccagcagcaaatactactaccatttggccagctagctacaacaagccccacttcctttttgaaacaacaacaattgcttccgttctaccagcagtttgtggctaaccccgcaaccctcttacaactgcaacagttgctgccctttgtccaacttgctttgacaaacccagcagccttctaccaacaacacatcattggcggt

SEQ ID NO: 71384 - DNA, 259 bp, Zea mays
gcaacatagaaagcacaatagtgtaccaacaatggcagccaaaatattttgcctccttatgctccttggtctttctgcaagtgctgctacggcgaccattttcccgcaatgctcgcaagctcctatagcttcccttcttcccccgtacctctcaccagcggtgtcttcggtatgtgaaaacccaattcttcaaccctacaggatccaacaggcaatcgcagctggcatcttacctttatcacccttgttcctccaacaa

SEQ ID NO: 71385 - DNA, 259 bp, Zea mays
  unsure (1)..(259): unsure at all n locations
cttgattttgagcccttcaatgcctcctttcctcgtccttccatgtncgaagtccatcggaaatggagtgcaattccttaaccgacacctgtcgtccaagttgttccaggacaaggagagtttgtaccccttgctgaacttcctcaaggctcataactacaagggcacgacgatgatgttgaatgacagantccaaagccttcgtggtctccaatcatccctgngaaaggcagaggagtatctactgagtgttcctcaa

SEQ ID NO: 71386 - DNA, 268 bp, Zea mays
ccgacctgcagcaaccagcatgtgccaggcttcatcacacaggctgagcagctcaaagccaagggtgtagacgagatcctgcttatcagcgttaacgaccccttcgtcatgaaggcgtgggcgaagacctaccccgagaacaagcacgtgaagttcctcgccgacggatctggagcgtacaccaaggcgctcgacctcgagctcgatctcacggacaaagggctgggcgtgcgctcgaagaggttcgctctcctggccgacgacctca

SEQ ID NO: 71387 - DNA, 265 bp, Zea mays
ctcgagccgatagaaagcacaatagtgtaccaacaatggcagccaaaatattttgcctccttatgctccttggtctttctgcaagtgctgctacggcgaccattttcccgcaatgctcgcaagctcctatagcttcccttcttcccccgtacctctcaccagcggtgtcttcggtatgtgaaaacccaattcttcaaccctacaggatccaacaggcaatcacagctggcatcttacctttatcacccttgttcctccaacaatc

SEQ ID NO: 71388 - DNA, 262 bp, Zea mays
attattgataccaactagcaaaatacatagtgaagtacactagcaacatcttagcaccaatgggagccaagattttttccctccttgccctccttgctctttcagcaagcgctgctacctctactattattccacaatgctcacaacaatacctctctccggtgacagccgcgggatttcaacacccaactatacaatcctacatgctacatgaggccatcgtagcaagcatcttacggtcattagcattaaccctccaaca

SEQ ID NO: 71389 - DNA, 259 bp, Zea mays
cgcaacagcaacaacagttcctaccagcactgagccacctagccatggtgaaccctgtcgcctacttgcaacagcagctgcttgcatccaacccacttgctctagcaaacgtagttgcaaaccagcaacaacaacaactgcaacagtttctgccagcgcttagtcaactagccatggtgaaccctgccgcctacctacaacagcaacaactgctttcatctagcccgctcgctgtggccaatgcacctacatacctgca

SEQ ID NO: 71390 - DNA, 256 bp, Zea mays
ctcgagcgattcggtcgagctttggtgcatttattggcacaccacatcagggcacaacaactacaacaacttgtgactagcaaaccttgctgcctactctcagcaacaacagtttcttccattcaaccaactagctgcattgaactctgcttcttatttgcaacaacaacaactaccattcagccagctatctgctgcctacccccagcaatttcttccattcaaccaactgacagctttgaactctcctgcttat

SEQ ID NO: 71391 - DNA, 255 bp, Zea mays
gcaacaacagagcaacaatggcgaccaagatattttccctccttatgctccttgctctttctgcatgtgttgctaacgcgacaattttccctcaatgctcacaagctcctatagcttcccttcttcccccataccttccatcaatgatagcttcagtatgtgaaaacccagctcttcagccctataggctccaacaagcaatcgcagcaagcaacatacctttatcacccttgttgtttcaacaatcgccagccc

SEQ ID NO: 71392 - DNA, 256 bp, Zea mays
attttgagcattcagaaacacaccaagcgaacgcagctagcaacgacctaacaacaatggctaccaagatattagccctccttgcgcttcttgccctttttgtgagcgcaacaaatgcgttcattattccacaatgctcacttgctcctagtgccattattccacagttcctcccaccagttacttcaatgggcttcgaacacctagctgtgcaagccaacatgcaacaacaagcgcttgcggcgagcgtcttaca

SEQ ID NO: 71393 - DNA, 250 bp, Zea mays
gagcattcagaaacacaccaagcgaagacattagcaacaacctaacaacaatggctaccaagatattatccctccttgcgcttcttgcgctttttgcgagcgcaacaaatgcgttcattattccacaatgctcacttgctccaagttccattattacacagttcctcccaccagttacttcaatgggcttcgaacacccagctgtgcaagcctataggctacaacaagcaattgcggcgagcgtcttaca

SEQ ID NO: 71394 - DNA, 256 bp, Zea mays
cactccgctcggccaccagctttgaccgcctcccctcccctccgctcctgttcctccataccccacccccccgcaggagcggcgcggcggcggcggcggcaaagccaaaggcaagatgttcgggcgcgcgccgaagaagagcgacaacaccaagtactacgagatcctcggggtgcccaagtcggcgtcccaggacgacctcaagaaggcctaccgcaaggcagctatcaagaaccaccccgacaagggcggtgac

SEQ ID NO: 71395 - DNA, 257 bp, Zea mays
caaccgtcagccctattacagcagttacctttggtgcatttgttggcacaaaacatcaaggcacaacaactacaacaacttgtgctaggaaaccttgctgcctactctcagcaacagcagtttcttccattcaaccaactggctgcattgaactctgctgcttatttgcaacaacaactaccattcagtcagctagctgctgcctacccccagcaatttcttccattcaaccaactggcagcattgaactctgctgc

SEQ ID NO: 71396 - DNA, 261 bp, Zea mays
caactagcaacatagaaagcacaatagtgtaccaacaatggcagccaaaatattttgcctccttatgctccttggtctttctgcaagtgctgctacggcgaccattttcccgcaatgctcgcaagctcctatagcttcccttcttcccccgtacctctcaccagcggtgtcttcggtatgtgaaaacccaattcttcaaccctacaggatccaacaggcaatcacagctggcatcttacctttatcacccttgttcctcca

SEQ ID NO: 71397 - DNA, 259 bp, Zea mays; identical to SEQ ID NO: 28330

SEQ ID NO: 71398 - DNA, 259 bp, Zea mays
caactagcaacatagaaagcacaatagtgtaccaacaatggcagccaaaatattttgccttcttatgctccttggtctttctgcaagtgctgctacggcgaccattttcccgcaatgctcgcaagctcctatagcttcccttcttcccccgtacctctcaccagcggtgtcttcggtatgtgaaaacccaattcttcaaccctacaggatccaacaggcaatcacagctggcatcttacctttatcacccttgttcctc

SEQ ID NO: 71399 - DNA, 256 bp, Zea mays
ccgggtgtgggcagccgagcgccatgttccagccgctccggcaacagtgctgccagcagcagatgaggatgatggacgtgcagtccgtcgcgcagagctgcagatgatgatgcagcttgagcgtgccgctgccgccagcagcagcctgtacgagccagctctgatgcagcagcagcagcagctgctggcagcccagggtctcaaccccatggccatgatgatggcgcagaacatgccggccatgggtggactctac

SEQ ID NO: 71400 - DNA, 254 bp, Zea mays
cattcaaaaacacaccaagcgaagccactagcaacgacctaacaccaatggctaccaagatattagccctccttgcgcttcttgcccttttagtgagcgcaacaaatgcgttcattattccacagtgctcacttgctcctagtgccattattccacagttcctcccaccagttacttcaatgggcttcgaacatccagccgtgcaagcctacaggctacaactagcgcttgcggcgagcgccttacaacaacca

SEQ ID NO: 71401 - DNA, 256 bp, Zea mays; identical to SEQ ID NO: 68767

SEQ ID NO: 71402 - DNA, 252 bp, Zea mays
ccacacagaagcggcggcggcggagcaaacgcaggcgaaggcgagggtgtgagggaaggagcaccagccatggtgcacgtcaacttctaccgcaactatggtaagacgttcaagaaaccaaggcgtccttatgagaaggagcgtcttgatgctgaactgaagctggttggtgagtatgggctgaggtgcaagcgtgagctttggagggtccagtatgcactgagcaggatccgtaatgctgcaaggcacttg

SEQ ID NO: 71403 - DNA, 253 bp, Zea mays
cggtgtggtcctgcagtccttcctgcagcagcagccgcagggcgagactcgcggcgctgactagcggcccaggtagcgcagcagctgacggcgatggccggtcggcagctgcagcagccatggtcgctgcccttgcaacgcaactgccggcggtgtctactactgaggcaactatgtactgtagtactaatgtactggtgccgctgactagctacctatagggctatagctaggtcactcgcttagcggcgat

SEQ ID NO: 71404 - DNA, 250 bp, Zea mays
aacaacagttgctgcaacaaattgtaccagctctgactcagctagctgtggcaaaccctgctgcctacttacaacagttgcttccattcaaccaactggctgtgtcaaactctgctgcgtacctacaacagcgacaacagttacttaatccattggcagtggctaacccattggtcgctaccttcctgcagcagcaacaacaattgctgccatacaaccagttctctttgatgaaccctgccttgcagca

SEQ ID NO: 71405 - DNA, 251 bp, Zea mays
cggtatgtgaaaacccaattcttcaaccctacaggatccaacaggcaatcgcagctggcatcttacctttatcacccttgttcctccaacaatcatcagccctattacagcagttacctttggtgcatttattggcacaaaacatcagggcacaacaactacaacaacttgtgctagcaaaccttgctgcctactctcagcaacagcagtttcttccattcaaccaactagctgcattgaactctgcttct

SEQ ID NO: 71406 - DNA, 249 bp, Zea mays
gcagcaacaactactaccattcagccagctagctggtgtgagccctgctaccttcttgacacaaccacaattgttgccgttctaccagcacgctgcgcctaacgctggcaccctcttacaactgcaacaattgctgccattcaaccaacttgctttgacaaacccaacagcattctaccaacaacccatcattggtggtgccctcttttagatttcttatgagttatagttcaataataaagttttttg

SEQ ID NO: 71407 - DNA, 255 bp, Zea mays
  unsure (1)..(255): unsure at all n locations
tctcgagccgaatcggctcgagttcagaaacacacctagcgaaggcanctagcaacgaccacacaacaatggctaccaagatattatccctctttgcgcttcttgccctttttgtgagcgcaacaaatgcgttcattattccacaatgctcacttgctcctagtgccattattccacagttcctccctccagttacttcaatgggcttcgaacacccagctgtgcaagcctacaggctacaacaagcgcttgcgg

SEQ ID NO: 71408 - DNA, 254 bp, Zea mays
gccagcgctcagtcaactagccatggtgaaccctgccgcctacctacaacagcaacaactgctttcatctagcccgctcgctgtggccaatgcacctacatacctgcaacaacaattgttgcaacagattgtaccagctctgactcagctagttgtggcaaaccctgctgcctacttgcaacagctgcttccattcaaccaactgactatgtcgaactctgctgcgtacctacaacagcgacaacagttactta

SEQ ID NO: 71409 - DNA, 265 bp, Zea mays
aatattttgagcattcagaaacacacctagcgaagcgcactagcaacgacctaacaacaatggcttccaagacattatccctccttgcgcttcttgccctttttgtgagtgcaacaaatgcgttcattattccacaatgctcacttgctccgagtgccattattccacagttcctccctccacgttacttcaatgggcttcgaacacccagctgtgcaagcctataggctacaacaagcgcttgcggcgagcgtcttagaacaac

SEQ ID NO: 71410 - DNA, 259 bp, Zea mays
caggatcgttgcaagaaaaacaccagagagcaggtgtcctgcaatttcattagcagaagttcctagcaaacaagcaagaaatgatcatgaggcagcagagaagcttaagtttgtcatttatcaaaggcccaaagcattccaaaatggaagcactgatttgggaaacaagaatggtgcaccaaaaactgttgaagagagaatagaggaatataataaagcacgagcacgcatcttcaatggttctgtttctgcagattct

SEQ ID NO: 71411 - DNA, 237 bp, Zea mays
cttcagaccattagctttatctactccagagcgcagaagaacccgatcgacaccatgagggtgttgctcgttgccctcgctctcctggctctcgctgcgagcgccacctccacgcatacaagcggcggctgcggctgccagccaccgccgccggttcatctaccgccgccggtgcatctgacacctccggttcacctgccacctccggtgcatctcccaccgccggtccacctggcg

SEQ ID NO: 71412 - DNA, 254 bp, Zea mays
caccaagcgaacacattagcaacaacctaacaacaatggctaccaagatattatccctccttgcgcttcttgcgctttttgcgagcgcaacaaatgcgttcattattccacaatgctcacttgctccaagttccattattacacagttcctcccaccagttacttcaatgggcttcgaacacccagctgtgcaagcctataggctacaacaagcaattgcggcgagcgtcttacaacaaccaatttcccagttg

SEQ ID NO: 71413 - DNA, 257 bp, Zea mays
ctcgagccgcaacatagaaagtggagtacagtagcaacaatagacgcaacaatggcggccaagatattttccatccttatgctccttgctctttctgcatgtgttgctaacgcgaccatttttcctcaatactcacaagctcctatagctgcccttcttcccccataccttccatcaatgaccgcttcagtttgtgaaaacccagcccttcaacccgacaggctccaacaagcaatcgcaacaagcaacttaccttt

SEQ ID NO: 71414 - DNA, 254 bp, Zea mays
cgctgttccccgcaacctatcgacccaatctcgtccgacccggcgcgtcgtcccctccagatctccgtcgccctctccaggtagcagaaactgttctgctgcagtctgacaaagtggagggcttaggagcttctgcttcttttatgtctgaacaatctttgctttatttgggattgttgggagagtactctcgtgcaactaggaaaaggcacaaggttccgtcccactgcatgcgtcaagagactgtctggttt

SEQ ID NO: 71415 - DNA, 250 bp, Zea mays
cccatacctctcaccagcggtgtcttcaatgtgtgaaaccccaattgttcaaccctacaggatccaacaggcaatcgcaacaggcatcttaccattatcacccttgttcctccaacaaccgtcagccctattacagcagttacctttggtccatttggtggcacaaaacatcagggcacaacaactacaacaacttgtgctagcaaaccttgctgcatactctcagcaacatcagtttcttccattcaac

SEQ ID NO: 71416 - DNA, 249 bp, Zea mays
ctcgagccggtgaaaacccaattcttcaaccctacaggatccaacaggcaatcgcagcaggcatcttacctttatcacccttgttcctccaacaaccgtcagccctattacagcagttacctttggtgcatttgttggcacaaaacatcaaggcacaacaactacaacaacttgtgctaggaaaccttgctgcctactctcagcaacagcagtttcttccattcaaccaactggctgcattgaactctg

SEQ ID NO: 71417 - DNA, 249 bp, Zea mays
tgagcattcagaaacacaccaagcgaacgacactagcaacgacctaacaacaatggctaccaagatattagccctccttgcgcttcttgccctttttgtgagcgcaacaaatgcgttcattattccacaatgctcacttgctcctagtgccattattccacagttcctcccaccagttacttcaatgggcttcgaacacctagctgtgcaagccaacatgcaacaacaagcgcttgcggcgagcgtctt

SEQ ID NO: 71418 - DNA, 250 bp, Zea mays
attttgagcattcagaaacacaccaagcgaacagcattagcaacaacctaacaacaatggctaccaagatattatccctccttgcgcttcttgcgctttttgcgagcgcaacaaatgcgttcattattccacaatgctcacttgctccaagttccattattacacagttcctcccaccagttacttcaatgggcttcgaacacccagctgtgcaagcctataggctacaacaagcaattgcggcgagcgt

SEQ ID NO: 71419 - DNA, 252 bp, Zea mays
caacaagcaacatagaaagtggaatccagtagcaacaatagagcaactatggcgaccaagatattttccctccttatgctccttgctctttctacatgtgttgctaacgcgacaattttccctcaatgctcacaagctcctatagcttcccttcttcccccataccttccatcaattatagcttcaatatgtgaaaacccagctcttcaaccatataggcttcaacaagcaatcgcagcaagcaacatacct

SEQ ID NO: 71420 - DNA, 254 bp, Zea mays
caacatagaaagcacaatagtgtaccaacaatggcagccaaaatattttgcttccttatgctccttggtctttctgcaagtgctgctaccgcaaccattttcccacaatgctcacaagctcctatagcttcctttcttcccccatacctctcaccagcggtgtcttcagtatgtgaaaacccaattcttcaaccctacaggatccaacaggcaatcgcagcaggcatcttacctttatcacccttgttcctcca

SEQ ID NO: 71421 - DNA, 260 bp, Zea mays
gctcgagcggctcgagcggctcgagattgagaccaacaagcaacatagaaagtggaatccagtagcaacaacagagcaacaaacgcgaccaagatattttccctccttatgctccttgctctttctgcatgtgttgctaacgcgacaattttccctcaatgctcacaagctcctatagcttcccttcttcccccataccttccatcaatgatagcttcagtatgtgaaaacccagctcttcatccctataggctccaaca

SEQ ID NO: 71422 - DNA, 257 bp, Zea mays
ccattattccacagttcctcccaccagttacttcaatgggcttcgaacatccagccgtgcaagcctacaggctacaactagcgcttgcggcgagcgccttacaacaaccaattgcccaattgcaacaacaatccttggcacatctaaccctacaaaccattgcaacgcaacaacaacaacaacaacagtttctgccatcactgagccacctagccgtggtgaaccctgtcacctacttgcaacagcagctgcttgca

SEQ ID NO: 71423 - DNA, 254 bp, Zea mays
attgagaccaactagcaacatagaaagcacaatattgtaccaataatggcagccaaaatattttgcctcattatgctccttggtctttctgcaagtgctgctacggcgagcattttcccgcaatgctcacaagctcctatagcttcccttcttcccccatacctctcaccagcgatgtcttcagtatgtgaaaatccaattcttctaccctacaggatccaacaggcaatcgcagcaggcatcttacctttatc

SEQ ID NO: 71424 - DNA, 250 bp, Zea mays; identical to SEQ ID NO: 27168

SEQ ID NO: 71425 - DNA, 251 bp, Zea mays
gcgatttcgatctcgcagccacctttttttttgttctgttgtgtatctagtagttggaggagatatgcagtttgcacttgcattggacacgaactcaggtcctcaccagataagatcttgtgagggtgatgggattgacaggttggaaaaattaagtattgggggcagaaagcaggagaaagctttgagaaataggtgctttggtggtagagttgctgcaactacacaatgtattcttacctcagatgctt

SEQ ID NO: 71426 - DNA, 253 bp, Zea mays
ggctcgagcgaatcggctcgagcaagcaattgcggcgagcgtctaccaacaaccaatttcacagttgcaacaacaatcctgggcacatctaacaatacaaaccatcgcaacgcaacagcaacaacaattcctaccagcactgagccacctagccatggtgaaccctgccgcctacttgcaacagcagttgcttgcatcaaacccacttgctctggcaaacgtagttgcaaaccagccacaacaacagctgcaa

SEQ ID NO: 71427 - DNA, 249 bp, Zea mays
attttgagcattcagaaacacacctagcgaagcgcactagcaacgacctaacaacaatggcttccaagacattatccctccttgcgcttcttgccctttttgtgagtgcaacaaatgcgttcattattccacaatgctcacttgctccgagtgccattattccacagttcctccctccagttacttcaatgggcttcgaacacccagctgtgcaagcctataggctacaacaagcgcttgcggcgagcg

SEQ ID NO: 71428 - DNA, 246 bp, Zea mays
gaaaatttatctgggtactcgaggattattacagtcacaaatccattgacaacattgtaatcttgagtggcgatcagctttatcggatgaattacatggaacttgtgcagaaacatgtcgaggacgatgctgatatcactatatcatgtgctcctgttgatgagagccgagcttctaaaaatgggctagtgaagattgatcatactggacgtgtacttcaattctttgaaaaaccaaagggtgctg

SEQ ID NO: 71429 - DNA, 252 bp, Zea mays
ggcaatcgcagcaggcatcttacctttatcacccttgttcctccaacaaccgtcagccctattacagcagttacctttggtgcatttgttggcacaaaacatcaaggcacaacaactacaacaacttgtgctaggaaaccttgctgcctactctcagcaacagcagtttcttccattcaaccaactggctgcattgaactctgctgcttatttgcaacaacaactaccattcagtcagctagctgctgccta

SEQ ID NO: 71430 - DNA, 252 bp, Zea mays
tcaactagcaacatagaaagcacaatagtgtaccaacaatggcagctaaaatattttgcctccttatgctccttggtctttctgcaagtgctgctacggcgaccattttcccacaatgctcacaagctcctatagcttcccttcttcccccgtacctctcaccaacggtgtcttcggtatgtgaaaacccaattcttcaaccctacaggatccaacaggcaatcgcagctggcatcttacctttatcaccct

SEQ ID NO: 71431 - DNA, 257 bp, Zea mays
ctcgagccgaatcggctcgaggctgacggttgttggaggaacacgacatcagggcacaacaactacaacaacttgtgcagcgcaaaccttgctgcatactctcagcaacatcagtttcttccattcaaccaactggctgcattgaactctgctgcttatttgcaacaacaattaccattcagccagctagttgctgcctacccccagcaatttcttccattcaaccaactagcagcattgaactctgctgcttattt

SEQ ID NO: 71432 - DNA, 249 bp, Zea mays
cggacggacacacacacaaccagatctcccccaaatccacccgtcggcacctccgcttcaagatgcagatctttgtgaaaaccctgactggcaagactatcaccctcgaggtggagtcgtctgacaccattgacaacgttaaggccaagatccaggacaaggagggcatccccccagaccagcagcggctcatctttgctggcaaacagcttgaggacgggcgcacgcttgctgactacaacatccaga

SEQ ID NO: 71433 - DNA, 248 bp, Zea mays
cgctcaccctctcaccaaatccttctcctccgcgccgccacagccgggcgcgcctccccgatcgagatccaggagatatgcctcgttatgatgatcgccatgggaatacacgcttgtatgttggaagattggcccctcgcacccgttcccgcgacctagaatatcttttcagcaaatatggaagtctacgtgaagtggagttgaagcgtgactatgcattcattgaattcagtgacccccgtgatgct

SEQ ID NO: 71434 - DNA, 251 bp, Zea mays
gcattcaaaaacacaccaagcgaaggtcactagcaacgacctaacaccaatggctaccaagatattagccctccttgcgcttcttgcccttttagtgagcgcaacaaatgcgttcattattccacagtgctcacttgctcctagtgccagtattccacagttcctcccaccagttacttcaatgggcttcgaacatccagccgtgcaagcctacaggctacaactagcgcttgcggcgagcgccttacaac

SEQ ID NO: 71435 - DNA, 251 bp, Zea mays
  unsure (1)..(251): unsure at all n locations
tcagcattcaaaaacacaccaagcgaagtncactagcaacgacctaacaccaatggctaccaagatattagccctccttgcgcttcttgcccttttagtgagcgcaacaaatgcgttcattattccacagtgctcacttgctcctagtgccagtattccacagttcctcccaccagttacttcaatgggcttcgaacatccagccgtgcaagcctacaggctacaactagcgcttgcggcgagcgccttac

SEQ ID NO: 71436 - DNA, 250 bp, Zea mays
tgcaatctttggtcacttcctcactacactgccagccatgcattcgatgatcatttttgtctgcatcaaatgggtcccagttccagttgtgcctcagaatgaaaggttcctcttccgtcgtgtgtgcccaaagaactaccatatgttccgctgtattgctaggtatgggtataaggatgtacgcaaggagaaccaccaagcattcgaacagcttctgatagaaagccttgaaaagttcatacgccgagag

SEQ ID NO: 71437 - DNA, 249 bp, Zea mays
  unsure (1)..(249): unsure at all n locations
cacctagcgaaggnactagcaacgacctaacaacaatggcttccaagacattatccctccttgcgcttcttgccctttttgtgagtgcaacaaatgcgttcattattccacaatgctcacttgctccgagtgccattattccacagttcctccctccagttacttcaatgggcttcgaacacccagctgtgcaagcctataggctacaacaagcgcttgcggcgagcgtcttagaacaaccaattgccc

SEQ ID NO: 71438 - DNA, 261 bp, Zea mays
ctgcaagcaaggggtaaagtagaatccattagcaacaatagagcgacgatggcgaccacgatgttttccctccttatgctccttgctcttgctacatgtgttgctaacgtgataattttccctcaatgctcagaagttcctatagcttcgcttcttgcctcataccttgccatcaattatagcttcagtatgtggtaacccagctacttcaaccatataggcttcaataagcaatcggagctagccacatatctttatcgg

SEQ ID NO: 71439 - DNA, 250 bp, Zea mays
gaagctggtgcttgtggttcttgctttcattgcgttagtatcaagtgcttcttgtacacagacaggcggctgcagctgtggtcaacaacaaagccatgagcagcaacatcatccacaacaacatcatccacaaaaacaacaacatcaaccaccaccacaacatcaccagcagcagcaacaccaacaacaacaagttcacatgcaaccacaaaaacatcagctacaacaagaagttcatgttcaacaacaa

SEQ ID NO: 71440 - DNA, 246 bp, Zea mays
gcaacatagaaagcacaatagtgtaccaacaatggcagccaaaatattttgcctccttatgctccttggtctttctgcaagtgctgctacggcgaccattttcccacaatgctcacaagctcctatagcttcccttcttcccccgtacctctcaccagcggtgtcttcggtatgtgaaaacccaattcgtcaaccctataggatccaacaggcaatcgcagctggcatcttacctttatcaccctt

SEQ ID NO: 71441 - DNA, 246 bp, Zea mays
agaaagcacaatagtgtaccaacaatggcagccaaaatattttgcttccttatgctccttggtctttctgcaagtgctgctaccgcaaccattttcccacaatgctcacaagctcctatagcttcctttcttcccccatacctctcaccagcggtgtcttcagtatgtgaaaacccaattcttcaaccctacaggatccaacaggcaatcgcagcaggcatcttacctttatcacccttgttcctc

SEQ ID NO: 71442 - DNA, 245 bp, Zea mays
  unsure (1)..(245): unsure at all n locations
gagaccaactagcaacatagaaagcacaatagtgtaccaacaatggcagccaaaatattttgcctccttatgctccttggtctttctgcaagtgctgctacggcgatcattttcccacaatgctcacaagctcctatagcttcccttcttcccccgtacctctcaccagcggtgtcttcggtatgtgaaaacccaattctncaaccctataggattctacaggcaatcgcagctggcatcttacc

SEQ ID NO: 71443 - DNA, 245 bp, Zea mays
ctcgagccgattgttgttgcctacccccagcaatttcttccattcaaccaactagcagcagtgaactctgctgcttatttacagcagcaacaactactaccattcagccagctagctgatgtgagccctgctgccttcttgacacaacaacagttgttgccgttctacctgcacgctatgcctaacgctggcaccctcttacaactgcaacaattgctgccattcaaccaacttgctttgacaaa

SEQ ID NO: 71444 - DNA, 247 bp, Zea mays
atttatctcagatggttgcttactgagagaatgcaacatcgagcattctgtgattagagtctgctcacgtgtcagctctggatgtgaactcaaggactccgtgatgatgggagcggacatctatgaaactgaagaagaagcttcaaagctactgttagctgggaaggtcccagttggaataggaaggaacacaaagataaggaactgtatcattgacatgaatgctaggattgggaagaacgtggtg

SEQ ID NO: 71445 - DNA, 248 bp, Zea mays
agtttctgccaacgctcagtcaactagccatggtgaaccctgccgcctacgtacaacaacaacaactgctttcatctagcccgctcgctgtgggcaatgcacctacatacctgcaacaacaattgttgcaacagattgtaccagctctgactcaactagctgtggcaaaccctgttgcctacttgcaacagctgcttccattcaaccaactgactctgtcgaactctgctgcgtacctacaacagcga

SEQ ID NO: 71446 - DNA, 245 bp, Zea mays
cggctcgagcggctcgagcagaaacacacctagcgaagcgcactagcaacgacctaacaacaatggctaccaagatattatccctctttgcgcttcttgccctttttgtgagcgcaacaaatgcgttcattattccacaatgctcacttgctcctagtgccattattccacagttcctccctccagttacttcaatgggcttcgaacacccagctgtgcaagcctacaggctacaacaagcgctt

SEQ ID NO: 71447 - DNA, 250 bp, Zea mays
tagcaacatagaaagcacaatagtgtaccaacaatggcagccaaaatattttgcttccttatgctccttggtctttctgcaagtgctgctaccgcaaccattttcccacaatgctcacaagctcctatagcttcctttcttcccccatacctctcaccagcggtgtcttcagtatgtgaaaacccaattcttcaaccctacaggatccaacaggcaatcgcagcaggcatcttacctttatcacccttgt

SEQ ID NO: 71448 - DNA, 251 bp, Zea mays
ctcttacaactacaacaattgttgccctttgtccaacttgctttgacagaccgagcggcctcctaccaacaacacatcattggtggtgccctcttttagattgcttattagttgtaattcaataataaagttttttggatgatgtatgtggccaaccagaaataagaagttacatttccagattttaatgtgaaaaaaaaaagaaaaaaaaaaaaaaaagggggggcgcctgaaaataaccctttgccccc

SEQ ID NO: 71449 - DNA, 252 bp, Zea mays
agaaagcacaatagtgtaccaacaatggcagccaaaatattttgcttccttatgctccttggtctttctgcaagtgctgctaccgcaaccattttcccacaatgctcacaagctcctatagcttcctttcttcccccatacctctcaccagcggtgtcttcagtatgtgaaaacccaattcttcaaccctacaggatccaacaggcaatcgcagcaggcatcttacctttatcacccttgttcctccaacaa

SEQ ID NO: 71450 - DNA, 257 bp, Zea mays
aagaggccatcgcagcaagcatcttacggtcgttagcattgaccgtccaacaaccatatgccctattgcaacaaccatccttaatgaatctatatctccaaagaatcgcagcacaacaactacaacaacagttgcttccaacaatcaatcaagtagttgcagcgaaccttgctgcttacctccagcaacaacaatttcttccattcaatcaactagctggggtgaaccctgctgcttacttgcaggcacaacagcta

SEQ ID NO: 71451 - DNA, 258 bp, Zea mays
tttcagcattcaaaaacacaccaagcgaaggtcactagcaacgacctaacaccaatggctaccaagatattagccctccttgcgcttcttgcccttttagtgagcgcaacaaatgcgttcattattccacagtgctcacttgctcctagtgccagtattccacagttcctcccaccagttacttcaatgggcttcgaacatccagccgtgcaagcctacaggctacaactagcgcttgcggcgagcgccttacaacaa

SEQ ID NO: 71452 - DNA, 255 bp, Zea mays
ggtgaggcacagcgtcgaacggctggaccaggccgacgtctacagccctggggctgggaggatcacacgcctcaccagccacaagttccccgtcctcaacctcgtacagatgagcgcggtgcgggtagacctgtaccaggacgccatcatgtcgccgttctggaacttcaacgcccacagcgccatgtacggcatcaggggcagtgcaagggtccaggtcgccagcgacaacgggaccacggtgttcgacgacgt

SEQ ID NO: 71453 - DNA, 250 bp, Zea mays; identical to SEQ ID NO: 26415

SEQ ID NO: 71454 - DNA, 245 bp, Zea mays
cagtcgcacatctctactatactatactctaggacgcaaggacaccaccgccatggcagccaagatgcttgcattgttcgctctcctagctctttgtgcaagcgccactagtgcgacccatattccagggcacttgccaccagtcatgccattgggtaccatgaacccatgcatgcagtactgcatgatgcaacaggggcttgccagcttgatggcgtgtccgtccctgatgctgcagcaactgt

SEQ ID NO: 71455 - DNA, 243 bp, Zea mays
gacagaccccctttcccctccctcctcggcctcctcgaccactccgacgcccacagcgcctccggcgagctccacctctccaccggcggcagcgaggggcgagggggctaatactgtaggcggaggaggagccgagccgatggggcagcagtcgctgatctacgcgttcgtggcgcggggcaccgtggtgctggccgagtacaccgagttcaccggcaacttcaccaccatcgccgcccagtg

SEQ ID NO: 71456 - DNA, 243 bp, Zea mays
tagaaagtggaatccagtagcaacaatagagcaacaatggcgaccaagatactttccctccttatgctccttgctctttctgcatgtgttgctaacgcgacaattttccctcaatgctcacaagctcctatagcttcccttcttcccccataccttccatcaatgatagcttcagtatgtgaaaacccagctcttcaaccctataggctccaacaagcaatcgcagcaagcaacataccttta

SEQ ID NO: 71457 - DNA, 249 bp, Zea mays
gagaccaacaagcaacatagaaagtggaatccagtagcaacaatagagcaacaatggcgaccaagatactttccctccttatgctccttgctctttctgcatgtgttgctaacgcgacaattttccctcaatgctcacaagctcctatagcttcccttcttcccccataccttccatcaatgatagctttcgtatgtgaaaacccagctcttcaaccctataggctccaacaagcaatcgcagcaagca

SEQ ID NO: 71458 - DNA, 245 bp, Zea mays
ggctgttttcggtttaggagccgttggtcttgccgctgcagaaggtgcaaggattgctggagcgtcaaggatcattggtgtcgacctgaaccccagcagattcgaagaagctaggaagttcggttgcactgaatttgtgaacccaaaagaccacaacaagccagtgcaggaggtacttgctgagatgaccaacggaggggtcgaccgcagtgtggaatgcactggcaacattaatgctatgatcc

SEQ ID NO: 71459 - DNA, 245 bp, Zea mays
ggtatttggagaatgtcagtcctatcctgcaaagctatgggattgttgcgatcgctcccttttctcaccgccttgcatttgatgatttgcctgtggatcttcaacgcttgcgttgtaaagttaacttccaagctctggtcttccgttctcacattatctcacttggagaaacacttgtgaagcgcttgaggtctccggtccgggttcattccagtaaatctatccatcaagttgtaggagacaca

SEQ ID NO: 71460 - DNA, 252 bp, Zea mays
gcaacatagaaagcacaatagtgtaccaacaatggcagccaaaatattttgcctccttatgctccttggtctttctgcaagtgctgctacggcgaccattttcccgcaatgctcgcaagctcctatagcttcccttcttcccccgtacctctcaccagcggtgtcttcggtatgtgaaaacccaattcttcaaccctacaggatccaacaggcaatcgcagctggcatcttacctttatcacccttgttcct

SEQ ID NO: 71461 - DNA, 254 bp, Zea mays
gcaatgcacctacatacctgcaacaacagttcttgctgttgtaggtaggcgatagggttcaccagcgctcagtcaactagccatggtgaaccctatcgcctacctacaacagcactaactaccttcatctagcccgctcgctatgggcaatgcacctacatacctgcaacaacagttgttgcaacaacagctgctgcaacaacttgtaccagctcttactcagctagctgtggcaaaccctgctgcctacttgc

SEQ ID NO: 71462 - DNA, 251 bp, Zea mays
ccgtgccgcacctgcgaggagaggagacttcgccgcgaagctcgccatgatctcgccggagaggagctcgtcacagagccagcggtcgccggcggcgggggcgccgttcctctcgatctccgtcacggatcccgtaaagatgggtaccggcgtgcagtcctacatctcctaccgcgtcatcaccaagaccaacctccctgaatttgagggaccagagaaaattgttattcggcgctatagtgattttgaat

SEQ ID NO: 71463 - DNA, 240 bp, Zea mays
ccgccgccggtgcatctgccacctccggttcacctgccacctccggtgcatctcccaccgccggtccacctgccgccgccggtccacctgccaccgccggtccatgtgccgccgccggttcatctgccgccgccaccatgccactaccctactcaaccgccccggcctcagcctcatccccagccacacccatgcccgtgccaacagccgcatccaagcccgtgccagctgcagggaacc

SEQ ID NO: 71464 - DNA, 243 bp, Zea mays
attttgagcattcagaaacacaccaagcgaagaccattagcaacaacctaacaacaatggctaccaagatattatccctccttgcgcttcttgcgctttttgcgagcgcaacaaatgcgttcattattccacaatgctcacttgctccaagttccattattacacagttcctcccaccagttacttcaatgggcttcgaacacccagctgtgcaagcctataggctacaacaagcaattgcgg

SEQ ID NO: 71465 - DNA, 235 bp, Zea mays
gtgggattgaagccaacttatggacgagtttctcgttttggtctcatggcctacgcttcatcactagatgttgtgggatgctttggttcgtcggtttttgacactgcaaccatcttatctgttgttgctggccatgacaagatggacgcaaccagcagttcacaggttgttccagagtatgcatcggagttggtctccctagatttactagaatcgaaaccattaaatggtgtga

SEQ ID NO: 71466 - DNA, 244 bp, Zea mays
aacttctttcatctagcccgctcgctatgggcaatgcacctacatacctgcaacaacagttgttgcaacaacagttgctgcaacaaattgtaccagctcttactcagctagctgtggcaaaccctgctgcctacttgcaacaactacttccattcaaccaactgactgtgtcgaactctgctgcgtacctacaacagcgacaacagttacttaatccactagcggtggctaacccattggtcgc

SEQ ID NO: 71467 - DNA, 240 bp, Zea mays
ctcgagccgctcgagccgcaacaagcaacatagaaagtggaatccagtagcaacaatagaacaacaatggacgcccaagatactttccctccttatgctccttgctctttctgcatgtgttgctaacgcgacaattttccctcaatgctcacaagctcctatagcttcccttcttcccccataccttccatcaatgatagcttcagtatgtgaaaacccagctcttcaaccctataggct

SEQ ID NO: 71468 - DNA, 243 bp, Zea mays
attttcagcattcaaaaacacaccaagcgaacgaactagcaacgacctaacaccaatggctaccaagatattagccctccttgcgcttcttgcccttttagtgagcgcaacaaatgcgttcattattccacagtgctcacttgctcctagtgccagtattccacagttcctcccaccagttacttcaatgggcttcgaacatccagccgtgcaagcctacaggctacaactagcgcttgcggc

SEQ ID NO: 71469 - DNA, 251 bp, Zea mays; identical to SEQ ID NO: 27785

SEQ ID NO: 71470 - DNA, 243 bp, Zea mays
cagaaacacaccaagcgaaccaactagcaacgacctaacaacaatggctaccacgatattagccctccttgcgcttcttgccctttttgtgagcgcaacaaatgcgttcattattccacaatgctcacttgctcctagtgccattattccacagttcctcccaccagttacttcaatgggcttcgaacacctagctgtgcaagccaacatgcaacaacaagcgcttgcggcgagcgtcttaca

SEQ ID NO: 71471 - DNA, 242 bp, Zea mays
cttcgacaaagcgattggaattaatgttccccgctcaaggtttctcccagtgaaggctacatctgatctgttgcttgtgcagtctgatctttacaccttggttgatggctttgtcatccgcaacccatccagagcgaatccagctaacccttcaattgagcttggacctgagttcaagaaggttgccaatttccttgctcggttcaagtccatccccagcatagttgagcttgacagcttga

SEQ ID NO: 71472 - DNA, 240 bp, Zea mays
cgtcacctagcaattagctcatcgactccagattggagaactcgacaccatgaaggtgctgatcgttgcccttgctctcctggcgctcgctgcgagcgccgcctccagtacaagcggcggctgtggctgccagacaccaccgtttcatctaccgcctccgttctatatgccgcctccgttctatctgccgccgcagcagcagccgcagccatggcaataccccactcaacggccgcagct

SEQ ID NO: 71473 - DNA, 239 bp, Zea mays
attttcagcattcaaaaacacaccaagcgaaggtcactagcaacgacctaacaccaatggctaccaagatattagccctccttgcgcttcttgcccttttagtgagcgcaacaaatgcgttcattattccacagtgctcacttgctcctagtgccagtattccacagttcctcccaccagttacttcaatgggcttcgaacatccagccgtgcaagcctacaggctacaactagcgctt

SEQ ID NO: 71474 - DNA, 236 bp, Zea mays
caactagcaacatacatagtgaagtacactagcaacatcttagcaccaatgggagccaagatttttgccctccttgccctccttgctctttcagcaagcgctgctacctcgacttttattccacaatgctcacaacaatacctctctccggtgacagccgcgggatttcaatacccaactatacaatcctacatggtacaagaggccatccaagcaagcatcttacggtcattagc

SEQ ID NO: 71475 - DNA, 243 bp, Zea mays
tagaaagcacaatagtgtaccaacaatggcagccaaaatattttgcctccttatgctccttggtctttctgcaagtgctgctacggcgaccattttcccgcaatgctcgcaagctcctatagcttcccttcttcccccgtacctctcaccagcggtgtcttcggtatgtgaaaacccaattcttcaaccctacaggatccaacaggcaatcacagctggcatcttacctttatcacccttgtt

SEQ ID NO: 71476 - DNA, 235 bp, Zea mays
gacgtcagcctagcaattagctcatcgactccagattggagaactcgacaccatgaaggtgctgatcgttgcccttgctctcctggcgctcgctgcgagcgccgcctccagtacaagcggcggctgtggctgccagacaccaccgtttcatctaccgcctccgttctatatgccgcctccgttctatctgccgccgcagcagcagccgcagccatggcaataccccactcaacca

SEQ ID NO: 71477 - DNA, 244 bp, Zea mays
gagcattcagaaacacacctagcgaacgtcactagcaacgacctaacaacaatggctaccaagatattatccctctttgcgcttcttgccctttttgtgagcgcaacaaatgcgttcattattccacaatgctcacttgctcctagtgccattattccacagttcctccctccagttacttcaatgggcttcgaacacccagctgtgcaagcctacaggctacaacaagcgcttgcggcgagcg

SEQ ID NO: 71478 - DNA, 248 bp, Zea mays
gcaacatagaaagtggaatccagtagcaacaatagagcaacaatggcgaccaagatattttccctccttatgctccttgctctttctacatgtgttgctaacgcgacaattttccctcaatgctcacaagctcctatagcttcccttcttcccccataccttccatcaattatagcttcaatatgtgaaaacccagctcttcaaccatataggcttcaacaagcaatcgcagcaagcaacataccttt

SEQ ID NO: 71479 - DNA, 250 bp, Zea mays
ttgagaccaactagcaacatagaaagcacaatagtgtaccaacaatggcagccaaaatattttgcctccttatgctccttggtctttctgcaagtgctgctacggcgaccattttcccgcaatgctcgcaagctcctatagcttcccttcttcccccgtacctctcaccagcggtgtcttcggtatgtgaaaacccaattcttcaaccctacaggatccaacaggcaatcacagctggcatcttaccttt

SEQ ID NO: 71480 - DNA, 254 bp, Zea mays
ctcgagccggttttgagcattcagaaacacaccaagcgaagcgcactagcaacgacctaacagcaatggctaccaagatattagccctccttgcgcttcttgccctttttgtgagcgcaacaaatgcgttcattattccacaatgctcacttgctcctagtgccattattccacagttcctcccaccagttacttcaatgggcttcgaacacctagctgtgcaagccaacatgcaacaacaagcgcttgcggcg

SEQ ID NO: 71481 - DNA, 240 bp, Zea mays
cagcattcaaaaacacaccaagcgaaggccactagcaacgacctaacaccaatggctaccaagatattagccctccttgcgcttcttgcccttttagtgagcgcaacaaatgcgttcattattccacagtgctcacttgctcctagtgccagtattccacagttcctcccaccagttacttcaatgggcttcgaacatccagccgtgcaagcctacaggctacaactagcgcttgcggcg

SEQ ID NO: 71482 - DNA, 238 bp, Zea mays
gcgaacgcactagcaacgacctaacaacaatggctaccaagatattagccctccttgcgcttcttgccctttttgtgagcgcaacaaatgcgttcattattccacaatgctcacttgctcctagtgccattattccacagttcctcccaccagttacttcaatgggcttcgaacacctagctgtgcaagccaacatgcaacaacaagcgcttgcggcgagcgtcttacaacaaccaat

SEQ ID NO: 71483 - DNA, 238 bp, Zea mays
tcgaaaatgacactggctgatgatgtaaacctagaagagtttattatgtcaaaagatgagttttcaggtgctgacatcaaggccatttgtactgaagctggcttgcttgctttgagagagcggcggatgaaggtgacgcatgcagacttcaagaaggccaaagaaaaggttatgttcaagaagaaagaaggcgtgccggagggcttatatatgtgagactcatcagcagcgctattag

SEQ ID NO: 71484 - DNA, 240 bp, Zea mays
gagaccagcaagcaacatagaaagtagaatccattagcaacaatagagcaacaatggcgaccaagatattttccctccttatgctccttgctctttctacatgtgttgctaacgcgacaattttccctcaatgctcacaagctcctatagcttcccttcttcccccataccttccatcaattatagcttcagtatgtgaaaacccagctcttcaaccatataggcttcaacaagcaatcg

SEQ ID NO: 71485 - DNA, 242 bp, Zea mays
gaaagcacaatagtgtaccaacaatggcagccaaaatattttgcttccttatgctccttggtctttctgcaagtgttgctaccgcaaccattttcccacaatgctcacaagctcctatagcttcccttcttcccccatacctctcaccagcggtgtcttcaatgtgtgaaaacccaattgttcaaccctacaggatccaacaggcaatcgcaacaggcatcttaccattatcacccttgttc

SEQ ID NO: 71486 - DNA, 241 bp, Zea mays
attttgagcattcagaaacacaccaagcgaagtacattagcaacaacctaacaacaatggctaccaagatattatccctccttgcgcttcttgcgctttttgcgagcgcaacaaatgcgttcattattccacaatgctcacttgctccaagttccattattacacagttcctcccaccagttacttcaatgggcttcgaacacccagctgtgcaagcctataggctacaacaagcaattgc

SEQ ID NO: 71487 - DNA, 247 bp, Zea mays
caactagcaacatagaaagcacaatagtgtaccaacaatggcagccaaaatattttgcctccttatgctccttggtctttctgcaagtgctgctacggcgaccattttcccgcaatgctcgcaagctcctatagcttcccttcttcccccgtacctctcaccagcggtgtcttcggtatgtgaaaacccaattcttcaaccctacaggatccaacaggcaatcacagctggcatcttacctttatca

SEQ ID NO: 71488 - DNA, 249 bp, Zea mays
tgctgaaaagattcatggcgaatatgggagtttgtttgaccctattaaagctacagaagaaggccgagctgtgtactttactggagagatggtgttcccttgcatgttcgatgacatccctgctctacgagacctaaaggaggctgcctgtttgttagctgagaaggaagactggcctccgctctatgatgtcagcgtgttgaacaacaataaggttccggtagcggctgcggtgtactacgaggacat

SEQ ID NO: 71489 - DNA, 263 bp, Zea mays
tcgagccgaatcggctcgaccaactagcaacatagaaagcacaatagtgtaccaacaatggcagccaaaatattttgcttccttatgctccttggtctttctgcaagtgttgctaccgcaaccattttcccacaatgctcacaagctcctatagcttcccttcttcccccatacctctcaccagcggtgtcttcaatgtgtgaaaacccaattgttcaaccctacaggatccaacaggcaatcgcaacaggcatcttaccatt

SEQ ID NO: 71490 - DNA, 263 bp, Zea mays
agatagtggaatccagtagcaacaatagagcaacaatggcgaccaagatactttccctccttatgctccttgctctttctgcatgtgttgctaacgcgacaattttccctcaatgctcacaagctcctatagcttcccttcttcccccataccttccatcaatgatagcttcagtatgtgaaaacccagctcttcaaccctataggctccaacaagcaatcgcagcaagcaacatacctttatcacccttgtttcaacaatcg

SEQ ID NO: 71491 - DNA, 263 bp, Zea mays
caactagcaacatagaaagcacaatagtgtaccaacaatggcagccaaaatattttgcctccttatgctccttggtctttctgcaagtgctgctacggcgaccattttcccacaatgctcacaagctcctatagcttcccttcttcccccgtacctctcaccagcggtgtcttcggtatgtgaaaacccaattcttcaaccctataggatccaacaggcaatcgcagctggcatcttacctttatcacccttgttcctccaac

SEQ ID NO: 71492 - DNA, 263 bp, Zea mays
aagcaacatagaaagtggaatccagtagcaacaatagagcaacaatggcgaccaagatattttccctccttatgctccttgctctttctacatgtgttgctaacgcgacaattttccctcaatgctcacaagctcctatagcttcccttcttcccccataccttccatcaattatagcttcaatatgtgaaaacccagctcttcaaccatataggcttcaacaagcaatcgcagcacgcaacataccttaatcgcccttgttg

SEQ ID NO: 71493 - DNA, 260 bp, Zea mays
tgaatttgccagggaatacggttgtttgtttctagaatgcagtgcgaaaacaaaagtaaacgtagaacagtgttttgaggaactggttctaaagatcttagacacgccaagcctcctggcggatgcttcctcagcaggggtcagcaagaagaacatcttcaagcagaaggctccagaagctgacgccgccacaggcagctgctgttaacatggttttggtcctgtatattgctatatgtggtgaagacaattggcagcag

SEQ ID NO: 71494 - DNA, 263 bp, Zea mays
gcaacatagaaagcacaatagtgtaccaacaatggcagccaaaatattttgcttccttatgctccttggtctttctgcaagtgctgctaccgcaaccattttcccacaatgctcacaagctcctatagcttcctttcttcccccatacctctcaccagcggtgtcttcagtatgtgaaaacccaattcttcaaccctacaggatccaacaggcaatcgcagcaggcatcttacctttatcacccttgttcctccaacaaccgt

SEQ ID NO: 71495 - DNA, 262 bp, Zea mays
tagcaacatagaaagcacaatagtgtaccaacaatggcagccaaaatattttgcttccttatgctccttggtctttctgcaagtgctgctaccgcaaccattttcccacaatgctcacaagctcctatagcttcctttcttcccccatacctctcaccagcggtgtcttcagtatgtgaaaacccaattcttcaaccctacaggatccaacaggcaatcgcagcaggcatcttacctttatcacccttgttcctccaacaac

SEQ ID NO: 71496 - DNA, 261 bp, Zea mays
ccctaagcagggagttgatttatccgctgcagccatgagtaagttgcagtctgagtctgtcaaggatgccatctcccagattgttggggatgccaaggagaagaataggaagttcactgagactgtggaacttcagattggtctgaagaattatgatccacagaaggacaagcgtttcagtggctctgttaagttgccccatatccctcgtcccaagatgaaggtgtgcatgcttggtgatgcccagcatgttgaggaggc

SEQ ID NO: 71497 - DNA, 258 bp, Zea mays
ggcaatcgcaacaggcatcttaccattatcacccttgttcctccaacaaccgtcagccctattacagcagttacctttggtccatttggtggcacaaaacatcagggcacaacaactacaacaacttgtgctagcaaaccttgctgcatactctcagcaacatcagtttcttccattcaaccaactggctgcattgaactctgctgcttatttacagcagcaacaactactaccattcagccagctagctgatgtgag

SEQ ID NO: 71498 - DNA, 261 bp, Zea mays
caagcaacatagaaagtggaatccagtagcaacaatagagcaacaatggcgaccaagatattttccctccttatgctccttgctctttctacatgtgttgctaacgcgacaattttccctcaatgctcacaagctcctatagcttcccttcttcccccataccttccatcaattatagcttcaatatgtgaaaacccagctcttcaaccatataggcttcaacaagcaatcgcagcaagcaacatacctttatcgcccttg

SEQ ID NO: 71499 - DNA, 257 bp, Zea mays
caaccctctttttgggtcttcccgtattgaacaagcccacgttgagcaatggatggattttgccgcaacagaagttgatcctggtgttgcatggtacttgtatccaaggcttgggtacctcccttatgttagcacaactgaggaaacagctatttcttcattgaagaggtcgcttggtgctctgaacacacaccttgcttcaaacacataccttgttgggcatgctgttactctagctgacattgtaatgacatgca

SEQ ID NO: 71500 - DNA, 261 bp, Zea mays
caatgtcattgccaggagcagcaacagactacaaggtgcagctataactactatagcagtagctcaaatctaaaaaattgtcatgaattcctaaggcagcagtgcagccctttggtaatgccttttctccaatcacgtttgatacaaccaagtagctgccaggtattgcagcaacaatgttgtcatgatcttaggcagattgagccacaatacattcaccaagcaatctacaacatggttcaatccataatccaggaggag

SEQ ID NO: 71501 - DNA, 261 bp, Zea mays
gtggaatccagtagcaacaacagagcaacaatggcgaccaagatattttccctccttatgctccttgctctttctgcatgtgttgctaacgcgacaattttccctcaatgctcacaagctcctatagcttcccttcttcccccataccttccatcaatgatagcttcagtatgtgaaaacccagctcttcagccctataggctccaacaagcaatcgcagcaagcaacatacctttatcacccttgttgtttcaacaatcg

SEQ ID NO: 71502 - DNA, 261 bp, Zea mays
  unsure (1)..(261): unsure at all n locations
attttgagcattcagaaacacaccaagcgaagtnacctagcaacgacttaacaacaatggctaccaagatattagccctccttgcgcttcttgccctttttgtgagcgcaacaaatgcgttcattattccacaatgctcacttgctcctagtgccattataccacagttcctccgaccagttacttcaatgtgcttcgaacacctagctgtgcaagcctacaggctacaacaagcgcttgcggcgagcgtcttacaacaac

SEQ ID NO: 71503 - DNA, 259 bp, Zea mays
gcttgtcgggcctgaaggtgaagagcacgagtttgatgctccagacgacgcctacatccttgacgcagccgagactgccggtgtggagttgccatactcgtgccgtgctggggcttgctccacctgtgccggcaaaatcgagtctggttcggttgaccagtcggatgggtccttccttgatgacgggcagcaggaggaaggttatgtgctgacatgcgtctcctacccaaagtccgactgcgtcatccaccccacaagg

SEQ ID NO: 71504 - DNA, 259 bp, Zea mays
gaaacacaccaagcgaagcacattagcaacaacctaacaacaatggctaccaagatattatccctccttgcgcttcttgcgctttttgcgagcgcaacaaatgcgttcattattccacaatgctcacttgctccaagttccattattacacagttcctcccaccagttacttcaatgggcttcgaacacccagctgtgcaagcctataggctacaacaagcaattgcggcgagcgtcttacaacaaccaatttcccagt

SEQ ID NO: 71505 - DNA, 255 bp, Zea mays
cgaaaccaaggattgatccaggagcttccggaaggcgaggcgcgcgcgcactcgaggtgctggtgccggtgccgcccatggatcgggctcgcggatccgcgttcctgctcggcgtcctgctcgcaggatccttgttcgcgttttcagttgccaaagaggagaccaagaagctcgggaccgtgatcggtatcgatctcggtaccacctactcctgtgtcggtgtgtacaagaacggtcatgtcgagatcatcgcca

SEQ ID NO: 71506 - DNA, 257 bp, Zea mays
attcagaaacacaccaagcgaactacattagcaacaacctaacaacaatggctaccaagatattatccctccttgcgcttcttgcgctttttgcgagcgcaacaaatgcgttcattattccacaatgctcacttgctccaagttccattattacacagttcctcccaccagttacttcaatgggcttcgaacacccagctgtgcaagcctataggctacaacaagcaattgcggcgagcgtcttacaacaaccaatt

SEQ ID NO: 71507 - DNA, 254 bp, Zea mays
ccagagaccagtcagagacaagttctctaggctttcgcagatgtcgaccattttgaacttcgagcgggtatcggagatattggatttctggggtgacaatgctggccatctgacgtggctgttgacacctgcagaggtgcggagagtgttaggacttaggattgacttcaggcctgaagctattgctgctttgaggctctgaatcgtgcatttatttgtacttgttaattcattatatgtgatatatagcaacg

SEQ ID NO: 71508 - DNA, 256 bp, Zea mays
atttaaaaccagagtcattctctcgtcgtgtttgcaggcctttcagattgaaccgattacttcaacggtgtcatacatgattggtagggatgtgatggaggggagggggcaatgcaggtgcaggtgttgtactgtttcttagaattatccagcaacttcgatgggaggaattttgtttgagctgtgggcccaatttgagaagttttacatatagagtaaaaaaaggtcctgctctcgtgttttcgtgtaaaactgg

SEQ ID NO: 71509 - DNA, 258 bp, Zea mays
  unsure (1)..(258): unsure at all n locations
caaaaacacaccaagcgaaggnactagcaacgacctaacaccaatggctaccaagatattagccctccttgcgcttcttgcccttttagtgagcgcaacaaatgcgttcattattccacagtgctcacttgctcctagtgccagtattccacagttcctcccaccagttacttcaatgggcttcgaacatccagccgtgcaagcctacaggctacaactagcgcttgcggcgagcgccttacaacaaccaattgccca

SEQ ID NO: 71510 - DNA, 260 bp, Zea mays
ctcgagccgctcgagccgtgagcattcagaaacacacctagcgaactgcactagcaacgacctaacaacacatggcttccaagacattatccctccttgcgcttcttgccctttttgtgagtgcaacaaatgcgttcattattccacaatgctcacttgctccgagtgccattattccacagttcctccctccagttacttcaatgggcttcgaacacccagctgtgcaagcctataggctacaacaagcgcttgcggcg

SEQ ID NO: 71511 - DNA, 259 bp, Zea mays
gagaccagcaagcaacatagaaagtagaatccattagcaacaatagagcaacaatggcgaccaagatattttccctccttatgctccttgctctttctacatgtgttgctaacgcgacaattttccctcaatgctcacaagctcctatagcttcccttcttcccccgtacctctcaccagcggtgtcttcggtatgtgaaaacccaattcttcaaccctataggatccaacaggcaatcgcagctggcatcttaccttt

SEQ ID NO: 71512 - DNA, 257 bp, Zea mays
taataatgcagtaagacgacacacattattacatatatagatagagagagcttgatagaggagatttcccaaatatcatgaatcagtagtaacgcggaatggcagcggagacgccacaggggttggtgcggtagctgggcagctggtactggtagagtccacccatggccggcatgttctgcgccatcatcatggccatggggttgagaccctgggctgccagcagctgctgctgctgctgcatcagagctggctcg

SEQ ID NO: 71513 - DNA, 255 bp, Zea mays
gttgctgcctacccccagcaatttcttccattcaaccaactagcagcattgaactctgctgcttatttacagcagcaacaactactaccattcagccagctagctgatgtgagccctgctgccttcttgacacaacaacagttgttgccgttctacctgcacgctatgcctaacgctggcaccctcttacaactgcaacaattgctgccattcaaccaacttgctttgacaaactcaacagtgttctaccaacaa

SEQ ID NO: 71514 - DNA, 258 bp, Zea mays
ctcgagccgctcgagccgattcggctcgagcaactagcaacatagaaagcacaatagtgtattaacaatgtcagccaaaatattttgcctccttatgatccttggtctttctgcaagtgctgctacggcgaccattttcccgcaatgctcgcaagctcctatagcttcccttcttcccccgtacctctcaccagcggtgtcttcggtatgtgaaaacccaattcttcaaccctacaggatccaacaggcaatcacagc

SEQ ID NO: 71515 - DNA, 255 bp, Zea mays
attttggatgggaagattgaatgaagggttgtcattatttgatgcaatactgattgttccaatgtttcaaattgcttggaccttcttctctatctgtacaggatttgtttactttcaagaatatcaagtatttgatacgctcaggataattatggttgtattgggcatgacatttgtctttgttgggatctccttgctagcacccgatgacactaaagctgatacgaaagatggttcgagcactgccgaggaatc

SEQ ID NO: 71516 - DNA, 254 bp, Zea mays
gaccaactagcaacatagaaagcacaatagtgtaccaacaatggcagccaaaatattttgcctccttatgctccttggtctttctgcaagtgctgctacggcgaccattttcccacaatgctcacaagctcctatagcttcccttcttcccccgtacctctcaccagcggtgtcttcggtatgtgaaaacccaattcttcaaccctataggatccaacaggcaatcgcagctggcatcttacctttatcaccct

SEQ ID NO: 71517 - DNA, 256 bp, Zea mays
attcgagccgattcggttcacggctcgaggagaccaacaagcaccatagaaagtggaatccagtagcaacaacagagcaacaatggcgaccaagatattttccctccttatgctccttgctctttctgcatgtgttgctaacgcgacaattttccctcaatgctcacaagctcctatagcttcccttcttcccccataccttccatcaatgatagcttcagtatgtgaaaacccagctcttcagccctataggctc

SEQ ID NO: 71518 - DNA, 168 bp, Zea mays
aagcgaagctactagcaacgacctaacaccaatggctaccaagatattagccctccttgcgcttcttgcccttttagtgagcgcaacaaatgcgttcattattccacagtgctcacttgctcctagtgccattattccacagttcctcccaccagttacttcaatggg

SEQ ID NO: 71519 - DNA, 258 bp, Zea mays
gaccaactagcaacatagaaagcacaatagtgtaccaacaatggcagccaaaatattttgcttccttatgctccttggtctttctgcaagtgttgctaccgcaaccattttcccacaatgctcacaagctcctatagcttcccttcttcccccatacctctcaccagcggtgtcttcaatgtgtgaaaccccaattgttcaaccctacaggatccaacaggcaatcgcaacaggcatcttaccattatcacccttgtt

SEQ ID NO: 71520 - DNA, 255 bp, Zea mays
gcgcctccatttcggcctctgtccctcgcaagttcaatctcacctccaaccatgggtaaagagaagtcccacatcaacattgtggttattggtcatgtcgactctggcaagtcgaccaccacaggacaccttatctacaagcttggaggcattgacaagcgtgtgatcgagaggttcgagaaggaggctgctgaaatgaacaagcggtccttcaagtacgcgtgggtgctcgacaagctcaaggctgagcgtgag

SEQ ID NO: 71521 - DNA, 253 bp, Zea mays
ggcatcagtgcagcccgacggcgacgccctactgctcgcctcagtgccagtcgttgcggcagcagtgttgccagcagctcaggcaggtggagccgcagcaccggtaccaggcgatcttcggcttggtcctccagtccatcctgcagcagcagccgcaaagcggccaggtcgcggggctgttggcggcgcagatagcgcacaactgacggcgatgtgcggcctgcagcagccgactccatgcccctacgctgct

SEQ ID NO: 71522 - DNA, 258 bp, Zea mays
atattttgagcattcagaaacacaccaagcgaagtacattagcaacaacctaacaacaatggctaccaagatattatccctccttgcgcttcttgcgctttttgcgagcgcaacaaatgcgttcattattccacaatgctcacttgctccaagttccattattacacagttcctcccaccagttacttcaatgggcttcgaacacccagctgtgcaagcctataggctacaacaagcaattgcggcgagcgtcttaca

SEQ ID NO: 71523 - DNA, 129 bp, Zea mays
gggtcttcagaccattagctttatctactccagagcgcagaagaacccgatcgacaccatgagggtgttgctcgttgccttcgctctcctggctctcgctgcgagcgccacctccacgcatacaagggg

SEQ ID NO: 71524 - DNA, 254 bp, Zea mays
agaccaacaagcaacatagaaagtggaatccagtagcaacaacagagcaacaatggcgaccaagatattttccctccttatgctccttgctctttctgcatgtgttgctaacgcgacaattttccctcaatgctcacaagctcctatagcttcccttcttcccccataccttccatcaatgatagcttcagtatgtgaaaacccagctcttcagccctataggctccaacaagcaatcgcagcaagcaacatac

SEQ ID NO: 71525 - DNA, 235 bp, Zea mays
tgaacgtcgtcttcgtcggcgccgagatggcgccgtggagcaagaccggcggcctcggcgacgtcctcggcggcctgccgccggccatggccgcgaacgggcaccgtgtcatggtcgtctctccccgctacgaccagtacaaggacgcctgggacaccagcgtcgtgtccgagatcaagatgggagacgggtacgagacggtcaggttcttccactgctacaagcgcggagtgga

SEQ ID NO: 71526 - DNA, 253 bp, Zea mays
attttcagcattcaaaaacacaccaagcgaagcgcactagcaacgacctaacaccaatggctaccaagatattagccctccttgcgcttcttgcccttttagtgagcgcaacaaatgcgttcattattccacagtgctcacttgctcctagtgccagtattccacagttcctcccaccagttacttcaatgggcttcgaacatccagccgtgcaagcctacaggctacaactagcgcttgcggcgagcgcctt

SEQ ID NO: 71527 - DNA, 255 bp, Zea mays
cagaaacacaccaagcgaagcacattagcaacaacctaacaacaatggctaccaagatattatccctccttgcgcttcttgcgctttttgcgagcgcaacaaatgcgttcattattccacaatgctcacttgctccaagttccattattacacagttcctcccaccagttacttcaatgggcttcgaacacccagctgtgcaagcctataggctacaacaagcaattgcggcgagcgtcttacaacaaccaattt

SEQ ID NO: 71528 - DNA, 253 bp, Zea mays
cagaaacacaccaagcgaagcacattagcaacaacctaacaacaatggctaccaagatattatccctccttgcgcttcttgcgctttttgcgagcgcaacaaatgcgttcattattccacaatgctcacttgctccaagttccattattacacagttcctcccaccagttacttcaatgggcttcgaacacccagctgtgcaagcctataggctacaacaagcaattgcggcgcgcgtcttacaacaaccaat

SEQ ID NO: 71529 - DNA, 167 bp, Zea mays
atcctctccaattccacacaaaaccctagtgactagagagagtgatttgccgtgttcatttgagctcttgcgcttggatcgcattctttctttctcttttgctcttgtgatcaacactcaattgtaaccgaggcaagaggcaccgattgtgtggtggcccttgcggg

SEQ ID NO: 71530 - DNA, 252 bp, Zea mays
attattgataccaactagcaacatacatagtgaagtacactagcaacatcttagcaccaatgggagccaagatttttgccctccttgccctccttgctctttcagcaagcgctgctacctcgacttttattccacaatgctcacaacaatacctctctccggtgacagccgcgggatttcaatacccaactatacaatcctacatggtacaagaggccatccaagcaagcatcttacggtcattagcattaa

SEQ ID NO: 71531 - DNA, 254 bp, Zea mays
tattattgagaccaacaagcaacatagaaagtggaatacagtagcaacaatagagcaacaatggcggccaagatattttccatccttatgctccttgctctttctgcatgtgttgctaacgcgaccatttttcctcaatactcacaagctcctatagctgcccttcttcccccataccttccatcaatgaccgcttcagtttgtgaaaacccagcccttcaaccctacaggctccaacaagcaatcgcaacaag

SEQ ID NO: 71532 - DNA, 250 bp, Zea mays
gcagcaatcgcaggaaccctagcgccgccgcacccgcaggaatgggtatcgacctcgtcgccggtgggaggaataagaagaccaagcgcactgcgcccaagtctgacgatgtctacctcaagctcctcgtcaagctctaccgtttcttggtcaggaggaccaagagcaatttcaacgctgtcattctcaagaggcttttcatgagtaaaaccaaccgaccaccaatctccatgcgccgccttgtcaagtt

SEQ ID NO: 71533 - DNA, 253 bp, Zea mays
attttgagcattcagaaacacaccaagcgaagatcattagcaacaacctaacaacaatggctaccaagatattatccctccttgcgcttcttgcgctttttgcgagcgcaacaaatgcgttcattattccacaatgctcacttgctccaagttccattattacacagttcctcccaccagttacttcaatgggcttcgaacacccagctgtgcaagcctataggctacaacaagcaattgcggcgagcgtctt

SEQ ID NO: 71534 - DNA, 123 bp, Zea mays
caacaagcaacatagaaagtggaatccagtagcaacaacagagcaacaatggcgaccaagatattttccctccttatgctccttgctctttctgcatgtgttgctaacgcgacaattttccct

SEQ ID NO: 71535 - DNA, 250 bp, Zea mays
tgaatttcctatcaatcaaccggtttgagaggaaaaagaatcttgatcttgccatttcagcatttgctttgctccgttctgctgcttggactctacctggtgatgctctacaagaagcaacattaacagtggcaggtggctatgataagcgtctcaaggaaaatgttgaataccttgaggaactcaaaagactcgcattgacggaaggggtttctggacaggttaattttgttacatcttgctcaacatc

SEQ ID NO: 71536 - DNA, 121 bp, Zea mays
cgcgacatggacctgttcgagcacttcgccgccgtcgcccagcgcctcggcgtgtacaccgcccgggactacgcggacatcgtcgagttccttgtcaagcggtggaagctggagacactgg

SEQ ID NO: 71537 - DNA, 253 bp, Zea mays
gcaacatagaaagcacaatagtgtaccaacaatggcagccaaaatattttttactcttatgctccttggtctttctgcaagtgctgctacggcgaccattttcccgcaatgctcgcaagctcctatagcttcccttcttcccccgtacctctcaccagcggtgtcttcggtatgtgaaaacccaattcttcaaccctacaggatccaacaggcaatcacagctggcatcttacctttatcacccttgttcctc

SEQ ID NO: 71538 - DNA, 252 bp, Zea mays
gcaacatagaaagtggaatacagtagcaacaatagagcaacaatggcggccaagatattttccatccttatgctccttgctctttctgcatgtgttgctaacgcgaccatttttcctcaatactcacaagctcctatagctgcccttcttcccccataccttccatcaatgaccgcttcagtttgtgaaaacccagcccttcaaccctacaggctccaacaagcaatcgcaacaagcaacttacctttatca

SEQ ID NO: 71539 - DNA, 248 bp, Zea mays
cctagcccttgcgccgccgcctcctccgccacccagcgctcgagctcctcgcgtcctgcgagcgcgcgccgcaacgccaccatgaagttcaacatcgcgaaaccttccaccgggtgccaaaagaagctggaaatcgatgacgaccagaagctgcgtgccatttatgaccgaaggatatcccaggaggtcagtggtgatgctctgggtgaggagttcaagggttatgtcttcaagatcatgggtggatg

SEQ ID NO: 71540 - DNA, 247 bp, Zea mays
tcctgagctatgctatagatgatgcacagaaatatccataccttgcatcaatgggcatttatgtcttcaagaaagatgcacttttagaccttctcaagtcaaaatatattcaattacatgactttggatctgaaatcctcccaagagctgtactagatcatagtgtgcaggcatgcatttttacgggctattgggaggatgttggaacaatcaaatcattctttgatgcaaacttggccctcactga

SEQ ID NO: 71541 - DNA, 248 bp, Zea mays
agcaaggtttgctagcattcagccagctatctgctgcctacccccagcaatttcttccattcaaccaactgacagctttgaactctcctgcttatttacagcagcaacaactactaccattcagccagctagctggtgtgagccctgctaccttcttgacacaaccacaattgttgccgttctaccagcacgctgcgcctaacgctggcaccctcttacaactgcaacaattgctgccattcaaccaa

SEQ ID NO: 71542 - DNA, 270 bp, Zea mays
attgagaccaacaagcaacatagaaagtggaatacagtagcaacaatagagcaacaatggcggccaagatatttccatccttatgctccttgctctttctgcatgtgttgctaacgcgaccatttttcctcaatactcacaagctcctatagctgcccttcttcccccataccttccatcaatgaccgcttcagtttgtgaaaacccagcccttcaaccctacaggctccaacaagcaatcgcaacaagcaacttacctttatcacccct

SEQ ID NO: 71543 - DNA, 268 bp, Zea mays
atttactttacacaaagagttgacgcaactggtatgcccggactaggaccattacaaaaagtttgtgcggcctgcggatacttgcttatggcttaccttcagatgcggtagacgagtatattcaaattggggaatcaacggctagggaatgccttcatcatttttgtcgcgcaatcattgattgttttagtgcctggtatttacgcactccaactcaagatgacattactcgcatcatgcataatagtgagtcgcggggttttcctgg

SEQ ID NO: 71544 - DNA, 267 bp, Zea mays
ctcgagccgttgcaaaccatggacatggctttggcgtctaaagcctcccctccgccatggaatgccaccgccgcgagcagccaattccaaagcgtgacaaagccgctgcaaatgattcaacatacctcaatcctcaagctcatgatagtgttcttggaatcattctgggaggtggtgctgggactagattgtaccccttgacaaagaagcgtgccaagcctgcagtgccattgggtgccaactatagactgattgatattcctgtca

SEQ ID NO: 71545 - DNA, 268 bp, Zea mays
aacatcaaggcacaacaactacaacaacttgtgctaggaaaccttgctgcctactctcagcaacagcagtttctccattcaaccaactggctgcattgaactctgctgcttatttgcaacaacaactaccattcagtcagctagctgctgcctacccccagcaatttcttccattcaaccaactggcagcattgaactctgctgcttatttacaacagcaacagctaccaccattcagccagctagctgatgtgagccctgttgcctt

SEQ ID NO: 71546 - DNA, 270 bp, Zea mays
ctagcaacatacatagtgaagtacactagcaacatcttagcaccaatggcagccaagatttttgccatccttgccctccttgctctttcagcaagcgttgctaccgcgactattattccacaatgctcacaacaatacctctctccggtgacagccgcgagatttgaatacccaactatacaatcctacaggctacaagaggccatcgcagcaagcatcttacggtcgttagcattgaccgtccaacaaccatatgccctattgcaacaa

SEQ ID NO: 71547 - DNA, 264 bp, Zea mays
gggacaaaattcgactcaagccgtgatcgtggagaacccttcaagttcaagcttggacaaggtcaagtgataagggttgggatcaaggaatcaagaccatgaagaaaggagaaaatgctatttttaccattcctccagagctggcttatggagcatctggttcacctccaactatcccacccaatgcaaccctgcagtttgatgttgagctgctttcatggaccagtgtcaaagacatttgcaaagatggcggcatattcaaga

SEQ ID NO: 71548 - DNA, 266 bp, Zea mays
cacagatgatgacgcctaacatgatgtcaccattgatgatgccgagcatgatgtcaccaatggtcttgccggcatgatgtcgcaaatgatgatgccacaatgtcactgcgacgccgtctcgcagattatgctgcaacagcagttaccattcatgttcaacccaatggccatgacgattccacccatgttcttacagcaaccctttgttggtgctgcattctagatagaaatatttgtgttgtatcgaataatgagttgacatgcca

SEQ ID NO: 71549 - DNA, 262 bp, Zea mays
caggaatctatctggcagaaggtttttaagagttttaatgttaccgacagagatttagatgatttttttggtggaccagctttccttgcttgggctagaatggggaacttgcatgggtggggtggaccactgtcacaaaactggttggatcaacaattggcattgcagaagaaaattctatcccggatgattgagcttgggatggtccctgttcttccatcgttctcaggaaatgtcccagctattttcgcaaaattatttc

SEQ ID NO: 71550 - DNA, 265 bp, Zea mays
caaccctctttttgggtcttcccgtattgaacaagcccacgttgagcaatggatggattttgccgcaacagagttgatcctggtgttgcatggtacttgtatccaaggcttgggtacctcccttatgttagcacaactgaggaaacagctatttcttcattgaagaggtcgcttggtgctctgaacacacaccttgcttcaaacacataccttgttgggcatgctgttactctagctgacattgtaatgacatgcaacctctacc

SEQ ID NO: 71551 - DNA, 265 bp, Zea mays
ggcagcaacagtttcttccattcaaccaactagctgcattgaactctgcttcttatttgcaacaacaacactaccattcagccagctatctgctgcctacccccagcaatttcttccattcaaccaactgacagctttgaactctcctgcttatttacagcagcaacaactactaccattcagccagctagctggtgtgagccctgctaccttcttgacacaaccacaattgttgccgttctaccagcacgctgcgcctaacgct

SEQ ID NO: 71552 - DNA, 264 bp, Zea mays
  unsure (1)..(264): unsure at all n locations
tctcgccgccgccgcttcccctgcgccccgagccaagatgaatgttgaaaagctcaagaagatggcngtgctgtgcgcactggggggaagggtagcatgcgcaggaagaagaaggcagtccacaagactacgaccacagatgataaaaggcttcagagcaccctgaaaagaataggagtgaacaccattcctggtattgaagaggtcaacatctttaaggatgatgttgttattcagtttgtgaatcctaaagtgcaagcttca

SEQ ID NO: 71553 - DNA, 267 bp, Zea mays
aatattttgagcattcagaaacacaccaagcgaagcgcactagcaacaacctaacaacaatggctaccaagtattatccctccttgcgcttcttgcgctttttgcgagcgcaacaaatgcgtccattattccacaatgctcacttgctcctagttccattattccacagttcctcccaccagttacttcaatggccttcgaacacccagctgtgcaagcctataggctacaacaagcgattgcggcgagcgtcttacaacaaccaat

SEQ ID NO: 71554 - DNA, 267 bp, Zea mays
aaaacatgatcataatgtaatattaatccaaaactaggtagagcaatagcaaaactacccaaaagtttagtggtaaacaaggtgtgggataaacaagtctaggaaaacatattaggtcccatcagattaacctgagcatgtcacagtgattaacaggaacattaggttaaagaaaagtgatcagggcacaacttgccttagactcgagatcctaggtaccaacttgctcttcaggtgactcgtaacctcgctgctaatcgtagacat

SEQ ID NO: 71555 - DNA, 268 bp, Zea mays
cacagttcctcccaccagttacttcaatgggcttcgaacatccagccgtgcaagcctacaggctacaactagcgcttgcggcgagcgccttacaacaaccaattgcccaattgcaacaacaatccttggcacatctaaccctacaaaccattgcaacgcaacaacaacaacaacaacagtttctgccatcactgagccacctagccgtggtgaaccctgtcacctacttgcaacagcagctgcttgcatccaacccacttgctctggc

SEQ ID NO: 71556 - DNA, 264 bp, Zea mays
ctcgagccgcgcgctactcgtcctggtggtgtccaacatcgtggacgtgggggacgtggatcacgcggcgtctccacggccagcgtcatagtctacttctgcttcttcgtcatggggttcgggcccgtccccaacatcctctgcgcggagatcttccccaccacggtccgcggtgtctgcatcgccatctgcgccttggccttctgggtcggtgtcatcttcgtgacgtacactctccccgtgatgctgaacgtcgtcgggctc

SEQ ID NO: 71557 - DNA, 253 bp, Zea mays
cttcagtgctccagtaagagagcagatctacaagatagcttcagtgaacctatgctccaatatgcactggtcaaatccttgcgagcctcgtcatgaatccaccaaaggttggagacgaatcatatgcttcctacaaggcagagaaagatggaatccttgagtctttagctcgtcgtgcaaaaggcgttggaggatgcattcaacaagcttgagggattttcatgtaacaaggtccgaaggagcaatgtatctt

SEQ ID NO: 71558 - DNA, 264 bp, Zea mays
attgagaccaactagcaacatagaaagcacaatagtgtaccaacaatggcagccaaaatattttgcctcttatgctccttggtctttctgcaagtgctgctacggcgaccattttcccgcaatgctcgcaagctcctatagcttcccttcttcccccgtacctctcaccagcggtgtcttcggtatgtgaaaacccaattcttcaaccctacaggatccaacaggcaatcacagctggcatcttacctttatcacccttgttcc

SEQ ID NO: 71559 - DNA, 265 bp, Zea mays
ggtgttcgaagcccattgaagtaactggtgggaggaactgtggaataatggcactaggagcaacagttctaccagcactgagccacctagccatggtgaaccctgccgcctacttgcaagagcagctgcttgcatccaacccacttgctctggcgaacgctagttgcaaaccagcaacaacaacagctacaacagtttctgccaacgctcagtcaactagccatggtgaaccctgccgcctacgtacaacaacaacaactgcttt

SEQ ID NO: 71560 - DNA, 265 bp, Zea mays
agcattcaaaaacacaccaagcgaagcgcactagcaacgacctaacaccaatggctaccaagatattagcctccttgcgcttcttgcccttttagtgagcgcaacaaatgcgttcattattccacagtgctcacttgctcctagtgccagtattccacagttcctcccaccagttacttcaatgggcttcgaacatccagccgtgcaagcctacaggctacaactagcgcttgcggcgagcgccttacaacaaccaattgcccaa

SEQ ID NO: 71561 - DNA, 264 bp, Zea mays
ctcgagccgctcgagccgatagaaagcacaatagtgtaccaacaatggcagccaaaatattttgcctcttatgctccttggtctttctgcaagtgctgctacggcgaccattttcccacaatgctcacaagctcctatagcttcccttcttcccccgtacctctcaccagcggtgtcttcggtatgtgaaaacccaattcttcaaccctataggatccaacaggcaatcgcagctggcatcttacctttatcacccttgttcct

SEQ ID NO: 71562 - DNA, 265 bp, Zea mays
aaatattttgcctccttatgctccttggtctttctgcaagtgctgctacggcgaccattttcccgcaatgctcgcaagctcctatagcttcccttcttcccccgtacctctcaccagcggtgtcttcggtatgtgaaaacccaattcttcaaccctacaggatccaacaggcaatcacagctggcatcttacctttatcacccttgttcctccaacaatcatcagccctattacatcagttacctttggtgcatttattggcaca

SEQ ID NO: 71563 - DNA, 267 bp, Zea mays
caactagcaacatagaaagcacaatagtgtaccaacaatggcagccaaaatattttgcttccttatgctcttggtctttctgcaagtgctgctaccgcaaccattttcccacaatgctcacaagctcctatagcttcctttcttcccccatacctctcaccagcggtgtcttcagtatgtgaaaacccaattcttcaaccctacaggatccaacaggcaatcgcagcaggcatcttacctttatcacccttgttcctccaacaaccg

SEQ ID NO: 71564 - DNA, 265 bp, Zea mays
cttccattcaaccaactaggttcattgaactctgcttcttatcagcaacaacaacaactaccattcagcagctacctgctgcctacccccagcaatttcttccattcaaccaactagcagcattgaactctcctgcttatttacagcagcaacaactactaccattcagccagctagctggtgtgagccctgctaccttcttgacacaagcacagttgttgccgttctaccagcacgttgcgcctaacgctggcaccctcttaca

SEQ ID NO: 71565 - DNA, 265 bp, Zea mays
ttcagaaacacacctagcgaagcgcactagcaacgacctaacaacaatggcttccaagacattatccctccttgcgcttcttgccctttttgtgagtgcaacaaatgcgttcattattccacaatgctcacttgctccgagtgccattattccacagttcctccctccagttacttcaatgggcttcgaacacccagctgtgcaagcctataggctacaacaagcgcttgcggcgagcgtcttagaacaaccaattgcccaatta

SEQ ID NO: 71566 - DNA, 266 bp, Zea mays
tagcaacatagaaagcacaatagtgtaccaacaatggcagccaaaatatgttgcctccttatgctccttgtctttctgcaagtgctgctacggcgaccattttcccgcaatgctcgcaagctcctatagcttcccttcttcccccgtacctctcaccagcggtgtcttcggtatgtgaaaacccaattcttcaaccctacaggatccaacaggcaatcgcagctggcatcttacctttatcacccttgttcctccaacaatcatca

SEQ ID NO: 71567 - DNA, 267 bp, Zea mays
gcaacatagaaagtggaatccagtagcaacaacagagcaacaatggcgaccaagatattttccctccttatgctccttgctctttctgcatgtgttgctaacgcgacaattttccctcaatgctcacaagctcctatagcttcccttcttcccccataccttccatcaatgatagcttcagtatgtgaaaacccagctcttcagccctataggctccaacaagcaatcgcagcaagcaacatacctttatcacccttgttgtttcaa

SEQ ID NO: 71568 - DNA, 265 bp, Zea mays; identical to SEQ ID NO: 71562

SEQ ID NO: 71569 - DNA, 264 bp, Zea mays
atatatatggacataaattgggtctccttgctgcgtaaatgcttcaagagagtatgcctacactctcatgtcactgaaaagagtgacatatatagctttggtgtggtgatccttgagctcgttaccggaaagaagccgctggcagcagagattggcgagatggacctggtggcgtgggtgactgccaaagttgagcagtacgggctagagtctgtgcttgaccagaacctcgacgagcagttcaaggacgagatgtgcatggtt

SEQ ID NO: 71570 - DNA, 264 bp, Zea mays
gctccttgctctttctgcatgtgttgctaacgcgacaattttccctcaatgctcacaagctcctatacttcccttcttcccccataccttccatcaatgatagcttcagtatgtgaaaacccagctcttcagccctataggctccaacaagcaatcgcagcaagcaacatacctttatcacccttgttgtttcaacaatcgccagccctatctttggtgcagtcattggtacaaaccatcagggcacagcagctgcagcaactc

SEQ ID NO: 71571 - DNA, 259 bp, Zea mays
agttggaggagatatgcagtttgcacttgcattggacacgaactcaggtcctcaccagataagatctgtgagggtgatgggattgacaggttggaaaaattaagtattgggggcagaaagcaggagaaagctttgagaaataggtgctttggtggtagagttgctgcaactacacaatgtattcttacctcagatgcttgtcctgaaactcttcattctcaaacacagtcctctaggaaaaattatgctgatgcaaacc

SEQ ID NO: 71572 - DNA, 261 bp, Zea mays
ttcaaaaacacaccaagcgaagcgcactagcaacgacctaacaccaatggctaccaagatattagcctccttgcgcttcttgcccttttagtgagcgcaacaaatgcgttcattattccacagtgctcacttgctcctagtgccagtattccacagttcctcccaccagttacttcaatgggcttcgaacatccagccgtgcaagcctacaggctacaactagcgcttgcggcgagcgccttacaacaaccaattgcccaa

SEQ ID NO: 71573 - DNA, 262 bp, Zea mays
attttgagcattcagaaacacaccaagcgaaggcagctagcaacgacctaacaacaatggctaccagatattagccctccttgcgcttcttgccctttttgtgagcgcaacaaatgcgttcattattccacaatgctcacttgctcctagtgccattattccacagttcctcccaccagttacttcaatgggcttcgaacacctagctgtgcaagccaacatgcaacaacaagcgcttgcggcgagcgtcttacaacaacca

SEQ ID NO: 71574 - DNA, 262 bp, Zea mays; identical to SEQ ID NO: 26399

SEQ ID NO: 71575 - DNA, 260 bp, Zea mays
taccaactagcaacatagaaagcacaatagtgtaccaacaatggcagctaaaatattttgcctcctatgctccttggtctttctgcaagtgctgctacggcgaccattttcccacaatgctcacaagctcctatagcttcccttcttcccccgtacctctcaccaacggtgtcttcggtatgtgaaaacccaattcttcaaccctacaggatccaacaggcaatcgcagctggcatcttacctttatcacccttgttcct

SEQ ID NO: 71576 - DNA, 259 bp, Zea mays
cgtgtatctgctatcattttgggcggaggcactggatctcagctctttcctctgacaagcacagagctacgcctgctgtacctgttggaggatgttacaggcttattgatatccctatgagtaactgcttcaacagtggtataaataagatatttgtgatgagtcagttcaattctacttcgcttaaccgccatattcatcgtacataccttgaaggcgggatcaactttgctgatggatctgtacaggtattagcggc

SEQ ID NO: 71577 - DNA, 264 bp, Zea mays
ccgtcatcgatctcgtttcaaatccatccatcctcgtttcctccgtcccgcagcatctcaaccccatgccaagatcaagatcgggatcaatgggttcggcaggatcggaaggctggtggccagggtggccctgcagagtgacgatgtcgagctcgtcgccgtgaacgaccccttcatcagcaccgactacatgacctacatgttcaagtacgacactgtgcacggacagtggaagcaccatgaagtcaaggtgaaggactccaa

SEQ ID NO: 71578 - DNA, 260 bp, Zea mays
gtgggacatgtacacacggaccagtgatgaggtacggcttccacggttctggcaggaggcgtttgatgctgcatacgaggaacttgctggtgatgatgtgcaggtccgtgatgcagctatctctgagattgcccgaatgtcagcccacaaacttgagctcgagcagacattgaatgagaatgaggaagagaatgccgcgagcaacagtggtggcaggtcaaaggcgagtcagtagttccacagatatctgtggcctgagg

SEQ ID NO: 71579 - DNA, 263 bp, Zea mays
agaccaactagcaacatagaaagcacaatagtgtaccaacaatggcagccaaaatattttgcctcctatgctccttggtctttctgcatgtgctgctacggcgaccattttcccgcaatgctcgcaagctcctatagcttcccttcttcccccgtacctctcaccagcggtgtcttcggtatgtgaaaacccaattcttcaaccctacaggatccaacaggcaatcgcagctggcatcttacctttatcacccttgttcctcc

SEQ ID NO: 71580 - DNA, 265 bp, Zea mays
ggcttcgaacacccagctgtgcaagcctataggctacaacaagcgcttgcggcgagcgtcttagaacaccaattgcccaattacaacaacaatccttagcacatctaaccatacaaaccatcgcaacgcagcagcaacaagcactgagccacctagccgtggtgaaccctatcgcctacttgcaacaacagctgcttgcatccaacccacttgctttggcaaacgtagctgcataccaacaacaacaacagttgcaacagtttct

SEQ ID NO: 71581 - DNA, 261 bp, Zea mays
cttgcggcgagcgtcttagaacaaccaattgcccaattacaacaacaatccttagcacatctaacatacaaaccatcgcaacgcagcagcaacaagcactgagccacctagccgtggtgaaccctatcgcctacttgcaacaacagctgcttgcatccaacccacttgctttggcaaacgtagctgcataccaacaacaacaacagttgcaacagtttctgccagcgctcagtcaactagccatggtgaacccgatcgcct

SEQ ID NO: 71582 - DNA, 262 bp, Zea mays; identical to SEQ ID NO: 28071

SEQ ID NO: 71583 - DNA, 253 bp, Zea mays
caacaagcaacatagaaagtggaatccagtagcaacaacagagcaacaatggcgaccaagatatttccctccttatgctccttgctctttctgcatgtgttgctaacgcgacaattttccctcaatgctcacaagctcctatagcttcccttcttcccccataccttccatcaatgatagcttcagtatgtgaaaacccagctcttcagccctataggctccaacaagcaatcgcagcaagcaacataccttt

SEQ ID NO: 71584 - DNA, 95 bp, Zea mays
ttttttttttttaagaatctagaaatgtactttcttatttctgggaagccacaaacatcagacaaaaaacttattattgaactataactcataag

SEQ ID NO: 71585 - DNA, 263 bp, Zea mays
gaccaacaagcaacatagaaagtggaatccagtagcaacaatagagcaacaatggcgaccaagatttttccctccttatgctccttgctctttctacatgtgttgctaacgcgacaattttccctcaatgctcacaagctcctatagcttcccttcttcccccataccttccatcaattatagcttcaatatgtgaaaacccagctcttcaaccatataggcttcaacaagcaatcgcagcaagcaacatacctttatcgccc

SEQ ID NO: 71586 - DNA, 257 bp, Zea mays
aatattttgagcattcagaaacacaccaagcgaacgcacttagcaacgacctaacaacaatggcaccaagatattagccctccttgcgcttcttgccctttttgtgagcgcaacaaatgcgttcattattccacaatgctcacttgctcctagtgccattattccacagttcctcccaccagttacttcaatgggcttcgaacacctagctgtgcaagccaacatgcaacaacaagcgcttgcggcgagcgtcttac

SEQ ID NO: 71587 - DNA, 260 bp, Zea mays
gtcagcctagcaattagctcatcgactccagattggagaactcgacaccatgaaggtgctgatcgtgcccttgctctcctggcgctcgctgcgagcgccgcctccagtacaagcggcggctgtggctgccagacaccaccgtttcatctaccgcctccgttctatatgccgcctccgttctatctgccgccgcagcagcagccgcagccatggcaataccccactcaacatccgcagctaagcccgtgccagcagttcgg

SEQ ID NO: 71588 - DNA, 259 bp, Zea mays
caccaagcgaaggcactagcaacgacctaacaccaatggctaccaagatattagccctccttgcgcttcttgcccttttagtgagcgcaacaaatgcgttcattattccacagtgctcacttgctcctagtgccagtattccacagttcctcccaccagttacttcaatgggcttcgaacatcctgccgtgcaagcctacaggctacaactagcgcttgcggcgagcgccttacaacaaccaattgcccaattgcaaca

SEQ ID NO: 71589 - DNA, 259 bp, Zea mays
gcaacatagaaagcacaatagtgtaccaacaatggcagccaaaatattttgcctccttatgctccttggtctttctgcaagtgctgctacggcgaccattttcccgcaatgctcgcaagctcctatagcttcccttcttcccccgtacctctcaccagcggtgtcttcggtatgtgaaaacccaattcttcaaccctacaggatccaacaggcaatcacagctggcatcttacctttatcacccttgttcctccaacaa

SEQ ID NO: 71590 - DNA, 256 bp, Zea mays
gcgcagaacatgccggccatgggtggactctaccagtaccagtaccagctgcccagctaccgaccaacccctgtggcagccgcagtgcagcccgctggcggcggcgccctactacgccgggtgtgggcagacgagcgccatgtaccagccgctccggcaacagtgctgccagcagcagatgaggatgatggacgtgcagtccgtcgcgcagagctgcagatgatgatgcagcttgagcgtgccgctgccgccagca

SEQ ID NO: 71591 - DNA, 259 bp, Zea mays
ggaagaagaacacacccttcctctacgacctcgtcatcacccacgcgctcgaatggccctccttaccgtgcagtggctccccgaccgcaccgagccgccggggaaggaccactccgtccagaagatgatccttggcacgcacacctctgacaacgagcccaactacctcatgctcgcgcaggtccagctgcccctcgacgacgccgaggccgacgcccgccactacgacgatgaccacgccgacatcggtggttttggc

SEQ ID NO: 71592 - DNA, 258 bp, Zea mays
tgcctatgcacttctccaccaccaccactggacgtcagcctagcaattagctcatcgactcagattggagaactcgacaccatgaaggtgctgatcgttgcccttgctctcctggcgctcgctgcgagcgccgcctccagtacaagcggcggctgtggctgccagacaccaccgtttcatctaccgcctccgtgctatatgccgcctccgttctatctgccgccgcagcagcagccgcagccatggcaataccccact

SEQ ID NO: 71593 - DNA, 258 bp, Zea mays
ctagcaacatagaaagcacaatagtgtaccaacaatggcagccaaaatattttgcctccttatgctccttggtatttctgcaagtgctgctacggcgaccattttcccgcaatgctcacaagctcctatagcttcccttcttcccccgtacctctcaccagcggtgtcttcggtatgtgaaaacccaattcttcaaccctacaggatccaacaggcaatcgcagctggcatcttacctttatcacccttgttcctcca

SEQ ID NO: 71594 - DNA, 260 bp, Zea mays
attgagaccaactagcaacatagaaagcacaatagtgtaccaacaatggcagccaaaatatttgcttccttatgctccttggtctttctgcaagtgttgctaccgcaaccattttcccacaatgctcacaagctcctatagcttcccttcttcccccatacctctcaccagcggtgtcttcaatgtgtgaaaccccaattgttcaaccctacaggatccaacaggcaatcgcaacaggcatcttaccattatcacccttg

SEQ ID NO: 71595 - DNA, 257 bp, Zea mays
aaccccactgaagcagagctgcaggacatgatcaacgaggttgatgctgatggcaatgggacattgacttcccagagttcctgaacctgatggcaaggaagatgaaggacaccgactccgaggaggagcttaaggaggcctttcgcgtcttcgacaaggaccagaatggtttcatctcggctgctgagctccgccatgtcatgaccaacctcggcgagaagctgactgacgaggaggtcgacgagatgatccgtgag

SEQ ID NO: 71596 - DNA, 253 bp, Zea mays
cagatcagcaaagcggcagtgcgtagagaggatcgtcgaacagaagagcatgaagatggtcatgttctcgtcgtgtgcctggctctgtcagctgccagcgcctctgcaatgcagatgccctgcccctgcgcggggctgcagggcttgtacggcgctggcgccggcctgacgacgatgatgggcgccggcgggctgtacccctacgcggagtacctgaggcagccgcagtgcagcccgctggcggcggcgccta

SEQ ID NO: 71597 - DNA, 114 bp, Zea mays
ctcataagaaatctaaaagagggcaccaccaatgatcggttatagttcaataataaagtttttgtctgatgtttgtggcttcccagaaataagaaagtacatttctagattctt

SEQ ID NO: 71598 - DNA, 255 bp, Zea mays; identical to SEQ ID NO: 28485

SEQ ID NO: 71599 - DNA, 289 bp, Zea mays
tagcaacatagaaagcacaatagtgtaccaacaatggcagccaaaatattttgcctccttatgctccttggtctttctgcaagtgctgctacggcgaccattttcccgcaatgctcgcaagctcctatagcttcccttcttcccccgtacctctcaccagcggtgtcttcggtatgtgaaaacccaattcttcaaccctacaggatccaacaggcaatcacagctggcatcttacctttatcacccttgttcctccaacaatcatcagccctattacatcagttacctt

SEQ ID NO: 71600 - DNA, 214 bp, Zea mays
gcacaatagtgtaccaacaatggcagctaaaatattttgcctccttatgctccttggtctttctgcaagtgctgctacggcgaccattttcccacaatgctcacaagctcctatagcttcccttcttcccccgtacctctcaccaacggtgtcttcggtatgtgaaaacccaattcttcaaccctacaggatccaacaggcaatcgcagctggc

SEQ ID NO: 71601 - DNA, 205 bp, Zea mays
agaaagtacatttctaatttctgggaagccacaaacatcagataaaaaactttattattgaactataactcataagaaatctaaaagagggcaccaccaatgatgggttgttggtagaacactgctgggtttgtcaaagcaagttggttgaatggcagcaattgttgcagttgtaagagggtgccagcgttaggcgcaacgtgct

SEQ ID NO: 71602 - DNA, 193 bp, Zea mays
caaggtctcaagtaagattggtgtcattggatccaccaacaatagcggcaaatggcttctttgggttggtggatccaaggtctcaagtaagattggtgtcattgagtccttgctggcgaaggtcgatatcctcatccttggtggtggtatgatctacacattttacaaggcacaaggatattctgttggaaaa

SEQ ID NO: 71603 - DNA, 199 bp, Zea mays
cgcgacgcttcgggaaacccgcaatccaacagtacgccgtccatcaacggtcacatcaaaaacccccgcggaaccacttcgagcgagggcagcgtctccgccatctagcgacgtcttcggcaccaggtgactttgtcgaactggtccctcggagggcaaatgttggggcgaaggcaaagacgccacccttcgctcgagg

SEQ ID NO: 71604 - DNA, 203 bp, Zea mays
agaccagcaagcaacatagaaagtagaatccattagcaacaatagagcaacaatggcgaccaagatattttccctccttatgctccttgctctttctacatgtgttgctaacgcgacaattttccctcaatgctcacaagctcctatagcttcccttcttcccccataccttccatcaattatagcttcatatgtgaaaaccc

SEQ ID NO: 71605 - DNA, 156 bp, Zea mays
tagcaacatagaaagcacaatagtgtaccaacaatggcagccaaaatattttgcttccttatgctccttggtctttctgcaagtgctgctaccgcaaccattttcccacaatgctcacaagctcctatagcttcctttcttcccccatacctctca

SEQ ID NO: 71606 - DNA, 161 bp, Zea mays
gcattcagaaacacacctagcgagccactagcaacgacctaacaacaatggcttccaagacattatccctccttgcgcttcttgccctttttgtgagtgcaacaaatgcgttcattattccacaatgctcacttgctccgagtgccattattccacagttc

SEQ ID NO: 71607 - DNA, 131 bp, Zea mays
ctagcaacatagaaagcacaatagtgtaccaacaatggcagccacaatattttgcttccttatgctccttggtctttctgcaagtgttgctaccgcaaccattttcccacaatgctcacaagctcctatag

SEQ ID NO: 71608 - DNA, 224 bp, Zea mays
  unsure (1)..(224): unsure at all n locations
cagaaacacaccaagcgaactnacctagcaacgacttaacaacaatggctaccaagatattagccctccttgcgcttcttgccctttttgtgagcgcaacaaatgcgttcattattccacaatgctcacttgctcctagtgccattataccacagttcctccgaccagttacttcaatgggcttcgaacacctagctgtgcaagcctacaagctacaacaagcg

SEQ ID NO: 71609 - DNA, 167 bp, Zea mays
gcaacatacatagtgaagtacactagcaacatcttagcaccaatggcagccaagatttttgccatccttgccctccttgctctttcagcaagcgttgctaccgcgactattattccacaatgctcacaacaatacctctctccggtgacagccgcgagattatgata

SEQ ID NO: 71610 - DNA, 174 bp, Zea mays
ctcgtcagacgtcagccagcagttcgaaaccaaggatcgatccaggagcttccggaaggctaggcgcgcgcgcactcgaggtgctggtgccggtgccgcccatggatcgggctcgcggatccgcgttcctgctcggcgtcctgctcgcaggatccttgttcgcgttttcagttg

SEQ ID NO: 71611 - DNA, 235 bp, Zea mays
gccagctgcgattgcctgttggatccttgttcctccaacaatcatcagccctattacagcagttacctttggtgcatttattggcacaaaacatcagggcacaacaactacaacaacttgtgctagcaaaccttgctgcctactctcagcaacagcagtttcttccattcaaccaactagctgcattgaactctgcttcttatttgcaacaacaacaactaccattcagccagct

SEQ ID NO: 71612 - DNA, 282 bp, Zea mays
gaccaacaagcaacatagaaagtggaatccagtagcaacaatagagcaacaatggcgaccaagatattttccctccttatgctccttgctctttctacatgtgttgctaacgcgacaattttccctcaatgctcacaagctcctatagcttcccttcttcccccataccttccatcaattatagcttcaatatgtgaaaacccagctcttcaaccatataggcttcaacaagcaatcgcagcaagcaacatacctttatcgcccttgttgtttcaacaatcg

SEQ ID NO: 71613 - DNA, 202 bp, Zea mays
caacaagcaacatagaaagtggaatccagtagcaacaacagagcaacaatggcgaccaagatattttccctccttatgctccttgctctttctgcatgtgttgctaacgcgacaattttccctcaatgctcacaagctcctatagcttcccttcttcgcccataccttccatcactgatagcttcagtatgtgaaaacccag

SEQ ID NO: 71614 - DNA, 159 bp, Zea mays
aagcgaagacattagcaacaacctaacaacaatggctaccaagatattatccctccttgcgcttcttgcgctttttgcgagcgcaacaaatgcgttcattattccacaatgctcacttgctccaagttccattattacacagttcctcccaccagttat

SEQ ID NO: 71615 - DNA, 166 bp, Zea mays
tagcaacatagaaagcacaatattgtaccaataatggcagccaaaatattttgcctcattatgctccttggtctttctgcaagtgctgctacggcgagcattttcccgcaatgctcacaagctcctatagcttcccttcttcccccatacctctcaccagcgatgt

SEQ ID NO: 71616 - DNA, 135 bp, Zea mays
attttcagcattcaaaaacacaccaagcgaagcgcactagcaacgacctaacaccaatggctaccaagatattagccctccttgcgcttcttgcccttttagtgagcgcaacaaatgcgttcattattccacagt

SEQ ID NO: 71617 - DNA, 184 bp, Zea mays
  unsure (1)..(184): unsure at all n locations
ttttcagcattcaaaaacacaccaagcgaagccactagcaacgacctaacaccaatggctaccaagatattagccctccttgcgcttcttgcccttttagtgagcgcaacaaatgcgttcattattccacagtgctcacttgctcctagtngcattattccacagttcctcccaccagttactt

SEQ ID NO: 71618 - DNA, 190 bp, Zea mays
gcgctttttgcgagcgcaacaaatgcgtccattattccacaatgctcacttgctcctagttccattattccacagttcctcccaccagttacttcaatggccttcgaacacccagctgtgcaagcctataggctacaacaagcgattgcggcgagcgtcttacaacaacaattggccaattgcaacaaca

SEQ ID NO: 71619 - DNA, 153 bp, Zea mays
gacacaaatcatgtttgaaactttcagtgttcctgctatgtatgttgctattcaagctgtcctttccctttatgctagtggccgtaccactggtattgtcctggattctggagacggtgtcagccacactgtcccaatctatgaaggctatgc

SEQ ID NO: 71620 - DNA, 181 bp, Zea mays
caactagcaacatagaaagcacaatagtgtaccaacattggcagccaaaatattttgcttccttatgctccttggtctttctgcaagttttgctaccgcaaccattttcccacaatgctcacaagctcctatagcttcccttcttcccccatacctctcaccagcggtgtcttcaatgtgt

SEQ ID NO: 71621 - DNA, 159 bp, Zea mays
ctcgagccgaatcggctcgaggtcgcacatatctactatactaacctctaggaagcaagaacaccaccgccatggcagcacagatgcttgcattgttcgctctcctagctctttgtgcaagcgccactagtgcgacccatattccagggcacttgccac

SEQ ID NO: 71622 - DNA, 182 bp, Zea mays
tttcagcattcaaaaacacaccaagcgaagcgcactagcaacgacctaacaccaatggctaccaagatattagccctccttgcgcttcttgcccttttagtgagcgcaacaaatgcgttcattattccacagtgctcacttgctcctagtgccagtattccacagttcctcccaccagttac

SEQ ID NO: 71623 - DNA, 283 bp, Zea mays
ctcgagccgatagaaagcacaatagtgtaccaacaatggcagccaaaatattttgcctccatatgctccttggtctttctgcaagtgctgctacggcgaccattttcccgcaatgctcgcaagctcctatagcttcccttcttcccccgtacctctcaccagcggtgtcttcggtatgtgaaaacccaattcttcaaccctacaggatccaacaggcaatcgcagctggcatcttacctttatcacccttgttcctccaacaatcatcagccctattacaaca

SEQ ID NO: 71624 - DNA, 244 bp, Zea mays
  unsure (1)..(244): unsure at all n locations
ttcagaaacacaccaagcgaactnacctagcaacgacttaacaacaatggctaccaagatattagccctccttgcgcttcttgccctttttgtgagcgcaacaaatgcgttcattattccacaatgctcacttgctcctagtgccattataccacagttcctccgaccagttacttcaatgggcttcgaacacctagctgtgcaagcctacaggctacaacaagcgttgcggcgagcgtcttac

SEQ ID NO: 71625 - DNA, 208 bp, Zea mays
tcgtccgtccactgcgcgctgcgggaagccatccgagcggcgagggtggagtttgcggacagcaccgtgtcatctggacactcgccgctggagttccagatgggtgtccctgcaccgatgacactggtgaaagaactctgcggtctagatattgtggacaggtacttggaaggtctgtctacctgtgaacgtgcggctggtggggcgt

SEQ ID NO: 71626 - DNA, 179 bp, Zea mays
attgagaccaactagcaacatagaaagcacaatagtgtaccaacaatggcagccaaaatattttgcttccttatgctccttggtctttctgcaagtgctgctaccgcaaccattttcccacaatgctcacaagctcctatagcttcctttcttcccccatacctctcaccagcggtgtc

SEQ ID NO: 71627 - DNA, 193 bp, Zea mays
ggtttgccagagctactctcagcaacaacaatttcttccattcaaccaactgtctacactgaaccctgctgcttatttgcagcaacaactattaccatttagccagctagctactgcctactctcagcaacaacaacttcttccatttaaccaattggccgcactgaaccccgctgcttatttgcaggcagca

SEQ ID NO: 71628 - DNA, 240 bp, Zea mays
ctcgagccggtgcgtgaggcccatctcgccaaatccttatatttcataagggttggggagaaggagaaagcactggagcagcttaaagttactgaaggaaaaactgtagctgttgggcaaaagatggaccttgttttctacacactacaaattggattgttctatatggactttgatctcatctcgaagtccattgacaaagcgaaaaacttgtttgaggaaggtggtgattgggaaagg

SEQ ID NO: 71629 - DNA, 182 bp, Zea mays
gcgcactagcaacgacctaacaccaatggctaccaagatattagccctccttgcgcttcttgcccttttagtgagcgcaacaaatgcgttcattattccacagtgctcacttgctcctagtgccagtattccacagttcctcccaccagttacttcaatgggcttcgaacatccagccgtgc

SEQ ID NO: 71630 - DNA, 142 bp, Zea mays
caacaagcaacatagaaagtggaatcgagtagcaacaacagagcaacaatgagcgacaagatatgttccctccttatgctccttgctctgtctgcatgtgttgctaacgcgacaattttcgctcaatgctcacaagctccta

SEQ ID NO: 71631 - DNA, 148 bp, Zea mays
gcaacatagaaagcacaatagtgtaccaacaatggcagccaaaatattttgcctccttatgctccttggtctttctgcaagtgctgctacggcgaccattttcccgcaatgctcgcaagctcctatagcttcccttcttcccccgtac

SEQ ID NO: 71632 - DNA, 197 bp, Zea mays
aatattttgagcattcaaaaacacacaaagggaagtgcactagcaacttcctaacaacaatggctaccaagatattagcccttcttgcgctcctttccctttcagtgagcgcaacaactgcattcattattccacaatgctcacttgctcctaatgccattattccacagttcctcccatcagttacatcaatgggc

SEQ ID NO: 71633 - DNA, 153 bp, Zea mays
acgcgaccatttttcctcaatactcacaagctcctatagctgcccttcttcccccataccttccatcaatgaccgcttcagtttgtgaaaacccagcccttcaaccctacaggctccaacaagcaatcgcaacaagcaacttacctttatcac

SEQ ID NO: 71634 - DNA, 161 bp, Zea mays
ctcgagccgctgagagtaggcagcaaggtttgctagcacgagttgttgtagttgttgtgcacattcaaccaactagctgcattgaactctgctgcttatttgcagcaacaacaactactaccattcagccagctagctgctgcctacccccggcaatttct

SEQ ID NO: 71635 - DNA, 270 bp, Zea mays
caactagcaacatagaaagcacaatagtgtaccaacaatggcagccaaaatattttgcttccttatgctccttggtctttctgcaagtgttgctaccgcaaccattttcccacaatgctcacaagctcctatagcttcccttcttcccccatacctctcaccagcggtgtcttcaatgtgtgaaaacccaattgttcaaccctacaggatccaacaggcaatcgcaacaggcatcttaccattatcacccttgttcctccaacaacgtca

SEQ ID NO: 71636 - DNA, 200 bp, Zea mays
tgggttgctgccttttagattacatatgagatgtactcgataatggtgccctcattccggcatgtgtttcctagaaataatcaatatattgattgagatttatctcaatatatttctgaactatgttcatcatataaataattgaaaacatcaaatcgtaattataaaaaaaaaaaaaaaaaaaaaaggggggccgccga

SEQ ID NO: 71637 - DNA, 158 bp, Zea mays
gtgaaacgggtcaactatggaacagtccattgtacgactggaaagctatggaagcagatggtttttcatggtggataaagaggattaaacgtgcccttgatttgtatgatgaattccgtattgaccatttccgggggcttgcgggtttttgggcagtc

SEQ ID NO: 71638 - DNA, 168 bp, Zea mays
atccaacccacttgctctagcaaacgtagttgcaaaccagcaacaacaacaactgcaacagtttctgccagcgcttagtcaactagccatggtgaaccctgccgcctacctacaacagcaacaactgctttcatctagcccgctcgctgtggccaatgcacctacata

SEQ ID NO: 71639 - DNA, 151 bp, Zea mays
aaacacaccaagcgaagcgcactagcaacgacctaacaacaatggctaccaagatattagccctccttgcgcttcttgccctttttgtgagcgcaacaaatgcgttcattattccacaatgctcacttgctcctagtgccattattccaca

SEQ ID NO: 71640 - DNA, 156 bp, Zea mays
aacaacaacagctacaacagtttctgccaacgctcagtcaactagccatggtgaaccctgccgcctacgtacaacaacaacaactgctttcatctagcccgctcgctgtgggcaatgcacctacatacctgcaacaacaattgttgcaacagattg

SEQ ID NO: 71641 - DNA, 177 bp, Zea mays
ttgagaccaactagcaacatagaaagcacaatagtgtaccaacaatggcagccaaaatattttgcttccttatgctccttggtctttctgcaagtgttgctaccgcaaccattttcccacaatgctcacaagctcctatagcttcccttcttcccccatacctctcaccagcggtgt

SEQ ID NO: 71642 - DNA, 145 bp, Zea mays
ctagcaacatagaaagcacaatagtgtaccaacaatggcagccaaaatattttgcttccttatgctccttggtctttctgcaagtgttgctaccgcaaccattttcccacaatgctcacaagctcctatagcttcccttcttccc

SEQ ID NO: 71643 - DNA, 151 bp, Zea mays
ttcagaaacacaccaagcgaagctacctagcaacgacttaacaacaatggctaccaagatattagccctccttgcgcttcttgccctttttgtgagcgcaacaaatgcgttcattattccacaatgctcacttgctcctagtgccattata

SEQ ID NO: 71644 - DNA, 158 bp, Zea mays
ccgctgcttatttgcagcagcaaatactactaccatttagccagctagctgcagcaaaccgtgcttccttcttgacacagcaacagttgctgcctttctaccagcagtttgcggctaaccccgcaaccctcttacaactacaacaattgttgcccttt

SEQ ID NO: 71645 - DNA, 202 bp, Zea mays
attttgagcattcagaaacacacctagcgaactgcactagcaacgacctaacaacaatggcttccaagacattatccctccttgcgcttcttgccctttttgtgagtgcaacaaatgcgttcattattccacaatgctcacttgctccgagtgccattattccaaagttcctccctccagttacttcaatgggcttcgaaca

SEQ ID NO: 71646 - DNA, 264 bp, Zea mays
gaagctataattgatggaaggtatgggggaagaagggaagctataggagcttgtgagcaacatacctttatcgcccttgttgtttcaacaatcgccagccctatctttggtgcagtcattggtacaaaccatcagggcacaacagctgcagcaactcgtgctacctctgatcaaccaagtagctctggcaaacctttctccctactctcagcaacaacaatttcttccattcaaccaactgtctacactgaaccctgctgctta

SEQ ID NO: 71647 - DNA, 231 bp, Zea mays
caccaagcgaagccactagcaacgacctaacaccaatggctaccaagatattagccctccttgcgcttcttgcccttttagtgagcgcaacaaatgcgttcattattccacagtgctcacttgctcctagtgccagtattccacagttcctcccaccagttacttcaatgggcttcgaacatccagccgtgcaagcctacaggctacaactagcgcttgcggcgagcgcct

SEQ ID NO: 71648 - DNA, 216 bp, Zea mays
cgacaacgctctctaccgtccgagaccccaagcaccagcgcggcggcgggggcggcggcgaccatggctgtcggaaagaacaagaggatctccaagggaaagaagggtggcaagaaaaagaccgtcgaccctttctctaagaaggattggtatgacatcaaggcaccgtcggtgttcagtgtgcgcaacatcgggaagactctcgtatccaggaca

SEQ ID NO: 71649 - DNA, 212 bp, Zea mays
attttgagcattcagaaacacacctagcgaacgtcactagcaacgacctaacaacaatggctaccaagatattatccctctttgcgcttcttgccctttttgtgagcgcaacaaatgcgttcattattccacaatgctcacttgctcctagtgccattattccacagttcctccctccagttacttcaatgggcttcgaacacccagctgtg

SEQ ID NO: 71650 - DNA, 241 bp, Zea mays
agcaacatagaaagcacaatagtgtaccaacaatggcagccaaaatattttgcttccttatgctccttggtctttctgcaagtgttgctaccgcaaccattttcccacaatgctcacaagctcctatagcttcccttcttcccccatacctctcaccagcggtgtcttcaatgtgtgaaaacccaattgttcaaccctacaggatccaacaggcaatcgcaacaggcatcttaccatatca

SEQ ID NO: 71651 - DNA, 197 bp, Zea mays
gggcgccgccgccagcgggctgcactgcggctgcctcaggtactccgcgtaggggtacagccctactacgccgggtgtgggcagccgagcgccatgttccagccgctccggcaacagtgctgccagcagcagatgaggatgatggacgtgcagtccgtcgcgcacagctgcagatgatgatgcagcttgagcgtgcc

SEQ ID NO: 71652 - DNA, 169 bp, Zea mays
tattattgagaccaactagcaacatagaaagcacaatattgtaccaataatggcagccaaaatattttgcctcattatgctccttggtctttctgcaagtgctgctacggcgagcattttcccgcaatgctcacaagctcctatagcttcccttcttcccccatacctc

SEQ ID NO: 71653 - DNA, 168 bp, Zea mays
ctcgctttggatcgattggtttcgtaactggtgagggactgagggtctcggagtggattgatttgggattctgttcgaagatttgcggaggggggcaatggcgaccgcggggaaggtgatcaagtgcaaagctgcggtggcatgggaggccggcaagccactgtcgat

SEQ ID NO: 71654 - DNA, 188 bp, Zea mays
agaccaactagcaacatagaaagcacaatagtgtaccaacaatggcagccaaaatattttgcctccttatgctccttggtatttctgcaagtgctgctacggcgaccattttcccgcaatgctcacaagctcctatagcttcccttcttcccccgtacctctcaccagcgtgtcttcggtatgtgaaa

SEQ ID NO: 71655 - DNA, 139 bp, Zea mays
aaattaacagaggctaaggctgaccagcttgctaagattcaaaagcaggtcggtttgcctactgaacatgcacagaaaatcattaagggtattacaacgacaaagttatcttctgcaattgaagcctctgttgctcggg

SEQ ID NO: 71656 - DNA, 153 bp, Zea mays
gcaaaatacatagtgaagtacactagcaacatcttagcaccaatgggagccaagattttttccctccttgccctccttgctctttcagcaagcgctgctacctctactattattccacaatgctcacaacaatacctctctccggtgacagcg

SEQ ID NO: 71657 - DNA, 145 bp, Zea mays
ttttcagcattcaaaaacacaccaagcgaacgcactagcaacgacctaacaccaatggctaccaagatattagccctccttgcgcttcttgcccttttagtgagcgcaacaaatgcgttcattattccacagtgctcacttgctc

SEQ ID NO: 71658 - DNA, 146 bp, Zea mays
ctcggccgcaagttctccgaccccgagctccagagtgatctcgcgatcttcccgttccgtgtcacggagggccccgatggatttcccttggtacatgtgcggttcctgggcgaggagcggacgtttacccccacccagctgcttgc

SEQ ID NO: 71659 - DNA, 242 bp, Zea mays
caggtcctcaccagataagatcttgtgagggtgatgggattgacaggttggaaaaattaagtattgggggcagaaagcaggagaaagctttgagaactaggtgctttggtggtagagttgctgcaactacacaatgtattcttacctcagatgcttgtcctgaaactcttcattctcaaacacagtcctctaaggaaaattaatgctgttccaaaccgtgtatctgctatcatttggggcgg

SEQ ID NO: 71660 - DNA, 250 bp, Zea mays
cgcactagcaacgacctaacaacaatggctaccaagatattatccctctttgcgcttcttgccctttttgtgagcgcaacaaatgcgttcattattccacaatgctcacttgctcctagtgccattattccacagttcctccctccagttacttcaatgggcttcgaacacccagctgtgcaagcctacaggctacaacaagcgcttgcggcgagcgtcttacaacaaccaattgcccaattacaacaac

SEQ ID NO: 71661 - DNA, 237 bp, Zea mays
ccgagtgccattattccacagttcctccctccagttacttcaatgggcttcgaacacccagctgtgcaagcctataggctacaacaagcgcttgcggcgagcgtcttagaacaaccaattgcccaattacaacaacaatccttggcacatctaaccatacaaaccatcgcaacgcagcagcaacaagcactgagccacctagccgtggtgaaccctatcgcctacttgcaacaacag

SEQ ID NO: 71662 - DNA, 185 bp, Zea mays
tctcgagccgaatcggctcgagcatagaaagtggaatccagtagcaacaatagagcaacaatagcgaccaagatattttccctccttatgctccttgctctttctacatgtgttgctaacgcgacaattttccctcaatgctcacaagctcctatagcttcccttcttcccccataccttccatc

SEQ ID NO: 71663 - DNA, 175 bp, Zea mays
ggcgttcaagtctttccagagataatggttcctcttgttggaacaccgcaggaattgggacatcaggtggcccttatccgtcaagtcgctaacaaagttttcaccagtatgggtaaaactattgggtacaagatcgggacgatgattgagattcccagggcagctctagtggctg

SEQ ID NO: 71664 - DNA, 136 bp, Zea mays
caacaagcaacatagaaagtggaatccagtagcaacaacagagcaacaatggcgaccaagatattttccctccttatgctccttgctctttctgcatgtgttgctaacgcgacaattttccctcaatgcgcacaag

SEQ ID NO: 71665 - DNA, 140 bp, Zea mays
gcaacatagaaagcacaatagtgtaccaacaatggcagccaaaatattttgcctccttatgctccttggtctttctgcaagtgctgctacggcgaccattttcccgcaatgctcgcaagctcctatagcttcccttcttc

SEQ ID NO: 71666 - DNA, 188 bp, Zea mays
ctagcaacatagaaagcacaatagtgtaccaacaatggcagccaaaatattttgcttccttatgctccttggtctttctgcaagtgttgctaccgcaaccattttcccacaatgctcacaagctcctatagcttcccttcttcccccatacctctcaccagcggtgtcttcaatgtgtgaaaccccat

SEQ ID NO: 71667 - DNA, 177 bp, Zea mays
cggtggctccaccactagcaacccgtgcagcgagcccaccccgaccactgccatgtcgaggcgcggcgactgggtctacgagaacaacggcgggacctgcgtggccatcgccggcgccgattactgtgtcgtcgcggcggacacccgcctctctgtcggatacagcatcctcacgcg

SEQ ID NO: 71668 - DNA, 159 bp, Zea mays
ctcgagccgctcgagccgaatcggctcgagagaaaaccctagccgccgccaccgaagcggcctcccagataagcaagagcgtccaccccgccgccgccatgaagcgcaatccccgcgtcacgagctctcgccggaagtgccgcaagcgcacttcacggc

SEQ ID NO: 71669 - DNA, 265 bp, Zea mays
gcacaatagtgtaccaacaatggcagccaaaatattttgcctccttatgctccttggtctttctgcaagtgctgctacggcgaccattttcccacaatgctcacaagctcctatagcttcccttcttcccccgtacctctcaccagcggtgtcttcggtatgtgaaaacccaattcttcaaccctataggatccaacaggcaatcgcagctggcatcttacctttatcacccttgttcctccaacaatcatcagccctattacag

SEQ ID NO: 71670 - DNA, 232 bp, Zea mays
aacacaccaagcgaacgcactagcaacgacctaacaccaatggctaccaagatattagccctccttgcgcttcttgcccttttagtgagcgcaacaaatgcgttcattattccacagtgctcacttgctcctagtgccattattccacagttcctcccaccagttacttcaatgggcttcgaacatccagccgtgcaagcctacaggctacaactagcgcttgcggcgagcg

SEQ ID NO: 71671 - DNA, 266 bp, Zea mays
ccttgttgtttcaacaatcgccagccctatctttggtgcagtcattggtacaaaccatcagggcacaacagctgcagcaactcgtgctacctctgatcaaccaagtagctctggcaaacctttctccctactctcagcaacaacaatttcttccattcaaccaactgtctacactgaaccctgctgcttatttgcagcaacaactattaccatttagccagctagctactgcctactctcagcaacaacaacttcttccatttaac

SEQ ID NO: 71672 - DNA, 124 bp, Zea mays
gaactagcaacatacatagtgaagtacactagcaacatcttagcaccaatggcagccaagatttttgccatccttgccctccttgctctttcagcaagcgttgctaccgcgactattattccac

SEQ ID NO: 71673 - DNA, 89 bp, Zea mays
tgtacgccggagctcgacaaggacgaccgacgacgcacgcggagatccggcgtactgcaaattttgaaaactgaactgtaagatggcat

SEQ ID NO: 71674 - DNA, 270 bp, Zea mays
cattcagaaacacaccaagcgaagcacattagcaacaacctaacaacaatggctaccaagatattatccctccttgcgcttcttgcgctttttgcgagcgcaacaaatgcgttcattattccacaatgctcacttgctccaagttccattattacacagttcctcccaccagttacttcaatgggcttcgaacacccagctgtgcaagcctataggctacaacaagcaattgcgacgagcgtcttacaacaacccatttcccagttgcaa

SEQ ID NO: 71675 - DNA, 234 bp, Zea mays
gaggcatcagtgcagcccgacggcgacgccctactgctcgcctcagtgccagtcgttgcggcagcagtgttgccagcagctcaggcaggtggagccgcagcaccggtaccaggcgatctgcggcttggtcctccagtccatcctgcagcagcagccgcaaagcggccaggtcgcggggctgttggcggcgcagatagcgcagaactgacggcgatgtgcggcctgcagcagccg

SEQ ID NO: 71676 - DNA, 268 bp, Zea mays
caatagtgtaccaacaatggcagccaaaatattttgcctccttatgctccttggtctttctgcaagtgctgctacggcgaccattttcccgcaatgctcgcaagctcctatagcttcccttcttcccccgtacctctcaccagcggtgtcttcggtatgtgaaaacccaattcttcaaccctacaggatccaacaggcaatcacagctggcatcttacctttatcacccttgttcctccaacaatcatcagccctattacatcagtta

SEQ ID NO: 71677 - DNA, 268 bp, Zea mays
cagcattcaaaaacacaccaagcgaagcgcactagcaacgacctaacaccaatggctaccaagatattagccctccttgcgcttcttgcccttttagtgagcgcaacaaatgcgttcattattccacagtgctcacttgctcctagtgccagtattccacagttcctcccaccagttacttcaatgggcttcgaacatccagccgtgcaagcctacaggctacaactagcgcttgcggcgagcgccttacaacaaccaattgcccaat

SEQ ID NO: 71678 - DNA, 268 bp, Zea mays
gaccaactagcaacatagaaagcacaatagtgtaccaacaatggcagccaaaatattttgcttccttatgctccttggtctttctgcaagtgttgctaccgcaaccattttcccacaatgctcacaagctcctatagcttcccttcttcccccatacctctcaccagcggtgtcttcaatgtgtgaaaacccaattgttcaaccctacaggatccaacaggcaatcgcaacaggcatcttaccattatcacccttattcctccaacaa

SEQ ID NO: 71679 - DNA, 270 bp, Zea mays
actcgagccgattcggctcgagaaagtatattgcttgctgcgatgcctacctgtgatcaacctagtagctctggcaaacctttctccctactctcagcaacaacaatttcttccattcaaccaactgtctacactgaaccctgctgcttatttgcagcaacaactattaccatttagccagctagctactgcctactctcagcaacaacaacttctaccatttaaccaattggccgcactgaaccccgctgcttatttacaacaaccaat

SEQ ID NO: 71680 - DNA, 159 bp, Zea mays
ggatgagcaacatagaaagtggaatccagtagcaacaacagagcaacaatggcgaccaatatattttccctccttatgctccttgctctttctgcatgtgttgctaacgcgacaattttccctcaatgctcacaagctcctatagcttcccttcttccc

SEQ ID NO: 71681 - DNA, 266 bp, Zea mays
gacaacaacagctacaacagtttctgccaacgctcagtcaactagccatggtgaaccctgccgcctacgtacaacaacaacaactgctttcatctagcccgctcgctgtgggcaatgcacctacatacctgcaacaacaattgttgcaacagattgtaccagctctgactcaactagctgtggcaaaccctgttgcctacttgcaacagctgcttccattcaaccaactgactctgtcgaactctgctgcgtacctacaacagcga

SEQ ID NO: 71682 - DNA, 155 bp, Zea mays
tgagaccaactagcaacatagaaagcacaatagtgtaccaacaatggcagccaaaatattttgcttccttatgctccttggtctttctgcaagtgttgctaccggaaccattttcccacaatgctcacaagctcctatagctgcccttcttcccc

SEQ ID NO: 71683 - DNA, 190 bp, Zea mays
agcaacatagaaagcacaatagtgtaccaacaatggcagccaaaatattttgcctccttatgctccttggtctttctgcaagtgctgctacggcgaccattttcccgcaatgctcgcaagctcctatagcttcccttcttcccccgtacctctcaccagcggtgtcttcggtatgtgaaaacccaattct

SEQ ID NO: 71684 - DNA, 185 bp, Zea mays
gcaacatagaaagcacaatagtgtaccaacaatggcagccaagctattttgcttccttatgctccttggtctttctgcaagtgctactaccgcaaccattttcccacaatgctcacaagctcctatagcttcctttcttcccccatacctctcaccagcggtgtcttcagtatgtgaaaacccaa

SEQ ID NO: 71685 - DNA, 267 bp, Zea mays
acaggatccaacaggcaatcgcagctggcatcttacctttatcacccttgttcctccaacaatcatcagccctattacaacagttacctttggtgcatttattggcacaaaacatcagggcacaacaactacaacaacttgtgctagcaaaccttgctgcctactctcagcaacagcagtttcttccattcaaccaactaggttcattgaactctacttcttatttgcaacaacaacaactaccagtcagccagctacctgctgcct

SEQ ID NO: 71686 - DNA, 265 bp, Zea mays
atagaaagcacaatagtgtaccaacaatggcagccaaaatattttgcttccttatgctccttggtctttctgcaagtgttgctaccgcaaccattttcccacaatgctcacaagctcctatagcttcccttcttcccccatacctctcaccagcggtgtcttcaatgtgtgaaaacccaattgttcaaccctacaggatccaacaggcaatcgcaacaggcatcttaccattatcacccttgttcctccaacaaccgtcagccct

SEQ ID NO: 71687 - DNA, 78 bp, Zea mays
cgctactatactatactctaggacgctaggacactaccgctatggcagccaagctgcttgcattgttcgctctcctag

SEQ ID NO: 71688 - DNA, 247 bp, Zea mays
attgagaccaactagcaacatagaaagcacaatagtgtaccaacaatggcagctaaaatattttgcctccttatgctccttggtctttctgcaagtgctgctacggcgaccattttcccacaatgctcacaagctcctatagcttcccttcttcccccgtacctctcaccaacggtgtcttcggtctgtgaaaacccaattcttcaagcctataggatccaacaggcaatcgcagctggcatcttac

SEQ ID NO: 71689 - DNA, 269 bp, Zea mays
ctgcaagtgctgctacggcgaccattttcccgcaatgctcacaagctcctatagcttcccttcttcccccgtacctctcaccagcggtgtcttcggtatgtgaaaacccaattcttcaaccctacaggatccaacaggcaatcgcagctggcatcttacctttatcacccttgttcctccaacaatcatcagccctattacagcagttacctttggtgcatttattggcacaaaacatcagggcacaacaactacaacaacttgtgcta

SEQ ID NO: 71690 - DNA, 264 bp, Zea mays
gagcattcagaaacacaccaagcgaaggacactagcaacgacctaacaacaatggctaccaagatattagccctccttgcgcttcttgccctttttgtgagcgcaacaaatgcgttcattattccacaatgctcacttgctcctagtgccattattccacagttcctcccaccagttacttcaatgggcttcgaacacctagctgtgcaagccaacatgcaacaacaagcgcttgcggcgagcgtcttacaacaaccaattgcc

SEQ ID NO: 71691 - DNA, 267 bp, Zea mays
attttcagcattcaaaaacacaccaagcgaagcgcactagcaacgacctaacaccaatggctaccaagatattagccctccttgcgcttcttgcccttttagtgagcgcaacaaatgcgttcattattccacagtgctcacttgctcctagtgccagtattccacagttcctcccaccagttacttcaatgggcttcgaacatccagccgtgcaagcctacaggctacaactagcgcttgcggcgagcgccttacaacaaccaattg

SEQ ID NO: 71692 - DNA, 187 bp, Zea mays
attttcagcattcaaaaacacaccaagcgaaggcactagcaacgacctaacaccaatggctaccaagatattagccctccttgcgcttcttgcccttttagtgagcgcaacaaatgcgttcattattccacagtgctcacttgctcctagtgccagtattccacagttcctcccaccagttacttca

SEQ ID NO: 71693 - DNA, 264 bp, Zea mays
gcaacatagaaagcacaatagtgtaccaacaatagcagccaaaatattttgcttccttatgctccgtggtctttctgcaagtgttgctaccgcaatcattttcccacaatgctcacaagctcctatagcttcccttcttcccccatacctctcaccagcggtatcttcaatgtgtgccaacccaattgttcaaccctacaggatccatcaggcaatcgcaacaggcatcttaccattatcacgcttgttcctccaacaaccgtc

SEQ ID NO: 71694 - DNA, 263 bp, Zea mays
cgccgtctgccttctgcgcctccatttcggcctctgtcccttgcaagttcaatctcacctccaaccatgggtaaagagaagtcccacatcaacattgtggttattggccacgttgactctggcaagtcgaccaccacaggacacctgatctacaagcttggaggcattgacaagcgtgtgatcgagaggtttgagaaggaggctgctgaaatgaacaagcggtccttcaagtacgcatgggtgctcgacaagctcaaggctga

SEQ ID NO: 71695 - DNA, 264 bp, Zea mays
tgagaccaactagcaacatagaaagcacaatagtgtaccaacaatggcagccaaaatattttgcctccttatgctccttggtctttctgcaagtgctgctacggcgaccattttcccgcaatgctcgcaagctcctatagcttcccttcttcccccgtacctctcaccagcggtgtcttcggtatgtgaaaacccaattcttcaaccctacaggatccaacaggcaatcacagctggcatcttacctttcatcaccttgttcct

SEQ ID NO: 71696 - DNA, 266 bp, Zea mays
ctcgagccgattcggctcgagggcagcagctgctggcagcccaggcgctcaaccccatggacttgatgatggcgcagaacacgccggccatgggtggactctaccagtaccagctgcccagctaccgcaccaacccctgtggcgtctccgctgccattccgccctactactgattcatgatatttgggaaatctcctctagccatctctctctatctatatatgtaataatgcagtcagacgacacacattatcatgtgtggtatg

SEQ ID NO: 71697 - DNA, 264 bp, Zea mays
gcgctgatcacgctgccgccccccagggaggtggcgcggccggagatgcccagagattcggctccggctgctggacgggtcgacgaggaggagtgggtcaccgttaccggatactttcctggtgatactaacatggtgctgcgagaatttgagaaatgtgggcatagtcttgagacatgttcttggtccaagggatgcgaactgggtgcatatcttgtatcagagccggcatgatgcgcagaaagcgctcgcccagcatgggca

SEQ ID NO: 71698 - DNA, 156 bp, Zea mays
gcgcgaccatttttcctcaatactcacaagctcctatagctgcgcttctgcccccataccgtccatcaatgaccgcgtcagtgtgtgaaaaccgagcccttcaacgcctataggcgccaacaagcaatcgcaacaagcaacttacgctttatcacc

SEQ ID NO: 71699 - DNA, 266 bp, Zea mays
gtcaactagccatggtgaaccctgccgtctacctacaactactttcatctagcccgctcgcggtgggcaatgcacctacgtacctacaacaacagttgctgcaacaaattgtaccagctctgactcagctagctgtggcaaaccctgctgcctacttacaacagttgcttccattcaaccaactggctgtgtcaaactctgctgcgtacctacaacagcgacaacagttacttaatccattggcagtggctaacccattggtcgct

SEQ ID NO: 71700 - DNA, 263 bp, Zea mays
attgagaccaactagcaacatagagagcacaatagtgtaccaacaatggcagctaaaatattttgcctccttatgctccttggtctttctgcaagtgctgctacggcgaccattttcgcacaatgctcacaagctcctatagcttcccttcttcccccgtacctctcaccaacggtgtcttcggtatgtgaaaacccaattcttcaaccctacaggatccaacaggcaatcgcagctggcatcttacctttatcacccgtggt

SEQ ID NO: 71701 - DNA, 263 bp, Zea mays
ataccaactagcaaaatacatagtgaagtacactagcaacatcttagcaccaatgggagccaagattttttccctccttgccctccttgctctttcagcaagcgctgctacctctactattattccacaatgctcacaacaatacctctctccggtgacagccgcgggatttcaacacccaactatacaatcctacatgctacatgaggccatcgtagcaagcatcttacggtcattagccattaacctccaacagccatatg

SEQ ID NO: 71702 - DNA, 260 bp, Zea mays
ggcgaccaagatattttccctccttatgctccttgctctttctgcatgtgttgctaacgcgacaattttccctcaatgctcacaagctcctagagcttcccttctgctcccataccttccatcactgatagcttcagtatgtgaaaacccagctcttcagccctataggcgccaacacgcgatcgcagcaagcaacataccgttatcacccttgttgtttcaacactcgccagccctatctctggtgcagtcattggtac

SEQ ID NO: 71703 - DNA, 268 bp, Zea mays
cagtatgtgaaaacccaattcttcaaccctacaggatccaacaggcaatcgcagcaggcatcttacctttatcacccttgttcctccaacaaccgtcagccctattacagcagttacctttggtgcatttgttggcacaaaacatcaaggcacaacaactacaacaacttgtgctaggaaaccttgctgcctactctcagcaacagcagtttcttccattcaaccaactggctgcattgaactctgctgcttatttgcaacaacaact

SEQ ID NO: 71704 - DNA, 267 bp, Zea mays
caaagattatccccaggaataccacactgccaacctcaaaatcggaggtattctcaacagctgcagatggacagacgagcgttgagattaatgttctccagggagaaagagagtttgtcagggacaacaagtccgttggaagcttccggttggatgggatccctcctgcacctcgtggtgtcccacaaattgaagtgaagtttgatattgatgcaaatgggatactctcagttgctgccattgataagggcactggaaagaaacagg

SEQ ID NO: 71705 - DNA, 270 bp, Zea mays
gctagttgctgcctacccccagcaatttcttccattcaaccaactagcagcattgaactctgctgcttatttacagcagcaacaactactaccattcagccagctagctgatgtgagccctgctgccttcttgacacaacaacagttgttgccgttctacctgcacgctatgcctaacgctggcaccctcttacaactgcaacaattgctgccattcaaccaacttgctttgacaaacactacagtgttctaccaacaacccatcattgg

SEQ ID NO: 71706 - DNA, 268 bp, Zea mays
gcaacatagaaagcacaatagtgtaccaacaatggcagccaaaatattttgcctccttatgctccttggtctttctgcaagtgctgctacggcgaccattttcccgcaatgctcgcaagctcctatagcttcccttcttcccccgtacctctcaccagcggtgtcttcggtatgtgaaaacccaattcttcaaccctacaggatccaacaggcaatcacagctggcatcttacctttatcacccttgttcctccaacaatcatcagcc

SEQ ID NO: 71707 - DNA, 266 bp, Zea mays
attgagaccaactagcaacatagaaagcacaatagtgtaccaacaatggcagccaaaatattttgcctccttatgctccttggtctttctgcaagtgctgctacggcgaccattttcccgcaatgctcgcaagctcctatagcttcccttcttcccccgtacctctcaccagcggtgtcttcggtatgtgaaaacccaattcttcaaccctacaggatccaacaggcaatcgcagctggcatcttacctttatccaccttgttcct

SEQ ID NO: 71708 - DNA, 264 bp, Zea mays
ctcgagccgctcgagcggctcgagcggctcgaggaaagtggaatactgtaacaacaacagcactaacaataccgaccaagatatattccctcactatgctccttgctctttctgcatgtgttgctaacgcgacaattttccctcaatgctcacaagctcctataacttcccttcttcccccataccttccatcaatgatagcttcagtatgtgaaaacccagctcttcagtcctataggctccaacaagcaatcgcagcaagca

SEQ ID NO: 71709 - DNA, 122 bp, Zea mays
ctttcagcattcaaaaacacaccaagcgaaggcactagcgacgacgtaacaccaatggctatcaagatattagccctccttgcgcttcttgcccttttagtgagcgcaacaaatgcgttcat

SEQ ID NO: 71710 - DNA, 264 bp, Zea mays
attttgagcattcagaaacacaccaagcgaagacattagcaacaacctaacaacaatggctaccaagatattatccctccttgcgcttcttgcgctttttgcgagcgcaacaaatgcgttcattattccacaatgctcacttgctccaagttccattattacacagttcctcccaccagttacttcaatgggcttcgaacacccagctgtgcaagcctataggctacaacaagcaattgcggcgagcgtcttacaacaaccaat

SEQ ID NO: 71711 - DNA, 266 bp, Zea mays
gcttcgaacacccagctgtgcaagcctataggctacaacaagcgcttgcggcgagcgtcttagaacaaccaattgcccaattacaacaacaatccttagcacatctaaccatacaaaccatcgcaacgcagcagcaacaagcactgagccacctagccgtggtgaaccctatcgcctacttgcaacaacagctgcttgcatccaacccacttgctttggcaaacgtagctgcataccaacaacaacaacagttgcaacagtttctg

SEQ ID NO: 71712 - DNA, 147 bp, Zea mays
gttgagaccaactagcaacatagaaagcacaatagtgtaccaacaatggcagcgaaaatattttgcctccttatgctccttggtctttctgcaagtgctgctacggcgaccattttcccacaatgctcacaagctcctatagcttcc

SEQ ID NO: 71713 - DNA, 261 bp, Zea mays
ttcgagccgattcggctcgaggctacctgctgcctacccccagcagtttcttccattcaaacgactagcagcattgaactagcctgcttatttacagcagcaacaactactaccattcagccagctagctggtgtgagccctgctaccttcttgacacaaccacagttgttgccgttctaccagcacgttgcgcctaacgctggcaccctcttacaactgcaacaattgctgccattcaaccaacttgctttgacaaaccc

SEQ ID NO: 71714 - DNA, 260 bp, Zea mays
gttttgagcattcagaaacacaccaagcgaaggcacctagcaacgacctaacaacaatggctaccaagatattagccctccttgcgcttcttgccctttttgtgagcgcaacaaatgcgttcattattccacaatgctcacttgctcctagtgccattattccacagttcctcccaccagttacttcaatgggcttcgaacacctagctgtgcaagccaacatgcaacaacaagcgcttgcggcgagcgtcttacaacaa

SEQ ID NO: 71715 - DNA, 261 bp, Zea mays
cagaaacacaccaagcgaagtacctagcaacgacttaacaacaatggctaccaagatattagccctccttgcgcttcttgccctttttgtgagcgcaacaaatgcgttcattattccacaatgctcacttgctcctagtgccattataccacagttcctccgaccagttacttcaatgggcttcgaacacctagctgtgcaagcctacaggctacaacaagcgcttgcggcgagcgtcttacaacaaccaattaaccaatt

SEQ ID NO: 71716 - DNA, 263 bp, Zea mays
  unsure (1)..(263): unsure at all n locations
ccggtgaccacggcaaggagtccaaggacagggaggagcaggcggagttcaagaagatgtacagcctcatcgacgagtacaagttgaagggccatatccggtggatctcggcgcagatgaaccgcgtccgcaacggggagctgtaccgctacatttncgataccaagggcgcattcgtgcagcctgcgttctacgaagcgttcggcctnactgtgatcgagtccatgacgtgcggtctgccaacgatcgcgacctgccatngt

SEQ ID NO: 71717 - DNA, 284 bp, Zea mays
tcggctcgagtgagcattcagaaacacaccaagcgaacacattagcaacaacctaacaacaatggctaccaagatattatccctccttgcgcttcttgcgctttttgcaagcgcaacaaatgcgttcattattccacaatgctcacttgctccaagttccattattacacagttcctcccaccagttacttcaatgggcttcgaacacccagctgtgcaagcctataggctacaacaagcaattgcggcgagcgtcttacaacaaccaatttcccagttgcaac

SEQ ID NO: 71718 - DNA, 284 bp, Zea mays
ttcggctcgagattttcagcattcaaaaacacaccaagcgaacgcactagcaacgacctaacaccaatggctaccaagatattagccctccttgcgcttcttgcccttttagtgagcgcaacaaatgcgttcattattccacagtgctcacttgctcctagtgccagtattccacagttcctcccaccagttacttcaatgggcttcgaacatccagccgtgcaagcctacaggctacaactagcgcttgcggcgagcgccttacaacaaccaattgcccaatt

SEQ ID NO: 71719 - DNA, 273 bp, Zea mays
agaccaacaagcaacatagaaagtggaatccagtagcaacaatagagcaacaatggcgaccaagatactttccctccttatgctccttgctctttctgcatgtgttgctaacgcgacaattttccctcaatgctcacaagctcctatagcttcccttcttcccccataccttccatcaatgatagcttcagtatgtgaaaacccagctcttcaaccctataggctccaacaagcaatcgcagcaagcaacatacctttatcacccttgtttca

SEQ ID NO: 71720 - DNA, 284 bp, Zea mays
attcggctcgaggaaagcacaatagtgtaccaacaatggcagccaaaatattttgcctccttatgctccttggtctttctgcaagtgctgctacggcgaccattttcccgcaatgctcgcaagctcctatagcttcccttcttcccccgtacctctcaccagcggtgtcttcggtatgtgaaaacccaattcttcaaccctacaggatccaacaggcaatcacagctggcatcttacctttatcacccttgttcctccaacaatcatcagccctattacatcag

SEQ ID NO: 71721 - DNA, 270 bp, Zea mays
attcggctcgagcggctcgagtgagaccagcaagcaacatagatagtagaatccatgggcaacagtagagcaacaatggcgaccaagatatttgccctccttatgctccttgcagttactacatgtgttgctaacgcgacaattttccctcaatgctcacaagctcctatagcttcccttcttcccccataccttccatcaattatagcttcagtatgtgaaaacccagctcttcaaccatataggcttcaacaagctatcgcagcaagc

SEQ ID NO: 71722 - DNA, 282 bp, Zea mays
ttcggctcgagatcacccataatattttgagcattcagaaacacacctagcgaacgcactagcaacgacctaacaacaatggctaccaagatattatccctctttgcgcttcttgccctttttgtgagcgcaacaaatgcgttcattattccacaatgctcacttgctcctagtgccattattccacagttcctccctccagttacttcaatgggcttcgaacacccagctgtgcaagcctacaggctacaacaagcgcttgcggcgagcgtcttacaacaa

SEQ ID NO: 71723 - DNA, 273 bp, Zea mays
agaaagcacaatagtgtaccaacaatggcagccaaaatattttgcctccttatgctccttggtctttctgcaagtgctgctacggcgaccattttcccacaatgctcacaagctcctatagcttcccttcttcccccgtacctctcaccagcggtgtcttcggtatgtgaaaacccaattcttcaaccctataggatccaacaggcaatcgcagctggcatcttacctttatcacccttgttcctccaacaatcatcagccctattacagcag

SEQ ID NO: 71724 - DNA, 283 bp, Zea mays
ttcggctcgatctcgagaactccatttcgatcccatttgaaatcaacccatcctcgtttcctccgtctagcagcctctcaccctcatggccaagatcaagatcgggatcaatgggtttggcaggatcggaaggctggtggccagggtggccctgcagagcgacgacgtcgagctcgtcgccgtgaacgaccccttcatcagcaccgattacatgacctacatgttcaagtatgacactgtgcacggacagtggaagcaccatgaggtcaaggtgaaggactcc

SEQ ID NO: 71725 - DNA, 272 bp, Zea mays
tagcaacatagagagcacaatagtgtaccagcaatggcagccagaatatttagcctccttatgctccttggtatttctgcaagtgctgctacggcgaccatgttcccgcaatgctcacaagctcctatagtttcccttctacccccgtacctgctcaccagcggtgtcttcggtatgtgataacccaattcttcaacgctacaggatccaacaggcaatcgcagctggcatcttacctttatcacgcttgttcctccaacaatcatcagccc

SEQ ID NO: 71726 - DNA, 270 bp, Zea mays
cagacccacaagcgccagcacgctcgagactgtgccgtgggagtgggaggttcctcaggtgctgagcagtcgccggcggcgaccgccggtgtcggagatgaaggagagaagcggctccagggcggcggtggacgagcgctacgcgcagtggaagtcgctcatccccgtcctctacgactggtttgccaaccacaacctcgtctggacatccctctcctgccggtgggggccacagtttgagaaagctacctacaagaatcgtcagcgcct

SEQ ID NO: 71727 - DNA, 269 bp, Zea mays
ttcaaaaacacaccaagcgaacgcactagcaacgacctaacaccaatggctaccaagatattagccctccttgcgcttcttgcccttttagtgagcgcaacaaatgcgttcattattccacagtgctcacttgctcctagtgccagtattccacagttcctcccaccagttacttcaatgggcttcgaacatccagccgtgcaagcctacaggctacaactagcgcttgcggcgagcgccttacaacaaccaattgcccaattgcaaca

SEQ ID NO: 71728 - DNA, 271 bp, Zea mays
atggatcgtcaatctggtacggatccatattgagaggtgatgtcaacagcattcatattggatctggttctaatatacaagacaattcccttgtacatgtttcaaaagctaacattagcgggaaggtcctcccaaccataattggaagcaacgtgacagtgggtcacagtgctgtattacatgcatgtaccattgaggatgaagcttttgttggtatgggtgccactctgcttgatggagtggtagttgaaaagcacagcatggttggtgc

SEQ ID NO: 71729 - DNA, 270 bp, Zea mays
cagaaacacaccaagcgaagctacctagcaacgacttaacaacaatggctaccaagatattagccctccttgcgcttcttgccctttttgtgagcgcaacaaatgcgttcattattccacaatgctcacttgctcctagtgccattataccacagttcctccgaccagttacttcaatgggcttcgaacacctagctgtgcaagcctacaagctacaacaagcgcttgcggcgagcgtcttacaacaaccaattaaccaattgcaacaac

SEQ ID NO: 71730 - DNA, 273 bp, Zea mays
gtagcaacaacagagcaacaatggcgaccaagatattttccctccttatgctccttgctctttctgcatgtgttgctaacgcgacaattttccctcaatgctcacaagctcctatagcttcccttcttcccccataccttccatcaatgatagcttcagtatgtgaaaacccagctcttcagccctataggctccaacaagcaatcgcagcaagcaacatacctttatcacccttgttgtttcaacaatcgccagccctatctttggtgcagt

SEQ ID NO: 71731 - DNA, 286 bp, Zea mays
attcggctcgaggcgatacggaacgccctgcgcctgcgcgtccaccggtggactcgtcgacaccatcatcgaaggcaagaccgggttccacatgggccgcctcagcgtcgactgtaacgtcgtggagccggcggacgtcaagaaggtggccaccacattgcagcgcgccatcaaggtggtcggcacgccggcgtacgaggagatggtgaggaactgcatgatccaggatctctcctggaagggccctgccaagaactgggagaacgtgctgctcagcctcggggtc

SEQ ID NO: 71732 - DNA, 265 bp, Zea mays
cagcaacatagaaagtggaatccagtagcaacaacagagcaacaatggcgaccaagatattttccctccttatgctccttgctctttctgcatgtgttgctaacgcgacaattttccctcaatgctcacaagctcctatagcttcccttcttcccccataccttccatcaatgatagtttcagtatgtgaaaacccagctcttcagccctataggctccaacaagcaatcgcagcaagcaacatacctttatcacccttgttgtt

SEQ ID NO: 71733 - DNA, 270 bp, Zea mays
caaaaacacaccaagcgaagcggactagcaacgacctaacaccaatggctaccaagatattagccctccatgcgcttcttgcccttttagtgagcgcaacaaatgcgttcattattccacagtgctcacttgctcctagtgccagtattccacagttcctcccaccagttacttcaatgggcttcgaacatccagccgtgcaagcctacaggctacaactagcgcttgcggcgagcgccttacaacaaccaattgcccaattgcaacaac

SEQ ID NO: 71734 - DNA, 261 bp, Zea mays
atagaaagcacaatagtgtaccaacaatggcagctaaaatattttgcctccttatgctccttggtctttctgcaagtgctgctacggcgaccattttcccacaatgctcacaagctcctatagcttcccttcttcccccgtacctctcaccaacggtgtcttcggtatgtgaaaacccaattcttcaaccctacaggatccaacaggcaatcgcagctggcatcttacctttatcacgcttgttcctccaacaatcatcag

SEQ ID NO: 71735 - DNA, 280 bp, Zea mays
ttcggctcgaggatcagcaaagcggcagtgcgtagagaggatcgtcgaacagaacagcatgaagatggtcatcgttctcgtcgtgtgcctggctctgtcagctgccagcgcctctgcaatgcagatgccctgcccctgcgcggggctgcagggcttgtacggcgctggcgccgacctgacgacgatgatgggtgccggcgggctgtacccctacgcggagtacctgaggcagccgcagtgcagcccgctggcggcggcgcgctactacgccgggtgtggg

SEQ ID NO: 71736 - DNA, 270 bp, Zea mays
ctagcaacatagaaagcacaatagtgtaccaacaatggcagccaaactattttgcttccttatgctccttggtctttctgcaagtgttgctaccgcaaccattttcccacaatgctcacaagctcctatagcttcccttcttcccccatacctctcaccagcggtgtcttcaatgtgtgaaaccccaattgttcaaccctacaggatccaacaggcaatcgcaacaggcatcttaccattatcacccttgttcctccaacaaccgtcagc

SEQ ID NO: 71737 - DNA, 268 bp, Zea mays
ctcgagccgctcgagccgggcgaccaagatattttccctccttatgctccttgctctttctacatgtgttactaacgcgacaattttccctcaatgctcacaagctcctatagcttcccttcttcccccataccttccatcaatgatagcttcagtatgtgaaaacccagctcttcagccctataggctccaacaagcaatcgcagcaagcaacatacctttatcacccttgttgtttcaacaatcgccagccctatctttggtgcag

SEQ ID NO: 71738 - DNA, 271 bp, Zea mays
ccagattggagaactcgacaccatgaaggtgctgatcgttgcccttgctctcctggcgctcgctgcgagcgccgcctccagtacaagcggcggctgtggctgccagacaccaccgtttcatctaccgcctccgttctatatgccgcctccgttctatctgccgccgcagcagcagccgcagccatctcaataccccactcaaccaccgcagctaagcccgtgccagcagttcggatcctgcggcgtcggcagcgtcggcagcccgttcctg

SEQ ID NO: 71739 - DNA, 273 bp, Zea mays
ggcgtggtcacgctcacgcaggacgacgatggacctacaactgtgaatgtccgtatcactggacttacccctggacttcatggcttccacctccacgagtttggtgatactaccaatgggtgcatatcgacaggaccacattttaatccaaacaatctgacacacggtgcaccagaagacgaagtccgtcatgcgggtgacctgggaaacattgttgcaaatgctgagggcatagccgaggcaaccattgttgatacccagattcctttgact

SEQ ID NO: 71740 - DNA, 272 bp, Zea mays
ttgagaccaacaagcaacatagaaagtggaatccagtagcaacaatagagcaacaatggcgaccaagatactttccctccttatgctccttgctctttctgcatgtgttgctaacgcgacaattttccctcaatgctcacaagctcctatagcttcccttcttcccccataccttccatcaatgatagcttcagtatgtgaaaacccagctcttcaaccctataggctccaacaagcaatcgcagcaagcaacatacctttatcacccttgt

SEQ ID NO: 71741 - DNA, 269 bp, Zea mays
agaaagtggaatccagtagcaacaatagagcaacaatggcgaccaagatactttccctccttatgctccttgctctttctgcatgtgttgctaacgcgacaattttccctcaatgctcacaagctcctatagcttcccttcttcccccataccttccatcaatgatagcttcagtatgtgaaaacccagctcttcaaccctataggctccaacaagcaatcgcagcaagcaacatacctttatcacccttgtttcaacaatcgccagcc

SEQ ID NO: 71742 - DNA, 266 bp, Zea mays
gggcttgtacggcgctggcgcggcctgacgacgatgatgggcgccggcgggctgtacccctacgcggagtacctgaggcagccgcagtgcagcccgctggcggcggcgccctactacgccgggtgtggccagccgagcgccatgttccagccgctccggcaacagtgctgccagcagcagatgaggatgatggacgtgcagtccgtcgcgcacagctgcagatgatgatgcagcttgagcgtgccgctgccgccagcagcagcctg

SEQ ID NO: 71743 - DNA, 266 bp, Zea mays
cctagcgaacgcactagcaacgacctaacaacaatggctaccaagatattatccctctttgcgcttcttgccctttttgtgagcgcaacaaatgcgttcattattccacaatgctcacttgctcctagtgccattattccacagttcctccctccagttacttcaatgggcttcgaacacccagctgtgcaagcctacaggctacaacaagcgcttgcggcgagcgtcttacaacaaccaattgcccaattacaacaacaatcctt

SEQ ID NO: 71744 - DNA, 265 bp, Zea mays
tgaaaagctaagtgtttggcagtctataataacttttggtggccagaagctgtaaaaagctgaaacaaacagggccgataaatctgtacaatcaacatattgtgaattctgaaccttttcagaacatgtttctagcagtgctcctgcagtcatatgtgacaaaatttagagatgtgatgtatctctctgttccttttgtacgtgaataatcatgttataagctttatgttgcatgaaagtaatttctttgtgcataactttaaca

SEQ ID NO: 71745 - DNA, 268 bp, Zea mays
tagcaacatagaaagcacaatagtgtaccaacaatggcagctaaaatattttgcctccttatgctccttggtctttctgcaagtgctgctacggcgaccattttcccacaatgctcacaagctcctatagcttcccttcttcccccgtacctctcaccaacggtgtcttcggtatgtgaaaacccaattcttcaaccctacaggatccaacaggcaatcgcagctggcatcttacctttatcacccttgttcctccaacaatcatcag

SEQ ID NO: 71746 - DNA, 268 bp, Zea mays
ctgtccgatactgttactgatgatgagttgaaggagatgtttggaaaatatggaaccataacaagtgctgttgttatgcgggatagtgatggaaattctaggtgttttggatttgtcaattttgaaaatgcagatgctgctgctcaggctgttcaagagttgaatggcaagatattcaatgataaggaactgtatgttggaagagcacaaaagaagtctgaaagagagatggagttgaaggagaaatttgagaagaatattcaagagg

SEQ ID NO: 71747 - DNA, 269 bp, Zea mays
agaccagcaagcaacatagaaagtagaatccattagcaacaatagagcaacaatggcgaccaagatattttccctccttatgctccttgctctttctacatgtgttgctaacgcgacaattttccctcaatgctcacaagctcctatagcttcccttcttcccccataccttccatcaattatagcttcagtatgtgaaaacccagctcttcaaccatataggcttcaacaagcaatcgcagcaagcaacatacctttatcgcccttgt

SEQ ID NO: 71748 - DNA, 268 bp, Zea mays
atttataccaactaccaacatacatagtgaagtacactagcaacatcttagcaccaatggcagccaagatttttgcgctccttgccctccttgctctttcagcaagtgttgctaccgcgactattattccacaatgctcacaacaatacctctctccagtgatagccgcgagatttgaatacccatctatacaatcctacaggctacaagaggccatcacagcaagcatcttacggtcgttagcattgaccgtccaacaaccatatgc

SEQ ID NO: 71749 - DNA, 272 bp, Zea mays
taatccagtagcaacaacagagcaacaatggcgaccaagatattttccctccttatgctccttgctctttctgcatgtgttgctaacgcgacaattttccctcaatgctcacaagctcctatagcttcccttcttcccccataccttccatcaatgatagcttcagtatgtgaaaacccagctcttcagccctataggctccaacaagcaatcgcagcaagcaacatacctttatcacccttgttgtttcaacaatcgccagccctatcttt

SEQ ID NO: 71750 - DNA, 273 bp, Zea mays
cccgtcgcatcccatcccactaccacccatctcgtcgtccgccgattcgatccggttcttccaacccaggggctgtgatggcgacgaagaggagcgtgggcaccctcggcgaggcggatctgaaggggaagaaggtgttcgtgcgcgccgacctcaacgtccctctcgacgacgcccagaagatcagcgacgacacccgcatccgcgcctccgtccccaccatcaagttcctcctcgagaagggcgccaaggtcatcctcgccagccacctgg

SEQ ID NO: 71751 - DNA, 266 bp, Zea mays
attttgagcattcagaaacacacctagcgaacgcactagcaacgacctaacaacaatggcttccaagacattatccctccttgcgcttcttgccctttttgtgagtgcaacaaatgcgttcattattccacaatgctcacttgctccgagtgccattattccacagttcctccctccagttacttcaatgggcttcgaacacccagctgtgcaagcctataggctacaacaagcgcttgcggcgagcgtcttagaacaaccaattg

SEQ ID NO: 71752 - DNA, 269 bp, Zea mays
atttataccaactaccaacatacatagtgaagtacactagcaacatcttagcaccaatggcagccaagatttttgcgctccttgccctccttgctctttcagcaagtgttgctaccgcgactattattccacaatgctcacaacaatacctctctccagtgatagccgcgagatttgaatacccatctatacaatcctacaggctacaagaggccatcacagcaagcatcttacggtcgttagcattgaccgtccaacaaccatatgcc

SEQ ID NO: 71753 - DNA, 266 bp, Zea mays
attgagaccaactagcaacatagaaagcacaatagtgtaccaacaatggcagccaaaatattttgcctccttatgctccttggtctttctgcaagtgctgctacggcgaccattttcccgcaatgctcgcaagctcctatagcttcccttcttcccccgtacctctcaccagcggtgtcttcggtatgtgaaaacccaattcttcaaccctacaggatccaacaggcaatcacagctggcatcttacctttatcacccttgttcct

SEQ ID NO: 71754 - DNA, 269 bp, Zea mays
ttctcgagccgaatcggctcgagcaactagcaacatagaaagcacaatcttgtaccaataatggacgccaaaatattttgcctcattatgctccttggtctttctgcaagtgctgctacggcgagcattttcccgcaatgctcacaagctcctatagcttcccttcttcccccatacctctcaccagcgatgtcttcagtatgtgaaaatccaattcttctaccctacaggatccaacaggcaatcgcagcaggcatcttacctttatc

SEQ ID NO: 71755 - DNA, 268 bp, Zea mays
cagaaacacacctagcgaagcgcactagcaacgacctaacaacaatggctaccaagatattatccctctttgcgcttcttgccctttttgtgagcgcaacaaatgcgttcattattccacaatgctcacttgctcctagtgccattattccacagttcctccctccagttacttcaatgggcttcgaacacccagctgtgcaagcctacaggctacaacaagcgcttgcggcgagcgtcttacaacaaccaattgcccaattacaaca

SEQ ID NO: 71756 - DNA, 269 bp, Zea mays
ttgagaccaactagcaacatagaaagcacaatagtgtaccaacaatggcagccaaaatattttgcctccttatgctccttggtctttctgcaagtgctgctacggcgaccattttcccacaatgctcacaagctcctatagcttcccttcttcccccgtacctctcaccagcggtgtcttcggtatgtgaaaacccaattcttcaaccctataggatccaacaggcaatcgcagctggcatcttacctttatcacccttgttcctccaa

SEQ ID NO: 71757 - DNA, 270 bp, Zea mays
ccattcaaccaactggctgcattgaactctgctgcttatttgcaacaacaattaccattcagccagctagttgctgcctacccccagcaatttcttccattcaaccaactagcagcattgaactctgctgcttatttacagcagcaacaactactaccattcagccagctagctgatgtgagccctgctgccttcttgacacaacaacagttgttgccgttctacctgcacgctatgcctaacgctggctacctcttacaactgcaacaa

SEQ ID NO: 71758 - DNA, 272 bp, Zea mays
gtggatccaagagaccaggacatacctcctcgatgggtcctgtatggtggaagagtcggggaccctcgaatcccagcttgaagctaccaaacgcaagcaccaggaaatccgagccatgagaagtcagctcaaaaagatcgaggacctgggggccgccatggaggaggccctcatcctggacaacaagtacacggagcacagcaccgtgggcctcgcccagcagtgggaccagctggaccagctgggcatgcgcatgcagcacaacctggagc

SEQ ID NO: 71759 - DNA, 144 bp, Zea mays
gaccaacaagcaacatagaaagtggaatacagtagcaacaatagagcaacaatggcggccaagatattttccatccttatgctccttgctctttctgcatgtgttgctaacgcgaccatttttcctcaatactcacaagctcct

SEQ ID NO: 71760 - DNA, 256 bp, Zea mays
aggtgatcaggaagaaccttgtgaagaagtgtgttgagctcttctttgagattgctgagaacaaggaggactacaacaagttttacgaggctttctccaagaacctcagcttggcatccacgaggactcgcagaacaggaccaagatcgccgagcttctgagataccactccaccaagagtggtgatgagctgaccagcctcaaggactacgtgaccaggatgaaggagggacagaatgacatatactatatcact

SEQ ID NO: 71761 - DNA, 252 bp, Zea mays
ctcaattatcacttatgcttcttagtgcctcatataatttcaatttgatttcaattggtaatttcaatcgacatctatcttgttgggcctatgcttcgtcgccgaagtcttacagggagaagcagtcttcggcggaagctgtttgtataaaacggccgaaggttcctctttgtgaagcttcggtattgcaaaccgacttaaagatagaatgaccttttagtccataaaggtatgagtcaatgttgtaagctt

SEQ ID NO: 71762 - DNA, 140 bp, Zea mays
tagaaagcacaatagtgtaccaacaatggcagctaaaatattttgcctccttatgctccttggtctttctgcaagtgctgctacggcgaccattttcccacaatgctcacaagctcctatagcttcccttcttcccccgt

SEQ ID NO: 71763 - DNA, 249 bp, Zea mays
gacttccactgtgttatctgaagctgcagcgtttaagcagtgtgaagctattttgaagaagcttatgactcaaaagtatagtcatatattcaatgttccagttgatattgtgaagctgcaaattcctgattattttgacattgtgaagaccccaatggatcttggtactgtcaagaaaaagcttgaatctggttcatacacaagtccatcagattttgctgctgatgtccggctgacctttaacaacgc

SEQ ID NO: 71764 - DNA, 250 bp, Zea mays
cagaaacacaccaagcgaagcacattagcaacaacctaacaacaatggctaccaagatattatccctccttgcgcttcttgcgctttttgcgagcgcaacaaatgcgttcattattccacaatgctcacttgctccaagttccattattacacagttcctcccaccagttacttcaatgggcttcgaacacccagctgtgcaagcctataggctacaacaagcaattgcggcgagcgtcttacaacaacc

SEQ ID NO: 71765 - DNA, 247 bp, Zea mays
cggctcgagccaactagcaacatagacagcacaatagtgtaccaacaatggcagccaaaataatttgcttccttatgctccttggtctttctgcaagtgttgctaccgcaaccattttcccacaatgctcacaagctcctatagcttcccttcttcccccatacctctcaccagcggtgtcttcaatgtgtgaaaccccaattgttcaaccctacaggatccaacaggcaatcgcaacaggcatctt

SEQ ID NO: 71766 - DNA, 244 bp, Zea mays
aaacccagcaccagcctgcagtggtggcgtgctcctcgcctgtgcctgagcactcatctgtggagcgcggtggttgtgcttgtgcatgcctgtgcacttgccttcaaggcagcggtccagtggaggttgcgacggtggcggtgctgttgtggcgcggcgtttcaggttcacaacggaggttggcaaggcgccaaggcctcacgctggaggtacgacgagcggtggtcaaggctagcacgaagct

SEQ ID NO: 71767 - DNA, 139 bp, Zea mays
acaggatccaacaggcaatcgcagctggcatcttacctttatcacccttgttcctccaacaatcatcagccctattacaacagttacctttggtgcatttattggcacaaaacatcagggcacaacaactacaacaact

SEQ ID NO: 71768 - DNA, 119 bp, Zea mays
caacaagcaacatagaaagtggaatccagtagcaacaatagagcaacaatggcgaccaagatattttccctccttatgctccttgctctttctacatgtgttgctaacgcgacaatttt

SEQ ID NO: 71769 - DNA, 142 bp, Zea mays
agaccaactagcaacatagaaagcacaatagtgtaccaacaatggcagccaaaatattttgcctccttatgctccttggtatttctgcaagtgctgctacggcgacattttcccgcaatgctcacaagctcctatagcttcc

SEQ ID NO: 71770 - DNA, 252 bp, Zea mays
gcaacatagaaagtggaatccagtagcaacaatagagcaacaatggcgaccaagatattttccctccttatgctccttgctctttctacatgtgttgctaacgcgacaattttccctcaatgctcacaagctcctatagcttcccttcttcccccataccttccatcaattatagcttcaatatgtgaaaacccagctcttcaaccatataggcttcaacaagcaatcgcagcaagcaacatacctttatcg

SEQ ID NO: 71771 - DNA, 255 bp, Zea mays
attgagaccaactagcaacatagaaagcacaatagtgtaccaacaatggcagccaaaatattttgcttccttatgctccttggtctttctgcaagtgttgctaccgcaaccattttcccacaatgctcacaagctcctatagcttcccttcttcccccatacctctcaccagcggtgtcttcaatgtgtgaaaacccaattgttcaaccctacaggatccaacaggcaatcgcaacaggcatcttaccattatca

SEQ ID NO: 71772 - DNA, 255 bp, Zea mays
gaccaactagcaacatagaaagcacaatagtgtaccaacaatggcagctaaaatattttgcctccttatgctccttggtctttctgcaagtgctgctacggcgaccattttcccacaatgctcacaagctcctatagcttcccttcttcccccgtacctctcaccaacggtgtcttcggtatgtgaaaacccaattcttcaaccctacaggatccaacaggcaatcgcagctggcatcttacctttatcaccctt

SEQ ID NO: 71773 - DNA, 102 bp, Zea mays
tagtgtaccaacaatggcagccaaaatattttgcctccttatgctccttggtctttctgcaagtgctgctacggcgaccattttcccgcaatgctcgcaagc

SEQ ID NO: 71774 - DNA, 252 bp, Zea mays
gttggatcctgtagggttgaacaggcaatcgcaacaggcatcttaccattatcacccttgttcctccaacaaccgtcagccctattacagcagttacctttggtccatttggtggcacaaaacatcagggcacaacaactacaacaacttgtgctagcaaaccttgctgcatactctcagcaacatcagtttcttccattcaaccaactggctgcattgaactctgctgcttatttgcaacaacaattacca

SEQ ID NO: 71775 - DNA, 249 bp, Zea mays
ggccacattgcactagacattgctgtgtttcctaatgggacgacaggacatgctcttgatattctttcacgagcaccactctggagagagggtcttgactatcggcatggtacaggccatggaattggatcttatttgaatgtccatgaaggtcctcatctaattagcttcagaccttctgctcgaaatgtaccgctgcaagcatcaatgactgtgacagatgagcctggttattatgaagatggggcc

SEQ ID NO: 71776 - DNA, 254 bp, Zea mays
gggcttcgaacatccagccgtgcaagcctacaggctacaactagcgcttgcggcgagcgccttacaacaaccaattgcccaattgcaacaacaatccttggcacatctaaccctacaaaccattgcaacgcaacaacaacaacaacagtttctgccatcactgagccacctagccgtggtgaaccctgtcacctacttgcaacagcagctgcttgcatccaacccacttgctctggcgaacgtagctgcatacc

SEQ ID NO: 71777 - DNA, 253 bp, Zea mays
gaaagcacaatagtgtaccaacaatggcagccaaaatattttgcctccttatgctccttggtctttctgcaagtgctgctacggcgaccattttcccgcaatgctcgcaagctcctatagcttcccttcttcccccgtacctctcaccagcggtgtcttcggtatgtgaaaacccaattcttcaaccctacaggatccaacaggcaatcgcagctggcatcttacctttatcacccttgttcctccaacaatc

SEQ ID NO: 71778 - DNA, 252 bp, Zea mays
gaacgaactcgcaaacgtcagtcacatcagcaggtcgccgccactcgccataaataaatttgttatccagggcaaaggatagggtgcttacgtgcgcggccatgcgcgcccacttgttgccgagctgcgcgtggtgctgggcgatgaggagctcctcgtcgggggagaaggagcccttcttgaggttggggcggaggtggttggtccagcgcaggcggcagctcttgccgcagcgcacaggccggtcatcct

SEQ ID NO: 71779 - DNA, 251 bp, Zea mays
attcaaccaactagctgcattgaactctgcttcttatttgcaacaacaacaactaccattcagccagctatctgctgcctacccccagcaatttcttccattcaaccaactgacagctttgaactctcctgcttatttacagcagcaacaactactaccattcagccagctagctggtgtgagccctgctaccttcttgacacaaccacaattgttgccgttctaccagcacgctgcgcctaacgctggca

SEQ ID NO: 71780 - DNA, 239 bp, Zea mays
ctcgagccgaacagttgcaacagtttctgccagcgctcagtcaactagccatggtgaaccatatcgcctacctacaacagcaacaacttctttcatctagcccgctcgctatgggcaatgcacctacatacctgcaacaacagttgttgcaacaacagttgctgcaacaaattgtaccagctcttactcagctagctgtggcaaaccctgctgcctacttgcaacaactacttccattc

SEQ ID NO: 71781 - DNA, 248 bp, Zea mays
caatgatagcttcagtatgtgaaaacccagctcttcagccctataggctccaacaagcaatcgcagcaagcaacatacctttatcacccttgttgtttcaacaatcgccagctagctactgcctactctcagcaacaacaacttcttccatttaaccaattggccgcactgaaccccgctgcttatttgcagcagcaaatactactaccatttagccagctagctgcagcaaaccgtgcttccttctt

SEQ ID NO: 71782 - DNA, 98 bp, Zea mays
agaccagctagcaacatagaaagcacaatagtgtaccaacaatggcagccacaatattttgcctccttatgctccttggtatttctgcaagtgctgct

SEQ ID NO: 71783 - DNA, 249 bp, Zea mays; identical to SEQ ID NO: 68662

SEQ ID NO: 71784 - DNA, 252 bp, Zea mays
agctgactgtgtcgaactctgctgcgtacctacaacagcgacaacagttacttaatccactagcggtggctaacccattggtcgttgccttcctacagcagcaacaattgctgccatacaaccagttctctttgatgaaccctgccttgttgtggcagcaacccatcgttggaggtgccatcttttagattacatatgagatgtactcgataatggtgccctcatagcggcatgtgtttcctagaaataatc

SEQ ID NO: 71785 - DNA, 253 bp, Zea mays
cggctcgagccaactagcaacatagaaagcacaatagtgtaccaacaatggcagccaaaatattttgcctccttatgctccttggtctttctgcaagtgctgctacggcgaccattttcccgcaatgctcgcaagctcctatagcttcccttcttcccccgtacctctcaccagcggtgtcttcggtatgtgaaaacccaattcttcaaccctacaggatccaacaggcaatcacagctggcatcttaccttt

SEQ ID NO: 71786 - DNA, 112 bp, Zea mays
cacagtgccaggcgctgcagcagcagtgctgccaccagagtcaggcaggtcggcgccgctgacacacggtaccaggtcgacatgacggtcgtgcgtcctcgcacgtccttcc

SEQ ID NO: 71787 - DNA, 124 bp, Zea mays
ctcgagccgattcggctcggcagcattcaaaaacacaccaagcgaagcgcactagcaacgacctaacaccaatggctaccaagatattagccctccttgcgcttcttgcccttttagtgagcgc

SEQ ID NO: 71788 - DNA, 245 bp, Zea mays
cgccgcctcctctccccagcacccggagctcgcccgaccgccgctcaccatgatcatccccaagaagaaccgcaatgagatctgcaagtacctcttcaaggagggcgtgctgtatgccaagaaggactacaacctggcgaagacccgcagatcgatgtgcccaacctccaggtgatcaagctcatgcagagctttaagtccaaggagtatgttagggagaccttctcctggcagtactactactg

SEQ ID NO: 71789 - DNA, 247 bp, Zea mays
caccaagcgaagcgactagcaacgacctaacaccaatggctaccaagatattagccctccttgcgcttcttgcccttttagtgagcgcaacaaatgcgttcattattccacagtgctcacttgctcctagtgccagtattccacagttcctcccaccagttacttcaatgggcttcgaacatccagccgtgcaagcctacaggctacaactagcgcttgcggcgagcgccttacaacaaccaattgc

SEQ ID NO: 71790 - DNA, 248 bp, Zea mays
ctcgagccgtgagcattcagaaacacaccaagcgaagcgcactagcaacaacctaacaacaatggctaccaagatattatccctccttgcgcttcttgcgctttttgcgagcgcaacaaatgcgtccattattccacaatgctcacttgctcctagttccattattccacagttcctcccaccagttacttcaatggccttcgaacacccagctgtgcaagcctataggctacaacaagcgattgcgg

SEQ ID NO: 71791 - DNA, 238 bp, Zea mays
attgagaccaactagcaacatagaaagcacaatagtgtaccaacaatggcagctaaaatattttgcctccttatgctccttggtctttctgcaagtgctgctacggcgaccattttcccacaatgctcacaagctcctatagcttcccttcttcccccgtacctctcaccaacggtgtcttcggtatgtgaaaacccaattcttcaaccctacaggatccaacaggcaatcgcagctg

SEQ ID NO: 71792 - DNA, 104 bp, Zea mays
ccaacaagcaacatagaaagtggaatccagtagcaacaacagagcaacaatggcgaccaagatattttccctccttatgctccttgctctttctgcatgtgttg

SEQ ID NO: 71793 - DNA, 252 bp, Zea mays
ttctgcaagtgctgctacggcgaccattctcccacaatgctcacaagctcctatagcttcccttcttcccccgtacctctcaccagcggtgtcttcggtatgtgaaaacccaattcttcaaccctataggatccaacaggcaatcgcagctggcatcttacctttatcacccttgttcctccaacaatcatcagccctattacagcagttacctttggtgcatttattggcacaaaacatcagggcacaaca

SEQ ID NO: 71794 - DNA, 147 bp, Zea mays
cgccctactactgattcatgatatttgggaaatctcctctatccatctctctctatctatatatgtaataatgcagtaagacgacacacattatcatgtgtggtatgaccaataatatatgcatggtcataataaagttttggtttt

SEQ ID NO: 71795 - DNA, 250 bp, Zea mays; identical to SEQ ID NO: 25478

SEQ ID NO: 71796 - DNA, 247 bp, Zea mays
ctcgagccgaatcggctcgagcggctcgagccacaatgctcacaacaatacctctctccaatgatagccgcgagatttgaatacccatctatacaatcctacaggctacaagaggccatcacagcaagcatcttacggtcgttagcattgaccgtccaacaaccatatgccctattgcaacaaccatccttagtgaatctgtatctccaaagaatcacagcacaacaactacaacaacggttgcttc

SEQ ID NO: 71797 - DNA, 247 bp, Zea mays
caactagcaacatagaaagcacaatagtgtaccaacaatggcagccaaaatattttgcttccttatgctccttggtctttctgcaagtgttgctaccgcaaccattttcccacaatgctcacaagctcctatagcttcccttcttcccccatacctctcaccagcggtgtcttcaatgtgtgaaactccaattgttcaaccctacaggatccaacaggcaatcgcaacaggcatcttaccattatca

SEQ ID NO: 71798 - DNA, 247 bp, Zea mays
ccaactagcaacatagaaagcacaatagtgtaccaacaatggcagccaaaatattttgcttccttatgctccttggtctttctgcaagtgttgctaccgcaaccattttcccacaatgctcacaagctcctatagcttcccttcttcccccatacctctcaccagcggtgtcttcaatgtgtgaaaccccaattgttcaaccctacaggatccaacaggcaatcgcaacaggcatcttaccattatc

SEQ ID NO: 71799 - DNA, 120 bp, Zea mays
ctcgagccgattcggctcgagctcggcctgctcgagccggtgccctcttttagatttcttgcgagttatagttcaataaaccagttttttgtctgatgtttgtggcttcctagaaatgtg

SEQ ID NO: 71800 - DNA, 177 bp, Zea mays
ttcagcattcaaaaacacaccaagcgaaggcactcagcaacgacctaacaccaatggctaccaagatattagccctccttgcgcttcttgcccttttagtgagcgcaacaaatgcgttcattattccacagtgctcacttgctcctagtgccagtattccacatttcctcccaccat

SEQ ID NO: 71801 - DNA, 213 bp, Zea mays
gagagaccaacaagcaacatagaaagtggaatccagtagcaacaacagagcaacaatggcgaccaagatattttccctccttatgctccttgctctttctgcatgtgttgctaacgcgacaattttccctcaatgctcacaagctcctatagcttcccttcagcccccataccttccatcaatgatagcttcagtatgtgaaaacccagctct

SEQ ID NO: 71802 - DNA, 249 bp, Zea mays
cggtgtggtcctgcagtccttcctgcagcagcagccgcagggcgatgcacgcggcgctgatggcggcccaggtagcgcagcagctgacggcgatgtgcggtctgcagctgcagcagccaggtccctgcccttgcaacgcagctgccggcggtgtctactactgaggaaactatgtactgtagtaataatgtaatggagccgctgactagctacctatagggctatagctagttcactcgtttagcggcg

SEQ ID NO: 71803 - DNA, 224 bp, Zea mays
cggctcgagccaactagcaacatagacagcacaatagtgtaccaacaatggcagccaaaatatattgcttccttatgctccttggtctttctgcaagtgttgctaccgcaaccattttcccacaatgctcacaagctcctatagcttcccttcttcccccatacctctcaccagcggtgtcttcaatgtgtgaaaccccaattgttcaaccctacaggatccaa

SEQ ID NO: 71804 - DNA, 147 bp, Zea mays
cgcactagcaacgacctaacaacaatggctaccaagatattatccctctttgcgcttcttgccctttttgtgagcgcaacaaatgcgttcattattccacaatgctcacttgctcctagtgccattattccacagttcctccctcca

SEQ ID NO: 71805 - DNA, 249 bp, Zea mays
aatattttgagcattcagaaacacacctagcgaacgctactagcaacgacctaacaacaatggcttccaagacattatccctccttgcgcttcttgcccttttgtgagtgcaacaaatgcgttcattattccacaatgctcacttgctccgagtgccattattccacagttcctccctccagttacttcaatgggcttcgaacacccagctgtgcaagcctataggctacaacaagcgcttgcggcgag

SEQ ID NO: 71806 - DNA, 177 bp, Zea mays
ttcagaaacacaccaagcgaagacattagcaacaacctaacaacaatggctaccaagatattatccctccttgcgcttcttgcgctttttgcgagcgcaacaaatgcgttcattattccacaatgctcacttgctccaagttccattattacacagttcctcccaccagttacttca

SEQ ID NO: 71807 - DNA, 248 bp, Zea mays
caacaagcaacatagaaagtggaatccagtagcaacaatagagcaacaatggcgaccaagatattttccctccttatgatccttgctctttctacatgtgttgctaacgcgacaattttccctcaatgctcacaagctcctatagcttcccttcttcccccataccttccatcaattatagcttcaatatgtgaaaacccagctcttcaaccatattggcttcaacaagcaatcgcagcaagcaacat

SEQ ID NO: 71808 - DNA, 248 bp, Zea mays
atacgaactagcaacatacatagtgaagtacactagcaacatcttagcaccaatggcagccaagatttttgccatccttgccctccttgctctttcagcaagcgttgctaccgcgactattattccacaatgctcacaacaatacctctctccggtgacagccgcgagatttgaatacccaactatacaatcctacaggctacaagaggccatcgcagcaagcatcttacggtcgttagcattgaccg

SEQ ID NO: 71809 - DNA, 245 bp, Zea mays
cgacaagcaacatagaaagtggaatccagtagcaacaatagagcaacagttgcgaccaagatattttccctccttatgctccttgcttcttctacatgtgttgctaacgcgacaattttccctcaatgctcacaagctcctatagcttcccttcttcccccatatcttccatcaattatagcttcactatgtgaaaacccagctcttcaaccatataggcttcaacaagcaatcgtagtaagcaa

SEQ ID NO: 71810 - DNA, 134 bp, Zea mays
ccaacaagcaacatagaaagtggaatccagtagcaacaatagagcaacaatggcgaccaagatattttccctccttatgctccttgctctttctacatgtgttgctaacgcgacaattttccctcaatgctcac

SEQ ID NO: 71811 - DNA, 243 bp, Zea mays
gttgctgagagtaggcagcagtttcttccattcaaccaactagctgcattgaactctgcttcttatttgcaacaacaacaactaccattcagccactacctgctgcctacccccagcaatttcttccattcaaccaactggcagcattgaactctcctgcttatttacagcagcaacaactactaccattcagccagctagctggtgtgagcctgctaccttcttgatacaaccacagttgtt

SEQ ID NO: 71812 - DNA, 245 bp, Zea mays
cagaaacacaccaagcgaactacctagcaacgacttaacaacaatggctaccaagatattagccctccttgcgcttcttgccctttttgtgagcgcaacaaatgcgttcattattccacaatgctcacttgctcctagtgccattataccacagttcctccgaccagttacttcaatgggcttcgaacacctagctgtgcaagcctacaggctacaacaagcgcttgcggcgagcgtcttacaac

SEQ ID NO: 71813 - DNA, 240 bp, Zea mays
gttgctgcctttctaccagcagtttgcggctaaccccgcaaccctcttacaattacaacagttgttgccctttgtccaacttgctttgacagaccagcggcctcctaccaacaacacatcattggtggtgccctctttgagattgcttattagttgtaattcaataataaagttttttggatgatgtatgtggccaaccagagatatgaagttacatttccagatttgaatgtggaaaaa

SEQ ID NO: 71814 - DNA, 247 bp, Zea mays
cgagcagccgagcgactaagcgaagactcccttttccccgagcacaagagaaccatggcggcggcggcagtttacggcggcttcaaagggaagcttggcgtcgaggatgcccccgagctgcagctcaaccgcatccgcatcacactctcatccaagaacgtcaagaacttggagaaagtttgtgcggatttggtaaagggagccaaggacaagcatttgagggttaagggacctgtcaggatcccta

SEQ ID NO: 71815 - DNA, 177 bp, Zea mays
tagcaacatagaaagcacaatagtgtaccaacaatggcagccaaaatattttgcctccttatgctccttggtctttctgcaagtgctgctacggcgaccattttcccgcaatgctcgcaagctcctatagcttcccttcttcccccgtacctctcaccagcggtgtcttcggtatgt

SEQ ID NO: 71816 - DNA, 232 bp, Zea mays
cagcattcaaaaacacaccaagcgaagcgcactagcaacgacctaacaccaatggctaccaagatattagccctccttgcgcttcttgcccttttagtgagcgcaacaaatgcgttcattattccacagtgctcacttgctcctagtgccagtattccacagttcctcccaccagttacttcaatgggcttcgaacatccagccgtgcaagcctacaggctacaactagcgc

SEQ ID NO: 71817 - DNA, 272 bp, Zea mays
ctcgagccgctcgagccgttttgagcattcagaaacacaccaagcgaagcacattagcaacaacctaacaacaatggctaccaagatattatccctccttgcgcttcttgcgctttttgcgagcgcaacaaatgcgttcattattccacaatgctcacttgctccaagttccattattacacagttcctcccaccagttacttcaatgggcttcgaacacccagctgtgcaagcctataggctacaacaagcaattgcggcgagcgtcttac

SEQ ID NO: 71818 - DNA, 273 bp, Zea mays
gcaacatagaaagcacaatagtgtaccaacaatggcagccaaaatattttgcctccttatgctccttggtctttctgcaagtgctgctacggcgaccattttcccgcaatgctcgcaagctcctatagcttcccttcttcccccgtacctctcaccagcggtgtcttcggtatgtgaaaacccaattcttcaaccctacaggatccaacaggcaatcgcagctggcatcttacctttatcacccttgttcctccatcaatcatcagccctatt

SEQ ID NO: 71819 - DNA, 270 bp, Zea mays
attcagaaacacaccaagcgaacgcactagcaacaacctaacaacaatggctaccaagatattatccctccttgcgcttcttgcgcttcttgcgagcgcaacaaatgcgtccattattccacaatgctcacttgctcctagttccattattccacagttcctcccatcagttacttcaatggccttcgaacacccagctgtgcaagcctataggctacaacaagcgattgcggcgagtgtcttacaacaaccattcgtccaattgcaaca

SEQ ID NO: 71820 - DNA, 275 bp, Zea mays
  unsure (1)..(275): unsure at all n locations
gcaacatagaaagcacaatagtgtaccaacaatggcagccaaaatattttgcctncttatgctccttggtctttctgcaagtgctgctacggcgaccattttcccgcaatgctcgcaagctcctatagcttcccttcttcccccgtacctctcaccagcggtgtcttcggtatgtgaaaacccaattcttcaactctacaggatccaacaggcaatcgcagctggcatcttacctttatcacccttgttcctccaacaatcatcagccctattac

SEQ ID NO: 71821 - DNA, 282 bp, Zea mays
cggctcgagcggctcgagctcgagccgattttcagcattcaaaagcacaccaagcgaacgcaactagcaacgacctaacaccaatggctaccaagatattagccctccttgcgcttcttgcccttttagtgagcgcaacaaatgcgttcattattccacagtgctcacttgctcctagtgccattattccacagttcctcccaccagttacttcaatgggcttcgaacatccagccgtgcaagcctacaggctacaactagcgcttgcggcgagcgccttac

SEQ ID NO: 71822 - DNA, 283 bp, Zea mays
ctcgagccgtgagcattcagaaacacacctagcgaagcgcactagcaacgacctaacaaagatggctaccaagatattatccctctttgcgcttcttgccctttttgtgagcgcaacaaatgcgttcattattccacaatgctcacttgctcctagtgccattattccacagttcctccctccaattcattcaatgacattcgaacacccagctgtgcaagcctacaggctacaacaagcgcttgcggcgagcgtcttacaacaaccaattgcccaattacaa

SEQ ID NO: 71823 - DNA, 280 bp, Zea mays
gcaacatagaaagtggaatccagtagcaacaacagagcaacaatggcgaccaagatattttccctccttatgctccttgctctttctgcatgtgttgctaacgcgacaattttccctcaatgctcacaagctcctatagcttcccttcttcccccataccttccatcaatgatagcttcagtatgtgaaaacccagctcttcagccctataggctccaacaagcaatcgcagcaagcaacatacctttatcacccttgttgtttcaacaatcgccagccc

SEQ ID NO: 71824 - DNA, 304 bp, Zea mays
gtcgcacgcacgcgtccgaattccgctcgacagcatatacgcttcaacaagcaatcgcagcaagcaacatacctttatcgcccttgttgtttcaacaatcaccagccctatctttggtgcagtcattggtacaaaccatcagggcacaacagctgcagcaactcgtgctacctgtgatcaaccaagtagctctggcaaacctttctccctactctcagcaacaacaatttcttccattcaaccaactgtctacactgcaccctgctgcttatttgcagcaacaactattaccatttagccagct

SEQ ID NO: 71825 - DNA, 220 bp, Zea mays
ctagcaacatagaaagctcaatagtgtaccaccaatggcagctattatattttgcgctcttatgatccttggtatttctgcaagtgctgctatggcgacaattgtcgcgaaatggacgataactccaatatgttcacatcaatacctgtatctggcgacagcggtgagatcggaatgtgcaaatcatcactactctaaaggtaacgggaggacaacgcag

SEQ ID NO: 71826 - DNA, 269 bp, Zea mays
caggcaggcaggtcggcgaggagggcaggaagaccgaagaccgagccgtgcgggggctcgggacgggaacgggacaggacctcaaaatctcagatccttcctgcccgcccgcccgtgcccgtcgacgcgtcgttcttgccggccgcgccccacatccgccctctcctcctccagggggatcggatacgccacaggctgcgcgatggtgctgtgggtcttcggatacggctccctcatctggaaccccggcttcgacttcgacgacaaaa

SEQ ID NO: 71827 - DNA, 270 bp, Zea mays
attgagaccaactagcaacatagaaagcacaatagtgtaccaacaatggcagccaaaatattttgcctccttatgctccttggtctttctgcaagtgctgctacggcgaccattttcccgcaatgctcgcaagctcctatagcttcccttcttcccccgtacctctcaccagcggtgtcttcggtatgtgaaaacccaattcttcaaccctacaggatccaacaggcaatcacagctggcatcttacctttatcacccttgttcctccaa

SEQ ID NO: 71828 - DNA, 273 bp, Zea mays
cagaaacacaccaagcgaactacattagcaacaacctaacaacaatggctaccaagatattatccctccttgcgcttcttgcgctttttgcgagcgcaacaaatgcgttcattattccacaatgctcacttgctccaagttccattattacacagttcctcccaccagttacttcaatgggcttcgaacacccagctgtgcaagcctataggctacaacaagcaattgcggcgagcgtcttacaacaaccaatttcccagttgcaacaacaat

SEQ ID NO: 71829 - DNA, 261 bp, Zea mays
ggtgaaccctgtcgcctacttgcaacagcaggtgcttgcatccaacccacttgctctggcaaacgtagctgcataccaacaacaacaacaattgcaacagtttctgccagcgctcagtcaactagccatggtgaaccctgccgcctacctacaacagcaacaactgctttcatctagccctctcgttgtgggtaatgcacctacatacctgcaacaacaattgctgcaacagattgtaccagctctgactcagctagctgt

SEQ ID NO: 71830 - DNA, 278 bp, Zea mays
gcaaaatacatagtgaagtacactagcaacatcttagcaccaatgggagccaagattttttccctccttgccctccttgctctttcagcaagcgctgctacctctactattattccacaatgctcacaacaatacctctctccggtgacagccgcgggatttcaacacccaactatacaatcctacatgctacatgaggccatcgtagcaagcatcttacggtcattagcattaaccctccaacagccatatgccctattgcaacaaccatccttagt

SEQ ID NO: 71831 - DNA, 279 bp, Zea mays
tggaattgggtgatgaagatgaggacaaggagaaagaaagcaagcaggagtatactcttctatgcgactggataaagcagcagcttggcgataaagtcgccaaggtccagatctcgaagcgactcagctcttctccatgtgttcttgtttctggtaaatttggctggtcagccaacatggaaaggctcatgaatgcacagacccttggtgacacatcaagcctggagttcatgagaggtagacgaatttttgagatcaaccctgaccatcctatcatca

SEQ ID NO: 71832 - DNA, 278 bp, Zea mays
atagaaagcacaatagtgtaccaacaatggcagccaaaatattttgcttccttatgctccttggtctttctgcaagtgttgctaccgcaaccattttcccacaatgctcacaagctcctatagcttcccttcttcccccatacctctcaccagcggtgtcttcaatgtgtgaaaacccaattgttcaaccctacacgatccaacaggcaatcgcaacaggcatcttaccattatcacccttgttcctccaacaaccgtcagccctattacagcagtta

SEQ ID NO: 71833 - DNA, 277 bp, Zea mays
gagaccaactagcaacatagaaagcacaatagtgtaccaacaatggcagccaaaatattttgcctccttatgctccttggtctttctgcaagtgctgctacggcgaccattttcccgcaatgctcgcaagctcctatagcttcccttcttcccccgtacctctcaccagcggtgtcttcggtatgtgaaaacccaattcttcaaccctacaggatccaacaggcaatcgcagctggcatcttacctttatcacccttgttcctccaacaatcatcag

SEQ ID NO: 71834 - DNA, 270 bp, Zea mays
  unsure (1)..(270): unsure at all n locations
ctgaagacaccgctggtgagaggtatgggggatgataggacgcagtaggatgttgtgagcattgtgggaaaatggttgcggtaatcgcacttgcagaaagaccaaggagcataagctcctatagcttcctttcttcccccatacctctcatcagcggtgtcttcagtacgtgaaaacccaattcttcaaccctacaggatcgaacaggcaatcgcagcaggcatcttaaaggtnacagccttgttcctccaacaaccgtcagccctatta

SEQ ID NO: 71835 - DNA, 276 bp, Zea mays
  unsure (1)..(276): unsure at all n locations
gcaacatagtaagcacaatagtgtaccaacaatggcagccaaaatattttgcttccntatgctccttggtctttctgcaatcgctgctacggcgaccattttcccgcaatgctcgcaagctcctatactttcccttcttcccccgtacctctcaccagcggtgtcttcggtatgtgaaaactctaattcttcaaccctacaggatccaacaggcaatcgcagctggcatctcacctgtatcacccttgttcctccaacaatcatcagccctattac

SEQ ID NO: 71836 - DNA, 271 bp, Zea mays
ctgaaagttggcgaggcagagaaaaatcttggtgcaggcgatgtcaatgtttacgcacagatgattgatgatgctgagggcctggacaagattgagaacctacagagccatgacaacactgagatatatgagaaggctgtcaagatgctcgaatcttactggctagaggaggaagatgatgccatgccctctggcgacaatccccagaatggcttcaactttgggaaccagccctctgttccatcaggtggattcaacttcggctgaagat

SEQ ID NO: 71837 - DNA, 277 bp, Zea mays
ctcgagccgttttcagcattcaaaaacacaccaagcgaagcgcacctagcaacgacctaacaccaatggctaccaagatattagccctccttgcgcttcttgcccttttagtgagcgcaacaaatgcgttcattattccacagtgctcacttgcccctagtgccagtattccacagttcctcccaccagttacttcaatgggcttcgaacatccagccgtgcaagcctacaggctacaactagcgcttgcggcgagcgccttacaacaaccaattgc

SEQ ID NO: 71838 - DNA, 272 bp, Zea mays
gtccgcgtggagccggagcacggctttcaccagctgaatccgtcgccgtcgtcgtcgtcgttttcgatcccatcgtcacaaggccagtaccaaacgtgccagcgcgacgtcgacaggcacaacgtctgcgccatggaggtgaggcacagcgtcgaacggctggaccaggccgacgcctacagccctggggctgggaggatcacacgcctcaccagccacaagttccccgtcctcaacctcgtacagatgagcgcggtgcgggtagacctgta

SEQ ID NO: 71839 - DNA, 278 bp, Zea mays
gcaacatagaaagtggaatccagtagcaacaacagagcaacaatggcgaccaagatattttccctccttatgctccttgctctttctgcatgtgttgctaacgcgacaattttccctcaatgctcacaagctcctatagcttcccttcttcccccataccttccatcaatgatagcttcagtatgtgaaaacccagctcttcagccctataggctccaacaagcaatcgcagcaaccaacatacctttatcacccttgttgtttcaacaatcgccagc

SEQ ID NO: 71840 - DNA, 267 bp, Zea mays
ctgaaagttggcgaggcagagaaaaatcttggtgcaggcgatgtcaatgtttacgcacagatgattgatgatgctgagggcctggacaagattgagaacctacagagccatgacaacactgagatatatgagaaggctgtcaagatgctcgaatcttactggctagaggaggaagatgatgccatgccctctggcgacaatccccagaatggcttcaactttgggaaccagccctctgttccatcaggtggattcaacttcggctga

SEQ ID NO: 71841 - DNA, 267 bp, Zea mays
gaactagcaacatacatagtgaagtacactagcaacatcttagcaccaatggcagccaagatttttgccatccttgccctccttgctctttcagcaagcgttgctaccgcgactattattccacaatgctcacaacaatacctctctccggtgacagccgcgagatttgaatacccaactatacaatcctacaggctacaagaggccatcgcagcaagcatcttacggtcgttagcattgaccgtccaacaaccatatgccctattg

SEQ ID NO: 71842 - DNA, 265 bp, Zea mays
gcagcaacaactactaccattcagccagctagctggtgtgagccctgctaccttcttgacacaaccacaattgttgccgttctaccagcacgctgcgcctaacgctggcaccctcttacaactgcaacaattgctgccattcaaccaacttgctttgacaaacccaacagcattctaccaacaacccatcattggtggtgccctcttttagatttcttatgagttatagttcaataataaagttttttgtctgatgtttgtggct

SEQ ID NO: 71843 - DNA, 264 bp, Zea mays
gcagcaacaactactaccattcagccagctagctggtgtgagccctgctaccttcttgacacaaccacaattgttgccgttctaccagcacgctgcgcctaacgctggcaccctcttacaactgcaacaattgctgccattcaaccaacttgctttgacaaacccaacagcattctaccaacaacccatcattggtggtgccctcttttagatttcttatgagttatagttcaataataaagttttttgtctgatgtttgtggc

SEQ ID NO: 71844 - DNA, 265 bp, Zea mays
tgggccagtgcgtcgagttcctgaggcatcagtgcagcccgacggcgacgccctactgctcgcctcagtgccagtcgttgcggcagcagtgttgccagcagctcaggcaggtggagccgcagcaccggtaccaggcgatcttcggcttggtcctccagtccatcctgcagcagcagccgcaaagcgccaggtcgcggggctgttggcggcgcagatagcgcacaactgacggcgatgtgcggcctgcagcagccgactccatgcc

SEQ ID NO: 71845 - DNA, 270 bp, Zea mays
ggcgaacgtagctgcataccagcaacaacaacagctgcaacagtttatgccagtgctcagtcaactagccatggtgaaccctgccgtctacctacaactactttcatctagcccgctcgcggtgggcaatgcacctacgtacctacaacaacagttgctgcagcaaattgtaccagctctgactcaaccggctgtggcaaaccctgctgcctacttacaacagttgcttccattcaaccaactggctgtgtcaaactctgctgcgtacct

SEQ ID NO: 71846 - DNA, 270 bp, Zea mays
agaaagcacaatagtgtaccaacaatggcagccaaaatattttgcctccttatgctccttggtctttctgcaagtgctgctacggcgaccattttcccgcaatgctcgcaagctcctatagcttcccttcttcccccgtacctctcaccagcggtgtcttcggtatgtgaaaacccaattcttcaaccctacaggatccaacaggcaatcacagctggcatcttacctttatcacccttgttcctccaacaatcatcagccctattacat

SEQ ID NO: 71847 - DNA, 275 bp, Zea mays
ccaactagcaacatagaaagcacaatagtgtaccaacaatggcagccaaaatattttgcctccttatgctccttggtctttctgcaagtgctgctacggcgaccattttcccacaatgctcacaagctcctatagcttcccttcttcccccgtacctctcaccagcggtgtcttcggtatgtgaaaacccaattcttcaaccctataggatccaacaggcaatcgcagctggcatcttacctttatcacccttgttcctccaacaatcatcagcc

SEQ ID NO: 71848 - DNA, 273 bp, Zea mays
gttcattgaactctgcttcttatttgcaacaacaacaactaccattcagccagctacctgctgcctacccccagcaatttcttccattcaaccaactagcagcattgaactctcctgcttatttacagcagcaacaactactaccattcagccagctagctggtgtgagccctgctaccttcttgacacaaccacagttgttgccgttctaccagcacgttgcgcctaacgctggcaccctcttacaactgcaacaattgctgccattcaacc

SEQ ID NO: 71849 - DNA, 272 bp, Zea mays
gaaacttcttggacggtataattttctggatgaactatcaactcttgatcctgagctttatagaaatcttatgcaactaaagcactatgatggagatgttgaggatctatttttggattttactgtaactgaagagttgggtggtaaaagaatcgtccatgagcttagacctggtggtaaaaatatataacagacgaacgaaaacaagttacactatgttcatgcaatggcagatttcaaacttaaccgacagcaccattgtccttgcagat

SEQ ID NO: 71850 - DNA, 269 bp, Zea mays
cagaaacacaccaagcgaacggactagcaacgacctaacaacaatggctaccaagatattagccctccttgcgcttcttgccctttttgtgagcgcaacaaatgcgttcattattccacagtgctcacttgctcctagtgccagtattccacagttcctcccaccagttacttcaatgggcttcgaacatctagctgtgcaagcctacatgctacaactagcgcttgcggcgagcgtcttacaacaaccaattgcccaattgcaacaac

SEQ ID NO: 71851 - DNA, 257 bp, Zea mays
gcagaatgggggcattcgaatgttgctggaccttgcaaggtgctcaagggagagcgcacaatctgaagcagcaaaagctattgccaacttgtcagtgaataccaaggttgccaaggcagttgcagatgaaggcggcattacaatactcattaatttagccaagtcgatgaataggcttgttgccgaagaagctgctggtggcctttggaatctctctgtaggcgcagtacacaagcggctattgcagtactggtggc

SEQ ID NO: 71852 - DNA, 262 bp, Zea mays
tattgataccaactagcaacatacatagtgaagtacactagcaacatcttagcaccaatgggagccaagatttttgccctccttgccctccttgctctctcagcaagcgctgctacctcgacttttattccacaatgctcacaacaatacctctctccggtgacagccgcgggatttcaatacccaactatacaatcctacatggtacaagatgccatccaagcaagcatcttacggtcattagcattaaccctccaacaac

SEQ ID NO: 71853 - DNA, 262 bp, Zea mays
attttgagcattcagaaacacaccaagcgaacagcattagcaacaacctaacaacaatggctaccaagatattatccctccttgcgcttcttgcgctttttgcgagcgcaacaaatgcgttcattattccacaatgctcacttgctccaagttccattattacacagttcctcccaccagttacttcaatgggcttcgaacacccagctgtgcaagcctataggctacaacaagcaattgcggcgagcgtcttacaacaacc

SEQ ID NO: 71854 - DNA, 171 bp, Zea mays
gtttgtggcttctcagaaataagatagtacatttctaaaacacttgctctggcaaccgtagctgcataccaacaacaacaacaattgcaacagtttctgccagcgctcagtcaactagccctggtgaatcctgccgcctacctcacaacagcaacaactgctttcatctag

SEQ ID NO: 71855 - DNA, 275 bp, Zea mays
gagaccaactagcaacatagaaagcacaatagtgtaccaacaatggcagccaaaatattttgcttccttatgctccttggtctttctgcaagtgttgctaccgcaaccattttcccacaatgctcacaagctcctatagcttcccttcttcccccatacctctcaccagcggtgtcttcaatgtgtgaaaacccaattgttcaaccctacaggatccaacaggcaatcgcaacaggcatcttaccattatcacccttgttcctccaacaaccgtc

SEQ ID NO: 71856 - DNA, 274 bp, Zea mays
ttgagaggaacaagctacatagtcagtggaatccagtagctccaacagagcaacaatggcgatgaagatattttccctccttatgctccttgctctttctgcatgtgttgctaacgcgacaattttccctcaatgctcacaagctcctatagcttcccttcttcccccataccttcagtcaatgatagcttcagtatgtgaaaacccagctcttcagccctataggctccaacaagcaatcgcagcaagcaacatacctttatcacccttgttg

SEQ ID NO: 71857 - DNA, 273 bp, Zea mays
gtcgagctgaaattttgagcagtcgagaacactcctagtgcaggcgctgatcaatgaccacgcacagatgattgatgatgctgaaggcctggacaagattgagaacctacagagccatgacaacactgagatatatgagaaggctgtcaagatgctcgaatcttactggctagaggaggaagatgatgccatgccctctggcgacaatccccagaatggcttcaactttgggaaccagcactctgttccatcaggtggattcaacttcggctg

SEQ ID NO: 71858 - DNA, 264 bp, Zea mays
caagcaacatagaaagtggaatccagtagcaacaacagagcaacaatggcgaccaagatattttccctccttatgctccttgctctttctgcatgtgttgctaacgcgacaattttccctcaatgctcacaagctcctatagcttcccttcttcccccataccttccatcaatgatagcttcagtatgtgaaaacccagctcttcagccctataggctccaacaagcaatcgcagcaagcaacatacctttatcacccttgttg

SEQ ID NO: 71859 - DNA, 259 bp, Zea mays
tcggccagtgcgtcgcgttcctgaggcatcagtgcagcccgacggcgacgccctactgctcgcctcactgtcactcgttgcggcagcagtgtcgccagcagctcaggtaggtggcgccgcagcaccggtaccaggcgatcttcggcttggtcctccagtccatcctgcagcagcagccgctaagcggcatgtcgcggggctgttggctgcgcagcatagcgcacggctgacggcgatgtgcggcctgcagcagacgact

SEQ ID NO: 71860 - DNA, 270 bp, Zea mays
tattttcagcattcaaaaacacaccaagcgaagcgcactagcaacgacctaacaccaatggctaccaagatattagccctccttgcgcttcttgcccttttagtgagcgcaacaaatgcgttcattattccacagtgctcacttgctcctagtgccattattccacagttcctcccaccagttacttcaatgggcttcgaacatccagccgtgcaagcctacaggctacaactagcgcttgcggcgagcgccttacaacaaccaattgcc

SEQ ID NO: 71861 - DNA, 267 bp, Zea mays
ctcgagccgctagttgtggcaaaccctgctgcctacttgcaacagctgcttccattcaaccaactgactatgtcgaactctgctgcgtacctacaacagcgacaacagttacttaatccactagcagtggctaacccattggtcgctgccttcctacagcagcaacaattgctgccatacaaccagttctctttgataaaccctgtcttgtcgaggcagcaacccatcgttggaggtgccatcttttagattacatatgagatgtac

SEQ ID NO: 71862 - DNA, 266 bp, Zea mays
ttgaaccctgctgcttatttgcagcaacaactattaccattcagcgcgctagctactgcctactctcagcaacaacaacttcttccatttaaccatttggccgcactgaacccacgctgcttatttgcagcagcacatactactaccatttagccagctagctgcagcacaccgtgcttccttcttgacacagcaacagttgctgcctttctaccagcagtttgcggctaaccccgcaaccctcttacgactacaacacttgttgc

SEQ ID NO: 71863 - DNA, 209 bp, Zea mays
ccttgttcctccaacaatcatcagccctattacagcagttacctttggtgcatttattggcacaaaacatcagggcacaacaactacaacaacttgtgctagcaaacctagctgcctactctcagcaacagcagtttcttccattcaaccaactagcagcatggaactctgcttcttatttgcaacaacaacaactaccattcagccag

SEQ ID NO: 71864 - DNA, 209 bp, Zea mays
agaaagcacaatagtgtaccaacaatggcagccaaaatattttgcttccttatgctccttggtctttctgcaagtgctgctaccgcaaccattttcccacaatgctcacaagctcctatagcttcctttcttcccccatacctctcaccagcggtgtcttcagtatgtgaaaacccaattcttcaaccctacaggatccaacaggaatc

SEQ ID NO: 71865 - DNA, 245 bp, Zea mays
gaccaactagcaacatagaaagcacaatagtgtaccaacaatggcagctaaaatattttgcctccttatgctccttggtctttctgcaagtgctgctacggcgaccattttcccacaatgctcacaagctcctatagcttcccttcttcccccgtacttctcacaaacggtgtcttcggtatgtgaaaccccatttcttcacccctacaggatccaacaggcaatcgcagctggcatcttacctc

SEQ ID NO: 71866 - DNA, 63 bp, Zea mays
actagttctagttgcagcaaacctttttatgaacctttgtatttccattacctgctttggatc

SEQ ID NO: 71867 - DNA, 252 bp, Zea mays
ctactatactatactctaggaagcaaggacaccaccgccatggcagccaagatgcttgcattgttcgctctcctagctctttgtgcaagcgccactagtgcgacccatattccagggcacttgccaccagtcatgccattgggtaccatgaacccatgcatgcagtactgcatgatgcaacaggggcttgccagcttgatggcgtgtccgtccctgatgctgcagcaactgttggccttaccgcttcagacg

SEQ ID NO: 71868 - DNA, 263 bp, Zea mays
cggctcgagctcgagcgaatcggctcgagattcaacatacctcaatcctcaagttcatgatactgtacttggaatcattctgggaggtggtgcagggactagattgtaccccttgacaaagaagcgtgccaagcctgcagtgccattgggtgccaactatagactgattgatattcctgtcagcaattgtctcaacagcaacatatccaagatctatgtgctaacgcaatttaactctgcttccctcaaccgtcacctctcaa

SEQ ID NO: 71869 - DNA, 264 bp, Zea mays
tgagcattcaaaaacacacaaagggaagtgcactagcaacttcctaacaacaatggctaccaagatattagccctccttgcgctcctttccctttcagtgagcgcaacaactgcattcattattccacaatgctcacttgctcctaatgccattattccacagttcctcccatcagttacatcaatgggcatcgaacaccctattgtgcaagcctataggctacaacaagcgcatgcggcgagcgtcttacaacaaccgtttgc

SEQ ID NO: 71870 - DNA, 262 bp, Zea mays
gaccaacaagcaacatagaaagtggaatccagtagcaacaacagagcaacaatggcgaccaagatattttccctccttatgctccttgctctttctgcatgtgttgctaacgcgacaattttccctcaatgctcacaagctcctatagcttcccttcttcccccataccttccatcaatgatagcttcagtatgtgaaaacccagctcttcagccctataggctccaacaagcaatcgcagcaagcaacatacctttatcac

SEQ ID NO: 71871 - DNA, 266 bp, Zea mays
attgagaccagcaagcaacatagaaagtagaatccattagcaacaatagagcaacaatggcgaccaagatattttcactccttatgctccttgctctttctacatgtgttgctaacgcgacaattttccctcaatgctcacaagctcctatagcttcccttcttcccccataccttccatcaattatagcttcagtatgtgaaaacccagctcttcaaccatataggcttcaacaagcaatcgcagcaagcaacatactttatcgc

SEQ ID NO: 71872 - DNA, 133 bp, Zea mays
cgaacatccagccgtgcaagcctacaggctacaactagcgcttgcggcgagcgccttacaacaaccaattgcccaattgcaacaacaatccttggcacatctaaccctacaaaccattgcaacgcaacaacaa

SEQ ID NO: 71873 - DNA, 131 bp, Zea mays
cgaacatccagccgtgcaagcctacaggctacgactagcgcttgcggcgagcgccttgcaacaagcaattgcccaattgcgacagcaatccttggcacatgtggccctacaagccattgcaacgcaagaac

SEQ ID NO: 71874 - DNA, 210 bp, Zea mays
tactcgagccgattcggctcgagtagcaacatagaaagcacaatagacgtaccaacaatggcacccaaaatattttgcttccacatgctccttggtctttctgcaagttttgctaccgcaaccattttcccacaatgctcacaagctcctatagcttcccttcttcccccatacctctaacagcggtgccttcaatgtgtaaaccccatt

SEQ ID NO: 71875 - DNA, 168 bp, Zea mays
gtttctgccagcgctcagtcaactagccatggtgaaccctgccgcctacctacaacagcaacaactgctttcatctagcccgctcgctgtggccaatgcacctacatacctgcaacaacaattgttgcaacagattgtaccagctctgactcagctagttgtggcaaa

SEQ ID NO: 71876 - DNA, 218 bp, Zea mays
ttcaaaaacacaccaagcgaacgcactagcaacgacctaacaccaatggctaccaagatattagccctccttgcgcttcttgcccttttagtgagcgcaacaaatgcgttcattattccacagtgctcacttgctcctagtgccattattccacagttcctcccaccagttacttcaatgggcttcgaacatccagccgtgcaagcctacaggctaca

SEQ ID NO: 71877 - DNA, 266 bp, Zea mays
caactagcaacatagaaagcacaatagtgtaccaacaatggcagccaaaatattttgcctccttatgctccttggtctttctgcaagtgctgctacggcgaccattttcccgcaatgctcgcaagctcctatagcttcccttcttcccccgtacctctcaccagcggtgtcttcggtatgtgaaaacccaattcttcaaccctacaggatccaacaggcaatcgcagctggcatcttacctttatcacccttgtccctccaaaaat

SEQ ID NO: 71878 - DNA, 259 bp, Zea mays
gggaaaatgatcaacaggaggtggtgcagcagcttcataaggttcttcgcccattccttcttaggaggctcaagtctgatgtagaaaagggcctacctccaaagaaagaaacaattcttaaagttggaatgtctcagatgcaaaagcagtactatcgtgctctgcttcagaaggatttggaggttattaatgctggtggtgaacgcaagcgattgcttagcattgccatgcagttgcgcaagtgctgcaaccatccata

SEQ ID NO: 71879 - DNA, 247 bp, Zea mays
  unsure (1)..(247): unsure at all n locations
caactagcaacatagaaagcacaatagtgtaccaacaatggcagctaaaatattttgcctccttatgctccttggtctttctgcaagtgctgctacggcgaccattttcccacaatgctcacaagctcctatagcttcccttcttcccccgtacctctcaccaacggtgtcttcggtatgtgaanacccaattcttcaaccctacaggatccaacaggcaatcgcagctggcatcttacctttatca

SEQ ID NO: 71880 - DNA, 260 bp, Zea mays
caaataccccggccggccgcggccgttcccgaatcgagcggtgactggcgaggcaaaagcgcaaacgcgaccacagacagagcgcgcttcaaggccttttttttttgagataacaaggaggagaggaggagatggcggtcacgatcacctgggtgaaggcgaggcagatcttcgacagccgcggcaaccccaccgtcgaggtggacgtgggcctcagcgacggcagctacgcgaggggggccgtacccagcggcgcatcc

SEQ ID NO: 71881 - DNA, 263 bp, Zea mays
gatgtttcgtagacattttgaagcttttggggaaattcttgatctttacatgccaaaggaacatggttcaaaagggcatcgtggaattgggtttatcacgtttcagagtgcagagtctgtggacaacatcatgcaagagtcacatgagcttgatggtacaacagtagttgttgatcgtgcgactcctaaggatgaagatgtcagataccccccgagtaggccatctcagggtggctatggtgcatataacgcatacatttcag

SEQ ID NO: 71882 - DNA, 258 bp, Zea mays
gttctagatcgcgagcggccgccccgcccgtgccaccgcaaggggaaatcaacgaagagggtgtctatggtcaggggcctgatcagagaggttgctgggtttgctccttatgagaagcgtatcactgagcttctgaaggttggcaaggacaagcgtgccctgatgcttgctaagagaaagcttggaactcacaagagggcaaagaagaagagagaggagatggcgggcgtccacatgaagatgatgtcggctggtacg

SEQ ID NO: 71883 - DNA, 171 bp, Zea mays
attgagaccaactagcaacatagaaagcacaatagtgtaccaacaatggcagccaaaatattttgcttccttatgctccttggtctttctgcaagtgctgctaccgcaaccattttcccacaatgctcacaagctcctatagcttcctttcttcccccatacctctcacca

SEQ ID NO: 71884 - DNA, 165 bp, Zea mays
gacattctcagcgtatcctccccttggtaggtttgctgtccgtgacatgaggcagacggttgctgttggagttatcaagagtgtggagaagaaggacccaaccggcgccaaggtgaccaaggctgctgccaagaagaaatgatgcgatcctgcgcctgctttagc

SEQ ID NO: 71885 - DNA, 168 bp, Zea mays
caacaatggcagccaaaatattttgcctccttatgctccttggtctttctgcaagtgctgctacggcgaccattttcccgcaatgctcgcaagctcctatagcttcccttcttcccccgtacctctcaccagcggtgtcttcggtatgtgaaaacccaattcttcaac

SEQ ID NO: 71886 - DNA, 130 bp, Zea mays
gcaacatagaaagtggaatccagtagcaacaacagagcaacaatggcgaccaagatattttccctccttatgctccttgctctttctgcatgtgttgctaacgcgacaattttccctcaatgctcacaag

SEQ ID NO: 71887 - DNA, 256 bp, Zea mays
ggaagcctcaggagatccccaaccctgagtactttgagcttgacaagcctgactttgatccaattgctgctattgggattgagatctggacaatgcaggatggcatcctgtttgacaatatcttgattgctgacgatgagaaggttgccacctccattctggagaagacctggaagcccaagtatgatgttgagaaggaaaaggagaaggctgaggaggaggctgctgctggtgcagatggtctttctgagttcca

SEQ ID NO: 71888 - DNA, 259 bp, Zea mays
accaaatcaaatctgcaacatcaattatctaactccaaaaaccatgaagctggtgcttgtggttcttgctttcattgctttagtatcaagtgtttcttgtacacatacaggcggctgcagctgtggtcaacaacaaaaccattgcaacgcaacaacaacaacaacagtttctgccatcactgagccacctagccgtggtgaaccctgtcacctacttgcaacagcagctgcttgcatccaacccacttgctctggcgaa

SEQ ID NO: 71889 - DNA, 250 bp, Zea mays
ctacactgaaccctgctgcttatttgcagcaacaactattaccatttagccagctagctactgcctactctcagcaacaacaacttcttccatttaaccaaatggccgcactgaaccccgctgcttatttgcagcagcaaatactactgccatttagcgagctagctgcagcaagtcgtgcttccttcttgacacagcaacagttgctgcctttctacaagcagtttgcggctaaccccgcaaccctctt

SEQ ID NO: 71890 - DNA, 261 bp, Zea mays
caaaacatcagggcacaacaactacaacaacttgtgctagcaaaccttgctgcatactctcagcaacatcagtttcttccattcaaccaactggctgcattgaactctgctgcttatttgcaacaacaattaccattcagccagctagttgctgcctacccccagcaatttcttccattcaaccaactagcagcattgaactctgctgcttatttgcagcagcatcaactactaccattcagccagctagctgatgtgagc

SEQ ID NO: 71891 - DNA, 127 bp, Zea mays
ggaaaggaataatatatagggaaaaaggatgtatgctcacactgccacccatggtgatgggtggcagtgtgaccatgatcctggatgaaccattgaaatggaaaggaataatatatagggaaaaagg

SEQ ID NO: 71892 - DNA, 169 bp, Zea mays
  unsure (1)..(169): unsure at all n locations
gcagaagaagggatgcagcagccgatgcacatgcagccgcaggncggcgataccccagctgccggaatcaccacggagcagatccaaaagtatctggatgagaataagcagcttattttggctattttggaaaatcagaacctaggaaaattggcagaatgtgctcagt

SEQ ID NO: 71893 - DNA, 126 bp, Zea mays
cgcctacttgcaacagcaggtgcttgcatccaacccacttgctctggcaaacgtagctgcataccaacaacaacaacaattgcaacagtttctgccagcgctcagtcaactagccaaggtgaaccc

SEQ ID NO: 71894 - DNA, 262 bp, Zea mays
cgcctacttgcaacagcaggtgcttgcatccaacccacttgctctggcaaacgtagctgcataccaacaacaacaacaattgcaacagtttctgccagcgctcagtcaactagccatggtgaaccctgccgcctacctacaacagcaacaactgctttcatctagccctctcgttgtgggtaatgcacctacatacctgcaacaacaattgctgcaacagattgtaccagctctgactcagctagctgtggcaaacctgctg

SEQ ID NO: 71895 - DNA, 258 bp, Zea mays; identical to SEQ ID NO: 70447

SEQ ID NO: 71896 - DNA, 257 bp, Zea mays
gttctagatcgcgagcggccgctctattacagcagttacctttggtgcatttgttggcacaaaacatcaaggcacaacaactacaacaacttgtgctaggaaaccttgctgcctactctcagcaacagcagtttcttccattcaaccaactggctgcattgaactctgctgcttatttgcaacaacaactaccattcagtcagctagctgctgcctacccccagcaatttcttccattcaaccaactggcagcattg

SEQ ID NO: 71897 - DNA, 258 bp, Zea mays
ctcgagccgaatattttgagcattcagaaacacaccaagcgaacgcactagcaacgacctaacaacaatggctaccaagatattagccctccttgcgcttcttgccctttttgtgagcgcaacaaatgcgttcattattccacaatgctcacttgctcctagtgccattattccacagttcctcccaccagttacttcaatgggcttcgaacacctagctgtgcaagccaacatgcaacaacaagcgcttgcggcgag

SEQ ID NO: 71898 - DNA, 253 bp, Zea mays
gcaacatagaaagcacaatagtgtaccaacaatggcagccaaaatattttgcctccttatgctccttggtctttctgcaagtgctgctacggcgaccattttcccgcaatgctcgcaagctcctatagcttcccttcttcccccgtacctctcaccagcggtgtcttcggtatgtgaaaacccaattcttcaaccctacaggatccaacaggcaatcgcagctggcatcttacctttatcacccttgttcctc

SEQ ID NO: 71899 - DNA, 258 bp, Zea mays
caatagtgtaccaacaatggcagccaaaatattttgcttccttatgctccttggtctttctgcaagtgttgctaccgcaaccattttcccacaatgctcacaagctcctatagcttcccttcttcccccatacctctcaccagcggtgtcttcaatgtgtgaaaacccaattgttcaaccctacaggatccaacaggcaatcgcaacaggcatcttaccattatcacccttgttcctccaacaaccgtcagccctatt

SEQ ID NO: 71900 - DNA, 252 bp, Zea mays
ctagcaacatagaaagcacaatagtgtaccaacaatggcagccaaaatattttgcctccttatgctccttggtatttctgcaagtgctgctacggcgaccattttcccgcaatgctcacaagctcctatagcttcccttcttcccccgtacctctcaccagcggtgtcttcggtatgtgaaaacccaattcttcaaccctacaggatccaacaggcaatcgcagctggcatcttacctttatcacccttgtt

SEQ ID NO: 71901 - DNA, 126 bp, Zea mays
tgagaccagcaagcaacatagaaagtagaatccattagcaacaatagagcaacaatggcgaccaagatattttccctccttatgctccttgctctttctacatgtgttgctaacgcgacaattttc

SEQ ID NO: 71902 - DNA, 125 bp, Zea mays
caccaagcgaaggacactagcaacgacttaacaccaatggctaccaagatattagccctccttgcgattcttgcccttttagtgagagcaacaaatgcgttcattattccacagtgctcacttgc

SEQ ID NO: 71903 - DNA, 126 bp, Zea mays
caacaagcaccatatagagtggagtccagtagcaacaatagagcaacaatggcgaccaagatactttccctccttatgctccttggactttgtgcatgtgttgctaacgcgacaattttccctcaa

SEQ ID NO: 71904 - DNA, 253 bp, Zea mays
ctcgagccgcgcacatatctactatactatactctaggaagcaaggacaccaccgccatggcagccaagatgcttgcattgttcgctctcctagctctttgtgcaagcgccactagtgcgacccatattccagggcacttgccaccagtcatgccattgggtaccatgaacccatgcatgcagtactgcatgatgcaacatgggcttgccagcttgatggcgtgtccgtccctgatgctgcagaaatgtggcc

SEQ ID NO: 71905 - DNA, 103 bp, Zea mays
gcaacatagaaagtggaatccagtagcaacaatagggcaacaatggcgaccaagatattgtccctccttatgctgcttgctctggctacatgtgttgctaacg

SEQ ID NO: 71906 - DNA, 259 bp, Zea mays
aagcaatcgcagcaagcaacatacctttatcgcccttgttgtttcaacaatcgccagccctatctttggtgcagtcattggtacaaaccatcagggcacaacagctgcagcaactcgtgctacctctgatcaaccaagtagctctggcaaacctttctccctactctcagcaacaacaatttcttccattcaaccaactgtctacactgaaccctgctgcttatttgcagcaacaactattaccatttagccagctagc

SEQ ID NO: 71907 - DNA, 258 bp, Zea mays
ctcgagccgttcgatcccatttgaaatcaacccatcctcgtttcctccgtctagcagcctctcaccctcatggccaagatcaagatcgggatcaatgggtttggcaggatcggaacgctggtggccagggtggccctgcagatcgacgacgtcgagctcgtcgccgtgaacgaccccttcatcagcaccgattacatgacctacatgttcaagtatgacactgtgcacggacagtggaagcaccatgaggtcaaggtg

SEQ ID NO: 71908 - DNA, 109 bp, Zea mays
aacccatcattggtggtgccctcttttagatttcttatgagttatagttcaataataaagttttttgtctgatgtttgtggcttcccagaaataagaaagtacatttct

SEQ ID NO: 71909 - DNA, 190 bp, Zea mays
aacaagcaacatagaaagtggaatacagtagcaacaatagagcaacaatggcggccaagatattttccatccttatgctccttgctctttctgcatgtgttgctaacgcgaccatttttcctcaatactcacaagctcctatagctgcccttcttcccccataccttccatcaatgaccgcttcagtttg

SEQ ID NO: 71910 - DNA, 201 bp, Zea mays
gaccaactagcaacatagaaagcacaatagtgtaccaacaatggcagccaaaatattttgcttccttatgctccttggtctttctgcaagttttgctaccgcaaccattttcccacaatgctcacaagctcctatagcttcccttcttcccccatacctctcaccagcggtgtctacaatgtgtgaaaccccatttgttca

SEQ ID NO: 71911 - DNA, 124 bp, Zea mays
tcagaaacacacctagcgaacgacactagcaacgacctaacaacaatggctaccaagatattatccctctttgcgcttcttgccctttttgtgagcgcaacaaatgcgttcattattccacaat

SEQ ID NO: 71912 - DNA, 231 bp, Zea mays
attttgagcattcagaaacacaccaagcgaactacattagcaacaacctaacaacaatggctaccaagatattatccctccttgcgcttcttgcgctttttgcgagcgcaacaaatgcgttcattattccacaatgctcacttgctccaagttccattattacacagttcctcccaccagttacttcaatgggcttcgaacacccagctgtgcaagcctatgggctacaac

SEQ ID NO: 71913 - DNA, 295 bp, Zea mays
tttctcgcgtacgcgtgctcggtctccaacttcagctcgagccgaatattttgcgcattcagaaacacaccaagcgaacgcactcagcaacgacctatcaacaatggctaacaagatattagccctgccttgcgcttcttgccctttttgtgcgcgcaacaaatgcgttcattattgcacaatgctcacttgctcctagtgccattattccacagttcctgccaccagttacttcactgggcttcgaacacctcgctgtgcaaggcaacatgcagcaacaagcgcttgcggcgag

SEQ ID NO: 71914 - DNA, 254 bp, Zea mays
  unsure (1)..(254): unsure at all n locations
cagacacctccgccacctccacccttcgaatcgttccccaccatggcgtcgcngggatcctccgtcttcgccgcactncgagcaggcnccggaggaccccatcctcggagtgaccgttgcctacaacaaggatcccagccccgtgaaggtcaacctcggggtcggcgntaccggaccgaggaagggaagcccctagtgtgaacgtggtcaggcgcgccgagcaaatgttgatcaataatccgtcagtgtcagga

SEQ ID NO: 71915 - DNA, 195 bp, Zea mays
caacaagcaacatagaaagtggaatacagtagcaacaatagagcaacaatggcggccaagatattttccatccttatgctccttgctctttctgcatgtgttgctaacgcgaccatttttcctcaatactcacaagctcctatagctgcccttcttcccccataccttccatcaatgaccgcttcagtttgtgaa

SEQ ID NO: 71916 - DNA, 274 bp, Zea mays
ccaactagcaacatagaaagcacaatagtgtaccaacaatggcagccaaaatattttgcctccttatgctccttggtctttctgcaagtgctgctacggcgaccattttcccgcaatgctcgcaagctcctatagcttcccttcttcccccgtacctctcaccagcggtgtcttcggtatgtgaaaacccaattcttcaaccctacaggatccaacaggcaatcacagctggcatcttacctttatcacccttgttcctccaacaatcatcagc

SEQ ID NO: 71917 - DNA, 271 bp, Zea mays
gcagctgcttgcatccaacccacttgctctggcgaacgtagttgcaaaccagcaacaacaacagctacaacagtttctgccaacgctcagtcaactagccatggtgaaccctgccgcctacgtacaacaacaacaactgctttcatctagcccgctcgctgtgggcaatgcacctacatacctgcaacaacaattgttgcaacagattgtaccagctctgactcaactagctgtggcaaaccctgttgcctacttgcaacagctgcttcca

SEQ ID NO: 71918 - DNA, 266 bp, Zea mays
gttgcttccaacaatcaatcaagtagttgcagcgaaccttgctgcttacctccagcaacaacaatttcttccattcaatcaactagctggggtgaaccctgctgcttacttgcaggcacaacagctactaccattcaaccaacttgtcaggagccctgctgccttcttactgcagcaacagttgcttccattccatctacaagttgtggcaaacattgctgctttcttgcaacaacaacaacattgctgccatttacccacggttg

SEQ ID NO: 71919 - DNA, 110 bp, Zea mays
cgttttgagcattcaaaaccgcacactgggaagtgcactagcaacttcctaacaacaatggctaccaagatattagccctccttgcgctcctttccctttcagtgagcgc

SEQ ID NO: 71920 - DNA, 266 bp, Zea mays; identical to SEQ ID NO: 69162

SEQ ID NO: 71921 - DNA, 151 bp, Zea mays
attggcggtgccctcttttagattgcttatgagttatagttcaataatgaagttttttggatgatgtttgtggcttcccagaaataagaaagtacatttctaagcaaaaaaaaaaaaaaaaggggcggccgccgcctcagaaccccgacgc

SEQ ID NO: 71922 - DNA, 191 bp, Zea mays
cgctggcaccctcttacaactgcaacaattgctgccattcaaccaacttgctttgacaaacccagcagtgttctaccaacaacccatcattggtggtgccctcttttagatttcttatgagttatagttcaataataaagttttttatctgatgtttgtggcttcccagaaataagaaagtacatttctag

SEQ ID NO: 71923 - DNA, 250 bp, Zea mays; identical to SEQ ID NO: 69511

SEQ ID NO: 71924 - DNA, 270 bp, Zea mays
aagcaacatagaaagtggaatccagtagcaacaacagagcaacaatggcgaccaagatattttccctccttatgctccttgctctttctgcatgtgttgctaacgcgacaattttccctcaatgctcacaagctcctatagcttcccttcttcccccataccttccatcaatgatagcttcagtatgtgaaaacccagctcttcagccctataggctccaacaagcaatcgcagcaagcaacatacctttatcacccttgttgtttcaac

SEQ ID NO: 71925 - DNA, 269 bp, Zea mays
gttgtttcaacaatcgccagccctatctttggtgcagtcattggtacaaaccatcagggcacagcagctgcagcaagtcgtgctacctgtgatcaaccaagtagctctggcaaacctttctccctactctcagcaacaacaatttcttccattcaaccaactgtctacactgaaacctgctgcttatttgcagcaacaactattaccattcagccagctagctactgcctactctcagtaacaacaacttcttccatttaaccattggc

SEQ ID NO: 71926 - DNA, 266 bp, Zea mays
caacaacaatccttggcacatctaaccatacaaaccatcgcaacacaacagcaacaacagttcctaccagcactgagccaactagatgtggtgaaccctgtgcgctacttgcaacagcaggtgcttgcatccaacccacttgctctggcaaacgtagctgcataccgacaacaacaccaattgcaacagtttctgccagcgctcagtcaactagccatggtgaaccctgccgcctatctacaacagcaacaactgctttcatctcg

SEQ ID NO: 71927 - DNA, 263 bp, Zea mays
agttaatccatcgcccataatattttgagcattcaaaaacacacaaagggaagtgcactagcaacttcctaacaacaatggctaccaagatattagccctccttgcgctcctttccctttcagtgagcgcaacaactgcattcattattccacaatgctcacttgctcctaatgccattattccacagttcctcccatcagttacatcaatgggcatcgaacaccctattgtgcaagcctataggctacaacaagcgcttgcg

SEQ ID NO: 71928 - DNA, 263 bp, Zea mays
gctagcaaaccttgctgcctactctcagcaacagcagtttcttccattcaaccaactagctgcattgaactctgcttcttatttgcaacaacaacaactaccattcagccagctacctgctgcctacccccagcaatttcttccattcaaccaactggcagcattgaactctcctgcttatttacagcagcaacaactactaccattcagccagctagctggtgtgagccctgctaccttcttgatacaaccacagttgttgc

SEQ ID NO: 71929 - DNA, 256 bp, Zea mays
gcaacatagaaagcacaatagtgtaccaacaatggcagccaaaatattttgcctccttatgctccttggtctttctgcaagtgctgctacggcgaccattttcccgcaatgctcgcaagctcctatagcttcccttcttcccccgtacctctcaccagcggtgtcttcggtatgtgaaaacccaattcttcaaccctacaggatccaacaggcaatcacagctggcatcttacctttatcaccttgatcctccaac

SEQ ID NO: 71930 - DNA, 266 bp, Zea mays
cagaaacacaccaagcgaagcgcactagcaacaacctaacaacaatggctaccaagatattatccctccttgcgcttcttgcgctttttgcgagcgcaacaaatgcgtccattattccacaatgctcacttgctcctagttccattattccacagttcctcccaccagttacttcaatggccttcgaacacccagctgtgcaagcctataggctacaacaagcgattgcggcgagcgtcttacaacaaccaattgcccaattgcaa

SEQ ID NO: 71931 - DNA, 251 bp, Zea mays
ctcaattgttcaaccctacaggatccaacaggcaatcgcaacaggcatcttaccattatcacccttgttcctccaacaaccgccatcaaggtggtcggcacgccggcgtacgaggagatagtgaggaactgcatgatccaggatctctcctggaagggccctgccaagaactgggagaacgtgctgctcagcctcggcgtcaccggcgacacaccaggggtcgcacggcgaggagatcgcgccgctcgcca

SEQ ID NO: 71932 - DNA, 262 bp, Zea mays
  unsure (1)..(262): unsure at all n locations
ctcgagccgttcgatcccatttgaaatcaacccatcctcgtatnctccgtctagcagcctctcaccctcatggccaagatcaagatcgggatcaatgggtttggtcggatcggaaggctggtggccagggtggccctgcagagcgacgacgtcgagctcgtcgccgtgaacgaccccttcatcagcaccgattacatgacctacatgttcaagtatgacactgtgcacggacagtggaagcaccatgaggtcaaggtgaagg

SEQ ID NO: 71933 - DNA, 261 bp, Zea mays
attgagaccaactagcaacatagaaagcacaatagtgtaccaacaatggcagccaaaatattttgcctccttatgctccttggtctttctgcaagtgctgctacggcgaccattttcccgcaatgctcgcaagctcctatagcttcccttcttcccccgtacctctcagcagcggtgtcttcggtatgtgaaaacccaattcttcaaccctacaggatccaacaggcaatcacagctggcatcttacctttatcacccttg

SEQ ID NO: 71934 - DNA, 257 bp, Zea mays
cagacttctgctgcagcgcctccgccgccgccgccgcatctaacgcagttccctccgccgcagcccgaggcaagatggttctccagaacgacattgatctgctcaacccgccggcagaactcgagaagctcaagcacaagaaaaagagactcgtccagtcgcccaactccttcttcatggatgttaagtgccaggggtgcttcagcataaccactgttttcagccactcccagatgttgttgtgtgcctggctgcca

SEQ ID NO: 71935 - DNA, 261 bp, Zea mays
tagcaacatagaaagcacaatagtgtaccaacaatggcagccaaaatattttgcctccttatgctccttggtctttctgcaagtgctgctacggcgaccattttcccacaatgctcacaagctcctatagcttcccttcttcccccgtacctctcaccagcggtgtcttcggtatgtgaaaacccaattcttcaaccctataggatccaacaggcaatcgcagctggcatcttacctttatcaccttgttccgccaacatc

SEQ ID NO: 71936 - DNA, 266 bp, Zea mays
tagcaacatagaaagtagaatccattagcaacaatagagcaactatggcgaccaagatattttccctccttatgctccttgctctttctacatgtgttgctaacgcgacaattttccctcaatgctcacaagctcctatagcttcccttcttcccccataccttccatcaattatagcttcagtatgtgaaaacccagctcttcaaccatataggcttcaacaagcaatcgcagcaagcaacatacctttatcgcccttgttgttt

SEQ ID NO: 71937 - DNA, 273 bp, Zea mays
tgagaccaacaagcaacatagaaagtggaatccagtagcaacaatagagcaacaatggcgaccaagatactttccctccttatgctccttgctctttctgcatgtgttgctaacgcgacaattttccctcaatgctcacaagctcctatagcttcccttcttcccccataccttccatcaatgatagcttcagtatgtgaaaacccagctcttcaaccctataggctccaacaagcaatcgcagcaagcaacatacctttatcacccttgttt

SEQ ID NO: 71938 - DNA, 266 bp, Zea mays
gaccaactagcaacatagaaagcacaatagtgtaccaacaatggcagccaaaatattttgcctccttatgctccttggtctttctgcaagtgctgctacggcgaccattttcccgcaatgctcgcaagctcctatagcttcccttcttcccccgtacctctcaccagcggtgtcttcggtatgtgaaaacccaattcttcaaccctacaggatccaacaggcaatcacagctggcatcttacctttcatcaccttgttcctccaac

SEQ ID NO: 71939 - DNA, 265 bp, Zea mays
attttgagcattcagaaacacaccaagcgaaggtcactagcaacgacctaacaacaatggctaccaagatattagccctccttgcgcttcttgccctttttgtgagcgcaacaaatgcgttcattattccacaatgctcacttgctcctagtgccattattccacagttcctcccaccagttacttcaatgggcttcgaacacctagctgtgcaagccaacatgcaacaacaagcgcttgcggcgagcgtcttacaacaaccatt

SEQ ID NO: 71940 - DNA, 261 bp, Zea mays
atgcttctgaggctgacgaatttttagaagttgcttcaaagcctttagaatcattaccatatgattctcctgggcagacctttgtggcttttgaaaatccagaaggtgtcattgccaccggcaagttctcaaatatcctgaaattctttgttaaggaggttgatccatccacgggtgaagctgaagatgatggtgtcgaggatgagtaccagcttgaagatcttgaaatcgtttctgctgattatatgttgaaggtgggag

SEQ ID NO: 71941 - DNA, 224 bp, Zea mays
aaacaatgccatgcttcggcttcatatggaattgaagggtccattccctaagaagatgcttcgaaagggtgcctttactatgcaacactttgatcaagatctcaattttcatgctaccgaggaggatcctgtgacaaaaacggctgtgagaaggttaattttgaccattaaaccaaaggatgtcggttttttgattttgaactctcctggcgaggatccaaaaa

SEQ ID NO: 71942 - DNA, 262 bp, Zea mays
gagcattcagaaacacaccaagcgaagagcactagcaacgacctaacaacaatggctaccaagatattagccctccttgcgcttcttgccctttttgtgagcgcaacaaatgcgttcattattccacaatgctcacttgctcctagtgccattattccacagttcatcccaccagttacttcaatgggcttcgaacacctagctgtgcaagccaacatgcaacaacaagcgctagcggcgagcgtcttacaacaaccaattg

SEQ ID NO: 71943 - DNA, 267 bp, Zea mays
tttgagcattcagaaacacacctagcgaacgtcactagcaacgacctaacaacaatggcttccaagacattatccctccttgcgcttcttgccctttttgtgagtgcaacaaatgcgttcattattccacaatgctcacttgcgccgagtgccattattccacagttcctccctccagttacttcaatgggcttcgaacacccagctgtgcaagcctataggctacaacaagcgcttgctgcgagcgtcttagaacaaccaattgcc

SEQ ID NO: 71944 - DNA, 267 bp, Zea mays
ctcgagccgcggtctggctgaattcaataagctgagcgctaagcttatctttggcgctgacagccctgctattcaggagaatagggttgctaccgtgcagtgcctatcgggtactggttctttaagagtcggaggtgaatttcttgcaaggcactatcacgagcgcactatctacatcccacaaccaacctggggaaatcacccaaaagtcttcaccctatctggcttgaacgttaggagctaccgctattatgatcctgcaacatg

SEQ ID NO: 71945 - DNA, 268 bp, Zea mays
ggaagcccttgcgacagatatttagcgagttcagtggtggcaccaagcctgtcaatgaaggcgaggggttgtatacagggactggtgatgtcaagtaccatcttggaacttcatatgataggcctaccaggggtgggaaacatatccatctgtcactggttgcaaacccgagtcatttggaagcagttgatcctgttgttgctgggaaaacaagagcgagcagtactattctaatgaccgtgacaggaccaagaatttgggagtgttg

SEQ ID NO: 71946 - DNA, 271 bp, Zea mays
caactagcaacatagaaagcacaatagtgtaccaacaatggcagccaaaatattttgcctccttatgctccttggtctttctgcaagtgctgctacggcgaccattttcccgcaatgctcgcaagctcctatagcttcccttcttcccccgtacctctcaccagcggtgtcttcggtatgtgaaaacccaattcttcaaccctacaggatccaacaggcaatcgcagctggcatcttacctttatcaccttgttcctccaacaatcatcag

SEQ ID NO: 71947 - DNA, 272 bp, Zea mays
gtggcacaaaacatcagggcacaacaactacaacaacttgtgctagcaaaccttgctgcatactctcagcaacatcagtttcttccattcaaccaactggctgcattgaactctgctgcttatttgcaacaacaattaccattcagccagctagttgctgcctacccccagcaatttcttccattcaaccaactagcagcattgaactctgctgcttatttacagcagcaacaactactaccattcagccagctagctgatgtgagcctgct

SEQ ID NO: 71948 - DNA, 214 bp, Zea mays
cgttctaccagcacggtgagagttgtggtggcatcctcttagtactggggcaattgctggcattcaaccaacttgctttgacaaacctagcagtgttctaccaacaaacgatcattggtggtgccctcttttagatttcttatgagttatagttcaataataaagttttgtgtctgaactttgtggcttcccagaaataagaaagtacatttct

SEQ ID NO: 71949 - DNA, 264 bp, Zea mays
tgcttatttacaacagcaacagctaccaccattcaaccagctagctaatgtgagccctgctgccttcttgacacaacaatagttgttgtcgttctacctgcacgctgcgcctaacgctggcaccctcttacaactgcaacaattgctgccattcaaccaacttgctttgacaaacccagcagcgttctaccaacaacccatcattggtggtgccctcttttagattgcttatgagttatagttcaataatgaagttttttggat

SEQ ID NO: 71950 - DNA, 264 bp, Zea mays
ccaacaagcaacatagaaagtggaatccagtagcaacaacagagcaacaatggcgaccaagatattttccctccttatgctccttgctctttctgcatgtgttgctaacgcgacaattttccctcaatgctcacaagctcctatagcttcccttcttcccccataccttccatcaatgatagcttcagtatgtgaaaacccagctcttcagccctataggctccaacaagcaatcgcagcaagcaacatacctttatcaccctg

SEQ ID NO: 71951 - DNA, 263 bp, Zea mays
ccaactagcaacatagaaagcacaatagtgtaccaacaatggcagccaaaatattttgcttccttatgctccttggtctttctgcaagtgttgctaccgcaaccattttcccacaatgctcacaagctcctatagcttcccttcttcccccatacctctcaccagcggtgtcttcaatgtgtgaaaccccaattgttcaaccctacaggatccaacaggcaatcgcaacaggcatcttaccattatcacccttgttcctccaa

SEQ ID NO: 71952 - DNA, 245 bp, Zea mays
tgaaacaagggtgataaaggtatgttgcttgctgcttatttgcagcagcaaatattactaccatttagccagctagctgcagcaagccgtgcttccttcttgacacagcaacagttgctgcctttctaccagcagttagtggctaacaccgcaaccctacttacaactacaacaattgttgccctttgtccaacttgctttgacaaacacagcaacctcctatcaacgccacatcattggtggtg

SEQ ID NO: 71953 - DNA, 251 bp, Zea mays
caagttggttgaatggcagcaattgttgcagttgtaagagggtgccagcgttaggcgcacgtgctggtagaacggcaacaactgtggttgtatcaagaaggtagcatggctctaccaacaacccatcattggtggtgccctcttttagatttcttatgagtgctagttcaataataaagttttttgtctgatgtttgtggcttcccagaattaagaaagtccatttctagagaaaataaaaaaacaagggg

SEQ ID NO: 71954 - DNA, 266 bp, Zea mays
tgagacacaccaagcgaagcgactagcaacaacctaacaacaatggctaccaagatattatccctccttgcgcttcttgcgctttttgcgagcgcaacaaatgcgtccattattccacaatgctcacttgctcctagttccattattccacagttcctcccaccagttacttcaatggccttcgaacacccagctgtgcaagcctataggctacaacaagcgattgcggcgagcgtcttacaacaaccaattgcccaattgcaaca

SEQ ID NO: 71955 - DNA, 255 bp, Zea mays
agcataaggaggcaaaatattttcccgcaatgctcacaagctcctatagcttcccttcttcccccgtacctctcaccagcggtgtcttcggtatgtgaaaacccaattcttcaaccctacaggatccaacaggcaatcgcagctggcatcttacctttatcacccttgttcctccaacaatcatcagccctattacagcagttacctttgggtgcatttatgggcacaaaacatccagggcacaacaactacaac

SEQ ID NO: 71956 - DNA, 109 bp, Zea mays
gttcaaaaacacaccaagcgaacgcgactagcaacggactaacaccaatggctaccggggtatgagcccgcctggcgcttgcccttttcgtgagcgcacaactgcggtc

SEQ ID NO: 71957 - DNA, 265 bp, Zea mays
tagcaacatagaaagcacaatagtgtaccaacaatggcagccaaaatattttgcttccttatgctccttggtctttctgcaagtgttgctaccgcaaccattttcccacaatgctcacaagctcctatagcttcccttcttcccccatacctctcaccagcggtgtcttcaatgtgtgaaaccccaattgttcaaccctacaggatccaacaggcaatcgcaacaggcatcttaccattatcacccttgttcctccaacaaccgt

SEQ ID NO: 71958 - DNA, 93 bp, Zea mays
ctcgagccgattttgagcattcagaaacacacctagcgaaggcagctagcaacgacctaacaggaatggcttccaagacattatccctccttg

SEQ ID NO: 71959 - DNA, 261 bp, Zea mays
gagaaaatagatgaaatcatgtactccaagatatctactttcttgatgttgattaaagacagcgataggcatgtgagaagagcagcagttctggctttgagcacagcagcgcacaacaagccaaatttgattaaaggtcttcttccagagatattacctcttctatacgaccaaactgttattaagcaagagttaatcaggacagttgctctggggcctttcaaacatgttgtagatgatggtcttgaactcaggaaagct

SEQ ID NO: 71960 - DNA, 260 bp, Zea mays
ggcgaccaagatattttccctccttatgctccttgctctttctgcatgtgttgctaacgcgacaattttccctcaatgctcacaagctcctatagcttcccttcttcccccataccttccatcaatgatagcttcagtatgtgaaaacccagctcttcagccctataggctccaacaagcaatcgcagcaagcaacatacctttatcacccttgttgtgtcaacaatcgccagccctatctttggtgcagtcattggtac

SEQ ID NO: 71961 - DNA, 226 bp, Zea mays
ctcgagccgttcagaaacacaccaagcgaagcacattgagcaacaacctaacaacactggctaccaagatatgatccctccttgcgcttcttcggcatgctgcgagcgcaacaaatgcgttcaaaaatcgtcaatgctcacttactccatgttccaagggagtgacgagtagcactgataacctacttcaatggacgtcgaacacccagctgtgcaagcctatagg

SEQ ID NO: 71962 - DNA, 213 bp, Zea mays
agataagataaatcagtttagtggcataatagaaggcttaatttggtctcctaaagcaagtgattcaaatgatagacatgatgattgggcttttgaggagggaccacactctgattttactgggccaaattgtgggagtacagcctgtgtagctttgatcagaaataagcaactcgttgtggcaaatgctggtgactcccgctgtgtcatctc

SEQ ID NO: 71963 - DNA, 264 bp, Zea mays
caactagcaacatagaaagcacaatagtgtaccaacaatggcagctaaaatattttgcctccttatgctccttggtctttctgcaagtgctgctacggcgaccattttcccacaatgctcacaagctcctatagcttcccttcttcccccgtacctctcaccaacggtgtcttcggtatgtgaaaacccaattcttcaaccctacaggatccaacaggcaatcgcagctggcatcttacctttatcacccttgttcctccaaca

SEQ ID NO: 71964 - DNA, 260 bp, Zea mays
taggaaaccttgctgcctactctcagcaacagcagtttcttccattcaaccaactggctgcattgaactctgctgcttatctgcaacagcaactaccagtcagtcagctagctgctgcctacccccagcaatttcttccattcaaccaactggcagcattgaactctgcggcttatttacaacagcgacagctagtaccattcagcgagctcagctgatgtgagctctgttgccgtcttgacacatctgcagttgttgcc

SEQ ID NO: 71965 - DNA, 267 bp, Zea mays
gtcaagttcacatgcaaccacaaaaacatcagcaacaacaagaagttcatgttcaacaacaacaacaacaaccgcagcaccaacaacaacaacaacaacaacaccaacaatcacaaggccatgtgcaacaacacgaacagagccatgagcaacaccaaggacagagccatgagcaacaacatcaacaacaattccagggtcatgacaagcagcaacaaccacaacagcctcagcaatatcagcagggccaggaaaaatcacaacagc

SEQ ID NO: 71966 - DNA, 265 bp, Zea mays
atactgctggtagaaaggcagcagtttgcggctaaccccgcaaccctcttacaactacaacaattgttgccctttgtccaacttgctacgacagaccgagcggcctcctaccaacaacacatcattggtggtgccctcttttagattgcttattagttgtaattcaataataaagttttttggatgatgtatgtggccaaccagaaataagaagttacatttccagattttactgtgaaaatgtaacttcttatttctggttggc

SEQ ID NO: 71967 - DNA, 108 bp, Zea mays
gaaggaccataggggaaccagcattggcagccaaaatattttgcttccttatgctccttggtctttctgcaagtgctgctacggcaaccattttcccacaatgctcac

SEQ ID NO: 71968 - DNA, 278 bp, Zea mays
attgagaccaacaagcaacatagaaagtggaatccagtagcaacaacagagcaacaatggcgaccaagatattttccctccttatgctccttgctctttctgcatgtgttgctaacgcgacaattttccctcaatgctcacaagctcctatagcttcccttcttcccccataccttccatcaatgatagcttcagtatgtgaaaacccagctcttcagccctataggctccaacaagcaatcgcagcaagcaacatacctttatcacccttgttgttt

SEQ ID NO: 71969 - DNA, 277 bp, Zea mays
cggctcgagcagaatttattgaaggacaccgctgatcaagcactggctgttagagaaagcttaattgttgctgcgagcaatcgctttttcactcttatcccttctattcatcctcatattatacgggatgaggatgatttgatgatcaaagcgaaaatgcttgaagctctgcaggatattgaaattgcttcaaagatagttggcttcgatagcgacagtgatgaatctcttgatgataaatatatgaaacttcactgtgacatcaccccgctggctc

SEQ ID NO: 71970 - DNA, 220 bp, Zea mays
taacttgctttgacaaacccaacagcattctaccaacaacccatcattggtggtgccctcttttagatttcttatgagttatagttcaataataaagttttttgtctgatgtttgtggcttcccagaaataagaaagtacatttctagattcttatgtgcttctagtctccaaatgtggttgatagttattttgctctaagattagcagtaatgaagtat

SEQ ID NO: 71971 - DNA, 277 bp, Zea mays
  unsure (1)..(277): unsure at all n locations
attttgagcattcaaaaacacaccaagcgaagacattagcaacaacnctaaccacaatggctaccaagatattatccctccttgcgcttcttgcgctttttgcgagcgcaacaaatgcgttcattattccacaatgctcacttgctccaagttccattattacacagttcctcccaccagttacttcaatgggcttcgaacacccagctgtgcaagcctataggctacaacaagcaattgcggcgagcgtcttacaacaaccaatttcccagttgca

SEQ ID NO: 71972 - DNA, 279 bp, Zea mays
attgagaccaacaagcaacatagaaagtggaatccagtagcaacaatagagcaacaatggcgaccaagatattttccctccttatgctccttgctctttctacatgtgttgctaacgcgacaattttccctcaatgctcacaagctcctatagcttcccttcttcccccataccttccatcaattatagcttcaatatgtgaaaacccagctcttcaaccatataggcttcaacaagcaatcgcagcaagcaacatacctttatcgcccttgttgtttc

SEQ ID NO: 71973 - DNA, 281 bp, Zea mays
attattgataccaactagcaacatacatagtgaagtacactagcaacatcttagcaccaatgggagccaagatttttgccctccttgccctccttgctctttcagcaagcgctgctacctcgacttttattccacaatgctcacaacaatacctctctccggtgacagccgcgggatttcaatacccaactatacaatcctacatggtacaagaggccatccaagcaagcatcttacggtcattagcattaaccctccaacaaccatatgctctattgcaa

SEQ ID NO: 71974 - DNA, 279 bp, Zea mays
gaaagtggaatacagtagcaaaaatagagcaacaatggcggccaagatattttccatccttatgctccttgctctttctgcatgtgttgctaacgcgaccatttttcctcaatactcacaagctcctatagctgcccttcttcccccataccttccatcaatgaccgctttagtatgtgaaaacccagcccttcaaccctacaggatccagcaagcaatcgcaacaagcaacttacctttatcacacctgttctttcaacaatcgccagccctatcttt

SEQ ID NO: 71975 - DNA, 279 bp, Zea mays
catcctccttgcaactccagtgctgctcactgccactgctagcagatcgagctgctccgtctcacaaaccctctagcttgctttgctgctccacctgcaagtctgcaaccgcgtacagagatgtcgacggtgagccgtgcgtccctcgaccagaagctcgccctcgccaagcgctgctcccgagaggcgaccctcgccggagccaaggcggcagccgtggcgactatcgcctccgcgatccccaccctggccagcgtgcggatgctgccatgggccaag

SEQ ID NO: 71976 - DNA, 281 bp, Zea mays
taccaacatacatagtgaagtacactagcaacatcttagcaccaatggcagccaagatttttgcgctccttgccctccttgctctttcagcaagtgttgctaccgcgactattattccacaatgctcacaacaatacctctctccagtgatagccgcgagatttgaatacccatctatacaatcctacaggctacaagaggccatcacagcaagcatcttacggtcgttagcattgaccgtccaatcaacatatgccctattgcaacaaccatccttagtg

SEQ ID NO: 71977 - DNA, 276 bp, Zea mays
tagcaacatagaaagcacaatagtgtaccaacaatggcagccaaaatattttgcctccttatgctccttggtctttctgcaagtgctgctacggcgaccattttcccgcaatgctcgcaagctcctatagcttcccttcttcccccgtacctctcaccagcggtgtcttcggtatgtgaaaacccaattcttcaaccctacaggatccaacaggcaatcacagctggcatcttacctttatcacccttgttcctccaacaatcatcagccctatta

SEQ ID NO: 71978 - DNA, 76 bp, Zea mays
cgtatgagttatagttcaataataaagttttttgtctgatgttggtggcttcccagacataagagagtacatttct

SEQ ID NO: 71979 - DNA, 275 bp, Zea mays
attttcagcattcaaaaacacaccaagcgaagcgcactagcaacgacctaacaccaatggctaccaagatattagccctccttgcgcttcttgcccttttagtgagcgcaacaaatgcgttcattattccacagtgctcacttgctcctagtgccattattccacagttcctcccaccagttacttcaatgggcttcgaacatccagccgtgcaagcctacaggctacaactagcgcttgcggcgagcgccttacaacaaccaattgcccaattg

SEQ ID NO: 71980 - DNA, 279 bp, Zea mays
tgcaacatagaaagcacaatagtgtaccaacaatggcagccaaaatattttgcttccttatgctccttggtctttctgcaagtgttgctaccgcaaccattttcccacaatgctcacaagctcctatagcttcccttcttcccccatacctctcaccagcggtgtcttcaatgtgtgaatacccaattgttcaaccctacaggatccaacaggcaatcgcaacaggcatcttacctattatcaccttgttcctccaacaaccgtcagccctattacagc

SEQ ID NO: 71981 - DNA, 258 bp, Zea mays
aacgccttcttgcaacaacaacaattgctgccattctacccacaggatgtggcaaacattgtcgccttcttacaacaacagcaattgctgccatttagccaactcgctttgacgaatcctaccaccttattgcatcagcccaccattggtggtaccatcttctagattttttatgctttatactgtaataataaatttctcatactgatatgtgcaacttctcagtaataaaagattagagatctatattttaagttc

SEQ ID NO: 71982 - DNA, 276 bp, Zea mays
atttagaccaactagcaacatagaaagcacaatagtgtaccaacaatggcagccaaaatattttgcctccttatgctccttggtatttctgcaagtgatgctacggagaccattttcccgcaatgctcacaagctcctatagcttcccttcttcccccgtacctgttaccaacggtgtcttcggtatgtgaaaacccaattcttcaaccctacaggatccaacaggcaatcgcagctggcatcttaactttatcacccttgttcctccaacaatca

SEQ ID NO: 71983 - DNA, 277 bp, Zea mays
ggggttcatgggggacgaccagctcggggaggcgctggagggctccgacatcgtcatcatccccgcaggagtgcctaggaagcccggcatgaccagggacgacctcttcaacatcaacgccggcatcgttaaggcgctgtgcactgccatcgccaagcactgccccaacgctcttgtcaatatgatcagtaaccctgtcaactctactgtcccgattgctgcggaggttttcaagaaggctggtacttatgatgagaagaagctgtttggtgtgact

SEQ ID NO: 71984 - DNA, 108 bp, Zea mays
agaccattagctttatctactccagagcggagaagaacgcgatcgacaccatgagggtgtagctcgttgccctcgctctcctggcgctcgctgcgagcgctattttta

SEQ ID NO: 71985 - DNA, 276 bp, Zea mays
caactagcaacatagaaagcacaatagtgtaccaacaatggcagctaaattattttgcctccttatgctccttggtctttctgcaagtgctgctacggcgaccattttcccacaatgctcacaagctcctatagcttcccttcttcccccgtacctctcaccaacggtgtcttcggtatgtgaaaacccaattcttcaaccctacaggatccaacaggcaatcgcagctggcatcttacctttatcacccttgttcctccaacaatcatcagccct

SEQ ID NO: 71986 - DNA, 282 bp, Zea mays
ttagagcggctcgaacagaatttattgaaggacaccgctgatcaagcactggctgtgagagacagcttaattgtcgctgcgagcaatcgcgttttcactcttatcgcttctattcatcctcatattatacgggatgcagatgatttgatgatcaaagcgataatgcttgaagctctgcaggatattgaaattgcttcaaagatagttggcttcgatagcgacagtgatgaatctcttgatgatcaatatatgaaacttcactgtgacatcaccccgctggat

SEQ ID NO: 71987 - DNA, 275 bp, Zea mays
tgagcattcagaaacacacctagcgaacgtcactagcaacgacctaacaacaatggcttccaagacattatccctccttgcgcttcttgccctttttgtgagtgcaacaaatgcgttcattattccacaatgctcacttgctccgagtgccattattccacagttcctccctccagttacttcaatgggcttcgaacacccagctgtgcaagcctataggctacaacaagcgcttgcggcgagcgtcttagaacaaccaattgcccaattacaac

SEQ ID NO: 71988 - DNA, 178 bp, Zea mays
aaagaaaaaaagtactccatctgttcatttcaattcttcattcaggtcattgctcacactgacactgccacccatggtgatgcgtgacacattattactcaatcatcaccatgggtggcagtgtcagtgtgagcaatgacctgaatgaacaattgaaatgaaaatgaaagtaagtact

SEQ ID NO: 71989 - DNA, 274 bp, Zea mays
cagcagacacctccgccacctccaccctcgaatcgttccccaccatggcgtcgacaggatcctccgtcttcgccgcactcgagcaggccccggaggaccccatcctcggagtgaccgttgcctacaacaaggatcccagccccgtgaaggtcaacctcggggtcggcgcctaccggaccgaggaagggaagcccctagtgctgaacgtggtcaggcgcgccgagcaaatgttgatcaataatccgtcacgtgtcaaggagtacctaccaatcac

SEQ ID NO: 71990 - DNA, 277 bp, Zea mays
gtggcctccctcagccgggacttccgctccatggtccgcagcggggagatctaccggctgcggcgccagaacggggtggccgagcattgggtctacttctcctgcaacgttctcgaatgggatgcctacgacccataccgggagcgctggatccatgtgcccaagatgccgcctgatgaatgcttcaagtgctccgacaaggaatcgcttgcggtgggcactgagctgcttgtgttcgggatggcgcgtattgtcttccgatacagcatcctgacca

SEQ ID NO: 71991 - DNA, 271 bp, Zea mays
ttcagaaacacaccaagcgaagcacattagcaacaacctaacaacaatggctaccaagatattatccctccttgcgcttcttgcgctttttgcgagcgcaacaaatgcgttcattattccacaatgctcacttgccccaagttccattattacacagttcctcccaccagttacttcaatgggcttcgaacacccagctgtgcaagcctataggctacaacaagcaattgcggcgagcctcttacaacaaccatttcccagttgcaacaac

SEQ ID NO: 71992 - DNA, 275 bp, Zea mays
  unsure (1)..(275): unsure at all n locations
cgggagccaaccaggaggatgccctcgcgcgaattgaaaagctttcagaagtaaacccgatgcttggcttccgtgggtgcaggcttggtatatcgtaccctgaattgacagagatgcaagcccgggccatttttgaagctgctatagcaatgaccaaccagggtgttcaagtgttcccagagataatggttcctcttgttggaacaccacaggaatggggcatcagtgatcttaatccgccaattgctgagaaantgttcgccaagtgggcaaat

SEQ ID NO: 71993 - DNA, 274 bp, Zea mays
tatagaaagtggaatacagtagcaacaatagagcaacaatggcggccaagatattttccatccttatgctccttgctctttctgcatgtgttgctaacgcgaccatttttcctcaatactcacaagctcctatagctgcccttcttcccccataccttccatcaatgaccgcttcagtttgtgaaaacccagcccttcaaccctacaggctccaacaagcaatcgcaacaagcaacttacctttatcacccctgttctttcaacaatcgccagc

SEQ ID NO: 71994 - DNA, 269 bp, Zea mays
ttacgaaaaaagtgaccatcaggtgtattcaggaatgcttctcctccacggagagacgttacgcatgatagctgatacaatcttctctggtactggtgtgcccatctcagggaaggttgctggaatacattggcactattatacttgttcacatccatctgaactgacatctggctactacaactctctactcagagatggctatcttcctatagctcgaatgtatgccacatacaacgctacattgtgctgcagttgtttcgacctga

SEQ ID NO: 71995 - DNA, 273 bp, Zea mays
attttgagcattcagaaacacacctagcgagcgcactagcaacgacctaacaacaatggcttccaagacattatccctccttgcgcttcttgccctttttgtgagtgcaacaaatgcgttcattattccacaatgctcacttgctccgagtgccattattccacagttcctccctccagttacttcaatgggcttcgaacacccagctgtgcaagcctataggctacaacaagcgcttgcggcgagcgtcttagaacaaccaattgcccaatt

SEQ ID NO: 71996 - DNA, 272 bp, Zea mays
ttaaacacaccaagcgaacgcactagcaacgacctaacaccaatggctaccaagatattagccctccttgcgcttcttgcccttttagtgagcgcaacaaatgcgttcattattccacagtgctcacttgctcctagtgccagtattccacagttcctcccaccagttacttcaatgggcttcgaacatccagccgtgcaagcctacaggctacaactagcgcttgcggcgagcgccttacaacaaccaattgcccaattgcaacaacaatc

SEQ ID NO: 71997 - DNA, 277 bp, Zea mays
attttcagcattcaaaaacacaccaagcgaagcgcactagcaacgacctaacaccaatggctaccaagatattagccctccttgcgcttcttgcccttttagtgagcgcaacaaatgcgttcattattccacagtgctcacttgctcctagtgccagtattccacagttcctcccaccagttacttcaatgggcttcgaacatccagccgtgcaagcctacaggctacaactagcgcttgcggcgagcgccttacaacaaccaattgcccaattgca

SEQ ID NO: 71998 - DNA, 261 bp, Zea mays
tggagagggtgtgactgacgtagctccgggcgaccatgtccttcctgtgttcactggggagtgcaaggagtgtgcccactgcaagtcggcagagagcaacatgtgtgatctgctcaggatcaacaccgaccgcggtgtgatgattgccgatggcaagtcgcggttttcaatcaatgggaagcctatctaccactttgttgggacttccaccttcagcgagtacaccgtcatgcattggggtgtgttgcaagatcaacctca

SEQ ID NO: 71999 - DNA, 276 bp, Zea mays
tagcaacatagaaagtagaatccattagcaacaatagagcaacaatggcgaccaagatattttccctccttatgctccttgctctttctacatgtgttgctaacgcgacaattttccctcaatgctcacaagctcctatagcttcccttcttcccccataccttccatcaattatagcttcagtatgtgaaagtccagctcttcaaccatataggcttcaacaagcaatcgcagcaagcaacatacctttatcgcccttgttgtttcaacaatcac

SEQ ID NO: 72000 - DNA, 279 bp, Zea mays
gcaacatagaaagtggaatccagtagcaacaatagagcaacaatggcgaccaagatattttccctccttatgctccttgctctttctacatgtgttgctaacgcgacaattttccctcaatgctcacaagctcctatagcttcccttcttcccccataccttccatcaattatagcttcaatatgtgaaaacccagctcttcaaccatataggcttcaacaagcaatcgcagcaagaatactacctttatcgcccttgttgtttcatcaatcgccagcc

SEQ ID NO: 72001 - DNA, 277 bp, Zea mays
gctcccggctcccccacggtactccagccgctactctgcgatttcgccagtacgccaccaccaccgagcctggactaccgccgccgcccttcgccgatatcttcagcggcgaacagcgcccaccagatcccgcccctgcgatggagtccgtggtgaacccgaaggcatacccgctggctgatgcgcactgacgatgggtatcctcgatatcatccataaggccgccaactacaaacagcttaagaagggagcgaatgaagcgacgaagaccctgaat

SEQ ID NO: 72002 - DNA, 271 bp, Zea mays; identical to SEQ ID NO: 68330

SEQ ID NO: 72003 - DNA, 230 bp, Zea mays
cagaccattagctttatctactccagagcgcagaagaacccgatcgacaccatgagggtgttgctcgttgccctcgctctcctggctctcgctgcgagcgtcatctccatgcatacaaggcgctgcagccgctgacagccactgacgacggttcatctaccgacgccacaataccactaccctacacaacagctacggcctcaggctcagcacaagtcacagcgatatcc

SEQ ID NO: 72004 - DNA, 271 bp, Zea mays
taagcaacatagaaagtggaatacagtagcaacaatagagcaacaatggcggccaagatattttccatccttatgctccttgctctttctgcatgtgttgctaacgcgaccatttttcctcaatactcacaagctcctatagctgcccttcttcccccataccttccatcaatgaccgcttcagtttgtgaaaacccagcccttcaaccctacaggctccaacaagcaatcgcaacaagcaacttacctttatcacccctgttctttcaac

SEQ ID NO: 72005 - DNA, 203 bp, Zea mays
gcctaacgctggcaccctcttacaactgcaacaattgctgccattcaaccaacttgctttgacaaacccaacagtgttctaccaacaacccatcattggtggtgccctcttttagattgcttatgagttatagttcaataatgaagttttttggatgatgtttgtggcgtcccagaaataagaaagtacatttctagattctt

SEQ ID NO: 72006 - DNA, 271 bp, Zea mays
gacaaaacccaagctgtctagtcatggtgatctgtattatgaaggcaaagaatttgaggttaaactgagggaaatgaagccaggcatgctgtctcgtgagcttaaagatgctcttggtatgcctgatggcgcccctcccccatggcttataaacatgcagcgctatggtccacctccatcttatccccaactgaagatcccaggtctaaatgccccaatcccccctggtgccagttttggttatagaccaggggagtggggaaagccacca

SEQ ID NO: 72007 - DNA, 274 bp, Zea mays
caactagcaacatagaaagcacaatagtgtaccaacaatggcagccaaaatattttgcctccttatgctccttggtatttctgcaagtgctgctacggcgaccattttcccgcaatgctcacaagctcctatagcttcccttcttcccccgtacctctcaccagcggtgtcttcggtatgtgaaaacccaattcttcaaccctacaggatccaacaggcaatcgcagctggcatcttacctttatcacccttgttcctccaacaatcatcagcc

SEQ ID NO: 72008 - DNA, 276 bp, Zea mays
agaccaactagcaacatagaaagcacaatagtgtaccaacaatggcagccaaaatattttgcttccttatgctccttggtctttctgcaagtgctgctaccgcaaccattttcccacaatgctcacaagctcctatagcttcctttcttcccccatacctctcaccagcggtgtcttcagtatgtgaaaacccaattcttcaaccctacaggatccaacaggcaatcgcagcaggcatcttacctttatcacccttgttcctccaacaaccgtcag

SEQ ID NO: 72009 - DNA, 274 bp, Zea mays
tgagaccaacaagcaacatagaaagtggaatccagtagcaacaatagagcaactatgctgaccaagatactttccctccttatgctccttgctctttctgcatgtgttgctaacgcgacaattttccctcaatgctcacaagctcctatagcttcccttcttcccccataccttccatcaatgatagcttcagtatgtgaaaacccagctcttcaaccctataggcttcaacaagcaatcgcagcaagcaacatacctttatcacccttgtttc

SEQ ID NO: 72010 - DNA, 274 bp, Zea mays
tacagcagcaacaattgctgccatacaaccagttctctttgatgaatcctgtcttgtcgaggcagcaacccatcgttggaggtgccatcttttaggtgactcagaggattaagattaattcagcacggtgcccctaataacttgctatcagatccaagtcgctgcagaagggagcaaacaaagggagatgaagctcagagtcgtgtgcaggaagctgtatgactatgtgcggtatgacctcaaggagatagccttcccgtcgtcactcccggac

SEQ ID NO: 72011 - DNA, 275 bp, Zea mays
tctcgagccgaatcggctcgaggcaacatagaaagtggaatccagtttcaacaacagagcacgttggcgaccaagatatttagtctccttatgctccttgctctttctgcatgtgttgctaacgcgacaattttccctcaatgctcacaagctcctatagcttcccttcttcccccataccttccatcaatgatagcttcagtatgtgaaaacccagctcttcagccctataggctccaacaagcaatcgcagcaagcaacatacctttatcacc

SEQ ID NO: 72012 - DNA, 274 bp, Zea mays
  unsure (1)..(274): unsure at all n locations
tcagaaacacacctagcgaacgcacctagcaacgacctaacaacaatggctaccaagatattatccctctttgcgcttcttgccctttttgtgagcgcaacaaatgcgttcattattccacaatcctcacttgctcctagtgccattattccacagttcctccctccagttacttcaatgggcttcgaacacccagctgtgcaagcctacaggctacaacaagcgcttgcggcgagcgtcacctagcaaccccntgcccaattacaacaacaat

SEQ ID NO: 72013 - DNA, 273 bp, Zea mays
cccgtacctctcaccagcggtgtcttcggtatgtgaaaacccaattcttcaaccctataggatccaacaggcaatcgcagctggcatcttacctttatcacccttgttcctccaacaatcatcagccctattacagcagttacctttggtgcatttattggcacaaaacatcagggcacaacaactacaacaacttgtgctagcaaaccttgctgcctactctcagcaacaacagtttcttccattcaaccaactagctgcattgaactctgc

SEQ ID NO: 72014 - DNA, 269 bp, Zea mays
tgagaccaacaagcaacatagaaagtggaatccagtagcaacaatagagctacaatggcgaccaagatactttccctccttatgctccttgctctttctgcatgtgttgctaacgcgacaattttccctcaatgctcacaagctcctatagcttcccttcttcccccataccttccatcaatgatagcttcagtatgtgaaaacccagctcttcaaccctataggctccaacaagcaatcgcagcaagcaacatacctttatcaccctt

SEQ ID NO: 72015 - DNA, 271 bp, Zea mays
gaagaaggagaaggctctagtcgagaagaagaagtccatcgagagccgcaagctcatcttcacccgcgcaaagcagtacgccgaggaatacgatgcccaggagaaggaactggtgcagcttaagcgcgaggcccgtttgaagggtggtttctatgtcagtcctgaggcaaagctgctctttgtggtccgcatccggggtattaatgccatgcaccctaagaccaggaagatcttgcagcttctgcgattgaggcagatcttcaatggcgtg

SEQ ID NO: 72016 - DNA, 272 bp, Zea mays
tcagaaacacacctagcgaagcgcactagcaacgacctaacaacaatggctaccaagatattatccctctttgcgcttcttgccctttttgtgagcgcaacaaatgcgttcattattccacaatgctcacttgctcctagtgccattattccacagttcctccctccagttacttcaatgggcttcgaacacccagctgtgcaagcctacaggctacaacaagcgcttgcggcgagcgtcttacaacaaccaattgcgcaattacaacaaca

SEQ ID NO: 72017 - DNA, 272 bp, Zea mays
aacaacaattgcaacagtttctaccagcgctcagtcaactagccatggtgaaccctgccgcctacctacaacagcaacaactgatttcatctagccctctcgctgtggttaatgcacctacatacctgcaacaacagttgctgcaacagattgtaccagctctgactcagctagctgtggcaaaccctgctgcctacttgcaacagctgcttccattcaaccaactgactgtgtcgaactctgctgcgtacctacaacagcgacaacagtta

SEQ ID NO: 72018 - DNA, 273 bp, Zea mays
taggaaaccttgctgcctactctcagcaacagcagtttcttccattcaaccaactggctgcattgaactctgctgcttatttgcaacaacaactaccattcagtcagctagctgctgcctacccccagcaatttcttccattcaaccaactggcagcattgaactctgctgcttatttacaacagcaacagctaccaccattcagccagctagctgatgtgagccctgttgccttcttgacacaacaacagttgttgccgttctacctgcacg

SEQ ID NO: 72019 - DNA, 255 bp, Zea mays
  unsure (1)..(255): unsure at all n locations
tatagcggttgttctctaggctgtagcatgcagtggaaactggaaaatgttggggttgctctgttgtcggtagtttacatgcgcatgtcggtatgtgtagctaaagctggtggatctcagttctcagatcggactcgagacggggaaaaccattgcccagttggctggttctctgaagttttgtttggtgtaaagaaatggtggtccatcatctactcaaatttttttctcttntttaatgaaataagttgactc

SEQ ID NO: 72020 - DNA, 271 bp, Zea mays
  unsure (1)..(271): unsure at all n locations
cacagaaatatccataccttgcatcaatgggcatttatgtcttcaagaaagatgcacttttagaccttctcaagtcaaaatatactcaattacatgactttggatctgaaatcctcccaagagctgtactagatcatagtgtgcaggcatgcatttttacgggctattgggaggatgttggaacaatcaaatcattctttgatgcaaacttggccctcactgagcagccttccaagttgattnttacgatccaaaacactttcttcactgc

SEQ ID NO: 72021 - DNA, 264 bp, Zea mays
cagaaacacaccaagcgaacacattagcaacaacctaacaacaatggctaccaagatattatccctccttgcgcttcttgcgctttttgcgagcgcaacaaatgcgttcattattccacaatgctcacttgctccaagttccattattacacagttcctcccaccagttacttcaatgggcttcgaacacccagcgtgcaagcctataggctacaacaagcaattgcggcgagcgtcttacaacaaccaatttcccagttgcaa

SEQ ID NO: 72022 - DNA, 263 bp, Zea mays
tagcaacatagaaagcacaatagtgtaccaacaatggcagctaaaatattttgcctccttatgctccttggtctttctgcaagtgctgctacggcgaccattttcccacaatgctcacaagctcctatagcttcccttcttcccccgtacctctcaccaacggtgtcttcggtatgtgaaaacccaattcttcaacctacaggatccaacaggcaatcgcagctggcatcttacctttatcacccttgttcctccaacaatca

SEQ ID NO: 72023 - DNA, 260 bp, Zea mays
tagcaacatagaaagcacaatagtgtaccaacaatggcagccaaaatattttgcttccttatgctccttggtctttctgcaagtgttgctaccgcaaccattttcccacaatgctcacaagctcctatagcttcccttcttcccccatacctctcaccagcggtgtcttcaatgtgtgaaaacccaattgttcaacctacaggatccaacaggcaatcgcaacaggcatcttaccattatcacccttgttcctccaacaa

SEQ ID NO: 72024 - DNA, 261 bp, Zea mays
agcactgagccacctagccatggtgaaccctgccgcctacttgcaacagcagttgcttgcatcaaacccacttgctctggcaaacgtagttgcaaaccagccacaacaacagctgcaacagtttctgccagcgctcagtcaactagccatggtgaaccctgccgcctacctacaacagcaacaactgctttcactagcccgctcgctgtggccaatgcacctacatacctgcaacaacaattgttgcaacagattgtacca

SEQ ID NO: 72025 - DNA, 259 bp, Zea mays
ttgagaccagcaagcaacatagaaagtagaatccattagcaacaatagagcaacaatggcgaccaagatattttccctccttatgctccttgctctttctacatgtgttgctaacgcgacaattttccctcaatgctcacaagctcctatagcttcccttcttcccccataccttccatcaattatagcttagtatgtgaaaacccagctcttcaaccatataggcttcaacaagcaatcgcagcaagcaacatacctt

SEQ ID NO: 72026 - DNA, 258 bp, Zea mays
gaactagcaacatacatactgaagtacactagcaacatcttagcaccaatggcagccaagatttttgccatccttgccctccttgctctttcagcaagcgttgctaccgcgactattattccacaatgctcacaacaatacctctctccggtgacagccgcgagatttgaatacccaactatacaatcctaaggctacaagaggccatcgcagcaagcatcttacggtcgttagcattgaccgtccaacaaccatatg

SEQ ID NO: 72027 - DNA, 258 bp, Zea mays
atgcttctgaggctgacgaatttttagaagttgcttcaaagcctttagaatcattaccatatgattctcctgggcagacctttgtggcttttgaaaatccagaaggtgtcattgccaccggcaagttctcaaatatcctgaaattctttgttaaggaggttgatccatccacgggtgaagctgaagatgatctgtcgaggatgagtaccagcttgaagatcttgaaatcgtttctgctgattatatgttgaaggtggg

SEQ ID NO: 72028 - DNA, 260 bp, Zea mays
gcaacatagaaagcacaatagtgtaccaacaatggcagccaaaatattttgcctccttatgctccttggtatttctgcaagtgctgctacggcgaccattttcccgcaatgctcacaagctcctatagcttcccttcttcccccgtacctctcaccagcggtgtcttcggtatgtgaaaacccaattcttcaacctacaggatccaacaggcaatcgcagctggcatcttacctttatcacccttgttcctccaacaatc

SEQ ID NO: 72029 - DNA, 260 bp, Zea mays
aatattttgagcattcagaaacacaccaagcgaagcacattagcaacaacctaacaacaatggctaccaagatattatccctccttgcgcttcttgcgctttttgcgagcgcaacaaatgcgttcattattccacaatgctcacttgctccaagttccattattacacagttcctcccaccagttacttcaatggcttcgaacacccagctgtgcaagcctataggctacaacaagcaattgcggcgagcgtcttacaac

SEQ ID NO: 72030 - DNA, 260 bp, Zea mays
caactagcaacatagaaagcacaatagtgtaccaacaatggcagccaaaatattttgcctccttatgctccttggtctttctgcaagtgctgctacggcgaccattttcccgcaatgctcgcaagctcctatagcttcccttcttcccccgtacctctcaccagcggtgtcttcggtatgtgaaaacccaatcttcaaccctacaggatccaacaggcaatcacagctggcatcttacctttatcacccttgttcctcca

SEQ ID NO: 72031 - DNA, 259 bp, Zea mays
ccaacaagcaacatagaaagtggaatacagtagcaacaatagagcaacaatggcggccaagatattttccatccttatgctccttgctctttctgcatgtgttgctaacgcgaccatttttcctcaatactcacaagctcctatagctgcccttcttcccccataccttccatcaatgaccgcttcagtttgtgaaaacccagcccttcaaccctacaggctccaacaagcaatcgcaacaagcaacttacctttatca

SEQ ID NO: 72032 - DNA, 253 bp, Zea mays
gcaggggtgggtggttagcacatccttggctggtgcaacactaggttcttttactgggggttctttggcagataaatttgggcggacaagaacattcatcctggatgcagtcccacttgctctaggtgcattcttgagtgcaacagctcaagatatccgcacaatgattattggccgattgcttgctgaattggtatcggggtctcatctgctcttgtacccctttacatatctgagatctcaccaactgaaa

SEQ ID NO: 72033 - DNA, 254 bp, Zea mays
attgagaccaactagcaacatagaaagcacaatagtgtaccaacaatggcagccaaaatattttgcctccttatgctccttggtctttctgcaagtgctgctacggcgaccattttcccgcaatgctcgcaagctcctatagcttcccttcttcccccgtacctctcaccagcggtgtcttcggtatgtgaaacccaattcttcaaccctacaggatccaacaggcaatcacagctggcatcttacctttatca

SEQ ID NO: 72034 - DNA, 253 bp, Zea mays
ttgagaccaactagcaacatagaaagcacaatagtgtaccaacaatggcagccaaaatattttgcttccttatgctccttggtctttctgcaagtgctgctaccgcaaccattttcccacaatgctcacaagctcctatagcttcctttcttcccccatacctctcaccagcggtgtcttcagtatgtgaaacccaattcttcaaccctacaggatccaacaggcaatcgcagcaggcatcttacctttatca

SEQ ID NO: 72035 - DNA, 132 bp, Zea mays
cagaaacacaccaagcgaagcacattagcaacaacctaacaacaatggctaccaagatattatccctccttgcgcttcttgcgctttttgcgagcgcaacaaatgcgttcattattccacaatgctcacttg

SEQ ID NO: 72036 - DNA, 260 bp, Zea mays
cagaaacacaccaagcgaagacattagcaacaacctaacaacaatggctaccaagatattatccctccttgcgcttcttgcgctttttgcgagcgcaacaaatgcgttcattattccacaatgctcacttgctccaagttccattattacacagttcctcccaccagttacttcaatgggcttcgaacacccactgtgcaagcctataggctacaacaagcaattgcggcgagcgtcttacaacaaccaatttccagttg

SEQ ID NO: 72037 - DNA, 256 bp, Zea mays
ctcgagccgcgaaactgctggcggacaatgcgcccaaggcgatgaaggagcagaagttcacgagctacttcggccgcaaaatcgccgtcgacgccagcatgagcatctaccagttcctgatagtagttggaaggacaggcatggaaactctcacaaatgaagctggtgaagtcactagtcatttgcaaggaagttcaaccggacaataagattactggaagcgggaatcaagccagtttatgtttttgatggcaag

SEQ ID NO: 72038 - DNA, 257 bp, Zea mays
aaagcacaatagtgtaccaacaatggcagccaaaatattttgcctccttatgctccttggtctttctgcaagtgctgctacggcgaccattttcccgcaatgctcgcaagctcctatagcttcccttcttcccccgtacctctcaccagcggtgtcttcggtatgtgaaaacccaattcttcaaccctacggatccaacaggcaatcacagctggcatcttacctttatcacccttgttcctccaacaatcatcagc

SEQ ID NO: 72039 - DNA, 258 bp, Zea mays
gcctcgggtcaaaccctaagcagggagttgatttatccgctgcagccatgagtaagttgcagtctgagtctgtcaaggatgccatctcccagattgttggggatgccaaggagaagaataggaagttcactgagactgtggaacttcagattggtctgaagaattatgatccacagaaggacaagcgtttagtggctctgttaagttgccccatatccctcgtcccaagatgaaggtgtgcatgcttggtgatgccca

SEQ ID NO: 72040 - DNA, 257 bp, Zea mays
aaagcacaatagtgtaccaacaatggcagctaaaatattttgcctccttatgctccttggtctttctgcaagtgctgctacggcgaccattttcccacaatgctcacaagctcctatagcttcccttcttcccccgtacctctcaccaacggtgtcttcggtatgtgaaaacccaattcttcaaccctaaggatccaacaggcaatcgcagctggcatcttacctttatcacccttgttcctccaacaatcatcagc

SEQ ID NO: 72041 - DNA, 252 bp, Zea mays
tgacaagcgagtgattgagaggttcgagaaagaggctgccgagatgaacaagcggtcattcaagtatgcgtgggtgcttgacaagctcaaggctgagctgagagacgtattacaattgatattgccctgtggaagttcgagaccaccaagtactactgcactgttattgatgccccgggacaccgtgattcatcaagaatatgatcactggcacttcccaagctgactgtgctgttcttatcattgactcaa

SEQ ID NO: 72042 - DNA, 252 bp, Zea mays
cgaactagcaacatacatagtgaagtacactagcaacatcttagcaccaatggcagccaagatttttgccatccttgccctccttgctctttcagcaagcgttgctaccgcgactattattccacaatgctcacaacaatacctctctccggtgacagccgcgagatttgaatacccaactatacaacctacaggctacaagaggccatcgcagcaagcatcttacggtcgttagcattgaccgtccaacaa

SEQ ID NO: 72043 - DNA, 254 bp, Zea mays
ccctcaatgctcacaagctcctatagcttcccttcttcccccataccttccatcaatgatagcttcagtatgtgaaaacccagctcttcagccctataggctccaacaagcaatcgcagcaagcaacatacctttatcacccttgttgtttcaacaatcgccagccctatctttggtgcagtcattgtacaaaccatcagggcacagcagctgcagcaactcgtgctacctgtgatcaaccaagtagctctggc

SEQ ID NO: 72044 - DNA, 254 bp, Zea mays
gtacaaaccatcagggcacaacagctgcagcaactcgtgctacctctgatcaaccaagtagctctggcaaacctttctccctactctcagcaacaacaatttcttccattcaaccaactgtctacactgaaccctgctgcttatttgcagcaacaactattaccatttagccagctagctactgcctatctcagcaacaacaacttcttccatttaaccaattggccgcactgaaccccgctgcttatttgcag

SEQ ID NO: 72045 - DNA, 251 bp, Zea mays
caactaccaacatacatagtgaagtacactagcaacatcttagcaccaatggcagccaagatttttgcgctccttgccctccttgctctttcagcaagtgttgctaccgcgactattattccacaatgctcacaacaatacctctctccagtgatagccgcgagatttgaatacccatctatacaacctccaggctacaagaggccatcacagcaagcatcttacggtcgttagcattgaccgtccaacaa

SEQ ID NO: 72046 - DNA, 251 bp, Zea mays
tcagcattcaaaaacacaccaagcgaagcgcactagcaacgacctaacaccaatggctaccaagatattagccctccttgcgcttcttgcccttttagtgagcgcaacaaatgcgttcattattccacagtgctcacttgctcctagtgccattattccacagttcctcccaccagttacttcaatggcttcgaacatccagccgtgcaagcctacaggctacaactagcgcttgcggcgagcgccttaca

SEQ ID NO: 72047 - DNA, 253 bp, Zea mays
  unsure (1)..(253): unsure at all n locations
ctcgagccgattcagaaacacaccaagcgaagcgcactagcaacgacctaacaacaatggataccaagatattagccctccttgcgcttcttgccctttttgtgagcgcaacaaatgcgttcattattccacaatgctcacttgctcctagtgccattattccacagttcctcccaccctctnattcatgggcttcgaacacctagctgtgcaagccaacatgcaacaacaagcgcttgcggcgagcgtctta

SEQ ID NO: 72048 - DNA, 128 bp, Zea mays
ccaacaacccatcattggcggtgccctcttttagattgcttatgagttatagttcaataatgaagttttttggatgatgtttgtggcttcccagaaataagaaagtacatttctaaaaaaaaaaaaca

SEQ ID NO: 72049 - DNA, 158 bp, Zea mays
gctggtagaaaggcagcaactgttgctgtgtcaagaaggaagcacggtttgctgcagctagctggctaaatggtgcttccttcttgacacagcaacagttgctgactttctaccagcagtttgcggctaatcccggaaccctcttacaactacaacaa

SEQ ID NO: 72050 - DNA, 254 bp, Zea mays
aatacttttagctgctacactgatgtgttttgcatgcagtgatgtctacgaatgattctatgagtatggtgtttaagtgtttgtcgaagggagcagttgatttcttggtaaaaccactacgtaagaatgagcttaagaacctttggcagcatgtttggaggcgatgccacagttccagtggaagtgaagtggcatccagacacagaagtgtgccaaactaaatactggcgacgagtatgagaacggcagtgaca

SEQ ID NO: 72051 - DNA, 251 bp, Zea mays
attgagaccaacaaaccaccatagaaagtggaatccagtagcaacaacagagcaacaatggcgaccaagatattttccctccttatgctccttgctctttctgcatgtgttgctaacgcgacaattttccctcaatgctcacaagctcctatagcttcccttcttcccccataccttccatcaatgaagcttcagtatgtgaaaacccagctcttcagccctataggctccaacaagcaatcgcagcaagc

SEQ ID NO: 72052 - DNA, 252 bp, Zea mays
tggagcttggacataatgcagaaacttttacctcgacatgttgagataatagaaacaattgatgaagagctgataaacaacatagtctcaaagtatggaaccacagatactgaactgttgaaaaagaagctgaaagagatgaggattctggataatgttgaccttccagcttccatttcccaactattgttaaacccaaagacaaaaaggaatctcctgcaaaatcaaagcaaaagttacttgttaaatctt

SEQ ID NO: 72053 - DNA, 249 bp, Zea mays
attgatacgaactagcaacatacatagtgaagtacactagcaacatcttagcaccaatggcagccaagatttttgccatccttgccctccttgctctttcagcaagcgttgctaccgcgactattattccacaatgctcacaacaatacctctctccggtgacagccgcgagatttgaataccaactatacaatcctacaggctacaagaggccatcgcagcaagcatcttacggtcgttagcattgac

SEQ ID NO: 72054 - DNA, 245 bp, Zea mays
attgagaccaactagcaacatagaaagcacaatagtgtaccaacaatggcagctaaaatattttgcctccttatgctccttggtctttctgcaagtgctgctacggcgaccattttcccacaatgctcacaagctcctatagcttcccttcttcccccgtacctctcaccaacggtgtcttcgtatgtgaaaacccaattcttcaaccctacaggatccaacaggcaatcgcagctggcatctta

SEQ ID NO: 72055 - DNA, 241 bp, Zea mays
  unsure (1)..(241): unsure at all n locations
ctcgagccgttcagaaacacaccaagcgaacnacattagcaacaacctaacaacaatggctaccaagatattatccctccttgcgcttcttgcgctttttgcgagcgcaacaaatgcgttcattattccacaatgctcacttgctccaagttccattattacacagttcctcccaccagttacttcaatgggcttcgaacacccagctgtgcaagcctataggctacaacaagcaattgcg

SEQ ID NO: 72056 - DNA, 248 bp, Zea mays
caccaatggctaccaagatattagccctccttgcgcttcttgcccttttagtgagcgcaacaaatgcgttcattattccacagtgctcacttgctcctagtgccagtattccacagttcctcccaccagttacttcaatgggcttcgaacatccagccgtgcaagcctacaggctacaactaggcttgcggcgagcgccttacaacaaccaattgcccaattgcaacaacaatccttggcacatctaa

SEQ ID NO: 72057 - DNA, 247 bp, Zea mays
tttagaccaactagcaacatagaaagcacaatagtgtaccaacaatggcagccaaaatattttgcctccttatgctccttggtatttctgcaagtgctgctacggcgaccattttcccgcaatgctcacaagctcctatagcttcccttcttcccccgtacctctcaccagcggtctcttcggttgtgaaaacccaattcttcaaccctacaggatccaacaggcaatcgcagctggcatcttacct

SEQ ID NO: 72058 - DNA, 251 bp, Zea mays
tttagaccaactagcaacatagaaagcacaatagtgtaccaacaatggcagccaaaatattttgcctccttatgctccttggtatttctgcaagtgctgctacggcgaccattttcccgcaatgctcacaagctcctatagcttcccttcttcccccgtacctctcaccagcggtgtcttcggttgtgaaaacccaattcttcaaccctacaggatccaacaggcaatcgcagctggcatcttacctttat

SEQ ID NO: 72059 - DNA, 249 bp, Zea mays
ctcgagccgttttcagcattcagaaacacaccaagcgaaggtcactagcaacaacctaacaacaatggctaccacagatattatccctccttgcgcttcttgcgctttttgcgagcgcaacaaatgcgtccattattccacaatgctcacttgctcctagttccattattccacagttcctcccaccagttacttcaatgccttcgaacacccagctgtgcaagcctataggctacaacaagcgattgc

SEQ ID NO: 72060 - DNA, 251 bp, Zea mays
gcaacatagaaagcacaatagtgtaccaacaatggcagccaaaatattttgcttccttatgctccttggtctttctgcaagtgctgctaccgcaaccattttcccacaatgctcacaagctcctatagcttcctttcttcccccatacctctcaccagcggtgtcttcagtatgtgataatctattcttcaaccctacaggatccaacaggcaatcgcagcaggcatcttacctttatcacccttgttcct

SEQ ID NO: 72061 - DNA, 252 bp, Zea mays
gcacatctaaccatacaaaccatcgcaacgcagcagcaacaagcactgagccacctagccgtggtgaaccctatcgcctacttgcaacaacagctgcttgcatccaacccacttgctttggcaaacgtagctgcataccaacaacaacaacagttgcaacagtttctaccagcgctcagtcaactgccatggtgaaccctatcgcctacctacaacagcaacaacttctttcatctagcccgctcgctatgg

SEQ ID NO: 72062 - DNA, 250 bp, Zea mays
aacacacctagcgaacgcactagcaacgacctaacaacaatggcttccaagacattatccctccttgcgcttcttgccctttttgtgagtgcaacaaatgcgttcattattccacaatgctcacttgctccgagtgccattattccacagttcctccctccagttacttcaatgggcttcgaaacccagctgtgcaagcctataggctacaacaagcgcttgcggcgagcgtcttagaacaaccaattgc

SEQ ID NO: 72063 - DNA, 247 bp, Zea mays
attcagaaacacaccaagcgaagcacattagcaacaacctaacaacaatggctaccaagatattatccctccttgcgcttcttgcgctttttgcgagcgcaacaaatgcgttcattattccacaatgctcacttgctccaagttccattattacacagttcctcccaccagttacttcaatgatcacgaacacccagctgtgcaagcctataggctacaacaagcaattgcggcgagcgtcttacaa

SEQ ID NO: 72064 - DNA, 249 bp, Zea mays
gcaacatagaaagtagaatccattagcaacaatagagcaacaatggcgaccaagatattttccctccttatgctccttgctctttctacatgtgttgctaacgcgacaattttccctcaatgctcacaagctcctatagcttcccttcttcccccataccttccatcaattatagcttcagttgtgaaaacccagctcttcaaccatataggcttcaacaagcaatcgcagcaagcaacatacctttat

SEQ ID NO: 72065 - DNA, 245 bp, Zea mays
attgagaccaactagcaacatagaaagcacaatagtgtaccaacaatggcagccaaaatattttgcctccttatgctccttggtctttctgcaagtgctgctacggcgaccattttcccgcaatgctcgcaagctcctatagcttcccttcttcccccgtacctctcaccagcggtgtcttcgtatgtgaaaacccaattcttcaaccctacaggatccaacaggcaatcacagctggcatctta

SEQ ID NO: 72066 - DNA, 247 bp, Zea mays
caacaagcaacatagaaagtggaatccagtagcaacaacagagcaacaatggcgaccaagatattttccctccttatgctccttgctctttctgcatgtgttgctaacgcgacaattttccctcaatgctcacaagctcctatagcttcccttcttcccccataccttccatcaatgatagttcagtatgtgaaacccagtctcctcataggcttcggctagcattgcagcttgcactattactatt

SEQ ID NO: 72067 - DNA, 266 bp, Zea mays
agcgggcagcagcacacagccccatcccaatcctagtcgatcttcttcccctcctcaaggaagaaaagaagctgaaccatggggaagagaaagtcagctgctaagccacctcctaagaagcggatggacaagcttgacactgtcttttcctgcccattctgcaaccacgggagtagtgttgagtgccgaattgacatgaagaatctgattggcgagcatcttgtagaatctgtcagaaaattcagcaaactttaatgcatcatgag

SEQ ID NO: 72068 - DNA, 274 bp, Zea mays
ggagccgcagcaccggtaccaggcgatcttcggcttggtcctccagtccatcctgcagcagcagccgcaaagcgccaggtcgcggggctgttggcggcgcagatagcgcagaactgacggcgatgtgcggcctgcagcagccgactccatgcccctacgctgcagccggcggtgtcccccatgccagaaactatgtgctgtagtatagccgctggctagctagctagttgagtcatttagcggacgatgatgagtaataatgtgtcacgcatca

SEQ ID NO: 72069 - DNA, 273 bp, Zea mays
gaccaactagcaacatagaaagcacaatagtgtaccaacaatggcagccaaaatattttgcttccttatgctccttggtctttctgcaagtgttgctaccgcaaccattttcccacaatgctcacaagctcctatagcttcccttcttcccccatacctctcaccagcggtgtcttcaatgtgtgaaaacccaattgttcaaccctacaggatccaacaggcaatcgcaacaggcatcttaccattatcaccttgttcctccaacaccgtcag

SEQ ID NO: 72070 - DNA, 274 bp, Zea mays
gcaacatagaaagcacaatagtgtaccaacaatggcagccaaaatattttgcctccttatgctccttggtctttctgcaagtgctgctacggcgaccattttcccgcaatgctcgcaagctcctatagcttcccttcttcccccgtacctctcaccagcggtgtcttcggtatgtgaaaacccaattcttcaaccctacaggatccaacaggcaatcgcagctggcatcttacctttatcacccttgttcctccaacaatcatcagccctatta

SEQ ID NO: 72071 - DNA, 263 bp, Zea mays
cagcaagcaacatagaaagtagaatccattagcaacaatagagcaacaatggcgaccaagatattttccctccttatgctccttgctctttctacatgtgttgctaacgcgacaattttccctcaatgctcacaagctcctatagcttcccttcttcccccataccttccatcaattatagcttcagtatgtgaaaacccagctcttcaaccatataggcttcaacaagcaatcgcagcaagcaacatactttatcgcccttg

SEQ ID NO: 72072 - DNA, 264 bp, Zea mays
atgcagtaagacgacacacattatcatatatagatagagagggatggatagaggagatttcccaaatatcatgaatcagtagtagggcggaatggcagcggagacgccacaggggttggtgcggtagcaactagcaacatagaaagcacaatagtgtaccaacaatggcagccaaaatattttgcctccttatgctccttggtctttctgcaagtgctgctacggcgaccattttcccgcaatgctcgcaagctcctatagctt

SEQ ID NO: 72073 - DNA, 268 bp, Zea mays
  unsure (1)..(268): unsure at all n locations
ggttgctttcttcgccaagactgggctggattacgtttcttgctcccctttcagggtcccgatncgctaggctagctgcagctcaggtgcttgtctgaggggctgcctcctcgttggcagcctgctgttggtgcatctggtgattaataatactactatgacagagccatatgctctgtgaagagtattagtagcagcgctcataaaagctacagttccatctattttctcagctatgtaaaattccaaatgttcatgcttaaaatga

SEQ ID NO: 72074 - DNA, 269 bp, Zea mays
caactagcaacatagaaagcacaatagtgtaccaacaatggcagccaaaatattttgcctccttatgctccttggtctttctgcaagtgctgctacggcgaccattttcccgcaatgctcgcaagctcctatagcttcccttcttcccccgtacctctcaccagcggtgtcttcggtatgtgaaaacccaattcttcaaccctacaggatccaacaggcaatcacagctggcatcttacctttatcaccttgtttctccaacaatcatc

SEQ ID NO: 72075 - DNA, 274 bp, Zea mays
attttgagcattcagaaacacacctagcgaaggcactagcaacgacctaacaacaatggctaccaagatattatccctctttgcgcttcttgccctttttgtgagcgcaacaaatgcgttcattattccacaatgctcacttgctcctagtgccattattccacagttcctccctccagttacttcaatgggcttcgaacacccagctgtgcaagcctacaggctacaacaagcgcttgcggcgagcgtcttacaacaaccaattgcccaatta

SEQ ID NO: 72076 - DNA, 275 bp, Zea mays
attgagaccaactagcaacatagaaagcacaatagtgtaccaacaatggcagctaaaatattttgcctccttatgctccttggtctttctgcaagtgctgctacggcgaccattttcccacaatgctcacaagctcctatagcttcccttcttcccccgtacctctcaccaacggtgtcttcggtatgtgaaaacccaattcttcaaccctacaggatccaacaggcaatcgcagctggcatcttacctttatcaccttgtttctccaacaatca

SEQ ID NO: 72077 - DNA, 279 bp, Zea mays
tataaagtggaatacagtatcgacaatagagcaacaatggcggcaaagatattttccatccttatgctccttgctctttcttcatgtgttcctaacgcgaccatttttcctccatactcacaagctcctatagctgcccttcttcctccataccttccataactgaccgcttcactatgtgaaaacccagcccttcaaccctataggctccaacaagcaatcgcaacaaacaacttacctttatcacacctgttctttcgaccaatcgccagccctatc

SEQ ID NO: 72078 - DNA, 274 bp, Zea mays
  unsure (1)..(274): unsure at all n locations
cgaatacagtagcaacaatagagcaacaatggcggccaagatattttccatccttatgctccttgctctttctgcatgtgttgctaacgcgaccatttttcctcaatactcacaagctcctatagctgcccttcttcccccataccttccatcaatgaccgcttcagtttgtgaaaacccagcccttcaaccctacaggctccaacaagcaatcgcaacaagcaacttacctttatcacccctgttctttcaacaatcgncagccctatctttg

SEQ ID NO: 72079 - DNA, 270 bp, Zea mays
caacaagcaacatagaaagtggaatccagtagcaacaatagagcaacaatggcgaccaagatattttccctccttatgctccttgctctttctacatgtgttgctaacgcgacaattttccctcaatgctcacaagctcctatagcttcccttcttcccccataccttccatcaattatagcttcaatatgtgaaaacccagctcttcaaccatataggcttcaacaagcatccagcaagcaacatacctttattcgcccttgttgtttc

SEQ ID NO: 72080 - DNA, 178 bp, Zea mays
attgagaccaactagcaacatagaaagcacaatagtgtaccaacaatggcagccaaaatattttgcctccttatgctccttggtctttctgcaagtgctgctacggcgaccattttcccgcaatgctcgcaagctcctatagcttcccttcttcccccgtacctctcaccagcggtgt

SEQ ID NO: 72081 - DNA, 269 bp, Zea mays
ttctgggaccgaagcgaatgagttggcaatgttgatggcccggctgtatagtgggaatctcagtatggttgcgctcagaaatgcatatcatggcggaagtgccggtacgattggattgactggtttgcagacgtggaaatacccaattcctcagggtgaaatacatcatgtcatgaaccctgatccttatcgggggactttcgggtctgatgctgcagcttatgctaaggaagtcgaagaacacataacttatggaagttcaggaaggg

SEQ ID NO: 72082 - DNA, 261 bp, Zea mays
agaccaacaagcaacatagaaagtggaatccagtagcaacaacagagcaacaatggcgaccaagatattttccctccttatgctccttgctctttctgcatgtgttgctaacgcgacaattttccctcaatgctcacaatctcctatagcttcccttcttcccccataccttccatcaatgatagcttcagtatgtgaaaacccagctcttcagccctataggctccaacaagcaatcgcagcaagcaacatacctttatc

SEQ ID NO: 72083 - DNA, 274 bp, Zea mays
cagaaacacacctagcgaagcgcactagcaacgacctaacaacaatggctaccaagatattatccctctttgcgcttcttgccctttttgtgagcgcaacaaatgcgttcattattccacaatgctcacttgctcctagtgccattattccacagttcctccctccagttacttcaatgggcttcgaacacccagctgtgcaagcctacaggctacaacaagcgcttgcggcgagcgtcttacaacaaccaattgcccaattacaacaacaatc

SEQ ID NO: 72084 - DNA, 264 bp, Zea mays
gagcgattcagacgcatgatggttgaatctaatcggtctgcgtccaagaacaggttaccattgcctccaacaacggggcattggagtccaaatgagcctaacacagttctgcgagttctgtgctaccggagtgatgagacagctacaaagttcctcaagaaaacttacaacctaccgaagaagatatgacttgtgggatagatcacaaaccacatgtacatttcctgtcagtataaaaagtttctctatgctgtcacaactctg

SEQ ID NO: 72085 - DNA, 206 bp, Zea mays
atgcgttccccataaaatgcacagatgttatctctggtgatagtcctgatgatattgttgaaattcgagctgaatatgatcctttgaagacttctaaactgaagggtgttcttcactggattgcctgagccagcacctggtgtagagccattgaacgtggaagtaagattattcgagaaattgttcatgtcagagaatcctgctga

SEQ ID NO: 72086 - DNA, 257 bp, Zea mays
ccaacaagcaacatagaaagtggaatccagtagcaacaatagagcaacaatggcgaccaagatactttccctccttatgctccttgctctttctgcatgtgttgctaacgcgacaattttccctcaatgctcacaagctcctatagcttcccttcttcccccataccttccatcaatgatagcttcagtatgtgaaaacccagctcttcaaccctataggctccaacaagcaatcgcagcaagcaacatactttatc

SEQ ID NO: 72087 - DNA, 263 bp, Zea mays
tcccaccggaccagcagcgcctcatcttcgccggcaagcagctggaggatggccgcaccctggcggattacaacatccagaaggagagcactctccacctggtgctccgcctcaggggtggcatgcagatttttgtgaagacattgactggcaagactatcaccttggaggtggagagctctgacaccattgacaatgtgaaggccaagatccaggacaaggagggcattcccccagaccagcagcgtctgatctttgcgggc

SEQ ID NO: 72088 - DNA, 267 bp, Zea mays
cagcattcaaaaacacaccaagcgaaccagctagcaacgacctaacaccaatggctaccaagatattagccctccttgcgcttcttgcccttttagtgagcgcaacaaatgcgttcattattccacagtgctcacttgctcctagtgccattattccacagttcctcccaccagttacttcaatgggcttcgaacatccagccgtgcaagcctacaggctacaactagcgcttgcggcgagcgccttacaacaaccaattgcccaat

SEQ ID NO: 72089 - DNA, 264 bp, Zea mays
atcgaagagacttttgtgccactccccttggatttgcaggtagcggaggcaaagtttgtttttgagggaaggaccataaaaaggatggagcttctggtgctaagcaccttaaagtggaggatgcatgctgttactgcttgctcatttgttgaatactttcttcataaattgagtgatcatggtgcaccctccttgcttgcacgctctcgctcttcggaccttgtcttgagcaccgctaaaggtgctgaattcgtggtattcaga

SEQ ID NO: 72090 - DNA, 268 bp, Zea mays
gcatttattggcacaaaacatcagggcacaacaactacaacaacttgtgctagcaaaccttgctgcctactctcagcaacagcagtttcttccattcaaccaactagctgcattgaactctgcttcttatttgcaacaacaacaactaccattcagccagctacctgctgcctacccccagcaatttcttccattcaaccaactggcagcattgaactctcctgcttatttacagcagcaacaactactaccattcagccagctagct

SEQ ID NO: 72091 - DNA, 263 bp, Zea mays
aagcaacatagaaagtggaatccagtagcaacaatagagcaacaatggcgaccaagatattttccctccttatgctccttgctctttctacatgtgttgctaacgcgacaattttccctcaatgctcacaagctcctatagcttcccttcttcccccataccttccatcaattatagcttcaatatgtgaaaacccagctcttcaaccatataggcttcaacaagcatcgcagcaagcacatacttttatggccctggtggtt

SEQ ID NO: 72092 - DNA, 272 bp, Zea mays
ccctcaatgctcacaagctcctatagcttcccttcttcccccataccttccatcaatgatagcttcagtatgtgaaaacccagctcttcagccctataggctccaacaagcaatcgcagcaagcaacatacctttatcacccttgttgtttcaacaatcgccagccctatctttggtgcagtcattggtacaaaccatcagggcacagcagctgcagcaactcgtgctacctgtgatcaaccaagtagctctggcaaacctttctccctact

SEQ ID NO: 72093 - DNA, 271 bp, Zea mays
atttacaacaacaacaactactaccattcagccagctagctactgcctactctcagcagcaacaatttcttccatttaaccaattggccgcactgaacccctctgcttatttccagcagcaaatactactaccatttggccagctagctacaacaagccccacttcctttttgaaacaacaacaattgcttccgttctaccagcagtttgtggctaaccccgcaaccctcttacaactgcaacagttgctgccctttgtccacttgctttg

SEQ ID NO: 72094 - DNA, 264 bp, Zea mays
cttgcaacaacaacaattgctgccattctacccacaggatgtggcaaacattgtcgccttcttacaacaacagcaattgctgccatttagccaactcgctttgacgaatcctaccaccttattgcatcagcccaccattggtggtaccatcttctagattttttatgctttatactgtaataataaatttctcatactgatatgtgcaacttctcagtaataaaagattagagatctatattttaaaaaaaaagaaaatgcaag

SEQ ID NO: 72095 - DNA, 274 bp, Zea mays
  unsure (1)..(274): unsure at all n locations
ggtgacactggcgaaggtgtaactnnacacactcnacttgcttcttgaccttcttgaggcccctgatcctgccaacttggagaagttccttggaactataccaatgatgttcaatgttgttatcctttctcctcatggntacttcgntcagtccaatgtgcttggataccctgacactggcggtcaggttgtgtacattctggatcaagtccgtgctttggagaatgagatgcttctgaggattaagcagcaaggcttgatatcatccgaagat

SEQ ID NO: 72096 - DNA, 253 bp, Zea mays
ctgcctttctaccagcagtttgcggctaaccccgcaaccctctagcaactacaacaattgttgccctttgtccaacttgctttgacagacccagcggcctcctaccaacaacacatcattggtggtgccctcttttagattgcttattagttgtaattcaataataaagttttttggatgatgtatgtggccaaccagaaataagaagttacatttccaaaaaaaacgaaaaatgccggtatggagttgccat

SEQ ID NO: 72097 - DNA, 264 bp, Zea mays
gcaacatagaaagtggaatccagtagcaacaatagagcaacaatggcgaccaagatactttccctccttatgctccttgctctttctgcatgtgttgctaacgcgacaattttccctcaatgctcacaagctcctatagcttcccttcttcccccataccttccatcaatgatagcttcagtatgtgaaaacccagctcttcaaccctataggctccaacaagcaattgcagcaagcaaacatactcttatcacccttgtttca

SEQ ID NO: 72098 - DNA, 73 bp, Zea mays; identical to SEQ ID NO: 69106

SEQ ID NO: 72099 - DNA, 269 bp, Zea mays
gaccaactagcaacatagaaagcacaatagtgtaccaacaatggcagccaaaatattttgcctccttatgctccttggtctttctgcaagtgctgctacggcgaccattttcccgcaatgctcgcaagctcctatagcttcccttcttcccccgtacctctcaccagcggtgtcttcggtatgtgaaaacccaattcttcaaccctacaggatccaacaggcaatcacagctggcatcttacctttatcacccttgttcctccaacaat

SEQ ID NO: 72100 - DNA, 266 bp, Zea mays
attgagaccaactagcaacatagaaagcacaatattgtaccaataatggcagccaaaatattttgcctcattatgctccttggtctttctgcaagtgctgctacggcgagcattttcccgcaatgctcacaagctcctatagcttcccttcttcccccatacctctcaccagcgatgtcttcagtatgtgaaaatccaattcttctaccctacaggatccaacaggcaatcgcagcaggcatcttacctttatcacccttgttcct

SEQ ID NO: 72101 - DNA, 263 bp, Zea mays
ttcagaaacacacctagcgaagcgcactagcaacgacctaacaacaatggcttccaagacattatccctccttgcgcttcttgccctttttgtgagtgcaacaaatgcgttcattattccacaatgctcacttgctccgagtgccattattccacagttcctccctccagttacttcaatgggcttcgaacacccagctgtgcaagcctataggctacaacaagcgcttgcggcgagcgtcttagaacaaccaattgcccaat

SEQ ID NO: 72102 - DNA, 263 bp, Zea mays
cagcattcaaaaacacaccaagcgaaggtcactagcaacgacctaacaccaatggctaccaagatattagccctccttgcgcttcttgcccttttagtgagcgcaacaaatgcgttcattattccacagtgctcacttgctcctagtgccagtattccacagttcctcccaccagttacttcaatgggcttcgaacatccagccgtgcaagcctacaggctacaactagcgcttgcggcgaccgccttacacaaaccatttgc

SEQ ID NO: 72103 - DNA, 269 bp, Zea mays
tagaaagtggaatccagtagcaacaacagagcaacaatggcgaccaagatattttccctccttatgctccttgctctttctgcatgtgttgctaacgcgacaattttccctcaatgctcacaagctcctatagcttcccttcttcccccataccttccatcaatgatagcttcagtatgtgaaaacccagctcttcagccctataggctccaacaagcaatcgcagcaagcaacatacctttatcacccttgttgtttcaacaatcgcc

SEQ ID NO: 72104 - DNA, 271 bp, Zea mays
ctagcaacatagaaagcacaatagtgtaccaacaatggcagccagaatattttgcctccttatgctccttggtctttctgcaagtgctgctacggcgaccattttcccgcaatgctcgcaagctcctatagcttcccttcttcccccgtacctctcaccagcggtgtcttcggtatgtgaaaacccaattcttcaaccctacaggatccaacaggcaatcacagctggcatcttacctttatcacccttgttcctccaacaatcatcagcc

SEQ ID NO: 72105 - DNA, 237 bp, Zea mays
aagcacaatagtgtaccaacaatggcagctaaaatattttgcctccttatgctccttggtctttctgcaagtgctgctacggcgaccattttcccacaatgctcacaagctcctatagcttcccttcttcccccgtacctctcaccaacggtgtcttcggtatgtgagaacccaattcttcaaccctacaggatccaacagggaatcgcagctggcatcttacctttatcaccctgt

SEQ ID NO: 72106 - DNA, 253 bp, Zea mays
ctgcgctgcgccgtccttcacctccgccgccgaatccgagactctgatctcgggttcaccgcagcgcacagagcacccccgactcccgtcccgatccgcgctctcctctacgacgcttcagtcatggcaggaatggcacccgagggttctcagtttgatgctaagcactatgattctaaaatgcaggagctgctgagcactggtgagactgaagagttcttcacctcatatcgatgagttttgaaagttttga

SEQ ID NO: 72107 - DNA, 263 bp, Zea mays
gtgcggctaaccagggacagctctttgaggctctcaacatttcggccctctggaagctgcctgccatattggtctgcgagaacaaccattatgggatgggaacagcggagtggagggcagcaaagagccctgcctactacaagcgtggcgactatgtgcctggattgaaggttgatggaatggatgttcttgctgtgaagcaagcgtgcaaatttgcaaaagatcatgctgtcgcaaatggcccaattgtccttgagatggat

SEQ ID NO: 72108 - DNA, 255 bp, Zea mays
aagcgaagacattagcaacaacctaacaacaatggctaccaagatattatccctccttgcgcttcttgcgctttttgcgagcgcaacaaatgcgttcattattccacaatgctcacttgctccaagttccattattacacagttcctcccaccagttacttcaatgggcttcgaacacccagctgtgcaagcctataggctacaacatgcaattgcggcgagcgtcttacaacaaccaattgccatttcaacaac

SEQ ID NO: 72109 - DNA, 171 bp, Zea mays
ctaacaccaatggctaccaagatattagccctccttgcgcttcttgcccttttagtgagcgcaacaaatgcgttcattattccacagtgctcacttgctcctagtgccattattccacagttcctcccaccagttacttcaatgggcttcgaacatccagccgtgcaagcc

SEQ ID NO: 72110 - DNA, 104 bp, Zea mays
gtgcgatttcgatctcgcagccaccttttttttgttctgttgtgtatctagtagttggaggagatatgcagtttgcacttgcattggacacgaactcaggtcct

SEQ ID NO: 72111 - DNA, 261 bp, Zea mays
attttgagcattcagaaacacaccaagcgaacacattagcaacaacctaacaacaatggctaccaagatattatccctccttgcgcttcttgcgctttttgcgagcgcaacaaatgcgttcattattccacaatgctcacttgctccaagttccattattacacagttcctcccaccagttacttcaatgggcttcgaacacccagctgtgcaagcctataggctacaacaagcaattgcggcgagcgtctaacaacaacc

SEQ ID NO: 72112 - DNA, 257 bp, Zea mays
attttgagcattcagaaacacaccaagcgaactagcctagcaacgacttaacaacaatggctaccaagatattagccctccttgcgcttcttgccctttttgtgagcgcaacaaatgcgttcattattccacaatgctcacttgctcctagtgccattataccacagttcctccgaccagttacttcaatgggcttcgaacacctagctgtgcaagcctacaggctacaacaagcgttgcggcgagcgtcttacaac

SEQ ID NO: 72113 - DNA, 264 bp, Zea mays
attgagaccaactagcaacatagaaagcacaatagtgtaccaacaatggcagccaaaatattttgcctccttatgctccttggtctttctgcaagtgctgctacggcgaccattttcccacaatgctcacaagctcctatagcttcccttcttcccccgtacctctcaccagcggtgtcttcggtatgtgaaaacccaattcttcaaccctataggatccaacaggcaatcgcagctggcatcttacctttatcaccttgttcc

SEQ ID NO: 72114 - DNA, 263 bp, Zea mays
gcaacatagaaagcacaatagtgtaccaacaatggcagccaaaatattttgcctccttatgctccttggtctttctgcaagtgctgctacggcgaccattttcccacaatgctcacaagctcctatagcttcccttcttcccccgtacctctcaccagcggtgtcttcggtatgtgaaaacccaattcttcaaccctataggatccaacaggcaatcgcagctggcatcttacctttatcaccttgttcctccaacaatcatc

SEQ ID NO: 72115 - DNA, 214 bp, Zea mays
agccgactccatgcccctacgctgctgccggcggtgtcccccactgaagaaactatgtgctgtagtatagccgctggctagctagctagttgagtcatttagcggcgatgattgagtaataatgtgtcacgcatcaccatgggtggcagtgtcagtgtgagcaatgacctgaatgaacaattgaaatgaaaagaaaaaagtattgttccacatt

SEQ ID NO: 72116 - DNA, 268 bp, Zea mays
tagcaacatacatagtgaagtacactagcaacatcttagcaccaatgggagccaagatttttgccctccttgccctccttgctctttcagcaagcgctgctacctcgacttttattccacaatgctcacaacaatacctctctccggtgacagccgcgggatttcaatacccaactatacaatcctacatggtacaagaggccatccaagcaagcatcttacggtcattagcattagccctccaacaaccatatgctctattgcaaca

SEQ ID NO: 72117 - DNA, 263 bp, Zea mays
cttccattcaaccaactgtctacactgaaccctgctgcttatttgcagcaacaactattaccatttagccagctagctactgcctactctcagcaacaacaacttcttccatttaaccaattggccgcactgaaccccgctgcttatttgcagcagcaaatactactgccatttagcgagctagctgcagcaagtcgtgcttccttcttgacacagcaacagttgctgcctttctacaagagtttgcgggctaacccgcaacc

SEQ ID NO: 72118 - DNA, 256 bp, Zea mays
ctcgagccgcaagatttttgcgctccttgccctccttgctctttcagcaagtgttgctacagcgactattattccacaatgctcacaacaatacctctctccagtgatagccgcgagatttgaatacccatctatacaatcctacaggctacaagaggccatcacagcaagcatcttacggtcgttagcattgaccgtccaacatacctttatcgcccttgttgtttcaacaatcgccagccctatctttggtgca

SEQ ID NO: 72119 - DNA, 234 bp, Zea mays
cagcattcaaaaacacaccaagcgaaggtcactagcaacgacctaacaccaatggctaccaagatattagccctccttgcgcttcttgcccttttagtgagcgcaacaaatgcgttcattattccacagtgctcacttgctcctagtgccattattccacagttcctcccaccagttacttcaatgggcttcgaacatccagccgtgcaagcctacaggctacaactagcgctt

SEQ ID NO: 72120 - DNA, 260 bp, Zea mays
ttggcttctcctccccctccggttcgggttcgggttcgtgaggttctccggggttcggtttcgagggtgggcggatcgagatggcggcgtcggatgttgagtaccgctgcttcgtcggcggcctcgcctgggccacggacgaccactccctccacaacgccttcagcagctacggcgagaaactaaagtccaagatcatcctcgatcgggacacgcagatgtcacgcagcatccgcttcgtcaccttctccacggaggac

SEQ ID NO: 72121 - DNA, 263 bp, Zea mays
agaccaactagcaacatagaaagcacaatagtgtaccaacaatggcagccaaaatattttgcttccttatgctccttggtctttctgcaagtgttgctaccgcaaccattttcccacaatgctcacaagctcctatagcttcccttcttcccccatacctctcaccagcggtgtcttcaatgtgtgaaaacccaattgttcaaccctacaggatccaacaggcaatcgcaacaggcatcttaccattatcacccttgttcctc

SEQ ID NO: 72122 - DNA, 258 bp, Zea mays
atcatcagtaacagtatcggacagatgatgagttgaaggagatgtttggaaaatatggaaccataacaagtgctgttgttatgcgggatagtgatggaaattctaggtgttttggatttgtcaattttgaaaatgcagatgctgctgctcaggctgttcaagagttgaatggcaagatattcaatgataaggaactgtatgttggaagagcacaaaagaagtctgaaagagagatggagttgaaggagaaatttgaaa

SEQ ID NO: 72123 - DNA, 260 bp, Zea mays
gcattcagaaacacaccaagcgaaggcagctagcaacgacctaacaacaatggctaccaagatattagccctccttgcgcttcttgccctttttgtgagcgcaacaaatgcgttcattattccacaatgctcacttgctcctagtgccattattccacagttcctcccaccagttacttcaatgggcttcgaacacctagctgtgcaagccaacatgcaacaacaagcgcttgcggcgagcgtcttacaacaaccaattg

SEQ ID NO: 72124 - DNA, 260 bp, Zea mays; identical to SEQ ID NO: 69175

SEQ ID NO: 72125 - DNA, 259 bp, Zea mays; identical to SEQ ID NO: 68504

SEQ ID NO: 72126 - DNA, 261 bp, Zea mays
gaccaactagcaacatagaaagcacaatagtgtaccaacaatggcagccaaaatattttgcttccttatgctccttggtctttctgcaagtgttgctaccgcaaccattttcccacaatgctcacaagctcctatagcttcccttcttcccccatacctctcaccagcggtgtcttcaatgtgtgaaaacccaattgttcaaccctacaggatccaacaggcaatcgcaacaggcatcttaccattatcacccttgttcct

SEQ ID NO: 72127 - DNA, 234 bp, Zea mays
gaagaagaagatggcgacactggaggaggaggaggtgcagatgcagatgcagatgccggaggcgctgatctggcggctgcggcagcggctgacccacaggccgacacgaagagcaagctggtgaagctggtggtcatggtgtgcgaggggctgcggttcaacaccgtgtcccgcacggtggtcgcggggttcaactgccagcacggggtgaccttgaccgttacgcaggggaag

SEQ ID NO: 72128 - DNA, 267 bp, Zea mays
gcaacatagaaagtggaatccagtagcaacaatagagcaacaatggcgaccaagatattttccctccttatgctccttgctctttctacatgtgttgctaacgcgacaattttccctcaatgctcacaagctcctatagcttcccttcttcccccataccttccatcaattatagcttcaatatgtgaaaacccagctcttcaaccatataggcttcaacaagcaatcgcagcaagcaacatacctttatcgcccttgttgtttcaa

SEQ ID NO: 72129 - DNA, 271 bp, Zea mays
tgcaaaccatggacatggctttggcgtctaaagcctcccctccgccatggaatgccaccgccgccgagcagccaattccaaagcgtgacaaagccgctgcaaatgattcaacatacctcaatcctcaagctcatgatagtgttcttggaatcattctgggaggtggtgctgggactagattgtaccccttgacaaagaagcgtgccaagcctgcagtgccattgggtgccaactatagactgattgatattcctgtcagcaattgtctcaa

SEQ ID NO: 72130 - DNA, 260 bp, Zea mays
ggcaatcgcagctggcatcttacctttatcacccttgttcctccaacaatcatcagccctattacaacagttacctttggtgcatttattggcacaaaacatcagggcacaacaactacaacaacttgtgctagcaaaccttgctgcctactctcagcaacagcagtttcttccattcaaccaactaggttcattgaactctgcttcttatttgcaacaacaacaactaccattcagccagctacctgctgcctaccccc

SEQ ID NO: 72131 - DNA, 253 bp, Zea mays
aaagcacaatagtgtaccaacaatggcagccaaaatattttgcttccttatgctccttggtctttctgcaagtgttgctaccgcaaccattttcccacaatgctcacaagctcctatagcttcccttcttcccccatacctctcaccagcggtgtcttcaatgtgtgaaaacccaattgttcaagtctctccgatccaacaggcaatcgcaacaggcatcttaccattatcaccctttttcctccatcaaccg

SEQ ID NO: 72132 - DNA, 248 bp, Zea mays
aatattttgagcattcagaaacacacctagcgaagcgcactagcaacgacctaacaacaatggctaccaagatattatccctctttgcgcttcttgccctttttgtgagcgcaacaaatgcgttcattattccacaatgctcacttgctcctagtgccattattccacagttcctccctccagttacttcaatgggcttcgaacacccagctgtgcaagcctacaggctacaacaagcgcttgcggcg

SEQ ID NO: 72133 - DNA, 248 bp, Zea mays
atagtgaagtacactagcaacatcttagcaccaatgggagccaagatttttgccctccttgccctccttgctctttcagcaagcgctgctacctcgacttttattccacaatgctcacaacaatacctctctccggtgacagccgcgggatttcaatacccaactatacaatcctacatggtacaagaggccatccaagcaagcatcttacggtcattagcattaaccctccaacaaccatatgctct

SEQ ID NO: 72134 - DNA, 246 bp, Zea mays
attgagaccaactagcaacatagaaagcacaatagtgtaccaacaatggcagccaaaatattttgcttccttatgctccttggtctttctgcaagtgttgctaccgcaaccattttcccacaatgctcacaagctcctatagcttcccttcttcccccatacctctcaccagcggtgtcttcaatgtgtgaaaccccaattgttcaaccctacaggatccaacaggcaatcgcaacaggcatctta

SEQ ID NO: 72135 - DNA, 248 bp, Zea mays
attattgagaccaactagcaacatagaaagcacaatagtgtaccaacaatggcagccaaaatattttgcttccttatgctccttggtctttctgcaagttttgctaccgcaaccattttcccacaatgctcacaagctcctatagcttcccttcttcccccatacctctcaccagcggtgtcttcaatgtgtgaaaccccaattgttcaaccctacaggatccaacaggcaatcgcaacaggcatctt

SEQ ID NO: 72136 - DNA, 244 bp, Zea mays; identical to SEQ ID NO: 25284

SEQ ID NO: 72137 - DNA, 248 bp, Zea mays
ggcaatcgcaacaggcatcttaccattatcacccttgtttcctcccaaaaaccgtcagccctattacagcagttacctttggtccatttggtggcacaaaacatcagggcacaacaactacaacaacttgtgctagcaaaccttgctgcatactctcagcaacatcagtttcttccattcaaccaactggctgcattgaactctgctgcttatttgcaacaacaattaccattcagccagctagttgc

SEQ ID NO: 72138 - DNA, 250 bp, Zea mays
agaccaactagcaacatagaaagcacaatagtgtaccaacaatggcagccaaaatattttgcttccttatgctccttggtctttctgcaagtgttgctaccgcaaccattttcccacaatgctcacaagctcctatagcttcccttcttcccccatacctctcaccagcggtgtcttcaatgtgtgaaaacccaattgttcaaccctacaggatccaacaggcaatcgcaacaggcatcttaccattatc

SEQ ID NO: 72139 - DNA, 253 bp, Zea mays
ctctcctccggcatcgacgaggcgaaaccctagcgcccgagtccctctccctgctcccacaacccatggcggcggatatggcgtacgcgccgccgatgaaggctggcaaggccgggttcgaggctggcatgatggatccacagcacaggatccgcatcacgctctcctccaagagcgtcaagaacctcgagaaagtctgcggggatctggtgaagggcgccaagggtaaggagctcaaggtcaagggccccgt

SEQ ID NO: 72140 - DNA, 220 bp, Zea mays
ccagatcaggcaggtggagccgctgcaccggtaccaggcgacatacggtgtggtcctgcagtccttcctgcagcagcagccgcagggcgagctcgcggcgctgatggcggcccaggtagcgcagagctgacggcgatgtgcggtctgcagctgcagcagccaggtctctgcccttgcaacgcagctgccggcggtgtctactactgaggaaactatgtac

SEQ ID NO: 72141 - DNA, 246 bp, Zea mays
tgatcaaccaagtagctctggcaaacctttctccctactctcagcaacaacaatttcttccattcaaccaactgtctacactgaaccctgctgcttatttgcagcaacaactattaccatttagccagctagctactgcctactctcagcaacaacaacttcttccatttaaccaattggccgcactgaaccccgctgcttatttgcagcagcaaatactactaccatttagccagctagctgcag

SEQ ID NO: 72142 - DNA, 243 bp, Zea mays; identical to SEQ ID NO: 26577

SEQ ID NO: 72143 - DNA, 241 bp, Zea mays
ttccgagattatgaagaatacctgaagaggctaaacctttatcgtcaaagacgtttggacatgtaatatatctggaaaatctaatttaacttttgaagaagctttggtatctgagcacaaagcgatggagaaggctcaaaatttgccaactgagctaatggctcaagttcttcggatgactcaatacagccctcttggtttatatgaacttgttgataagatatatgctagtctgctggaa

SEQ ID NO: 72144 - DNA, 247 bp, Zea mays
caacaagcaacatagaaagtggaatccagtagcaacaatagagcaacaatggcgaccaagatattttccctccttatgctccttgctctttctacatgtgttgctaacgcgacaattttccctcaatgctcacaagctcctatagcttcccttcttcccccataccttccatcaattatagcttcaatatgtgaaaacccagctcttcaaccatataggcttcaacaagcaatcgcagcaagcaaca

SEQ ID NO: 72145 - DNA, 90 bp, Zea mays
gaccaactagcaacatagaaagcacaatagtgtaccaacaatggcagccaaaatattttgcttccttatgctccttggtctttctgcaag

SEQ ID NO: 72146 - DNA, 241 bp, Zea mays
gcaacatagaaagcacaatagtgtaccaacaatggcagccaaaatattttgcttccttatgctccttggtctttctgcaagtgctgctaccgcaaccattttcccacaatgctcacaagctcctatagcttcctttcttcccccatacctctcaccagcggtgtcttcagtatgtgaaaacccaattcttcaaccctacaggatccaacaggcaatcgcagcaggcatcttacttttatca

SEQ ID NO: 72147 - DNA, 248 bp, Zea mays
ctgcttatttacaacaacaacaactactaccattcagccagctagctactgcctactctcagcagcaacaatttcttccatttaaccaattggccgcactgaacccctctgcttatttccagcagcaaatactactaccatttggccagctagctacaacaagccccacttcctttttgaaacaacaacaattgcttccgttctaccagcagtttgtggctaaccccgcaaccttttacaactgcaac

SEQ ID NO: 72148 - DNA, 248 bp, Zea mays; identical to SEQ ID NO: 71478

SEQ ID NO: 72149 - DNA, 247 bp, Zea mays
cagcagacacctccgccacctccaccctcgaatcgttccccaccatggcgtcgcagggatcctccgtcttcgccgcactcgagcaggccccggaggaccccatcctcggagtgaccgttgcctacaacaaggatcccagccccgtgaaggtcaacctcggggtcggcgcctaccggaccgaggaagggaagcccctagtgctgaacgtggtcaggcgcgccgagcaaatgttgatcaataatccgtc

SEQ ID NO: 72150 - DNA, 246 bp, Zea mays
attgagaccaactagcatcatagaaagcacaatagtgtaccaacaatggcagccaaaatattttgcctccttatgctccttggtctttctgcaagtgctgctacggcgaccattttcccacaatgctcacaagctcctatagcttcccttcttcccccgtacctctcaccagcggtgtcttcggtatgtgaaaacccaattcttcaaccctataggatccaacaggcaatcgcagctggcatctta

SEQ ID NO: 72151 - DNA, 235 bp, Zea mays
aaagaaaaaaagtactccatctgttcatttcaattgttcattcaggtcattgctcacactgacactgccacccatggtgatgcgtgacacattattactcaatcatcaccatgggtggcagtgtcagtgtgagcaatgacctgaatgaacaattgaaatgaaacagaaaaaaagtactccatctgttccaaattaaaattggttttaaccttttaataggtttatacaataattg

SEQ ID NO: 72152 - DNA, 243 bp, Zea mays
gcaacatagaaagcacaatagtgtaccaacaatggcagccaaaatattttgcctccttatgctccttggtctttctgcaagtgctgctacggcgaccattttcccgcaatgctcgcaagctcctatagcttcccttcttcccccgtacctctcaccagcggtgtcttcggtatgtgaaaacccaattcttcaaccctacaggatccaacaggcaatcacagctggcatcttaccttaatcacc

SEQ ID NO: 72153 - DNA, 243 bp, Zea mays
caactagcaacatagaaagcacaatagtgtaccaacaatggcagccaaaatattttgcctccttatgctccttggtctttctgcaagtgctgctacggcgaccattttcccgcaatgctcgcaagctcctatagcttcccttcttcccccgtacctctcaccagcggtgtcttcggtatgtgaaaacccaattcttcaaccctacaggatccaacaggcaatcgcagctggcatcttaccttt

SEQ ID NO: 72154 - DNA, 246 bp, Zea mays; identical to SEQ ID NO: 26152

SEQ ID NO: 72155 - DNA, 247 bp, Zea mays
atattttcagcattcaaaaacacaccaagcgaagcgcactagcaacgacctaacaccaatggctaccaagatattagccctccttgcgcttcttgcccttttagtgagcgcaacaaatgcgttcattattccacagtgctcacttgctcctagtgccagtattccacagttcctcccaccagttacttcaatgggcttcgaacatccagccgtgcaagcctacaggctacaactagcgcttgcggcg

SEQ ID NO: 72156 - DNA, 226 bp, Zea mays
gttgccactgctgccccaccatctgaggaggaattgaacccgtacactatatttccccaaccagaggaaaacttcaaggttcatacagaaatatttttcagtgatgggaacatatggagagcgcataacacaaagctcatttcagtacctcatcctagagcaactggaggaatagtgatgacccgttttcaccagaacctaatggatatcttcatattggtcatgc

SEQ ID NO: 72157 - DNA, 244 bp, Zea mays
caaagattatccccaggaataccacactgccaacctcaaaatcggaggtattctcaacagctgcagatggacagacgagcgttgagattaatgttctccagggagaaagagagtttgtcagggacaacaagtccgttggaagcttccggttggatgggatccctcctgcacctcgtggtgtcccacaaattgaagtgaagtttgatattgatgcaaatgggatatctcagttgctgccattgat

SEQ ID NO: 72158 - DNA, 246 bp, Zea mays
gcattcagaaacacaccaagcgaacacattagcaacaacctaacaacaatggctaccaagatattatccctccttgcgcttcttgcgctttttgcgagcgcaacaaatgcgttcattattccacaatgctcacttgctccaagttccattattacacagttcctcccaccagttacttcaatgggcttcgaacacccagctgtgcaagcctataggctacaacacgcaattgcggcgagcgtctta

SEQ ID NO: 72159 - DNA, 244 bp, Zea mays
gtgccctcttttagattgcttatgagttatagttcaataatgatgggttgttggtagaacactgttgggtttgtcaaagcaagttggttgaatggcagcaattgttgcagttgtaagagggtgccagcgttaggcatagcgtgcaggtagaacggcaacaacttgctttgacaaacccaacagtgttctaccaacaacccatcattggtggtgccctcttttagattgcttatgagttatagtt

SEQ ID NO: 72160 - DNA, 245 bp, Zea mays
gccaaatccctgatggttatggttctggaagaggctatggtagagggatgggtggaagaatgatggctggacgtggctttggacgtgggctagaacgcaggacacctcctcgaggctatgtttgtcacagatgcaaagtacctggtcattttattcaacattgccccacaaatggggatgctagatatgatgtgaaaaggatgaaacccccaactggcattccaaaatcaatgctaatgcaaact

SEQ ID NO: 72161 - DNA, 235 bp, Zea mays
attttcagcattcaaaaacacaccaagcgaagcgcactagcaacgacctaacaccaatggctaccaagatattagccctccttgcgcttcttgcccttttagtgagcgcaacaaatgcgttcattattccacagtgctcacttgctcctagtgccattattccacagttcctcccaccagttacttcaatgggcttcgaacatccagccgtgcaagcctacaggctacaactagc

SEQ ID NO: 72162 - DNA, 248 bp, Zea mays
caagcagcgatccgaagctcaatcaattcactcaaacctcttccccaaatcttcgattagattctcgttgacaagaagactagaaccgaacctgaccatgtcgctgatccgccgcagcaacgtgttcgatcccttctccctcgacctctgggacccctttgagggcttccccttcggctccggcaacagcagcagtctcttcccctcgttcccgcggaccagctcggagaccgcggccttcgctggcg

SEQ ID NO: 72163 - DNA, 254 bp, Zea mays
ggatatcatatgtcccaactgcagtgatggttttatccaagagatcagtgagatgggtggcgcactggacacttggtcgttctgcaagtgttgctaccgcaaccattttcccacaatgctcacaagctcctatagcttcccttcttcccccatacctctcaccagcggtgtcttcaatgtgtgaaaccccaattgttcaaccctacaggatccaacaggcaatcgcaacaggcatcttaccattatcacccttg

SEQ ID NO: 72164 - DNA, 246 bp, Zea mays
gaccaacaagcaacatagaaagtggaatacagtagcaacaatagagcaacaatggcggccaagatattttccatccttatgctccttgctctttctgcatgtgttgctaacgcgaccatttttcctcaatactcacaagctcctatagctgcccttcttcccccataccttccatcaatgaccgcttcagtttgtgaaaacccagcccttcaaccctacaggctccaacaagcaatcgcaacaagc

SEQ ID NO: 72165 - DNA, 248 bp, Zea mays
cgtgacttcccctccccttctcctcccctctccactccatcgtcaaggaaggaacacggccctaactaaaccctagctaagggaagggaaacaagaccatggatgcctccaagctccgcgagcttcgcgacttcgtcgaggcgtgcaagaagaatccttcgctcctcgccgaccccaacctctccttcttccgggattacctccagagtttgggtgccaaaattcccgccgccgccccctctttcgaa

SEQ ID NO: 72166 - DNA, 243 bp, Zea mays
gaggcaagtgcgatttcgatctcgcagccacctttttttttgttctgttgtgtatctagtagttggaggagatatgcagtttgcacttgcattggacacgaactcaggtcctcaccagataagatcttgtgagggtgatgggattgacaggttggaaaaattaagtattgggggcagaaagcaggagaaagctttgagaaataggtgctttggtggtagattgctgcaactacacaatgtatt

SEQ ID NO: 72167 - DNA, 236 bp, Zea mays
attttgagcattcagaatctcaccaagcgaagatcattagcaacaacctaacaacaatggctaccaagatattatccctccttgcgcttcttgcgcttgttgcgagcgcaacaaatgcgttctctattccacaatgctcacttgctccaagttccattattacacagttcctcccaccagttacttcaatgggcttcgaacactcagctgtgcaagcctataggctacaacaagca

SEQ ID NO: 72168 - DNA, 245 bp, Zea mays
agcaacatagaaagcacaatagtgtaccaacaatggcagccaaaatattttgcttccttatgctccttggtctttctgcaagtgttgctaccgcaaccattttcccacaatgctcacaagctcctatagcttcccttcttcccccatacctctcaccagcggtgtcttcaatgtgtgaaaacccaattgttcaaccctacaggatccaacaggcaatcgcaacaggcatcttaccattcatcacc

SEQ ID NO: 72169 - DNA, 232 bp, Zea mays
gagcattcagaaacacacctagcgaagcgcactagcaacgacctaacaacaatggctaccaagatattatccctctttgcgcttcttgccctttttgtgagcgcaacaaatgcgttcattattccacaatgctcacttgctcctagtgccattattccacagttcctccctccagttacttcaatgggcttcgaacacccagctgtgcaagcctacaggctacaacaagcgc

SEQ ID NO: 72170 - DNA, 235 bp, Zea mays
ccgtcgcatcccatcccactaccacccatctcgtcgtccgccgattcgatccggttcttccaacccaggggctgtgatggcgacgaagaggagcgtgggcaccctcggcgaggcggatctgaaggggaagaaggtgttcgtgcgcgccgacctcaacgtccctctcgacgacgcccagaagatcaccgacgacacccgcatccgcgcctccgtccccaccatcaagttcctcctc

SEQ ID NO: 72171 - DNA, 242 bp, Zea mays
aagcaacatagaaagtggaatacagtagcaacaatagagcaacaatggcggccaagatattttccatccttatgctccttgctctttctgcatgtgttgctaacgcgtaccatttttcctcaatactcacaagctcctatagctgcccttcttcccccataccttccatcaatgaccgcttcagtttgtgaaaacccagcccttcaaccctacaggctccaacaagcaatcgcaacaagcaa

SEQ ID NO: 72172 - DNA, 117 bp, Zea mays
tgtaatcctaaatttctcatactgatatgtgcaacttctcagtaataaaatatagatctctaatctttcattactgaggagtcgcacatatcagtatgagagatttattatcgacag

SEQ ID NO: 72173 - DNA, 247 bp, Zea mays
attcagaaacacaccaagcgaactacattagcaacaacctaacaacaatggctaccaagatattatccctccttgcgcttcttgcgctttttgcgagcgcaacaaatgcgttcattattccacaatgctcacttgctccaagttccattattacacagttcctcccaccagttacttcaatgggcttcgaacacccagctgtgcaagcctataggctacaacaagcaattgcggcgagcgtcttaca

SEQ ID NO: 72174 - DNA, 249 bp, Zea mays
tattattgagaccaactagcaacatagaaagcacaatagtgtaccaacaatggcagccaaaatattttgcctccttatgctccttggtctttctgcaagtgctgctacggcgaccattttcccgcaatgctcgcaagctcctatagcttcccttcttcccccgtacctctcaccagcggtgtcttcggtatgtgaaaacccaattcttcaaccctacaggatccaacaggcaatcacagctggcatctt

SEQ ID NO: 72175 - DNA, 250 bp, Zea mays
cagaaacacaccaagcgaagcgcactagcaacgacctaacaacaatggctaccaagatattagccctccttgcgcttcttgccctttttgtgagcgcaacaaatgcgttcattatatgagaacattattccacagtgctcacttgctcctagtgccagtattccacagttcctcccaccagttacttcaatgggcttcgaacatccagccgtgcaagcctacaggctacaactagcgcttgcggcgagcg

SEQ ID NO: 72176 - DNA, 244 bp, Zea mays
cacaatagtgtaccaacaatggcagccaaaatattttgcttccttatgctccttggtctttctgcaagtgctgctaccgcaaccattttcccacaatgctcacaagctcctatagcttcctttcttcccccatacctctcaccagcggtgtcttcagtatgtgaaaacccaattcttcaaccctacaggatccaacaggcaatcgcagcaggcatcttacctttatcacccttgttcctccaac

SEQ ID NO: 72177 - DNA, 244 bp, Zea mays
cagaaacacaccaagcgaacgcactagcaacgacctaacaacaatggctaccaagatattagccctccttgcgcttcttgcccttgcttgtgagcgcaacaaatgcgttcattattccacaatgctcacttgctcatagtgccattattccacagttcctcccaccagttacttcaatgggcttcgacgacctagctgtgcaagccaccatgcaacaacaagcgcttgctgcgagcgtcttaca

SEQ ID NO: 72178 - DNA, 243 bp, Zea mays
gcacaatagtgtaccaacaatggcagccaaaatattttgcttccttatgctccttggtctttctgcaagtgttgctaccgcaaccattttcccacaatgctcacaagctcctatagcttcccttcttcccccatacctctcaccagcggtgtcttcaatgtgtgaaaacccaattgttcaaccctacaggatccaacaggcaatcgcaacaggcatcttaccattatcacccttgttcctcca

SEQ ID NO: 72179 - DNA, 242 bp, Zea mays
gaccaactagcaacatagaaagcacaatagtgtaccaacaatggcagccaaaatattttgcttccttatgctccttggtctttctgcaagtgctgctaccgcaaccattttcccacaatgctcacaagctcctatagcttcctttcttcccccatacctctcaccagcggtgtcttcagtatgtgaaaacccaattcttcaaccctacaggatccaacaggcaatcgcagcaggcatcttac

SEQ ID NO: 72180 - DNA, 243 bp, Zea mays
gaccaactagcaacatagaaagcacaatagtgtaccaacaatggcagccaaaatattttgcttccttatgctccttggtctttctgcaagtgctgctaccgcaaccattttcccacaatgctcacaagctcctatagcttcctttcttcccccatacctctcaccagcggtgtcttcagtatgtgaaaacccaattcttcaaccctacaggatccaacaggcaatcgcagcaggcatcttacc

SEQ ID NO: 72181 - DNA, 238 bp, Zea mays
gcaacatagaaagtagaatccattagcaacaatagagcaacaatggcgaccaagatattttccctccttatgctccttgctctttctacatgtgttgctaacgcgataatttgccctcaagtggtcagaagctcttatagttgcccttcgggccccataccttggatcaattataggttcagtatgtgagaacccagttcttcaaccatataggctgcaacaagcagtcgcagcaagc

SEQ ID NO: 72182 - DNA, 250 bp, Zea mays
cttgcaaaccatttaatgcacaaactcttgccagatgcaactgtacgttgctgaagatgtttcaggcatgccggtcctttgccggccagttgatgaaggtggggttgggtttgactatcgcctggcaatggctatccctgatagatggattgactacctgaagaataaagatgactctgagtggtcgatgggtgaaatagcgcatactttgactaacaggagatatactgaaaaatgcatcgcatatgct

SEQ ID NO: 72183 - DNA, 264 bp, Zea mays
ggcaatcgcagctggcatcttacctttatcacccttgttcctccaacaatcatcagccctattacaacagttacctttggtgcatttattggcacaaaacatcagggcacaacaactacaacaacttgtgctagcaaaccttgctgcctactctcagcaacagcagtttcttccattcaaccaactaggttcattgaactctgcttcttatttgcaacaacaacaactaccattcagccagctacctgctgcctacccccagca

SEQ ID NO: 72184 - DNA, 260 bp, Zea mays
agaccaactagcaacatagaaagcacaatagtgtaccaacaatggcagccaaaatattttgcttccttatgctccttggtctttctgcaagtgctgctaccgcaaccattttcccacaatgctcacaagctcctatagcttcctttcttcccccatacctctcaccagcggtgtcttcagtatgtgaaaacccaattcttcaaccctacaggatccaacaggcaatcgcagcaggcatcttacctttatcacccttgttc

SEQ ID NO: 72185 - DNA, 255 bp, Zea mays
taaaaacactcgtttaatcacatgtgatcctcatgccagcaagcttgtggtaaactcagatactcctcaggaggttgaagccgggaaggaaatcatatttacctatgatgtaggcttcgaggagagtgatatcaagtgggcttctcgctgggacacctacttgttaatgatagatgatcaaattcactggttttctattgtgaactctctcatgatcgtactcttcttatctgggatggtggcaatgattatgct

SEQ ID NO: 72186 - DNA, 248 bp, Zea mays
taaaaacactcgtttaatcacatgtgatcctcatgccagcaagcttgtggtaaactcagatactcctcaggaggttgaagccgggaaggaaatcatatttacctatgatgtaggcttcgaggagagtgatatcaagtgggcttctcgctgggacacctacttgttaatgatagatgatcaaattcactggttttctattgtgaactctctcatgatcgtactcttcttatctgggatggtggcaatga

SEQ ID NO: 72187 - DNA, 251 bp, Zea mays
aactagcaacatagaaagcacaatagtgtaccaacaatggcaaccaaaatattttgcttccttatgctccttggtctttctgcaagtgctgctaccgcgaccattttcccgcaatgctcacaagctcctatagcttcccttcttcccccatacctctcaccagcggtgtcttcagtatgtgaaaacccaattcttcaaccctacaggatccaacaggcaatcgcagcaggcatcttacctttatcaccctt

SEQ ID NO: 72188 - DNA, 252 bp, Zea mays
tttcagcattcaaaaacacaccaagcgaaggcactagcaacgacctaacaccaatggctaccaagatattagccctccttgcgcttcttgcccttttagtgagcgcaacaaatgcgttcattattccacagtgctcacttgctcctagtgccagtattccacagttcctcccaccagttacttcaatgggcttcgaacatccagccgtgcaagcctacaggctacaactagcgcttgcggcgagcgccttac

SEQ ID NO: 72189 - DNA, 253 bp, Zea mays
cgatgagagcaaaaattcaaaaccagagaagccatcttcagcagctggtgcaggcctccccaatccgtttgatttttcttctatgagcaacttgctcaatgacccatcgataagagagatggctgagcaaattgcaagtgaccctgtgttcaaccagatggctgaacagcttcagaaaagtgctcagggtgctggagaacagggtattcctgcattggatcctcaacagtatatggaaacaatgcaacaagtc

SEQ ID NO: 72190 - DNA, 261 bp, Zea mays
aaagcacaatagtgtaccaacaatggcagccaaaatattttgcttccttatgctccttggtctttctgcaagtgttgctaccgcaaccattttcccacaatgctcacaagctcctatagcttcccttcttcccccatacctctcaccagcggtgtcttcactgtgtgaaaccccaattgttcaaccctacaggatccaacaggcaatcgcaacaggcatcttaccattatcacccttgttcctccaacaaccgtcagccct

SEQ ID NO: 72191 - DNA, 244 bp, Zea mays
caacaagcaacatagaaagtggaatccagtagcaacaacagagcaacaatggcgaccaagatattttccctccttatgctccttgctctttctgcatgtgttgctaacgcgacaattttccctcaatgctcacaagctcctatagcttcccttcttcccccataccttccatcaatgatagcttcagtatgtgaaaacccagctcttcagccctataggctccaacaagcaatcgcagcaagca

SEQ ID NO: 72192 - DNA, 249 bp, Zea mays
attgagaccaactagcaacatagaaagcacaatagtgtaccaacaatggcagccaaaatattttgcttccttatgctccttggtctttctgcaagtgttgctaccgcaaccattttcccacaatgctcacaagctcctatagcttcccttcttcccccatacctctcaccagcggtgtcttcaatgtgtgaaaccccaattgttcaaccctacaggatccaacaggcaatcgcaacaggcatcttacca

SEQ ID NO: 72193 - DNA, 249 bp, Zea mays
caacaagcaacatagaaagtggaatccagtagcaacaacagagcaacaatggcgaccaagatattttccctccttatgctccttgctctttctgcatgtgttgctaacgcgacaattttccctcaatgctcacaagctcctatagcttcccttcttcccccataccttccatcaatgatagcttcagtatgtgaaaacccagctcttcagcctataggctccaacaagcaatcgcagcaagcaacatac

SEQ ID NO: 72194 - DNA, 248 bp, Zea mays
aacaattgttgcaacagattgtaccagctctgactcagctagctgtggcaaaccctgctgcctacttgcaacagctgcttccattcaaccaactgactgtgtcgaactctgctgcgtacctacaacagcgacagcagttactaaacccactggcagtggctaacccattggtcgttgccgtcctacagcagcaacatttgctgccatacaaccagttctctttgatgaaccctgtcttgtcgaggcag

SEQ ID NO: 72195 - DNA, 249 bp, Zea mays
  unsure (1)..(249): unsure at all n locations
caagggaaagctgctattctggtaagggcggagaccagccctgaggacgttggtggcatgcacgctgctgtggggattcttacagagaggggtggcatgacttcccacgctgctgtggtcgcacgtgggtgggggaaatgctgcgtctcgggatgctcaggcattcgcgtaaacgatgcgganaagctcgtgacgntcggaggccatgtgctgcgcaanggtnagtggntgtcgctnaaggggtcgact

SEQ ID NO: 72196 - DNA, 251 bp, Zea mays
cgcaaacgcgaccacagacagagcgcgcttcaaggccttttttttttgagataacaaggaggagaggaggagatggcggtcacgatcacctgggtgaaggcgaggcagatcttcgacagccgcggcaaccccaccgtcgaggtggacgtgggcctcagcgacggcagctacgcgaggggggccgtacccagcggcgcatccactggaatatatgaggccttggagttgagggatggaggatctgattatct

SEQ ID NO: 72197 - DNA, 110 bp, Zea mays
ccaacaagcaacatagaaagtggaatccagtagcaacaatagagcaacaatggcgaccaagatattttccctccttatgctccttgctctttctacatgtgttgctaacg

SEQ ID NO: 72198 - DNA, 254 bp, Zea mays
tattattgagaccaactagcaacatagaaagcacaatagtgtaccaacaatggcagccaaaatattttgcctccttatgctccttggtctttctgcaagtgctgctacggcgaccattttcccgcaatgctcgcaagctcctatagcttcccttcttcccccgtacctctcaccagcggtgtcttcggtatgtgaaaacccaattcttcaaccctacaggatccaacaggcaatcgcagctggcatcttacctt

SEQ ID NO: 72199 - DNA, 258 bp, Zea mays; identical to SEQ ID NO: 25449

SEQ ID NO: 72200 - DNA, 261 bp, Zea mays
ccaactagcaacatagaaagcacaatagtgtaccaacaatggcagccaaaatattttgcctccttatgctccttggtctttctgcaagtgctgctacggcgaccattttcccgcaatgctcgcaagctcctatagcttcccttcttcccccgtacctctcaccagcggtgtcttcggtatgtgaaaacccaattcttcaaccctacaggatccaacaggcaatcacagctggcatcttacctttatcacccttgttcctcc

SEQ ID NO: 72201 - DNA, 255 bp, Zea mays
  unsure (1)..(255): unsure at all n locations
aaacacaccaagcgaagcnactagcaacgacctaacaacaatggctaccaagatattagccctccttgcgcttcttgccctttttgtgagcgcaacaaatgcgttcattattccacaatgctcacttgctcctagtgccattattccacagttcctcccaccagttacttcaatgggcttcgaacacctagctgtgcaagccaacatgcaacaacaagcgcttgcggcgagcgtcttacaacaaccaattgccca

SEQ ID NO: 72202 - DNA, 251 bp, Zea mays
aattcattgctgagtttgaagtagcagccgaagaagatgcaaacttgaataggcaatcaaaaccagccattaacaaacttatgaagcttcctctgctcatagatgttctctccaagaagaatcttcagcaggaatttcttgaccacggagttctcactcttctaaaaaattggcttgagccattacctgatggaagcatgccaaacatgaatattcgatctgctgtactgaaattattaactgattttcca

SEQ ID NO: 72203 - DNA, 248 bp, Zea mays
caccaagcgaagccactagcaacgacctaacaccaatggctaccaagatattagccctccttgcgcttcttgcccttttagtgagcgcaacaaatgcgttcattattccacagtgctcacttgctcctagtgccagtattccacagttcctcccaccagttacttcaatgggcttcgaacatccagccgtgcaagcctacaggctacaactagcgcttgcggcgagcgccttacaacaaccaattgcc

SEQ ID NO: 72204 - DNA, 247 bp, Zea mays
ctacaggctacaacaagcgcttgcggcgagcgtcttacaacaaccaattgcccaattacaacaacaatccttggcacatctaaccatacaaaccatcgcaacgcaacagcaacaacaatttctaccagcactgagccaactagctgtggtgaaccctgtcgcctacttgcaacagcagttgcttgcatccaacccacttgctctggcaaacatagttgcataccaacaacaacaacaattgcaacag

SEQ ID NO: 72205 - DNA, 245 bp, Zea mays
caacaagcaatcgcagcaagcaacatacctttatcgcccttgttgtttcaacaatcaccagccctatctttggtgcagtcattggtacaaaccatcagggcacaacagctgcagcaactcgtgctacctgtgatcaaccaagtagctctggcaaacctttctccctactctcagcaacaacaatttcttccattcaaccaactgtctacactgagccctgctgcttatttgcagcagggttcagt

SEQ ID NO: 72206 - DNA, 77 bp, Zea mays
attgagaccaactagcaacatagaaagcacaatagtgtaccaacaatggcagccaaaatattttgcttccttatgcc

SEQ ID NO: 72207 - DNA, 258 bp, Zea mays
tgaacaggtatcttcggactcgagtcgatatcacagtaggagaagcccaaaataatacgaaggttgatacaacgccgaagatgtgagcgggaaagcttcggcgtggtagcagaaaaggaaaccgacttaaagatgaaaaggctattcagacctcggtggattactatagaattactaccaaatgtaaagggcatgaatgtaattttatatgggctgtgtcccgtgcctataaataggtaaacagtacccccgtactgt

SEQ ID NO: 72208 - DNA, 246 bp, Zea mays
attttgagcattcagaaacacaccaagcgaagaccagtagcaacaacctaacaacaatggctaccaagatattatccctccttgcgcttcttgcgctttttgcgagcgcaacaaatgcgttcattattccacaatgctcacttgctccaagttccattattacacagttcctcccaccagttatcacaatgggcttcgaacacccagctgtgcaagcctataggctacaacaagcaattgcggcga

SEQ ID NO: 72209 - DNA, 240 bp, Zea mays
gcaaaactggcagtcaaaatattttgcctccttatgctccttgctctttctgcaagtgctgctaacgcgaccaattttctgcaatgctcacaagatccaattgcttcccttcttccctcatacctctcaccagcgacatcttcagtatgtgaaaacccaattcttcaaccctataggatccaacaggcaatcacagcaagcatcttacctttatcacccttgttcctccaacaaccgcca

SEQ ID NO: 72210 - DNA, 245 bp, Zea mays
ccaactagcaacatagaaagcacaatagtgtaccaacaatggcagccaaaatattttgcttccttatgctccttggtctttctgcaagtgttgctaccgcaaccattttcccacaatgctcacaagctcctatagcttcccttcttcccccatacctctcaccagcggtgtcttcaatgtgtgaaaacccaattgttcaaccctacaggatccaacaggcaatcgcaacaggcatcttaccatta

SEQ ID NO: 72211 - DNA, 248 bp, Zea mays
gcaacatagaaagcacaatagtgtaccaacaatggcagccaaaatattttgcttccttatgctccttggtctttctgcaagtgctgctaccgcaaccattttcccacaatgctcacaagctcctatagcttcctttcttcccccatacctctcaccagcggtgtcttcagtatgtgaaaacccaattcttcaaccctacaggatccaacaggcaatcgcagcaggcatcttacctttatcacccttgt

SEQ ID NO: 72212 - DNA, 251 bp, Zea mays
ctgcttatttgcaacaacaattaccattcagccagctagttgctgcctacccccagcaatttcttccattcaaccaactagcagcattgaactctgctgcttatttacagcagcaacaactactaccattcagccagctagctgatgtgagccctgctgccttcttgacacaacaacagttgttgccgttctacctgcacgctatgcctaacgctggcaccctcttacaactgcgacaattgctgccattc

SEQ ID NO: 72213 - DNA, 263 bp, Zea mays
gctcgagggttgatcaaccttgggctccctaggaccatggacttcctgggtgtcaaccccaacagcttcgacgggcacggcaactacagccttggcctccgtgaccagggcgtgttcccggagatcccgtacgacgtgggcgggaagaagaacggcatggacgtgtccatcgtcaccagcgccaagacggagaacatcaagaccgacgtggtgatccggaagaagaggttgaagcgccaccacttcctgagcaagggcaaggg

SEQ ID NO: 72214 - DNA, 253 bp, Zea mays
ttccacagtgctcacttgctcctagtgccagtattccacagttcctcccaccagttacttcaatgggcttcgaacatccagccgtgcaagcctacaggctacaactagcgcttgcggcgagcgccttacaacaaccaattgcccaattgcaacaacaatccttggcacatctaaccctatacaccattgcaacgcaacaacaacaacaacagtttctgccatcactgagccacctagccgtggtgaaccctgt

SEQ ID NO: 72215 - DNA, 246 bp, Zea mays
cagaaacacacctagcgaacggactagcaacgacctaacaacaatggcttccaagacattatccctccttgcgcttcttgccctttttgtgagtgcaacaaatgcgttcattattccacaatgctcacttgctccgagtgccattattccacagttcctccctccagttacttcaatgggcttcgaacacccagctgtgcaagcctataggctacaacaagcgcttgcggcgagcgtcttagaaca

SEQ ID NO: 72216 - DNA, 245 bp, Zea mays
tagcaacatagaaagcacaatagtgtaccaacaatggcagccaaaatattttgcttccttatgctccttggtctttctgcaagtgttgctaccgcaaccattttcccacaatgctcacaagctcctatagcttcccttcttcccccatacctctcaccagcggtgtcttcaatgtgtgaactcacaattgttcaaccctacaggatccaacaggcaatcgcaacaggcatcttaccattatcacc

SEQ ID NO: 72217 - DNA, 243 bp, Zea mays
cattggtacaaaccatcaaggcacagcagctgcagcaactcgtgctacctgtgatcaaccaagtagctctggcaaacctttctccctactatcagcaacaacaatttcttccattcaaccaactatctacactgaaccctgctgcttatttgcagcaacaactattaccattcagccagctagctactgcctactctcatcaacaacaacttcttccatttaaccaattggccgcactgaacc

SEQ ID NO: 72218 - DNA, 243 bp, Zea mays
agaccaacaagcaacatagaaagtggaatccagtagcaacaacagagcaacaatggcgaccaagatattttccctccttatgctccttgctctttctgcatgtgttgctaacgcgacaattttccctcaatgctcacaagctcctatagcttcccttcttcccccataccttccatcaatgatagcttcagtatgtgaaaacccagctcttcagccctataggctccaacaagcaatcgcagc

SEQ ID NO: 72219 - DNA, 241 bp, Zea mays
gaccaactagcaacatagaaagcacaatagtgtaccaacaatggcagctaaaatattttgcctccttatgctccttggtctttctgcaagtgctgctacggcgaccattttcccacaatgctcacaagctcctatagcttcccttcttcccccgtacctctcaccaacggtgtcttcggtatgtgaaaacccaattcttcaaccctacaggatccaacaggcaatcgcagctggcatctta

SEQ ID NO: 72220 - DNA, 101 bp, Zea mays
ttcagaaacacacctagcgaagcgcactagcaacgacctaacaacaatggcttccaagacattatccctccttgcgcttcttgccctttttgtgagtgcaa

SEQ ID NO: 72221 - DNA, 104 bp, Zea mays
gagcattcagaaacacaccaagcgaaggtactagcaacgacctaacaacaatggctaccaagatattagccctccttgcgcttcttgccctttttgtgagcgca

SEQ ID NO: 72222 - DNA, 249 bp, Zea mays
ccaacaagcaacatagaaagtggaatccagtagcaacaacagagcaacaatggcgaccaagatattttccctccttatgctccttgctctttctgcatgtgttgctaacgcgacaattttccctcaatgctcacaagctcctatagcttcccttcttcccccataccttccatcaatgatagcttcagtatgtgaaaacccagctcttcagccctataggctccaacaagcaatcgcagcaagcaacat

SEQ ID NO: 72223 - DNA, 247 bp, Zea mays
attttgagcattcagaaacacacctagcgaacgccactagcaacgacctaacaacaatggcttccaagacattatccctccttgcgcttcttgccctttttgtgagtgcaacaaatgcgttcattattccacaatgctcacttgctccgagtgccattattccacagttcctccctccagttacttcaatgggcttcgaacacccagctgtgcaagcctataggctacaacaagcgcttgcggcgag

SEQ ID NO: 72224 - DNA, 239 bp, Zea mays
gctacttcgcccagtccaatgtgcttggataccctgacactggcggtcaggttgtgtacattctggatcaggtccgtgctttggagaatgagatgcttctgaggattaagcagcaaggccttgatatcactccgaagatcctcattgttaccaggctgttgcctgatgctgctgggactacgtgcggtcagcggctggagaaggtcattggtactgagcacacagacatcattcgcgtt

SEQ ID NO: 72225 - DNA, 241 bp, Zea mays
tattattgagaccaactagcaacatagaaagcacaatagtgtaccaacaatggcagccaaaatattttgcctccttatgctccttggtctttctgcaagtgctgctacggcgaccattttcccgcaatgctcgcaagctcctatagcttcccttcttcccccgtacctctcaccagcggtgtcttcggtatgtgaaaacccaattcttcaaccctacaggatccaacaggcaatcacagct

SEQ ID NO: 72226 - DNA, 172 bp, Zea mays
cggggtgctcctgtcgtcgagcttgccgatgtggccaagctccttggtgaacgcgaggcagccgaagacccgtaggtgagagaccgccggtttgcgcccatgcaaagcctcgtacggtgtcatcccgttgagtgccttggtgggcgagcggttgaggatgtagaccgctgtc

SEQ ID NO: 72227 - DNA, 244 bp, Zea mays
attgagaccaactagcaacatagaaagcacaatagtgtaccaacaatggcagccagaatattttgcttccttatgctccttggtctttctgcaagtgttgctaccgcaaccattttcccacaatgctcacaagctcctatagcttcccttcttcccccatacctctcaccagcggtgtcttcaatgtgtgaaaacccaattgttcaaccctacaggatccaacaggcaatcgcaacaggcatct

SEQ ID NO: 72228 - DNA, 246 bp, Zea mays
ctagcaacatagaaagcacaatagtgtaccaacaatggcagccaaaatattttgcctccttatgctccttggtctttctgcaagtgctgctacggcgaccattttcccgcaatgctcgcaagctcctatagcttcccttcttcccccgtacctctcaccagcggtgtcttcggtatgtgaaaacccaattcttcaaccctacaggatccaacaggcaatcgcagctggcatcttacctttatcacc

SEQ ID NO: 72229 - DNA, 247 bp, Zea mays
cagttgcacaccttttgcaaaatggtaatatgtatgggaaagaaatatcttcagtaaggccagaagaaatgacagatgaagtctgggatttcctgtttcgtgatggcccggcaccaaaaagcgagatccctgccgctctgttgaacaagatgaaacatgaatttcagtataccgatccatttgatatccgtgtgtctggtaaagaccttattcaaaaccattcgacattctgcatatacaatcatac

SEQ ID NO: 72230 - DNA, 251 bp, Zea mays
gagaccaacaagcaacatagaaagtggaatacagtagcaaaaatagagcaacaatggcggccaagatatttgccatccttatgctccttacgctttctgcatgtgttgctaacgcgaccatttttcctcaatactcacaaggtcctatagctgcccttcttcccccataccttccatcaatgaccgctttagtatgtgaaaacgcagcccttcaaccctacaggatccagcaagcaatcgcaacaagcaac

SEQ ID NO: 72231 - DNA, 255 bp, Zea mays
ttattgagaccaactagcaacatagaaagcactatagtgtaccaacaatggcagccaaaatattttgcctccttatgctccttggtctttctgcaagtgctgctacggcgaccattttcccgcaatgctcgcaagctcctatagcttcccttcttcccccgtacctctcaccagcggtgtcttcggtatgtgaaaacccaattcttcaaccctacaggatccaacaggctatcacagctggcatcttacctttat

SEQ ID NO: 72232 - DNA, 258 bp, Zea mays
gaaacacaccaagcgaacgtactagcaacaacctaacaacaatggctaccaagatattatccctccttgcgcttcttgcgctttttgcgagcgcaacaaatgcgtccattattccacaatgctcacttgctcctagttccattattccacagttcgtcccaccagttacttcaatggccttcgaacacccagctgtgcaagcctataggctacaacaagcgattgcggcgagcgtcttacaacaaccaattgcccatt

SEQ ID NO: 72233 - DNA, 265 bp, Zea mays
ccaactagcaacatagaaagcacaatagtgtaccaacaatggcagccaaaatattttgcctccttatgctccttggtctttctgcaagtgctgctacggcgaccattttcccttcttcccccgtacctctcaccagcggtgtcttcggtatgtgaaaacccaattcttcaaccctataggatccaacaggcaatcgcagctggcatcttacctttatcacccttgttcctccaacaatcatcagccctattacagcagttacctt

SEQ ID NO: 72234 - DNA, 245 bp, Zea mays
agaaagtgggatccagtagcaacaatagagcaacaatggcgaccaagatatgttccctccttatgctccttgctctttctacatgtgttgctaacgcgacaattttccctcaatgctcacaagctcctatagcttcccttcttcccccataccttccatcaattatagcttcaatatgtgaaaacccagctcttcaaccatataggcttcaacaagcaatcgcagcaagcacatacctttatcgc

SEQ ID NO: 72235 - DNA, 260 bp, Zea mays
attgagaccaacaagcaacatagaaagtggaatccagtagcaacaatagagcaacaatggcgaccaagatactttccctccttatgctccttgctctttctgcatgtgttgctaacgcgacaattttccctcaatgctcacaagctcctatagcttcccttcttcccccataccttccatcaatgatagcttcagtatgtgaaaacccagctcttcaaccctataggctccaacaagcaatcgcacaagcaacatacctt

SEQ ID NO: 72236 - DNA, 258 bp, Zea mays
tggtaattgttgttgcaaataagcagcaatttcttccattcaaccaactagcagcattgaactctgctgcttatttacagcagcaacaactactaccattcagccagctagctgatgtgagccctgctgccttcttgacacaacaacagttgttgccgttctacctgcacgctatgcctaacgctggcaccctcttacaactgcaacaattgctgccattcaaccaacttgctttgacaaactcaacagtgttctacc

SEQ ID NO: 72237 - DNA, 257 bp, Zea mays
gtttgattggtgctggcacaaacaatgccagaatagctggcatgcttcgcaatctttcaagttattactacaaagaagctgctcatctgttttgtgttagaattgcccagggccttgttcacctcggaaagggcttgttgaccctttccccataccattccgatagatttcttctctccccgatggcacttgggggccttgtaaccgttctccacgcgtgccttgatatgaagtccaccatctagggaaataccact

SEQ ID NO: 72238 - DNA, 253 bp, Zea mays
tagtgaagtacactagcaacatcttagcaccaatggcagccaagatttttgccatccttgccctccttgctctttcagcaagcgttgctaccgcgactattattccacaatgctcacaacaatacctctctccggtgacagccgcgagatttgaatacccaactatacaatcctacaggctacaagaggccatcgcagcaagcatcttacggtcgttagcattgaccgtccaacaaccaatgccctattgcaa

SEQ ID NO: 72239 - DNA, 251 bp, Zea mays
  unsure (1)..(251): unsure at all n locations
aacacaccaagcgaagcnactagcaacaacctaacaacaatggctaccaagatattatccctccttgcgcttcttgcgctttttgcgagcgcaacaaatgcgtccattattccacaatgctcacttgctcctagttccattattccacagttcctcccaccagttacttcaatggccttcgaacacccagctgtgcaagcctataggctacaacaagcgattgcggcgagcgtcttaaacaaccaattgcc

SEQ ID NO: 72240 - DNA, 251 bp, Zea mays
agaccaactagcaacatagaaagcacaatagtgtaccaacaatggcagctaaaatattttgcctccttatgctccttggtctttctgcaagtgctgctacggcgaccattttcccacaatgctcacaagctcctatagcttcccttcttcccccgtacctctcaccaacggtgtcttcggtatgtgaaaacccaattcttcaaccctacaggatccaacaggcaatcgcagctggcatctacctttatcac

SEQ ID NO: 72241 - DNA, 260 bp, Zea mays
gaccaactagcaacatagaaagcacaatagtgtaccaacaatggcagccaaaatattttgcttccttatgctccttggtctttctgcaagtgttgctaccgcaaccattttcccacaatgctcacaagctcctatagcttcccttcttcccccatacctctcaccagcggtgtcttcaatgtgtgaaaccccaattgttcaaccctacaggatccaacaggcaatcgcaacaggcatcttaccatatcacccttgttcct

SEQ ID NO: 72242 - DNA, 258 bp, Zea mays
atttataccaactaccaacatacatagtgaagtacactagcaacatcttagcaccaatggcagccaagatttttgcgctccttgccctccttgctctttcagcaagtgttgctaccgcgactattattccacaatgctcacaacaatacctctctccagtgatagccgcgagatttgaatacccatctatacaatcctacaggctacaagaggccatcacagcaagcatcttacggtcgttacattgaccgtccaaca

SEQ ID NO: 72243 - DNA, 257 bp, Zea mays
aatgactgcaccaaagatagggcacaacagctgcagcaactcgtgctacctctgatcaaccaagtagctctggcaaacctttctccctactctcagcaacaacaatttcttccattcaaccaactgtctacactgaaccctgctgcttatttgcagcaacaactattaccatttagccagctagctactgcctactctcagcaacaacaacttcttccatttaaccaattggccgcactgaccccgctgcttatttg

SEQ ID NO: 72244 - DNA, 254 bp, Zea mays
caacaacttgtgctagcaaaccttgctgcctactctcagcaacaacagtttcttccattcaaccaactagctgcattgaactctgcttcttatttgcaacaacaacaactaccattcagccagctatctgctgcctacccccagcaatttcttccattcaaccaactgacagctttgaactctcctgcttatttacagcagcaacaactactaccattcagccagctagctggtgtgagcctgctacctgcttg

SEQ ID NO: 72245 - DNA, 257 bp, Zea mays
attgagaccagcaagcaacatagaaagtagaatccattagcaacaatagagcaacaatggcgaccaagatattttccctccttatgctccttgctctttctacatgtgttgctaacgcgacaattttccctcaatgctcacaagctcctatagcttcccttcttcccccataccttccatcaattatagcttcagtatgtgaaaacccagctcttcaaccatataggcttcaacaagcaatgcagcaagcaacatac

SEQ ID NO: 72246 - DNA, 253 bp, Zea mays
  unsure (1)..(253): unsure at all n locations
cagaaacacacctagcgaagcnactagcaacgacctaacaacaatggcttccaagacattatccctccttgcgcttcttgccctttttgtgagtgcaacaaatgcgttcattattccacaatgctcacttgctccgagtgccattattccacagttcctccctccagttacttcaatgggcttcgaacacccagctgtgcaagcctataggctacaacaagcgcttgcggcgagcgtcttagaacaaccaatt

SEQ ID NO: 72247 - DNA, 252 bp, Zea mays
gtgatagccgcgagatttgaatacccatctatacaatcctacaggctacaagaggccatcacagcaagcatcttacggtcgttagcattgaccgtccaacaaccatatgccctattgcaacaaccatccttagtgaatctgtatctccaaagaatcacagcacaacaactacaacaacggttgcttccaacaattaatcaagtagttgcagcgaaccttgctgcttaccttcagcacaacaatttcttccat

SEQ ID NO: 72248 - DNA, 251 bp, Zea mays
  unsure (1)..(251): unsure at all n locations
gagcattcagaaacacaccaagcgaactnacctagcaacgacttaacaacaatggctaccaagatattagccctccttgcgcttcttgccctttttgtgagcgcaacaaatgcgttcattattccacaatgctcacttgctcctagtgccattataccacagttcctccgaccagttacttcaatgggcttcgaacacctagctgtgcaagcctacaggctacaacaagcgcttgggcgagcgtcttacaa

SEQ ID NO: 72249 - DNA, 254 bp, Zea mays
acatttgttgccattttacccacaagttgtgggaaacattaatgccttcttgcaacagcaacaattgcgcccattctacccacagaatgtggcaaacattgttgccttcttacaacaacaacaattgctaccatttagccaacatgctttgacgaatcctaccaccttattgcaaccgcccaccattggtggtgccatcttctagattttttatgatttatactgtaataataaagtttcatgctgatatgtgc

SEQ ID NO: 72250 - DNA, 134 bp, Zea mays
tggtcccgctgactagctacctatagggctatagctagttcactcgtttagcggcgatgagtaacggagtgtcacccatcaccatgggtggcagtgtgagcaatgacctgaatgaaccattgaaatggaaagga

SEQ ID NO: 72251 - DNA, 111 bp, Zea mays
aagatattagccctccttgcgcttcttgcccttttagtgagcgcaacaaatgcgttcattattccacagtgctcacttgcctctagtgccagtattccacagttcctccca

SEQ ID NO: 72252 - DNA, 255 bp, Zea mays
caactagcaacatagaaagcacaatagtgtaccaacaatggcagccaaaatattttgcctccttatgctccttggtctttctgcaagtgctgctacggcgaccattttcccacaatgctcacaagctcctatagcttcccttcttcccccgtacctctcaccagcggtgtcttcggtatgtgaaaacccaattcttcaaccctataggatccaacaggcaatcgcagctggcatcttactttatcacccttgttc

SEQ ID NO: 72253 - DNA, 252 bp, Zea mays
gcactactgagagcgacaaagctagctctctccagggatcggattcggatcaccatgccgtccaccgtgaactccgcgtccctcgaccagaaccttgagctcgccaagcaatgctcgcgagaggccgccctcgcagggttcaaggcagcagctgtcgcgaccgtcgcctctgcagttcccaccctggttagcgtcaggatgctgccatgggccaaggccaacatcaaccccgctggccagccctcatcgtct

SEQ ID NO: 72254 - DNA, 250 bp, Zea mays
attcagatacacacctagcgaaggtactaagcatcgacctaacaacaatggcttccaagacattatccctccttgcgcttcttgccctttttgtgagtgcaacaaatgcgttcattattccacaatgctcacttgctccgagtgccattattccacagttcctccctccagttacttcaatgggcttcgaacacccagctgtgcaagcctataggctacaacaagcgcttccggcgagcgcttagaacaa

SEQ ID NO: 72255 - DNA, 179 bp, Zea mays
attgagaccaactagcaacatagaaagcacaatagtgtaccaacaatggcagccaaaatattttgcctccttatgctccttggtctttctgcaagtgctgctacggcgaccattttcccacaattctcacaagctcctatagcttcccttcttcccccgtacctctcaccagcggtgtc

SEQ ID NO: 72256 - DNA, 252 bp, Zea mays
attttcagcattcaaaaacacaccaagcgaagcgcactagcaacgacctaacaccaatggctaccaagatattagccctccttgcgcttcttgcccttttagtgagcgcaacaaatgcgttcattattccacagtgctcacttgctcctagtgccattattccacagttcctcccaccagttacttcaatgggcttcgaacatccagccgtgcaagcctacaggctacaactagcgctgcggcgagcgcctt

SEQ ID NO: 72257 - DNA, 250 bp, Zea mays
atagaaagcacaatagtgtaccaacaatggcagccaaaatattttgcctccttatgctccttggtctttctgcaagtgctgctacggcgaccattttcccgcaatgctcgcaagctcctatagcttcccttcttcccccgtacctctcaccagcggtgtcttcggtatgtgaaaacccaattcttcaaccctacaggatccaacaggcaatcgcagctggcatcttacctttatcacccttgttcctcca

SEQ ID NO: 72258 - DNA, 251 bp, Zea mays
ctcgagccgttcagcattcaaaaacacaccaagcgaagccactagcaacgacctaacacaaatggctaccaagatattagccctccttgcgcttcttgcccttttagtgagcgcaacaaatgcgttcattattccacagtgctcacttgctcctagtgccattattccacagttcctcccaccagttacttcaatgggcttcgaacatccagccgtgcaagcctacaggctacaactagcgcttggcgcga

SEQ ID NO: 72259 - DNA, 255 bp, Zea mays
caacaagcaacatagaaagtggaatacagtagcaaaaatagagcaacaatggcggccaagatattttccatccttatgctccttgctctttctgcatgtgttgctaacgcgaccatttttcctcaatactcacaagctcctatagctgctcttcttcccccataccttccatcaatgaccgctttagtatgtgaaaacccagctcttcagccctataggctccaacaagcaatcgcagcagcaacatacctttat

SEQ ID NO: 72260 - DNA, 253 bp, Zea mays
taccaacaatggcagccaaaatattttgcctccttatgctccttggtctttctgcaagtgctgctacggcgaccattttcccgcaatgctcgcaagctcctatagcttcccttcttcccccgtacctctcaccagcggtgtcttcggtatgtgaaaacccaattcttcaaccctacaggatccaacaggcaatcacagctggcatcttacctttatcacccttgttcctccaacaatctcagccctattacat

SEQ ID NO: 72261 - DNA, 253 bp, Zea mays
caagcctataggctacaacaagcgcttgcggcgagcgtcttagaacaaccaattgcccaattacaacaacaatccttggcacatctaaccatacaaaccatcgcaacgcagcagcaacaagcactgagccacctagccgtggtgaaccctatcgcctacttgcaacaacagctgcttgcatccaacccacttgctttggcaaacgtagctgcataccaacaacaacaacagttgcaacgtttctaccagcgct

SEQ ID NO: 72262 - DNA, 253 bp, Zea mays
attttgagcattcagaaacacaccaagcgaaggcaactagcaacgacctaacaacaatggctaccaagatattagccctccttgcgcttcttgccctttttgtgagcgcaacaaatgcgttcattattccacaatgctcacttgctcctagtgccattattccacagttcctcccaccagttacttcaatgggcttcgaacacctagctgtgcaagccaacatgcaacaacaagcgctgcggcgagcgtctta

SEQ ID NO: 72263 - DNA, 249 bp, Zea mays
gtgtggtcctgcagtccttcctgcagcagcagccgcgggcgagctcgcggcgctgatggcggcccaggtagcgcagagctgacggcgatgtgcggtctgcagctgcagcagccaggtccctgcccttgcaacgcagctgccggcggtgtctactactgaggaaactatgtactgtagtaataatgtaatggagccgctgactagctacctatagggctatagctagttcactcgttagcggcgatgagt

SEQ ID NO: 72264 - DNA, 252 bp, Zea mays
ctcctctcctcccccacccgtccatcgcccctccctccggtctgcgctcccacagcctcacccctgcgcccccgccgattcgcgtcgccctttgttggaaggaacgatggagcagaccttcatcatgatcaagcccgacggcgtccagcggggcctgatcggggacatcatcagtcgcttcgagaagaaagggttctacctcaaggggatgaagttcatgaacgtggagaggtccttgcgcacagcactacg

SEQ ID NO: 72265 - DNA, 248 bp, Zea mays
cagcaagcaacatagaaagtagaatccattagcaacaatagagcaacaatggcgaccaagatattttccctccttatgctccttgctctttctacatgtgttgctaacgcgacaattttccctcaatgctcacaagctcctatagcttcccttcttcccccataccttccatcaattatagcttcagtatgtgaaaacccagctcttcaaccatataggcttcaacaagcaatgcagcaagcaacata

SEQ ID NO: 72266 - DNA, 250 bp, Zea mays
ctcgaaatatctcaacattgtgaagcaaaagcttgaaatagcaggcatttctgctaatgttattggagaagttactagctcaccagaaatagaagtttttattgatggcaatctgcatctcaaggaaaaaacttcagatctcagggatctgtgggaggaaacaagcttccagcttgaggagttacaacgtctgaaatcttgtgtaaaacttgagaaagaaggattaaaatgcaggacaacaccatcatgg

SEQ ID NO: 72267 - DNA, 248 bp, Zea mays
attgagaccaacaagcaacatagaaagtggaatccagtagcaacaacagagcaacaatggcgaccaagatattttccctccttatgctccttgctctttctgcatgtgttgctaacgcgacaattttccctcaatgctcacaagctcctatagcttcccttcttcccccataccttccatcaatgatagcttcagtatgtgaaaacccagctcttcagccctataggctccaacagcaatcgcagcaa

SEQ ID NO: 72268 - DNA, 250 bp, Zea mays
  unsure (1)..(250): unsure at all n locations
ggcatccgcagagagtttgttccgtccaggcaaccanaaagcgttgccccgccgcgcagaggaagaagagagcagaggaggatggctcgtacgaagcagaccgcccgcaagtccacgggaggcaaggccccccgcaagcagctcgccaccaaggcggcgaggaagtcggcgccgacgaccggcggcgtgaagaagccccacaggtacaggcccggaaccgtggcgctgcgcgagatcgcaagtaccagaa

SEQ ID NO: 72269 - DNA, 162 bp, Zea mays
atagaaagcacaatagtgtaccaacaatggcagccaaaatattttgcttccttatgctccttggtctttctgcaagtgctgctaccgcaaccattttcccacaatgctcacaagctcctatagcttcctttcttcccccatacctctcaccagcggtgtctt

SEQ ID NO: 72270 - DNA, 248 bp, Zea mays
gaccaactagcaacatagaaagcacaatagtgtaccaacaatggcagccaaaatattttgcctccttatgctccttggtctttctgcaagtgctgctacggcgaccattttcccgcaatgctcgcaagctcctatagcttcccttcttcccccgtacctctcaccagcggtgtcttcggtatgtgaaaacccaattcttcaaccctacaggatccaacaggcaatcacagctggctcttacctttatc

SEQ ID NO: 72271 - DNA, 94 bp, Zea mays
ggccgccctttttttacaatgtttgtacggtcgcaataaatgtatggtcgtgtttgctcgagagctactcaggtgattttgtcgtgggagcacc

SEQ ID NO: 72272 - DNA, 244 bp, Zea mays
aagatttctaagggcttgcttgacaagtatggtcccgatagggttcttgacacacctatcacagaggctggctttactggcattggtgttggtgcagcttaccaaggtcttcggcctgttatagaatttatgacatttaatttctcgatgcaggctattgatcatatcatcaattcagctgctaagtcaaactacatgtcagccggtcagatatctgttcctattgttttagaggaccaaatgg

SEQ ID NO: 72273 - DNA, 117 bp, Zea mays
caatgctcacaagctcctatagcttcctttcttcccccatacctctcaccagcggtgtcttcagtatgtgaaaacccaattcttcaaccctacaggatccaacaggcaatcgcagca

SEQ ID NO: 72274 - DNA, 247 bp, Zea mays
attgagaccaactagcaacatagaaagcacaatagtgtaccaacaatggcagccaaaatattttgcttccttatgctccttggtctttctgcaagtgttgctaccgcaaccattttcccacaatgctcacaagctcctatagcttcccttcttcccccatacctctcaccagcggtgtcttcaatgtgtgaaaccccaattgttcaaccctacaggatccaacaggcaatcgcacaggcatcttacc

SEQ ID NO: 72275 - DNA, 118 bp, Zea mays
attgagaccaacaagcaacatagaaagtggaatccagtagcaacaacagagcaacaatggcgaccaagatattttccctccttatgctccttgctctttctgcatgtgttgctaacgc

SEQ ID NO: 72276 - DNA, 117 bp, Zea mays
gcttcgaacacctagctgtgcaagccaacatgcaacaacaagcgcttgcggcgagcgtcttacaacaaccaattgcccaattgcaacaacaatccttgccacatctaacaatacaag

SEQ ID NO: 72277 - DNA, 250 bp, Zea mays
accaactagcaacatagaaagcacaatagtgtaccaacaatggcagctaaaatattttgcctccttatgctccttggtctttctgcaagtgctgctacggcgaccattttcccacaatgctcacaagctcctatagcttcccttcttcccccgtacctctcaccaacggtgtcttcggtatgtgaaaacccaattcttcaaccctacaggatccaacaggcaatcgcagctggcatcttacctttatcac

SEQ ID NO: 72278 - DNA, 246 bp, Zea mays
ggcagccaaaatattttgcctccttatgctccttggtctttctgcaagtgctgctacggcgaccattttcccgcaatgctcgcaagctcctatagcttcccttcttcccccgtacctctcaccagcggtgtcttcggtatgtgaaaacccaattcttcaaccctacaggatccaacaggcaatcacagctggcatcttacctttatcacccttgttcctccaacaatcatcaccctattacatcag

SEQ ID NO: 72279 - DNA, 248 bp, Zea mays
ccttcaaccatctcaggcggaatggcggcttctggtgagggcgcgtcgctgccgtctccggcgggcggggaggatgcgcaccgccgccgcgtcagctatttctacgagccgtcgatcggagactactactacgggcaaggtcacccgatgaagccccaccgcatccgaatggcgcactcgctggtggtccactacggcctccaccgcctcctcgagctctcccgcccctacccgcctctgaggccgac

SEQ ID NO: 72280 - DNA, 242 bp, Zea mays
gagaccaactagcaacatagaaagcacaatagtgtaccaacaatggcagccagaatattttgcttccttatgctccttggtctttctgcaagtgctgctaccgcaaccattttcccacaatgctcacaagctcctatagcttcctttcttcccccatacctctcaccagcggtgtcttcagtatgtgaaaacccaattcttcaaccctacaggatccaacaggcaatcgcgcaggcatctta

SEQ ID NO: 72281 - DNA, 167 bp, Zea mays
ccctggtgcacctcaatccccaggtagaaggagagatgccccaggtcactcatttggaaggtggccttcatctcttccttgaacgctgccacctctacatccttggcgccggtgatcaccaagtcgtcgacgtagacacccaccagcagggcattatctccattgcc

SEQ ID NO: 72282 - DNA, 244 bp, Zea mays
attgagaccaacaagcaacatagaaagtggaatccagtagcaacaatagagcaacaatggcgaccaagatattttccctccttatgctccttgctctttctacatgtgttgctaacgcgacaattttccctcaatgctcacaagctcctatagcttcccttcttcccccataccttccatcaattatagcttcaatatgtgaaaacccagctcttcaaccatataggctcaacaagcaatcgca

SEQ ID NO: 72283 - DNA, 246 bp, Zea mays
gagaccaactagcaacatagaaagcacaatagtgtaccaacaatggcagccaaaatattttgcttccttatgctccttggtctttctgcaagtgctgctaccgcaaccattttcccacaatgctcacaagctcctatagcttcctttcttcccccatacctctcaccagcggtgtcttcagtatgtgaaaacccaattcttcaaccctacaggatccaacaggcaatcgcacaggcatcttacctt

SEQ ID NO: 72284 - DNA, 164 bp, Zea mays
caacaagcaacatagatagtggaatccagtagcaacaatagagcaacaatggcgaccaagatattttccctccttatgctccttgctctttctacatgtgttgctaacgcgacaattttccctcaatgctcacaagctcctatagcttcgcttcttcccccata

SEQ ID NO: 72285 - DNA, 279 bp, Zea mays
caacaagcaacatagaaagtggaatccagtagcaacaatagagcaacaatggcgaccaagatactttccctccttatgctccttgctctttctgcatgtgttgctaacgcgacaattttccctcaatgctcacaagctcctatagcttcccttcttcccccataccttccctcaatgatagcttcagtatgtgaaaacccagctcttcaaccctataggctccaacaagcaatcgcagcaagcaacatactttatcacccttgtttcaacaatcgccag

SEQ ID NO: 72286 - DNA, 269 bp, Zea mays
ttgagaccaactagcaacatagaaagcacaatagtgtaccaacaatggcagccaaaatatcctgcctccttatgctccttggtctttctgcaagtgctgctacggcgaccattttcccgcaatgctcgcaagctcctatagcttcccttcttcccccgtacctctcaccagcggtgtcttctatatgtgaaaacccaattcttcaaccctacaggatccaacaggcaatcacagctggcatcttacctttacacccttgctcctccaac

SEQ ID NO: 72287 - DNA, 220 bp, Zea mays
tttgagcattcagaaacacacctagcgaagcgcactagcaacgacctaacaacaatggctaccaagatattatccctctttgcgcttcttgccctttttgtgagcgcaacaaatgcgttcattattccacaatgctcacttgctccaagttccattattacacagttcctcccaccagttacttcaatgggcttcgaacacccagctgtgcaagcctata

SEQ ID NO: 72288 - DNA, 274 bp, Zea mays
caacaagcaacatagaaagtggaatacagtagcaaaaatagagcaacaatggcgaccaagatattttccctccttatgctccttgctctttctgcatgtgttgctaacgcgacaattttccctcaatgctcacaagctcctatagctacccttcttcccccataccttccatcaatgatagctactgtatgtgaaaacccagctcttcagccctataggctccaacaagctatcgcagcaagcaacaacctttatcacccttgttgtttcaaca

SEQ ID NO: 72289 - DNA, 275 bp, Zea mays
tagaaagcacaatagtgtaccatcaatggcagccaaaatattttgcttccttatgctccttggtctttctgcaagtgctgctaccgcaaccattttcccacaatgctcacaagctcctatagcttcctttcttcccccatacctctcaccagcggtgtcttcagtatgtgaaaacccaattcttcaaccctacaggatccaacaggcaatcgcagcaggcatcttacctttatgacccttgttcctgcaacaaccgtcagccctattacagcagt

SEQ ID NO: 72290 - DNA, 126 bp, Zea mays
gaatcctaccaccttattgcaatcgcccaccattggtggtgccatcttctagattttttatgatttatactgtaataataaaattctcatgctgatatgtgcgacctctcagtaataaagtattat

SEQ ID NO: 72291 - DNA, 169 bp, Zea mays
attttgagcattcagaaacacaccaagcgaaggctactagcaacgagctaacaacaatggctaccaagatattagccctcgttgcgcttcttgccctttttgtgagcgcaacaaatgcgttcattattccacaatgctcacttgctcctagtgccattattccacagtt

SEQ ID NO: 72292 - DNA, 271 bp, Zea mays
gcattcagaaacacaccaagcgaagcgcactagcaacgacctaacaacaatggctaccaagatattagccctccttgcgcttcttgccctttttgtgagcgcaacaaatgcgttcattattccacaatgctcacttgctcctagtgccattattccacagttcctcccaccagttacttcaatgggcgtacccaacctagctgtgcaagccaacatgcaacaacaagcgcttgcggcgagcgtcttacacaaccaattgcccaattgcaac

SEQ ID NO: 72293 - DNA, 281 bp, Zea mays
gcaacaacagttgctgcaacagattgtaccagctctgactcagctagctgtggcaaaccctgctgcctacttgcaacagctgcttccattcaaccaactgactgtgtcgaactctgctgcgtacctacaacagcgacaacagttacttaatccactagcggtggctaacccattggtcgttgccttcctacagcagcaacaattgctgccatacaaccagttctctttgatgaaccctgccttgttgtggcagaacccatcgttggaggtgccacttttag

SEQ ID NO: 72294 - DNA, 277 bp, Zea mays
gcgaaggcactagcaacgacctaacaacaatggctaccaagatattagcctccttgcgcttcttgccctttttgtgagcgcaacaaatgcgttcattattccacaatgctcacttgctcctagtgccattattccacagttcctcccaccagttacttcaatgggcttcgaacacctagctgtgcaagccaacatgcaacaacaagcgcttgcggcgagcgtcttacaacaaccaattgcccaattgcaacaacaatccttgccacatctaacaata

SEQ ID NO: 72295 - DNA, 288 bp, Zea mays
tgagaccaaccagcaacatagaaagcacaatagtgtaccaacaatggcagccacaatattttgcttccttatgctccttggtctttctgcaacctttgctaccgcaaccattttcccacaatgctcacaagctcctatagcttcccttcttcccccatacctctcaccagcggtgtcttcaatgtgtgaaaccccaattgttcaaccctacaggatccaacaggcaatcgcaacaggcatcttaccattatcacccttgtcctccaacaaccgtcagccctattacag

SEQ ID NO: 72296 - DNA, 277 bp, Zea mays
cctatgctgatacccagaggcaccgccttggtccaaactatctgatgcttcctgtgaatgcaccaaaatgtgcccaccacaataaccaccatgatgggttcatgaacttcatgcacagggacgaagaggtgaactacttcccttcgaggtttgatcccgcccgtcacgcggagaaggtccccattcctccccgtgttctaacaggctgtcgtgagaagtgcatcattcagaaggagaacaacttcaagcggctggcgagagatatcgttccttcgac

SEQ ID NO: 72297 - DNA, 277 bp, Zea mays
caactagcaacatagaaagcacaatagtgtaccaacaatggcagccaaatattttgcctccttatgctccttggtctttctgcaagtgctgctacggcgaccattttcccgcaatgctcgcaagctcctatagcttcccttcttcccccgtacctctcaccagcggtgtcttcggtatgtgaaaacccaattcttcaaccctacaggatccaacaggcaatcacagctggcatcttacctttatcaccctgttcctccaacaatcatcagccctatt

SEQ ID NO: 72298 - DNA, 273 bp, Zea mays
ccgaggagtacaagaggtacaaccccaagaaactgacgtacgagcagaggaaggccagtctcattgaaaggctcaaccaactcaactcctcgggcggcgcagatgacgacgatgaggatgacgagtaaagtttggtcccatcgaagtagtgctatcttatgcggcgatcagtatttgtgctatggcatttatcgctacctgtagtcgtgcaacatgcatttttgtttaagtttgtcgatgcgaacaagttgtttctgttagtttggagctgga

SEQ ID NO: 72299 - DNA, 160 bp, Zea mays
gagaccaacaagcaacatagaatgtggaatacagtagcaacaatagagcaacaatggcggccaagatattttccatgccttatgctccttgctctttctgcatgtgttgctaacgcgaccatttttcctcaatactcacaagctcctatagctgcccttc

SEQ ID NO: 72300 - DNA, 272 bp, Zea mays
agaaagcacaatagtgtaccaacaatggcagccacaatattttgcctcttatgctccttggtctttctgcaagtgctgctacggcgaccattttcccgcaatgctcgcaagctcctatagcttcccttcttcccccgtacctctcaccagcggtgtcttcggtatgtgaaaacccaattcttcaaccctacaggatccatcaggcaatcgcagctggcatcttacctttatcacccttgttcctcaacaatcatcagccctattacaacagt

SEQ ID NO: 72301 - DNA, 160 bp, Zea mays
aactagcaacatagaaagcacaatagtgtaccaacaatggcagccaaaatatcttgcttccttatgctccttggtctttctgcaagtgctgctaccgcaaccattttcccacaatgctcacaagctcctatagcttcctttcttcccccatacctctcac

SEQ ID NO: 72302 - DNA, 174 bp, Zea mays
agaaagcacaatagtgtaccaacaatggcagccaaaatattttgcttccttatgctccttggtctttctgcaagcgttgctaccgcaaccattttcccacaatgctcacaagctcctatagcttcccttcttcccccatacctctcaccagcggtgtcttcaatgtgtgaaaac

SEQ ID NO: 72303 - DNA, 277 bp, Zea mays
gcagctgctgtgctacctgtgatcaaccaagtagctctggcaaacctttctccctactatcagcaacaacaatttcttccattcaaccaactatctacactgaaccctgctgcttatttgcagcaacaactattaccattcagccagctagctactgcctactctcatcaacaacaacttcttccatttaaccaattggccgcactgaacctcgctgcttatttgcagcagcaaatattactaccatttgccagctagctgcagcaagccgtgcttc

SEQ ID NO: 72304 - DNA, 278 bp, Zea mays
agaccaactagcaacatagaaagcacaatagtgtacctacaatggcagccaaaatattttgcttccttatgctccttggtctttctgcaagtgttgctaccgcaaccattttcccacaatgctcacaagctcctatagcttcccttcttcccccatacctctcaccagcggtgtcttcaatgtgtgaaaacccaattgttcaaccctacaggatccaacaggcaatcgcaacaggcatcttaccattatcacccttgttcctccaacaaccgtcagcc

SEQ ID NO: 72305 - DNA, 262 bp, Zea mays
cagaaacacaccaagcgaagtcactagcaacgacctaacaacaatggctaccaagatattagccctccttgcgcttcttgccctttttgtgagcgcaacaaatgcgttcattattccacaatgctcacttgctcctagtgccattattccacagttcctcccaccagttacttcaatgggcttcgaacacctagctgtgcaagcctacatgctacaacatgcgcttgcggcgagcgtcttacaacaacaattgaccaattgc

SEQ ID NO: 72306 - DNA, 270 bp, Zea mays
agaaagcacaatagtgtaccaacaatggcagctaaaatattttgcctccttatgctccttggtctttctgcaagtgctgctacggcgaccattttcccacaatgctcacaagctcctatagcttcccttcttcccccgtacctctcaccaacggtgtcttcggtatgtgaaaacccctctcttcaaccctacaggatccaacaggcaatcgcagctggcatcttacctttatcacccttgtcctccaacaatcatcagccctattacagc

SEQ ID NO: 72307 - DNA, 236 bp, Zea mays
gaaacacacctagcgaggcactagcaacgacctaacaacaatggctaccaagatattatccctctttgcgcttcttgccctttttgtgagcgcaacaaatgcgttcattattccacaatgctcacttgctcctagtgccattattccacagttcctccctccagttacttcaatgggcttcgaacacccagctgtgcaagcctacaggctacaacaagcgcttgcggcgagcgtct

SEQ ID NO: 72308 - DNA, 138 bp, Zea mays
ttcagttcaacaagcaacatagacagtggaatccagtagcaacaatagagcaacaatggcgaccaagatattttccctccttatgctccttgctctttctagatgtgttgcgaacgcgacaattttccgtcaatgctc

SEQ ID NO: 72309 - DNA, 228 bp, Zea mays
ccaacaagcaacatagaaagtggaatacagtagcaacaatagagcacaatggcggccaagatattgtccatccttatgctccttgctctttctgcatgtgttgctaacgcgaccatttttcctcaatactcacaagctcctatagctgcccttcttcccccataccttccatcaatgaccgcttcagtttgtgagaacccagcccttcaaccctacaggctccaacaa

SEQ ID NO: 72310 - DNA, 269 bp, Zea mays
ttgagaccaactagcaacatagacagcacaatagtgtaccaacaatggcagccaaaatattttgcttccttatgctccttggtctttctgcaagtgttgctaccgcaaccattttcccacaatgctcacaagctcctatagcttcccttcttcccccatacctctcaccagcggtgtcttcaatgtgtgaaaacccaattgttgaaccctacaggatcgaacaggcaatcgcaacaggcatcttacattatcacccttgttcctccaac

SEQ ID NO: 72311 - DNA, 270 bp, Zea mays
ggatttcgactcatatgtcctctctgagtcaagcttgtttatctatcctctgaagattgtcatcaagacctgtggcactaccaagctcctgctcaccattccaagaatccttgagcttgctgaagagctgtctatgccacttgctgctgtgaagtactcccgtgggacgttcatctttcctggtgcacagccagccccccacaggagcttctctgaggaagttgctgcacttaaccgctactttgcggcctgaaatctggtggtaatgct

SEQ ID NO: 72312 - DNA, 143 bp, Zea mays
ctagcaacatagaaagcacaatagtgtaccaacaatggcagccgaatattttgcttcctgatgctccttggtctttctgcaagtgttgctaccgcaaccattttcccacaatgcgcacaagctcctatagcttcccttcttcc

SEQ ID NO: 72313 - DNA, 269 bp, Zea mays
attgagaccaactagcaacatagaaagcacaatagtgtaccaacaatggcagctaaaatattttgcctccttatgctccttggtctttctgcaagtgctgctacggcgaccattttcccacaatgctcacaagctcctatagcttcccttcttcccccgtacctctcaccaacggtgtcttcggtatgtgaaaacccaattcttcaaccctacaggacccaacaggcaatcgcaacaggcacttaccattatcacccttgttcctccaa

SEQ ID NO: 72314 - DNA, 267 bp, Zea mays
gagaccaactagcaacatagaaagcacaatagtgtaccaacaatggcagccaaaatattttgcttccttatgctccttggtctttctgcaagtgttgctaccgcaaccattttcccacaatgctcacaagctcctatagcttcccttcttcccccatacctctcaccagcggtgtcttcaatgtgtgaaaacccaattgttcaaccctacaggatccaacaggcaatcgcaacaggcatctaccattatcacccttgttcctccaac

SEQ ID NO: 72315 - DNA, 271 bp, Zea mays
ataccaactaccaacatacatagtgaagtacactagcaacatcttagcaccaatggcagccaagatttttgcgctccttgccctccttgctctttcagcaagtgttgctaccgcgactattattccacaatgctcacaacaatacctctctccagtgatagccgcgagatttgaatacccatctatacaatcctacaggctacaagaggccatcacagcaagcatcttacggtcgttagcattaccgtccaacaaccatatgccctattgc

SEQ ID NO: 72316 - DNA, 264 bp, Zea mays
gcaacatagaaagcacaatagtgtaccaacaatggcagccaaatattttgcctccttatgctccttggtctttctgcaagtgctgctacggcgaccattttcccgcaatgctcgcaagctcctatagcttcccttcttcccccgtacctctcaccagcggtgtcttcggtatgtgaaaacccaattcttcaaccctacaggatccaacaggcaatcacagctggcatcttacctttatcaccttgttcctccaacaatcatcag

SEQ ID NO: 72317 - DNA, 269 bp, Zea mays
cccatacctctcaccagcggtgtcttcaatgtgtgaaaccccaattgtgcaaccctacaggatccaacaggcaatcgcaacaggcatcttaccattatcacccttgttcctccaacaaccgtcagccctattacagcagttacctttggtccatttggtggcacaaaacatcagggcaccacaactacaacaacttgtgctagctaaccttgctgcatactctcagcaacatcagtttcttccatcaaccactgagctgcattgaatct

SEQ ID NO: 72318 - DNA, 112 bp, Zea mays
tagcaacatagaaagcacaatagtgtaccaacaatggcagacaaatattttgcctccttattgtccttggtctttctgcaagtgctgctacggcgaccattttcccgcaatg

SEQ ID NO: 72319 - DNA, 161 bp, Zea mays
caacaagcaacatagcaagtggattacagtagcaaaaatagagcaacaatggcggccaagatattttccatccttatgctccttgctctttctgcatgtgttgctaacgcgaccatttctcctcaatactcacaagctcctatagctgcccttcttccccc

SEQ ID NO: 72320 - DNA, 269 bp, Zea mays
tacaacagcaataacttctttcatctagcccgctcgctatgggcaatgcacctacatacctgcaacaacagttgttgcaacaacagttgctgcaacaaattgtaccagctcttactcagccagctgtggcaaaccctgctgtctacttgcaacaactacttccattcaaccaactgactgtgtcgaactctgctgcgtacctacaacagcgacaacagttacttaatccactagcggtggctaacccattggtcgctgccttcctacag

SEQ ID NO: 72321 - DNA, 103 bp, Zea mays
ttcaataataacgtttcatatctgatgtttgtggcttcctagaaatgtactttcttatttctgggaagccacaaacatcagatacacaagtacatttctagac

SEQ ID NO: 72322 - DNA, 267 bp, Zea mays
gaaagtggaatccagtagcaacaacagagcaacaatggcgacaagatattttccctccttatgctccttgctcttactgcatgtgttgctaacgcgacaattttccctcaatgctcacaagctcctatagcttcccttcttcccccataccttccatcaatgatagcttcagtatgtgaaaacccagctcttcagccctataggctccaacaagcaatcgcagcaagcaacatacctttatcacccttgttgtttcaacaatcgcca

SEQ ID NO: 72323 - DNA, 132 bp, Zea mays
ctcgagccgcttgagaccaactagcaacatagaaagcacaatagtgtaccaacaatggcagacagcatattatgcctccttatgctccttggtctttctgcaagtgctgctacggcgaccattttcccgcaa

SEQ ID NO: 72324 - DNA, 236 bp, Zea mays
cttccgtttttattgtccaccctccgccgccggcgtctctccacaacccaaccaaaccctagatccgccgcactcagttccggtgagaccctcctttccagcgaaaatgccgaacctcgagtgccggatgtatgagcagcggttcccggaggtggacgccgcggtgatgatccaggtgaagcacatcgctgacatgggcgcgtacgtctcgttgctcgagtacaacaacatcgagg

SEQ ID NO: 72325 - DNA, 144 bp, Zea mays
gagaccaacaagcaacatagaaagtggaatctagtagcaacaatagagcaacaatggcggccaagatattttccatccttatgctccttgctctttctgcatgtgttgctaacgcgaccatttttcctcaatactcacaagctc

SEQ ID NO: 72326 - DNA, 271 bp, Zea mays
ctgggacaccagcgtcgtgtccgagatcaagatgggagacgggtacgagacggtcaggttcttccactgctacaagcgcggagtggaccgcgtgttcgttgaccacccactgttcctggagagggtttggggaaagaccgaggagaagatctacgggcctgtcgctggaacggactacagggacaaccagctgcggttcagcctgctatgccaggcagcacttgaagctccaaggatcctgacctcaacaacaacccatacttctccggac

SEQ ID NO: 72327 - DNA, 286 bp, Zea mays
catacatagtgaagtacactagcaacatcttagcaccaatggcagccaagatttttgcgctccttgccctccttgctctttcagcaagtgttgctaccgcgactattattccacaatgctcacaacaatacctctctccagtgatagccgcgagatttgaatacccatctatacaatcctacaggctacaagaggccatcacagcaagcatcttacggtcgttagcattgaccgtccaacaaccatatgccctattgcaacaaccatccttagtgaatctgtatct

SEQ ID NO: 72328 - DNA, 281 bp, Zea mays
ctcgagccgttttgagcattcagaaacacaccaagcgaacggactagcaacgacctaacaacaatggctaccaagatattagccctccttgcgcttcttgccctttttgtgagcgcaacaaatgcgttcattattccacaatgctcacttgctcctagtgccattattccacagttcctcccaccagttacttcaatgggcttcgaacacctagctgtgcaagccaacatgcaacaacaagcgcttgcggcgagcgtcttacaacaaccaattgcccaatt

SEQ ID NO: 72329 - DNA, 272 bp, Zea mays
ccaataaatgcaccaaaggtaactgctgtaatagggctgatgattgttggcacaaaacatcagggcacaacaactacaacaacttgtgctagcaaaccttgctgttgctgagagtaggcagcaaggtttgctagcacaagttgttgtagttgttgtgctagcaaaccttgctgcctactctcagcaacagcagtttcttccattcaaccaactagctgcattgaactctgcttcttatttgcaacaacaacaactaccattcagccagctat

SEQ ID NO: 72330 - DNA, 277 bp, Zea mays
aacacaccaagcgaagacattagcaacaacctaacaacaatggctaccaagatattatccctccttgcgcttcttgcgctttttgcgagcgcaacaaatgcgttcattattccacaatgctcacttgctccaagttccattattacacagttcctcccaccagttacttcaatgggcttcgaacacccagctgtgcaagcctataggctacaacaagcaattgcggcgagcgtcttacaacaaccaatttcccagttgcaacaacaatccttggcac

SEQ ID NO: 72331 - DNA, 279 bp, Zea mays
agcgctcagtcaactagccatggtgaaccctgccgcctacctacaacagcaacaactgatttcatctagccctctcgctgtggttaatgcacctacatacctgcaacaacagttgctgcaacagattgtaccagctctgactcagctagctgtggcaaaccctgctgcctacttgcaacagctgcttccattcaaccaactgactgtgtcgaactctgctgcgtacctacaacagcgacaacagttacttaatccactagcggtggctaacccattggt

SEQ ID NO: 72332 - DNA, 278 bp, Zea mays
gcaacatagaaagcacaatagtgtaccaacaatggcagccaaaatattttgcctccttatgctccttggtctttctgcaagtgctgctacggcgaccattttcccacaatgctcacaagctcctatagcttcccttcttcccccgtacctctcaccagcggtgtcttcggtatgtgaaaacccaattcttcaaccctataggatccaacaggcaatcgcagctggcatcttacctttatcacccttgttcctccaacaatcatcagccctattacagc

SEQ ID NO: 72333 - DNA, 280 bp, Zea mays
agaccaactagcaacatagaaagcacaatagtgtaccaacaatggcagccaaaatattttgcttccttatgctccttggtctttctgcaagtgttgctaccgcaaccattttcccacaatgctcacaagctcctatagcttcccttcttcccccatacctctcaccagcggtgtcttcaatgtgtgaaaacccaattgttcaaccctacaggatccaacaggcaatcgcaacaggcatcttaccattatcacccttgttcctccaacaaccgtcagccct

SEQ ID NO: 72334 - DNA, 256 bp, Zea mays
tttcaaaaacacaccgcacaatagtgtaccaaccgtggcagccaaaatattttgcctccttatgctccttggtctttctgcaagtgctgctacggcgaccattttcccgcaatgctcgcaagctcctatagcttcccttcttcccccgtacctctcaccagcggtgtcttcggtatgtgaaaacccaattcttcaaccctacaggatccaacaggcaatcgcagctggcatcttacctttatcacccttgttcctc

SEQ ID NO: 72335 - DNA, 273 bp, Zea mays
ctcaaacttcaatggtgaccatggttccagaaagtttgcaagcatcaaaacctgagcgatggagcattttcagggagagaactgggatttggggtaaaaatgactttgtccggaatggatttgtggaccatattaatacgacaaaggactccaccgactacctatggtacacaacaagttttcgtgtggatggaagttactcctcattagggagccatgctgtccttaatatcgactccaatggccatggtgtccatgctttcttgaataatg

SEQ ID NO: 72336 - DNA, 274 bp, Zea mays
ggctaagactgtagatgtggaagagctcactgttgaggagcgtaacctcttgtcggtcgcatacaagaatgtgattggggctcgccgtgcttcatggcgcattgtctcttctattgaacagaaggaggagtcccgtaagaacgaagagcatgtgaaccttatcaaggaataccgtgcgaagatcgaggctgaactgagcaatatctgtgatggcatcctgaagctgcttgactcccacctagtgccttcttctactgctgctgaatcaaaggtc

SEQ ID NO: 72337 - DNA, 199 bp, Zea mays
ctcgagccgattcggctcgagtcttacaactgcaacaattgctgcagttcaaccaacttgcattgacaaacccaacaacgtactaccaacaacccatcattggcggtgccctcttttagattgcttatgagttatagttcaataatgaagttttttggatgatgtttgtggcttcccagaaataagaaagtacatttct

SEQ ID NO: 72338 - DNA, 279 bp, Zea mays
caatttcttccattcaaccaactgtctacactgaaccctgctgcttatttacaacaacaacaactactaccattcagccagctagctactgcctactctcagcagcaacaatttcttccatttaaccaattggccgcactgaacccctctgcttatttccagcagcaaatactactaccatttggccagctagctacaacaagccccacttcctttttgaaacaacaacaattgcttccgttctaccagcagtttgtggctaaccccgcaaccctctta

SEQ ID NO: 72339 - DNA, 271 bp, Zea mays
tgagcattcagaaacacacctagcgaacgcactagcaacgacctaacaacaatggcttccaagacattatccctccttgcgcttcttgccctttttgtgagtgcaacaaatgcgttcattattccacaatgctcacttgctccgagtgccattattccacagttcctccctccagttacttcaatgggcttcgaacacccagctgtgcaagcctataggctacaacaagcgcttgcggcgagcgtcttagaacaaccaattgcccaattac

SEQ ID NO: 72340 - DNA, 272 bp, Zea mays
caacaagcaacatagaaagtggaatacagtagcaaaaatagagcaacaatggcggccaagatattttccatccttatgctccttgctctttctgcatgtgttgctaacgcgaccatttttcctcaatactcacaagctcctatagctgcccttcttcccccataccttccatcaatgacctctttagtatgtgaaaacccagcccttcaaccctacaggatccagcaagcaatcgcaacaagcaacttacctttatcacacctgttctttca

SEQ ID NO: 72341 - DNA, 273 bp, Zea mays
gctgcattgaactctgcttcttatttgcaacaacaacaactaccattcagccagctacctgctgcctacccccagcaatttcttccattcaaccaactggcagcattgaactctcctgcttatttacagcagcaacaactactaccattcagccagctagctggtgtgagccctgctaccttcttgatacaaccacagttgttgccgttctaccagcacgctgcgcctaacgctggcaccctcttacaactgcaacaattgctgccattcaac

SEQ ID NO: 72342 - DNA, 278 bp, Zea mays
tctcgagccgaatcggctcgaggcattcagaaacacaccaagcgaaacacattagcaacaacctaacaacaatggctaccaagctattatccctccttgcgcttcttgcgctttttgcgagcgcaacaaatgcgttcattattccacaatgctcacttgctccaagttccattattacacagttcctcccaccagttacttcaatgggcttcgaacacccagctgtgcaagcctataggctacaacaagcaattgcggcgagcgtcttacaacaacca

SEQ ID NO: 72343 - DNA, 271 bp, Zea mays
attgagaccaactagcaacatagaaagcacaatagtgtaccaacaatggcagccaaaatattttgcctccttatgctccttggtctttctgcaagtgctgctacggcgaccattttcccacaatgctcacaagctcctatagcttcccttcttcccccgtacctctcaccagcggtgtcttcggtatgtgaaaacccaattcttcaaccctataggatccaacaggcaatcgcagctggcatcttacctttatcacccttgttcctccaac

SEQ ID NO: 72344 - DNA, 269 bp, Zea mays; identical to SEQ ID NO: 70433

SEQ ID NO: 72345 - DNA, 270 bp, Zea mays
  unsure (1)..(270): unsure at all n locations
aaaacacaccaagcgaaggnactagcaacgacctaacaccaatggctaccaagacattagccctccttgcgcttcttgcccttttagtgagcgcaacaaatgcgttcattattccacagtgctcacttgctcctagtgccagtattccacagttcctcccaccagttacttcaatgggcttcgaacatccagccgtgcaagcctacaggctacaactagcgcttgcggcgagcgccttacaacaaccaattgcccaattgcaacaacaat

SEQ ID NO: 72346 - DNA, 272 bp, Zea mays
gcaacatagaaagcacaatagtgtaccaacaatggcagccaaaatattttgcctccttatgctccttggtctttctgcaagtgctgctacggcgaccattttcccgcaatgctcgcaagctcctatagcttcccttcttcccccgtacctctcaccagcggtgtcttcggtatgtgaaaacccaattcttcaaccctacaggatccaacaggcaatcacagctggcatcttacctttatcacccttgttcctccaacaatcatcagccctat

SEQ ID NO: 72347 - DNA, 269 bp, Zea mays
gctgcattgaactctgcttcttatttgcaacaacaacaactaccattcagccagctacctgctgcctacccccagcaatttcttccattcaaccaactggcagcattgaactctcctgcttatttacagcagcaacaactactaccattcagccagctagctggtgtgagccctgctaccttcttgatacaaccacagttgttgccgttctaccagcacgctgcgcctaacgctggcaccctcttacaactgcaacaattgctgccatt

SEQ ID NO: 72348 - DNA, 262 bp, Zea mays
gaccaactagcaacatagaaagcacaatagtgtaccaacaatggcagccaaaatattttgcctccttatgctccttggtatttctgcaagtgctgctacggcgaccattttcccgcaatgctcacaagctcctatagcttcccttcttcccccgtacctctcaccagcggtgtcttcggtatgtgaaaacccaattcttcaaccctacaggatccaacaggcaatcgcagctggcatcttacctttatcacccttgttcctc

SEQ ID NO: 72349 - DNA, 267 bp, Zea mays
atttagaccaactagcaacatagaaagcacaatagtgtaccaacaatggcagccaaaatattttgcctccttatgctccttggtatttctgcaagtgctgctacggcgaccattttcccgcaatgctcacaagctcctatagcttcccttcttcccccgtacctctcaccagcggtgtcttcggtatgtgaaaacccaattcttcaaccctacaggatccaacaggcaatcgcagctggcatcttacctttatcacccttgttcctc

SEQ ID NO: 72350 - DNA, 268 bp, Zea mays
tagcaacatagaaagcacaatagtgtaccaacaatggcagccaaaatattttgcctccttatgctccttggtctttctgcaagtgctgctacggcgaccattttcccgcaatgctcgcaagctcctatagcttcccttcttcccccgtacctctcaccagcggtgtcttcggtatgtgaaaacccaattcttcaaccctacaggatccaacaggcaatcgcagctggcatcttacctttatcacccttgttcctccaacaatcatcag

SEQ ID NO: 72351 - DNA, 262 bp, Zea mays
gccattcggtctgacaggagcaccggctacctttcaagattttatgaatcacatcttagctccccttttgagaaagtgtgttgtggtattcttggatgatattttggtttatagtactactttagaagatcacgttggacatttggaacaggtttttggtattctgacccaaaatcagttgaaactaaaacaatccaagtgtaagtttgcccaagacaaattggaatttttgggccatgtaatcagtgctgctggtatttcg

SEQ ID NO: 72352 - DNA, 263 bp, Zea mays
tattattgagaccaactagcaacatagaaagcacaatagtgtaccaacaatggcagccaaaatattttgcctccttatgctccttggtctttctgcaagtgctgctacggcgaccattttcccgcaatgctcgcaagctcctatagcttcccttcttcccccgtacctctcaccagcggtgtcttcggtatgtgaaaacccaattcttcaaccctacaggatccaacaggcaatcgcagctggcatcttacctttatcaccct

SEQ ID NO: 72353 - DNA, 261 bp, Zea mays
attttgagcattcagaaacacaccaagcgaactcactagcaacgacctaacaacaatggctaccaagatattagccctccttgcgcttcttgccctttttgtgagcgcaacaaatgcgttcattattccacaatgctcacttgctcctagtgccattattccacagttcctcccaccagttacttcaatgggcttcgaacacctagctgtgcaagcctacatgctacaacaagcgcttgcggcgagcgtcttacaacaacc

SEQ ID NO: 72354 - DNA, 104 bp, Zea mays
gcaatctaaaagatggcaccgccaatgatgtgttgttggtagaaggctgctgggtttgtcaaagcaataatgaagttttttggctgatgtatgtggcctcctag

SEQ ID NO: 72355 - DNA, 264 bp, Zea mays
gaaagcacaatagtgtaccaacaatggcagccaaaatattttgcttccttatgctccttggtctttctgcaagtgctgctaccgcaaccattttcccacaatgctcacaagctcctatagcttcctttcttcccccatacctctcaccagcggtgtcttcagtatgtgaaaacccaattcttcaaccctacaggatccaacaggcaatcgcagcaggcatcttacctttatcaccttgttcctccaacaaccgtcagccctatt

SEQ ID NO: 72356 - DNA, 264 bp, Zea mays
caactagcaacatagaaagcacaatagtgtaccaacaatggcagccaaaatattttgcttccttatgctccttggtctttctgcaagtgttgctaccgcaaccattttcccacaatgctcacaagctcctatagcttcccttcttcccccatacctctcaccagcggtgtcttcaatgtgtgaaaacccaattgttcaaccctacaggatccaacaggcaatcgcaacaggcatcttaccattatcacccttgttcctccaaca

SEQ ID NO: 72357 - DNA, 262 bp, Zea mays
gtgcaagggtccaggtcgccagcgacaacgggaccacggtgttcgacgacgtgctccgtgcggggcagctgctcatcgtaccccagggctacctcgtcgccaccaaggcgcagggagaaggcttccagtacatcgccttcgagacgaaccctgacaccatggtcagccacgtcgccgggaagaactccgtcctgagcgacttgccggccgccgtcatcgccagctcgtatgccatctccatggaggaagctgcagagctcaa

SEQ ID NO: 72358 - DNA, 259 bp, Zea mays
  unsure (1)..(259): unsure at all n locations
ccaagcgaaccnactagcaacgacctaacaacaatggctaccaagatattagccctccttgcgcttcttgccctttttgtgagcgcaacaaatgcgttcattattccacaatgctcacttgctcctagtgccattattccacagttcctcccaccagttacttcaatggacttcgaacacctagctgtgcaagccaacatgcaacaacaagcgcttgcggcgagcgtcttacaacaaccaattgcccaattgcaacaac

SEQ ID NO: 72359 - DNA, 260 bp, Zea mays
gcgcacctttaatctcgcttgcattgaccacagaggcacaccggagcatccggcgaggacctgcacgcttgaaaccgacgacgaggccatatgctggggaattgcatattgtgtcaagggtggtccagaaaaagagctaaaagcaatgcagtacttggagagaagagagtgtgagtacgaccagatgatatccattgatttctacaaggaaggagatcccttgaaaccagctgtgacaggcgtcttagtgttcgtttcca

SEQ ID NO: 72360 - DNA, 262 bp, Zea mays
gaccaactagcaacatagaaagcacaatagtgtaccaacaatggcagccaaaatattttgcctccttatgctccttggtctttctgcaagtgctgctacggcgaccattttcccgcaatgctcgcaagctcctatagcttcccttcttcccccgtacctctcaccagcggtgtcttcggtatgtgaaaacccaattcttcaaccctacaggatccaacaggcaatcacagctggcatcttacctttatcacccttgttcctc

SEQ ID NO: 72361 - DNA, 262 bp, Zea mays
tagcaacatagaaagcacaatagtgtaccaacaatggcagccaaaatattttgcctccttatgctccttggtatttctgcaagtgctgctacggcgaccattttcccgcaatgctcacaagctcctatagcttcccttcttcccccgtacctctcaccagcggtgtcttcggtatgtgaaaacccaattcttcaaccctacaggatccaacaggcaatcgcagctggcatcttacctttatcacccttgttcctccaacaat

SEQ ID NO: 72362 - DNA, 265 bp, Zea mays; identical to SEQ ID NO: 69105

SEQ ID NO: 72363 - DNA, 259 bp, Zea mays
attcaaaaacacaccaagcgaagcgcactagcaacgacctaacaccaatggctaccaagatattagccctccttgcgcttcttgcccttttagtgagcgcaacaaatgcgttcattattccacagtgctcacttgctcctagtgccagtattccacagttcctcccaccagttacttcaatgggcttcgaacatccagccgtgcaagcctacaggctacaactagcgcttgcggcgagcgccttacaacaaccaattgc

SEQ ID NO: 72364 - DNA, 253 bp, Zea mays
gcgaacgcactagcaacgacctaacaacaatggctaccaagatattatccctctttgcgcttcttgccctttttgtgagcgcaacaaatgcgttcattattccacaatgctcacttgctcctagtgccattattccacagttcctccctccagttacttcaatgggctttgtccacccagctgtgcaagcctacaggctacaacaagcgcttgcggcgagcgtcttacaacaaccaattgcccaattacaaca

SEQ ID NO: 72365 - DNA, 255 bp, Zea mays
aaaattttattgtcacctaatgtttttaagttgtggtatgatgctgcttgccctttgaggccctgactcttgcctaattattttgttgcaccagattcctgtatttttcatacgtatggtttgccccagtataccatttttaagtacactactaagcatgcactgtggaccatttctcatgggggatttactgaagtggatattggtaagcattgtacagtttgttgttggcaaacggttctatgttgcggctta

SEQ ID NO: 72366 - DNA, 256 bp, Zea mays
gccccggcctcagcctcatccccagccacacccatgcccgtgccaacagccgcatccaagcccgtgccagctgcagggaacctgcggcgttggcagcaccccgatcctgggccagtgcgtcgagttcctgaggcatcagtgcagcccgacggcgacgccctactgctcgcctcagtgccagtcgttgcggcagcagtgttgccagcagctcaggcaggtggagccgcagcaccggtaccaggcgatcttcggcttg

SEQ ID NO: 72367 - DNA, 257 bp, Zea mays
ctcgagccgctcgagccggcattatcccagggaataccattttttcatgctggtgatgagatactacgatctaagtcgcttgatcgagattcatatgactctggtgattggtttaacaagattgattttacctatgaaacaaacaattggggtgttgggcttccaccaagagaaaagaacgaagggagctggcctttgatgaagccaagattggagaacccgtcgttcaaacctgcaaaacatgacattattgctgc

SEQ ID NO: 72368 - DNA, 260 bp, Zea mays
tagcaacatacatagtgaagtacactagcaacatcttagcaccaatggcagccaagatttttgccatccttgccctccttgctctttcagcaagcgttgctaccgcgactattattccacaatgctcacaacaatacctctctccggtgacagccgcgagatttgaatacccaactatacaatcctacaggctacaagaggccatcgcagcaagcatcttacggtcgttagcattgaccgtccaacaaccatatgcccta

SEQ ID NO: 72369 - DNA, 260 bp, Zea mays
caactagcaacatagaaagcacaatagtgtaccaacaatggcagccaaaatattttgcctccttatgctccttggtctttctgcaagtgctgctacggcgaccattttcccgcaatgctcgcaagctcctatagcttcccttcttcccccgtacctctcaccagcggtgtcttcggtatgtgaaaacccaattcttcaaccctacaggatccaacaggcaatcacagctggcatcttacctttatcacccttgttcctcc

SEQ ID NO: 72370 - DNA, 258 bp, Zea mays
gacaaacccagcagccttctaccaacaagcaacatagaaagtggaatacagtagtcttaatagagcaacaatggcggccaagatattttccatccttatgctccttgctctttctgcatgtgttgctaacgcgaccatttttcctcaatactcacaagctcctatagctgcccttcttcccccataccttccatcaatgaccgctttagtatgtgaaaacccagcccttcaaccctacaggatccagcaagcaatcgc

SEQ ID NO: 72371 - DNA, 257 bp, Zea mays
attttcagcattcaaaaacacaccaagcgaacgtcactagcaacgacctaacaccaatggctaccaagatattagccctccttgcgcttcttgcccttttagtgagcgcaacaaatgcgttcattattccacagtgctcacttgctcctagtgccagtattccacagttcctcccaccagttacttcaatgggcttcgaacatccagccgtgcaagcctacaggctacaactagcgcttgcggcgagcgccttacaa

SEQ ID NO: 72372 - DNA, 255 bp, Zea mays
  unsure (1)..(255): unsure at all n locations
aaacacaccaagcgaacgnactagcaacgacctaacaccaatggctaccaagatattagccctccttgcgcttcttgcccttttagtgagcgctacatatgcgttcattattccacagtgctcatttgctcctagtgccagtattccacagttcctcccaccagttacttcaatgggcttcgaacatccagccgtgcaagcctacaggctacaactagcgcttgcggcgagcgccttacaacaaccaattgccca

SEQ ID NO: 72373 - DNA, 256 bp, Zea mays
gcacaatagtgtaccaacaatggcagccaaaatattttgcttccttatgctccttggtctttctgcaagtgctgctaccgcaaccattttcccacaatgctcacaagctcctatagcttcctttcttcccccatacctctcaccagcggtgtcttcagtatgtgaaaacccaattcttcaaccctacaggatccaacaggcaatcgcagcaggcatcttacctttatcacccttgttcctccaacaaccgtcagcc

SEQ ID NO: 72374 - DNA, 255 bp, Zea mays
gggatgggctgttaccacggcaagttcggcttcgactgcttcagccacaagaagggagtcctgatccgcggctttggcggggaggcgaacgccaggtacccgccctacacgacggagaagcaaaagatcctgaggggcctcatcaacggcagcttcatcgccctcatccttgccctcctgggcttccccagggagaagcgttagatgctccggcctctttttggtttcggtacagcctttgtagtccctgttcgt

SEQ ID NO: 72375 - DNA, 257 bp, Zea mays
caactagcaacatagaaagcacaatagtgtaccaacaatggcagctaaaatattttgcctccttatgctccttggtgtttctgcaagtgctgctacggcgaccattttcccacaatgctcacaagctcctatagcttcccttcttcccccgtacctctcaccaacggtgtcttcggtatgtgaaaacccaattcttcaaccctacaggatccaacaggcaatcgcagctggcatcttacctttatcacccttgttcc

SEQ ID NO: 72376 - DNA, 254 bp, Zea mays
caaagataaggaactgtatcattgacatgaatgctaggattgggaagaacgtggtgatcacaaacagtaagggcatccaagaggctgatcacccggaagaagggtactacataaggtctggaatcgtggtgatcttgaagaatgcaaccatcaacgatgggtctgtcatatagatcggctgcgtttgcgtctacaaaacaagaacctacaatggtattgcatcgatggatcgtgtaaccttggtatggtaagag

SEQ ID NO: 72377 - DNA, 254 bp, Zea mays
attttgagcattcagaaacacacctagcgaacgcaactaacaacgacctaacaacaatggcttccaagacattatccctccttgcgcttcttgctctttttgtgagtgcaacaaatgcgttcattattccacaatgctcacttgctccgagtgccattattccacagttcctccctccagttacttcaatgggcttcgaacacccagctgtgcaagcctataggctacaacaagcgcttgcggcgatcgtctta

SEQ ID NO: 72378 - DNA, 256 bp, Zea mays
gcaacatagaaagcacaatagtgtaccaacaatggcagccaaaatattttgcttccttatgctccttggtctttctgcaagtgctgctaccgcaaccattttcccacaatgctcacaagctcctatagcttcctttcttcccccatacctctcaccagcggtgtcttcagtatgtgaaaacccaattcttcaaccctacaggatccaacaggcaatcgcagcaggcatcttacctttatcacccttgttcctccaa

SEQ ID NO: 72379 - DNA, 252 bp, Zea mays
ctcgagccgtgaaggatgcctatgatgctgctcatgagactgagaggaagcgtgcattatcagcacttctctcccaaacaaagcagcaagaacgaaaggacgccgagactttagcagaagcaaaacgtatcatggaatctcgtgctgctagcaaaaatgttgatgtagctgtaatgcctccgaactctgataatgctatggtacctgttgatggtgtatctccttcaagcagtactcatccatctttagcac

SEQ ID NO: 72380 - DNA, 248 bp, Zea mays
atccaggatctctcctggaagggccctgccaagaactgggagaacgtgctgctcagcctcggggtcgccggcgcgagccaggggtcgaaggcgaggagatcgcgccgctcgccaaggagaacgtggccgcgccctgaagagttcggcctgcagggcccctgatctcgcgcgtggtgcaaagatgttgggacatcttcttatatatgctgtttcgtttatgtgatatggacaagtatgtgtagctgctt

SEQ ID NO: 72381 - DNA, 251 bp, Zea mays
accagcggtgtcttcggtatgtgaaaacccaattcttcaaccctacaggatccaacaggcaatcgcagctggcatcttacctttatcacccttgttcctccaacaatcatcagccctattacagcagttacctttggtgcatttattggcacaaaacatcagggcacaacaactacaacaacttgtgctagcaaaccttgctgcctactctcagcaacagcagtttcttccattcaaccaactagctgcat

SEQ ID NO: 72382 - DNA, 254 bp, Zea mays
ctagcaacatagaaagcacaatagtgtaccaacaatggcagccaaaatattttgcctccttatgctccttggtatttctgcaagtgctgctacggcgaccattttcccacaatgctcacaagctcctatagcttcccttcttcccccgtacctctcaccagcggtgtcttcggtatgtgaaaacccaattcttcaaccctataggatccaacaggcaatcgcagctggcatcttacctttatcacccttgttcc

SEQ ID NO: 72383 - DNA, 271 bp, Zea mays
cagaaacacaccaagcgaagtacctagcaacgacttaaaacaatggctaccaagatattagccctccttgcgcttcttgccctttttgtgagcgcaacaaatgcgttcattattccacaatgctcacttgctcctagtgccattataccacagttcctccgaccagttacttcaatgggcttcgaacacctagctgtgcaagcctacaagctacaacaagcgcttgcggcgagcgtcttacaacaaccaattaaccaattgcaacaacaat

SEQ ID NO: 72384 - DNA, 276 bp, Zea mays
caacatagaaagcacaatagtgtaccaacaatggcagccaaatattttgcctccttatgctccttggtctttctgcaagtgctgctacggcgaccattttcccacaatgctcacaagctcctatagcttcccttcttcccccgtacctctcaccagcggtgtcttcggtatgtgaaaacccaattcttcaaccctataggatccaacaggcaatcgcagctggcatcttacctttatcacccttgttcctccaacaatcatcagccctattacaca

SEQ ID NO: 72385 - DNA, 273 bp, Zea mays
tcatgaattcctaaggcagcagtgcagccctttggtatgccttttctccaatcacgtatgatacaaccaagtagctgccaggtattgcagcaacaatgttgtcatgatcttaggcagattgagccacaatacattcaccaagcaatctacaacatggttcaatccataatccaggaggagcaacaacaacaaccatgtgagttatgtggatctcaacaagctactcaaagtgcggtggcaatcttgacagcagcacaatacctaccatcaatt

SEQ ID NO: 72386 - DNA, 276 bp, Zea mays
gctcgagctcgagccgctcgagccgctcgagcggtcagttccatattacacagttcctcccaccagttacttcagtgggcttcgaacacccagctgtgcaagcctataggctacaacaagcaattgcggcgagcgtcttacaacaaccaatttcccagttgcaacaacaatccttggcacatctaacaatacaaaccatcgcaacgcaacagcaacaacaattcctaccagcactgagccacctagccatggtgaaccctgccgcctacttgcaac

SEQ ID NO: 72387 - DNA, 266 bp, Zea mays
acttgctccaagttccattattacacagttcctcccacagttacttcaatgggcttcgaacacccagctgtgcaagcctataggctacaacaagcaattgcggcgagcgtcttacaacaaccaatttcccagttgcaacaacaatccttggcacatctaacaatacaaaccatcgcaacgcaacagcaacaacaattcctaccagcactgagccacctagccatggtgaaccctgccgcctacttgcaacagcagttgcttgcatc

SEQ ID NO: 72388 - DNA, 263 bp, Zea mays
attttgagcattcaaaaacacacaaagggaaggcactagcaacttcctaacaacaatggctaccaagatattagccctccttgcgctcctttccctttcagtgagcgcaacaactgcattcattattccacaatgctcacttgctcctaatgccattattccacagttcctcccatcagttacatcaatgggcatcgaacaccctattgtgcaagcctataggctacaacaagcgcttgcggcgagcgtcttacaacaacgtt

SEQ ID NO: 72389 - DNA, 264 bp, Zea mays
gtccattctaatcagtggtcatttagactttgcattggaaaagatggtgcaaaggttcctgtatcagaacttgttgggaagactgtccttgtttacttctcagcaaaatggtgcccaccatgccgtgccttcctgcccacacttgtcaaggagtacaacaagatcaaagagaagaacagtgattttgagatcgtcttcatctctagtgacgaggatcagagctcattcgatgattttttctctgaaatgccatggcttgctgta

SEQ ID NO: 72390 - DNA, 246 bp, Zea mays
  unsure (1)..(246): unsure at all n locations
cagaaacacaccaagcgaaggtactagcaacaactaacaacaatggctaccaagatattatccctccttgcgcttcttgcgctttttgcgagcgcaacaaatgcgtccattattccacaatgctcacttgctcctagttccattattccacagttcctcccaccagttacttcaatggccttcgaacacccagctgtgcaagcctataggctacaacaagggatgcaggncgacgtcttacaacaa

SEQ ID NO: 72391 - DNA, 269 bp, Zea mays
agcaacatagaaagcacaatagtgtaccaacaatggcagccaaaatattttgcttccttatgctccttggtctttctgcaagtgttgctaccgcaaccattttcccacaatgctcacaagctcctatagcttcccttcttcccccatacctctcaccagcggtgtcttcaatgtgtgaaaccccaattgttcaaccctacaggatccaacaggcaatcgcaacaggcatcttaccattatcacccttgttcctccaacaaccgtcagcc

SEQ ID NO: 72392 - DNA, 123 bp, Zea mays
agaccaactagcaacatagaaagcacaatagtgtaccaacaatggcagccaaaatattttgcctccttatgctccttggtctttctgcaagtgctgctacggcgaccattttcccgcaatgct

SEQ ID NO: 72393 - DNA, 269 bp, Zea mays
aagcaacatagaaagtggaatccagtagcaacacagagcaacaatggcgaccaagatattttccctccttatgctccttgctctttctgcatgtgttgctaacgcgacaattttccctcaatgctcacaagctcctatagcttcccttcttcccccataccttccatcaatgatagcttcagtatgtgaaaacccagctcttcagccctataggctccaacaagcaatcgcagcaagcaacatacctttatcacccttgttgtttcaca

SEQ ID NO: 72394 - DNA, 271 bp, Zea mays
gcaacatagaaagcacaatagtgtaccaacaatggcagctaaaatattttgcctccttatgctccttggtctttctgcaagtgctgctacggcgaccattttcccacaatgctcacaagctcctatagcttcccttcttcccccgtacctctcaccaacggtgtcttcggtatgtgaaaacccaattcttcaaccctacaggatccaacaggcaatcgcagctggcatcttacctttatcacccttgttcctccaacaatcatcagcctat

SEQ ID NO: 72395 - DNA, 273 bp, Zea mays
agcattcagaaacacaccaagcgaagcgcactagcaacgacctaacaacaatggctaccaagatattagccctccttgcgcttcttgccctttttgtgagcgcaacaaatgcgttcattattccacaatgctcacttgctcctagtgccattattccacagttcctcccaccagttacttcaatgggcttcgaacacctagctgtgcaagccaacatgcaacaacaagcgcttgcggcgagcgtcttacaacaaccaattgcccaattgcaca

SEQ ID NO: 72396 - DNA, 271 bp, Zea mays
cattacctgatagtcatctctcttgtattcttgaatttgatggtgcctctaaaggaaatccagggaaagccggtgctggagcaataataaggcaggtagatggttccgtgattgctcaactacgtgagggtctgggcattgcaaccaacaatgctgctgaatatcgtgcattgatcctagggctaacatatgcagccaagaaagggttcaagtatattcgtgctcaaggcgactctaagcttgtttgtaaccaggtccaagatatctggcg

SEQ ID NO: 72397 - DNA, 267 bp, Zea mays
  unsure (1)..(267): unsure at all n locations
gaggattaagcagcaaggccttgatatcactccgaagatcctcattgttaccaggctgttacctgatgctgctgggactacgtgcggtcagcggctggagaaggtcattggtactgagcacacagacatcattcgcgttccgttcagaaatgagaatggcatcctaccgnaagtggatctctncgttttgatgtctggccatacctggagacatacatgaggatgtttccagtgnaaataatgaaagaaatgcagccaagcctgact

SEQ ID NO: 72398 - DNA, 264 bp, Zea mays
ctcgagccgctcgagccggcattatccagggaataccattttttcatgctggtgatgagatactacgagctaagtcgcttgatcgagattcatatgactctggtgattggtttaacaagattgattttacctatgaaacaaacaattggggtgttgggcttccaccaagagaaaagaacgaagggagctggcctttgatgaagccaagattggagaacccgtcgttcaaacctgcaaaacatgacattattcgtgccttagcaa

SEQ ID NO: 72399 - DNA, 262 bp, Zea mays
tctcgagccgaatcggctcgagaagcaactagaaagtggaatccagtagcaacaacagagagacaatggcgaccaagatattttccctccttatgctccttgctctttctgcatgtgttgctaacgcgacaattttccctcaatgctcacaagctcctatagcttcccttcttcccccataccttccatcaatgatagcttcagtatgtgaaaacccagctcttcagccctataggctccaacaagcaatcgcagcaagcaa

SEQ ID NO: 72400 - DNA, 264 bp, Zea mays
agaccaactagcaacatagaaagcacatagtgtaccaacaatggcagctaaaatattttgcctccttatgctccttggtctttctgcaagtgctgctacggcgaccattttcccacaatgctcacaagctcctatagcttcccttcttcccccgtacctctcaccaacggtgtcttcggtatgtgaaaacccaattcttcaaccctacaggatccaacaggcaatcgcagctggcatcttacctttatcacccttgttcctcaa

SEQ ID NO: 72401 - DNA, 260 bp, Zea mays
ctgaaattcacagtgaaattgtgaaaaggatgtgttcaacagcttctatgagatgtggccaactaaatttcagaataaaacaaatggagtgactcccagacgttggatccggttttgtaatcctgcattaagtgcattaatttcaaagtggattggttctgatgactgggtgcttaatacagacaaactggcagaactgaagaagtttgctgataatgaagatctgcattcagagtggcgtgctgctaagaaggctaaca

SEQ ID NO: 72402 - DNA, 262 bp, Zea mays
gaccagcaagcaacatagaaagtagatccattagcaacaatagagcaacaatggcgaccaagatattttccctccttatgctccttgctctttctacatgtgttgctaacgcgacaattttccctcaatgctcacaagctcctatagcttcccttcttcccccataccttccatcaattatagcttcagtatgtgaaaacccagctcttcaaccatataggcttcaacaagcaatcgcagcaagcaacatacctttatcgcc

SEQ ID NO: 72403 - DNA, 264 bp, Zea mays
gttgctgcctacccccagcaatttctccattcaaccaactagcagcattgaactctgctgcttatttacagcagcaacaactactaccattcagccagctagctgatgtgagccctgctgccttcttgacacaacaacagttgttgccgttctacctgcacgctatgcctaacgctggcaccctcttacaactgcaacaattgctgccattcaaccaacttgctttgacaaactcaacagtgttctaccaacaacccatcatgg

SEQ ID NO: 72404 - DNA, 252 bp, Zea mays
ctcgagccgctagcaacatagatagcacaatagtgtaccaacaatggcagccaaaatattatgcctccttatgctccttggtatttctgcaagtgctgctacggcgaccattttcccgcaatgctcacaagctcctatagcttcccttcttcccccgtacctctcaccagcggtgtcttcggtatgtgaaaacccaattcttcaaccctataggatccaacaggcaatcgcagctggcatcttacctttatc

SEQ ID NO: 72405 - DNA, 259 bp, Zea mays
cgaggagaagatctacgggccgtcgctggaacggactacagggacaaccagctgcggttcagcctgctatgccaggcagcacttgaagctccaaggatcctgagcctcaacaacaacccatacttctccggaccatacggggaggacgtcgtgttcgtctgcaacgactggcacaccggccctctctcgtgctacctcaagagcaactaccagtcccacggcatctactagggacgcaagaccgctttctgcatccaaa

SEQ ID NO: 72406 - DNA, 102 bp, Zea mays
aaacctagcagtgttctaccacaacccatcattggtggtgccctcttttagatttcttatgagttatagttcaataataaagttttttgtctgatgtttgtg

SEQ ID NO: 72407 - DNA, 258 bp, Zea mays
ggcaagtgcgatttcgatctccagccacctttttttttgttctgttgtgtatctagtagttggaggagatatgcagtttgcacttgcattggacacgaactcaggtcctcaccagataagatcttgtgagggtgatgggattgacaggttggaaaaattaagtattgggggcagaaagcaggagaaagctttgagaaataggtgctttggtggtagagttgctgcaactacacaatgtattcttacctcagatgctgt

SEQ ID NO: 72408 - DNA, 268 bp, Zea mays
  unsure (1)..(268): unsure at all n locations
gcattcaaaaacacaccaagcgaaggcanctgagcaacgaccttgaacactcaatggctaccaagggtattagccctgccttgcgctgtcttgcccttttcagtgagcgcaacaaatgcgttcattattccacagtgctcacttgctcctagtgccagtattccacagttcctcccaccagttacttcaatgggcttcgaacatccagccgtgcaagcctacaggctacaactagcgcttgcggcgagcgccttacaacaaccaatgc

SEQ ID NO: 72409 - DNA, 258 bp, Zea mays
gcaaaccgtgcttccttcttgacacagcaacagttgctgcctttctaccagcagtttgcggctaaccccgcaaccctcttacaacaaccaattgcccaattgcaacaacaatccttggcacatctaaccctacaaaccattgcaacgcaacaacaacaacaacagtttctgccctcactgagccacctagccgtggtgaaccctgtcacctacttgcaacagcagctgcttgcatccaacccacttgctctggcgaac

SEQ ID NO: 72410 - DNA, 260 bp, Zea mays
gttgcggcacagtgttgccacccgtgccagctgcagggaacctgcggcgttggcagcaccccgatcctgggccagtgcgtcgagttcctgaggcatcagtgcagcccgacggcgacgccctactgctcgcctcagtgccagtcgttgcggcagcagtgttgccagcagctcaggcaggtggagccgcagcaccggtaccaggcgatcttcggcttggtcctccagtccatcctgcagcagcagccgcaaagcggccaggc

SEQ ID NO: 72411 - DNA, 252 bp, Zea mays
gagaccaacaagcacatagaaagtggaatccagtagcaacaatagagcaacaatggcgaccaagatattttccctccttatgctccttgctctttctacatgtgttgctaacgcgacaattttccctcaatgctcacaagctcctatagcttcccttcttcccccataccttccatcaattatagcttcaatatgtgaaaacccagctcttcaaccatataggcttcaacaagcaatcgcagcaagcaacta

SEQ ID NO: 72412 - DNA, 251 bp, Zea mays
  unsure (1)..(251): unsure at all n locations
cattggactgcttgtccctgttgaccattgggtattctgnaccatcgagccatngctgccangctgactcgcntccacagtcttcgcgaacgccttggngccaccttctcctcccatcccantgaactgatagcactctttnccaggtatgttcaccagggcaagggaatgcttcagcgccatcagctgcttgcggagtttgatgccctgtttgatatgacaggagaagtatgcaccctttgaagacatct

SEQ ID NO: 72413 - DNA, 254 bp, Zea mays
ctggtagaaaggcagcgtttgcggctaaccccgcaaccctcttacaactacaacaattgttgcactttgtccaacttgctttgacagaccgagcggcctcctaccaacaacacatcattggtggtgccctcttttagattgcttattagttgtaattcaataataaagttttttggatgatgtatggagccaaccagaaataagaagttacattttcacattaaaatctggaaatgtaacttcttatttctgtt

SEQ ID NO: 72414 - DNA, 256 bp, Zea mays
caaatgcgttcattatccacaatgctcacttgctccgagtgccattattccacagttcctccctccagttacttcaatgggcttcgaacacccagctgtgcaagcctataggctacaacaagcgcttgcggcgagcgtcttagaacaaccaattgcccaattacaacaacaatccttggcacatctaaccatacaaaccatcgcaacgcagcagcaacaagcactgagccacctagccgctcgctatgggcaagca

SEQ ID NO: 72415 - DNA, 253 bp, Zea mays
cacaatagtgtacaacaatggcagccaaaatattttgcctccttatgctccttggtctttctgcaagtgctgctacggcgaccattttcccgcaatgctcgcaagctcctatagcttcccttcttcccccgtacctctcaccagcggtgtcttcggtatgtgaaaacccaattcttcaaccctacaggatccaacaggcaatcgcagctggcatcttacctttatcacccttgttcctccaacaatcatcacc

SEQ ID NO: 72416 - DNA, 248 bp, Zea mays
agccacctagctaggtgaaccctgccgcctacttgcaagagcagctgcttgcatccaacccacttgctctggcgaacgtagttgcaaaccagcaacaacaacagctacaacagtttctgccaacgctcagtcaactagccatggtgaaccctgccgcctacgtacaacaacaacaactgctttcatctagcccgctcgctgtgggcaatgcacctacatacctgcaacaacaattgttgcaacagatt

SEQ ID NO: 72417 - DNA, 253 bp, Zea mays
attttcagcattcaaaacacaccaagcgaagcgcactagcaacgacctaacacgaatggctaccaagatattagccctccttgcgcttcttgcccttttagtgagcgcaacaaatgcgttcattattccacagtgctcacttgctcctagtgccagtattccacagttcctcccaccagttacttcaatgggcttcgaacatccagccgtgcaagcctacaggctacaactagcgcttgcggcgagcgcctac

SEQ ID NO: 72418 - DNA, 254 bp, Zea mays
gcaacatagaaagccaatagtgtaccaacaatggcagccaaaatattttgcctccttatgctccttggtctttctgcaagtgctgctacggcgaccattttcccgcaatgctcgcaagctcctatagcttcccttcttcccccgtacctctcaccagcggtgtcttcggtatgtgaaaacccaattcttcaaccctacaggatccaacaggcaatcgcagctggcatcttacctttatcacccttgttcctcaa

SEQ ID NO: 72419 - DNA, 247 bp, Zea mays
attttgagattcagaaacacaccaagcgaagcgcactagcaacaacctaacaacaatggctaccaagatattatccctccttgcgcttcttgcgctttttgcgagcgcaacaaatgcgtccattattccacaatgctcacttgctcctagttccattattccacagttcctcccaccagttacttcaatggccttcgaacacccagctgtgcaagcctataggctacaacaagcgatggcgagcgct

SEQ ID NO: 72420 - DNA, 249 bp, Zea mays
agcaacgactaacaacaatggcttccaagacattatccctccttgcgcttcttgccctttttgtgagtgcaacaaatgcgttcattattccacaatgctcacttgctccgagtgccattattccacagttcctccctccagttacttcaatgggcttcgaacacccagctgtgcaagcctataggctacaacaagcgcttgcggcgagcgtcttagaacaaccaattgcccaattacaacaacaatctt

SEQ ID NO: 72421 - DNA, 243 bp, Zea mays
cgagttgcaaccatggacatggctttggcgtctaaagcttcccctccgccatggaatgccaccgcggcggagcagccaattccaaagcgtgacaaagccgctgcaaatgattcaacatacctcaatcctcaagctcatgatagtgttcttggaatcattctgggaggtggtgctgggactagattgtaccccttgacaaagaagcgtgccaagcctgcagtgccattgggtgcaaactataga

SEQ ID NO: 72422 - DNA, 252 bp, Zea mays
ccggtgactttggctacaatctgagcaaagtcccactcctatgtgacaatgagagtgctatccgaatagcggaaaatcctgttgagcacagccgcacaaagcacattgacatccggcatcactttttgagagaccaccagcaaaagggagatatcgaagtgtttcatgttagcaccgagaaccagctagccgatatcttcactaagcctttagatgaaaagaccttttgcaggctgcatagtgagctaatgt

SEQ ID NO: 72423 - DNA, 244 bp, Zea mays
tgagacaactagcaacatagaaagcacaatagtgtaccaacaatggcagccaaaatattttgcctccttatgctccttggtctttctgcaagtgctgctacggcgaccattttcccgcaatgctcgcaagctcctatagcttcccttcttcccccgtacctctcaccagcggtgtcttcggtatgtgaaaacccaattcttcaaccctacaggatccaacaggcaatcacagctggcatcttac

SEQ ID NO: 72424 - DNA, 246 bp, Zea mays
attgagccaactagcaacatagaaagcacaatagtgtaccaacaatggcagccaaaatattttgcctccttatgctccttggtctttctgcaagtgctgctacggcgaccattttcccacaatgctcacaagctcctatagcttcccttcttcccccgtacctctcaccagcggtgtcttcggtatgtgaaaacccaattcttcaaccctataggatccaacaggcaatcgcagctggcatcttac

SEQ ID NO: 72425 - DNA, 249 bp, Zea mays
gcaacatagaaagcacaatagtgtaccaacaatggcagccaaaatattttgcctccttatgctccttggtctttctgcaagtgctgctacggcgaccattttcccgcaatgctcgcaagctcctatagcttcccttcttcccccgtacctctcaccagcggtgtcttcggtatgtgaaaacccaattcttcaaccctacaggatccaacaggcaatcacagctggcatcttacctttatcaccctttct

SEQ ID NO: 72426 - DNA, 246 bp, Zea mays
agaaagccaatagtgtaccaacaatggcagccaaaatattttgcctccttatgctccttggtctttctgcaagtgctgctacggcgaccattttcccacaatgctcacaagctcctatagcttcccttcttcccccgtacctctcaccagcggtgtcttcggtatgtgaaaacccaattcttcaaccctataggatccaacaggcaatcgcagctggcatcttacctttatcacccttgttcctcc

SEQ ID NO: 72427 - DNA, 267 bp, Zea mays
ggcacaacaactacaacaactcgtgctagcaaaccttgctgcctactctcagcaacaacagtttctgccattcaaccaactagctgcattgaactctgctgcttatttgcagcaacaacaactactaccattcagccagctagctgctgcctacccccggcaatttcttccattcaaccaactggcagcattgaactctcatgcttatgtacaacaacaacaactactaccattcagccagctagctgctgtgagccctgctgcctt

SEQ ID NO: 72428 - DNA, 268 bp, Zea mays
ctagcacttcatgacttagggtacaaggcatctggtattagattagattctggtgatctggcctatttgtccattgaagcacgaaaagtgtttagtgcagtagagaaggaatataatgtacctggttttgcaaagatgctcattactgctagcaacgacctgaatgaagaaacaattgatgccctcaacaaacagggtcatgaggttgatgcctttggaattggaacttaccttgtgacgtgttattcccaggctgctcttggctgtg

SEQ ID NO: 72429 - DNA, 269 bp, Zea mays
tatcaacgacgatccacgagtagccctgaacacttactcatggacaaagatggctagcctcctcttggtcgactcgccagcaggtgtgggctactcgtacgctgatcatgaagatgactacaccacagatgacacaagcagggtagcggacctgtatgactttctgtcaaagtggttcgctgaatacgcagaatttctgtcgaatcctttctacgtagctggatgctcgtacagtggagtgatagtacctgtacttgcacacgaaatta

SEQ ID NO: 72430 - DNA, 267 bp, Zea mays
cagaaacacacctagcgaacgcactagcaacgacctaacaacaatggctaccaagatattatccctctttgcgcttcttgccctttttgtgagcgcaacaaatgcgttcattattccacaatgctcacttgctcctagtgccattattccacagttcctccctccagttacttcaatgggcttcgaacacccagctgtgcaagcctacaggctacaacaagcgcttgcggcgagcgtcttacaacaaccaattgcccaattacaaca

SEQ ID NO: 72431 - DNA, 267 bp, Zea mays
ccgcagcaccggtaccaggcgatcttcggcttggtcctccagtccatcctgcagcagcagccgcaaaaggccaggtcgcggggctgttggcggcgcagatagcgcacaactgacggcgatgtgcggcctgcagcagccgactccatgcccctacgctactgccggcggtgtcccccactgaagaaactatgtgctgtagtatagccgctggctagctagctagttgagtcatttagcggcgatgattgtataataatgtgtcacgca

SEQ ID NO: 72432 - DNA, 267 bp, Zea mays
attttcagcattcaaaaacacaccaagcgaagccactagcaacgacctaacaccaatggctaccaagatattagccctccttgcgcttcttgcccttttagtgagcgcatcaaatgcgttcattattccacagtgctcacttgctcctagtgccagtattccacagttcctcccaccagttacttcaatgggcttcgaacatccagccgtgcaagcctacaggctacaactagcgcttgcggcgagcgacttacaacaaccaattgc

SEQ ID NO: 72433 - DNA, 87 bp, Zea mays
cttctagattttttatgatttatactgtaataataaagttctcatgctgatatgtgcgacctctcagtaataaagtattagagatct

SEQ ID NO: 72434 - DNA, 271 bp, Zea mays
agaaagtggaatccagtagcaacaatagagcaacaatggcgaccaagatattttccctccttatgctccttgctctttctacatgtgttgctaacgcgacaattttccctcaatgctcacaagctcctatagcttcccttcttcccccataccttccatcaattatagcttcaatatgtgaaaacccagctcttcaaccatataggcttcaacaagcaatcgcagcaagcaacatacctttatcgcccttgttgtttcaacaatcgccagc

SEQ ID NO: 72435 - DNA, 273 bp, Zea mays
  unsure (1)..(273): unsure at all n locations
ggcattcccaagggaaatcagttatnctggtgagggcggagaccagccctgaggacgtcggcggcatgcacgcggctgcaggaatcctcacagaaagaggtggcatgacctcccatgccgccgtggtcgcacgcgggtggggaaaatgctgtgtctcgggatgctctgggattcgtgtaaatgacgcagagaaggttgtgaagattggaggcaatgtgctgcgcgaaggtgagtggctatcgctgaatggatcgaccggcgaatgatcctcgg

SEQ ID NO: 72436 - DNA, 275 bp, Zea mays
  unsure (1)..(275): unsure at all n locations
ggttgctttcttcgccaagactgggctggattacgtttcttgctcccctttcagggtcccgatcgctaggctagctgcagctcaggtgcttgtctgaggggctgcctcctcgttggcagcctgctgttggtgcatctggtgattaataatactactatgacagagccatatgctctgtgaagagtattagtagcagcgctcataaaagctacagttccatctatnttctcagctatgtaaaacttccaaactgttcatgcttanaactgagggtt

SEQ ID NO: 72437 - DNA, 267 bp, Zea mays
tagcaacatagaaagcacaatagtgtaccaacgatggcagccaaaatattttgcctccttatgctccttggtctttctgcaagtgctgctacggcgaccattttcccgcaatgctcgcaagctcctatagcttcccttcttcccccgtacctctcaccagcggtgtcttcggtatgtgaaaaccacattcttcaaccctacaggatccaacaggcaatcacagctggcatcttacctttatcacccttgttcctccaacaatcatca

SEQ ID NO: 72438 - DNA, 264 bp, Zea mays
  unsure (1)..(264): unsure at all n locations
gggatgctgagatagagtgctcgtatgggtggatagagtgtgtgggtattgctgatagatctgcatatgatttgaaagctcacactgacaaaagcggtgtcccacttgttgctcatgaaaaattctccaagcctagagaggttaggaanattgtcatagttccctcgaagaaagacctggggctggcttttaagggcaaccaaaagatggtcctggaagcattggaggctatgagtgagaaggaagcatttgagatgaaagctg

SEQ ID NO: 72439 - DNA, 265 bp, Zea mays
cccttcttcccccataccttccatcaattatagcttcagtatgtgaaaacccagctcttcaaccatataggcttcaacaagcaatcgcagcaagcaacatacctttatcgcccttgttgtttcaacaatcaccagccctatctttggtgcagtcattggtacaaaccatcagggcacaacagctgcagcaactcgtgctacctgtgatcaaccaagtagctctggcaaacctttctccctactctcagcaacaacaatttcttcc

SEQ ID NO: 72440 - DNA, 268 bp, Zea mays
aagcaacatagaaagtggaatccagtagcaacaatagagcaacaatggcgaccaagatactttccctccttatgctccttgctctttctgcatgtgttgctaacgcgacaattttccctcaatgctcacaagctcctatagcttcccttcttcccccataccttccatcaatgatagcttcagtatgtgaaaacccagctcttcaaccctataggctccaacaagcaatcgcagcaagcaacatacctttatcacccttgtttcaaca

SEQ ID NO: 72441 - DNA, 265 bp, Zea mays
cgcggtctgctcgttcgatctgtgcagcagatctgaggtcccgggcgaccgtgaagcagcttcaatcgtcggcatggcgctcgtattgcatagtggggctggaaacaagaatgccttcaaagcacttattgctgcagaatacagtgggatcaaggttgagttgaccaaggattttgagatgggtgtctccaacaagacccctgagtttcttaagatgaacccccttgggaaggttcctgttctggagactcctgatggccctgtt

SEQ ID NO: 72442 - DNA, 269 bp, Zea mays
gagaccaacaagcaacatagaaagtggaatacagtagcaacaatagagcaacaatggcggccaagatattttccatccttatgctccttgctctttctgcatgtgttgctaacgcgaccatttttcctcaatactcacaagctcctatagctgcccttcttcccccataccttccatcaatgaccgcttcagtttgtgaaaacccagcccttcaaccctacaggctccaacaagcaatcgcaacaagcaacttacctttatcacccctg

SEQ ID NO: 72443 - DNA, 266 bp, Zea mays
ctcgagccgattttgagcattcagaaacactcctagcgaagcgcactagcaacgacctaacaacaatggcttccaagacattatccctccttgcgcttcttgccctttttgtgagtgcaacaaatgcgttcattattccacaatgctcacttgctccgagtgccattattccacagttcctccctccagttacttcaatgggcttcgaacacccagctgtgcaagcctataggctacaacaagcgcttgcggcgagcgtcttagaa

SEQ ID NO: 72444 - DNA, 269 bp, Zea mays
ctacatataaagtggaatccagtagtaacaatagagcaacaatggcgaccaagatactttccctccttatgctccttgctctatctgcatgtgttgctaacgcgacaattttccctcaatgctcacaagctcctatagcttcccttcttcccccataccttccatcaatgatagcttcagtatgtgataactcagctcttcaaccctataggctccaacatgcaatcgcagctagcaacatacctttatcaccctggtttcaacaatcg

SEQ ID NO: 72445 - DNA, 268 bp, Zea mays
agcaagcaacatagaaagtagaatccattagcaacaatagagcaacaatggcgaccaagatattttccctccttatgctccttgctctttctacatgtgttgctaacgcgacaattttccctcaatgctcacaagctcctatagcttcccttcttcccccataccttccatcaattatagcttcagtatgtgaaaacccagctcttcaaccatataggcttcaacaagcaatcgcagcaagcaacatacctttatcgcccttgttgtt

SEQ ID NO: 72446 - DNA, 269 bp, Zea mays
cttgagcattcagaaacacacctagcgaacgcactagcaacgacctaacaacaatggcttccaagacattatccctccttgcgcttcttgccctttttgtgagtgcaacaaatgcgttcattattccacaatgctcacttgctccgagtgccattattccacagttcctccctccagttacttcaatgggcttcgaacacccagctgtgcaagcctataggctacaacaagcgcttgcggcgagcgtcttagaacaaccaattgcccaa

SEQ ID NO: 72447 - DNA, 273 bp, Zea mays
attgagaccaactagcaacatagaaagcacaatagtgtaccaacaatggcagccaaaatattttgcctccttatgctccttggtctttctgcaagtgctgctacggcgaccattttcccgcaatgctcgcaagctcctatagcttcccttcttcccccgtacctctcaccagcggtgtcttcggtatgtgaaaacccaattcttcaaccctacaggatccaacaggcaatcacagctggcatcttacctttatcacccttgttcctccaacaa

SEQ ID NO: 72448 - DNA, 263 bp, Zea mays
caggagcattggagctgactcaaaagattgcaaaagatgccatgactcctatatctgaaaccttctcacttgacataaatgctaagctggacttacacacaatgggtatgataatgactagagggcatagtcgtgttcctatatactctgggattccaagcaatattattggccttatattggtaaaaaacttgattacttgccgagctgaggatgaagtgcccattcgtaatgttactatcagaaaaattccaaggctcatc

SEQ ID NO: 72449 - DNA, 265 bp, Zea mays
ctcgagccgctcgagccgaatcggctcgagatagaaagcacaatattgtaccaataatggacagccaaaacattttgcctcattatgctccttggtcactctgcaagtgctgctacggcgagcattttcccgcaatgctcacaagctcctatagcttcccttcttcccccatacctctcaccagcgatgtcttcagtatgtgaaaatccaattcttctaccctacaggatccaacaggcaatcgcagcaggcatcttacctttat

SEQ ID NO: 72450 - DNA, 266 bp, Zea mays
cagcaagcgttgctaccgcgactattattccacaatgctcacaacaatacctctctccggtgacagccgcgagatttgaatacccaactatacaatcctacaggctacaagaggccatcgcagcaagcatcttacggtcgttagcattgaccgtccaacaaccatatgccctattgcaacaaccatccttaatgaatctatatctccaaagaatcgcagcacaacaactacaacaacagttgcttccaacaatcaatcaagtagtt

SEQ ID NO: 72451 - DNA, 264 bp, Zea mays
ccacttgctctggcaaacgtagttgcaaaccagccacaacaacagctgcaacagtttctgccagcgctcagtcaactagccatggtgaaccctgccgcctacctacaacagcaacaactgctttcatctagcccgctcgctgtggccaatgcacctacatacctgcaacaacaattgttgcgacagattgtaccagctctgactcagctagttgtggcaaaccctgctgcctacttgcaacagctgcttccattcaaccaactg

SEQ ID NO: 72452 - DNA, 266 bp, Zea mays
cgaagaaaaggttcagagaataatacataatctgaagaaagctcaaacccatcagaagagttatgcagacaaacgacgaatgcccatatattttctagtgggagattacgtttatctaaaggtctccccaatgaagggggtatcgcgtttcagggttaaaggaaagcttgcaccccggtacattggtcgattccctatacttgagcaatgtggaccagtggcataccgactccaattacccggaactttgtctgctgtacataatg

SEQ ID NO: 72453 - DNA, 265 bp, Zea mays
cagcaactgacggcgatgtgcggcctgcagcagccgactccatgcccctacgctgctgccggcggtgtcccccactgaagaaactatgtgctgtagtatagccgctggctagctagctagttgagtcatttagcggcgatgcttgagtaataatgtgtcacgcatcaccatgggtggcagtgtcagtgtgagcaatgacctgaatgaacaattgaaatgataagagaaaagtattgttccaaaaaaaaagcgtctaacaaaaggg

SEQ ID NO: 72454 - DNA, 267 bp, Zea mays
agatcttccatggacgacattgatgacgacggtgatgacgacgacgatttggatatgagggatcccactcctgagcgagacgagctcgatgaagagattgttgagtctgatcttgagctcgaaggagaaattgtacagtctgaccatgatgacccaccacagaagatgggaaatccttcagtgagagtgactgaggaaaaccgtgatgcttcccaagaagcaaaaggcaaggctatggaagcaatttctgaaggaaaacttgaagat

SEQ ID NO: 72455 - DNA, 267 bp, Zea mays
caacaatcgccagccctatctttggtgcagtcattggtacaaaccatcaaggcacagcagctgcagcaactcgtgctacctgtgatcaaccaagtagctctggcaaacctttctccctactatcagcaacaacaatttcttccattcaaccaactatctacactgaaccctgctgcttctgtgcagcaacaactattaccattcagccagctagctactgcctactctcatcaacaacaacttcttccatttaaccaattggccgca

SEQ ID NO: 72456 - DNA, 267 bp, Zea mays
aagcaacatagaaagtggaatccagtagcaacaatagagcaacaatggcgaccaagatattttccctccttatgctccttgctctttctacatgtgttgctaacgcgacaattttccctcaatgctcacaagctcctatagcttcccttcttcccccataccttccatcaattatagcttcaatatgtgaaaacccagctcttcaaccatataggcttcaacaagcaatcgcagcaagcaacatacctttatcgcccttgttgtttc

SEQ ID NO: 72457 - DNA, 271 bp, Zea mays
tctcgagccgattcggctcgatgcagcccgacggcgacgccctaatgctcgcctcagtgccactcgttgcggcagcagtgtagccagcagctcaggcaggtggagccgcagcaccggtaccaggcgatcttcggcttggtcctccagtccatcctgcagcagcagccgcaaagcgaccaggtcgcggggctgttggcggcgcagatagcgcacaactgacggcgatgtgcggcctgcagcagccgactcgatgcacctacgctgctgccgg

SEQ ID NO: 72458 - DNA, 278 bp, Zea mays
  unsure (1)..(278): unsure at all n locations
gctngngcannancgccgtanngatcgccgtggacatggttaacnagggncttgttgancgccgtgcggcgatcaagatggtaganccaggccacctggaccagcttctccatcctcagtttnanaacccatcggcgtacaaggaccnagtcattgccacgggcctaccggcgtcacctggggccgctgtgggccaggttgtattcactgctgaggacgctgaaacatngcattcccaagggacatcngntattctggtgagggcggnnaccagccct

SEQ ID NO: 72459 - DNA, 260 bp, Zea mays
ctgcattgaactctgctgcttatttgcaacaacaattaccattcagccagctagttgctgcctacccccagcaatttcttccattcaaccaactagcagcattgaactctgctgcttatttacagcagcaacaactactaccattcagccagctagctgatgtgagccctgctgccttcttgacacaacaacagttgttgccgttctacctgcacgctatgcctaacgctggcaccctcttacaactgcaacaattgctg

SEQ ID NO: 72460 - DNA, 261 bp, Zea mays
tggattttgatctgatatcaaaatccatcgataaggcaaagaacttgtttgaggaaggaggcgattgggagaggaagaacagattgacagtatatgaaggcttgtactgcatggcaaccagaaacttcaagaaagctgccagcttatttttagactcgatttcgactttcacaacttatgagatattcccatatgatacgttcatcttctatacagtcctcacaagtgtcatcacattggatcgtgtatctctgaaacaaa

SEQ ID NO: 72461 - DNA, 264 bp, Zea mays
attgagaccaactagcaacatagaaagcacaatagtgtaccaacaatggcagccaaaatattttgcctccttatgctccttggtctttctgcaagtgctgctacggcgaccattttcccacaatgctcacaagctcctatagcttcccttcttcccccgtacctctcaccagcggtgtcttcggtatgtgaaaacccaattcttcaaccctataggatccaacaggcaatcgcagctggcatcttacctttatcacccttgttc

SEQ ID NO: 72462 - DNA, 262 bp, Zea mays
attgagaccaactagcaacatagaaagcacaatagtgtaccaacaatggcagccaaaatattttgcttccttatgctccttggtctttctgcaagtcttgctaccgcaaccattttcccacaatgctcacaagctcctatagcttcccttcttcccccatacctctcaccagcggtgtcttcaatgtgtgaaaccccaattgttcaaccctacaggatccaacaggcaatcgcaacaggcatcttaccattatcacccttgt

SEQ ID NO: 72463 - DNA, 261 bp, Zea mays
cggctcgagaaacacaccaagcgaacacattagcaacaacctaacaacaatggctaccaagatattatccctccttgcgcttcttgcgctttttgcgagcgcaacaaatgcgttcattattccacaatgctcacttgctccaagttccattattacacagttcctcccaccagttacttcaatgggcttcgaacacccagctgtgcaagcctataggctacaacaagcaattgcggcgagcgtcttacaacaaccaatttc

SEQ ID NO: 72464 - DNA, 263 bp, Zea mays
cattgattgagcattcagaaacacacctagcgaaggcaactagcaacgacctaacaacaatggcttccaagacattatccctccttgtgcttcttgcgctttttgtgagtgcaacatatgcgttcattattccacaatgctcacttgctccgagtgccattattccacagttcctccctccagttacttctatgggcttcgaacacccagctgtgcaaggctataggctacaacaagcgcttgcggcgagcgtcttagaacaa

SEQ ID NO: 72465 - DNA, 262 bp, Zea mays
cagaaacacaccaagcgaagccactagcaacgacctaacaacaatggctaccaagatattagccctccttgcgcttcttgccctttttgtgagcgcaacaaatgcgttcattattccacaatgctcacttgctcctagtgccattattccacagttcctcccaccagttacttcaatgggcttcgaacacctagctgtgcaagccaacatgcaacaacaagcgcttgcggcgagcgtcttacaacaaccaattgcccaattg

SEQ ID NO: 72466 - DNA, 266 bp, Zea mays
attgatacgaactagcaacatacatagtgaagtacactagcaacatcttagcaccaatggcagccaagatgtgtgccatccttgccctccttgctctttcagcaagcgttgctaccgcgactattattccacaatgctcacaacaatacctctctccggtgacagccgcgagattcgaatacccaactatacaatcctacaggctacaagaggccatcgcagcaagcatcttacggtcgttagcattgaccgtccaacaaccatat

SEQ ID NO: 72467 - DNA, 267 bp, Zea mays
cggctcgagcctatagcttcccttcttcccccataccttccatcaattatagcttcaatatgtacaaacccagctcttcaaccatataggcttcaacaagcaatcgcagcaagcaacatacctttatcgcccttgttgtttcaacaatcgccagccctatctttggtgcagtcattggtacaaaccatcagggcacaacagctgcagcaactcgtgctacctctgatcaaccaagtagctctggcaaacctttctccctactctcag

SEQ ID NO: 72468 - DNA, 261 bp, Zea mays
tatcaattggaatctagtagcatatatagagcaacaatggcgaccaagatattttccctccttatgctccttgctcgctatacatgtgttgctaacgcgacaattttccctcaatgctcacaagctcctatagcttcccttcttcccctataccttccatcaattatagcttcaatatgtgaaaacccagctcttcaaccatataggcttcaacaagcaatcgcaattagcaacatacctttatcgcccttgttgtttcaa

SEQ ID NO: 72469 - DNA, 260 bp, Zea mays
gaccaacaagcaacatagaaagtggaatccagtagcaacaatagagcaacaatggcgaccaagatactttccctccttatgctccttgctctttctgcatgtgttgctaacgcgacaattttccctcaatgctcacaacctcctatagcttcccttcttcccccataccttccatcaatgatagcttcagtatgtgaaaacccagctcttcaaccctataggctccaacaagcaatcgcagcaagcaacatacctttatc

SEQ ID NO: 72470 - DNA, 238 bp, Zea mays
  unsure (1)..(238): unsure at all n locations
cttcagaaatgagaatggcatcctaccgcaagtggatctctacttttgatgtctggccatanctggagacatacactgaggatgtttccagtgaaataatgaaagaaatgcaggccaagcctgaccttatcattggcaactacagcgatggcaaccgngtcgccactctgctcgcgcacaagttgggagtcactcagtgtaccatcgctcatgccttggagaaaaccaaataccccaa

SEQ ID NO: 72471 - DNA, 261 bp, Zea mays
ggggactggagagagcatcaatgagaaggaccgctgcccagggtgcaagggtgagaaggtcgttcaagagaagaaggttcttgaggttcatgttgagaaggggatgcaacacaaccagaagatcaccttccctggtgaagctgatgaagcgcctgatactgtcactggagacattgtattcgtcctccagcagatggatcactccaaattcaaaagaaagggtgaagatctcttctatgagcacaccttgtctctgaccga

SEQ ID NO: 72472 - DNA, 261 bp, Zea mays
acggcccgcactggcccctgccgccgttcggcgagtcgcgcggcccctacagcctcctggaccagcggcccagcatcgccaaccagcacgggcagctctacgaggccgacgcgcgcacttccacgacctcgccgagcacgacgtcagcgtctccttcgccaacatcaccgcggggtccatgagcgcgccattgttcaacacccgttcgttcaagatcgcctacgtgccgaacggcaagggctacgccgagatcgtgtgccc

SEQ ID NO: 72473 - DNA, 259 bp, Zea mays
ctgaatcctccgcaactcgccgccgccgggaccgaccgacccgatcctatcgatcgaggatgtcgtacgcctacctcttcaagtacatcatcatcggcgacacaggcgtggggaagtcgtgcctgctgctgcagttcacggacaagcgcttccagcccgtgcacgacctcaccatcggcgtcgaattcggcgcccgcatgatcaccattgaaaataagcccatcaagctccagatttgggacacggctggccaagaatc

SEQ ID NO: 72474 - DNA, 259 bp, Zea mays; identical to SEQ ID NO: 69423

SEQ ID NO: 72475 - DNA, 260 bp, Zea mays
gcgtgctgcggccagggccgcgtcaacggcatggggccctgcaccatggtgtccagcctctgcgccgaccgcgacacctacgtgttctgggacgccttccaccccacggagcgcgccaaccgcctcatcgtgcagcagttcatgtccggctccaccgactacatcacgcccatgaacctcagcaccgtcctcgccgtcgacctccagaagcagcagctgcgtacgtgacgtgatgtcgtcatccgcttcatcagctgcct

SEQ ID NO: 72476 - DNA, 259 bp, Zea mays
attttgagcattcagaaacacaccaagcgaacgcactagcaacaacctaacaacaatggctaccaagatattatccctccttgcgcttcttgcgctttttgcgagcgcaacaaatgcgtccattattccacaatgctcacttgctcctagttccattattccacagttcctcccaccagttacttcaatggccttcgaacacccagctgtgcaagcctataggctacaacaagcgattgcggcgagcgtcttacaacaa

SEQ ID NO: 72477 - DNA, 263 bp, Zea mays
attcaaaaaccaccaagcgaagccactagcaacgacctaacaccaatggctaccaagatattagccctccttgcgcttcttgcccttttagtgagcgcaacaaatgcgttcattattccacagtgctcacttgctcctagtgccattattccacagttcctcccaccagttacttaaatgggcttcgaacatccagccgtgcaagcctacaggctacaactagcgcttgcggcgagcgccttacaacaaccaattgcccaatt

SEQ ID NO: 72478 - DNA, 264 bp, Zea mays
taattgcaacagtttctgccagcgctcagtcaactagccatggtgaaccctgccgcctacctacaacagcaacaactgctttcatctagccctctcgttgtgggtaatgcacctacatacctgcaacaacaattgctgcaacagattgtaccagctctgactcagctagctgtggcaaaccctgctgcctacttgcaacagctgcttccattcaaccaactgactgtgtcgaactctgctgcgtacctacaacagcgacaacag

SEQ ID NO: 72479 - DNA, 267 bp, Zea mays
gtaatccatcaaccatattattgagaccaacaagcaacatagaaagtggaatccagtagcaacaacagagcaacaatggcgaccaagatattttccctccttatgctccttgctctttctgcatgtgttgctaacgcgacaattttccctcaatgctcacaagctcctatagcttcccttcttcccccataccttccatcaatgatagcttcagtatgtgaaaacccagctcttcagccctataggctccaacaagcaatcgcagca

SEQ ID NO: 72480 - DNA, 259 bp, Zea mays
cggctcgagccagcaagcaacatagaaagtagaatccattagcaacaatagagcaacaatggcgaacaagatattttccctccttatgctccttgctctttctacatgtgttgctaacgcgacaattttccctcaatgctcacaagctcctatagcttcccttcttcccccataccttccatcaattatagcttcagtatgtgaaaacccagctcttcaaccatataggcttcaacaagcaatcgcagcaagcaacata

SEQ ID NO: 72481 - DNA, 260 bp, Zea mays
gcaacatagaaagtggaatacagtagcaacaatagagcaacaatggcggccaagatattttccatccttatgctccttgctctttctgcatgtgttgctaacgcgaccatttttcctcaatactcacaagctcctatagctgcccttcttcccccataccttccatcaatgaccgcttcagcgtgtgaaaacccagcccttcaaccctacaggctccaacaagcaatcgcaacaagcaacttacctttatcacccctgtt

SEQ ID NO: 72482 - DNA, 257 bp, Zea mays
aaccgaagatacaaggcacagagaacacctcaggagatgagagaagcgagaaaattgttcctctgattgatagcgaactgtacaatcgctctgattttataactgagtacaaggatgccaaattctttgtaataaagtcctacaccgaggaccatgtacataggagcattaagtataaagtttgggccagcacagccagcgggaacaggaagctggattctgcttaccatgcagccaaagagaaagaagagcattgc

SEQ ID NO: 72483 - DNA, 257 bp, Zea mays
gaccaactagcaacatagaaagcacaatagtgtaccaacaatggcagccaaaatattttgcctccttatgctccttggtctttctgcaagtgctgctacggcgaccattttcccgcaatgctcgcaagctcctatagcttcccttcttcccccgtacctctcaccagcggtgtcttcggtatgtgaaaacccaattcttcaaccctacaggatccaacaggcaatcgcagctggcatcttacctttatcacccttgt

SEQ ID NO: 72484 - DNA, 258 bp, Zea mays
cattattccacaatgctcacatttgagacgctcacttattgggcaagaagcgcaaagagggataatatcttggtagccattgttgttaggtcgttgcgcttcttgccctttttgtgagcggaacagatgcgttcattattccacaatgctcacttgctcctagtgccatgattccacagttcctccctccagttacttcaatgggcttcaaaagaccagctgtgcaagcctacaggctacaacaagcgcttgcggcga

SEQ ID NO: 72485 - DNA, 259 bp, Zea mays
cggctcgagacacaccaagcgaactacctagcaacgacttaacaacaatggctaccaagatattagccctccttgcgcttcttgccctttttgtgagcgcaacaaatgcgttcattattccacaatgctcacttgctcctagtgccattataccacagttcctccgaccagttacttcaatgggcttcgaacacctagctgtgcaagcctacaagctacaacaagcgcttgcggcgagcgtcttacaacaaccaattaa

SEQ ID NO: 72486 - DNA, 259 bp, Zea mays
ccaactagcaacatagaaagcacaatagtgtaccaacaatggcagccaaaatattttgcctccttatgctccttggtctttctgcaagtgctgctacggcgaccattttcccgcaatgctcgcaagctcctatagcttcccttcttcccccgtacctctcaccagcggtgtacacggtatgtgaaaacccaattcttcaaccctacaggatccaacaggcaatcacagctggcatcttacctttatcacccttgttcct

SEQ ID NO: 72487 - DNA, 263 bp, Zea mays
caatgatagcttcagtatgtgaaaacccagctcttcaaccctataggctccaacaagcaatcgcagcaagcaacatacctttatcacccttgtttcaacaatcgccagccctatctttggtgcagtcattggtacaaaccatcaaggcacagcagctgcagcaactcgtgctacctgtgatcaaccaagtagctctggcaaacctttctccctactatcagcaacaacaatttcttccattcaaccaactatctacactgaac

SEQ ID NO: 72488 - DNA, 262 bp, Zea mays
aatattttgagcattcagaaacacaccaagcgaagcgcactagcaacgacctaacaacaatggctaccaagatattagccctccttgcgcttcttgccctttttgtgagcgcaacaaatgcgttcattattccacaatgctcacttgctcctagtgccattattccacagttcctcccaccagttacttcaatgggcttcgaacacctagctgtgcaagccaacatgcaacaacaagcgcttgcggcgagcgtcttacaaca

SEQ ID NO: 72489 - DNA, 265 bp, Zea mays
tgaaacaagggtgataaaggtatgttgcttgctgcttatttgcagcagcaaatattactaccatttagccagctagctgcagctagccgtgcttccttcttgacacagcaacagttgctgcctttctaccagcagtatgcggctaaccccgcaaccctcttacaactacaacaattgtcgccctttgtccaacttgctttgacaaacccagcagcctcctaccaactacacatcattggtggtgccctcttttagattgcttatt

SEQ ID NO: 72490 - DNA, 284 bp, Zea mays
agaaagcacaatagtgtaccaacaatggcagccaaaatattttgcctccttatgctccttggtctttctgcaagtgctgctacggcgaccattttcccacaatgctcacaagctcctatagcttcccttcttcccccgtacctctcaccagcggtgtcttcggtatgtgaaaacccaattcttcaaccctataggatccaacaggcaatcgcagctggcatcttacctttatcacccttgttcgtcgaacaatcatcagccctattacagcagttacctttggt

SEQ ID NO: 72491 - DNA, 281 bp, Zea mays
gagatcaactagcaacatagaaagcacaatagtgtaccaacaatggcagctaaaatattttgcctccttatgctccttggtctttctgcaagtgctgctacggcgaccattttcccacaatgctcacaagctcctatagcttcccttcttcccccgtaactctcaccaacggtgtcttcggtatgtgaaaacccaattcttcaaccctacaggatccaacaggcaatcgcagctggcatcttacctttatcacccttgttcctccaacaatcatcagccct

SEQ ID NO: 72492 - DNA, 274 bp, Zea mays
tgagaccaactagcaacatagaaagcacaatagtgtaccaacaatggcagccaaaatattttgcctccttatgctccttggtctttctgcaagtgtcgctacggcgaccattttcccgcaatgctcgcaagctcctatagcttcccttcttcccccgtacttctcaccagcggtgtcttcggtatgcgaaaaccgaattcttcaaccctacaggatccatcaggcaatcacagctggcatctgaccttcatcacccttgttcctcgaacaatca

SEQ ID NO: 72493 - DNA, 269 bp, Zea mays
ctcgagccgttttgagcattcagaaacacaccaagcgaacacattagcaacaacctaacgacaatggctaccaagatattatcgctccttgcgcttcttgcgctttttgcgagcgcaacaaatgcgttcattattccaaaatgctcacatgctccaagttccattattacacagttcatcccaccagttacttcaatggcgttcgaacacccagctgtgcaagcctataggctacaacacgcaattgcggtgagcgtcttaaatcaacc

SEQ ID NO: 72494 - DNA, 278 bp, Zea mays
ctagcaacatagaaagcacaatagtgtaccaacaatggcagccaaaatattttgcctccttatgctccttggtctttctgcaagtgctgctacggcgaccattttcccgcaatgctcgcaagctcctatagcttcccttcttcccccgtacctctcaccagcggtgtcttcggtatgtgcttaacccaattcttcaaccctacaggatccaccaggcaatcgcatctggcatcttacctttatcacccttgtgcctccaacaatcttcagccctatta

SEQ ID NO: 72495 - DNA, 273 bp, Zea mays
ccagcaagcaacatagacagtagaatccattagcaacaatagagcaacaatggcgaccaagatattttccctccttatgctccttgctctttctacatgtgttgctaacgcgacaattttccctcaatgctcacaagctcctatagcttcccttctacccccataccttccatcacttatagcttcagtatgtgaaaacccagctcttcagccatataggcttcaacaagcaatcgcagcaagcagcatacctttatcgcacttgttgtttca

SEQ ID NO: 72496 - DNA, 280 bp, Zea mays
attttgagcattcagaaacacaccaagcgaagctacctagcaacgacttcacaacaatggctaccaagatattagccctccttgcgcttcttgccctttttgtgagcgcaacaaatgcgtccattattccacaatgctcacttgctcctagtgccattataccacagttcctccgaccagttacttcaatgggcttcgaacacctagctgtgcaagcctacaagctacaacaagcgcttgcggcgagcgtcttacaacaaccaattaaccaattgcaaca

SEQ ID NO: 72497 - DNA, 282 bp, Zea mays
gccgcactgaaccccgctgcttatttgcagcagcaaatactactaccatttagccagctagctgcagcaaaccgtgcttccttcttgacacagcaacagttgctgcctttctaccagcagtttgcggctaaccccgcaaccctcttacaactacaacaattgttgccctttgtccaacttgctttgacagacccagcggcctcctaccaacaacacatcattggtggtgccctcttttagattgcttattagttgtaattcaataataaagttttttggatg

SEQ ID NO: 72498 - DNA, 283 bp, Zea mays
  unsure (1)..(283): unsure at all n locations
caacaagcaacatagaaagtggaatccagtagcaacaatagagcaacaatggcgaccaagatattttccctccttatgctccttgctctttctacatgtgttgctaacgcgacaattttccctcaatgctcacaagctcctatagcttcccttcttcccccataccttccatcaattatagcttcaatatgtgaaaacccagctcttcaaccatataggcttcaacaagcaatcgcagcaagcaacataccnatatcaaaattgttgtttcaacaatcgccag

SEQ ID NO: 72499 - DNA, 287 bp, Zea mays
gaccaactagcaacatagaaagcacaatagtgtaccaacaatggcagctaaaatattttgcctccttatgctccttggtctttctgcaagtgctgctacggcgaccattttcccacaatgctcacaagctcctatagcttcccttcttcccccgtacctctcaccaacggtgtcttcggtatgtgaaaacccaattcttcaaccctacaggatccaacaggcaatcgcagctggcatcttacctttatcacccttgttcctccaacaatcatcagctctattacagc

SEQ ID NO: 72500 - DNA, 287 bp, Zea mays
cagaaacacacctagcgagcgcactagcaacgacctaacaacaatggcttccaagacattatccctccttgcgcttcttgccctttttgtgagtgcaacaaatgcgttcattattccacaatgctcacttgctccgagtgccattattccacagttcctccctccagttacttcaatgggcttcgaacacccagctgtgcaagcctataggctacaacaagcgcttgcggcgagcgtcttagaacaaccaattgcccaattacaacaacaatccttggcacatctaa

SEQ ID NO: 72501 - DNA, 219 bp, Zea mays
ccagcaagcaacatagaaagtagaatccattagcaacaatagagcaacaatggcgaccaagatattttccctccttatgctccttgctctttctacatgtgttgctaacgcgacaattttccctcaatgctcacaagctcctatagcttcccttcttcccccataccttccatcaattataggcttcagtatgtgaaaacccagctcttcaaccatata

SEQ ID NO: 72502 - DNA, 265 bp, Zea mays
cggctcgagccaacaagcaacatagaaagtggaatccagtagcaacaacagagcaacaatgacgaccaagatattatccctccttatgctccttgctctttctgcatgtgttgctaacgcgacaattttccctcaatgctcacaagctcctatagcttcccatcttcctccataccttccatcaatgatagcttcagtatgtgaaaacccagctcttcagccctataggctccaacaagcaatcgcagcaagcgacataccttta

SEQ ID NO: 72503 - DNA, 272 bp, Zea mays
gccattgttggtacactattgtgctttctatgttgcttggtctttctgcaagtgctgctacggcgaccattttcccacaatgctcacaagctcctatagcttcccttcttcccccgtacctctcaccaacggtgtcttcggtatgtgaaaacccaattcttcaaccctacaggatccaacaggcaatcgcagctggcatcttacctttatcacccttgttcctccaacaatcatcagccctattacagcagttacctttggtgcatttattg

SEQ ID NO: 72504 - DNA, 271 bp, Zea mays
caaaaacacaccaagcgaagcgcactagcaacgacctaacaccaatggctaccaagatattagccctccttgcgcttcttgcccttttagtgagcgcaacaaatgcgttcattattccacagtgctcacttgctcctagtgccagtattccacagttcctcccaccagttacttcaatgggcttcgaacatccagccgtgcaagcctacaggctacaactagcgcttgtggcgagcgccttacaacaaccaattgcccaattgcaacaaca

SEQ ID NO: 72505 - DNA, 278 bp, Zea mays
agcaagcaacatagaaagtagaatccattagcaacaatagagcatcaatggcgaccaagatattttccctccttatgctccttgctctttctacatgtgttgctaacgcgacaattttccctcaatgctcacaagctcctatagcttcccttcttcccccataccttccatcaattatagcttcagtatgtgaaaacccagctcttcaaccatataggcttcaacaagcaatcgcagcaagcaacatacctttatcgcccttgttgtttcaacaatca

SEQ ID NO: 72506 - DNA, 276 bp, Zea mays
ttcaaatgcaaaaaaaaaaatcagatgaattacatggaacttgtgcagaaacatgtcgaggacgatgctgatatcactatatcatgtgctcctgttgatgagagccgagcttctaaaaatgggctagtgaagattgatcatactggacgtgtacttcaattctttgaaaaaccaaagggtgctgatttgaattctatgagagttgagaccaacttcctggagtttagctatagattttgctttagaaatatccataccttgcatcaattgggcatt

SEQ ID NO: 72507 - DNA, 281 bp, Zea mays
ggccaccgctgctataaaaccctccgcctccacctccggctcgccaaactccgtttcgaattctagggttttgctgctctccgaccccgagctccgaaggccgcagcatcaggcgcgccccccctcgcgtgtgaccgagatggcgctgccgaatcaggggaccgttgattaccccagcttcaagctcgtcatcgtcggcgatggtggaactggtaaaactacatttgtgaagaggcatctcactggagattttcagaagaaatatgaaccaaccatggtgt

SEQ ID NO: 72508 - DNA, 282 bp, Zea mays
agaccaacaagcaacatagaaagtggaatacagtagcaaaaatagagcaacaatggcggccaagatattttccatccttatgctccttgctctttctgcatgtgttgctaacgcgaccatttttcctcaatactcacaagctcctatagctgcccttcttcccccataccttccatcaatgaccgctttagtatgtgaaaacccagcccttcaaccctacaggatccagcaagcaatcgcaacaagcaacttacctttatcacacctgttctttcaacaatc

SEQ ID NO: 72509 - DNA, 285 bp, Zea mays
ttccaggtgtcgcaatctccaggaaaagttacacaagaacaacttgatcgtgctaaagaggcaaccaaatctgcagttctgatgaacttggaatcaaggtctatagcatctgaagatattggaagacaggttcttacttatggggaaaggaagcccatcgagtatttcctgaaaacagttgaggagatcactttgaatgacattttgtcaaccgcaaaggagatgatgtctacaccactcacaatggcatcgtagggcgacgttattcatgttcctagctacgag

SEQ ID NO: 72510 - DNA, 272 bp, Zea mays
tctcgagccgaatcggctcgagtagcaacatagaaagcacaatactgtaccaacaatggcagccaaaatattttgcatccttatgctccttggactttctgcaagtgctgctaccgcaaccattttcccacaatgctcacaagctcctatagcttcctttcttcccccatacctctcaccaggggtgtcttcagtatgtgaaaacccaattcttcaaccctacaggatccaacaggcaatcgcagcaggcatcttagctttatcaccttgtt

SEQ ID NO: 72511 - DNA, 258 bp, Zea mays
ctcttcaaccatataggcttcaacaagcaatcgcagcaagcaacatacctttatcgcccttgttgtttcaacaatcgccagccctatctttggtgcagtcattggtacaaaccatcagggcacaacagctgcagcaactcgtgctacctctgatcaaccaagtagctctggcacacctttctccctactctcagcaacaacaatttcttccattcaaccagctgtctacactgaaccctgctgcttatgtgcagcaac

SEQ ID NO: 72512 - DNA, 177 bp, Zea mays
tatcgagtagcaacatacatagtgatagtacactagcaacatcttagcaccaatggcagccaagatttttgccatcctttccctccttgctctttcagcaagcgttgataccgcgactatgattccacaatgctcacaacaatacctctctccggtgacagccgcgagatttgacta

SEQ ID NO: 72513 - DNA, 271 bp, Zea mays
agaccaacaagcaacatagaaagtggaatacagtagcaacaatagagcaacaatggcggccaagatattttccatccttatgctccttgctctttctgcatgtgttgctaacgcgaccatttttactcaatactcacaagctcctatagctgcccttcttcccccataccttccatcaatgaccgcttcagtttgtgaaaacccagcccttcaaccctacaggctccaacaagcaatcgcaacaagcaacttacctttatcacccctgttc

SEQ ID NO: 72514 - DNA, 250 bp, Zea mays
tgagcattcagaaacacaccaagcgaactaccctagcaacgacttaacaacaatggctaccaagatattagccctccttgcgcttcttgccctttttgtgagcgcaacaaatgcgttcattattccacaatgctcacttgctcctagtgccattataccacagttcctccgaccagttacttcaatgggcttcgaacacctagctgtgcaagcctacaggctacaacaagcgcttgcggcgagcgtctta

SEQ ID NO: 72515 - DNA, 275 bp, Zea mays
  unsure (1)..(275): unsure at all n locations
cagcattcaaaaacacaccaagcgaagcnactagcaacgacctaacaccaatggctaccaagatattagccctccttgcgcttcttgcccttttagtgagcgcaacaaatgcgttcattattccacagtgctcacttgctcctagtgccattattccacagttcctcccaccagttacttcaatgggcttcgaacatccagccgtgcaagcctacaggctacaactagcgcttgcggcgagcgccttacaacaaccaattgcccaattgcaacaa

SEQ ID NO: 72516 - DNA, 315 bp, Zea mays
tcatacacgcgcacggaacttcgatcgtggtcgagctcgaggtgacatagagcacacacttgtgtaccaccatgtggctcgccaataatattttgagcctacctatatgcttccttgggttatgctgccagtgctgttacggcgatcattttcccgcaatgctcgcaagctcctatagcttcccttcttcccccgtacctctcaccagcggtgtcttcggtatgtgaaaacccaattcttcaaccctacaggatccaacaggcaatctcagctggcatcttgcctttatcaccctagttcctccaacaatcatca

SEQ ID NO: 72517 - DNA, 186 bp, Zea mays
cgctgccaacgcgttcctggcacagaggatctcctctgtgaacgccatctccgccctctgcgaggccaccggcgcgaatgtgactgaggtggcttacgccgtgggcaaggacacgaacattggccccaagttcctgaacgccagtgttgggttcggtgggtcttgcttccagaaggacatcctgaa

SEQ ID NO: 72518 - DNA, 281 bp, Zea mays
tattgagaccaactagcaacatagaaagcacaatagtgtaccaacaatggcagccaaaatattttgcctccttatgctccttggtctttctgcaagtgctgctacggcgaccattttcccgcaatgctcgcaagctcctatagcttcccttcttcccccgtacctctcaccagcggtgtcttcggtatgtgagaacccaattcttcaaccctacaggatccaacaggcaatcacagctggcatcttacctttatcacccttgttcctccaagagtcatcag

SEQ ID NO: 72519 - DNA, 253 bp, Zea mays
gcgagactgttgagtattcagtgaacaccaagcgagtacctagcaacgattcgaacatggctccaagatatagcctctgcgctctgcgcgtttgtgagcgcaacaaatgcgttcattattccacaatgctcacttgctcctagtgccattataccacagttcctccgaccagttacttcaatgggcttcgaacacctagctgtgcaggcctacaagctacatcagcgcttgcggcgagcgtcttacaacaacc

SEQ ID NO: 72520 - DNA, 212 bp, Zea mays
gctgcgcataacgctggcacgctcttacaactgcaacaattgctgacattcaagcaacttgctttggcatacccaacaacgttctacgcaacaacccatcattggcggtgccctcttatcgattgcttatgcgttatagttcaataatgaagtttattggatgatacttgtagcttcccagaaatgtactttctatatatctgggaagccac

SEQ ID NO: 72521 - DNA, 266 bp, Zea mays
ctcgagccgtttgagcattcagaaacacacctagcgaacgccactagcaacgacctaacaacaatggctaccaagatattatccctctttgcgcttcttgccctttttgtgagcgcaacaaatgcgctcattattccacaatgctcacttgctcctagtgccattattccacagttcctccctccagttacttcaatgggcttcgaacacccagctgtgcaagcctacaggctacaacaagcgcttgcggcgagcgtcttacaaca

SEQ ID NO: 72522 - DNA, 273 bp, Zea mays
cccgctccgcctccactcctcgcgccgctgccgcatctcctctacaggtaagaaggagagaaagagggcgaaatggtgaagcacaacaacgtcatccccaacgggcacttcaagaagcactggcagaactatgtcaagacatggttcaaccagcccgcccgcaagcagaggcgccgcatcgcacgtcaaaagaaggccctgaagatattcccacgaccaactgctggccctcttcgtcccattgttcaatgccagactcacaagtacaacatg

SEQ ID NO: 72523 - DNA, 267 bp, Zea mays
ggtcagccaagacaggtgcccagatcgactctgttcttgaccttgctcggtgcaccattgtgtccgagctctcaaatgacgactttgactcttatgtcttatctgagtcgagcctgtttgtctacccgtacaagattgtgatcaagacctgtggaactacaaagcttctgctcgctattccgaggatccttgaacttgctgaagagctcctgttgccactcgctgcagttaaatactcccgtggaacgttcatattccctgaagcac

SEQ ID NO: 72524 - DNA, 148 bp, Zea mays
ggagcaagcaacatagaaagtagaatccaggatcaactatagagcatcgatggcgactagcgtatatgctctccttatgctccatgctctttgtacatgctgtacgagcgggtcaagcgaccctcaatgctcactggctactagagct

SEQ ID NO: 72525 - DNA, 275 bp, Zea mays
ggcgatcagctttatcggatgaattacatggaacttgtgcagaaacatgtcgaggacgatgctgatatcactatatcatgtgctcctgttgatgagagccgagcttctaaaaatgggctagtgaagattgatcatactggacgtgtacttcaattctttgaaaaaccaaagggtgctgatttgaattctatgagagttgagaccaacttcctgagctatgctatagatgatgcacagaaatatccataccttgcatcaatgggcatttatgtctt

SEQ ID NO: 72526 - DNA, 277 bp, Zea mays
ctatatatgtaataatgcagtaagacgacacacattatcatgtgcggtatgaccactaatatatgcatggtcataataaagttttggtttaatcaagaggctggactgcgggcacgacttccatgctggctacgtcaagcaatggctggtggtgaccaacgtgtgccccatctgcaagcaactccgcattgaaagcctgaaaccgaacaaaggcgacacacccatgttccatgtccattcgatcggtcgcaagatcatttacccgattgctttttac

SEQ ID NO: 72527 - DNA, 273 bp, Zea mays
attgagaccaactagcaacatagaaagcacaatagtgtaccaacaatggcagccaaaatattttgcttccttatgctccttggtctttctgcaagtgctgctaccgcaaccattttcccacaatgctcacaagctcctatagcttcctttcttcccccatacctctcaccagcggtgtcttcagtatgtgaaaacccaattcttcaaccctacaggatccaacaggcaatcgcagcaggcatcttacctttatcacctttgttcctccaacaa

SEQ ID NO: 72528 - DNA, 259 bp, Zea mays
aattgcaacagtttctgccagcgctcagtcaactagccatggtgaaccctgccgcctacctacaacagcaacaactgctttcatctagccctctcgttgtgggtaatgcacctacatacctgcaacaacaattgctgcaacagcttgtaccagctctgactcacgtagctgtggcaaaccctgctgactacttgcaacagctgcttccattcaagcaactgactgtgtcgaactctgctgcgtatctacaacagcgaca

SEQ ID NO: 72529 - DNA, 270 bp, Zea mays
agaaagcacaatagtgtaccaacaatggcagccaaaatattttgcctccttatgctccttggtctttctgcaagtgctgctacggcgaccattttcccgcaatgctcgcaagctcctatagcttcccttcttcccccgtacctctcaccagcggtgtcttcggtatgtgaaaacccaattcttcaaccctacaggatccaacaggcaatcacagctggcatcttacctttatcacccttgtgtctccaacaatcatcagccctattacat

SEQ ID NO: 72530 - DNA, 277 bp, Zea mays
caactagcaacatagaaagcacaatagtgtaccaacaatggcagccaaaatattttgcttccttatgctccttggtctttctgcaagtgttgctaccgcaaccattttcccacaatgctcacaagctcctatagcttcccttcttcccccatacctctcaccagcggtgtcttcaatgtgtgaaaccccaattgttcaaccctacaggatccaacaggcaatcgcaacaggcatcttaccattatcacgcttgttcctccaacaaccgtcagctcta

SEQ ID NO: 72531 - DNA, 271 bp, Zea mays
tagcaacatacatagtgaagtacactagcaacatcttagcaccaatggcagccaagatttttgccatccttgccctccttgctctttcagcaagcgttgctaccgcgactattattccacaatgctcacaacaatacctctctccggtgacagccgcgagatttgaatactcaactatacaatcctacaggctacaagaggccatcgcagcaagcatcttacggtcgttagcattgaccgtccaacaaccatatgccctattgcaacacca

SEQ ID NO: 72532 - DNA, 131 bp, Zea mays
agttgcaacagtttctgccagcgctcagtcaactagccatggtgaaccctatcgcctatctacaacagcaacaacgtctctcgtctagcccgttcgctatgggcattggacctacatacctgcatcatcag

SEQ ID NO: 72533 - DNA, 267 bp, Zea mays
attttcagcattcaaaaacacaccaagcgtaggtactagctaggacctaacaccaatggctaccatgatatcagccctccttgcgcttcttgcccttttagtgagcgcaacaacatgcgttcattattccacagtgctcactcgctcctagtgatattattccacagttcctcccaccagttacttcaatgggcttcgaacatccagccgtgcaagactagaggctacaactagcgcttgcggcgagcgcctcacgacaatcaattg

SEQ ID NO: 72534 - DNA, 272 bp, Zea mays
gcaacatagaaagcacaatagtgtaccaacaatggcagccaaaatattttgcctccttatgctccttggtctttctgcaagtgctgctacggcgaccattttcccgcaatgctcgcaagctcctatagcttcccttcttcccccgtacctctcaccagcggtgtcttcggtatgtgataccccaattcttcaaccctacaggatccaacaggcaatcacagctggcatcttacctttatcaccttgttcctccaacaatcatcagccctatt

SEQ ID NO: 72535 - DNA, 268 bp, Zea mays
  unsure (1)..(268): unsure at all n locations
gctgangatcgncaccgncctgcaccgccancgacctcatagagctggtgggccagtacnaggncgtctacgtggaggctaagggagagccnttcccctcagaccccaagaggcagctgnngttggcagtgctggccgtgtncgactcgtgggagagcccgngggcnaagangtncaggagcntcatccnggtcaccggcctcnggggcaccgccgtgaaccgtncatgcatggtgtncggcaacatggggnacccctctggcaccgg

SEQ ID NO: 72536 - DNA, 257 bp, Zea mays
attcaaaaacacaccaagcgaaggaactagcaacgacctaacaccaatggctaccaagatattagccctccttgcgcttcttgcccttttagtgagcgcaacaaatgcgttcattattccacagtgctcacttgctcctagtgccattattccacagttcctcgcaccagttacttcaatgggcttcgaacatccagccgtgcaagcctacaggctacaactagcgcttgcggcgagcgccttacaacaaccattgc

SEQ ID NO: 72537 - DNA, 218 bp, Zea mays
aatcaatatattgattgagatttttctcgaaacaatggcgaaccacgatattatccctccttgatgctcctagactctggctacatgtgttgctaacgcggcaatcttccctcaatgctcacaagctcctatagcttcccttcttcccccataccttccatcagttatagcttcagtatgtgaaaacccagctcttcaaccatataggcttcaacaag

SEQ ID NO: 72538 - DNA, 91 bp, Zea mays
gagaccaacaagcaacatagaaagtggaatccagtagcaacaacagagcaacaatggcgaccaagatattttccctccttatgctccttgc

SEQ ID NO: 72539 - DNA, 163 bp, Zea mays
attatttagaccaactagcaacatagaaagcacaatagtgtaccaacaatggcagccaaaatattttgcctccttatgctccttggtatttctgcaagtgctgctacggcgaccattttcccgcaatgctcacaagctcctatagcttcccttcttcccccgt

SEQ ID NO: 72540 - DNA, 121 bp, Zea mays
aagcaacatagaaagtggaatccagtagcaacaacagagcaacaatggcgaccaagatattttccctccttatgctccttgctctttctgcatgtgttgctaacgcgacaattttccctca

SEQ ID NO: 72541 - DNA, 95 bp, Zea mays
ctgggaagccacaaacatcagataaaaaactttattattgaactataactcataagaaatctaaaagagggcaccaccaatgatgggttgttggt

SEQ ID NO: 72542 - DNA, 124 bp, Zea mays
gcaacatagaaagcacaatagtgtaccaacaatggcagccaaaatattttgcctccttatgctccttggtctttctgcaagtgctgctacggcgaccattttcccacaatgctcacaagctcct

SEQ ID NO: 72543 - DNA, 183 bp, Zea mays
ccgtcatcgatctcgtttcaaatccatccatcctcgtttcctccgtcccgcagcatctcaaccccatggccaagatcaagatcgggatcaatgggttcggcaggatcggaaggctggtggccagggtggccctgcagagtgacgatgtcgagctcgtcgccgtgaacgacgccgtcatcagca

SEQ ID NO: 72544 - DNA, 247 bp, Zea mays
gcaacatagaaagcacaatagtgtaccaacaatggcagccaaaatattttgcctccttatgctccttggtctttctgcaagtgctgctacggcgaccattttcccgcaatgctcgcaagctcctatagcttcccttcttcccccgtacctctcaccagcggtgtcttcggtatgtgaaaacccaattcttcaaccctacaggatccaacaggcaatcacagctggcatcttacctttatcacccttg

SEQ ID NO: 72545 - DNA, 254 bp, Zea mays
gccgccgacaactctctctaccgtccgataccccaagcaccagcgcggcggcggcgaccatggctgtcggaaagaacaagaggatctccaagggaaagaagggtggcaagaaaaagaccgtcgaccctttctctaagaaggattggtatgacatcaaggcaccgtcggtgttcagtgtgcgcaacatcgggaagactctcgtatccaggacacagggtaccaggattgcttctgagggtctgaagcacagagtc

SEQ ID NO: 72546 - DNA, 255 bp, Zea mays
ctcgagccgctaccattcagccagctagctggtgtgagccctgctaccttcttgacacaaacacagttgttgccgttctaccagcacgttgcgcctaacgctggcaccctcttacaactgcaacaattgctgccattcaaccaacttgctttgacaaacccagcagtgttctaccaacaacccatcattggtggtgccctcttttagatttcttatgagttatagttcaataataaagtttattatctgatgttt

SEQ ID NO: 72547 - DNA, 179 bp, Zea mays
cagcatcttcccacttcaaaacgtcttcatccgcaaggtgaagatactcaaggcccccaagtttgatctcgggaagttgatggaggttcatggcgactacaaagaggacgttggtgtgaagcttgagaggcctgtcgagggtgatgaggctatgcaggaggttgctgctgccgagtagt

SEQ ID NO: 72548 - DNA, 260 bp, Zea mays
gcaacatagaaagcacaatagtgtaccaacaatggcagccaaaatattttgcctccttatgctccttggtctttctgcaagtgctgctacggcgaccattttcccacaatgctcacaagctcctatagcttcccttcttcccccgtacctctcaccagcggtgtcttcggtatgtgaaaacccaattcttcaaccctataggatccaacaggcaatcgcagctggcatcttacctttatccaccttgttcctccaacaat

SEQ ID NO: 72549 - DNA, 260 bp, Zea mays
gatggataagaggataaaagaggatctgaagacagttgcgcttggaacgtcaaagatcaactaccttgatcctagaataaccgtggcatggtgcaaacgccatgaagtccctattgagaagattttcaacaaatctctcctcgcgaaatttgtatgggcaatggacgttgacccggaattcagattctaggagaccattggctaccatgtgccagccagtttggtccagtttccagcccttctccctggacactaattgc

SEQ ID NO: 72550 - DNA, 173 bp, Zea mays
cgagcctctcaagatttacctacaaaagtacaaagagatggagggtgatagcaagctgtgctacaaaggctggcgagggctctgtaaagaaggatgcaattagtccccatggtggcaccagtagctcaagtaatcagttggttcagcatggagtctacaaccaagggatgggc

SEQ ID NO: 72551 - DNA, 118 bp, Zea mays
atgatgggttgttggtagaacactgctgggtttgtcaaagcaagttggttgaataataaagttttttatctgatgtttgtggcttcccagaaataagaaagtacatttctagattctt

SEQ ID NO: 72552 - DNA, 255 bp, Zea mays
ccagcaagcaacatagaaagtagaatccattagcaacaatagagcaacaatggcgaccaagatattttccctccttatgctccttgctctttctacatgtgttgctaacgcgacaattttccctcaatgctcacaagctcctatagcttcccttcttcccccataccttccatcaattatagcttcagtatgtgaaaacccagctcttcaaccatataggcttcaacaagcaatcgcagccagcaacataccttt

SEQ ID NO: 72553 - DNA, 239 bp, Zea mays
ctcgagccgctaccattcagccagctagctggtgtgagccctgctaccttcttgacacaaacacagttgttgccgttctaccagcacgttgcgcctaacgctggcaccctcttacaactgcaacaattgctgccattcaaccaacttgctttgacaaacccagcagtgttctaccaacaacccatcattggtggtgccctcttttagatttcttatgagttatagttcaataataaagt

SEQ ID NO: 72554 - DNA, 172 bp, Zea mays
caagcacaagagctacgcctgctgtacctgttggaggatgttacaggcttattgatatccctatgagtaactgcttcaacagtggtataaataagatatttgtgatgagtcagttcaattctacttcgcttaaccgccatattcatcgtacataccttgaaggcgggatcaa

SEQ ID NO: 72555 - DNA, 258 bp, Zea mays
gagaccaacaagcaacatagaaagtggaatccagtagcaacaatagagcaacaatggcgaccaagatactttccctccttatgctccttgctctttctgcatgtgttgctaacgcgacaattttccctcaatgctcacaagctcctatagcttcccttcttcccccataccttccatcaatgatagcttcagtatgtgaaaacccagctcttcaaccctataggctccaacaagcaatcgcagcaagcaacatacctt

SEQ ID NO: 72556 - DNA, 253 bp, Zea mays
gcacctacatacctgcaacaacagttgctgcaacagattgtaccagctctgactcagctagctgtggcaaaccctgctgcctacttgcaacagctgcttccattcaaccaactgactgtgtcgaactctgctgcgtacctacaacagcgacaacagttacttaatccactagcggtggctaacccattggtcgctgccttcctacagcagcaacaattgctgccatacaaccagttctctttgatgaaccctg

SEQ ID NO: 72557 - DNA, 249 bp, Zea mays
ctcgagccgcaacaatggcagccaaaatattttgcttccttatgctccttggtctttctgacagtgttgctaccgcaaccattttcccacaatgctcacaagctcctatagcttcccttctacagccatacctctcaccagcggtgtcttcaatgtgtgaaaacccaattgttcaaccctacaggatccaacaggcaatcgcaacaggcatcttaccattatcacccttgttcctccaacaaccgtcag

SEQ ID NO: 72558 - DNA, 254 bp, Zea mays
cttgagaccaacaagcaacatagaaagtggaatacagtagcaacaatagagcaacaatggcggccaagatattttccatccttatgctccttgctctttctgcatgtgttgctaacgcgaccatttttcctcaatactcacaagctcctatagctgccctacttcccccataccttccatcaatgaccgcttcagtttgtgaaaacccagcccttcaaccctacaggctccaacaagcaatcgcaacaagcaac

SEQ ID NO: 72559 - DNA, 258 bp, Zea mays
gcaacatagaaagcacaatagtgtaccaacaatggcagccaaaatattttgcttccttatgctccttggtctttctgcaagtgctgctaccgcaaccattttcccacaatgctcacaagctcctatagcttcctttcttcccccatacctctcaccagcggtgtcttcagtatgtgaaaacccaattcttcaaccctacaggatccaacaggcaatcgcagcaggcatcttacctttatccaccttgttcctccaaca

SEQ ID NO: 72560 - DNA, 259 bp, Zea mays
attgagaccagcaagcaacatagaaagtagaatccattagcaacaatagagcaacaatggcgaccaagatattttccctccttatgctccttgctctttctacatgtgttgctaacgcgacaattttccctcaatgctcacaagctcctatagcttcccttcttcccccataccttccatcaattatagcttcagtatgtgaaaacccagctcttcaaccatataggcttcaacaagcaatcgcagcaagcaacatacc

SEQ ID NO: 72561 - DNA, 122 bp, Zea mays; identical to SEQ ID NO: 70396

SEQ ID NO: 72562 - DNA, 121 bp, Zea mays
aagcacaatagtgtaccaacaatggcagccaaaatattttgcttccttatgctccttggtctttctgcaagtgttgctaccgcaaccattttcccacaatgctcacaagctcctatagctt

SEQ ID NO: 72563 - DNA, 254 bp, Zea mays; identical to SEQ ID NO: 71380

SEQ ID NO: 72564 - DNA, 254 bp, Zea mays
tttgagcattcagaaacacacctagcgaagcgcactagcaacgacctaacaacaatggcttccaagacattatccctccttgcgcttcttgccctttttgtgagtgcaacaaatgcgttcattattccacaatgctcacttgctccgagtgccattattccacagttcctccctccagttacttcaatgggcttcgaacacccagctgtgcaagcctataggctacaacaagcgcttgcggcgagcgtcttaga

SEQ ID NO: 72565 - DNA, 257 bp, Zea mays
tttcagcattcaaaaacacaccaagcgaaggccactagcaacgacctaacaccaatggctaccaagatattagccctccttgcgcttcttgcccttttagtgagcgcaacaaatgcgttcattattccacagtgctcacttgctcctagtgccagtattccacagttcctcccaccagttacttcaatgggcttcgaacatccagccgtgcaagcctacaggctacaactagcgcttgcggcgagcgccttacaaca

SEQ ID NO: 72566 - DNA, 255 bp, Zea mays
caaatttattgagaagtgcaatagtggagcttcgaaaatgttggcaaagatcaaggtagcgaagaagattagagccacactagctgtgcaaaatgagctgtctgaccctgacaatacaacgcaagatgtgccttttcgaataaatgaggactatggggaaactgtccctacaagttctcagcaacacatgaaacatggcacatataatgattgtcaggtgattttggtactatgattgttcatactgaagatggg

SEQ ID NO: 72567 - DNA, 249 bp, Zea mays
cagaaacacacctagcgaacgcactagcaacgacctaacaacaatggcttccaagacattatccctccttgcgcttcttgccctttttgtgagtgcaacaaatgcgttcattattccacaatgctcacttgctccgagtgccattattccacagttcctccctccagttacttcaatgggcttcgaacacccagctgtgcaagcctataggctacaacaagcgcttgcggcgagcgtcttagaacaacc

SEQ ID NO: 72568 - DNA, 251 bp, Zea mays
gtggaatccagtagcaacaatagagcaacaatggcgaccaagatattttccctccttatgctccttgctctttctacatgtgttgctaacgcgacaattttccctcaatgctcacaagctcctatagcttcccttcttcccccataccttccatcaattatagcttcaatatgtgaaaacccagctcttcaaccatataggcttcaacaagcaatcgcagcaagcaacatacctttatcgcccttgttgtt

SEQ ID NO: 72569 - DNA, 255 bp, Zea mays
cgctagcaacatagaaagcacaatattgtaccaataatggcagccaacatattttgcctcattatgctccttggtctttctgcaagtgctgctacggcgagcattttcccgcaatgctcacaagctcctatagcttcccttcttcccccatacctctcaccagcgatgtcttcagtatgtgaacatccaattcttctaccctacaggatccaactggcaatcgcagcacgcatcttacctttatcacccttgttc

SEQ ID NO: 72570 - DNA, 258 bp, Zea mays
gatgtctatagctttggggttgttctgttggaagctattacaggtagagatccaattgattatgatcgccctacaaatgaggtaaacctggttgactggcttaaaatgatggttgccaacagacgttctgaacaagtggtggacccaaaccttgagagaaggccttcgacaaaggagctgaaacgtgcccttttgactgctctgaggtgtatcgatttgaatgctgagaagaggcctagcatggaccaggtggtccgg

SEQ ID NO: 72571 - DNA, 258 bp, Zea mays
gctgcactgcggctgcctcaggtactccgcgtaggggtacagcccgccggcggcgcgccctactacgccgggtgtgggcagccgagcgccatgttccagccgctccggcaacagtgctgccagcagcagatgaggatgatggacgtgcagtccgtcgcgcacagctgcagatgatgatgcagcttgagcgtgccgctgccgccagcagcagcctgtacgagccagctctgatgcagcagcagcagcagctgctggcag

SEQ ID NO: 72572 - DNA, 248 bp, Zea mays
attttcagcattcaaaaacacaccaagcgaaggcactagcaacgacctaacaccaatggctaccaagatattagccctccttgcgcttcttgcccttttagtgagcgcaacaaatgcgttcattattccacagtgctcacttgctcctagtgccagtattccacagttcctcccaccagttacttcaatgggcttcgaacatccagccgtgcaagcctacaggctacaactagcgcttgcggcgagcg

SEQ ID NO: 72573 - DNA, 122 bp, Zea mays
ctgaatcctccgcaactcgccgccgccgggaccgaccgacccgatcctatcgatcgaggatgtcgtacgcctacctcttcaagtacatcatcatcggcgacacaggcgtggggaagtcgtgc

SEQ ID NO: 72574 - DNA, 254 bp, Zea mays
tagcaacatagaaagcacaatagtgtaccaacaatggcagccaaaatattttgcctccttatgctccttggtctttctgcaagtgctgctacggcgaccattttcccgcaatgctcgcaagctcctatagcttcccttcttcccccgtacctctcaccagcggtgtcttcggtatgtgaaaacccaattcttcaacgctacaggatccaacaggcaatcacagctggcatcttacctttatcacccttgttcct

SEQ ID NO: 72575 - DNA, 256 bp, Zea mays
gaaggaagcacggtttgctgcagctagctggctaaatggtagtagtatttgctgctgcaaataagcagcggggttcagtgcggctaaccccgcaaccctcttacaactacaacaattgttgccctttgtccaacttgctttgacagaccgagcggcctcctaccaacaacacatcattggtggtgccctcttttagattgcttattagttgtaattcaataataaagttttttggatgatgtatgtggccaaccag

SEQ ID NO: 72576 - DNA, 258 bp, Zea mays
gctgcactgcggctgcctcaggtactccgcgtaggggtacagcccgccggcggctgcgccctactacgccgggtgtgagcagccgagcgccatgttccagccgctccggcaacagtgctgccagcagcagatgaggatgatggacgtgcagtccgacgcgcacagctgcagatgatgatgcagcttgagcgtgccgctgccgccagcagcagcctgtacgagccagctctgatgcagcagcagcagcagctgctggcc

SEQ ID NO: 72577 - DNA, 260 bp, Zea mays; identical to SEQ ID NO: 70140

SEQ ID NO: 72578 - DNA, 262 bp, Zea mays
gcaccacaagcgagcgagggacccggggcggaagaagagagagaagacgtctctctcctctcggcgtccccgttccccaacctctcgtctgctgcctgcctgcctgcctgcctgcaaaaaggagtttgtcatggcgtctaagcgcatcctcaaggagctgaaggacctgcagaaagacccccccacatcatgcagtgcaggtcctgctggtgaggacatgtttcattggcaagcaacaattatgggaccacctgacagtccc

SEQ ID NO: 72579 - DNA, 120 bp, Zea mays
caactagcaacatagaaagcacaatagtgtaccgccaatggcagccaaaatattttgcttccttatgctccttggtctttctgcaagtgttgctaccgcaaccattttcccacaatgctc

SEQ ID NO: 72580 - DNA, 76 bp, Zea mays
cttattgaactataactcataagagagttttttgtctgatgtttgtggcttcccagaaataagaaagtacatttct

SEQ ID NO: 72581 - DNA, 241 bp, Zea mays
caacatagaaagcacaatagtgtaccaacaatggcagccaaaatattttgcttccttatgctccttggtctttctgcaagtgttgctaccgcaaccattttcccacaatgctcacaagctcctatagcttcccttcttcccccatacctctcaccagcggtgtcttcaatgtgtgaaaccccaattgttcaaccctacaggatccaacaggcaatcgcaacaggcatcttaccattatcac

SEQ ID NO: 72582 - DNA, 253 bp, Zea mays
gcgaacgcactagcaacgacctaacaacaatggctaccaagatattagccctccttgcgcttcttgccctttttgtgagcgcaacaaatgcgttcattattccacaatgctcacttgctcctagtgccattattccacagttcctcccaccagttacttcaatgggcttcgaacacctagctgtgcaagccaacatgcaacaacaagcgcttgcggcgagcgtcttacaacaaccattgcccaattgcaacaa

SEQ ID NO: 72583 - DNA, 258 bp, Zea mays
ttcagcattcaaaaacacaccaagcgaagcgcactagcaacgacctaacaccaatggctaccaagatattagccctccttgcgcttcttgcccttttagtgagcgcaacatatgcgttcattattccacagtgctcacttgctcctagtgccagtattccacagttcctcccaccagttacctcaatgggcttcgaacatccagccgtgcaagcctacaggctacaactagcgcttgcggcgagcgccttacaacaag

SEQ ID NO: 72584 - DNA, 260 bp, Zea mays
agaccaactagcaacatagatagcacaatagtgtaccaacaatggcagccaaaatattttgcttccttatgctccttggtctttctgcaagtgctgctaccgcaaccattttcccacaatgctcacaagctcctatagcttcctttcttcccccatacctctcaccagcggtgtcttcagtatgtgaaaacccaattcttcaaccctacaggatccaacaggcaatcgcagcaggcatcttacctttatcgcccttgttc

SEQ ID NO: 72585 - DNA, 252 bp, Zea mays
gcaacatagaaagtggaatacagtagcaacaatagagcaacaatggcggccaagatattttccatccttatgctccttgctctttctgcatgtgttgctaacgcgaccatttttcctcaatactcacaagctcctatagctgcccttcttcccccataccttccatcaatgaccgcttcagtatgtgaaaacccagcccttcaaccctacaggctccaacaagcaatcgcaaaaagcaacttacctttatca

SEQ ID NO: 72586 - DNA, 119 bp, Zea mays
aacacaccaagcgaaggcactagcaacgacctaacaacaatggctaccaagatattagccctccttgcgctgcttgccctttttgtgagcgcaacaaatgcgttcattatgccacaatg

SEQ ID NO: 72587 - DNA, 251 bp, Zea mays
gacaagcgctacaagaacagggagctgcaaatcatgcgatccatggatcactgcaatgctgtttccttgaagcattgtttcttctccaccacaagcagagatgaactttttcttaacttagtgatggagtttgttcctgagtcactacatcgtgtgctgaagcactacagcaatatgaaccagaggatgccgcttatttatgttaaattatatacctaccagatatttcgaggtttagcctatattcacac

SEQ ID NO: 72588 - DNA, 121 bp, Zea mays
ctacaggatccaacaggcaatcgcaacaggcatcttaccattatcacccttgttcctccaacaaccgtcagccctattacagcagttacctttggtccatttggtggcacaaaacatcagg

SEQ ID NO: 72589 - DNA, 251 bp, Zea mays
ctcgccggcaggagatttccaccaccaccgccggaccaccccgaccctccttccctctcgcgctatggcccagactgttgtgctcaaggttggcatgtcctgtgagggctgtgttggagctgtcaagcgggtcctgggcaagatggaaggcgtcgagtcctacgacgtagacatcatggaacagaaggtcaccgtgaagggcaatgtgacacctgacgccgtcctgcaaactgtttcccagactggcaaga

SEQ ID NO: 72590 - DNA, 253 bp, Zea mays
attgagaccaactagcaacatagaaagcacaatagtgtaccaacaatggcagccaaaatattttgcctccttatgctccttggtctttctgcaagtgctgctacggcgaccattttcccacaatgctcacaagctcctatagcttcccttcttcccccgtacctctcaccagcggtgtcttcggtatgtgaaaacccaattcttcaaccctataggatccaacaggcaatcgcagctggcatcttacctttat

SEQ ID NO: 72591 - DNA, 121 bp, Zea mays
cagaaacacaccaagcgaagcacattagcaacaacctaacaacaatggctaccaagatattatccctccttgcgcttcttgcgctttttgcgagcgcaacaaatgcgttcattattccaca

SEQ ID NO: 72592 - DNA, 247 bp, Zea mays
cggctcgagcaactagcaacatagaaagcacaatagtgtaccaacaatggcagccaaaatattttgcctccttatgctccttggtctttctgcaagtgctgctacggcgaccattttcccaaaatgctcacaagctcctatagcttcccttcttcccccgtacctctcaccagcggtgtcttcggtatgtgaaaacccaattcttcaaccctataggatccaacaggcaatcgcagctggcatctta

SEQ ID NO: 72593 - DNA, 120 bp, Zea mays
ggctatggggtgagaacttctttgaccctgccacaaagacgtggaccaccaagaacacaggttctcctacctgcaagagaggatttgtacagttctgctatgagccaatcaagcaaatca

SEQ ID NO: 72594 - DNA, 258 bp, Zea mays
  unsure (1)..(258): unsure at all n locations
gcnacttgaccttcttgaggcccctgatcctgccanctnggagaagttccttggaactanaccaangatgttcaatgttgtnatcctnnctccncanggcnacttcgctcagtccaatgngcttgganaccctgacactnggcggtcaggttgtatacattctggntcaagtccgtgctttggagaatgagatgcttctgaggattaancagcaaggccttgatatnacnccgaagatcctcattgttaccaggcngt

SEQ ID NO: 72595 - DNA, 98 bp, Zea mays
attcagaaacacacctagcgaacgcactagcaacgacctaacaacaatggcttccatgacattatccctccttgcgcttcttgccctttttgtgagtg

SEQ ID NO: 72596 - DNA, 132 bp, Zea mays
caagcaacatagaaagtggaatccagtagcaacaatagagcaacaatggcgaccaagatactttccctccttatgctccttgctctttctgcatgtgttgctaacgcgacaattttccctcaatgctcacaa

SEQ ID NO: 72597 - DNA, 132 bp, Zea mays
cttccattcaaccaactgtctacactgaaccctgctgcttatttgcagcaacaactattaccatttagccagctagctactgcctactctcagcaacaacaacttcttccatttaaccaattggccgcactg

SEQ ID NO: 72598 - DNA, 278 bp, Zea mays
gaccaacaagcaacatagaaagtggaatccagtagcaacaacagagcaacaatggcgaccaagatattttccctccttatgctccttgctctttctgcatgtgttgctaacgcgacaattttccctcaatgctcacaagctcctatagcttcccttcttcccccataccttccatcaatgatagcttcagtatgtgaaaacccagctcttcagccctataggctccaacaagcaatcgcagcaagcaacatacctttatcacccttgttgtttcaaca

SEQ ID NO: 72599 - DNA, 278 bp, Zea mays
attttcagcattcaaaaacacaccaagcgaagcgcactagcaacgacctaacaccaatggctaccaagatattagccctccttgcgcttcttgcccttttagtgagcgcaacaaatgcgttcattattccacagtgctcacttgctcctagtgccagtattccacagttcctcccaccagttacttcaatgggcttcgaacatccagccgtgcaagcctacaggctacaactagcgcttgcggcgagcgccttacaacaaccaattgcccaattgcaa

SEQ ID NO: 72600 - DNA, 98 bp, Zea mays
attttgagcattcagaaacacacctagcgaaggcactagcaacgacctaacaacaatggctaccaagatattatccctctttgcgcttcttgcccttt

SEQ ID NO: 72601 - DNA, 96 bp, Zea mays
ctcgagccgcgagacgagatctctcccacacgaggaagggagagatgggcgggcgggtggatcacgagtactcctacctgttcaagatggtcctca

SEQ ID NO: 72602 - DNA, 97 bp, Zea mays
attttcagcattcataaacagaccaggcgtatggtactagcaacgacctatcaccaatggctaccgagatattagccctccttgcgcttcttgcact

SEQ ID NO: 72603 - DNA, 96 bp, Zea mays
agcattcagaaacacacctagcgaagggactagcaacgacctaacaacaatggctaccatgatattatccctctttgcgcttcttgccctttttgt

SEQ ID NO: 72604 - DNA, 95 bp, Zea mays
atttagaccaactagcaacatagaaagcacaatagtgtaccaacaatggcagccagaatattttgccgccttatgctccttggtatttctgcgag

SEQ ID NO: 72605 - DNA, 92 bp, Zea mays
ctactatactatactctaggaagcaaggacactaccgccatggcagccaagatgcttgcattgttcgctctcctagctctttgtgcaagcgc

SEQ ID NO: 72606 - DNA, 95 bp, Zea mays
cagcattcaaaaacacaccaagcgaaggcagctagcaacgacctaacaccaatggctaccaagatattagccctccttgcgcttcttgccctttt

SEQ ID NO: 72607 - DNA, 94 bp, Zea mays
agaaagcacaatagtgtaccaacaatggcagccaaaatattttgcttccttatgctccttggtctttctgcaagtgttgctaccgcaaccattt

SEQ ID NO: 72608 - DNA, 96 bp, Zea mays
attgagaccaactagcaacatagaaagcacaatagtgtaccaacaatggcagccaaaatattttgcctccttatgctccttggtctttctgcgagt

SEQ ID NO: 72609 - DNA, 131 bp, Zea mays
caactagcaacatagaaagcacaatagtgtaccaacaatggcagctaaaatattttgcctccttatgctccttggtctttctgcaagtgctgctacggcgaccattttcccacaatgctcacaagctccta

SEQ ID NO: 72610 - DNA, 96 bp, Zea mays
gcaacatagaaagtggaatccagtagcaacaatagagcaacaatggcgaccaagatattttccctccttatgctccttgctctttctacatgtgtt

SEQ ID NO: 72611 - DNA, 223 bp, Zea mays
gaagcattatgcacctggtgtgccaattattctcgtagggacaaagcttgatcttcgagacgacaagcagttctttgtggaccatcctggtgctgtccctatcactactgctcagggagaggagctaagaaagcaaataggcgctccatactacatcgaatgcagctcgaagacccaactaaacgtgaagggcgtctttgatgcggcgataaaggttgtgctg

SEQ ID NO: 72612 - DNA, 131 bp, Zea mays
gagaccaacaagcaacatagaaagtggaatacagtagcaaaaatagagcaacaatggcggccaagatattttccatccttatgctccttgctctttctgcatgtgttgctaacgcgaccatttttcctcaa

SEQ ID NO: 72613 - DNA, 276 bp, Zea mays
aacgatcagcaccttcatggtgtcgagttctccaatctggagtcgatgagctagttgctaggctgacgtccagtggtggtggtgccgccgctaatcctgttcctaataccaacagcccaccacctacaatgggcgagcatgcaattactgaccgtgagcttccgattgagggtcttaatcaaccactgtcagatgttggaaatgatccggagttgtggtctgaagcgacagcctgtttcttcccatggtcaaggtcagggttggctcagtgagggg

SEQ ID NO: 72614 - DNA, 98 bp, Zea mays
ctcgagccgtcagttgctgccattgataagggcactggaaagaaacaggacatcaccatcaccggtgctagtacgctacctaaggatgaggttgagag

SEQ ID NO: 72615 - DNA, 95 bp, Zea mays
aagatccaggacaaggagggcatcccaccggaccagcagcgtttgatcttcgctggcaagcagctggaggatggccgcacccttgcggattacaa

SEQ ID NO: 72616 - DNA, 97 bp, Zea mays
agttgtttcaacaatcgccagccctatctttaggtgcagtcattggtacaaaccatcagggcacagcagctgcagcaactcgtgctacctgtgatca

SEQ ID NO: 72617 - DNA, 97 bp, Zea mays
gttgtgagcattgtggaataatacctctctccagtgatagccgcgagatttgaatacccatctatacaatcctacaggctacaagaggccatcacag

SEQ ID NO: 72618 - DNA, 97 bp, Zea mays
gctgctgtaggaaggcggcgaccaatgggttagccactaccaatggattaagtaactgttgtcgctgttgtaggtacgcagcaacaattgctgccat

SEQ ID NO: 72619 - DNA, 115 bp, Zea mays
gacgcgtacggaaagtccgagaatcggcgcgaggaactagcaacatacatagtgaagtacactagcaacatcggagcaccaatggcaggcaagattttagccatccgggccctcc

SEQ ID NO: 72620 - DNA, 93 bp, Zea mays
caaaaacacaccaagcgaaggtactagcaacgacctaacaccaatggctaccaagatattagccctccttgcgcttcttgcccttttagtgag

SEQ ID NO: 72621 - DNA, 91 bp, Zea mays
cacagatcacacacactcgagaactccatttcgatctcatttgagatcaacccatcctcgtttcctccgtctagcagcgtctcaccctcat

SEQ ID NO: 72622 - DNA, 275 bp, Zea mays
caacatacatagtgaagtacactagcaacatcttagcaccaatggcagccaagatttttgcgctccttgccctccttgctctttcagcaagtgttgctaccgcgactattattccacaatgctcacaacaatacctctctccagtgatagccgcgagatttgaatacccatctatacaatcctacaggctacaagaggccatcacagcaagcatcttacggtcgttagcattgaccgtccaacaaccatatgccctattgcaacaaccatcctta

SEQ ID NO: 72623 - DNA, 130 bp, Zea mays
cgctcctctgactcctagactggtagtgcccatagacgtgaagaagcagccatgggagcagaaggttcctctccacaaccgctggcatccagacatccctcccgttgctgatgtaaccgaaggggaactg

SEQ ID NO: 72624 - DNA, 266 bp, Zea mays
gcgtgctgcggccagggccgcttcaacggcatggggctctgcaccatggtgtccagcctctgcgccgaccgcgacacctacgtgttctgggacgccttccaccccacggagcgcgccaaccgcctcatcgtgcagcagttcatgtccggctccaccgactacatcacgcccatgaacctcagcaccgtcctcgccgtcgacctccagaagcagcagctgcgtacgtgacgtgatgtcgtcatcaccttcattagctgcctgatcag

SEQ ID NO: 72625 - DNA, 128 bp, Zea mays
agaaagcacaatagtgtaccaacaatggcagccaaaatattttgcttccttatgctccttggtctttctgcaagtgttgctaccgcaaccattttcccacaatgctcacaagctcctatagcttccct

SEQ ID NO: 72626 - DNA, 271 bp, Zea mays
ctccgatcccctcgtcgatccaaagatgcagatcttcgtcaagaccctcactggaaagactatcaccctcgaggtggagtcttctgacaccattgacaacgtcaaggccaagatccaggacaaggagggcatccccccggaccagcagcggctcatctttgctggcaagcagctcgaggacgggcgcacacttgccgactacaacatccagaaggagagcaccctccaccttgtgctccgcctcaggggtggcatgcagatcttcgtcaag

SEQ ID NO: 72627 - DNA, 96 bp, Zea mays
cagaaacacaccaagcgaactacctagcaacgacttaacaacaatggctaccaagatattagccctccttgcgcttcttgccctttttgtgagcgc

SEQ ID NO: 72628 - DNA, 96 bp, Zea mays
agaccaactagcaacatagaaagcacaatagtgtaccaacaatggcagccaaaatattttgcttccttatgctccttggtctttctgcaagtgttg

SEQ ID NO: 72629 - DNA, 129 bp, Zea mays
cagctgctgagtcagagctggtacatacctgcgacaacaattgttgcaacagattgtaccagctctgactcagctagttgtggcaaaccctgctgcctacttgcaacagctgcttccattcaaccaact

SEQ ID NO: 72630 - DNA, 273 bp, Zea mays
caactagcaacatagaaagcacaatagtgtaccaacaatggcagctcaaatattttgcctccttatgctccttggtctttctgcaagtgctgctacggcgaccattttcccacaatgctcacaagctcctatagcttcccttcttcccccgtacctctcaccaacggtgtcttcggtatgtgaaaacccaattcttcaaccctacaggatccaacaggcaatcgcagctggcatcttacctttatcacccttgttcctccaacaatcatcagc

SEQ ID NO: 72631 - DNA, 127 bp, Zea mays
cagaaacacacctagcgaaggcactagcaacgacctaacaacaatggcttccaagacattatccctccttgcgcttcttgccctttttgtgagtgcaacaaatgcgttcattattccacaatgctca

SEQ ID NO: 72632 - DNA, 274 bp, Zea mays
attgagaccaactagcaacatagaaagcacaatagtgtaccaacaatggcagccaaaatattttgcctccttatgctccttggtctttctgcaagtgctgctacggcgaccattttcccgcaatgctcgcaagctcctatagcttcccttcttcccccgtacctctcaccagcggtgtcttcggtatgtgaaaacccaattcttcaaccctacaggatccaacaggcaatcacagctggcatcttacctttatcacccttgttcctccaacaat

SEQ ID NO: 72633 - DNA, 86 bp, Zea mays
agaccaacaagcaacatagaaagtggaatacagtagcaaaaatagagcaacaatggcggccaagatatgttccatccttatgctcc

SEQ ID NO: 72634 - DNA, 95 bp, Zea mays
ttgctgcaacaaattgtaccagctctgactcagctagctgtggcaaaccctgctgcctacttacaacagttgcttccattcaaccaactggctgt

SEQ ID NO: 72635 - DNA, 270 bp, Zea mays
ggctgtcgttcctcatctttatcttttggaacgtcttctctggcttcataatcgtgagagagatgatgcctgtgtggtggcggtgggtgtactgggcggatccggcggcatggacggtttatgggctaatgttctcacagctcgcagacaggacggagcagatcctggtgccggggctcggggagctcacggtgacagagttcctagaggggtacctgggcctgcaggatcgctactttgtgctggtgacctgcctccatcttgccatca

SEQ ID NO: 72636 - DNA, 86 bp, Zea mays
cgtaattccttgttatctgccaattatgtatggactatggacatgtgttgcgctgttcaacttactactacaaataagtaatcgat

SEQ ID NO: 72637 - DNA, 265 bp, Zea mays
gtacatcaagcaagttctcagtagcgtcgatgagagtctagtggttggatcttctggagttgatggtatcctcattgaccttggcatgtcatccatgcaggtgaataaatctaataggggattcagtgtactccaggatggtcctcttgatatgcgcatggaccctaaggcaactttaagagcagagattatcttgaattcttggccggagcttgaacttgggcgtatcctgcgtgaatatggggaggaaagcaactggcaatcc

SEQ ID NO: 72638 - DNA, 264 bp, Zea mays
gcttgctgaggttccttgttgacatgaggggagctgacgttgatgatcgccagcttcgagatgatcttatgacaatgcttattgctggacatgaaacaactgctgctgttctgacatggtctgtttttttgctagcccagagccctaccaggatgagaaaagcccaggcagaacatgattctgttctcagcaatggggcaattactgtcgaatctcttaagaaactggagtacataaaactgattattcttgaagctcttcgct

SEQ ID NO: 72639 - DNA, 265 bp, Zea mays
gaaagatcttggtgtgagctatgtcaaggagaaacaattgcaagttaatatgaagatcaataaactgcgggagactgtgaaggcacatcaggaaaagttgcaaacagtggcaaagactgctggtttgaatcatgaagaatggcttgctaatgcggatcgctgggttgctggttttctagagaagtttgagcaacactgccacaatatggaaactgcgatcaaggatcggatacaggagaggctagggaaacagttgagcaaagga

SEQ ID NO: 72640 - DNA, 265 bp, Zea mays
ctttggaagatggggattttagagcagatatcagatattgaagcagaaatttcaagaactcaaaagaacaaagcaacagaacatcatttagggttactcaaagcgaagttagcaaagttcagagcacaacttctcgagccaagcaaaactcccggccaaaaaggagatggctttgaagtttcaaagagataagacggtagaatagcactcattggttttccatcagtaggaaagagtacaattctcacagagttaacagacactg

SEQ ID NO: 72641 - DNA, 263 bp, Zea mays
ctcgccgccgggctcaccgtcatcgggcactaccaggacgaaaagatcccatgggccatcggcgtggccatcgcgtctaccatggcctacgtggccttcttctccatcggcctcggccccatcacgtgggtgtacagctcggaggtattcccgctgcatgtgcgcgcgatgggctgcgcgctgggcgtggcctccaaccgcctgaccagcggcgtgatctccatgaccttcatctcgctgtccaaggccatcaccatcggcgg

SEQ ID NO: 72642 - DNA, 263 bp, Zea mays
cgcctcggcgtcgaccagttgccgccactagctatcctcacgggcggcggcgcaccgctcgtcggcggcggagtaggtcccggcgcgggcggcgaggaggcgaaggccaaggaggagaagatggcgtacgacgtgaagctggaggggttcgacgccgcggcgaagctcaagatcatcaaggagctgaggaggttcacgaatctgggtctgaaggaggccaaggatctcgtggagaaggcgcccgccgtgctgaaggctggagt

SEQ ID NO: 72643 - DNA, 259 bp, Zea mays
tgcagaagcagctcaggccctacatggagtccatggtgccacttcccggtatctatgatccggacttcatcgcggctaaccagggctctcgcgccaacagtgtcatcaagggcaccaagaaagaacaggtggagcagatcatcaaggatatcagggagtttaaggagaagaacaaagtggacaagatagttgtgttgtggactgcaaacactgaaaggtatagcaatgtgtgcgctggtctcaacgacacgatggagaa

SEQ ID NO: 72644 - DNA, 261 bp, Zea mays
gaaagatcttggtgtgagctatgtcaaggagatacaattgcaagttaatatggagatccataaactgcgggagactgtgaaggcacatcaggaaaagttgcaaacagtggcaaagactgctgggttgaatcatgaagaatggcttgctaatgctgatcgctgggttgctggtttcctagagaagtttgagcaacactgccacaatatggaaactgcgatcaaggatcggatacaggataggctagggaaacagttgagcaa

SEQ ID NO: 72645 - DNA, 258 bp, Zea mays
gagttcttctacggggaggcccccgccgcgatgcgcacatctgctcggccttctccttcctggcgctgtcgctggggttctacgtcaactcgctggtggtgacgctggtggcggccgtgacgaagcggcccgggtggctggcgacggacctcgacaccggccacctggactactacttctggtcctggaccatcatcagcgtcgccaacctgctgctctacatggtgctcgccgcccggtacacgcccaagcaggtcg

SEQ ID NO: 72646 - DNA, 258 bp, Zea mays
  unsure (1)..(258): unsure at all n locations
gaacagccaacaaataaacgtacaaggtcagaaagtactacagaatcaagcacaaaagcatccagggagaaaattagaagggacaagctgaacgagagattcctggaattgggtgccattttggagccagggaaaactcctaaaatggacaaaacagctatattgaatgatgctattcgtgtaacangtgaattgcgtagtgaagcaaaaaagctcaaggattcaaatgagaatctccaagagaagattaaagagctg

SEQ ID NO: 72647 - DNA, 260 bp, Zea mays
gaagatggtatcaatcagcatggagaagaagctggaacaccagcgagtcttcaccccttcggtcgtcgagccgtcattcggcataggacggatcatctactgcttgtttgagcactcgttttacacaaggcctagcaaatcagaagaggaacagctgaatgtcttccggttccctcctcttgtacgccctatcaagtgcaccgtgttcccccttgttaagaatcaagagtttgacgatgctgccaaagtaatcgccaagg

SEQ ID NO: 72648 - DNA, 266 bp, Zea mays
tgcaaagagtctaagccaaccggcggaaaggatggaagcaaactggacgttaatacgaaacaacaacccaatgttagaccttcgggcggtgattacgattacttgttcaagctccttttgattggagacagtggagtgggcaaatcttccctcttgcttcgctttgcggacaacacttttactgaatcctttatcagtaccattggtgttgattttaagatccgtactatcaacattggcggtgcgaacgtgaagcttcaaatttg

SEQ ID NO: 72649 - DNA, 172 bp, Zea mays
agcacgaggagctctgcaggttcaggccgtacagctgcccgtacgcaggttccgagtgcctgatcgcaggcgacgtcccgttcctggtgtcccatctcatcaacgaccataaggtggacttgcacgagggctgcacgttcaaccaccggtacgtgaagcccaacccgtacga

SEQ ID NO: 72650 - DNA, 261 bp, Zea mays
ggctgaccaacaaaagagtcgatgcttttaactacacatcaatagttacgttctttatcgtgttgtcgtgcataattgctgtcgggaccaacctaagccagttcatatgcatcggaagattcacggccgtctcgttccaagtcctaggtcacatgaagacggttctcgtgttgaccctggggttctttacctcagggaaagagggtctcaatttccacgtcgcccttggcatgtttctggcagtgatcggcatgatctggt

SEQ ID NO: 72651 - DNA, 258 bp, Zea mays
ccgggtccctcgacgcgctgaggaagatcgtggcggctgatggggtgaagggcctgtacaaggggttcggacccgccatggcacgcagcgttccagccaatgccgcgacattcgtggcctacgagatcacgagatcggcgcttggttgatttgattggtgctggcctttgccatggccctttgcagtttattcattctccttgcgcggctggagcaacggaacaatgcgagacaattttaggaggaaagagagagaga

SEQ ID NO: 72652 - DNA, 261 bp, Zea mays
cggctcgaggtcagacagcatcgacactccttggcaggttctactacaaccaaggtggaaatagcaagtggatgtccacatttgtccaaaccgctggctttccagtgctgttcgtcgccctatatctgttccgttcaaaatcgccttctacacaaacaaccaccagtaaccctgagacttctaccaccagaattactcttatatgtgttgtcttgggcctcatcattgctgccgatgacttgatgtattcctatggcctgt

SEQ ID NO: 72653 - DNA, 159 bp, Zea mays
cgacgagctgttcctgctcaacggcgtgctcaacatcggcgactccatcccgtggctcgactggatggacttgcaggggtacatcaagcggatgaagaagctcagcaagatgttcgatcggttcctggagcacgtcgtcgaggagcacaaccagcggcg

SEQ ID NO: 72654 - DNA, 275 bp, Zea mays
ttccgctcgagacataaataaaaacacgccgccgccatcaatggcgatgtcgcgcttcgggcgctccgggcagccggagaaccgcgaatctttctccctcctcgtcctcaacgtctccttccgcactacggctgacgatctcttcccgctcttcgatcgctacggcaaggtcttagacatctacatcccgcgcgaccacatcactggggatccgcgagggttcgcgttcgtgaggtacaattacgaggatgaggcgcgggatgccattgacgggc

SEQ ID NO: 72655 - DNA, 256 bp, Zea mays
gtaaggtgtgccatggcttgtggcaagctatcgtccattctcgaccctgctgctgggcattggcctatggaggtggccggaaggctagcggaactgggcctgaggtgcagtgaggacagaagccgggatcgcccagacctgactgctgagactgtacgagagctggaacagctacacttgacgagggaggaggaacaagcaccctcctctttcctgtgcccgattatgcaggagataatgcatgatcctcaggtgt

SEQ ID NO: 72656 - DNA, 223 bp, Zea mays
caaaatactgatgagttatttcagtgtggtcagttctgtgctgtcttcatcaatccctgtatcttccatacaggtctctttgtgcttcagccctcaatgaacgtttttaagaatatgctacatgagctatcggttggacgtgaaaacccagatggtgcagaccaaggctttcttgctagttgatcctcccgtgacttgacttgggagtcagccacatgttcca

SEQ ID NO: 72657 - DNA, 258 bp, Zea mays
gttggtagcaaacgctggggactgccgcgccgtcctgtgtaggaaagggacagcggtggaggtgtcaaaggatcacaggccgacatacgacgcagagcgtcaaagggttatcgagtgcggtggatacatcgaagatgggtacctcaacggcgtactctctgtgacccgggctttagggagcagggacatgaagctgccccaaggctctccgtcgccccttatcgcagagccagagatccactggaccaccctgacgga

SEQ ID NO: 72658 - DNA, 205 bp, Zea mays
gtgtttgaccacggcagcaagcgcctcgccctcgcgctcaagaaggaatttgatacggcatatggtccagcttggcattgcattgttggaacaagctttggttcctatgtcactcactctctgggcggtttcttgtacttctccgtcgagaaggcctatattctcctcttcagaaccgctctcgagccataagccatccgcgatg

SEQ ID NO: 72659 - DNA, 246 bp, Zea mays
ggtttccccccaaacccgtccgagaggcagtcatcccgccgcgatgagggccaagtggaagaagaagcggatgaggcggcttaagaggaagcgccgaaagatgaggcagaggtccaagtaggcagattcatggagtgtccccgcctggagtctctctgcgttcggttgtagtttactgagtaattttagtttttttactaagacagtctgttatggatcagaaattccttgcgtttgtccgtggtc

SEQ ID NO: 72660 - DNA, 242 bp, Zea mays
gggttttgctgctctccgaccccgagctccgaaggccgcagcatcaggcgcggcccccctcgcgtgtgaccgagatggcgatgccgaatcaggggaccgttgattaccccagcttcaagctcgtcatcgtcggcgatggtggaactggtaaaactacatttgtgaagaggcatctcactggagagtttgagaagaaatatgaaccaaccattggtgtggaagttcatccgttggatttcacc

SEQ ID NO: 72661 - DNA, 237 bp, Zea mays
caaaaataaaaccaaaaaaaaggaatgcaacacgagaacttcccaggaggtcacccatcctagtactactctcgcccaagcacgcttaacttcggagttctgatgggatccggtgctttagtgctggtatgatcgcatccgtcatatcctgcgtcctccttcctcttatgcccacacctccgtgctcggctcgcccacggcactggacatccttcctccgcacaaagtacccgaaaa

SEQ ID NO: 72662 - DNA, 241 bp, Zea mays
cgatccaggtcaccgagttcactattcgtgacgcatacatgctcaagatatttgaagacaacccggcaaggcttccaggttggtgcaacgcaggcacggacaagcttcccttttgccagattctcggagagtacagaatggagctaccagagtacaacacgattgaaccttatgcgaaaatgaacgagaactgtccgtccttgcccccaacgtacaaacgacccgcacgctgctgactacg

SEQ ID NO: 72663 - DNA, 239 bp, Zea mays
ccctccagcgcctccaccctcctcgccgcctcactccctctgaggtcgcagatccgtccggttagacgaagccgcccgcacccatggcctccggtgagctcgcctgcacctacgccgccctcatcctcagcgacgacggcatcgccatcaccgccgagaagatcgccaccatcgtgaaggcggccaacatcaaggtcgagtcctactggccggcgctcttcgctaagctcctggagaag

SEQ ID NO: 72664 - DNA, 242 bp, Zea mays
ggcacgaacaactgcagtgttggtgcctgaatttccgtgggcgggtcactgttgcctcggttaaaaacttccagttggtggcttctgaggacaatggaccagagagccaagagagtgacaaggtgattctccaattcggaaagatcggaaaagatttgttcaccatggactacggttatccaatatcggcatttcaagcttttgcaatttgtctgagcagttttgatacaaaaattgcctgc

SEQ ID NO: 72665 - DNA, 242 bp, Zea mays
ctcctctgcacgcagggctccccgttggagcgtccaaagatgtcggaggtggtgaggatgctggaaggtgacggcctggcagagcgttgggacgaatggcagaaagtagaggtggtgaggcaggaggccgactcggcaccgctccgcaatgactggatcgtcgattccacgtacaaccttcgtgccgtggagctgtccggtccaaggtagtagccactccatgactccgaagaaagaattca

SEQ ID NO: 72666 - DNA, 235 bp, Zea mays
ctcgagccagctgaacgaatggttcttaccatgtgagagccttggactagcagctgaacacggctgcttcctcaggctgagaagagacgcagaatgggagacatgcgttccggtgatagactgcagctggaagcagatcgcagagcctgtgatgaagacctataccgagactacggacgggtcgactattgaggacaaggagactgccatcgtgtggtgctacgaggacgccgat

SEQ ID NO: 72667 - DNA, 235 bp, Zea mays
gtgttgagacatgagaagcaccacagatacgtgagcacgcacgacgtcgggtactgggcgaacagcttcttgcaagatcttgagcggatttgcctcgaccataacaggaggcgttgctggggcataggatttgggctgaagttcagggttgtggccctcgacccaaacttcaagaagcttgcggtggagcacttggtctcggcctaccggaggacgaagaagcgcgtcattctct

SEQ ID NO: 72668 - DNA, 240 bp, Zea mays
gcaatgtgctgttcgatgatgatatgacagcacacgtagcagactttggcatcgcaaagttgctactgggtgatgacaactccatggtcgtttccaccatgcctggaacacttggatacatggcaccagagtatggatctcttggaaaggcatcgcgcaagagtgatgtgttcagctttggaatcatgctttttgaagtcttcactgggaagaggcccacagatacgatgtttgagggag

SEQ ID NO: 72669 - DNA, 240 bp, Zea mays
ggctgctcgccctccctgagcggtgctatccgtgtgaacccttggaacatcgattcagtagccgacgcaatggactacgcgctggagatgccggaaggggagaaggtgttgagacatgagaagcaccacagatacgtgagcacgcacgacgtcgggtactgggcgaacagcttcttgcaagatcttgcgcggatttgcctcgaccataacaggaggcgttgctggggcataggatttggg

SEQ ID NO: 72670 - DNA, 234 bp, Zea mays
ggccacccaaggagctctcgctagcgttcacgggtctcacgcttctgccgtttattggattcttgatagggctcgttcgtcttggagtgaacttgaagaacttcccgtccttgccaggaccggccgcatttgcctcacttttccatgctgggataggagcagtcctgatgctctacgttctcttctggatcaagttggaccttttcacaactctcaagtacctcggcttcctcg

SEQ ID NO: 72671 - DNA, 224 bp, Zea mays
cttccagcccgagccggactacctcaagcgcaccatcccctacctcgtccacaacccggagatcgccctcgtccaggcgcgctggagattcgtgaacgcggacgagtgcctgatgacgaggatgcaggagatgtccctggactaccacttcaccgtggagcaggaagtgagctcctccgtctgcgccttctttggattcaacggtgaaaagcgagctgccgagt

SEQ ID NO: 72672 - DNA, 238 bp, Zea mays
caagattggagagaagtgggaccgtcagggagaaaatggccagatgatgagctgcacatgtcttgggaacggaaaaggagaattcaagtgtgaccctcatgaggcaacgtgttacgatgatgggaagacataccacgtaggagaacagtggcagaaggaatatctcggtgccatttgctcctgcacatgctttggaggccagcggggctggcgctgtgacaactgccgcagacctggg

SEQ ID NO: 72673 - DNA, 234 bp, Zea mays
aaaatatctaatgtctgcgtccaggttgctgaaactggtcagagtgagtcactctactgtaataactgtaagctctcgatgagccgattattaaggtgctgtccaacatgcccgtttaagctgtgcctaagttgctgtcagaagatacgtgaaggaaacacgtcggacaacacccctgaagataaattcaagaatcggttgattcaacaagagtctgtccatgaggatggcagt

SEQ ID NO: 72674 - DNA, 234 bp, Zea mays
gtttcagtttgataagaactgtttggtcattcagtggtctggagataatcctaatagccttgcaggtttaactctgaatacccctggtgatcttgccattagccttggtactagtgatacagtattcgggataacaacagaagctaaaccaagccttgaaggacatgttttccccaatcctgttgagcctaatggttatatggtcatgctatgctacaaaaatggctccttgac

SEQ ID NO: 72675 - DNA, 235 bp, Zea mays
gggtactgtagcagggaagaacatctgtctcacgccttcagctttgatgatagggaggatgatgccgcatgcaccagaaatcagtctagctccaatccacattcgtttaggtgaaggaagagggagcatcaagcggccaacaccgtagatagcaacagcaaagaagtgtgcaactaaactcagtggccgagggttaaggccagagagtaaagcgataggcccgttcgagaagacg

SEQ ID NO: 72676 - DNA, 228 bp, Zea mays
acaggttgcatttgcatctgagttcctgattgttgtatcccagtttcttctgtgagtggaatcgcgaggaagaaggatgtcgtgctgcggaggcaactgcgggtgcggcgccggctgcaagtgcggcagcggctgcggagggtgcaagatgtacccggacatggcagagcaggtgaccaccacccagactgtcatcatgggtgttgcaccatccaagggcgggttcga

SEQ ID NO: 72677 - DNA, 249 bp, Zea mays
agagcggtggggcccgcgcggccaagttatcctgttcgctaccgtgatgtttaccctagtccagagggtttatcttcgttcgtctcgtttgttgttgcccatctgtgtttttgattgcaaggtcgctctgtgtcagttgttagtgctgtgttcatcctcggctccagcagacccatgcatcaaccagcatggactgtggatcgatggatgctgttactcctgtcaggatttgttctaagttaatcctaa

SEQ ID NO: 72678 - DNA, 252 bp, Zea mays
gggcaaggacacgaggattggccccaagttcctgaacgccagtgttgggttcggtgggtcttgcttccagaaggacatcctgaacctggtgtacatctgcgagtgcaatggcctgcccgaggtggccaactactggaagcaggtgatcaagatcaacgactaccagaagagccggttcgtgaaccgcgtcgtgtcgtccatgttcaacaccgtcgccggcaagaagatcgccgtcctcggcttcgctttcaa

SEQ ID NO: 72679 - DNA, 252 bp, Zea mays
ggcaacttccccgaaccccgcgacgattcaccgagccggcgcccagtgacccttccagaagcttccagaaggtcaccgccatggccgcgcccttcttttccactcctttccagccctacgtctaccagagccagcaaggatctgtgacggcgtttcagatatccggtggagatgtgcaggtcctgcaggtgatgctgaagtctcaggagaagctgactgcaaaaccaggtgcaatgtgctacatgtctggga

SEQ ID NO: 72680 - DNA, 253 bp, Zea mays
atttctttcatgctgagatgaattcaggtagatgcaaaaggtgggttagcgaagagattatttgatattgcctatagccgtcgtctagctgctgtcaatggaagctggttgggtgcgtggggactagagaagcttttgtgggatatgctcgtcttccgaaaggttcgtgcaatcttgggaggacggattcgctttattcttgcaggtggagcacctctgtcaggggaaacacagagatttatcaatatatgtc

SEQ ID NO: 72681 - DNA, 250 bp, Zea mays
tgatgccaaatgttgacttgacatttcggctgaattgggccagtgctggtgaaaagcgcgatgatactcctgaatatactatttttgttggggatttggctgcagatgttacagattacttgttacaagagacattcagggttcattatccctctgtcaagggtgcaaaagttgtgactgataaattgacaatgcgcacaaagggttatggatttgtgaaatttggtgatcctacagagcaagctcgtgc

SEQ ID NO: 72682 - DNA, 248 bp, Zea mays
gccctgacggcggcgaaagctcctggacaaggtccgggtcatccaggccgatacattgagcatgatccagggagggttcaccggtgggagcaccacttctgaaactagctgcgaagctgttcgacagtcgtgtgttgcgctggttgagagactgaagcccatcaaggagaatctggaagctgaggcaggcacagtggaatggagttccttgattgctcaggcaagtatggcgagtgtgaacttatcgg

SEQ ID NO: 72683 - DNA, 250 bp, Zea mays
agccctcttcctcgattttcctcctccgtccgcgtagttctcggtttcggcgatgtcggggcgcggcaagggcggcaaggggctgggcaagggcggcgccaagcgccaccgcaaggtgctgcgcgacaacatccagggcatcacgaagccggcgatccgtaggctggccaggaggggcggcgtcaagcgcatttctgggctcatctacgaggaaacccgcggcgtgctcaagatcttcctcgagaacgtc

SEQ ID NO: 72684 - DNA, 250 bp, Zea mays
cataattgaggaaagggagcaagccattcaagatatccaacagcagattggtgaagtacatgaagtgttcaaagatcttgctacccttgtgcattcccaaggaatcataatcgaggaaatcgacatgaacattgaaaattctgcagcagtgaccaaagaggcaaagacagaggttgccaaagcagccaagactcagaaatcgaattcgtccctgatttgcttgcttatggtcatatttggggtcgtgctg

SEQ ID NO: 72685 - DNA, 252 bp, Zea mays
ccgccggcgaggaccatgaacgccatcgaggaggtgtaccgcatctcgcgcgcccaggcgctgattcgcgctctgcggcaccatcccgggctactggttcaccgtcggcctcatcgacatcgtgggcaggttctggatccagatcatgggcttcttcatgatgaccgtgttcatgctcgcgcttcgggtgccgtacgagcactggaccaaggcgtccaaccacaccggcttcgtcgtcctctacgggctcac

SEQ ID NO: 72686 - DNA, 253 bp, Zea mays
gttgaccagtcggatgggtccttccttgatgacgggcagcaggaggaaggttatgtgctgacatgcgtctcctacccaaaatccgactgcgtcatccacacccacaaggaaggcgacctgtactagggctagggcttttcaatttggcgagggaccaaaaatgctctcgagtggtgtgttgtcaagcaaagctccatctgcgcgccctaccccgttgtgcgaactgtttggcatcaaacttgtgtggttgctg

SEQ ID NO: 72687 - DNA, 220 bp, Zea mays
atggcggcgctgttcgtgtggaagttcgtccagtaccggcgcatggcggcgttccaagtgatggggtactgcctccccacggccaagggcgtcgcggagacgctcaagctcaacatggcgctcgtgctgctccccgtctgccgcaacacgctcacgtggctccgctcctcctgggcccgcttcttcgtccccttcgacgacaacatcacctttcacacaa

SEQ ID NO: 72688 - DNA, 250 bp, Zea mays
caatcctctcgtctccgcggctaagatgtcggggcgcggcaagggcggcaagggcctgggcaagggcggcgcgaagctcaccggaaggtgctgcgcgacaacatccaggggatcacgaagccggcgatccggaggctggcgcggcggggcggcgtgaagcgcatctcggggctcatctacgaggagacccgcggcgtgctcaagatcttcctggagaacgtcatccgcgacgccgtcacctacaccgagc

SEQ ID NO: 72689 - DNA, 247 bp, Zea mays
aaagactggaactcctattgcagtgcagcatgcgccacgccaccagcagaaaaaccgcgtgtcgccccaaagcctccgactccagcaaccacaagctatgctgatcggccatatgtctgcccctatgaaggttgtgacaaagcatacattcacagttacaaattgaaccttcatctaaaaactcagcaccctgaacacggtcaagaggaaaacggtaaggtcggtgcttctggtgggcagcatgctg

SEQ ID NO: 72690 - DNA, 248 bp, Zea mays
ggagcttctaacaggacgtaaaccttatgacagttcgtatccacgagctgaacaacatctagtacgatgggccacttctcaactctatgatattgatgccataacgaagatggttgatccttccattcgaggacaatgttctgataaggcattatcccgttttgctgacattattagccgctgcattcagcatgaaccagaattcaggccaccaatgtctgaagttgtccaagacttaactcgcatgg

SEQ ID NO: 72691 - DNA, 248 bp, Zea mays
ttggagaatcttaataaagacagatatcaaattcctgaggactggccttaccaagaagctcgacgcttgttcaaggagcctaatgtcacattggatattcctgagctaaaatggactgcacctgatgaggagggtctcataagtttcctggtaaaagataatggtttcaatgaagatcgggtgacaaaggccatagagaagatcaaatctgccaagaataaatcgtcgcaaggaagactcgagtcctt

SEQ ID NO: 72692 - DNA, 245 bp, Zea mays
cagcaccaccttcatcgtgccggccgagatcttcccggcgaggctccggtccacgtgccacggcatatcggcagcggccggcaaggcggcgccatcatcggcgcgttcgggttcctgtacgcggcgcaggaccccaagaagcccgaccatggctactcgccgggcatcggcatccgcaacacgctcttcgtgctcgccggaaccaacttcctgggcatgctcatgtcggtgttcgtgccggagtc

SEQ ID NO: 72693 - DNA, 248 bp, Zea mays
ccctacactcccggcggcggcggcggcggcgcacagcggcagcagcatccgaagatggtgaagttcctcaagcccggcaaggccgttatcctcctccagggccgcttcgccggcaggaaggcagttatcgtgcgcgtgttcgaggagggcacccgcgaccgcccctatggccactgcctcgtcgcaggcctcgccaagtacccaaagaaggtgatccgcaaggactccgccaagaagactgcgaagaa

SEQ ID NO: 72694 - DNA, 257 bp, Zea mays
ccgccgccgcccgcaaagcacgccgagagggagaggttcttccgagagaagagcatcgacggtgtggccagccttccgggccacatgaggggcctgtcgcagcacagccgggacggcagcagctcgtgtagcggcagcactgattacggcgactgaaaggggaggggtgagcagcagcagcagtacatatagggttccccttcttggggctggtctcacacttggtcaggccaggcaggcgatacattggtgttgtg

SEQ ID NO: 72695 - DNA, 241 bp, Zea mays
cggctcgagggtccgtgttcagccctgaggtgcttgacctttccgaggaggacctgattgagcagtttgccactggtgtctccatggttgcctccctgtcactggcgatctcgtacccgacccttgctgctgtgccccacatgttcatcaatgggtacaagaatgtgcttgctgttgctgtcgagacagactactcgtacccacatgctgacaagatcaaggagtacctcaaggacccaag

SEQ ID NO: 72696 - DNA, 201 bp, Zea mays
tttttgtgttgcactgaaacgctaggtattaagctacggctgatcaacaaacaacaagctctagatgtgtcaacataataaattcttaatgctccagtcagtaagcattgactctgaatttcaggatcaaaatttccatttcatcagagcacagatgtaagcggacacgccaccgaattcatcaagtacaactacactgga

SEQ ID NO: 72697 - DNA, 237 bp, Zea mays
ctgagccaaatgatcccgaagcctgagacatctggcctgggcctggaggacaacgaggaggaggaggttgacgaaactggtgtcgaggccaaggatgtcgagctggtgatgactcaggcatctgtttcgaggcccagggcggtcaaggccctcaaagcttctaatggagacatcgtcaccgccattatggagctgactacttagtgttatttttgtcaaccacccctttcttttaag

SEQ ID NO: 72698 - DNA, 234 bp, Zea mays
  unsure (1)..(234): unsure at all n locations
aatagcattccctttatctcagctatcaggtcgtatgcgggctctactcaattatgtagcacctgaaatccatgaatctgagccttttactcagcgcacgncgtatatagtttcggtgtggtgatgctagaacttcttactggtcgtaagccatatgacagctctcgtccacgtgctgaacaacatcttgttagatgggctgattctcagcttgatgacatgaagtccctgtca

SEQ ID NO: 72699 - DNA, 238 bp, Zea mays
ctccaactaaagaaacatggccaggcgttgcttcgttgcccgattacaagtcaactttcccaaagtggccacctgtggatcttgcaacggtggtcccgacactcgaaccggcgggaatcgatctcctatctaagatgctgcgtctagatcccagcaagaggatcaccgcccgcgccgccctcgagcacgactacttcagggacctcgagcacgcctagcagggatggatggatggatg

SEQ ID NO: 72700 - DNA, 127 bp, Zea mays
gatctgggaggattcaaaggggaaggtggatatattcattggtggaattggaacaggggggacaatatctggtgccggccgttttctcaaggagaaaaatcctggaattaaggttattggtattgag

SEQ ID NO: 72701 - DNA, 234 bp, Zea mays
gcccaaatatatctccccgcgtccgctagccctagccgccgtccgccgacttcatcgtcgccgtcgtctagacctcttcacgcactggaaaggttaaagtccgacatcaatggcgaagatcatcctgatctcatcatgtgccggaagcagcctggcatcgcgattggccgcctttgcgagaaatgtgatggcaagtgtgttgtctgcgactcgaacgtgcgcccatgtacgctt

SEQ ID NO: 72702 - DNA, 118 bp, Zea mays
taaattcaccgaagaaggcttctctggttgcattagcttcttatgcttcagatcctgctgaggctgatcgtctgaggttcttggcctctgctgctggcaaggatgtctatgcccaatg

SEQ ID NO: 72703 - DNA, 210 bp, Zea mays
ggaaagtaaacagtcgattaaatttcgacatggtgagtgactcagtggtagccggcagtctgggccagataaatgggggttctacctcggatcctgcagctgcatttagccccctttcaaagaagagagagacagatacttgatcaattataaatggtggcctctctcgtctctgcctcacagatcggtgctccgtagcagtctattcta

SEQ ID NO: 72704 - DNA, 235 bp, Zea mays
gattgatcaagaatatcaaagagaacgcaaatgtaagggatgacagcacatccaggcgaaagcaaagcccttccatcgctccagcgttgtagaatttcggtctggagtaggcatccattagatggctgtttgctgatacaaactgatcttccttgccaaaacttctgatggtagtcgatcctgttattgattcggcaaaatgctgtatgataggagctttgcagacacctactag

SEQ ID NO: 72705 - DNA, 191 bp, Zea mays
cacgttcacggtagcgagagcttatcgtcgtcggcggtgaagatggtgtcgctgaagctgcagaagcggctcgccgctagcgtcctcaagtgtgggaaaggcaaagtctggcttgaccccaatgaagtcagcgagatctccatggctaactcccgccagaacatccggaagttggttaaggatgggtttat

SEQ ID NO: 72706 - DNA, 188 bp, Zea mays
gcagaaacttttctgcgtcaagttgatagtgctgctgtatttcataatgcgagtacacgattctctgatggggctcgttttggattgggtgccgaggttggcataagcacagggcgtatacatgctcgcgggcctgtgggtgttgaaggtctcttaacaacacgctggatcatgcgaggaagtgggca

SEQ ID NO: 72707 - DNA, 233 bp, Zea mays
gtccctctcctactcctcccccaaagttccgttcagttccctcccgcaggtcaaaaccctcaacctcccacgcggctcgctgggtgggtcggtcggccatggctccccccgcgctcggatctcaggtggccgccgcagcctcggttcccgtcggctcggactctctcgctaagggcgcggcgctcaagggtaacagcactctaaactttcggaccaaaccatgcatcggaatg

SEQ ID NO: 72708 - DNA, 241 bp, Zea mays
cggctcgaggatggccatcgcggagcggcgcgctcaagaccaacatcacgacgctgggcccgctcgtgctgcccgtcagcgagcagctcctcttcttcgccacgctcgtcgccaagaagatgctcagcgccaagacgaagccctacatcccggacttcaagctggcgttcgagcacttctgcatccacgcgggcgggcgcgccgtcatcgacgagctggagaagaacctgcagctgagccc

SEQ ID NO: 72709 - DNA, 256 bp, Zea mays
  unsure (1)..(256): unsure at all n locations
ataattcccacagcacgtcgtgttgtctactctgcattccttatggctactcctcgccttatggaacctgtgtattatgttgatantcctacaccaattgattgtgtctctgcaatttatatggtgctatcccggcgggtggtcatgtaacagctgatgtacctaagccaggcactccaatatacattgttaaggcatttttacctgttatagagtcttttggatttgagacagatctcagataccatacacaggg

SEQ ID NO: 72710 - DNA, 255 bp, Zea mays
caatttgcaaagaattggggtttcctcccgcttgttggtggtggatctactaagattcagcctgtgtatgtaatcgatgttgctgctgctattgtgaactccctgaaggatgacggcactagcatgggaaagatattgaacttgggggccctgaaatttacactgtccatgagctggctgagctgatgtacgagacaatccgcgaatggccaagatatgtcaatgtccctcttcctgttgcaagggctattgctt

SEQ ID NO: 72711 - DNA, 257 bp, Zea mays
cggctatgtcaatcttcgagtacaatgggtccgccgtggtggcgatggtggggaagaactgcttcgcgattgccagcgaccggcggctcggcgtgcagcttcagaccatcgcgacagacttccagagggtgttcaagtccacgacaatctctacatcggcctctcagggctcgccaccgacgcccagacgctgtaccagcggttggtcttcaggcacaagctgtatcagctgcgcgaggagagggacatgaagcctg

SEQ ID NO: 72712 - DNA, 258 bp, Zea mays
aggtggccggcacactgcctttgtcacaaattacacaccccaattctacttcaggactgctgatgtcactggaaaggttaagttgcttggtgagacgaagatggttttgcccggtgacaatgtaaccgcgaatttcggttgatatcgcctgttcctcttgaaactgggcaaagatttgcgatgagggaaggagggaggacagttggtgccggggttgtctccaaagttattagctgatgagtttccactttcttgccc

SEQ ID NO: 72713 - DNA, 256 bp, Zea mays
gggagacatgcgttccggtgatagactgcagctggaagcagatcgcagagcctgtgatgaagacctataccgagactacggacgggtcgactattgaggagaaggagactgccatcgtgtggtgctacgaggacgcgatccagatttcggatcctgccaggccaaggagctccacgaccatctggagagcgtgcttgcaaacgagccggtctcagtgaaagctggacccaacctcgtcgaggtgaagccacagggc

SEQ ID NO: 72714 - DNA, 246 bp, Zea mays
cgtacggtccattccattccatcccatctccctcctcgcctacggcttcttccaccgcggcatcgtgcccggcctctgcttcggcgcgggcctggggattacgctgttcggcatggcctacatgttcgtccacgaggcctggtccaccgccgctttccggtcggccccatcgccgataggccctacttccgccgagtggctgcctcgcacaagatacaccacatggacaagttcggcggcgtcccg

SEQ ID NO: 72715 - DNA, 160 bp, Zea mays
tgcaatggaggcggtggggaagagcgtgtgcgtgaccggcgcgggcggcttcatcgcgtcgtggctggtgaagctcctcctctgccggggccaatacaaggtccgcggcaccgtgcgcgaccctggtgctagcagaatgctcatctcaaggttctagaag

SEQ ID NO: 72716 - DNA, 236 bp, Zea mays
tcgggaggccatcaagcactcgctggggcagtcccacccggtgcgcctggtgccctacaacccggacttcctggacgagtcggtgctgtggacggagagccgcgacgtcggcaacggcttccgctgcgtccgcatgtcaacaacatctacctcaacttcgatgccctccgcggcgacaagtggcacggcggcgtccgtgacggcaccaacgtcgtgctcaggaagtggtgcgaggg

SEQ ID NO: 72717 - DNA, 261 bp, Zea mays
tgatgacggcagaaagataaactcattttatcattcctttgtggaggtattatgcttaattgttagggtccgtgcatgcacgcagagcgaaacaaagtgcattttggctcctactctcctagccctcttacgcagtgcttttatgcctatacaatgctgccagtggtaggcgcactgacaataccatcaggtacaacgccaagcgcaggcactggcgccgcaccaagctcggcttctgagcgtcgggattggccggctgct

SEQ ID NO: 72718 - DNA, 254 bp, Zea mays
ccatccgtacccaatctaatcgacacccggccgagatgggccgcaagttcttcgttggtggcaactggaaatgcaatggaaccacagatcaggttgagaagattgtcaaaaccctgaatgaaggaaatgttcctcttcagatgttgttgaggtcgttgtcagtcctccttatgtgttcctcccggtggtcaagagccagctgcgccaagagttccaagttgctgctcagaactgctgggtgaagaagggaggtg

SEQ ID NO: 72719 - DNA, 252 bp, Zea mays
aggtgatatcggggagtggcaatccaatggcacgatgaagatcatcgacagaaagaagaacatcttcaagctgtcccagggggagtatgtggcagttgaggtcctggaaagagcatacctgcagtcacccctttggcatcggtctgggtctacgggaacagcttcgagtcgttcctcgttgccgtggctgtacctgagaggcaggctctcgaggaatgggcagcagccaacagcaaggccggcgactttgca

SEQ ID NO: 72720 - DNA, 253 bp, Zea mays
gaagggtttgaaacagaagaaggctcacctgatggagattcaggtcaatggtggtaccattgctgacaaggtggcatacggctacaaattttttgagaaagaggtccctgttgatgctgtcttccagaaggatagatgattgacatcatgggtgtgtccaaaggtaaaggttatgagggcgtggtcactcgttggggtgtcacccgccttccccgcaaaacccacaggggtctccgcaaggttgcttgtatcg

SEQ ID NO: 72721 - DNA, 125 bp, Zea mays
catggatgctcaagcagtcgcagatgcatgttctagcggtcacattgctggatacggtggtgatgtgtggttcccacagccagcaccaaaggatcacccctggcgctacatgccaaaccatgcca

SEQ ID NO: 72722 - DNA, 251 bp, Zea mays
  unsure (1)..(251): unsure at all n locations
gcggcgagttcaaatcccacaatcttcttgtagcacaccactgtcttcgtccaactcggcggcgatgtctgggcgcggcaagggcggcaaggggctgggcaagggcggcgcgaaacgccaccgtaaggttctcgcgacaacatccagggtatcacgaagccggcaatccggaggctggcgaggagggggcgcgtgaagcgtatctccgggcttatctacgagganacccgcggcgtgctcaagatcttctc

SEQ ID NO: 72723 - DNA, 244 bp, Zea mays
ctcctcccaacggttctccaccatgagggtaatggctcccaaaccgcctagtacggacctgtttgatggactgaacaagtgacatgtcgtcaccaagaaggaattgcccgcacgcgagttggatcgtaaggggaaaacaagcaagagggtgcactttgtgaggaacctcataagagaggttgctggttttgcaccctatgaaaagcgtataactgagttgctgaaggttgggaaggataagagg

SEQ ID NO: 72724 - DNA, 242 bp, Zea mays
cttttagtaacctttcaataggcgtcccccaagaactagtaaacatggcaaaactgttgagcctgttcttagccctctcctttgtagcagctatgtttgccataggctctcatgctgatggagactgtgagaatgacctccaaagcctgataagtgactgcaagacatacgtgatgttcccagctaatccaaaggtccctccttcggatgcttgctgtggtgtcatcaagaaggcaaacgtt

SEQ ID NO: 72725 - DNA, 242 bp, Zea mays
gcgccttgttccagttggtcttggagatgatgaccaatgcattgaggatgacttcaactcatggtatatattctggcttcttttgagcgcgcgcgctctctctctctctctctgcatttgactgcttcagtgttactagctgagtgcccgtgcgttgcaacggtaatatataataccagtatactacgataacttatatataaaatgtgtgttatattattatgagaaaatgtttcataatc

SEQ ID NO: 72726 - DNA, 240 bp, Zea mays
cgggattacaatcctttgcattcagacccagatattgcacagcttgctggggtcacccgttcaatcctgcacggcctctgcaccctaggattcgctgctcgcgccgtcataaaatctttctgcaacggcgaaccgactgcggtgaagagcatcttcggccgtttccttctgcacgtctaccccggggaaacgttgtccactgagatgtggcttgacggccagaaggtgcactaccaaacg

SEQ ID NO: 72727 - DNA, 237 bp, Zea mays
ggatggctttgattcaagaggagatgttaaagttattctagcaacaaatcgtattgagagtcttgacccagccttgctttgcccaggtcgaattgacagaaagactgaattcgctttacctgatggcaagactaggcggtgcattttccagatacacacatcgaaaatgacactggctgctgatgtaaacctagaagagtctattatgtcaaaagatgagttttcaggtgctgacat

SEQ ID NO: 72728 - DNA, 235 bp, Zea mays
gctcaacggatctaaggcttcagtctgtaatcatgtgaggcaagtatatcatttctgctattcttggatcatttgcagttgcatgggcttgtgattattatgtttcagacaaaaagctatttggaggttctacccctggaactattacaaacaatgagtgggcagaagagactgacaaaaaattgcaggcatggcctcgtactgccggtccaccagtggtcatgaatcccataag

SEQ ID NO: 72729 - DNA, 251 bp, Zea mays
ttgtgagcctatagcgcttagaaactactcggaagggaaacggtagcgatggactgcggaggtaaatacgcatagtcctcggggtcgcaaggccaagcgacaaccgaagaacactggaggtcaacgggaccgattcaggggctgccttcttcctccatttctcagtgcacacctccgaatcatccacggacggggaggaatacaatgacacaagaatcctcccggtccactactcggacaactacttttcg

SEQ ID NO: 72730 - DNA, 104 bp, Zea mays
cggctcgagctgagatttcgccgtcgcgcacttcgcgggatgctcaacatcggcttccagctcatgttcaccatcggcatcctctgcgctaaccacacaacata

SEQ ID NO: 72731 - DNA, 233 bp, Zea mays
gacgtggtctcacggcacgaataattgacgagacagagtcaatgtcagacgtgtatacctgtttctatgaggtttcttcattgatagaggcaaagattgatgacaatgatccaaatgctgctctaacacggagacacgtgaattcaataaagcaaacttgcaagtcatctggtttggtaaagaggagggggtaccatttggacacatcaccttacaggcctatgctgatcatg

SEQ ID NO: 72732 - DNA, 244 bp, Zea mays
aagaaagcaccgatcaaccaagacctcatcagcaacttcatgtctgaccctgtccacggagccatcgaagtctgcgctcagctgaggcccactgttgacatctcagtgaccgctgatgctgatttcgtgcgtccagagcttcgacagtcttcataagcttgtatggatccgcagtgtgactgcaatggctagtttgtaagaacttaatatgcctgggcttttgaactcttagattgtgcctgta

SEQ ID NO: 72733 - DNA, 240 bp, Zea mays
cagtaagagagtatgtgactccccaaaagttccaattttggaaggagtatggagaatcggtgggtttccgatatgttgctagcggacccttggttcggtcttcctaccgtgcaggagagctatttgtccaaaatttagtcagaaataacaaaactgagtcgtccatggatccgtacgcagaaataacaaaatctaactaaatatcttgtgccagagcaatccatgggatcagtacacact

SEQ ID NO: 72734 - DNA, 241 bp, Zea mays
ctttccccgtgcttctccgccgtcgaggccgcgtcccagtgcgaagagaccacgactcagatggccagccgctgggtccggcccgaggtgtacccgctgttcgcggcaacgggcgtggccgtcggcatctgcggatttcagctcttccggaacatcaccggcaacccggaagtcagggtaaacaaggcagggagggcagctggtgtgcttgagaaccatgaggaggggaggcgttacgcca

SEQ ID NO: 72735 - DNA, 239 bp, Zea mays
gtctgatcccaggggcctcttgccattcaggagtattacatccggcacaaggacgggcgcacggtcgacaacagcgccgagaggcagaaggtctcccggtgcctcgtggccgcggtggagcggagggccactcatggcgtcagggtggaggtgcgcgccgccgaccggtcgggcttgctatcggatttcaccagggtgctgcgggagcacggcctgtcgctgctgagagttgagctcaa

SEQ ID NO: 72736 - DNA, 244 bp, Zea mays
ggcatcaactatgttcaattttcaagaaatgtcttgctgttttacgtgtgcgacgggcattgaacgaaataatgaaaactaaggtgaccagttttgaggaagcaaggtgaggattttttcctacagtgagatgaggaaagctacgcatgattttagtggagcaaacaagattggcgagggcggtttcggctccgttttcagggggaagcttaaagatggaacgatcgtcgcggtgaaagtcctt

SEQ ID NO: 72737 - DNA, 248 bp, Zea mays
tagaagaaagacgtgatcgtcggtaaatacgggacccgctatggggcctccctccggaaaatggtgaagaaaattgaaatcagccagcacgccaagtacacttgctctttctgtggcaaaaccaagatgaagagacgagctgtggggatctggcactgtggttcctgcatgaagacagtggctggcggtgcctggacgtacaataccacttccgctgtcacggtaaagtccgccatcagaagactgaa

SEQ ID NO: 72738 - DNA, 242 bp, Zea mays
cttttctcggcacctcgcgggtctcccgtccgccccgtcccgcattcgtatcctctcctcactctcgccgccgccgcttcccctgcgccccgagccaagatgaatgttgaaaagctcaagaagatggcaggtgctgtgcgcactggggggaagggtagcatgcgcaggaagaagaaggcagtccacaagactacgaccacagatgataaaaggcttcagagcaccctgaaaagaataggagt

SEQ ID NO: 72739 - DNA, 242 bp, Zea mays
ccccgatccgaagctgtgcctcgtaccatttcgatccaatggcgccgacgtcgaagctgacgacgggcatcaagcgcgcttcgcggtcgcacacgtaccatcgccgtgggctgtgggccatcatggccaagaacggcggcgccttccccaaggccgacaaggccgccgccgccgtggaacccaagttctaccctgccgacgacgtcaagccccgcgttcccagcacccgcaagcctaagcct

SEQ ID NO: 72740 - DNA, 240 bp, Zea mays
acgtttcgtgggatcgactcgttggctgacgtcggtggtggccatggtggcgccgccgtcaccatcgccgccgccttcccccacctcaagtgcagcgtgcttgacctcccgcacgttgtcgccggtgctccgtctgatggcaacgtgcagttcgtcgcaggcaatatgtttgagagtattccacctgcaaccgctgttttcctcaagaaaactctacatgactggggtgacgatgagtgt

SEQ ID NO: 72741 - DNA, 238 bp, Zea mays
gaagtcgattgtttcactgctgatgatggccagggtgccattgaattggaagggttggtgaagaaggcgctagccagtggtgcatgtcagcttgttgagaaggacctcaaagaagaatctgacagtgaatatatatacccctgcctgcgtgcaggtgcagtttatgaaagaaagtatctgcttgggacttcgatggctaggcctgttattgctaaggcaatggatgatgttgccaagg

SEQ ID NO: 72742 - DNA, 240 bp, Zea mays
gcggcttgaagaacaatatgaagaggtgaaaaatgaagttatggagctgacctctgagactgaagagactactgtccggaaacttgaggatgaaataaaagaatgcaagggtattctcaagtgtggtgtatgctttgaccggcctaaagaggttgtgatcaccaaatgtttccacctattctgctcgctatgcatccagagaaacctcgagattcgccaccgaaaatgtcctggctgtgg

SEQ ID NO: 72743 - DNA, 239 bp, Zea mays
tctgcatataattgctattggagtatctgggataaagaagcttcctcttgcgtccagtttgctacttcccctaccaccgctgacccttctgttcaacgaattctgccggaacagatatctgcctatctttgaagcatactctaccgagtctttgctaaagaaagatagagaagaacagagcaaaccagatatggcggagttcttcagtaatcttgtaacagcttactgtgacccagctc

SEQ ID NO: 72744 - DNA, 236 bp, Zea mays
attaccacagcttattaccgcggtgccatgggcatattgcttgtttatgatgatactgtttaagcatctctcaacaatattaggaattggattcgcaacattgaacaacatgcttctgacaatgtatacaagatacttgtgggtaacaaggctgatatggatgaaagtaaaagggctgtgcctacctccaaaggtcaagcccttgctgatgagtatggtatcaagttttttgaaac

SEQ ID NO: 72745 - DNA, 237 bp, Zea mays
tccgattgttccaagaaagtgagtttgataagctggtggattctactgtgcctgagattaagcggtgtaacctctcaaatgttgttctgcaactcaaggctcttggaattgatgacatcataggatttgattttatggagaaaccatcaaggactgctattttgaaatcactggagcagttaatcttactaggggctctgactgatgattataagctctcagatccagttggtcatc

SEQ ID NO: 72746 - DNA, 237 bp, Zea mays
aagcgagcgagggacccggggcgtaagaagagagagacgacgtctctctcctatcggcgatcccgttccccaacctgtcgtctgctgcctgcctgcctgcaaaaaggagttcgacatggcgactaagcgcatcctcaaggagctgaaggacctgcagaaagacccccccacatcatgcagtgcaggtcctgctggtgaggacatgtttcattggcaagcaacaattatgggaccacc

SEQ ID NO: 72747 - DNA, 235 bp, Zea mays
actgaaggcagaactgaggacaatttatggccagttatgtcaagacgacatgcctatggtacgaagagctgctgcatctaatcttgggaagtttgctgcaacagtggaacaaagtcatttgaagacagaaatcatgtcaatgtttgatgatctaactcaagatgaccaagattcagtgcgactattggcagttgagggttgtgctgctcttgggaagttgttggagccccaagat

SEQ ID NO: 72748 - DNA, 236 bp, Zea mays
ggttttgcagcaattcatctgatatactttttcactgctgggcctgatgaggtataatgttggcagatcagacgccagactaaagctcctcaagctgctggtgcaattcacactgattctgaatgggggttcatatgcgctgaggtaatgaagtttgaagatctgaaagaactgggcagtgaatctgctgtaaaggctgctggaaaatacaagcaggaggggaaaacctatgtggt

SEQ ID NO: 72749 - DNA, 234 bp, Zea mays
tggagatgttgcgcgcagagaatccccaagcatacttacagggtagagggagacgagaggagaggagaggagaggttgcgcctgcgactccatggctccgatgaagctgtacggcgcggtgatgtcgtggaacgtgacgaggtgcgcaacggcgctggaggaggctggctccgactacgagatcgtgcccatcaacttcgccaccgccgatcacaagatccccgagcacctcgt

SEQ ID NO: 72750 - DNA, 276 bp, Zea mays
gtgcgatgccatatgaggatgcggtggagagataatgacgacgaggttcaagacgaacaggtagaagagaggcctcgtctgctccggtcacggtcgtatcgggaagctccgcatgcatcccgttggtcgtcgtaacgccggtgtgcatgcaccaccaccgcatcctcttcgacaagtaccatcccggtttcttcggaaaggtgggtatgcgctacttccacaaactccgctacatattctactgccccatcgtcaacattgataagctatgggccc

SEQ ID NO: 72751 - DNA, 261 bp, Zea mays
gagcctaggtggcacgagcagctgcagcgttggtgcctcaacttccatggtcggtcgaccgtggcttctgtgaagaacttccagctgatagctgcaccacaactagattctgaaccgtcacagcaagctcagcagcaaacccagccttcgaattcgtcttcagcatcggatcatgacaaagtgatcctgcagtttggtaaggtcgccaatgacatgttcactatggactaccgatacccactctcggcattccaggccttc

SEQ ID NO: 72752 - DNA, 267 bp, Zea mays
taaatccctattaagccgccatggtgaagtactcaagggagcctgacaatccaaccaagtcttgcaaggctagaggcgccgaccttagggttcattttaagatcactagggaaactgcctttgcaatcaggaagttgcccttggttaaagctaaaaggtacttggaagatgttcttgcgcacaagctggccattccgttcagacgtttctgtcgtggtgttggaaggacagctcaagcaaagaatagacactctaatggccaaggaa

SEQ ID NO: 72753 - DNA, 217 bp, Zea mays
gtctccctgtggagaaggtaccatcacctgggatcgctttgagatgaggattcacaagagggtgatcgatctcgtcagtacaccagacgttgtcaagctgatcacctgaatcaccattgaacctggtgtcgaggttgaggtgactatcagtgacgcttaatatggtagccttatcatttcaaaaggcttctagtgaacaggatatgttcaattccta

SEQ ID NO: 72754 - DNA, 267 bp, Zea mays
gatccgctctgacacggcgccgactgcgactgagacgaaacgttctaacacgtacctctatacgaactacctgccgccgtaaaaccctagatcgctcgaccatggatgcgcagcagccgtagcctgtcagctacctctgcggagattgcggagctgagaacaccctgaagcccggagatgtcatccagtgccgtgaatgtggctaccgcatcctctacaagaagcggacccgccggattgtccaatatgaagcgcgctgaagagtga

SEQ ID NO: 72755 - DNA, 248 bp, Zea mays
ctttcccgcgtcctccctcgccttcgccttcgccggccggagatttccaccaccaccgtcgaaccgccccgaccctgctcgcctctcgcgctatggccctgactgtcgtgctcaaggttgtgcatgtcctgtgatgggctgtgttggagctgtctagcgggtcctcggcaagatggaaggcgtcgagtcctacgacgtagacatcatggaacagaaggtcaccgtgaagggcaatgtgacacctgacg

SEQ ID NO: 72756 - DNA, 266 bp, Zea mays
cgtcgctccacctgaacacaccggcgaagaggaggcgaagaagcgatgggcgtgaccatggaggacgtcgaggcggccatgacctccgctctcagcccttccaatctcgtggtgacggacacgtccggagggtgcggcgcgagctacgagatcgaggtggagtcggagaagttcgaggggaagcggctgctggagaggcaccggatggtgaacaccgcgctggcgtctcacatggcggagatccacgccgtctccatcaagaaggc

SEQ ID NO: 72757 - DNA, 254 bp, Zea mays
caaatccccaaagcctccgacccccttcctctctccctccgccgccgctgcgcacgcagggaacaagcgacatgggcgtctacacctttgtgtgccgcaacaacggcggcgagtggaccgccaagctgcactccggcgagatcgaggcttccgccgctaccccatacgagctgcagcgccgcctcgtcgctgccgcctccgcggccgactctgcctacggcgtccagtcgtccttctccatggtcacccccagc

SEQ ID NO: 72758 - DNA, 243 bp, Zea mays
gtgaattgcagtcgtctattctggggatgcattccatcgtgcatcgccctgtggttgcgaatggtgacatccttgcgaggccaatgatgtaccttgcgctgacttacgaccacaggttgatcgatggcagagaggctgtcttcttcctgcggcgcatcaaggatgttgtcgaggaccccaggaggttgctgcttgacatataaattcttgcaccatcgctgcgctgccctgccggactgtttt

SEQ ID NO: 72759 - DNA, 254 bp, Zea mays
cagactcatacccgctcagtgcccaagaggttgttctctcggatgatcttgatctacgtcattcaccagcgccctgataaagttttggagatattcgcggatatggaggagttaggtgtgcgtccggacgaggatacagcgagacggatcggaaaggcattcgtggcttctggccaagaagaaaaggagaagcatgtcctcgagaaatacttgaagaagtggaagtacatccatttcaacggcgagcgcgttcg

SEQ ID NO: 72760 - DNA, 255 bp, Zea mays
ccgccgccgcatcaagcccccgccccgccgtcgcctgaggtagacaccaatccgtcgccatggggcgtatgcacagccgcgggaagggtatctcatcgtcggcgcttccctacaagaggacgcctcctacctggctcaagaccgctgcctccgacgtggaggagatgatcacaaaggcagcgaagaagggacagatgccgtcgcagatcggcgtcctgctccgtgaccagcacggtatcccccttgtcaagagcg

SEQ ID NO: 72761 - DNA, 254 bp, Zea mays
atcgtcgtcatgatgatatctatcaatctacgcgtgatgatcgatggctacttgtctactgctatgtactactaaataaaatctctccgtgtgtgcacgtacgcttgcatgtgcatggtagcatgtatgtacgacgtcgtccatgtatgtgtgtgtgacgtgtgagacagagagagagagagagagagagagagacaggatcgatcgagagaacggcatgtccttttggctgtttggtttattcatatcacaac

SEQ ID NO: 72762 - DNA, 255 bp, Zea mays
ggtttctgagcaaccgccgggtccatagcaaaccaaccctgcatgcagggccagcttattatatataatatctgaggtggagcatatctatctggctgtgtactacaagcaggcctagtacgccgcctgcgcgttcctcctattacacataacacatatagccccctccctgcgtgtatgcttgttgccgtcgtgtcgaatcttgtactacgaggctccgtcgaacctcgatggcttgcttctttatcagaacat

SEQ ID NO: 72763 - DNA, 232 bp, Zea mays
cgatgtcgtcctgttggcacttattagtgtacttataccaggcgatagctcaagtcccaagtctgagcactcgttggctcgatgggctacacctgaacttcatgatatcgatgctctgcctaatatggttggacctcgcttggaaggactataccctgagaagtccctttctcgacttgcggatgatattgctctatgcgttcatgccgagccggaattccgaccagctatg

SEQ ID NO: 72764 - DNA, 250 bp, Zea mays
gtggttgaacaataataagcgaggccgagctggctgccatacataggtattgtgtggcgtgtgtgagagagagagaaacagagttcttcagtttgctatctctctctgcatgtttggcgtcagtctttgtgctcatgtacgtacgtgtgtctacctgcatgttggttgatccgattgcatctgctgtaaccatatattaattggtccacgatgatatgatttgatactatatatatactaaaaccggact

SEQ ID NO: 72765 - DNA, 245 bp, Zea mays
gcttcacctcccaggtcatcatcatgaaccaccctgggcagattggcaacggctatgcccctgtgctggactgccacacctcccacatcgctgtcaagtttgctgagctcattaccaagatcgacaggcgctctggcaaggagcttgagaaggagccaaagttcctgaagaacggtgatgctggtatggtgaagatgatacccaccaagcccatggtgttggagacattctcagcgtatcctccc

SEQ ID NO: 72766 - DNA, 254 bp, Zea mays
caaatccccaaagcctccgacccccttcctctctccctccgccgccgctgcgcacgcagtgaacaagcgacatgggcgtctacacctttgtgtgccgcaacaacggcggcgagtggaccgccaagcagcactccggcgagatcgaggcttccgccgctaccccatacgagctgcagcgccgcctcgtcgctgccgcctccgcggccgactctgcctaccggcgccagtcgtccttctccatggtcacccccagc

SEQ ID NO: 72767 - DNA, 210 bp, Zea mays
gttcatccgtgttcttgtttgcgaggtcgagagagagaggatgtcgtgctgcggaggcaactgtgggtgcggctccggctgcaagtgcggcaacggctgcggagggtgcagcaagatgtacccggacatggctgagcaggtgaccaccaccacccaggctctcatcatgggtgtcgcaccatccaaggggcacgccgagggcgggttcga

SEQ ID NO: 72768 - DNA, 250 bp, Zea mays
caccagatgtgctactcctgtacacacatcatgttcaacgacactcacacaacgtcagcaacggccatcgtcccaacgcacaagaattcatggccggatagtagtgacttacgtggcaggttgctctttaggtggacgatgagttggacgacgtgatggcgtcgtcgtcaaatgcgatgcacagaacaacccgagagtcgccgacgttggcgacgaccatggggcccctctgctgaacgatggacagcgc

SEQ ID NO: 72769 - DNA, 252 bp, Zea mays
ctcgtccccaaacaagcaaccaccgcctccccgatctcgtcgagaggaagcccaatcccgaaaccgccgccctattccaatggcgcccaaggccgagaagaagcccgccgccaagaagcctgcggaggaggagccggcggcggagaaggccacggcggggaagaagcccaaggccgagaagcggctccccgcgggcaagtccgcaggcaaggagggtggcgagaagaaggggaagaagaatcatagaagtcg

SEQ ID NO: 72770 - DNA, 212 bp, Zea mays
ccggattgttgagtcaattggacgggaaaatttcgtggggcagaaggaggcccaggatctagatgatgacgatttcgcgttgatcagtaggtactaggaaaatgagtttgccagtctatgtatcttggcgaataaactagtagtttgtaccttgcgttcagacttcgttctgttgttcatcagtcgttgggttcgtctatctatttattaag

SEQ ID NO: 72771 - DNA, 130 bp, Zea mays
ctggctagctacctagctcgctaggttactcatttagcggcgatgagtaacgtagcgtcacccatcaccatgggtggcagtgtgagcaatgacctgaatgaaccattgaaatggaaaggaatattatata

SEQ ID NO: 72772 - DNA, 252 bp, Zea mays
caccagatgtgctactcctctacacacatcatgttcaacgacactcacacaacgtcagcatcggccatcgtcccaacgcacaagaattcatggccggttagtagtgacttacgtggcaggttgctctttaggtggacgatgagttggacgacgtgatggcgtcgtcgtcaaatgcgatgcacagaacaacccgagagtcgccgacgttggcgacgaccatggggtccccctgcttgacgatggacagcgcgg

SEQ ID NO: 72773 - DNA, 249 bp, Zea mays
cactgatcaagatcacagtactggaccttccgcaggagattcgcatgataccggctgatggagttgttaactatgctggaggtgacatgttcaaatccatcccacgtgctcaaatggtgttacttaagatggtgctgcaccactggagtgatgaggactgcgtgaagatccttgccaactgcaggaaggcaataccttcacgggaagagggagggaaggttgtcatcgcagatattattctcgacccag

SEQ ID NO: 72774 - DNA, 253 bp, Zea mays
atactatcaccctcgaggtccttagcagctacataatcgacaatgtcaaggccatgattctagacaaggaaggcattcctccggatcagcagcgtttgattttcgccggaaagcagctcgaagatggaaggaccctggccgattacaacatccagaaggaatcaacccttcatctcgtcctcaggcttcgtggtggcatcattgagccttccctcatggctttggctcgcaaatacaaccaggacaagatgat

SEQ ID NO: 72775 - DNA, 244 bp, Zea mays
gtcttatcttccatcggagcatcaaaaacttcatgatccaaggcggcgatccaactggcacaggaagtggaggagagtccatatggggtaaaccgttcaaggacgagccaaactcaaagctgctacattctggaagaggtgtagtcagcatggcaaattcaggccctcataccaacggatcccaattttttatcttgtacaagtctgcaccacacttaaattacaagcacacggtatttggcat

SEQ ID NO: 72776 - DNA, 194 bp, Zea mays
ctcgagccgatcggcgaggccgtctccgttcgcacaagccagacctattcgcgccggctatggacagactcggcgcgaatccggcgaactcgtgcccgctgacgccgcttggcttcctggagcgctcggccaccgtcttcggcgattgccactccgtcgtgtgccacgacacgatcttcacctgatcccagaca

SEQ ID NO: 72777 - DNA, 253 bp, Zea mays
gcagccaaggaccctctcgatctttcttcgggtagcaaccttggaaagacaggccaagcacccgcggcagcctccaagcctagcgcacagaaagacaattttcaggtcaagtccggcatatgggcagactcgctgagccggggattgattgatctgaacataactgcaccgaagaaggtgaacctagctgatattggcatcgtcggtggccttggcgatgggtccgatgagaaggccctgccctcttggacca

SEQ ID NO: 72778 - DNA, 242 bp, Zea mays
gaccagctgaaattgtaagaatgcgctatgacaggctgaggagcgttggaggtcgtgtgcaggctgtggctggggacctggcgacacaaggcgagagagcccatgctttgctgagctggagggaccctcgggccaccgccatcttcattttcttatctctggtggtcgccgttgtgctgtacgtgacgccgttccaggttttgatggtcatagccatgctttacctgctgcgacatcccggt

SEQ ID NO: 72779 - DNA, 252 bp, Zea mays
ctgcgacgccacaaccacacgttcacggtagcgagagcttatcgtcgtcggcggtgaagatggtgtcgctgaagctgcagaagcggctcgccgctagcgtcctcaagtgtgggaaaggcaaagtctggcttgaccccaatgaagtcagcgagatctccatggctaactcccgccagaacatccggaagttggttaaggatgggtttatcatcaggaagcctcagaaggttcactctaggtcccgtgcaagaa

SEQ ID NO: 72780 - DNA, 253 bp, Zea mays
ctagcatctggacatgatggctctcaacctgcacctgagacatacgtcggccatgttaatcgtgaaacgctgaagcgcgtgtctttcattgtgccaaatgatgaatatgttgccagagcttcatactgtggccggatctttatttggagaaagggagatgggaagtttctacgagccatggagggtgatgagtgcattgtgaattgcattgagcctcatcctcatgctatggcaatcgcgagctgtggaattg

SEQ ID NO: 72781 - DNA, 184 bp, Zea mays
cttttagtaacctttcaataggcgtcccccaagaactagtaaacatggcaaaactgatgagcctgttcttagccctctcctttgtagcagctatgtttgccataggctctcatgctgatggagactgtgagaatgacctccaaagcctgataagtgactgcaagacatacgtgatgttcccagc

SEQ ID NO: 72782 - DNA, 260 bp, Zea mays
tcagagctgcacgacgtcgcgcggcgatgacacgcgctgcacgagacccgtacgagcgcggcacgtgtcgccggcacggccgcatcggaagcaccggaagcatcccggaggtcgctggaacgccggtggcatgcaccaccaccgcatcctcttcgacaagtaccatcccggctacttcggtaaggtcggcatgcgctacttccacaagctccgcaacaagttctactgccccgcggtcaacatcgagcgcctctggtcga

SEQ ID NO: 72783 - DNA, 268 bp, Zea mays
ttcggctcgaggttgtacagatcagctgatactactaatcaaagaatacattttgatattgagccctgcggtagacatctagccactggtgggcaggatggcatggtccatgtatatgaccttcaaggtggtcaatgggtaaccggctaccaagcagcagctgatactgtaaacgggttctcgttccatccataccttccatttgctgtaacatcatccgggcacagaagatttggcatgcaagatgagtttgaagacgagttaaact

SEQ ID NO: 72784 - DNA, 167 bp, Zea mays
tgcaagcaggcctagtacgccgcctgcgcgtacctcctattacacatataggcccctccctgcgtgtatgcttgttaccgtcgtgtcgaaccttgtactacgaggctccatcgaacatcgatggcttgcttctttatcagaacatgtttgaataaacgctatttggt

SEQ ID NO: 72785 - DNA, 113 bp, Zea mays
acaaaccctgctgtgtctgggcctgtctataagaaacagcgatgagttgcgacgctatgtttctgacagtgtattgactaatgagcacatctttgatttactagaagaaacga

SEQ ID NO: 72786 - DNA, 261 bp, Zea mays
gcttgttcgctgcggcttgctgcggctgcaatccggctgcggcttctacaggattcatctctctatggattgcagctgcagcaatccaaacagctgcaacagtgtcggcttgcagccagccgaacacgcccataagcgatagcgtgcatcccggctggtacatgtaaagtctgtaactgtcagtttggcaatctcttcttgatctactcccctgagttttacaaccttttgccgattctttactgggagttgcaattccac

SEQ ID NO: 72787 - DNA, 263 bp, Zea mays
aaagaggcgatgagcacagcctcttggattgtttacctgaaggggtcatgggaggactagagggatggcgttggcggctcagtcttgggcgccacaaacagctatacttggccaaccttccattggcagcttcgtcacgcattgcgggtggtactcggacctagagagtgtgatcaacggtgctcctatgggtgcttggccactctacgccgagcagaacatgaatgctgcgatgatggagcgccaggttggtgtggcattgc

SEQ ID NO: 72788 - DNA, 250 bp, Zea mays
ccggctcagtcgtcttcaccgtcgcatctgatgagcacaggctgctcaccggagtctactacatccccgcgtcgaggaactctatcattagcttgggacagctgaatgagaacggttcgcgcgtggaggtcgagcacggagtcatgaggatctgggacccctctcgtcgccttcttgccaaggtacgcaggggtccaaatcggctatacatcctcaatgtgaaggtggcacaaccttgctgctcgtcgag

SEQ ID NO: 72789 - DNA, 264 bp, Zea mays
tagtatagctgcacaaaaagctgttgttaactacagtactgagaacttagatgctccaatcttatccatagagtaggctgctaaaaggtgcaggtatttcgaaaccccgccgtttcttcttcccctgaaaattggtgatttctcaaaaggaatggcagaagcagatcagaaaatctattctgaggttaaactcaattctcagtactacttttactggaaacacaagctgctctggcaatacccgatgaggataactgcatggta

SEQ ID NO: 72790 - DNA, 255 bp, Zea mays
ggaatgccagggactcccatgttcctatccttgccccactgccaattgggttcgcggtgttcctggtccaccttgccaccatccccattactggcactggcatcaacccagctaggagccttggcgctgccatcatctacaacagggatcacgcctggaacgaccattggatcttctgggtcggccccttcattggcgctgccctggctgccatctaccaccaggtgatcatcagagccatcccgttcaagagca

SEQ ID NO: 72791 - DNA, 249 bp, Zea mays
atgctctcaaggctaaggttgctgaagccatggaggttctccgctcagcccagcatctccagcagagcaatgcctccaccgagcagcagctggctaatctatcactgaatgatggcgtcctctccagctgaatgtttctgatgattcagaaattgctggcaatttttgcttgatacctatctctagaatgcaattactttggttactttattggaattttaggtgctgctctataattagctgaactag

SEQ ID NO: 72792 - DNA, 253 bp, Zea mays
  unsure (1)..(253): unsure at all n locations
agctattcagtaacatcttgctctctggtgggtcatcatcaattctgcagctaaaggagctcctggagacagaagtattggaggagtctgctcaagctgctcgtgtcaaggctatggcaagcgtaaactcagtagagagacgtttcagtgtttggattggagggagcattctagcatctcttgggtcgttccagcagatgtggttctccanagcagagtatgaagagcatggngattcctatattcagagaaa

SEQ ID NO: 72793 - DNA, 256 bp, Zea mays
ccgtggtacagacaggatgggcatgtgccgtggacttcgtactgctagtaagctacgtagtcaccgacgagaccagaagtggcatgataaacagtataagaaagctcatttgggcacagccataaaggccaacccttttggaggtgcttctcatgcaaaaggaatcgtgctggaaaaagtaggagttgaagccaaacagccaaattctgccattaggaagtgtgtaagggaccagctgatcaagaatggcaagaaa

SEQ ID NO: 72794 - DNA, 253 bp, Zea mays
ctaaagaccaatgccatccctgaggctgctgaatctgctaggatcatctacggaggctctgtaactgctgcgaactgcaaagagctagcagtacagcctgacgtcgatggttgtcttgccgactgagcttctttgaagcctgagttcatcgacatcatcaacgcggccaccgtgaagtccgcttaagatgctacgctgaagactgaacatacttctttttgctcaactgtgctatgtaagctagtagcttttg

SEQ ID NO: 72795 - DNA, 258 bp, Zea mays
gatccgtatcgatttaagaagcggacggagctgtacattgccgacgagggcgttcacacgtaccagtttgtgtattgcggcaagaagtcgcagctcaacattggcaatgtgctacctgtgggcaccatgcctgagggtacaatcgtgtgctgcctggaggagaagcctggagaccgtgacaagctggcccgagcatcagggaactatgccaccgttatctcctacaaccctgagaccaagaagacccgtgtgaagctg

SEQ ID NO: 72796 - DNA, 265 bp, Zea mays
ttgattgtgcgttgagctgaggctcgcatgctgtgtctaagagttcgcctcgaggaagaagcttccaacttcagatctaactttggctacaacattccactaaaacatcttgcatacagagtgctcatgtatgtgcatgcatatacactctacagagctgctagaccttttggctgctggttcatgttagggccttacagtgtgaatgacggagcgcaactctacatgattgacccatcaggagtttcatacggatattgtggct

SEQ ID NO: 72797 - DNA, 245 bp, Zea mays
agtggccatactatcctgggccatgctgctgctggcgctgtcggctcactcctttgacaatgggcaaacgcccttggcgccactgtcatcgggactgtttccaatcaagaaaaagccgctcaggcagctcaggatggatgccaccatcccataatttacactagcgaggatgtcgtcgcaagagtcaaggatattacatcaggaaaaggtgtcaatgtcgtctatgattctgttggaaaggatac

SEQ ID NO: 72798 - DNA, 256 bp, Zea mays
agcagagaagcagagacacatttggctcactcactcacactcactcgctcatagattgtcctgtccgtccatcatctctagctagcagctacaagtgagagcagcaagcgacaccacaaccagaccaccaccaacgcctagctgtgagaggatgggcaagctgtggacgatcctcactcacctccactcccttgcagggccaacggtgatgctgctgtaccctctgtacgcgtccgtgcgggcgatggagagccca

SEQ ID NO: 72799 - DNA, 257 bp, Zea mays
gggaacgccacggacgtgaggatgcgaataaagaggaggagtgaacgcgaaggacgccatggccgcgggcgccgctagcaggtggcggagacgctcatgaggatggctaccgccagtatgtgactccgccgcgctcgccaaaacgagcaagaagcaacaagagggcggcgcgcgaccgacgtgcgtacgtagcatgagcctgagtggagacgttggacgtgtatgtatatacctctctgcgtgttaactatgtacgt

SEQ ID NO: 72800 - DNA, 266 bp, Zea mays
aggcgttagcttctaggccgctgccattgctgggattggaggtgaaaaagctggcggttttgccccgtattatgtagatgaaccaatggatttcaaaatcaacaccgatgagattatgacttcactcaagtctgttaatggacaaatagaaagcctcattagtcctgatggttctcgtaaaaaccccgctagaaactgcagagacctgaaattctgccatcctgaactcaagagtggagaatactgagttgaccctaaccaaggat

SEQ ID NO: 72801 - DNA, 230 bp, Zea mays
gtctgcctgtgcaatttgctgcctgaagcgcataactcagttgcagaataaggagctgcttcggaacatgccagagcatgcaccctcgcgtattttcataaaatcagtgctcttaatgtaatatcttgaattgccgtgccatgtgtaataagtaatatcatgaataacagttgctattatgggttctaaatgtgtattaacagccatccatggcagagttctcatattac

SEQ ID NO: 72802 - DNA, 257 bp, Zea mays
ggaacttcatgaacatgcgaagacaagctatcaaaatacaagctgcatacagaggtcaccaagtgagaaggcagtaccgcaaggtattatggtccgttggagtagtggaaaaagctatcttgcgatggaggaagaagagaaagggcctgcgtggcattgcaactggaatgccagtagcaatggccacagacgcagaagcagcaagcactgcagaggaggactactaccaggttggtcggcaacaagccgaggacagg

SEQ ID NO: 72803 - DNA, 252 bp, Zea mays
gtagtacatatgttccatatcgagatagttaaatgaccagaatccttcaagattcattagttggcaactgtagaaccactattgtaatttgctgctctccatcatcatacaatgagtctgaaacaaaatctacactcttatttggccaaagggcctaaacaattaagaacacagtttgtgtcaatgtggagctaactgcagaacagtggaaaaagaagtatgacatagaaatagataaacataagatcctgc

SEQ ID NO: 72804 - DNA, 249 bp, Zea mays
gggactgggacatcgactacgagctccaggtcgggctcaccgtcgacctccccatcgtcgtcaacttcaccatcccgctctccacctctggcgagttcaagctccccaccctcaaggacttgttctgatctagtagtagctcgcttgccttgtgttctgtgcgggcgcgcaccagcgatctgtacgacgagcttttgcaaataaacgacgcagctcctctgttctataaaaaaaaaaaaaaagggcggc

SEQ ID NO: 72805 - DNA, 242 bp, Zea mays
gttgagcccactcttgaatttgcaattgtacaagatgcagatcgcttgtatgcaattgtggcaattggtattgcaagatgttttacatatggtggtagcaagaacagcgcattacatgatcctagaattctgccacgtgatagcttgtcgaaagaaaagtacatgtccaaggaagagaagcagacatcaatcaatcattttcatgagaagctttttaaactgaaggacatgatgaagacaga

SEQ ID NO: 72806 - DNA, 248 bp, Zea mays
caaatatccaagaagaggaagtttgacgctgatggcatcttcaaagctgaactgaatgagtatcttactcgggagctggttgaagatggctactctggagatgaggtgcgagttacaccaacctggacagaaatcattatcttagccaccagaacacagaatgttcttggtgagaagtgccggcgtattcgggaactgactgctgtagttcagaagagtgttggctgtccagagggcagtgtagagct

SEQ ID NO: 72807 - DNA, 251 bp, Zea mays
atcatgaccaatttgatgaggcactcctttgatctcatgaaggtgcttcaggttgccacttacatactgcggaagaatgtaccccagggagctgcgactacttgctacgtaggactgagccctcaactcaagggagtgacaggaaagtactttgctgactgcaacgtggagaagacgagcaaactggcgaggagcgaggagttggcgaagcagctctgggacttcagcgaggagctgatcaagtctgcgaa

SEQ ID NO: 72808 - DNA, 273 bp, Zea mays
agaacatgaacccaatgatggcccagatgcagatgagctctttgcagatgccaggaatgaacactgcgtgccctgagcagataaatgatcccgcactgagacacacaggcctctactgcaaccagctctcatccactgaccttctcaaaacagaagcagatggaacccagcaggtgcaacaggttcaggtgtttgctgacgtccagtgtacagtgaatctggtaggcggggacccttacctgaaccagcctggtccactgagaactcaaaagc

SEQ ID NO: 72809 - DNA, 266 bp, Zea mays
gccaccacacccagtcctgatttctatatattgatcttgtatcctgcaactttggtgaacttatttattggttctaatagtttgcatgtgtatgtattccataggatttcctataaacaagatgaagtcatctacagatagagataggtttacttcttttctagtctggataccatttatctcttctatttgctctggctagaattttactacattgctggatagaaatggtgagagtaggatccttgtcttggtcctgatctcag

SEQ ID NO: 72810 - DNA, 269 bp, Zea mays
  unsure (1)..(269): unsure at all n locations
gcaccacaagcgagcgagggacccggngcggaagaagagagagaagacgtctctctcctctcggcgtccccgttccccaacctctcgtctgctgcctgcctgcctgcctgcctgcaaaaaggagtttgtcatggcgtctaagcgcatcctcaaggagctgaaggacctgcagaaggacccccccacatcatgcagtgcaggtcctgctggtgaggacatgtttcattggcaagcaacaattatgggaccacctgacagtccctatgctg

SEQ ID NO: 72811 - DNA, 267 bp, Zea mays
gaactctactccgtgtctccgtaccttcaacgtacgctccccggactatttgtacttaatgaacgagttgtacttttgggtcgctggcgctggggtttcttcagttatatacctgttggagcaaccaacgttggctctatcaaactaaacttcgacgctgaactgcggacgaacagtcttacgacagatacagctgcggatagagcagctgccgaagcggccaaacgcggcgaagcctataccggatttgcagaagccacttattac

SEQ ID NO: 72812 - DNA, 258 bp, Zea mays
ctcgcctccacgaggacgttcaaacccaggtcgcactcctcgaatcgatggaaaggagttctttcgtcaggccaggagtcgtctatcctacgagcaatttggagcattcttagccaacatcacagagctcaatgcccataagcagtcacgtgaggaaactctcaagaaagctgaagagatctttggtccagacaataaagatctgtacctgtctttccaaggcctgctgaaccgtagcatggtggcataaggcttcac

SEQ ID NO: 72813 - DNA, 273 bp, Zea mays
gtaaaaagtgcgagaagtttaacagtgagaaggtggcatcacttgcttatgccagaatccaagggaaaacagccctgattgctcatttccagaactctagtttgatgaatgaggacaaacgctgccgccccatacttttccactcagatggtcctaatgcaggagatcaggaacctttccccatgggttcaaacatccgagccaggtctgggagatcccggacttcttcgggtgaagaaaatcaccatgacatccagacagtcttgaccaacg

SEQ ID NO: 72814 - DNA, 270 bp, Zea mays
  unsure (1)..(270): unsure at all n locations
tcctcggctgctgcctcgaggtggaaggccccattctcgtctacgagttcgtaccgaacgtcacgctgttcgacctcatccacggcgaccacggccagcgcgtctcgctggacacccgcctcaggatcgcctacgagtccgccgaggcgctggcctacctccactcgtgcgcgtacccgccgatcctccacggcgacgtcaagaccactcacatctgngtactactgagactacgcggtcaaggtctccgacttcggcgcgtcattctgc

SEQ ID NO: 72815 - DNA, 260 bp, Zea mays
ggccgcaagcttctcactggccgcaagcaaaccgaacgaacccaaccgaagcgagagctgagcaaggcagaggcgtcgtgaccggcgatggagcggctgcagcggatctttggcgcctccggcatggggcagccgccgacggactcgccgctgctcgattcctccgagcaggtctacatctcctccctagcgcttctcaagatgctcaagcacgggagggctggggtgcccatggaggtcatgggcctcatgctcggcga

SEQ ID NO: 72816 - DNA, 267 bp, Zea mays
ggattcgtctcgtgtataaggcgttcggagctcgcagatcctttcctctctcgcgtacgaggctaggtagccgtcaccatgagccgctcggtgcagcctccggatctcaagaagtacatgtacaagaagcttcagattaagatgaatgcaaaccgagttgctatcggcacacttcgtggattcgaccagttcatgaatctgggggtggacaacattgtggaggtcaatggaaatgacataacagatattggaatcgggggtatcagg

SEQ ID NO: 72817 - DNA, 263 bp, Zea mays
caggcactcagaatggtccagcgtttgacataccgacgtaggctttcctacaatacagcctctaacaaaactaggctgtcccgaatccctggcaatagaattgtttacctttataccaagaaggatgggaaagcaccaaaatctgcatgtggtgtgtgcccaggcagacttcgaggggttcgtgctgtacgacctaaagttcttatgagattgtccaaaacaaagaaacatgtcagcagggcctatggtggttccatgtgtgc

SEQ ID NO: 72818 - DNA, 261 bp, Zea mays
gtatcgtcatatatataggggtcagcctcgtaggcatctcttgactactgggtggagctcatttgtcaacaaatagaaactgggttcaggcgatgctgcgtcatttctccgaggtgatgacggtgaactaaggctgcgtgtgcggagggctattcagcttaaaaatgaggccctttttgaagatttcaatagtgacagcacaaagcggcattctttgacgtgtgtagctgattccttgaagaacagaagtgtttttcacat

SEQ ID NO: 72819 - DNA, 265 bp, Zea mays
caaaaccctccctgctcagactcgtctgctgcagctcctcctccgccgccgtatcaaacgcactctccttcgccgccgtatcaaacgcactctcctccgccgccgcctgatgcaagatggttctccagaacgacatcgaccttctcaacccgccggcagagctcgagatgctcaagcacaagaagaagcgcctcgtccagtcccccaactcattcttcatggatgacaagtgccagggatgcttcagcataaccacgggtttcag

SEQ ID NO: 72820 - DNA, 268 bp, Zea mays
cagctgtaagcttccacgctcgagatctgatcagagggctgcttgtgaaagagccagagtaccggcttggctcgtcgagaggagccactgagattaagcggcatcccttctttgaaggcctgaactgggccttgatccggtggaccgcaccaccagagaccctgaagaacattgacactgcaccaacacctgtaacgacacgcaagaaaaaggaaggcaaatgtctggaattccggctgaatggtgacgacatcgagttcgagctctt

SEQ ID NO: 72821 - DNA, 262 bp, Zea mays
cagagaccggctcagcctcgctacgacgccgccggcgaccatgtccctggcggctatctatcggcatctcctcgtgtccgcactgcagctgctcgaccgctacctcgacctcgacagatagagcggaggacttagtgatgagctgatcagagtgcggctagagatcgagcaacttctcgaggaggctgatcagtggtcaacgaccgccacatttgcacaagctgctaaactcacgcgcctggctgctgcaaggagaaggact

SEQ ID NO: 72822 - DNA, 292 bp, Zea mays
atcagaggaactgagctccgactcgctttccaggcgtgtctcaaggtggaagaattcgtggatctcatccttaaagccactgagccccagatgggtctcttcaacctgtatgacgactggctcatagactatgtcatcttacacggccttttcccgtctgatccttattctgcgtgccctatatgggaacaacgatcgggcaacacagactcgcactgtcaacaagcattgcgatgagatcatgacctgcaccaccagcaactatgagacccagactttctcatccgagact

SEQ ID NO: 72823 - DNA, 286 bp, Zea mays
ggcgagttcaaatcccacaatcttcttgtagcacaccactgtcttcgtccaactcggcggcgatgtctggtcgcggcaagggcggcaaggggctgggcaagggcggcgcgaaacgccaccgtaaggttctccgcgacaacatccagggtatcacgaagccggcaatccggaggctggcgaggaggggcggcgtgaagcgtatctccgggcttatctacgaggaaacccgcggcgtgctcaagatcttcctcgagaatgtcatccgcgacgctgtcacctacaccga

SEQ ID NO: 72824 - DNA, 240 bp, Zea mays
cgcattcgtccaaactcgtgagcactttctcctcgtccccgacaagccactcgaagccgagatacggccatggactccaccggcaccggagcagcggggaagggaaagaagggagcggccgggcgcaaggtcggcgggccaaggaagaagtcggtgtcgaggtccgtgaaggctgggctccagttccccgtcggccgcatcgggcgctacttgaagaagggccgctacgcgcagcgtgtc

SEQ ID NO: 72825 - DNA, 255 bp, Zea mays
cccactccagtcctttccccaacccacggcggcggccgtggacgccagggtcttctacctcaagatgaagggggactaccaccgctacctcgccgagttcaagaccggcgccgagcgcaaggacgccgcggactccacgctcgccgcctaccaggccgcgcaggacatcgccgtcaaggagctgccgcccacgcatcccatcaggctcggcctcgccctcaacttctccgtcttctactacgagatcctcagctc

SEQ ID NO: 72826 - DNA, 254 bp, Zea mays
cggctagggtttggggactttgggggcgatcgcaatggagggccgcggcgcggaacaagcacccgaggcggcggcggaggggaaaaatccgaggggcttcatggacgtcactatcggcggcgagatggaggggaggatcgttgtagagctctacgcttccgtggtaccgcggacggcggagaacttccgcgcgctctgcacaggggagaaaggcatcggcgccgccagcggcaagccggttcactttaagtact

SEQ ID NO: 72827 - DNA, 253 bp, Zea mays
aaaagtttggcatgtctccttcaatagggtgtattggtttatggccctcctggctgtggcaagactttgacgggcaaggcaattgccaatgaatgccaagctaacttcattagcgtgaagtgtcctgaactgcttaccatgtgggttggtgagagtgaggccaatgtccgtgagattttagacaaggctaggcagtctgctccatgtgtcctctattttgatgagctcgactccattgctactcagagaggaa

SEQ ID NO: 72828 - DNA, 235 bp, Zea mays
gtacaccatctctgacaactctaccggcaacaagccgggcatcattgtgatgggcaccgtctccgagctgtagatcgcggccaaggccgtcgacgagctgaggaaggaggggaagacggtccgcgtcgtctcgttcgtctcctgggaactctttgatgagcagtcggatgagcacaaggagatcgtcctccctgccgccgtcacagcgaggatcagcatcgaagccgggtccact

SEQ ID NO: 72829 - DNA, 275 bp, Zea mays
gccagggcggcgacttcacccgcggcaacggcaccggcggcgagtccatctacggcgagaagttccccgacgagaagttcgtgcgcaagcacaccgcccccggtgtgctctccatggccaacgccgggcccaacaccaacggctcccagttcttcatctgcaccgtcgcgaccccttggctcgacggcaagcacgtcgtcttcggccaggtcgtcgaggcatggacgtcgtcaaggccatcgagaaggtggcacccgcaacggctccacctccaa

SEQ ID NO: 72830 - DNA, 255 bp, Zea mays
attttgttggatgagaactggaatgctaaactgtcagactttgggttggctaggcatggaccagcagaaggtctgacccatgtctccacagcggtggtcgggactctaggctacgcagctccagagtacatgcagactgggcgcctgaccgcgaagagcgacatatggagctacggcgtcctcctgtacgagctgatcaccggccgccgccccatcgaccggaaccgcccaaagagcgagcagaagctcctggac

SEQ ID NO: 72831 - DNA, 281 bp, Zea mays
ggcggcttgtgcagcaatggccaagatcaaggctcgagatcttcgcgggaagaagaaggaggagctgctgaaacagctggacgacctgaaggtggagctgtcccagctgctcgtcgccaaagtgacaggcggtgcggcctccaagctctctaagatccgagtcgtccggaaatccattgcccgtgttctcacagttattaaccagactcagaaagaaaacctcaggaaattctacaagggcaagaagtacaagcccctggacctgcgtgctaagaagacac

SEQ ID NO: 72832 - DNA, 288 bp, Zea mays
gagccttttggataaacatgaactacatgggtctttcggcactacatcactatgcacataaggatggtccatatagcggcagggcaaaggaattgtatgacaagctaagatcaaaccttatccggaatatagtgcagaattacgatgcaacaggtttcttctgggaaaactatgaccagaaggacaaaggaaagggaaagggtgcacggtcatttactggatggacttcactcattgttctgatcatggcggagtcctacccaacattgcacaggtgagatatagatc

SEQ ID NO: 72833 - DNA, 248 bp, Zea mays
cgtggtcatagttgcctctgttgctgtggtctccctgagtagctcgcttgcgatgctccttcctgcacgcttgatggagacaggtcgactactgttacagtgctagcatctcatgaagacgtgtttcgtgagctgtgctctggatatgagcccggtggcactacagcttatatggctcgagtgggacaactgatgcaatatcactgtgatgttgaaaaggctgcacgaatggtgaagcctaatgtaga

SEQ ID NO: 72834 - DNA, 98 bp, Zea mays
ccataagatgcttgacaaactatgctaaaatctctgcgctcaaatctaaaatattatcaaatactgcagctcttttgaagtattctaaacttcggggg

SEQ ID NO: 72835 - DNA, 265 bp, Zea mays
gatcatggaaccaccgtggtctgcgtcactatctgtggcctccgtgtccgtggccatcactccaagacctctggctggcgtggaaaatctgttggcgtctccaagaagcgataagctacatatctatcgacaaatctcagatgtactagtgttggttcttgttcaaactgtcttgatgaagggtttctgttgggacagtttcctgaaattatgttttgccctatgataatcttgcagttatggaaccttgttatattgtatcctg

SEQ ID NO: 72836 - DNA, 248 bp, Zea mays
agctgctgtctccttgcccgctccttcgctcgccgtttgcccctcgtctccgcaccgcgctctgttgtccatccttgtgcagcataaatgacggctggctacattgctggctcactggacggatcctttgccattgcatatcctgtgtgacacatttatctctgacaagaaggcatttggaggtatcacccccaagactgtttctgagaaggagtggtggcaagccactgtcaccaagttccaggcct

SEQ ID NO: 72837 - DNA, 265 bp, Zea mays
gtgatgggatgacatacgatgaaataaagaaaagtaaacctgatgaatatgaatcacgtagaaaagacaagctgaggcatcgttatccgagaggagaatcctatcttgacgtcattcaaagactagaacctgtgataattgaacttgaacgacagcgtgctccagttgtagtcatagctcaccaggctgtgttgagagcactttatgcatactttgcggacaaaccgcttgaggaagtcccaaatattgagatacctgtacatac

SEQ ID NO: 72838 - DNA, 285 bp, Zea mays
ataatctggtaccaatagaattggccctcaaaattgcgagttagattaaagcgggagatcgctttgcagtgtatgtagtgataccaatgtggccggaaggagtccctactgctgcatctgtgctagaaatccttttctttcaggcccagacaatggagatgatgtataaaataattgctgatgagctcaaggcaacggtcaataaggatatgcaccctgaagattacttgaacttcttttgtcttggaaatcgggatgatccaccatctaatgggagtccagaat

SEQ ID NO: 72839 - DNA, 249 bp, Zea mays
agcttggtgagatctgccgggagctcattggagtctttgagaagcagaaccgcgtgaagccgcagaagatcatctacttccgtgatggcgtgagcgacgggcagttcgatatggtcctgaacgaggagctggctgacctggagaaggcgatcaaggtgaatggctatgcgccaaccatcaccgtggtcgtggccaagaagcggcaccacactcggctgttccccagggacgaacagcagccgcagacga

SEQ ID NO: 72840 - DNA, 177 bp, Zea mays
gtgagtggaatcgcgaggaagaaggatgtcgtgctgcggaggcaactgcgggtgcggcgccggctgcaagtgcggcagcggctgcggagggtgcaagatgtacccggacatggcagagcaggtgaccaccacccagactgtcatcatgggtgttgcaccatccaagggcgtgttcga

SEQ ID NO: 72841 - DNA, 270 bp, Zea mays
cagattttcagtccgggcttcgagcattgttgaaaacaggatatggagcacgtgtgaccccatacgttgatgaatctgttataattgacatcgatccagacaacaaggatatgtcccctgaatttttgagatggctaagagagagaaacctttcaagcgatgatcggacaatgcgcctaaaagaaggatacatcaaggaaggtagcactgtaagtgtgatgggggttgtccaaaggaacgacaacgttctgatgattgttcctccatcag

SEQ ID NO: 72842 - DNA, 265 bp, Zea mays
agcggcttccactgtagatccgagccggcgtgatcataccaaatcttacacgcatcatactagcatgcttgaaaacattgagcacctggggttctgtatttatcgactgggtcatgacatggatacttacaaactgcaacgcagagaaactattaaaggtattcagaaacgtgaagccagcaattgtttcgcaattcggcattttgaaaacaaatttgccgaggaaactttaatttgatcttgaacagtcaagaaaaacattatt

SEQ ID NO: 72843 - DNA, 261 bp, Zea mays
catcaggaaccaccgtggactgcgtcactactggagcctccgtgttcgtggccagcactccaagaccactggcaggcgttgaaaaactgttggtgtctccaagaagcgataagctacatatctatcgacaaatctcagatgtactagtgttggttcttgttcaaactgtcttgatgaagggtttctgttgggacagtttcctgaaattatgttttgccctaggataatcttgcagttatggaaccttgttatattgtatcc

SEQ ID NO: 72844 - DNA, 259 bp, Zea mays
cgcgcctataattgtttccttcattgtcttgactgtgatgagcgtctggcactatggaacagctaagaagtacgaattcgatgtggaaaacaaggtctcaataagttggcttctgaatttaggctcttcgttggtattgttcgggtcagaggcattggcctgatacatacagagcttgtgtctgggattcctgccattttctcccactttgtcaccaacctccctgcatttcatcaggttctggtcttcctatgcatca

SEQ ID NO: 72845 - DNA, 243 bp, Zea mays
tcgatttcggcttttcccctctgctcgagtacgagcggctactcccggcgtctgcggctgcggcggcgatgagcgcggagaacatcaccaacgtggcgctgctgcataacccgaccgccttcctcaatcccttccagtttgagatttcctacgagtgcctcgtgcccctcgacgacgatctggagtggaagcttatatatgttggatcagctgaagatgaaaactacgatcaacagcttgaga

SEQ ID NO: 72846 - DNA, 181 bp, Zea mays
gccccagagaacaacatgatgttctccagcatcgccctctgcttggccagagcgttcaccaccggtgtgccagggggaaccaggggtgccttggtgaggtagctcaggatggtggccaccgggtggaaggagtggaatttgtcctctccctcagctttcagcgactagttctagatcgcga

SEQ ID NO: 72847 - DNA, 262 bp, Zea mays
agcgattcgtctcctctgctcttatctccgctgtgcctgtgcctgacttttcctcctcttcgtccctcccacccgcaaccgcacagagaaaggggaggaggctctctacccagcgcagcccgagcacccctcagccccggatcgggacccctgctctgcgcaatccacccatggcggaggaatcaggccgccccttgccaaagtttggcgattgggatgttaatgatccagcttctgcagacggattcactgtcatattcaa

SEQ ID NO: 72848 - DNA, 256 bp, Zea mays
tgctcattccgttgagcttccacacaacatacgagcaggcgatatgaagatggactgcgatggacaggatgaatgcattggcagcaaccagcaggaacttcaagcaggcagctaagctgctgggcctcgactccaagctggagaagagcttgctcattccattcagggagatcaaggttgaatgcacaatcccaaaagatgatggaactttggcatcctatgttggatttagggttcaacatgataatgctagggg

SEQ ID NO: 72849 - DNA, 268 bp, Zea mays
ctgcaagctgcagacgagccgaatgagcatatgaggaggcagctgcagacacagcttcacgaggatgatacggaactgctggacgagcgagagctacgtgccctggcagctgcagcatacaagaagctggaaggggacctgaaagacctggagcttcaggccgactctgccatcaaggggagggaggaagccatcaagcagctacgcaaactgcaggctcagatgaaggactttcaaagagagctggaagatccccgtgcctccagag

SEQ ID NO: 72850 - DNA, 276 bp, Zea mays
gaggaatcgagaaggggaagtttacatgttgcctgctgacttgatgagagcagtagtccctgtttttcctccatcagagtccacggtagttcgtgaaggaagattaaggggggagcggagccctggagaattgcactgtgctccatcagagttctttatgcagttcgacacaaataatgatggcctcatctcctttgctgagtaagtggaaagaaaaatgatggcccaattcaggatcttgaactagggattcatacgtctgcatactactcatca

SEQ ID NO: 72851 - DNA, 293 bp, Zea mays
  unsure (1)..(293): unsure at all n locations
cctacagtcacaggcggacagcttccacaggcatggcagagagttgaggcgaaagatgtggcttcagaacctgaggtttaagctgatggtgggtggcggcattgcggctctgatcctcatcatttggctgatggtctgcaggggattcaaatgttagagcacaccaagttgctcgccttttttcttttcaggcgtttgatatgcacagactttcaaccaaattgtgtnttcagtgtcacggtatcgcaatgtagtggacttcaatccccgcagtctttcgcatgttccattac

SEQ ID NO: 72852 - DNA, 296 bp, Zea mays
gctcatttctgtgaaaaacctccatcggtttcctatagcatcttggaatctgtgagcaaagcaaaatttgcagctggctcagttgtgagctttaaatgcatggaaggctttgtactgaacacctcagcaaagattgaatgtatgagaggtgggcagtggaacccttcccccatgtacatccagtgcatccctgtgcggtgtggagagccaccaagcatcatgaatggctatgcaatgtggtcaaactacagttttggagccatggtggcttacagctgcaacaaggggttctacat

SEQ ID NO: 72853 - DNA, 278 bp, Zea mays
cggctcgagctggaccacggatccgtgagccccaacaagatcagccgaggggaacagcagcggaatggcatccagagcccatcgtaccggtgcgtggccgcaggcatcctcaactggcaagcggacgtggagaggtgcatagagtgggaagcccacagccgccgcgccaccgggctgacgctcgccttcctcagtacggcggcgaaggagctcggctgccctctcccgtgctgacgaggccgctcccggatctgatctgacatcggcggccacttgac

SEQ ID NO: 72854 - DNA, 288 bp, Zea mays
ccagcatcttggtcctgctgcaggagtgtttcggcgaggggctcataaccatcaaccagatgaccaaaggctttgcccgtgtcaaggaaggccttgatgatctgatcctcgacatcccaaatgcccaggagaagtttggagagtatgtggagctggcaacagagcgcggctggctgctgccgaccttcgcctccgttccctgagcatccaccactggcgataccttccttatgtgtacatttgtgcccatgatgtcattagctccgtaccaaagttttcctattccta

SEQ ID NO: 72855 - DNA, 283 bp, Zea mays
ctgactgatcatgattgcagcattcacttagttgctgccaattaagatggctctgctatagaagctctgggatgatgttgtggctggccctcaacctgagcgtggccttggcaagctcagaaaactcaccacgctcaaaactattgatgaaggagaaagtagcaagctgcagaagacgttgtcgatgccgtcgacaccaacaaccccgatgactccgacgactccaacgacaccgggatcggcccgtatagctgacaacgtttggaggagcgtcttccatcct

SEQ ID NO: 72856 - DNA, 216 bp, Zea mays
ggataaaccataaccctggaggctgagagctcggacaccatcgactatgtgaaggcgaagatccaggacatggagggcattctcccggaccagcagcgtctgatcttcgccggcaaacagctggaggatggccgcaccctagcagactacaacatccaaaaggagagcaccctccaccttgtgctccgtctccgtggtggtcagtaagtcatgggt

SEQ ID NO: 72857 - DNA, 291 bp, Zea mays
  unsure (1)..(291): unsure at all n locations
gtgctctgctcctacgaccncaacgtgcgcctcccgctctggccgtcgcccgacgccgnacgcgagggcatcctcagcatctggaaggaggccgacttcatcaaggtcagcgacgacgaggtggccttcctcacgcgcggngacgccaacgacgagaagaacgtgctgtccctgtggtttgacgggctcaagctgtcgtcgtcaccgacggggacaagggatgcaggtacttcaccaaggacttaaggcagcgtnccgcttcaangtcgacaccgcgacacaacgcgccgg

SEQ ID NO: 72858 - DNA, 286 bp, Zea mays
gtatttgatcgcctctggtttttgactcggggtggcttaagtaaggcatcaagagtgatcaatatcagtgaggacatctttgctggtttcaactgtaccttacgtggtggcaatgttagtcaccatgagtatattcaggttggtaagggccgtgatgttggcctcaatcagatatcaatgtttgaagcaaaggtttctagtggcaacggtgagcagacccttagtagggatgtctacaggcttggtcatagactggatttctttcggatgctctcctgtgtttata

SEQ ID NO: 72859 - DNA, 197 bp, Zea mays
  unsure (1)..(197): unsure at all n locations
ggcatactttgtggtgctattgggtatctagggtcaaccctttttgtaaggagaatctacagaaatatcaaatgtgattaaatccctgctacttgcagcaganagatcatatgtattgtcagtggaagcaaggcctgaaaaaaatggattttaatggtagaccctgaataggtttttgaaactgctgaggacttgac

SEQ ID NO: 72860 - DNA, 295 bp, Zea mays
ctgtactgccacacttcgcacattgctgtcaagtttgcggagctcattaccaagattgataggcggtctggcaaagagcttgagaaggagcccaaattcctcaagaatggtgatgctggtatggtgaagatggctcccactaagcccatggtagtggagaccttttctgaatatcctcctcttggtcgctttgctgtccgtgacatgaggcaaacggtggctgtcggagtcatcaagagtgtggagaagaaggatccaactggagccaaggtgaccaaggctgccgcaaagaaga

SEQ ID NO: 72861 - DNA, 272 bp, Zea mays
cagcttccttccacattcgtctcgagatctcgccccgtcgccatggacgcgatcgacagcgtggtggatcccctccgcgacttcgccaaggacagcgtccgcctcgtcaagcgctgccacaagcccgaccgcaaggagttcaccaaggtggcggcgcggacggcgatcgggttcgtcgtcatgggcttcgtcggcttcttcgttaagctcatcttcatccgcatcaacaacatcatcggtggttccggctaggcttacaggagtacagggcg

SEQ ID NO: 72862 - DNA, 252 bp, Zea mays
tataatcggcatgcatgagcggctgctgctgtcggcgctgccccatcacgttgccatgtatatgaaagaagacatcaatgagcactccttcaacaatttccagatgaagattgggctgaacatgggcccagtcgtggcatgtgtcatcggggctcggaagccacagtatgacatctggcggacacagtgaatgtctctagtcgtatggacagcacgggtgtccccgaccgattccagggaccacggacctgt

SEQ ID NO: 72863 - DNA, 273 bp, Zea mays
cgatgatgtccttgatgtgcagctggcattccttagacttctctgcagtcgagcttactagaacatcacatatcactgcaaaaatagcattgcatacatggatcaggcgagtggaaatgtaaagaaggccctgaagctgatggcgtcaaatgaaggtgaattcaaggctgaaggaaatagcaaattcacctacacagttctggaggatggttgcacgaaacacactagggaatggagcaaaacagtctttgaatatcgtacacgcaaggctgt

SEQ ID NO: 72864 - DNA, 279 bp, Zea mays
gggccacctggccctgcaggatatagaggccaccctggagctccggggccttcggggagccctggcttgcctggagtgcctggctccatgggagacatggtgaattatgatgaactcaagaggttcatcagacaagagatcattaaaatggttgatgagagaatggcttactacaccttcaggatgcagatccccatggagatggcggcagctccgggacgaccagggcctccagtgaaggatggtgctccgggcagtccaggtgctccagggtcacct

SEQ ID NO: 72865 - DNA, 276 bp, Zea mays
tgccgccagaacacaggcgtcgtgaaaactacccctaaaagccaaaatgggaaaggaaaagactcatatcaacattgtcgtcattggacacgtagattcgggcaagtccaccactactggccatctgagctataaatgcggtggcatcgacaaaagaaccattgaaaaatttgagaaggaggctgctgagatgggaaagggctccttcaagtatgcctgggtcttggataaactgaaagctgagcgtgaacgtggtatcaccattgatatctcctt

SEQ ID NO: 72866 - DNA, 229 bp, Zea mays
ggaaatcttgaacctgcagggagtgaagagcgttaagctgaacttgcatctgaagtggtctccacagccaatcatgcgtgattcgcgtgaagcgggcagcttaaggtcaaggtaagtgcgcacgcatggtagtacgtgtattctattggctgggtgtctcgtcctcgagacctgcttggtcgacggtttgtaaattttgagggcattctttttgacatcaacgcgtatg

SEQ ID NO: 72867 - DNA, 277 bp, Zea mays
acaggttgcatttgcatctgagttcctgattgttgtatcccagtttcttctgtgagtggaatcgcgaggaagaaggatgtcgtgctgcggaggcaactgcgggtgcggcgccggctgcaagtgcggcagcggctgcggagtgtgcaagatgtacccggacatggcagagcaggtgaccaccacccagactgtcatcatgtgtgttgcaccatccaagggcggtttcgaggcggccgccggagctgataatggcgtgtgcaagtgcggcgccaactgc

SEQ ID NO: 72868 - DNA, 279 bp, Zea mays
  unsure (1)..(279): unsure at all n locations
cacaattggttcattccctcagactgtggaactcaggagggttcgccgtgaatacaaggcaaagaagatcaccgaggacgaatacatcagtgccatcaaggaagaaatcagcaaggtcgtcaagatccaagaggagcttgacattgatgtgcttgtgcatggagagccagagagaaatgacatggttgagtacttcggtgagcaattatctgngtttgcgttcactgccaacggatgggtgcaatcctatggatcacgctgtgtgaagccacccattat

SEQ ID NO: 72869 - DNA, 248 bp, Zea mays
gtcgaagaggctgaagcccatgtcgtcaagagtattgcttttgagtcgcggaagcagatgtaagaaaaatcgtagtcatgtttggactttaactttgttttatgttggaaagtacttgaaagacttttcctgtggtaattctaggcgtaggttgctgtgctggttggggtttactggtgaaccagagtttttctatctcccactatgaatttgttacctcaaaaaaaaaaaaaaggaaagggggggag

SEQ ID NO: 72870 - DNA, 265 bp, Zea mays
  unsure (1)..(265): unsure at all n locations
tttagaaggctcgagttcggctattacaaggatggtgccactaatccgacattcctctatttctctcatggncttaaggagatcaagtgctaggcgtgcggcgaaattagttacccatgttgggtactatctatgtactattattatatccaaaactatagttgtcctggctgaattgaactcaaaagggtttgtttgagaaaaaattgtcccaagattggattgtttgttaaagctcaatattggtattgaagtgttattgctt

SEQ ID NO: 72871 - DNA, 262 bp, Zea mays
ggcgagagagagtgtgaagattgagcatgagaaaaagctttctactctgcagagcctggagtacagagggagggatagcgcaaagctggacaagaccaaggcctccataaacaggctgcaatccctgatcgtagttacgtcacaggctgccacaaccacatcatcagccattgttagagtccgtgacaatgagcttgcaccacagcttgtccagctctgttttgcgctactgggcatgtggaggtcaatgaaccatttccac

SEQ ID NO: 72872 - DNA, 279 bp, Zea mays
  unsure (1)..(279): unsure at all n locations
ggaaaaaccataaccctggaggttgagagctcggacaccatcgacaatgtgaaggcgatgatccaggacaaggagggcatccccccggaccagcagcgtctgatcttcgccggcaaacagctgtaggatggccgcaccctagcagactacaacatccaaaaggagagcaccctccaccttgtgctccgtctccgtggtggtcagtaagtcatgggtcgtttaagctgccgatgtcnctgcgtcgtctggtgccctctccatatggaggttgtcgaagta

SEQ ID NO: 72873 - DNA, 273 bp, Zea mays
agccactcaacaaggaggtgaagcgcagggagaagaggaagaacccgctcacgaacatggctgctgtgctcaagctcaacccctacctcggcactgcccggaagatggccacccttgctgaggctgcccgagtcaaggcccggaaggagaagcttgattccaagaggaccaagcttacctcggagactgccaaggtcaaggctgccggcaaggcgtggtacaagaccatggtctcggacagtgactacaccgagtttgagaacttcaccaagt

SEQ ID NO: 72874 - DNA, 272 bp, Zea mays
tggagatgatcaactttgtgaattgatctctaactttggcaaaattacttcgtacaaggtgatgcgtgaccaaaatggtcttagcaaaggctctggatttgttgctttctcaactcgtgaggaagcatctcaggctttaactgaaatgaatggcaaaatgatatctggaaaaccattgtatgttgcatttgcacagcgcaaagaagatagaaaagcgatgttgcaggcacagttttctcagatgcgccctgctgtaccaatgacacccactc

SEQ ID NO: 72875 - DNA, 259 bp, Zea mays
gcatagttatggaggatttgcagccctggtgcagttgtgcttcagtgtggggctgataccttgtctggggatagtgtgtgctgcttcaacctctcaatcaaaggtcatgcggaatgtgttaggtatatgaggtctttcaacggtccgattgagctcgttggtggcggcggatatccataagaaatgttgcatgctgttggtgttatgagactggagttgctcttggccaagagcctgaagacaagatgcctgttaatga

SEQ ID NO: 72876 - DNA, 239 bp, Zea mays
accttcctctcctcgctctccctattctggacggccgactcgcttctgtgagctaccggccttagatccagccatgaggtagattctccacatccagggcggccagtgcggcaaccagatcggttcaaaattctgggaggtcgtctgcgacgagcatgcgatcgatcccaccggacgctatgtcggcacctccgacctccagctcgagcgcgtcaatgtctactacaacgaggcctcat

SEQ ID NO: 72877 - DNA, 266 bp, Zea mays
  unsure (1)..(266): unsure at all n locations
cgctgtacccgtacctgcccgtgtgggtcatagacaagctggcgctgctcatgtgcgccgtggtgttcggcgacacgtcccggcacggcctccgccgccccgccatcgggcccttcaccatgaagctcaccaccccgggctaccccgtcgtggacgtcggcacctacgccaagatcaggagcggcgagatccgggtgctccccgccgccgtcaagagcgtccgcgggaacgtcgtcgagttcggngactgcagccgccaccctttc

SEQ ID NO: 72878 - DNA, 173 bp, Zea mays
tcgaaacagctgaactgatgatgacgatggtaacctgcgtcgtgtgtgctaagcatgtagcgtgctaggagatgatatattaaatataatcgagtagtagagccacccgctgtgtgacgctaaatttgtgtgcaaaaaaaaaaaatataaagaaaaaggaaaaataaaataaa

SEQ ID NO: 72879 - DNA, 276 bp, Zea mays
gttctgaataagccttacatgatgaaagtacgtgttgtacgcacagaaactgccatgacagatgttcttcgggaggtgatgattgtgtgtccataatgaaaatgctgaatcaccctaacattgtcaatcttgttgaagtgattgatgacccaaacatagataaattctacatgggtcttgactatgttgaaggaaaaatggtttgcgataatggtttagaagaaggactgcaagaaattatttgcgagacataatatctggtcttatgtatcttca

SEQ ID NO: 72880 - DNA, 274 bp, Zea mays
cttagaatgccgaaccttcactttctgcctgtcaacttggggagcaaagaagctccgctggtgaagtttgctgatgatgtgtacctgccgacggatgaaccacacgggacgattgaagcaaccttaataagccgtcccatgtcaaagctgtaaaaaaaatgtagtcgtcaggctggtattagactcctgcttcgtctccccagcatccccaggcttaaaatggacagtaagctgtaagggaaagataaactgtcataaatcgtagcccctatgc

SEQ ID NO: 72881 - DNA, 290 bp, Zea mays
gcgagcggcattggaagttggcttgagcatgtcttctggacagttttcaagtgctcgttcgatggacgtgaagacaaaggcagagcttgaggagattgctctcgctgaagctgatgttgcaaggttaaaacagaaggttgcagagcttcacctccaactcaatcaacaacgtcaacaccagtatggctctgtagtggatgcaaatgatcgtcatcaccgcctccctggtcatttctcacagcaaaactttgttcaacaaggatttgatatgaaccttgctttctgcaatc

SEQ ID NO: 72882 - DNA, 271 bp, Zea mays
gctaagatcaagtgtagtatctgttcttatcagtttaatatctgatatgtgggtcatgtgcctacttcgatattaaacttattgtttgtgggagagggtccattactaatggcttgccattaggggccctcacgcgtcgtccagctgttgcactgctggccggacgtggcgcaccccaaccaagacaaattgcaatttctctgtttgggaactcttcggtgccatgaggctggtctcggcgaattaaagcaactggagtggttctggttct

SEQ ID NO: 72883 - DNA, 272 bp, Zea mays
tcagggaagccagctaagaggttttgaatttgctaaagctgttcggcttgtcgctgagccattcacagtggacaatggtctcctcaccccaacattcaaggtcaaaaggcagcaagcaaagacatactttgcaaaggaaatttcagatatgtacgcggagctgcgggaggcagaggcacccaggtcgaagttgtaatgatcaattcaaggagaagcgacatatacaggcttacagatcatatgtctagaagaaacgtaatcatctttttact

SEQ ID NO: 72884 - DNA, 267 bp, Zea mays
gcttgacactgtcttttcctgcccattctgcaaccacgggagtagtgttgagtgccgaattgacatgaagaatctgactggcgaagcatcttgtagaatctgtcaggaaaacttcagcacaactgttaatgcactcactgagcctattgatatatatagtgaatggattgatgagtgtgagcgtgtcaacactgttgaaggcgacgatgatgcgtgagcttgccccatgcgatgaaactgttacctacaatcgtaatgtaatgtgct

SEQ ID NO: 72885 - DNA, 277 bp, Zea mays
ggacctgaaaagggccacagtagaactacggaattgaattctcaggacttgctggagcaattgccagcactgcagcaattgttatatcgacttattggctgtcgagcagaaggagctgcaaaaaacaattatctggtgcaatatgctctagcccaggttcttaaagaaagcttcaaaatttattgtgcaataaatgatggaattatcaaccttattgacaagttctttgagatgccaaagcatgaagcactaaaagcccttgacgtttacaagaggg

SEQ ID NO: 72886 - DNA, 273 bp, Zea mays
cgttgttgtgctagggtttcgtctcgtgtataaggcgctcggagctcgcaaatcctttcctctctcgcgctcgacgctaggtagccgtcaccatgagccgctcggcgcagcctccggatctcaagaagtacatggacaagaagcttcagattaagatgaatgcaaaccgtgttgttatcggcacacttcgtggattcgaccagttcatgaatctggtggtggacaacattgtggaggtcaatggaaatgacaaaacagatattggaatggggg

SEQ ID NO: 72887 - DNA, 269 bp, Zea mays
acggaaggggtcaaagaacacgatacctatcacaaaaactgaagattgtgagagcttcttcaacttcttcagtccacctcaagtccctgatgacgacgaggaaattgatgaggacacagctgatcagttgcagaaccaaatggagcaagattatgatattggatctaccatcagagacaagattatcccacatgctgtctcatggttcactggagaggctgctcaagatgaggactttgaagttatggacggcgaagacgatgacgatg

SEQ ID NO: 72888 - DNA, 266 bp, Zea mays
gcttgacactgtcttttcctgcccattctgcaaccacgggagtagtgttgagtgccgaattgacatgaagaatctgattggcgaagcatcttgtagaatctgtcaggaaaacttcagcacaactgttaatgcactcactgagcctattgatatatatagtgaatggattgatgagtgtgagcgtgtcaacactgttgaaggcgacgatgatgcgtgagcttgccccatgcgatgaaactgttacctacaatcgtaatgtaatgtgc

SEQ ID NO: 72889 - DNA, 275 bp, Zea mays
aaggacggctccggcaccgtcgccgtcgccgacctccgccacgtcctcacgtccatcggagagaagctcgaggtgcacgagttcgacgagtggatccgcgaggtcgacgtcgcgcccgacggcaccatccgctacgacgacttcatccgccgcatcgtcgccaaatgatcccgtcccctccgagtctccattccgccgatccaccctcgcgcgctcttcgtctgtaataacttcggctcccatccccgtgatttcattttggttcccttctatgg

SEQ ID NO: 72890 - DNA, 270 bp, Zea mays
  unsure (1)..(270): unsure at all n locations
ggcttggctggacagagaaggctctggcggtgctcatcagcctcgcggccacccaagctggccgaaaggagatcatgtccacccctggcttggtcagcacgctggcgatgctgctggacacgggcgagtcgacggagcaggagcaggcagtgtcgtgcctcctggtgatgtgcggcgccgacgacaagtgcatcgcgccggtgctccaggaaggggtggtcccgtccctcgtctccatctcggcggccgggactgggaggngcagggaga

SEQ ID NO: 72891 - DNA, 268 bp, Zea mays
gaaagactagaatctgatgaagatgtgctccaagcttcccttgacgctgttgctgaggaaaagcctcatgtgctacgctatatgtctaagaccattcgcgatttagaagttgtggagggaagtgctgctagatttgactgcacgattgaaggatacccagactctggagatagctagctcagagatgaccaagcaatcagggagtcccggcacttgcagattgactacgatgaggacgggaactgctctgtaattattagcgatgttt

SEQ ID NO: 72892 - DNA, 318 bp, Zea mays
gattagtcagttgaaatgccgcgacgaagctcgaattcgctcgagccgaaaggaccttgtttccagcttggtgtctggattattgacgattggaccccgtttcggtggagcaattgatgatgcagcccgatacttcaaagatgcatgtgataggagcctcacgccatacgagtttgttgaaggcatgaaaaagaagggaatccgtgtgcctgggattgggcacaggattaagagcagagacaacagggataagcgtgtgcagcttctacagaaatatgctcacacacatttcccttcagtcaagtacattggatacgc

SEQ ID NO: 72893 - DNA, 295 bp, Zea mays
ctcaagaagtcgattcccttccccaagaacccaagcccccaccatgacaagctcctcctctccttcccgaaaggcgctgagcaagatcgcttgcaatcggctgcagaaggaactcgccgagtggcaactcagcccccctgctggattcaagcacaaggtctccgataacctacaaaggtgggtaattgaggtcactggagcggcgggcaccctttacgccggcgagacctaccagttgcaggttgacttccctgagcattatcctatggaggcacctcaggtcatttttctcaat

SEQ ID NO: 72894 - DNA, 251 bp, Zea mays
gaggacatgggtttttctccaatctatattggtggaagaacaaagcatcttttgcagcgtgcaatctggaatgacacgtctttcctcacttcggtgaatgtcatggactattctctacttgtcggagtggacaaagagaagcatgaacttgtgtttggcatcattgattatctgaggcaatatacttgggacaaacaattggagacatgggtgaagacttctctgggagtacccaagaatgtttcaccaac

SEQ ID NO: 72895 - DNA, 329 bp, Zea mays
  unsure (1)..(329): unsure at all n locations
gtagtgntctgaagaggcccgacgtagctgaatcgctcgagataatgccaccacgcgtctgtcgtccttctgaagcttcggcggcggcgtaggtagcggcggtctcaaccccaggcgagctcggctccggtcacccgtcgatccacgcaaccatgtcgaggaggaagaccagggagcccaaggaggagaacgttacccttggacccactgtccgtgaaggagaagttgtctttggggttgctcacatctttgcatccttcaatgacaccttcattcatggcaactgattgtctgggagggaaactttggntcggatcactggtggcatg

SEQ ID NO: 72896 - DNA, 256 bp, Zea mays
gcttgacactgtctattcctgcccattctgcaaccacgggagtagtgttgagtgccgaattgacatgaagaatctgattggcgaagcatcttgtagaatctgtcaggaaaacttcagcacaactgttaatgcactcactgagcctattgatatatatagtgaatggattgatgagtgtgagcgtgtcaacactgttgaaggcgacgatgatgcgtgagcttgcccatgcgatgaaactgtacctacaatcgaatgg

SEQ ID NO: 72897 - DNA, 274 bp, Zea mays
tatggtggtatgcttccactgatggaacagttccttagtaccaatttgttcatgtatgtcattccacttaaatcagggatagatgaaccactacctctcaggtcactaatcctcagatcagaaaggtttttcaattcagataggctcgagggaattggcccttctaagaaagatccttctatttgcaatttgtcaagccttttcaagtttccccacaaatcaggtatccttccggaaaaattggtgctagaaatcttagatcagttaattactg

SEQ ID NO: 72898 - DNA, 274 bp, Zea mays
gtggaaggcggctggtgcctccacgacatcatccggtctaacgactggaagatcaatggcatcgtgaacggcatcgaccaccaggagtggaaccccaaggtggacgtgcacctgcggtcggacggctacaccaactactccctcgagacactcgacgctggaaagcggcagtgcaaggcggccctgcagcgggagctgggcctggaagtgcgcgacgacgtgccgctgctcggcttcatcgagcgtctgggatgacagaagggcgtggacatca

SEQ ID NO: 72899 - DNA, 280 bp, Zea mays
  unsure (1)..(280): unsure at all n locations
tatggaggtatgcttccactgatggaacagttccttagtaccaatttgttcatgtatgtcattccacttaaatcagggaaagatgaaccactacctctcaggtcactaatcctcagatcagaaaggtttttcaattcagataggctcgagggaattggcccttctaaganagatccttctatttgcaatttgtcaagccttttcaagtttccccaaaaatcaggtatccttccggaaaaattggggctagaaatcctcanatcagtttaaatactgaata

SEQ ID NO: 72900 - DNA, 303 bp, Zea mays
ttgattgtcgattgggctagctatgccgctacgtagctcgaattcgctcgagaagtttctcgtctgaggctacttggcgattatgtgcactcgacatgcatcgcttctgttgagtttgtccaagcagatagtgctattctcgctctgaactgcagtggcattgttcttggaacgcttcctgttagggtgagcccatcaaagacaccagtccgctcgcgatcgccccgtgtgacgtcatactgaattcggctcatctgaagccgtcggccagggcagcaaatttctgggcaacaaggcctagtc

SEQ ID NO: 72901 - DNA, 297 bp, Zea mays
caagcaattactctgcttcaagtaattgtagtcattggcgcttttcagaaacaatttttttttgagaaggggaggagctccagagcacagttgatagaaaatgtggtaagatctctctccttgtgccctttggaccaccctcgacttctcaagcaggaaggtctggattttagcaccacacattttaccagattcagagaagtgtatttcaataagcttgccaaatcggcttgagttatggtttcgtgatgattttgcattccccaatgcttccaggataacattggcttgaagacc

SEQ ID NO: 72902 - DNA, 303 bp, Zea mays
ctcttcgataaggatggcgacggctgcatcactaccaaggagcttggaactgtgatgcgctcccttggccagaaccccactgaagcagagctgcaggacatgatcaacgaggttgatgctgatggcaatgggaccattgacttcccagagttcctgaacctgatggcaaggaagatgaaggacaccgactccgaggaggagcttaaggaggcctttcgcgtcttcgacaaggaccagaatggtttcatctcggctgctgagctccgccatgtcatgaccaacctcggcgagaagctgactgac

SEQ ID NO: 72903 - DNA, 300 bp, Zea mays
  unsure (1)..(300): unsure at all n locations
cccagagatccagaacattcttaccgaccctatcatgcgacaggttctaatagatttccaggagaacccaagtgcggcccaggagcacctgaagaaccccggtgttatgcagaagattcagaagcttgtaagtgctgngatagttcagatgagatgatcgagcgatgcgatgattggctntgttcgttcacgtgcaccctggtcatacatatgttttaacaagcagcagcggcataagaatgaacctgttcggtggctaatcttattccttttggattgtaagtgcattgacattggata

SEQ ID NO: 72904 - DNA, 281 bp, Zea mays
acttctcctccggcatcgacgaggcgaagccccagcgcccgagtccctctccctgctcccacgacccatggcggcggatatggcgtacgcgccgccgatgaaggcgggcaaggccgggttcgaggctggcatgatggatccgcagcacaggatccgcatcacgctctcctccaagagcgtcaagaacctcgagaagtctgcgggatctggtgaaggcgccaaggtaaggactcaaggcaaggccccgtcggagcctacaagggctcacataccacaggagc

SEQ ID NO: 72905 - DNA, 293 bp, Zea mays
ggaagtttctacgagccatggagggagatgagtgcattgtgaattgcattgagcctcatcctcatgctatggcaatcgcgagctgtggaattgataatgatgtaaaagtttggactccctctgcgattgagcgggcacctatgatacatgttgatgagctccagttgagacctcgcaagagaagagccaagctctggcgctttggcatacgagacctgttgatccaacagatactgggtatcggaaataggcaacagtcagctgaagaagctcatcagaggaccatgaggaca

SEQ ID NO: 72906 - DNA, 285 bp, Zea mays
taagccgtggcctctcttccgtaagccctagcccctagccgccagtgtcgtgcattcgtgctgaggctcaactgctgatccgtcttccaagctctggtatcatccctgagcactgatttaagatgtatctccagtactacatcaacgagaagggggacaaggtctacaccaccaagaaggagtcacctcttggggtgccaacgcagtctgctcacccagctcggttctcaccagatgacaagtactctcgccagcgatacctgttgaagaagagatttggacttc

SEQ ID NO: 72907 - DNA, 291 bp, Zea mays
  unsure (1)..(291): unsure at all n locations
ctcttcgataaggatggcgacggctgcatcactaccaaggagcttggaactgtgatgcgctcccttggccagaaccccactgaagcagagctgcaggacatgatcaacgaggttgatgctgatggcaatgggaccattgacttcccagagttcctgaacctgatggcaaggaagatgaaggacaccgactccgaggaggagcttaaggaggcctttcgcgtcttcgacaaggaccagaatggtttcatctcggctgctgagctcngccatgtcatgaccaacctcggcgag

SEQ ID NO: 72908 - DNA, 293 bp, Zea mays
  unsure (1)..(293): unsure at all n locations
gaaaacctcctatttagtgtgtgccgtttcagagagctaactggaagatacccacagaacataactgatgttagctacgatttcaaggaggaacgttttgcacaactgcacagaaccgcactcggattcccggaaggaaggttcttcttctcaggtacaccagctacgccttccgcaagggaggctgctctgaaaggcgaagcagctgtccgagctcagttccttgaagacccgtatggatgtctaggatctcttcatgtaaagaggctgaagcgngacccattccaccgaac

SEQ ID NO: 72909 - DNA, 294 bp, Zea mays
gtcccccttttcacgactgcaagcgagttcaatggtgaagttcagttcctaatcacagacatggctatttggtggacaagtgaagtatgctgtggtgtttgagaagctaaccaagtaccccttgattgatttcaacaaagacaacgaagtgcattgcttcaagcatgccattgtcggccttcatgcttacatggagttcacaatcgacccgttaaaggctccacacaattactcaatggtggacttcaaccggttcatgcgcaggacctactcgctgcctagggatgcagtgag

SEQ ID NO: 72910 - DNA, 293 bp, Zea mays
cgacttcttgccccggacggctactcctcttgaagacattttcaagtcgatcctctgcttgccttgcctcctaggtttgagatgtttgagggatacatgtatacctgaagacgctatgcttaaggatccaaggaggctttatgcaccaggccggatttatcacatagtcgaaagaagaacgtgcaggtgcggaagatatccaccggtagtcaaaacagctgtgccggtggatggtagatttgagcacatagttctttcctgcaatgccacagcggaccatgccattatttgga

SEQ ID NO: 72911 - DNA, 286 bp, Zea mays
ccgacatcgtcccttcgtccccacgagcaaccgataatccgccggcgttgagatgttggtttatcaggatctcctatctggcgacgagctcctgtcggattcattcacctacaaggagctcgagaacggcgtcctgtgcgaggtcgagggaaagtgggtcacccaaggtcctgttgatgtggacattggtgccaatccatccgccgagtgtggtgaggacgaaagcgttgatgacacagctgtgaaggtggttgatattgttgacacattccgtctacaggagcaa

SEQ ID NO: 72912 - DNA, 284 bp, Zea mays
gtcgtgggatcccagccaccgccgctagaagaagagctcggcgattcccaggtcccgcgagaagatgccgaagcagatccatgagattaaggacttcctcctcaccgcgaggaggaaggatgcccgctcagtgaagatcaagaggagcaaggatgttgtcaagttcaaggtgcgctgctccaagtacttgtacacgctctgcgtcttcgatgctgagaaggcaaacaagttgaagcaatctcttcccccaggtttgaccgtcgaggaggtctgattggatacat

SEQ ID NO: 72913 - DNA, 275 bp, Zea mays
  unsure (1)..(275): unsure at all n locations
gcgagggcaagctcatcgaccccatgctcgactgcctcaaggagtgggacggcaagcccctgcccatctgctgaggagtgaggaggaggacgccaccggtgccaagaggcaagacccgcaagatgaggagatgacaccgtacgcgcgcgaggaagaaataaagaagggagtatttcggtattctcaagcaggcttcatatcgtttgcgatctgaagatcattatatgttggtcctctgtactcatctnttttgattggagcttgtagcagtgatc

SEQ ID NO: 72914 - DNA, 277 bp, Zea mays
cggctcgaggcaggctgaattcttctccttcggaacgaacgacctgacgcagatgacctttgggtacagcagggatgatgtgggaaagttcattcccgtctatcttgctcagggcatcctccaacatgaccccttcgaggtcctggaccagaggggagtgggcgagctggtgaagtttgctacagagaggggccgcaaagctaggcctaacttgaaggtgggcatttgtggagaacacggtggagagccttcgtctgtggccttcttcgcgaaagct

SEQ ID NO: 72915 - DNA, 283 bp, Zea mays
ctcgagtacgagcggctactcccggcggcggcggcgatgagcgcggtgaacatcaccaacgtggcggtgctggataaccccaccgccttcctcaatcccttccagtttgagatctcctacgagtgcctcgtgcccctcgacgacgatctggagtggaagcttatatatgttggatcagctgaagatgaaaactacgatcaacagcttgagagcgtgcttgttggccctgtcaatgttgggacctaccgttttgtccttcaggctgacccaccggatccctcaa

SEQ ID NO: 72916 - DNA, 266 bp, Zea mays
ctcgacccaaacttcaagaagcttgcggtggagcacttggtcttggcctaccggaggacgaagaagcgtgtcattctcttagactacgatgggacgctgatgccgcagacttcgctcggtaagagtcctacctcaaggacgatagacatgttgaacagcctttgccgcgacaggaacaacatggtcttccttgtgagcgcaaagagccggatgactctgaacgaatggttcttaccatgtgagagccttggactagcagctgaaca

SEQ ID NO: 72917 - DNA, 256 bp, Zea mays
cgtcaccatgacttttaagcgcaggaatggaggtcgcaacaaacacggtcggggccacgtcaagttcattcgatgctccaactgcggcaaatgctgtcctaaggacaaggctatcaagaggtttctggtgaggaacattgttgaacaggctgcagtcagagatgttcaggaggcttgtgtctatgaacaatacacgcttccgaagctttatgtgaagatgcagtattgctgttcctgtgctatccactctcaatgt

SEQ ID NO: 72918 - DNA, 265 bp, Zea mays
cagttggaaatccattcattccttcgtcccccacctgtcgctctatctccatctccatcccgcctcctcctcctcctcatgctgctgcggccactgccactataatagcccagctagctagaggccacccatcaagctgcccattccctcgtgacagcgcagctgcctgcctgctccgaggcgccacccagctcttcctcgccccagcagccgtttctcgagatccttttcactgtcaccaccagggtacatagaccgcatctgc

SEQ ID NO: 72919 - DNA, 275 bp, Zea mays
atcccagccaccgccgctagaagaagagctcggcgattcccaggtcccgcgagaatatgccgaagcagatccatgagattaaggacttcctcctgaccgcgaggagtaaggatgcccgctcagtgaagatcaagaggagtaaggatgttgtcaagttcaaggtgcgctgctccaagtacttgtacacgctctgcgtcttcgatgctgagaaggcaaacaagttgaagcaatctcttcccccaggtttgaccgtcgaggaggtctgattggataca

SEQ ID NO: 72920 - DNA, 270 bp, Zea mays
ctccgtttggatcttgcggggcgtgacctcaccgaccacctaatgaagatcctcacagagagagggtactccctcactacgagcgctgagcgggagattgtcagggacataaaggagaagcttgcctacgttgcccttgattatgaacaggagctggagactgccaggagcagctcctctgtcgagaagagctacgagatgcctgatggtcaggtcatcaccattgggtcagaaaggtttaggtgccccgaggtgctgttccaaccatcc

SEQ ID NO: 72921 - DNA, 283 bp, Zea mays
gtatccagagcttgttgagattataaacaagctcaaggatgcagatggtaagctatcaaatgtggacgcatctggcctccttgttgccaactctggcaacgatctgcctgtaattgacttgtctagtgtatcaccagagcttgcctttatggcaaatgatgctgacctgacggtgctcgaaggcatgggaagagcaattgaaactaacctatatgcgcagatgaaatgtgactcgatcaagtttggaatggttaagcatcctgaggtcgcccaatttttagga

SEQ ID NO: 72922 - DNA, 273 bp, Zea mays
cccagttcgtgcgcttcgacaacgacgccgcgagtccgaggatggtgccgcgggcgccgtggatggagcaggaggcgtcagagtattgggaccgggagacacggagcgccagggacaccgcacagattttccgagtgaacctgcggacgctgcgcggctactacaatcagagcgaggccgggtctcacaccctgcagtggatgcatggctgcgagctgaggcccgacaggcgcttctccgcgggtatgaacagttcgcctacgacggcaagga

SEQ ID NO: 72923 - DNA, 241 bp, Zea mays
aaggaataaataagtgtgctctgccaaggtcccaccaaccaccttgagtgctgctaacaaacctgcaaggaccactgatgctgtgccctggatgtcatcattgaaaacaagatggctcttgctatattttgcaagcaaattaaaagcattatgattcgcgaagtcctcaaactgaatgaggactttctcgccgaaatttgcttaacacaggcattaactttttccataagctcatgatact

SEQ ID NO: 72924 - DNA, 269 bp, Zea mays
ctcgagccgagactgaagcacgaggagctctgcaggttcaggccgtacagctgcccgtacgcaggttccgagtgcctgatcgcaggcgacgtcccgttcctggagtcccatctcatcaacgaccataagggggacttgcacgagggctgcacgttcaaccaccggtacgtgaagcccaacccgtacgaggtggagaatgccacgtggatgctcactgttttcaagtgtttcgggcagcacttctgcctgcacttcgagcagttcgtgct

SEQ ID NO: 72925 - DNA, 277 bp, Zea mays
gtccacgaggacatgcttcttgccgcctcggaagcactagctgctcaggccacacaggagaacttcgacaagggatcaatcttcccgcccttcactaacattagaaagatctctgcgcgcattgccgcagccgtggctgcaaaagcttatgaactcggtttggcgacccgtctgcctcccccaagggacctggtgaaatatgcacagagctgcatgtacactcctgtctaccgtaactaccgatagtgctgctgggatcaattctgcagtaataaaa

SEQ ID NO: 72926 - DNA, 261 bp, Zea mays
cattcttggactaggctttcaagaaatctctgttgggaatgcaacaccagtgtggcataacatggtgaaacaaggtctcatcagcgaccctgttttctctttctggtttaaccgacatgctgatgaaggagaaggtggtgaaattgtgtttggtggaatggattctagccactacaagggtgatcacacgtttgtcccagtcactcggaagggatactggcagttcaacatgggtgatgtcctgggtgatggaaagccact

SEQ ID NO: 72927 - DNA, 260 bp, Zea mays
atcggcgactctggcgtcggcaaatccaacctgctctccaggttcacgcgcaacgagttcagcctagagtccaagtccaccatcggggtcgagtttgctaccaggagcatcagggtcgacgacaaggtcgtcaaggcccagatctgggacactgctggccaggagaggtatcgggcaattacaagtgcgtactatagaggggctgttggagcacttgtcgtgtatgatgtgacacgccatgtgcctttgagatgtggaga

SEQ ID NO: 72928 - DNA, 264 bp, Zea mays
actattgcatttgggatcagaaatgtgacgcacattgagaaagctctatcagaagcttacagggttctaaagcgaggcgtgaggttcctatgcttggagttgagtcatgtggatgtccctgtttttaaagagatttatgatgtttactcgttttctgtgattccgactattggagagctggttgctggtgatcggcagtcgtaccaatacttggttgagagcatcgtcggtttccaaatcaggaatgtttgctcagatgattca

SEQ ID NO: 72929 - DNA, 268 bp, Zea mays
aggctacaacaagcaattgcggcgagcgtcttacaacaaccaatttcccagttgcaacaacaatccttggcacatctaacaatacaaaccatcgcaacgcaacagcaacaacaattcctaccagcactgagccacctagccatggtgaaccctgccgcctacttgcaacagcagttgcttgcatcaaacccacttgctctggcaaacgtagttgcaaaccagccacaacaacagctgcaacagtttctgccagcgctcagtcaactag

SEQ ID NO: 72930 - DNA, 273 bp, Zea mays
gtttggtgatctagttttcatccctttcaccttcactattcaggggaggtggcttttgaagaacaaagtagagctgtcccttttgtctggtctagctaacttatgcatctttcttattggctacctagtgttccgaggagctaacaagcaaaaacatgtgttcaagaaggaccccaaagctcctatatggggaaaacctcccaaagttgtcgggggaaagctacttagcatctggtactggggcatcgcaaggcactgcaattatctcggaga

SEQ ID NO: 72931 - DNA, 257 bp, Zea mays
gctcaaggcggtgcggtttattgacgcggcccacttctctgtccccgcgggcagtacgcggtggagctgttggccgggcgggagagcgccatcgcgcaggtcatccgcaccgtgcccaaccgcgcctacaacctgtcgttcgccgtcggcgacgcccggaacggctgccacggctctatgctggtggaggcgttcgcgggcaacgtcacgcagaaggtgccgttcgattccacggggaaaggcgggttcaagacggc

SEQ ID NO: 72932 - DNA, 267 bp, Zea mays
ctcgcgcacaaccccggcggcaaggagcggtacgagcgcgagttccgcgagctcgcaaagtgcgccggcttctccgggttcaaggccacctacatctacgccaacgcctgggccatcgagttcatcaagtgaaccaccgtcgccgcgatgagatggcatggctgccacatgctttgcttgcttggtcctcgtatcgtacgtcggcgtcgtcgtcttcttctggttattgcgctgctacctcgctgctctcgcgtatgcatgtacttt

SEQ ID NO: 72933 - DNA, 248 bp, Zea mays
gcaaggccggcggcgaggactacagcctcacggtgcgcaacggcacggcgtgcctggcgcccaccaacccgcgggacgagtaccagcactgggtcaaggacatgcgccacagcacccgggtgcgggacgaggagggctacccggccttcgcgctcgtcaacaaggtcaccggcgaggcgctcaagcactccacggggcagggccaccccgtcaagctcgtgccctacaacccggctaccaggacgagt

SEQ ID NO: 72934 - DNA, 247 bp, Zea mays
ctgagatatttgacacatggtgcaatattctcaaacgtgttcccaacagcgcattatggcttttaagattcccggcagctggtgaaactagagtgagagcatatgctgctgccagaggagtaagatcagatcaaattgtattcacagacgttgccatgaaaaatgagcatatacgacgcagtgccctggcagaccttttcctggacactcccctctgcaatgcacacacaacaggcactgacatact

SEQ ID NO: 72935 - DNA, 229 bp, Zea mays
gaccgggactcaccagctgccggccgggccacccacgaccgcagccatggacgccatcaagaagaagatgcagatgctgaagctggacaaggagaacgccatcgaccgcgccgagcaggccgaagccgacaagaagcaagctgaggaccgctgcaagcagctggaggaggagcagcaggccctccagaagaagctgaaggggacagaggatgaggtggaaaagtattct

SEQ ID NO: 72936 - DNA, 284 bp, Zea mays
atcgggcaccagaagtattgctccagtcatctgcttatgattctgcagttgatatgtgggcaatgggtgccataatggctgaattgttgacactccatcctctctttcctggaactagctgatgagattcacaagatatgcaatgtcatcggtagtccagatgagcaatcttggcctcaaggattgtcacttgcagaagcaatgaagtatcagttcccacagatcataggcaggcaactggccgaggtgatgacaacagccagtagcgatgcaattgacctcat

SEQ ID NO: 72937 - DNA, 264 bp, Zea mays
ggcgcgccagcaatgacctcgaggggtctactggagaaggatttcgagcagattggggagttcctccaccaggcagtgaccatctgcctgaacatccagaaggagtacggcaagctcctcaaggacttcaacaagggcctggtgaacaacaaggacatcgagaacctcaaggtccaggtggagaagtttgccgactccttcgacatgcctgggttcacgcttgagagcatgaaatacaaggagtagatatgcctctttcatgcg

SEQ ID NO: 72938 - DNA, 283 bp, Zea mays
cccgaccagcagccgagtgcccgattacaatcagccatcgccaccacctccctccgcggctccgccttccgccgcgaacacgccgctgtctcgaccccttgtcctcctccttcagcaagatggcggagattgagataaaaacagcacctgctgacttccgcttccctacaacaaaccaaacaaggcattgttttactcgctatgtcgagtaccacaggtgtttgaatgccaaaggggatgatgctggtgtttgggaaaaatttgccaagtactacaggtccct

SEQ ID NO: 72939 - DNA, 251 bp, Zea mays
catgatgattattgtgaccccacaagcacccccctcaccttacaattatcaacggctttgtataataatagcagcagcattaggagtactattaatgctaaagctaaagttcatgagtgttccatatgtggggcagaattttcatctgggcaagcgttggggggacacatgagaaagcatagaaattttctgagtgcacctattattgggcaattaatattgcaatggtggtgatggaagcctaaagtccg

SEQ ID NO: 72940 - DNA, 266 bp, Zea mays
cttgcagcaacaatggcagccatggctgcgcttcagagctcaatggacggtctctccctatcctccaactctttcttaggccaacgcctttctcccatcaccctcccctctcttctaccgggtaagtcaacagagaagcaatgtcctattgtaatgaggcttaaacgatgggaacggaaggagtgtaaaccaaacagccttcctatcttgcacaaaatgcatgttaaacttggagatacggggcaagtcatatctggacgtgaaag

SEQ ID NO: 72941 - DNA, 246 bp, Zea mays
  unsure (1)..(246): unsure at all n locations
ctaccccacacagaagcggcggcggaggagcaaacgcaggcgaaggcgagggtgtgagggaaggagcaccagccatggtgcacgtcaacttctaccgcaactatggtaagacgttcaagaaaccaaggcgtccttatgagaaggagcgtcttgatgctgaactgaagctnggtggtgagtatgggctgaggtcaagcgtgactttggagggccagtatcactgagcagatccgaatgctgaagcac

SEQ ID NO: 72942 - DNA, 287 bp, Zea mays
gtggcggcaatggaacgaagacaatgctgcggagctgatcgatccagtgataagagcatcgtgctcaggtcggcaggtgctgagatgcatccatattgcgatgctgtgcgtgcaagatcacgcagatgagcgacctgacatccccactgtcatccttatgctgagcaacgacagctcgagccttcctaatccgaggccgcctacgctgatgcttcgaggccgtgagatcgaatgcagcaagtcaagcgagaaggaccgagccactccattgcactgtgcaatgcaca

SEQ ID NO: 72943 - DNA, 222 bp, Zea mays
cgtctgcaacgtcgagcaccacgttggtgaccgcggtgtcttcgccagggcctctggggactacgccatcgtgatcagccacaaccctgacaacggaacctcgaggatcaagctgccatctggtgccaagaaaattgtccccagcagctgccgtgccatgattgggcaggttgccggtggtggcaggactgagaagccgatgctgaaggctggcaacgcgta

SEQ ID NO: 72944 - DNA, 278 bp, Zea mays
cgtcaagaaggggaagcccgacctcaggaagaaggtgatgcccgccgtcatcgtccgccagcgcaagccgtggcgccgcaaggacggtgtctacatgtacttcgaagataatgctggagtgattgtgaatcccaagggtgagatgaaaggttccgctatcactggacctatcggcaaggagtgtgctgatctttggcctaggattgctagcgcagcaaacgccattgtttgagagcttgttggatatgttcagacttatatgatcatcttatgatcag

SEQ ID NO: 72945 - DNA, 277 bp, Zea mays
tgaacattatgatgaaaaccatgccccgatcaattgctccctttgtaaagaaacaatagatcgtgagagctgggatcttcataaaggtgaaaagtgcccacaaagaattgtcgcttgtgaatattgcgagtttgaattgcctgcagttgatctccatgaacaccaggatgtatgtggaaaccgaacagagctttgccaaacatgcaggaagtatattagactgcgtgaatggacagggcacgaaatacagtgccatacaaactcaaatggttctgca

SEQ ID NO: 72946 - DNA, 269 bp, Zea mays
gtaaattgggatggactgcgcactaaagatgaggagcgtgtgcttgatcttggtgctacatatagaccttttgacctggacgaggctgtgattaggaggttcccccgcaggttaatggcaaacttgcctgatgcatcaaatagagagaaaattctgaaagtaattttggcaaaagaagagctgggatcggatgttgatctcgactcacttgccaatatgactgatggttattcaggaagcgacctgaagaatctgtgtgtgaccgcagc

SEQ ID NO: 72947 - DNA, 238 bp, Zea mays
gctgggtccgtcagagaagaacctagcggagagtaagcagtaacatggatcccatgcttcttgcatgcctcaaagatcctgtcgttcttccacccagggtgcatttccatctggcacactgccggtggaacattcgctgaccgcatgacacgcttatgctgagcaacgacagctcgagcgattctaatccgatggccgctacgctgatgcttcgaggccgagagatcggatccagcaa

SEQ ID NO: 72948 - DNA, 263 bp, Zea mays
gcgccagcggatcgatcattcgatccccaccactgcccgaggccctctgctcgctgacttggctcctccgccgtggccggagcgatagggacacagatgcatttagctgggtgaactctttcaaaaggggcaggtgcgctagtttgaatggctgctacaaagcttcaggcctttgggaaccaccctgctggcccgaaaaccattcatttctgggcgccaacattcaaataagggatcagcattgccaacatagccgactttgc

SEQ ID NO: 72949 - DNA, 260 bp, Zea mays
ctcacactctccaaaccctatcgggactacacactagctctatcgctatctccccaagattgtcgagcgccgatcccgagcacagagaagaggaggaggctcccgccgttgcgacgacgaggacaccggagctcacgccgctccaatcgtcaagctcgaggagtgtgctgtcaccaccggcgaggaggacgaagatgcaatcctggatctcaaatcgaagctttaccagttcgacaaggactggaaccagtggaaggagc

SEQ ID NO: 72950 - DNA, 173 bp, Zea mays
atccgcggttatgatgatggaacaatgacattctcgattcttaacagactcaggaggcaatggtagctaataaagtgactacaacaaggcacatgtctactacaggtgatgaggaaatgtgcgaatctgaatatgcattctgaaacctcgagccgctagttctcgatcgcgat

SEQ ID NO: 72951 - DNA, 265 bp, Zea mays
gtttcctgaaccttggtgcatgcctcgcctcttcactgccgatattgctgctttctatgaggctgactatactaacaaaggtgtaaagatcttgaagggcacgctagctgttggctttgatgctgatgccaatggtgatgtcactgcagttaagctaaaggatggcacagtacttgaagccgatattgttgttgtcggagttggagtcagaccattgactactctcttcaagggtcaagttgctgaggagaagggtggaatcaag

SEQ ID NO: 72952 - DNA, 270 bp, Zea mays
gaatgtgggaagcatgtacttgtcatcttgacagatatgagctcttatgcagacgcacttcgtgaggtttctgcagcccgagaagaggtgccaggtaggcgtggctatcctggatatatgtatactgatctggcaacaatatatgagcgtgctgggcgtattgaaggaagaacagggtccattacccaaattcctattctgacaatgcctaatgatgatatcacacacgcaactccggaccttactggatacattactgagggacagata

SEQ ID NO: 72953 - DNA, 256 bp, Zea mays
ataactagtagcattattcttccattcataatgggtgctttcacattcgaggacgaaatctactcccctgtggctcctgctactctttacatggccctagtttcagatgccgacaacgtcatcccaaaggctcttgagtccttcaagagtgttgaaaacgttgagggaaatggtggcccaggaaccatcaagacgatcactttcgttgaggatggagaaaccaaggttgtgctgcacaaaatagaaagcattgatg

SEQ ID NO: 72954 - DNA, 262 bp, Zea mays
ggagaagctacagacggaggtgaggacgacgatgcgctcgccggacggcacgaagctggacatgctagcggaggaggacctcggcagcatgccctacctcaaggcgaccatcaaggagacgctgcgcctgcacccgccggcgccgttcctcctcccgcactactccaccgccgactccgagatcgacggctacttcgtcccagccgggacgcgcgtcctcgtcaacgcctgggcgctcgggagggaccgcacgacgtgggag

SEQ ID NO: 72955 - DNA, 251 bp, Zea mays
ctccctcctcaaggagatgcagcaccgcaacatcgtcaggctgcaggacgtcgtgcactacgacaagtgcatctacctcgtattcgagtacctcgacctcgacctcaagaagcacatggactcctccacggacttcaagaaccaccgcatagtcaaatccttcctctaccagattctgcggggcatcgcctactgccactcgcaccgcgtgctccaccgcgacctgaagccgcagaacctgctgattgacc

SEQ ID NO: 72956 - DNA, 237 bp, Zea mays
gtttttccttttagattgtgattactgctagtataagtggctacttggaaatgatagctactcaaattgctaggttctgcggagcacacttttacccagtcattggtgcagtgggttttatgatccaaaggttggatatcccaagtgaagtagatcctcagtggaaatcaattatcctgagctgctgggaaagcgacccgcagcaacggccgtcgttccaggagcttcttgagaggc

SEQ ID NO: 72957 - DNA, 259 bp, Zea mays
attgtttaccatggaccagattttgttaggaagatctgatgttgctggttggggtgcattcattaaggtcagataaccgatcaaaatacctctgagtgcgatacttcctttcttgttctggctaattttccttgcaatatgtagaatcctgtaaataaaaatgagtatcttggagaatatactggtgaattgatctctcacaaggaagcagacaaacgcggcaaaatttatgaccgggcaaactcatctgttctgttcg

SEQ ID NO: 72958 - DNA, 257 bp, Zea mays
ctctgtttcatgaaaggtgcatgatctccaaactaaactatagactgagagccatgaataagatgtagttgtgggcttttgaacaatagctggagtgatatgaaacattagtgatgtagttgtgggcttttgaactgcttcaagctggagtgatgtcgctgtggtgctttagtgactgatcatctctggagcttttgtgaattatctagctagctatctgtaaatgatctagttgtgaatgatattataattgtgat

SEQ ID NO: 72959 - DNA, 252 bp, Zea mays
gatgcctattgtgaaggctcctgggattgtgtcagcgcttaagcctgttcacaacgcatcgagaagctggaggataccaagggaagagatgatgtgtttttcacaccaagtgccattccatgtccttactggagaagaagctcataatgctcccaaggggtgctatgaattggatccaggctcaactccacaggagcttcttcatgtagttccaccatctggcgatgctaaataagtttgcacttgaagctg

SEQ ID NO: 72960 - DNA, 274 bp, Zea mays
  unsure (1)..(274): unsure at all n locations
aaaacttaaagagcacatgcagtattgtgtggatcaccctgaagaggttagcaagctggccaaagtgaaggcacaggtttctgaagtcaagggtgttatgatggaaaacattgaaaaggtccttgatcgtggagagaagatcgagctgcttgttgacaagactgagaatctgcgctcacaggcacaagatttcagacagcaaggaacaaatgtgaggagatagatgtggttgcagaacatganaatcaagctcatcgtcctgggaataatcatc

SEQ ID NO: 72961 - DNA, 269 bp, Zea mays
acttcagaaaaattaagccttcacaatggtgaaccccttgggcctgatgattcaacacggtatagaagcatagtaggtgccctacaatatttaactttgactcgtccggatctcagttttgcagtgaacaaagtgtgccaatatttgcattcacctacaacagatcactggacagcagtcaagcgtatcttaaggtaccttcgatacactcttcaccatgtgttgaagatttcaaagtcaccttctctgctggtcagtgccttcactgg

SEQ ID NO: 72962 - DNA, 266 bp, Zea mays
gagacatccgataaaattggaacgatacagagaagattagcatggcccctgcgcaaggatgacacgcacaaatcgagaaatggtccaaatttttatgggggattgacgtttgtactcttaacttgcaatacaaccagtgctgttaaattttgatatttgaatgtagtcgccttcgtctgctgctttattcagataagtttctttatatgcctccatttgattacatctggtgttctttttcgctcttcagaccggtgtcattttta

SEQ ID NO: 72963 - DNA, 265 bp, Zea mays
gggatatgcaactgagcagcttgcagtatacactggtccaacagttggtggccttctgaatgctacatttggaaatgcaactgaaatgatcattgcaatatatgctttgaaaaatggaatgatccgagtagtgcagcagtcactattgggttccattttgtcaaatatgctgttgcgtatgggctgtgctttctttgctggtggtattgttcatcgcaacaaagaccaagtcttcagtaaggcaactgcagctgtcaactcaggt

SEQ ID NO: 72964 - DNA, 252 bp, Zea mays
cagcagagaatctctcatcattcttcgattgtctaatattcgccttctctcaattgtataaatgacgctcggagaaactgctagctcatacgcaggtatcatccttcatgaagatggcatcagtgtgactgccgacaagatcagcaccttgttggaaactgcacaggttcaagtagatacctatgggccaaccttatttgctaaacttgctgagaagaaagatcttgtcgatttgatagccaatgcagcagg

SEQ ID NO: 72965 - DNA, 262 bp, Zea mays
cttgtctgagcaggagcttgttgactgtgacacttcatacaaccaggggtgcaatggaggtctgatggactatgcgtttgagttcatcatcaacaatggcggaatcgacaccgaggaggattacccttacaagggcacggacggacggtgtgatgtcaacaggaaaaacgccaaggttgttactatcgacagctatgaagatgtaccagcgaacagtgagaaaagtctgcagaaggcagttgcgaaccagcccatcagtgtt

SEQ ID NO: 72966 - DNA, 272 bp, Zea mays
gagggaaccatcctgtcagccaatttcgaaaatggaatttgagtttgaacagaagtttaccaaagaggatgtcaaagaacttatattccaggagatactgcagtaccatcctcaacttctgaaggattacaagaacggctctgaaaagacgagttttctatatcccagcgccgttgacaggttccgtaggcaatttgctagcttagaagaaaatggagagaggaatgtcgcgcttgacaggaaacatgtgtctctcccaaggacaacaaccg

SEQ ID NO: 72967 - DNA, 275 bp, Zea mays
gtggaattgtattgcaaatcttggcttgtgctctctataacaactggtggccaatgctaacagttctcatgtaccttatcctaccaatgcccgtcatatttttcctgggttctgatacttcctccatgatgtccaatgggggagacggctgggtgaacttcacgaaattcttgacgggcgcatcaatagtagggagcatcgccattccgtcgatcctgaagcatgcgggcgtcattggatggggagccctgacgatggagctgtcatcctttgtg

SEQ ID NO: 72968 - DNA, 270 bp, Zea mays
gctcccccttccagggtctcaaacgcaaaccccaatctcggcgtcaccgccccaaatctagcaaacggaaatcccatctcgccgccgccgcgatgtctcgccgctatgacagtcgcacgacgatcttctcgccggaggggcgtctctaccaggtggagtacgcgatggaggcgatcggcaacgccgggtcagccctcgggatcctggcggccgacggcgtagtcctggtcggcgagaagaaggtgacctccaagctcctccagacctccc

SEQ ID NO: 72969 - DNA, 281 bp, Zea mays
gggaggcagagaggagctgaggagagaaaatgacgacgaggttcaagaagaacaggaagaagagaggccacgtcagcgccggtcacggtcgtatcgggaagcaccgcaagcatcccggtggacggggtaacgccggtggcatgcaccaccaccgcatcctcttcgacaagtaccatcccgggttcttcggaaaggtgggtatgcgctacttccacaaactccgcaacaaattctactgccccatcgtcaacattgataagctatggtccctcctaccccag

SEQ ID NO: 72970 - DNA, 271 bp, Zea mays
atgcagatgagattcttgccaagaagggggtagtagtattacctgatatctatgctaattcaggtggcgtggtcgttagctactttgaatgtgtgcagaacattcaaggtttcatgtgggatgaggagaaagttaatgatgaactagaaaagtacatgagcagtgcttttcaacacttgaaggccatgtgcaagtctctggattgcgaccttaggatgggggccttcaccttaggagttaacagagttgctcgtgccaccctcttgagagg

SEQ ID NO: 72971 - DNA, 274 bp, Zea mays
cgattccatttctaccccgagacctccagccgtccgcccctgaaccctcagccttctccgtcccgcctcggcactcgacggccgccggcacacaccgcgcagtctcgagacaggaaccggaggaacgaggatggaggatgactcgccgctgacgaagacgatgaagggtgcggtgacaggactcgccgcggggaccatctggggcaccgtcgtcgccacctggtacgacgtgccccgtgtggagcgccacgtcgcgctccctggccttatccgg

SEQ ID NO: 72972 - DNA, 264 bp, Zea mays
gtcgcacttggcaggtcggtggacctctctaaattcaccgactacggcgaactccaagcagagctggacaagatgtttgacttcgagggtgaattggtatctggcagccaaaactggcagatcgtctataccgacgacgagggcgatatgatgcttgtgggagacgacccgtgggaagagttctgcagcatagtgcgcaagatctacatctacacgaaggaggaggtccagaagatgaactcgaaatcagctgcgccaaggaag

SEQ ID NO: 72973 - DNA, 266 bp, Zea mays
gctacaggtactgcaaaagagcaaaggccgtgtttaaggagcttgagttgaagaaagagccatatgttgtggagcttgatcagcgagaggatggctcagagattcaggatgccttacttgagatagttggcaggcgtactgtccctcaagtttttgtccatggaaagcacctgggtggttctgacgatactgttgactcctacgaaagtggaaaactggctagacttctaaacatcggagtcaaggacgacctttgagtgacatgc

SEQ ID NO: 72974 - DNA, 219 bp, Zea mays
gttcatccgtgttcttgtttgcgaggtcgagagagactgagagaggatgtcgtgctgcggaggcaactgcgggtgcggctccggctgcaagtgcggcaacggctgcggagggtgcagcaagatgtacccggacatggccgagcaggtgaccaccaccaccacccaggctctcatcatgggtgtcgcaccatccaaggggcacgccgagtgcgtgttcga

SEQ ID NO: 72975 - DNA, 263 bp, Zea mays
ggccgccatggtctccaacaccctccgcaacatgctcacatccccaggcggcttctctgagacgcgccagggcgaggtccgcttcccagagatccccaccaacatcctcgagaagatctgccagtatttctattggtcgctccattactccagtgggaaggagacagcggagtttccaatcgaaccggagataaccctggagcttatgatggccgcaaactatctggacacttgatgaggagcctgaggggtataatcctagt

SEQ ID NO: 72976 - DNA, 264 bp, Zea mays
ctagtctcctcttcgcacgagcgcaacaccatccacccaccagttcgaagcggaggcgaccggcaacctgcggcggagatgtcaggcaggggcaagggcggcaaggggctcgggaagggcggcgcgaagcgtcaccggaaggtgctgcgcgacaacatccaggggatcacgaagccggcgatccggaggctggcgaggaggggtggcgtgaagcgcatctccgggctgatctacgaggagacccgcggcgtgctcaagatcttt

SEQ ID NO: 72977 - DNA, 240 bp, Zea mays
tctaaatctgagttgatgtacagaaaagaaaagcattgttctatgtgtctttggttttcaggtctcttcatctggaacatttcttggctgctttctgactggactatcattctattttaaggcacaaggactgtgcacacagctggttcctactttggctctttgtggcatactggtatactatgcggcgtactcagttggaatgggcccagttccttgggttatcatgtcagaggtaag

SEQ ID NO: 72978 - DNA, 261 bp, Zea mays
ggactacaaggactccattggattcattgttcatgacgatgcaaagaagatggacaaaggcctgaagaaccgttacacggtttgatcctgatgctggaatcccagagagttgtagcagtagctggcccaaatgcatgctgggtggttttatctattgctgatgagttgtttaagcaagatccattcctgtattgtactccataagccacttgggtgttgctttgtattgttcactgctgtgttttttctgtgtggcaccga

SEQ ID NO: 72979 - DNA, 261 bp, Zea mays
atcgcgctcggggcccggcgtccggcgcgtgttcgagggagggcagatgccgctctaccgtcgtctccgcaagctacggggcattgccggcgggatgcacattggcctgccgaagtatgtgccattcaatttaaaagacatagtgcgcggtggattcaaagatggtgacgaaatatcactggaaaccctgaaatcacggggtctgatcaatccatcaggcagggaaaggaagctgccgctgaagatcttaggagatgggga

SEQ ID NO: 72980 - DNA, 259 bp, Zea mays
gtacccctctccgtctctcgtcatcgtcggcccgtcgcagccacctccatcggcctacgatccctccacgagcctcaggtcgaatccgaggagcaggatccgcggcggcgggcggcggacgcccggcgatggcgcaccgtatggacaacgagtacgactacctcttcaagatcgtgctcatcggtgactccggcgtcggcaaatccaacatcctctcccgattcacccgcaacgagttctgcctcgagtccaagtccac

SEQ ID NO: 72981 - DNA, 246 bp, Zea mays
caccaccttctagctgggcgaaagagcatacgcggagcagaggcgcacccccgcggagcatatgagaagaaggcgatgcatgacgagaggggattccaagatgccgagggccaccagcgacgcgaagctcctgatccagtccctcggcaaggcgtacgctgccacaccaacaaatctcaagattattgacctctacgtgggatttgcggttgccactgcccttattcaggttgcttacatgggatt

SEQ ID NO: 72982 - DNA, 263 bp, Zea mays
gcagcctccaaagccactcccaaacccccgcttccagaaccttctcgaagctccacgccgcctgctccactcgcactgatagcgaaggaaccaatgcgcgtgctcgtcactggcgccgcaggacaaattggatatgccctggttcccatgattgctaggggagttatgcttggtgcagactagcctgttattctgcacatgcttgacatacgcgcagcagctgaagcccttaatggtgttaagatggagttgtgtgatgctgc

SEQ ID NO: 72983 - DNA, 263 bp, Zea mays
gtcactcttcaagcggatcggtgtgcagccccacgtcatcgagctcgacaatctcggagctcaaggaccacaactacaaaaggtattagaaaggctgactggacagtctactgttcctaacgttttcatcggtggaaaacacgttggaggctgcacagataccgtgaagctgtatcgcaagggggagctagctagcatgctgtcggacctggatatcaacattgacaactcatgacaagctatgttctgcaaggattgggcga

SEQ ID NO: 72984 - DNA, 265 bp, Zea mays
cttttctcgcctgcatcgcaggattctacctatattgctgtactatgcttcgattaggatcagtcaccatgtatcttcagttttacataaacgatgacggtgacaaagtttacaccactaagatagattcgccgctagcgctacctacacaatctgctcatccagcccgggtttcacctgatgataaatattcaaggcagagagttcttctgaagaagcgttttggattgttaccgacccagcagccacctccaaagtattgagt

SEQ ID NO: 72985 - DNA, 260 bp, Zea mays
catggtcacggtggccgccaagctggtcacggtggagggcccccgcggcaagctcacccgcaacttcaagcacctcaacctcgacttccagctgcaggaggccggccgcaagctcaaggtggacgcctggttcggcacccgccgcaccatggccgccatccgcaccgccatctcccacgtccagaacctcatcaagggggtcaccaagggctaccgctacaagatgaggttcgtctacgcccacttccccatcaacgcct

SEQ ID NO: 72986 - DNA, 263 bp, Zea mays
gaagatcgcctccagatccctgctgatccttgtgcgcttcatcttcaccggaatcttcatcggcctgctcgccaacttctccttcggcaggtccctcctgctgaagtaccctgagtttttctccgctgggctgttcagcagagccggcccgaccgaggaagaggtgaagagcgcctcgttcaagatgtggtttgtcggtcacggctacagcaacgtggatagctcgttggactcgggaagaagcaagccggacaaggaggtga

SEQ ID NO: 72987 - DNA, 266 bp, Zea mays
gtccactttccccgtgcttctccgccgtcgaggccgcgtcccagtgcgaagagaccacgactcagatggccagccgctgggtccggcccgaggtgtacccgctgttcgcggcaacgggcgtggccgtcggcatctgcggatttcagctcttccggaacatcaccggcaacccggaagtcagggtaaacaaggcagggagggcagctggtgtgcttgagaaccatgaggaggtgaggcgttacgccatgcatggcctaagaagcttt

SEQ ID NO: 72988 - DNA, 261 bp, Zea mays
ccttgcccgcgccgccgctcgccgtttgcccctcgtctccgcaccgcgcgctgttgtccatccttgtgcagcaaaaatgacggctggctacattgttggctcactggtcggatcctttgccattgcatacctgtgtgacacatttatctctgacaagaaggcatttggaggtagcacccccaagactgtttctgagaaggagtggtggcaagccacagacaccaagttccaggcctggcctcgcactgctgggccaccggt

SEQ ID NO: 72989 - DNA, 261 bp, Zea mays
gcagcagccgtccgtggaagaagatgtcgtacctgctgccgcatctgcactcggggtgtgcggtggaccaggccatcctcgccgaggaggagcgcctcgtcatcatccgcttcggccatgactgggacgagacctgcatgcagatggatgaagtgctggcagcagtagctgagaccataaagaactttgcggtcatctaccttgttgacatcacagaggtccctgatttcaacaccatgtatgagctgtacgacccttcga

SEQ ID NO: 72990 - DNA, 263 bp, Zea mays
tgaaaacacagaaactgacagggcaggcatgggtggtgtttagcgagattacagctgctaccaatgctttccgtggattgcaagactttgatttctacggcaaaaaaatgcgagtacaatatgcaaaaacaaaatcagactgtattgcaaaagaagatggtacttatgcacctaaggagaaaaggaagaagcaagaggagaaagctgctgagaaaaaacgacgagcagaagaggcacagcaagctggccccaatgctgctgct

SEQ ID NO: 72991 - DNA, 264 bp, Zea mays
gtagcaacaatgtcgaagcgaggtcgcggaggatcggcgggaaacaagttccgcatgtcgctgggtctgccggtggcggtgacggtgaactgcgccgacaacaccggcgcgaagaacctttacatcatatcagtgaaggggatcaagggtaggctgaaccggttgccgtcagcttgcgtcggagacatggttatggccaccgtcaagaagggaaagcccgatctccgtaagaaggtgctgcccgccgtcatcgtccgccagcgc

SEQ ID NO: 72992 - DNA, 252 bp, Zea mays
cacaaacgcacactgaattcaaaaacatcgaaagatacaggcatggccgagcaaaccttcatcatgatcaagccagatggcgttcaaagaggccttattggcgagattattagcagatttgagaggaagggtttttacttgaaagggttgaaactcgttactgtggaccgtccttttgctgagaagcactatgctgatttgtctgcaaagcctttctttagtggtttggcggattacattgtctctggccct

SEQ ID NO: 72993 - DNA, 283 bp, Zea mays
gaccaagttagatctccgcgaccacagagcctacctcgccgaccatcctggagcttcagcagtcaccacggcgcagggtgaggaactgaggaagcagatcggcgctgcggcctacatcgagtgcagttccaaaacccagcagaacgtcaagtctgtcttcgatacggccatcaaagtggtccttcaacccccacggaggagggaggcagtgcctgccaggaagaagaacaggcgtggctccggatgctctataatgaaccttgtgtgtggcagcacatgtgct

SEQ ID NO: 72994 - DNA, 342 bp, Zea mays
  unsure (1)..(342): unsure at all n locations
tgttgtggcgataggcgtggngcatgccgcgtacgtagctcgcatgctcgcacgaggtgttttcgcgccagcgccgccgacgcttcgacggctccgacgtatcgatgccgtcgcacaagaccttccggatcaagaagatgctggcgacgaagatgcgccagaaccgccccatgccctactggatccgcatgcgcacggacaacaccatcaggtacaacgccaagcgcaggcactggcgccgcaccaagctcggcttctgagcgcgcggatcggccggctcctgcgtcggaattctagggtctctacctttcctttggttttatcgatgtctcttgtgtttct

SEQ ID NO: 72995 - DNA, 302 bp, Zea mays
gtaatatgcgtctcgagctccttccagggtttctccaccaagagggaaatggctcccaaaccgcctagtacggatctgtttgatggactgaacaagggacatgtcgtcaccaagaaggaattgcccccacgcccctcggatcgtaaggggaaaacaagcaagagggagcactttgtgaggaacctcataagagaggttgctggttttgcaccctatgaaaagcgtataactgagttgctgaaggttgggaaggataagagggcacttaaggttgcaaagagaaagcttggaacccacaaacg

SEQ ID NO: 72996 - DNA, 279 bp, Zea mays
acggaaaaggattcctctcccccacctgacgcctcgccgctacgcccgcatttcccaatccatcctcgtcgccaggtgctcatctcgcgtcgacatttacccggtccgatccccggcacgaaaaataaagaagctagtgggtacagacacaagacaatattatattgggactcaattagtttgatgtttggcaaagatcatgcaaccggtgaagtcgcaaagaccctagctgatggcgcgagagacatgagtaaggaagaggtgatgcgcgcaagtacg

SEQ ID NO: 72997 - DNA, 276 bp, Zea mays
ggaagactgagagtctgggagatagagagaggagagggagggtttcctcaaagagaacccgaacccaaacccaaaccgaagcagagcacactagcgttccctcaccagggcgtccatcccagcagccatggcgatggcgtacaagatggcgacggaggggatgaacgtgaaggaggagtgccagcgctggttcatggagatgaagtggaagaaggtgcaccgcttcgtggtgtacaagatcgacgagcggtcgcgcgccgtgctggtggacaaggt

SEQ ID NO: 72998 - DNA, 131 bp, Zea mays
gtcgtccccgatggcctttggtcgcagaccatctttgctgcttgtctatgctgagaataaatgtgaacggtgcccctggacgctggatccatgctggttttggacacggttgtctttttgtgtttaactta

SEQ ID NO: 72999 - DNA, 253 bp, Zea mays
caatgttccaagtcacaagggcaattcttgagaacccaaaggacaacacgaaagtacacttaatctatgcaaatgtcacgtatgaggatattcttctgaaggaagaacttgacggcatggccaaaaactatcctgatcgtttcaagatctactatgtcttgaatcagcctcctgaagtctgggacggtggcgtcgggttcgtgtcgaaggaaatgatccagactcattgcccagcgcctgccgccgacattca

SEQ ID NO: 73000 - DNA, 148 bp, Zea mays
gtcgtctataaacatgtgttcctacgttgccacatgctgagtcaatctgtatacagctagctctaggtggtcagctgcgtctaccacaatgagcatacatgtatggataaatcttctgtgaaagcattcgatgaataagggttgtttt

SEQ ID NO: 73001 - DNA, 231 bp, Zea mays
ccatcctcggacctactcgtctgcagcagaccctactctggtgcgcgtgcgcagtcagtatgatgtcgacgaaaaccgcggcgaagctgcacctgcaggacaacaaggacaagcagaacgccatgaaggctgtctcggcgctcaccggcatcgacgagatatccgcggacatggcgtcgcacaagacgacggaggtcggcatggaggaccccaggagcgtggtgagcaagc

SEQ ID NO: 73002 - DNA, 277 bp, Zea mays
  unsure (1)..(277): unsure at all n locations
tagcggctcgagaatcaatccttcaagcgcaagctgcctgctcctcgtcgaccggacgtgagatgggatggcgggccgcggcaaggctatcggcgctggcgccgcgaagaaggcaacgtcgaggagctccaaggccggactccagttccccgtcggcaggattgctaggttcctcaaggcgggcaagtacgctgagcgcgtcggccncggcgcccccgtgtacctcgccgccgtcctcgagtacctcgcggctgaggttctcgaacttgccgggaac

SEQ ID NO: 73003 - DNA, 288 bp, Zea mays
cgcgagatcgggtgtcgctgtgaatgacgagtgcatgctcaagttcggcgagctgcagtcgaagaggctgcaccgcttcctaactttcaagatggacgacaagttcaaggagatcgttgtggaccaggtcggggatcgcgctaccagctacgaggacttcacaaacagcctccccgagaatgactgccgatacgcgatctatgatttcgactttgtcactgcagaagatgtccagaagagcaggatcttctatatcctatggtccccatcctccgccaaggtgaagag

SEQ ID NO: 73004 - DNA, 284 bp, Zea mays
gtgcaggctgcggttggcgacctggcgactcaaggcgagagagcccatgctttgctgatctggagggaccctcgggccatcgccatcttcatttgcttatccctggtggtcgccgttgcgctgtacgtgacgccggtccaggttttgatggtcatagccatgctttacctgctgcgacatccccggttccgcagcaggatgccctcagtgcctttcaacttctacaggagactgcctgccaagtctgatatgctcctttaagatccagtatccaccataagaga

SEQ ID NO: 73005 - DNA, 293 bp, Zea mays
  unsure (1)..(293): unsure at all n locations
gtccgcagaacctactcctgtcgctacgacgacgacttccagttgcccaccacgctatggtcccaaacccacggtcgctcatcctggacctccacgccatcgaggcagtgaagctgggctcattcgtgcaatcgtgctcaagtctggcatcaactcccccatctaccgggacctccacgcgctcgtctcccacccacgcctgctctccgttgttgcctcgctcctccatatgcccggcctcgtctgcaacgtcccctacacagcgctcncgtcgtcgtcctctgcgtcgaccg

SEQ ID NO: 73006 - DNA, 251 bp, Zea mays
ctcgtctgataaggctccaaggcctgatgtgacagcgcggatctacaaatcctgtcgctgtatcattaacgggaacctgctgagggctctatctgtcattcaccaaggcaatgctcagaagacggggccgctaaagtcctcttatctcattttgatccctacaaagatggatgcttctttggctggtaattttaggctaattagcctaattcacagtgttgctaagttggtcacaaaattgcttgctaatc

SEQ ID NO: 73007 - DNA, 280 bp, Zea mays
tagaaaacttaaagagcacatgcagtattgtgtggatcaccctgacgaggttagcaagctgtccaaagtgaaggcacaggtttctgaagtcaagggtgttatgatggaaaacattgaaaaggtccttgatcgtggagagaagatcgagctgcttgttgacaagactgagaatctgcgctcacaggcacaagatttcagacagcaaggaacaaatgtgaggagaaagatgtggttgcagaacatgaaaatcaagctcatcgtcctgggaataatcatcgca

SEQ ID NO: 73008 - DNA, 348 bp, Zea mays
  unsure (1)..(348): unsure at all n locations
gatgagatgancatttgaaggattgctcgcgtacgtcagctagtcgttcgcctcgaggtcgccgcgtatttgctcgccgtcctcggtggctacaacagcctctccgccgatgtcatctaggaaatccttgtctccgttggagtagaagcagatgatgataggattgaatcgtgttcgtctgaagttaagggtaaggatatagttgagcttattgctgccggtagggaaaagttggccacggttccttctggtggtggtggtgccgttgccgtcgccgcagctcctggaggaggtgctgctgctgctgctcctgctgctgaggcaaagaaggaggaaaaggtggaggag

SEQ ID NO: 73009 - DNA, 249 bp, Zea mays
acagagcagctttttgatatgacatgcatgacattaggtggccgtgctgcagaggaggttttgattggcaaaatctcaactggtgctcagaatgacctggagaaagttaccaaaatgacatatgcacaggtcgccgtgtatggttttagtgaaaaggttgggcttctgtccttcccccagaaagatggtggtttcgaaatgagcaagccttacagtaatcagacagcatccatcatcgacgatgaggtc

SEQ ID NO: 73010 - DNA, 260 bp, Zea mays
cggcagcaagagtagaaggtctcactggtgtttgggttggggaccgtaaagttgcggcgatagggatccacggttctcggatgatagtttatcacgggctcgcactaaacataacaactgaccttgctccattcagaatgattgatccttgcggcataaaggaccgcggtgtggggagcattaaggagatactacaaagggtgtctgatgcggaagagatcgatgacgcgtcactgatggatatagtgtatgattccatg

SEQ ID NO: 73011 - DNA, 268 bp, Zea mays
ctcgagccggtcttgtgctgctcggagcgtgcagcagcacacagccccatcccaatcctagtcgatcttcttcccctcctcaaggaagaaaagaagctgaaccatggggaagagaaagtcagctgctaagccacctcctaagaagcggatggacaagcttgacactgtcttttcctgcccattctgcaaccacgggagtagtgttgagtgccgaattgacatgaagaatctgattggcgaagcatcttgtagaatctgtcaggaaaac

SEQ ID NO: 73012 - DNA, 268 bp, Zea mays
tagcgtgaacccgccgccgacgcagctgcaggagacgcgccaaggagagcccgcaagtaggcgactatgagggccaagtggaagaagaagcgcatgaggaggctgaagaggaagcgccgaaagatgaggcagagatccaagtaggctgatggggattgtggatggtggtgtcggcatagttgtgttacgtttcttcgatgcgtgagttcatggagagatgtcacatcctagttcgtcgtcaccgtttgccatgggtccaatggctcgt

SEQ ID NO: 73013 - DNA, 267 bp, Zea mays
gggcaggtccgtggaccttaccaagttcaacggctacacggagctggtggcggagctgtacgagatgttcgacttcaacggcgagctgaaaggctgtagcaaggagtggatggtcgagtacaccgactacgaaggcgacatgatgctggtcggggacgacccctggaatgagttctgcagcatggtgcacaagatcttcgtgtacacgagggaggaggtccagcgcatgaacccgggcgccctgaactcgaggccggaggacagcgg

SEQ ID NO: 73014 - DNA, 280 bp, Zea mays
acgtttcgtgggatcgactcgttggctgacgtcggtggtggccatggtggcgccgccgtcaccatcgccgccgccttcccccacctcaagtgcagcgtgcttgacctcccgcacgttgtcgccggtgctccgtctgatggcaacgtgcagttcgtcgcaggcaatatgtttgagagtattccacctgcaaccgctgttttcctcaagataactctacatgactggggtgacgatgagtgtgtcaagatattgaagaattgcaagcaagccatatctccac

SEQ ID NO: 73015 - DNA, 253 bp, Zea mays
gtgccaggcctacaccctgaagcggatacgcgacccgagcttccaggtgagcccgcagtcgcccctgtccaaggagttcaccgacgagagtcagccggcggagctggtgcagctgaaccagcagagcgagtacgctccaggcctggaggacaccctcatcctgaccatgaagggcatcgccgccggcatgcagaacaccggctaggccaagatcttcggtgtgcaaataacctgtctcccatgagacggtgga

SEQ ID NO: 73016 - DNA, 276 bp, Zea mays
tctgaaggtaaggatgctacagaagaatttgacgatgcagggcacagcaagagtgccaaggagctaatgcaggactacttcgttggggagttggactcggacccaactcctgagattcctgagatggaggttttcagaaaggaacaggacacgggatttgccaggaagcttatggacgacgtggtgcaatattggtcgatcccagccgctgtaattgggatatcagctgttgttgccatattgtatgcgcgaaggaagtgaaagccgatgtgcatg

SEQ ID NO: 73017 - DNA, 250 bp, Zea mays
gaggttgagaaacttgtcatagttccctcaaagaaagacctggggctggcttttaagggctaccaaaagatggtccttgaagctttggaggctatgagtgagaaagaagcatttgagatgaaagctgaactagaaaccaagggggagacaaattttaaagtctgcacgcttggaaaagatgtggtgattacaaagaagatggtatcaatcagcatggaaaagaagctggaacatcagcgagtcttcaccc

SEQ ID NO: 73018 - DNA, 146 bp, Zea mays
ctgtttgaaccctctgtcacaggctccatcacaaagaatgatgtcattttgtaaagtaacatcctttgagccacatacagcacaaaatatatcttcgcttgaaatttctcctgcggaatcaaacaaagattcgttctagatcgcga

SEQ ID NO: 73019 - DNA, 258 bp, Zea mays
ctgatggagcaccgctatggggcaagagatttcgtgacgagtcaagatacaagtctgctatccgcaggcacatactatctcacgcacgttgactccaagtacagaaggttctacgacgtgaaatgtgacggtgtcgccactgcaatgtccaacggccactgatctttcttctgcccgaagctgcaacaagtcaaataacagaggcaagtgtcctaagcatccttagataatattatatctattaagaggggaagctcg

SEQ ID NO: 73020 - DNA, 259 bp, Zea mays
gagggatatatagctagctagctagcatagcatggcgcttgtagccgacgacgacgccgagctcaaggccaaggccaaggccaaggccgaggtctactacggcgacgaggcctgtcagctgtgcgcgcagctcctgctgagggaagcaggcctccccaacggcctgctgccgctggaggacctgacggagtgcggctacgtccaggagaccgggtacgtgtggctgaagcagggcaggagggtcgaccacgtcttccgg

SEQ ID NO: 73021 - DNA, 253 bp, Zea mays
ccagggtcgccaaggccatcaatgagaagacctgcaatgctctcctcttgaaggtgaaccaaatcgggtctgtgaccgagagtatcgaagctgtcaggatgtccaagcgcgccggatggggagtgatggcaagccacaggagtggcgagacagaggacaccttcattgctgacctctcagttggcctgtctacgggccaaatcaagacgggagctccttgccggtctgagcgcctggccaaatacaaccagct

SEQ ID NO: 73022 - DNA, 111 bp, Zea mays
taggcggcgatgactgagtaataatgtgtcacgcatcaccatgggtggcagtgtcagtgtgagcaatgacctgtatgaacaattgaaatgacaagaaaaaagtattgttcc

SEQ ID NO: 73023 - DNA, 261 bp, Zea mays
agcgagacgttgttgctcttctttttacctcaagttcttaatttcctgtgttcggtcctacagctctttcactttgttccttgcccaagacataggttgccgaggtttgatcctggagcgggtctgttgactggtaccaaagatgggaatctggttaacatattccttaggttatttggaaagtgctcagagagggccctttgcataaggctccttattttccaggctctatgttgcgtattctgcttctggctaaggtac

SEQ ID NO: 73024 - DNA, 255 bp, Zea mays
ccctaacgctgcgagtgcaccacctggagtagaaaaaatacagggtttataattttaaagcagctctcaccagcaagcagctcgtggagtacattgtgcttgacattgaaccagaatcgcctgaaatttgcatcgatgggtctcggtaccagttggcttatgcgcaggttgcccggatgtcagatttcgggaagaatgacgccatctttactgtgaggacgcatcttgggcatctgctgaatcctggcgatcacg

SEQ ID NO: 73025 - DNA, 270 bp, Zea mays
gttgaccaagaagatgggaaaggatgtgaaggcagcagaggcaaagaggtcagcattggacgagctgatgaaggaggagtagaaggccaaggagaggagcaataggaaggactactggctgtgccctgggattgtggtcaaagtgatgagcaagtcattggcagagaaggggtactacaagcagaaaggggtggtgaagaaagttattgataaatatgttggggagattgagatgttggagagcaagcatgttctcagggtcgaccaaga

SEQ ID NO: 73026 - DNA, 260 bp, Zea mays
gagagttgggcgcagagaatctccaagcaaacaaactgggtagattgagacgagaggatatgagaggagaggttgcgtctgggacaccatggctccgatgaagctgtacggggcggagatgtcgtggaacgtgacgaggtgcgcaacggcgctggaggaggctggctccgactacgagatcgtgcccatcaacttcgccaccgccgagcacaagagccccgagcacctcgtccgcaacccgtttggtcaggttccagctc

SEQ ID NO: 73027 - DNA, 263 bp, Zea mays
gatccatccaagacagggatcgccatgtcggactcggaggagcaccacttcgaatcgaaggccgacgctggggcgtccaagacctacccgcagcaggctggcaccgtccgtaagaacggcttcatcgtcatcaagaaccgtccctgcaaggttgtggaggtttctacctccaagactggtaagcatggccacgccaaatgccactttgtcgccatagacatattcaatgggaaaaagcttgaagatattgttccttcatcaca

SEQ ID NO: 73028 - DNA, 250 bp, Zea mays
ctagctcaaaaccctagagctctcgcctgctcgcctccgccgccggagcgagctccccatcttcatccgtcaaccatggcgacccagatcagcaagaagaagaagttcgtcagcgacggtgttttctacgccgagctcaatgagatgctgacgcgggagctggcggaggacggctactctggcgtggaggtgcgcgtcacgccgatgccacggagatcatattccgcgccacgcgacgcagaacgtgctc

SEQ ID NO: 73029 - DNA, 261 bp, Zea mays
atcgccatctgcgccctggccttctgggtcggcgacatcatcgtgacgtacactctccccgtgatgctgaacgtcgtcgggctcgccggcgtctttggggtgtacgccgtcgtgtgcgtcctagccctcgcgttcgtgttcatcaaggtgcccgagacgaagggcatgcctctcgaggtcatcaccgagttcttctccgttggggcaaagcaagccaaggaagaggaggaggaggaggaggccagggaaggttgatcaccc

SEQ ID NO: 73030 - DNA, 256 bp, Zea mays
aaataaagctttagaatgactctggctggcggttgctagacccgtgcagcgcgtagatttgcccccgcgtgaattctttgtccttcagctgagattgtcgcttcggtcgtgcagaacggcgtgaggggtctgatgctggacatgtacgacttccgcaacgacgtctggctctgccactcctacggcggcatctgccagaacttcaccgcgtttcaaccggcggtgaacgtgctccgcgaggtggagcgcttcctgt

SEQ ID NO: 73031 - DNA, 252 bp, Zea mays
gggaccgcttcttgtcaaagcacccaatacccttctactattgcataggtgttgtgattttctttgtgctgcttggattcttcgggctgatagtacactgctcatccttcaacgacaaccaggatccatgcctagctgggtgccggaactgctgctatggttggggcatcctagactgcctgcctgcttccctggaggcatgctttggggctggttttggttttcgtcgttgtgtttgccatccttggcatc

SEQ ID NO: 73032 - DNA, 253 bp, Zea mays
taaatccctagtaagccgccatggtgaagtactcaagggagcctgacaatccaaccaagtcttgcaaggctagaggcgccgaccttagggttcattttaagaacactagggaaactgcctttgcaatcaggaagttgcccttggttaaagctaaaaggtacttggaagatgttcttgcgcacaagcaggccattccgttcagacgtttctgtcgtggtgttggaaggacagctcaagcaaagaatagacactc

SEQ ID NO: 73033 - DNA, 253 bp, Zea mays
ggcaattgagggtatgagggttgcgctaggtgcagctttgattttgaattattgcctgcaaggtctcttccatccagcaaggaaagtacgtgaagtttattggaagatatacaactctctgtacattggtgcacaggattcacttgttgcttcttatcctgccctggaagacgatggggataacatatttagtcgcccagagttggcaatgttcgtctgattaacggtagtccgtgttgaagctgctgaagag

SEQ ID NO: 73034 - DNA, 244 bp, Zea mays
atccatccgccatggcgaccgctacgctactgagctcctccttcgccatgcccgccgccgcccgtagggcctcctccccttcctccgcctcattgagcttcgccacgtcgcagctcgccggcctctccctctccgccggcgttgcaactccaaccgccgtcgccctcctccccaagaggcagcagctccagcccattgtcgcgcggcgtgtgtgcccgttcacggacaagaagacgaaccgggc

SEQ ID NO: 73035 - DNA, 256 bp, Zea mays
tcgggaggtcagcatccggtccactgcgccagagcctttcagcttcgtcatcccgcccaagtgcaccgtgaggcacgacgtgccagcggtggtcttctctaccggcggctgcggcaccaacttcttccacgccatgactgacctcattgtcccactctacatcacagcccgtgagcacaacggccacgtccagctgcttgtcgccgactaccagcctgaatgggtggccaaattcagaccgatcctcactgcactg

SEQ ID NO: 73036 - DNA, 256 bp, Zea mays
gtggatttgggggagcttcttcactggagagtggagagctccggtagcgaggcgaaggaaggaagagggaggaggggaatcagagaggtctccccgatggcggactggggccccgtgatcgtagcgacggtgctgttcgtggtcctcacgccggggctgctctgcacgctgccgggccggggccgcgtcgcagagttcggcagcatgcacaccagcggcctggccatcctcgtccacgccgtcctctacttcgcgc

SEQ ID NO: 73037 - DNA, 250 bp, Zea mays
gggaccgcttcttgtcaaagcacccaatacccttctactattgcataggtgttgtgattttctttgtgctgcttggattcttcgggctgatagtacactgctcatccttcaacgacaaccaggatccatgcctagctgggtgccggaactgctgctatggttggggcatcctagactgcctgcctgcttccctggaggcatgctttgccctggttttggttttcgtcgttgtgtttgccatccttggcat

SEQ ID NO: 73038 - DNA, 249 bp, Zea mays
tccagctacccagaaaggaaactggaggtggaggataccgagctctgttggcttcgacagcctcagccctgaagcagcaaagctgaaggagctgcttgcgctgtacaatcgacagtgaagtccgctattgccatcgaagttccttcaataaaataggcaacaaaatgtgagcggtttggttgccaagttctatggtacgcggccccgcacagaggttgtgttctggttggctggaaacttgcgtgcact

SEQ ID NO: 73039 - DNA, 261 bp, Zea mays
ctggaacagtgttaagggattcctagacccactgcctgcattcacaacatacatctgatgtagcgtctcgggatagtagtcactgtctattctctgcatacgttggacaagctcccttgcggtctttgagaaattcttgaaccccacaccatggacgtccagtatggtggtagtggagtcaatatgtctcttggctgacagtgtgcaggcagggaacctctccctgaatgccctctcgaactcctgcacatggtacttgat

SEQ ID NO: 73040 - DNA, 254 bp, Zea mays
tctgaaggtaaggatgctacataagaatttgacgatgcagggcacagctagagtgccatgtagctaatgcaggactacttcgttggggagttggactcggacccaactcctgagattcctgagatggaggttttcagaaaggaacaggacacgggatttgccaggaagcttatggacgacgtggtgcaatattggtcgatcccagccgctgtaattgggatatcagctgttgttgccatattgtatgcgcgaag

SEQ ID NO: 73041 - DNA, 260 bp, Zea mays
tctgaaggtaaggatgctacagaagaatttgacgatgcagggcacagcaagagtgccaaggagctaatgcaggactacttcgttggggagttggactcggacccaactcctgagattcctgagatggaggttttcagaaaggaacaggacacgggatttgccaggaagcttatggacgacgtggtgcaatattggtcgatcccagccgctgtaattgggatatcagctgttgttgccatattgtatgcgcgaaggaagtg

SEQ ID NO: 73042 - DNA, 247 bp, Zea mays
caaatccccaaagcctccgacccccttcctctctccctccgccgccgctgcgcacgcagtgaacaagcgacatgggcgtctacacctttgtgtgccgcaacaacggcggcgagtggaccgccaagcagcactccggcgagatcgaggcttccgccgctaccccatacgagctgcagcgccgcctcgtcgctgccgcctccgcggccgactctgcctacggcgtccagtcgtccttctccatggtcac

SEQ ID NO: 73043 - DNA, 253 bp, Zea mays
atctccatgaggactcaagcatgaggatcatccatcgggacctgaaggcaaataacattcttcttgacgacaacatggaaccgaaaattgcagatttcgggttggcaaggcttctaggagaaggccacacacatactcagacaggcagagttgttgggacattcggctatatggcgccagagtatgcatcacatggtagtgtgtcgcctaagattgacatctttagcttaggtgtcttgatcctagagatcgc

SEQ ID NO: 73044 - DNA, 249 bp, Zea mays
cgtattcaagctgcattacgacttggaaccgggcaaagaaatgtactacggcaaaggcagcaccatacaggaacaggaaagttggcattgtgctcctgtagtgccagtccggtgaatagaggacatacatgtagagaaggatctcccaaaccataggagtctcatcactctgttgtaggagaagttgcaaggtggcatggaaaatcatactcccaatagcaagtatcatattggatatgtgcaggacac

SEQ ID NO: 73045 - DNA, 246 bp, Zea mays
ggctaagatcaagtgtagtatctggtcttatcaatttaatatctgatatgtggactatgtgttcactttgatattaaatttattttctgtggcggagagtccaccaccgtggcttgccactggtccccttgagcgtcgctcggactgggccccttgagcgtcgctcggccgttgcactactggctgagcctggcgcaccccaaccaatccaattcgagattttttccccaaccaatctaatttgag

SEQ ID NO: 73046 - DNA, 249 bp, Zea mays
gtcgtcgtcttgcttgccaatccgtcgctccacctgaacacaccggcgaagaggaggcgaagaagcgatgggcgtgaccaaggaggacgtcgaggcggccatcacctgcgctctcagcccttccaatctcgtggtgacggacacgttcggagggtgtggcgcgagctacgagatcgaggtggtgtcggagaagttcgaggggaagcggctgctggagaggcaccggatggtgaacaccgcgctggcgtc

SEQ ID NO: 73047 - DNA, 249 bp, Zea mays
cgaggggaacgacatcaccatgctcaccaaaatggagctggtggagggcgagctcggaaggtttgcaatgataagaggagaggagccaacccaaacatacaaccggctcaagacccttatcaacaaaataaggagctacggaagcacgcgatggacggatcacgacgtcgtccgcctaatgctaaggtcatttaccgtttttgatcctcatctcgtgaacaatattcgtgagaatcccaggtacacgaa

SEQ ID NO: 73048 - DNA, 243 bp, Zea mays
  unsure (1)..(243): unsure at all n locations
cgaaggcgagccacgatgtcaggaagaggaaagtgcggcaagggtttgggaaaggcaggagcgaagaggcaccgtaagcttctgagggacatcatccagcggatcaccaagcgtgcgattcggtgcttggcgaggcgtggcgacgtcatgcgtatcagctgttaaatctacgaagagacacgtggcgttctcaagatcttcctcgaaagngaattcgcgacgctgtacttacaccgagcacgc

SEQ ID NO: 73049 - DNA, 265 bp, Zea mays
ctttgctgtctcaatttttcttttactgtcaaggataagcaagtgacctctgtgtgcataccaccaccaccatacgtagcatacacaggcacagatggcagagcataaagggaacgttctcttgcacaagtatgagatggggaaattgcttggccaaggcacctttgccaaggtttaccatgctcgtaacacggcgacttcggaaagtgtcgcgatcaaagtgattgataaggagaaggttatgaaggttggtctcattgatcaa

SEQ ID NO: 73050 - DNA, 253 bp, Zea mays
caacaacccatacaaaatgtgcgacgacgaagttcaagccttggttattgacaacggatccggcatgtgcaaggccggtttcgccggagacgacgcccccagagctgtcttcccttccatcgttggaagacccagacacactggtgtcatggtcggtatgggacaaaaggactcctatgttggtgatgaggcccaaagcaagagaggtatcctcaccctcaagtaccccattgagcacggaatcgtcaccaac

SEQ ID NO: 73051 - DNA, 259 bp, Zea mays
gtggttgaacaataataagcgaggccgagctggctgccatacataggtattgtgtggtgtgtgtgagagagagagaaacagagttcttcagtttgctatctctctctgcatgtttggcgtcagtctttgtgctcatgtacgtacgtgtgtctacctgcatgttggttgatccgattgcatctgctgtaaccatatattaattggtccacgatgatatgatttgatactatatatatactaaaaccggacttcttattat

SEQ ID NO: 73052 - DNA, 280 bp, Zea mays
tgctccgattcgagggagaaagaaaagcagtcgagcagcggtagccggtaggcgagagagtcaggattcaggacgcggcgaggccaccatgagcactctcaagttctgccgggaatgcaacaacatgctgtacccgcgggaggacaaggagacgcgcaccctcctgtacgcgtgccaaacgtgcgagcatgaggagattgccactgatacttgtgtgtacaaaagggttatccgtaagcctggtggtgagcccaaagatgtcctgaaggatgcagcaact

SEQ ID NO: 73053 - DNA, 215 bp, Zea mays
tagccggattgttgagtcaattggacgggaaaatttcgtgcggcagaaggaggcccatgttctagatgatgacgatttcgtgttgatcagtaggtactaggaaaatgagcttgccagtctatgtatcttggcgaataaactagtagtttgtaccttgcagtcagacttcgttctgttgttcatcagtcgttgggttcgtctatctatgtattaag

SEQ ID NO: 73054 - DNA, 264 bp, Zea mays
ggaaggagaagagctctggcaagtatgagaagaaggtgtatgtgctccccaagcaccttgatgagaaggttgctgctctccacttgggcaagcttggtgccaagctgaccaagctcaccaagtctcaggccgactacatcagcgtgccgatcgagggtccctacaagcctgcccactaccggtactaggcagccagcacacggcttgcagctcactcgggccgttgtgtgctatgaagttcgctacactggcctgtcagttatc

SEQ ID NO: 73055 - DNA, 261 bp, Zea mays
caccagatgtgctactcctctactcacatcatgttcaacgacactcacacaacgtcagcatcggccatcgtgccaacgctcgagaattcatggccggttagtagtgacttacgtggcaggttagtctttaggtggacgatgagttggacgacgtgatggcgtcgtcgtcaaatgcgatgcacagaacaacccgagagtcgccgacgttggcgacgaccatggggtccccctgcttgacgatggacagcgcggagcagccgc

SEQ ID NO: 73056 - DNA, 251 bp, Zea mays
gtgctcttcgtcgccgctttcctcctctccgcctaccaggagtttaatgaattcggtgctgatggtggaccagcagctaaggcccttcggcccaaattcaacgtgtttgtcaaaaatgtatctgctcatctgggagtagctgtgccacacattgagttgaagcatgtgattgctgctacaattggtcttaagggtcttggaagcctcctttttattttgagcagctctctcggtgcttatctcctgctgct

SEQ ID NO: 73057 - DNA, 258 bp, Zea mays
gaggagttggggaagtttggtgagattgagaatctgaatgtttgtgataaccttgctgaccacatgattgggaatgtctatgtccagttcagggaggaagagcaagcagccgcagcatacaatgctcttcaggggcgcttttactctggccgccctataattgttgagtattctcctgtgaccgacttccgtgaagcaacctgtaggcagtttgaggagaacagctgcaaccgtggtggctactgtaatttcatgcat

SEQ ID NO: 73058 - DNA, 237 bp, Zea mays
gaccagctgaaattgtaagaatgcgctatgacaggctgaggagcgttggaggtcgcgtgcaggctgtggctggggacctggcgacacaaggcgagagagcccatgctttgctgagctggagggaccctcgggccaccgccatcttcattttcttatctctggtggtcgccgttgtgctgtacgtgacgccgttccaggttttgatggtcatagccatgctttacctgctgcgacatc

SEQ ID NO: 73059 - DNA, 255 bp, Zea mays
  unsure (1)..(255): unsure at all n locations
tggcacgtacccacagnggntgtggcgtntgacggcgagcttcttgatggagagcgcgtanctgaatggcngtgctcgctgcttccagcacaaggcaggctgcttgncaggatcccggtgctttcaactagttagggctcgttcggtagctctcaatccatgtagattgagtgagattagatgagtttgaatcccaaacaagtcaaacttcttaattntttccaatcccatctaatccatgtgtattgggaatac

SEQ ID NO: 73060 - DNA, 207 bp, Zea mays
atctccatgaggactcaagcatgaggatcatccatcgggacctgaaggcaaataacattcttcttgacgacaacatggaaccgaaaattgcagatttcgggttggcaaggcttctaggagaaggccacacacatactcagacaggcagagttgttgggacattcgggtatatggcgccagatatgcatcacatggtatggtcgccta

SEQ ID NO: 73061 - DNA, 253 bp, Zea mays
ctgcacgcggtgcggcgggccgacgacaactggtacctgtggcgatagcagattcagccatatgaaaactcgttccagacatctggaactccggggaggcaccagtgcgtgcaatccgcgtaactggctgcgtctgcgatttgctctttcgtcagaggagcaaactgtttcctgtacaccgtaggatgcccgtccttgcggtagtcagacagctcagtgatgttcagtatctgaacatgtatgcctttcggct

SEQ ID NO: 73062 - DNA, 267 bp, Zea mays
gccgtcgacgccgctcgacgcccaccgcgcagccatggcggaacagactgcgaaggctttcctcaagcagcctaaggcgttcctcagctcaaagaaatctggcaagggtaagaagccaggcacgggtggcaatcgattttggaagagcattggccttggtttcaagactcccagggaagcaattgaagggacctacattgacaagaaatgtccattcactggaaccggttctatcagaggcagaattattgctggaacatgccacag

SEQ ID NO: 73063 - DNA, 264 bp, Zea mays
ctggaacataccttgtcattttcaggttattaatcctaaaaagatgtatgggccttcagctgatatatggagccttggctgcaccgagttggaaatgctaacccggcaaataccatttcctaatattgagtggacaaatgctttcttcatgattggaagaggggaacagcctactattccctgctacctgtcgaaggaggcacaagatttcattggccagtgtgtaagagttgatcctgagagccggccttctgcatcacaact

SEQ ID NO: 73064 - DNA, 261 bp, Zea mays
attatgtgacatactgtaacaatcttaataagatattggccactgcttacctaagagaaccatggacgatgggcgctcatgaaagaaggggtgctgtatatcttgatgttcataagctccctgaaagaccaaaaagtgaagttgagcgtaagagatgttattggggctattcttttgaaaaccttgccactgagaactcattcagcgacgatggaggggtatcgatgcaaattagagttttgttctgtaataaagacaaat

SEQ ID NO: 73065 - DNA, 259 bp, Zea mays
ctatcttacgctcgctctcggcgacagctggacgaccgtcgtcgctgccgcgcttctccaggtgcccaggtcttcgccgggccctttgccgcctgttcgccgtcgacgagcaccagccaggacgaaaagaagctgaaccatgtggaagagaaagtcagctgctaagccacctcctaagaagcggatggacaagcttgacactgtattttcctgcccatttgcaaccacgggagtagtcttgagtgccgaattgacatga

SEQ ID NO: 73066 - DNA, 220 bp, Zea mays
cgatcgttcagatcatccgtgtacttgtttgcgaggtcgagagagagaggatgtcgagctgcggaggcaactgtgggtgcggctccggctgcaagtgcggcaacggctgcggagggtgcagcaagatgtacccggacatggctgagcaggtgaccaccaccacccaggctctcatcatgggtgtcgcaccatccaaggggcacgccgagggcgggatcga

SEQ ID NO: 73067 - DNA, 256 bp, Zea mays
tgattacatccgggctcaagaggctaggaggtttatgatctatgttcataccaaaatgatgatagtggacgacgagtacatcatcattgggtccgccaacatcaaccagaggtccatggacggtgccagggactccgagatcgccatgggcgcgtaccagccgtaccacttggcgactaggcagcctgcccggggccagatccatggcttccggatgtctctttggtacgagcacctgggaatgctggaagacgtc

SEQ ID NO: 73068 - DNA, 252 bp, Zea mays
atcatgtgcgatccaactggcagatatctcgcgactgcagatacctcagttcatgaaatgtagaatggcttgcaaatatggcccttcagtggcaagcatctatacaaggtgtcaaaggatcatttctatcaggccatatggcgcccgagaccgccctcactactgacggccgagaaggaagaagagatctcaaggaacctgaagaagtatagcaagaagtacgaacaagaagaccaggatgcattcaatcag

SEQ ID NO: 73069 - DNA, 264 bp, Zea mays
gttttatacaattttaaaacatctagatcgcaagttcgtgatcatgtttcgtgagcatggtttgcggaaattccaatctgtttatgaaataggtcgtaacttgtgctaaataacatgaataccatttttgcattcgcggtttttcatttttcaagtgacttgcagttcaaatctgaattatccgaagaaattcaattaaacgaactaaatctaatagttaaagcaaacactttgataaatgtgccaaaattgaacatgtatgtc

SEQ ID NO: 73070 - DNA, 263 bp, Zea mays
gcctacggaggaggcagccatcttcttctcggtatcatggacggccttagaccccttgtgaagcccaagatcgtcagcatgagaaccccgaagctcatccggcaccaggcagaccgatatgtcaaaattaagcgtaactggcggaaacccagaggcattgacaacaggggtcgtagaagattcaagggccagatcttgatgcccaacattggttatggaagcaacaaacaaacaaagcacatgctgcccagtggcttccggaa

SEQ ID NO: 73071 - DNA, 254 bp, Zea mays
gattctgaaatagttgccatgataaaagaattattggagactcgtattcgaccagctgttcaagatgacggcggtgacattgaataccgaggattcgacccagaaacaggaacagttaagcttaaaatgcaaggtgcctgcagcggctgtccaagttcgtcagtcacattgaagtctgggatagaaaacatgcttatgcactatgtgcctgaggctttgttcggctgcattcggatcggagggctagaatggct

SEQ ID NO: 73072 - DNA, 220 bp, Zea mays
cgttcgttcagttcatccgtgttcttgtttgcgaggtcgagagagagaggatgtcgagctgcggaggcaactgtgggcgcggctccggctgcaagtgcggcaacggctgcggagggtgcagcaagatgtacccggacatggctgagcaggtgaccaccaccacccaggctctcatcatgggtgtcgcaccatccaaggggcacgccgagggcgggatcga

SEQ ID NO: 73073 - DNA, 254 bp, Zea mays
gaaatctattgctgtgacatgccttacccagacctaagttttgccgatgactcatctgccgatgttcaccagaatttgcgcccagacattcctcgctgctgcccaagcgcatttgcgaatgttatgcggaaatgctgggatgcaaaccctgataaacgccctgatatggatgaagtggtgcagcttttagaggctctggacacgagcaaaggcggtggcatgatacctgatggccaatcatcaggatgcttatg

SEQ ID NO: 73074 - DNA, 217 bp, Zea mays
  unsure (1)..(217): unsure at all n locations
gagaaaatatgggaccatgcagcaggctcaattgtcgcgacagaagctggaggcatagtgacagatgctgcgggaaacgacttggatttctccaaagggagatttcggatctcgacacaggctgcagcgcaaccaacaggtagttgtagcctnggtnctcgaaatctgtccaagagctattaaagagacgaaccaggctgcctccctcttatagctg

SEQ ID NO: 73075 - DNA, 257 bp, Zea mays
gaagctttatacattctatcctacgcttgggggaatgatgatacagttcaggagagcctcggtatccgcaaggggacaattggagcatggaaacgatacagccatgcattgccttacaattatgatatccagagtgtagtggattaccattcaaggctagccacaaaaggatacagggcgctgatatacagcggcgaccacgatgctgttgtaccccatgttggcacacaagcatggattagatacctcaacttgac

SEQ ID NO: 73076 - DNA, 240 bp, Zea mays
atactcacgacatggagggaaaaactggatcaaggcaatggccatgacagcatcacttttcccatttatgtgctttggaatcggcttggtgcttaacactattgctattttctatggatcgttagctgccataccattggtacgatggtggttgttttcatcctgtgggccttcatctctttccctcttgcacttttgggaactgttgtcggtagaaattggagtggtgctccaaacaat

SEQ ID NO: 73077 - DNA, 251 bp, Zea mays
  unsure (1)..(251): unsure at all n locations
ggctcattgcgactgctagcaccaaggggactcttgttagaatctacaatgcagctgaaggcaatctcttgcaggaagtaaggagaggtgctgatagagcagaaatatatagcttggctttcttcgaatgattgcagtatttggctgtctccagtgataaaggaacaatacatgtcttcaacttaaagataaatgtgggatcaactgcnaatgacaagcctatgccttctccggatcctgaagttcctcac

SEQ ID NO: 73078 - DNA, 244 bp, Zea mays
gttgcgtctcagttcctgggtgtgttgttgtaagctcacaggcttcttctcttcgcgtgagctagctagagtgggatcgcgaggaagaaggatgtcgtgctgcggaggcaactgcgagcgcggtagcggatgcaagtgcggcagcggctgctgagtgtgcaagatgtactcggacatggctgagcaggtgaccaccaccaccactactcagactctcatcatgggagttgcgccattcacgggc

SEQ ID NO: 73079 - DNA, 171 bp, Zea mays
cagatttcggatcctgccaggccaaggagctccacgaccatctggagagcgtgcttgctaacgagccggtctcagtgaaagctggacccaacctcgtcgaggtgaagccacagggcgtaagcaatggcctggtggcgaagcggatcctgtcgacgacgcatgagcagcggg

SEQ ID NO: 73080 - DNA, 250 bp, Zea mays
gcagtggctaacccattggtcgctaccttcctgcagcagcaacaacaattgctgccatacaaccagctctctttgatgaaccctgccttgcagcaacccatcgttggaggtgccatctttttagattactgatgagagtactcgacaatggtgccctcataccgacatgtgtttcctagaaataatcaatatattgattgagatttatctcgatatatttctgaactatgttcatcatataaataattga

SEQ ID NO: 73081 - DNA, 242 bp, Zea mays
gttcaacgagcttgttccatttaggctgacacgcaacttgcaagctttcttctcgaattatggtgttgaaggtctcattgtgtctgccatgtgctctgctgcccagtcagtggattactcctatacaagaccgtcacattgtgcttcattggctatgtttttccgagatgaactgttatcttggtcgtggaggcggcctctgggcattccatcagtccctgtcgctgctggaatgatcaacc

SEQ ID NO: 73082 - DNA, 237 bp, Zea mays
gccagccagcaaaaatattcctaaggttctagactcagtagagctaaaactgaatacatgagatgtgacttcggcactactacatatgaggaaggagatgttaatttagaaggtcaagtagtgcctagaaagaatacatttcagtatttaggatcaatgatctagagagatggggatattaaagatgatagccatagaatcaaagcatgatggaggaagcggtgccaagcatctggc

SEQ ID NO: 73083 - DNA, 248 bp, Zea mays
  unsure (1)..(248): unsure at all n locations
acacactcgattccgctgctctctccctcttcctctgccccgcggcggagccataaaccctaggcctcgccgtcgtcggaggcgccgccgtgatgtcgcactttggaaggacgggtccgccggacaatccgcgacaccttctcgctgctcgtcctcaacatcagcttccgaaccacggccgacgaccttttcccgctcttcgagcgctgcggcanggtcggcgacgtcttcatcccgagggaccgcag

SEQ ID NO: 73084 - DNA, 234 bp, Zea mays
  unsure (1)..(234): unsure at all n locations
ggcttatcttttagaatgggtctggcaactttacgaggaagaccatccgctggacattgctgatcccaagctcacagaattcgatagcgtcgagttgctccgtgccatccgcatcgcacctcttctgctgccaaagctcaccncgtcaaaggccatccatgtcgagagtggtgtcaatgctcacaggagacagcgaggcgcctgaggcagtgtccaagcctagctatgttgccg

SEQ ID NO: 73085 - DNA, 243 bp, Zea mays
gtgtaatgcagcagcccatgccaatgggtagtcagcaacagatattccctagaggtggtcgtggctaccgctatgctactggacgtggaatgcctgatcctggcatgcataatgttggcgctgtgatgccatctccatatgagatgggagggatggcaatgagagatgctggtgtctcacaacctgttccaattggggcactagccactgcgcttgctaacgcctcaccagatcagcaaagac

SEQ ID NO: 73086 - DNA, 254 bp, Zea mays
tcactggtactaagctagatgttcgcctcgagcagatttcggatcctgccaggccaaggagctccacgaccatctggagagcgtgcttgctaacgagccggtctcagcgaaagctggacccaacctcgtcgaggtgaagccacagggcgtaagcaagggcctggtggcgaagcggatcctgtcgacgacgcatgagcagcggggcgacgacgacgacgacctgccggacttcgttctgtgcgtgggcgacgacc

SEQ ID NO: 73087 - DNA, 227 bp, Zea mays
caatgagtggccattcttcagggtcacccttgatttgcttgagatggatttcgcgaagtgagacccgggaatcgcagctgtgtacgacaaattgctagtggctgatgatttgcaatccttcggcgagcaactgaggaagaactatgaggagacaaaagagctactccttcaggttgctggtcacacggacgtccttgaaggtgatccttatctgaagcagcgtctgc

SEQ ID NO: 73088 - DNA, 239 bp, Zea mays
  unsure (1)..(239): unsure at all n locations
ctgcctgctcacggggaagtttatcacaccagagcttaccaatgtcgccagtatctggctcatggcacttttcatctgcatctccgtgaccggcatcctggaaatgaggtggagtggcgtggccatcgacgactggtggaggaacgagcagttctgggtcatcggaggcgtttcggcgcatctgttcgcgntgtccaaggccctcttgaaggtgttcgccggcatcgacacgagcttca

SEQ ID NO: 73089 - DNA, 273 bp, Zea mays
ggatctctatagacgcgtacgagcgctatagtgagcgtcgtggtgactgctcacggggttcctgacggacccgatcttgccaatctcgcctgtgtctgaatcatggcactgttcatctgcatctccgtgaccggcatcctggaaatgaggtggagtggcgcggccatcgacgactggtggaggaacgagcagttctgggtcatcggaggcgtttcggcgcatctgttcgcggtgttccagggcctgctgaaagggttcgccggcatcgacacg

SEQ ID NO: 73090 - DNA, 232 bp, Zea mays
gcagtggctaacccattggtcgctaccttcctgcagcagcaacaacaattgctgccatacaaccagttctctttgatgaaccctgccttgcagcaacccatcgttggaggtgccatcttttagattacatatgagatgtactcgacaatggtgccctcataccgacatgtgtttcctagaaataatcaatatattgattgagatttatctcgatatatttctgaactatgtt

SEQ ID NO: 73091 - DNA, 234 bp, Zea mays
ggcatgcattcggtgatcagtaccgggcaactgatgcagttatcaaggggccaggtaagcttaaattagtttttgagggaaaagaagagcaagttgagctggaggtgttcaacttcactggtgcaggaggagttgccttatcaatgtacaacactgacgagtccatccatgcctttgctgacgcttctatggccactgcttatgaaaagaaatggccattgtatcttagcacca

SEQ ID NO: 73092 - DNA, 206 bp, Zea mays
catcgatcgacgaccatggatatgattattatctatctagcttgcggagatggctgaacaataataagcgaggccgagctgtctgtcatgcatagggattgggtcgtgtgcgtgtgcagacacacagacacagagctgttcaggctgctatctatgtatgcatgtatggcggcaggctttgagctcatgtacacgggtctacatgc

SEQ ID NO: 73093 - DNA, 221 bp, Zea mays
aggttacggactgagacatgatcggccagctggtcatcggggagatggccgggactgacccctagaccgcgcaggacctcacctcgatggtgcagacactcatgcagcagatgcaaggaaaatttcagaccatgtctgaccagatcattgggagaattgatgatatgagtagtcgcattgatgatctggaaaagaatatcgcggacctcatgacacaggct

SEQ ID NO: 73094 - DNA, 298 bp, Zea mays
tgaagaacgaattcaagcgcgtggacagggaaaagacaccctgtcttatcgttctcatgcattctcccatgtacaacagcaacgaggcacattacatggagggtgagagtatgagggctgctttcgagaaatggcttgtgaagtacaaggttgacttggtgtttgcagggcacgttcatgcttatgagagatcataccgcatttctaatgtcaactacaacataacgtcgggaaatcggtatccagtgccggacaaatctgcttccgttacataacgtcggtgatggatgcaaccagg

SEQ ID NO: 73095 - DNA, 272 bp, Zea mays
taggctcatgatgttgatccgatctagctggacgtgtggctcccggccctttgcaggaaaatgtaggttccatactgcattgtcaagggaaaagcacgccttggatcgatcgttcacaagaagactgcatctgttctttgcttgaccaccgtcaagaacgaggacaagcttgagttcagcaaaatcttggaggctatcaaggctaacttcaacgacaagtttgatgaggtcaggaagaagggggtggtggtatcatgggctccaaatcacag

SEQ ID NO: 73096 - DNA, 293 bp, Zea mays
ctttccacttcggagtgctggccgacgtggtgcttctgtcctctcgtctccacagtccacactgcatacgagcatgcgaaggagtggctgcctgtatgttccgaggaagagctctgcaacaatgaggatcatcactgccaaggaccatgcctctgtccagatcaacattggccacttggatgcgaatggcctgtatgaggttcacttcacaacatttgctctctctggggtttgtccgtgctcagggcgatgcagacagctccttggacaggctgtggcagaagaagaaggct

SEQ ID NO: 73097 - DNA, 286 bp, Zea mays
ttcgtcatgaaggcgtgggcgaagacctaccccgagaacaagcacgtgaagttcctcgccgacggatctggagcgtacaccaaggcgctcgacctcgagctcgatctcacggacaaagggctgtgcgtgcgctcgaagaggttcgctctcctggccgacgacctcacggtcaccgtcgcaaacatcgaggaaggcgggcagttcacgatctccggcgctgaggagatcctgaaggcgctttagaagctccgtctcctctagaagccgcagcaacgatcggtctata

SEQ ID NO: 73098 - DNA, 257 bp, Zea mays
gatgattccatgaatctcagataaggtcggggtcaaggaccttatgggactgcaatcgtgcctgccaattggggaaggacgcgggcctggcaaccgctcggctctagtaagggaaacaggcatgtctcacatcattgctcgaagactggaaaaacagcaagttagctcagttgggtagagtgctggtctgtcacgctagaagcgcggggtcgaactccgtttccccgcacgatctgaaactatagatagaggggcat

SEQ ID NO: 73099 - DNA, 238 bp, Zea mays
  unsure (1)..(238): unsure at all n locations
ctccaactcactagtactcagccgacgcaatcagggacaggtagctcgagcgcgcgctccacctgctccgacgcgatgcgggccaagtggaagaagaagaggatgcggaggctcaagaggaagcgccggaaaatgaggcagagatctaagtaggcgcatcttgtgaccgaggatggcgagcttctcctgcaccatggctgagacgcgttgngatgattgtctccctttgaagacgtgc

SEQ ID NO: 73100 - DNA, 157 bp, Zea mays
cagcaagccccacagagttcaaaagatatccaaagcaagtcccagggtgcttcaacaaggagctgtacaaaggttcataagcaaggagtcgcacttggcaggtctggggacctgtctaaatccaccgactacggcgaactccaagcagagctggaca

SEQ ID NO: 73101 - DNA, 268 bp, Zea mays
caataatcaaggcttgtttctttacattcgcagatgccgcctaagagctttcgccctgccaggcttgagagctaatgctgcaaaatccttccttggatgtctgagggccgccccaaaaattactgaactactgtcttttgctatgcttgtaagatcatcatcaagaatttcccaactgtttctagcgcacctccagtttattgcctgtgtgaagcaaaaggagcatccaattcgtcttggccatgggtctgtagttagagttatggct

SEQ ID NO: 73102 - DNA, 279 bp, Zea mays
gcacaatgttcttggtgaagaagcaatagatttttttgaacggtttaagcagacagggtacaagccagatcatggcatgttcagacatgttttcttggcatgtggaattttgggatctgttaatgaaggaatgttgcattttgaatccatgcagaaagattttggcatacatcccactacagagcattatgcaagcattgttactatgcttggacagtctggctacattgtcgaggcttatgaattcgtggaacggatgcctgtggaaccaagcattga

SEQ ID NO: 73103 - DNA, 272 bp, Zea mays
gctcatgatgctgatccgatcgatctggacgagtagctcccggtcctttgcaggacaatgtaggttccatactgcattgtcaagggaaaagcacgccttggatcgatcgttcacaagaagactgcatctgttctttgcttgaccaccgtcaagaacgaggacaagcttgagttcagcaaaatcttggaggctatcaaggctaacttcaacgacaaggttgatgaggtcaggaagaagtggagtggtggtatcatgggctccaaatcacaggc

SEQ ID NO: 73104 - DNA, 265 bp, Zea mays
acacactcgattccgctgctctctccctcttcctctcccccgcggcggagccataaaccctaggcctcgccgtcgtcggaggcgccgccgtgatgtcgcactttggaaggacgggtccgccggacatccgcgacaccttctcgctgctcgtcctcaacatcagcttccgaaccacggccgacgaccttttcccgctcttcgagcgctgcggcaaggtcgtcgacgtcttcatcccgagggaccgcaggaccggtgactcgagggg

SEQ ID NO: 73105 - DNA, 239 bp, Zea mays
cagcaagccccacagagttcaaaagatatccaaagcacgtcccatggtgcttcaacaaggagctgtacaaaggttcataagcaaggagtcgcacttggcaggtcggtggacctgtctaaattcaccgactacggcgaactccaagcagagctggacaagatgtttgacttcgagggtgaattggtatctggtagccaaaactggcagatcgtctataccgacgacgagggcgatatgat

SEQ ID NO: 73106 - DNA, 266 bp, Zea mays
cagcgcggcgctcctgggcacgccgccgaatggtctccgagcgcacagctcgaggccgttccgatccactccgatcatacacagcccttcgttccctaccttctactacctctctctcgagggcatcaccgtcggcaagacgcggctgccggtcgactcgtcggtgttcgcgctcaagaaggacgggtcgggtgggacggtgatcgactccggcacgggcgtcaccacctttccggcggccgtgtttgagcaactcaagaacgagt

SEQ ID NO: 73107 - DNA, 271 bp, Zea mays
gtgaactgcgggccaccgccacctagagatggatccgcaccaagagcaccaaggtgagtatgtggtgagcttggaggcgtcagctttgtcgattcagggaacaaggtatacgtggggaaccttgcatgcggcgttgacaactcgactctggagaacctattcagtgagcaaggacaggtgctggatgctaaggtcatctacgacagggatagcggcaggtcaagggggtttgcgtttcgtcacctatggctctgccgaagaggtcaacaat

SEQ ID NO: 73108 - DNA, 268 bp, Zea mays
cggctcgagacgcagtagtgcagcagcactgaagcactacttcctgcactcactgtgctagctgctcaaaccgtagtagtaacagtccatcaccatcaccatcaccaccaatggctcccaaggttgcgctcttccttgccctaagcctcctgttcgctgccaccgcgcatggctgcgaaccctactgttccggcccagtcgtcccaacaccaccagtcgtgccgactccgtcgtcgcatagccacgggcgctgcccgatcgacgcgct

SEQ ID NO: 73109 - DNA, 262 bp, Zea mays
gtgctacgggggtgactgcggtggcgactgcggctggcggctgttgtcctcatcgaccatctcggcgacgtcctactcgagcgagatctcgctgcagtccctcgagatctgcagaactaatatgttgcaggaggagattgacaaggagattgaggacaagaagacagagctggagcccaaggtcgtggaggcctacgaagcatctcctcctgaggtcaaggctctgttcaaggataagaagccagtcaaggtcatcaagaag

SEQ ID NO: 73110 - DNA, 260 bp, Zea mays
gtggaagatgcaccactggaacgagcagaggaaaactagatccttctacgacatgcttgacaagggccagatcgtcgtcgtcgtcgaggagtagttcccacgtgtcacctcagaagtttttttttccagttgtttttgaaaactcactctggagagcacgacaaagtgaatgctgtggagatttggcttgaaaataagcataaccatttgagaacaccagcttctgttgaattgtcttttcttgtcatgactatttgagc

SEQ ID NO: 73111 - DNA, 258 bp, Zea mays
tggcaccgctggtccgctccacggctccagttccagtgacactgcaccagaccatccggctccagcgagatccagacccaaaacctcacctcgcagccaacctctgctcggaggggaagggaagggaagggaagcaatggcgtgcaacggaggcgggtaccgggcggaggacgactacgactacctcttcaaggtggtgctcatcggcgactccggcgtcggcaagtccaacctgctctcgcgcttaccaagacgagt

SEQ ID NO: 73112 - DNA, 216 bp, Zea mays
caaaaggcaacccaatgtggaaccagctaactgtcccagaagcatgactctactcatgggtgcccttgaacatgtcaggcagcacactggattggacaacctgcgcaatttcttctgtcgagggccatatatccctgaagtagacttcctggcattcgttccaaatcccaatgggctctttctcaaaatcaatatcaaactagttctagatcgcga

SEQ ID NO: 73113 - DNA, 347 bp, Zea mays
  unsure (1)..(347): unsure at all n locations
gcatgctgattgagcttngaggaatcatgcgtacgtagctatgcacgcgtctcgagcttgcttcacccatgcatacaccgtcatccatggacccaagacatccaaagcagggcccatggtgcttcagcaaggagctgtacaaaggttcataagcaaggagtcgcacttggcaggtcggtggacctctctaaattcaccgactacggcgaactccaagcagagctggacaagatgtttgacttcgagggtgaattggtatctggtagccaaaactggcagatcgtctataccgacgacgagtgcgatatgatgcttgtgggagacgacccgtgtgaagagttctgcag

SEQ ID NO: 73114 - DNA, 175 bp, Zea mays
ggggaataagtcataagtctgtctggaagggtaaagtctgagctttgctagtgtggctggtcactctagtcactggatgtgttgtgcatgcatcagctgtatgcccgtcgtctagttatggaaaatattggtcaaatgtattctcttgctgaataatttgtgacatctaattgtt

SEQ ID NO: 73115 - DNA, 257 bp, Zea mays
cagatctattactaggtcatactacagaggagctgctggagcccttttggtttatgatatcactaggagggagaccttcaatcatctcgcaagttggctagaagatgccaggcaacatgcaaatgctaacatgacagtgatgctgattgggaacaaatgggacctttctcataggcgtgctgtcagctatgatgaaggcgaacagtttgccaaggagcatggtctggtttttatggaggcatctgctaaaactgcac

SEQ ID NO: 73116 - DNA, 257 bp, Zea mays
cccagctggaacccccaaaaccataacgagggtgcccgtcctgctagccggtgtgcttgctgtgcgatcgtttggcatgtgcttgttgaggggttgctaggggattggagaggattgaagggattaaatctcctcctattcaattttgaataggaggggatttaatccccttcaatccccctcaaaccactagtaaccgaacgtggcctgatgggcgggcgagtctttatattgaatgaaactacataaaatagcat

SEQ ID NO: 73117 - DNA, 257 bp, Zea mays
cgcctccagtttggtctgtttcttgcaagttgctcttgcggtagttcccccaactgtcaccatgcagaacgaggagggtaagactgtggacctctatgttcccaggaagtgctcggccacaaacaggatcatcactgccaaggaccatgcctctgtccagatcaacattggccacttggatgcgaatggcctgtatgatggtcacttcacaacatttgctctctctgggtttgtccgtgctcagggcgatgcagaca

SEQ ID NO: 73118 - DNA, 256 bp, Zea mays
aaaccagcgagcacgatttctcctctctctgagctctgcagtaaaggaagtgtgtagtcaccatggtccatttcaagaatagggatatggtggtggagatctttatagatgcaggtagaggtgaacaggaccctataatcctcacccaatttaatataacaaaagttataaaagacagcattcagctcaactttggtgagtgtggcctagctggatctcttggatcattgcaagttaagtatgtcaatcctgtaac

SEQ ID NO: 73119 - DNA, 251 bp, Zea mays
gtcaccgttgactggccagatgttgccggacgcgtcaagattcttgaggtccactcccgaggaaaggctttggcgaaagatgttgattttgataaaattgctagaaggacccctggtttcactggtgctgacctccaaaacctcatgaatgaggctgccatccttgctgctcgccgtgatcttaaggaaattagcaaggatgagatctctgatgctcttgagagaatcattgctggccctgagaagaaaaa

SEQ ID NO: 73120 - DNA, 254 bp, Zea mays
cactaagaaagctgtatgatgaagaaaaatgtgaattgctggatcaggtgcaagattgatcttttaaagctgacactctgagtaaagagaaaatttctgctcttgagcaggtagatgactggcccaataaattctcagaatggaagaagaaagcacagtcaagatttacacagcatcaaaacactggtaaagaattgcagatccagcttgagttaaaatcaaaggaagcttatgaaaaggatgagcagataaat

SEQ ID NO: 73121 - DNA, 250 bp, Zea mays
ttatcaaaggggcaaatgtgtcacaactgacagctgatggcagtagcgcaattgggatttgtcggaggtttactagagctaaagactacaatacaaagatggagcagggtcaagaatcaaataaagataggttgtgtatagatattctagagagggagatgatgcggaatcctatggcggtggaagatgccgtcacctcgcctttgttggcagatgatcttcacatgaagcttctctacctggaaaacag

SEQ ID NO: 73122 - DNA, 216 bp, Zea mays
caaaaggcaacccaatgtggaaccagctaactgtcccagaagcatcactctactcatgggtgcccttgaacatgtcaggcagcacactggattggacaacctgcgcaatttcttctgtcgagggccatatatccctgaagtagacttccttgccatcctttccaaatccaatgggctctttctcaaaatcaatatcaaactagttctagatcgcga

SEQ ID NO: 73123 - DNA, 250 bp, Zea mays
gtggcggcgaacggccggtcgagcgccgccgaccttggctgggtcttcactcagtccttcgccggcgacgagcgtccacctggtgtctactgaactgagcagacagtagcaagagccactatgctgttcttctcctacttcaaggagctcgtggggaaggaggtgacggtggaactcaagaatgacctggcgatccgcgggacgctccactcggtagaccagtacctcaacatcaagctggaaaacaccc

SEQ ID NO: 73124 - DNA, 265 bp, Zea mays
gtgatgcagttcgctggagaaaggtcagccctacatattccgcgttggatcagggcaggtgatcaaggggcttgatgaggggattttgtcgatgaaggttggaggactacgtcggctgtacatacctgggccattagcgttccctaagggtcttacttctgctcctggaaggccaagagtacccccaagcagccctgtcgttttcgacgtcaatttactgtacataccaggtctcgatgatgagtgaaggcattctgtggcaaca

SEQ ID NO: 73125 - DNA, 263 bp, Zea mays
cggtgggcaacagctctgaaacttattcgtcaacatgggtccatagaaagcatcttggagaatcttaataaagacagatatcaaattcctgaggactggccttaccaagaagctcgacgcttgttcaaggagcctaatgtcacattggatattcctgagctaaaatggactgcacctgatgaggagggtctcataagtttcctggtaaaagataatggtttctatggagaatcttaataaagacagatatcaaattcctgagg

SEQ ID NO: 73126 - DNA, 252 bp, Zea mays
tcccacagctaatctcgcctttctagttcccttccagcagctaacctcgcgctgcagggcacgccacttggctcacttgtactccaggatcatgttgttctctggggccagcccaacgctggccctcatgatgttctccagcatcgccctctgcttggccagagcgttcaccaccggtgtgccatgggggaccaggggcgccttggcgagagagctcaggatggtggccaccgggtggaaggagtggaattt

SEQ ID NO: 73127 - DNA, 244 bp, Zea mays
cgtccccgaggtgacggggactcataaggttactgtgctctttgctggaagctcatcggcaaagatccccttcgaggcgtacgtggattagtcacacagtgacgccagcaaagtgactgcccatggtcccgggctggagcccagtggcaacatcgcgcatcaagaccacctactgtgagatctttatcgagctggagctggcacggacgaagtcgacgctgtgatccaggaccccatgggacag

SEQ ID NO: 73128 - DNA, 271 bp, Zea mays
aagttcggctcgagggataacagaacagccttcgctggacttgaacttagagcatagcatatatgcaaatttgaatgagcaacttgcggaagcaagccttcgactcaggcagatgagaggtgaagaacttgagggactgaatgttgatgaactccagcaattggagaagaacctggaatctggtctgcatagggtgcttcagacaaaggatcaacaattcttggaacagatcaatgacctcgaacgtaagagtacgcagctggcagaggag

SEQ ID NO: 73129 - DNA, 256 bp, Zea mays
tgctcacacagctcgtactgtgcgcacatagctagtgaacgaccatggcgtcccaggccatcgagaaccaccgtgccgtcgctgaggtcgtcaccggagacgccatctgcaggaagaagtcaatcgaactgctggaggagctcggcctccccaagggcttcctgcccctcgtggacatccaggagttcgggtacaaccgcgagacagggttcatgtggctggtgcaggggaagaagaagtggagcacaccttcaaa

SEQ ID NO: 73130 - DNA, 234 bp, Zea mays
agcgaacactggttgggccatgctggcgctgattgatgcaggacaggcccagagagatcccgcgcctctacaccgagcagcaagggttttgatcaacttgcagtcagaggacggagaatttccccagcaagagatcataggagtgttcaacaagaactgcatgatcagttactcccagtacaggaacaccttcccgatctgggctctgggagagtaccggtgccgagtcctggc

SEQ ID NO: 73131 - DNA, 263 bp, Zea mays
gctcgacagctcggttcgagggattatgaacgctttagagatccacgtcccataccgcttgcgtaaggtcttcaggaagatccatgtcaggatcgtcagtgagcttgagaagaaattcagcgtcaaggatgttggaattgtagccacaaggaggatcgtgaggccgcccaagaagggttcagctgttcagcgccctcgcaccaggactctgactgctgtccatgatggcatcctggaggatgttggcttcccagctgagattg

SEQ ID NO: 73132 - DNA, 269 bp, Zea mays
  unsure (1)..(269): unsure at all n locations
ctctaccccgcgccccctccgagatcggaatcgcggcgccccgtcgtcctcctccgccatggcgccgtctctgctcgggggcttcaccaagtcgctggccatgacggcgctctccgaggtcggtgacaagaccttcttcgccgccgcgatattggctatgcgccatcccaggaaactggtcctggcaggctgtttgactgcactaatagtgatgacagctctatcagcttctctaggttgngttgcaccaaatctgatttcacgtaaat

SEQ ID NO: 73133 - DNA, 268 bp, Zea mays
  unsure (1)..(268): unsure at all n locations
gatagaaagagcagagagaaggagatggcctcagtactcctttcttcattgagattagaattgttttcaactgatgacatcattgagggttttgtaatgctcttgcagtcagcagaagacactgcactcgacattgtggatgctcctagtgaaaacaattctaatctcgaggatagaaagagcagagagaaggagatggcctcagtactcctttcttcattgagattagaattgttntcaactgatgacatcattgagggttttgtaa

SEQ ID NO: 73134 - DNA, 265 bp, Zea mays
ctcaactacactgcacaagcactcattatatctgcagcctgtattgctggcttcttcatcactgctgacaaaaccattctacggaacgcacgacaaaacaccatcgggaagcttgacaagtcaacctgatgcagagatgtagctgaagctgaaaaggttctctggttgccgcggcgggtgatagggtgtcttttgccccatatgcagtggcaccatttctcttcggggacaagtaatttttggggtgtttggctattcaaaccag

SEQ ID NO: 73135 - DNA, 250 bp, Zea mays
gggcctcgttcgcaccaaaaccgtgatgaaggctgcgcgcgtcatcatagcatagtactacacgcgcctgggcaacgacttccacacgaactagcgcgtgtgcgaggagatcggcattatccccagcaaaaagctccgcaacaagatagcaggttacgtcacgcatctgatgaagcgaattcagagaggcccagtaagaggcatctccatcaagctgcaggaggaggatagagaaaggagagacacatat

SEQ ID NO: 73136 - DNA, 255 bp, Zea mays
ctcctcctgaccgcaagcactccgtgtggttcggcggctccatactggcctcgctgaccaccttccagcatatgaggctcagcaagcaggagtatgacgagtccggcccctccatcggctaccgcaaatgcttctaggcggactatgacttagttgcgttacaccctttcttgacaaaacctaacttgcgcagaaaacatgatgagattggcatggctttatttgttctttctgctttgttttggcttctttttt

SEQ ID NO: 73137 - DNA, 152 bp, Zea mays
cctttccatttaagtggataaacaagaaatggaaagaaggttttcatgtgactgcaatggcaacatcaggcaatcgatgggctatagtcatgtcccgcagtgctggattttctgagcaggttgtggagttggacttctggtacccgaccgag

SEQ ID NO: 73138 - DNA, 244 bp, Zea mays
tggtcttcactccttgctgcgagccctgaggaggccttctttccccagacatggtcaacatgggtccttcctatggcatgagccgggaagtgcagcccaaaatcgagaagaagtgtgacgagcagctgtaggagcggctggtggtgtggatcatagtgcagtgtggccctgatgtgtgctgcccagaccgtggtcgcttgggcttccaggcctggctgaagaatggcgtgattctgagcaagct

SEQ ID NO: 73139 - DNA, 273 bp, Zea mays
gcccaggccaccatggcggaggatgctacgagcagccacccgtcacgctacgtcaagctcaccaaggaccaggacgcccccgccgaggacatccgccccggcgagctcaaccagccagttcacgtcccgcagctcgaaggccggaggtgtagcgagtgcggtcaggtcctgcccgagagctacgagccgcccgccgacgagccctggaccaccgggatcttcggatgcaccgatgacccagagacctgccgaactggattgttttgcccctgc

SEQ ID NO: 73140 - DNA, 73 bp, Zea mays
cgagagaagaatgagcaaggtttttgttcgcatctattgttgtccaatgatattgatatattgttcccctgtc

SEQ ID NO: 73141 - DNA, 267 bp, Zea mays
gctgaatatcaatccaaagatcttggtctactagttgaggatacaacagtggagcagcttggcatagctcggaaagttacaatctcaagttcctcgacgaccattatagcagatgctgctagcaaagacgatatccaggccagaatcgcgcagctgaagagagagctttctcagacggactcgacgtatgactctgagaagttggcagagagaattgcaaagctttctggtggagttgctgtggttaaggttggagcatcgaccgag

SEQ ID NO: 73142 - DNA, 268 bp, Zea mays
ctcatcgtgtttagtgggccatgagctcagcctctctactggaaatgctggtggaagactggcatgtggcatgttcatttggctatatttatggtgaaccgttgaatgtgactgtgggataatgatgttagaaaaggcattgaaacttgtcatcggtgcccatccagttaatttctacgaccgtaaaaaaataagccactgcaactgttttacaagaagtattcatgtgcattccaaagtgttttatggctttcacctagtaatcatt

SEQ ID NO: 73143 - DNA, 173 bp, Zea mays
gccaaagaagtctcttggaagttatgtcagagttcccatcagcaaagcctccacttggtgttttctttgcagctatttgtcctcgcctgcagccaagatactactcaatatcttcctcaccgagaatagcaccaacagggattcatgtgacatgtccactagtatttgggcca

SEQ ID NO: 73144 - DNA, 200 bp, Zea mays
ctgccgtggtggaggatgaaaagaaacctgaagatgcaccacagtctgaggttgagaaggacaaggagggcgcggagaatgaagaagaaaaggaacctgaggataaggagatgactttggaggaatatgaaaaggtactggaggaaaaacgaaaagctttactctcccttaaggctgaggagagaaaagttgaaattgac

SEQ ID NO: 73145 - DNA, 123 bp, Zea mays
atctcctcgcatttcttcccatccgatccccccttcgcaaccaaaaccccaactcgccctgcatcgatggcgcccaaggccgagaagaaacccgcggcgaagaagccggcgtaggaggagccc

SEQ ID NO: 73146 - DNA, 266 bp, Zea mays
gtccaaatgcgccgcttgtcctcaaaggaatcacttgcacttttgctgctgggaacaagattggggttgcagggaggacagcaagtggaaaatcaacacttatcagctcattgatccgtctcgtagatccggcgggcggtaggatacttattgacaagttggatatttgctccattggccttaaggatctaagaactaaactaagtattatccctcaagaacctacacttttcaggggaaccgtgcgcaacaatttggatcccctt

SEQ ID NO: 73147 - DNA, 252 bp, Zea mays
gggtaccctgaagctaaagagaattcagcagctactctattcagtctctcggatgtagtagaaaataaagtgaggattgtacgatctggtgccatcaagcctctagtagacttgctaggaaatggcacccctcgaggaaagaaagacgcagctacagcattgtttaacctgtcgattcttcatgagaataaagctcgcatcgtgcaagctgatgctgtacagcatctggttgagcttatggatcctgctgct

SEQ ID NO: 73148 - DNA, 250 bp, Zea mays
ctccattgttggatgaagcacggtccattgtctcgaggagctccatcactcgtcatcatcttcatcctcctcactaccctcttcatcatcctcgtcattgacctccgacttggacttgtcagactcctcttcatcttcctcctcttcctccttggcaggagccttcttagctgcagtgctctcgcccttgttgtaggcagcgatggccttgatgtactcgagcttgagcttgttagccttggctacatag

SEQ ID NO: 73149 - DNA, 246 bp, Zea mays
gtggcccgcaagcaaatgcaggtaggagcagtaggagggaggcaggtctacaagaatgtgttccatgcgctctactgcataatggagaaggaaggggttggcggcctgtacaaggggctcggaccgagctgcatcaagttgatgcctgcagcaggcatctcgttcatgtgctacgaggcctgtaagaagatcctggtcgaagacaatgaggatagtgagtgaagctgaagcatgtatgcccctgag

SEQ ID NO: 73150 - DNA, 248 bp, Zea mays
ctgacgcaggagcacccgcactgctacgttgacacgttgctcgacctcaggctcgacgaggaacaggatggtggccgccttctcacagaccacgagatagcaagcctgtgcatcgagatcctcatcggtggctcggagctaccggcgacggcgctggagtggatcatggcggagctagtcaagaacccaggcgtgcaggacaagctctacgaggagatgatggcgaaagccaaagccaccactgacgc

SEQ ID NO: 73151 - DNA, 156 bp, Zea mays
gcacagtcgagctcatttcagcaggccagcaccagggtggcatgatcctgattgttccacagggagaccatgctgtaaggctagggaatgatgctagcgttgggcaggtggtggacgtcgagaagggcttggactacgctgtcacattcagcgctg

SEQ ID NO: 73152 - DNA, 278 bp, Zea mays
  unsure (1)..(278): unsure at all n locations
gggtgtttcatttttcctttgaaaattagtggacaccggattgggacagcggaagttgagtctgctctggtttcacatccaaaatgtgctgaggctgctgatgttggtattgatcatgaggttaaaggtcagggaatatatgcttttgtgactttggtggatggtgttccctacagtgatgatctacggaaaagcctcgttacgacggtccgcagtcagattggtgcgantgctgctcctgacaagatccattgggcacctgggctccctaagacacg

SEQ ID NO: 73153 - DNA, 286 bp, Zea mays
ctcggcgacgccactactcctgcctcacgccgccgctcaaaccgcagaagagagatgagaagcacgcccaaaaattccgaggatttcacctcttggagcgcaccaacaccacccggagaccggagcgactcgccaccggcgcggaaaaggagggcggaggctcgatggcggatgagaatcaggctggaaagaaagaggaggaggaatttagcacaggccctctgtcagtcctaatgatgagtgttaagaacaacacccaggtcctcatcaattgccgcaacaacag

SEQ ID NO: 73154 - DNA, 276 bp, Zea mays
gcgcgtttagctgaagacttggagcaaacttgggaggtccttgctgagccaatacagacagtgatgcgaagatatggaatacctgaaccttatgagaagctgaaggaacttacgagaggccaagctgtcaccaaggacagcatgcagcaattcattgatggtctagacataccgggggaggttcgagcaaaactttcgaagctaacccctcattcttatactgggctagcggaggatttggcaagatacatcgagaagtgggttgatcttgaatct

SEQ ID NO: 73155 - DNA, 253 bp, Zea mays
gcgtgacgtgcgtgaggagtctggagtcggacggaatcgaaaaggcgaaaactcagtgtctcgagtttcctcggagcggaggcgatggctgggaagggagggaaaggcttgctcgccgcgaagactacggcggccaagtccgccgagaaggacaaggggaagaaggccccaatctcacgctcctcccgcgccggcctccagttccctgttggacgtatccaccgtcagctgaagcagaggactcaggcaaatg

SEQ ID NO: 73156 - DNA, 280 bp, Zea mays
gcttgctgtcctcgctgggaactccagcccctctgccgaggacttgacatccattctggagtcagttggctgtgaagctgacaatgaaaagatggaactccttctgtcccagctgaacggtaaggacattaccgagctcattgccgccggcagggagaagtttgcttcagtcccatgtggcggtggcggtgtggctgtcgcggcagctgcccctgctgctggcggcggcggcgctcctgcagctgaggcgaagaaagaagagaaggtggaggagaaggaa

SEQ ID NO: 73157 - DNA, 281 bp, Zea mays
  unsure (1)..(281): unsure at all n locations
gtcaccccaatatggcatcaaggtttcatacgtgatgatggaaggtcatactacgtgccatatgtccagacagctcgctgggagtacagcactcgtccagtttatgggtggggtgatgtcaaatctaagcagttgtccacagctggttggcttgcagcttttcctttctttgaacctcattggcaaatttgcatggctagtggcttgtccacaggatggatagaatgggatgtagaacggtttgaatttgaaaatgctccatcttactcagancagactgg

SEQ ID NO: 73158 - DNA, 277 bp, Zea mays
cgaatttggaaaagccttatgtaagcatattcttaagcatccctacagttcttgatccatcattagctgccgaaggacatcatatacttcatatatttactaccgcaggcatagaagactgggagggtctctctaggaaggaatatgaagagaaaaaagaggtggaggccaatgagattataagaaggcttgaaaagaagatggttcctggccttcaagattcaatagtcctcaaagaggtaggctcaccaaaaacacaccgaagatttcttgctcg

SEQ ID NO: 73159 - DNA, 200 bp, Zea mays
ggttgcatttgcatctgaggtcctgattgttgtatcccagtttcttctgtgaatggaatcgcgaggaagaaggatgtcgtgctgcggaggcaactgcgggtgcggcgccggctgcaagtgcggtagcggctgcggagggtgcaagatgtacccggacatggcagagcaggtgaccaccacccagactgtcatcatgggtg

SEQ ID NO: 73160 - DNA, 177 bp, Zea mays
gattctagctcttcatctgacaatatctcagagaaggcaaggctgactgcattaactctgttgcccatcatcttcacaactttggcatactgtatattatctgtaactattttggggagctctggaaagtgccagccataccattcacgaactctcatggcataagtggtaagctcc

SEQ ID NO: 73161 - DNA, 255 bp, Zea mays
agagaatccccaagcaaacaaacagggtatagggagacgagactagaggagaggagagtatgggtctgggacaccatggctccgatgaagctgtacgatgcgatgatgtcgtggaacgtgacgaggtgcgcaacggcgctggaggaggctggctccgactacgagatcgtgcccatcaacttcgccaccgccgagcacaagagccccgagcacctcgtccgcaacccgtttggtcaggttccagctctgcaggat

SEQ ID NO: 73162 - DNA, 268 bp, Zea mays
gagtatgtgcgccaccggaagcggaaacctcgggtgtcgtcgaccaacctcgtcgatctcggtgcgacgcggtgtgctagaataactaccgaccatggtagaggaggagatcaccgagggcttgaagaacctcaccgtcaccggagacgcggcggcttcgggcggagaagggcagaggaggggcggcggcatcagcagcaaccgcatccaggtgtccaacaccaagaagcccctcttcttctacgtaaacctcgccaagaggtatatg

SEQ ID NO: 73163 - DNA, 271 bp, Zea mays
cacgtaccaaatggtagctcttgttgcctttatcaacagggaaactgtcaggtctcaagagcttcaagacagcactgagatgaatgacaaggaactgacaaaatcaatcaaatcattacttgatgtgaaaatgattaaccatgattcagaaaaggaagatattgatgcagaatcttcattttcattaaatatgaactttagcagtaaaagaacaaaatttaaaattactacatcaatgcagaaagacacaccacatgaaatgtacaagggc

SEQ ID NO: 73164 - DNA, 202 bp, Zea mays
gtgacaagcacagtggacagcctcgacagccatgacctggaaggggtactagattgacgttcgatgccatcatagacgatggggaccactccagcctgatgtcgggcgccctgagcccaagtatcattcagaacctttcccatagctcctcccgcctcaccacgcctcggacgcccctcccattcccagcgctgtccatgag

SEQ ID NO: 73165 - DNA, 274 bp, Zea mays
cgatgatgatatggaaggagatgctgagactactgggaacggaaaccctgttcaacaaagattacagagaaggaagcaatccaaccgagaatcagccaggcgttcgagaagcagaaaggcagctcacttgaatgaactggaggcacaggtagcacagttaagagttgagaactcttcgctgctaaggcgacttgctgacgttaatcagaagttcaatgaggctgctgttgacaatagggtgctaaaggcagatgtcgaaaccttaagagcaaag

SEQ ID NO: 73166 - DNA, 241 bp, Zea mays
gcctgatccccttccgcctggccttctcggacgacatggagagcaacctgaaccgcaccttctccctgctcaaggccaggggcatgatccagtctggggacctcgtgatcgccctctcggacatgctgcagtccatccaggtgatgaacgtaccctgaggtagaagagccttacctttacctccatgccgcacggtcccgtatcggaaggaacacgcgtgttatcggcaccttggaaggac

SEQ ID NO: 73167 - DNA, 248 bp, Zea mays
ggggtatgatttccgtcgtgtatactgtgtagataaccatattggttgctgctgagggagtacataaggcgccgattataaatagcagcaatgacttaaagacagctctacaaaagatgggtgccataccatcgcgcaaaatactggcagtcgaggtcctatggactccacaaaatgagaatgacactttgtcagagcgagagctccttgaagattacccgctcttaaggcctctgtagaaagaagct

SEQ ID NO: 73168 - DNA, 194 bp, Zea mays
ctgttggcaatgggacgaagacaatgctgtggagctgatcgatccaaatataagagcatagtgctcagttcggcaggcgctgagatgcatccatattgcgatgctgtgcgtgcaagatcacgctgatgagcgacctgacatgcgcactgtcatccttatgctgagcaacgacagctcgagccttcctaatccga

SEQ ID NO: 73169 - DNA, 265 bp, Zea mays
cgtcaagaaggggaagcccgatctcaggatgaaggcgatgcccgccgtcatcgtccgctatcgcaagccgtggcgccgcaaggacggcgtctacatgtacttcgaagataatgctggagtgattgtgaatcccaagggtgagatgaaaggttccgctatcactggacctatcggcaaggagtgtgctgatctttggcctaggattgctagcgcagaaaacgcctttgtttgaaagcttgggggaatatggccagacttatatgat

SEQ ID NO: 73170 - DNA, 204 bp, Zea mays
gcggagatggcggaggcccgggtgccgctcgcctaccgcgaccagtgcgcgcacctactcatcccgctcaacaagtgccgcgtcgccgagttctacctcccctggaagtgcgagcccgagcgctacgcctacgagaagtgccagtacgagctcgtcatggagcggatgctccagatgcagaagatccgcgaggccaggagacca

SEQ ID NO: 73171 - DNA, 236 bp, Zea mays
aagaaccttaagctcatcgatgttgatgttccagatgctgatggccatgctggaatcacatttctgccactgttatcgatgaccaggccatctgtcaccttcacagatgagggaactgatgagctgacaaagaggatacagaatgccgtgacagaggtggtggatgccaaggctggtgctgggtctgctaccctgtccatggcctatgccgctgccagattcgttgagtcttctct

SEQ ID NO: 73172 - DNA, 263 bp, Zea mays
ctcctgcgacgccacaaccacacgttcacgtgagcgagagcttatcgtcgacggcggcgatgatggagtcgctgaagctgcagaagcggctcgccgctagcgtcctcaagtgtgggagaggcatagtctggcttgaccccaatgaagtcagcgagatctccatggctaactcccgccagaacatccggaagttgggtaaggatgggtttatcatcaggaagcctcagaaggtcactctaggtcccgtgcaagaagggcacatg

SEQ ID NO: 73173 - DNA, 268 bp, Zea mays
ctcaatcaattcactcaaacctcttccccaaatcttcgattagattctcgatgacaagaagactagaaccgaacctgaccatgtcgctgatccgccgcagcaacgtgatcgatcccttctccctcgacctctgggacccctttgagggcttccccttcggctccggcaacagcagcagtctcttccactcgttcccgcggaccagctcggagaccgcggccttcgctggcgcgcggatcgactggaaggagactccagagcgcacgtg

SEQ ID NO: 73174 - DNA, 298 bp, Zea mays
  unsure (1)..(298): unsure at all n locations
ggttgtgctctcatgacgctcgtagctgaatcgctcagacgtgacactgagcagatggnggagctaatatcaatgtcaccgacagccagatcccactgactggagcaaactcaatcattggcagagctgatgatgttcacgctgatcctgatgatcttggaaagggtgggcacgagctcagcaagagcactggaaacgccggtggccgtgttgcttgtgggatcattggactccagggctgaaaacgatcgccggacttgggggtgcctgagaggtccgtctcctgccgtccccagca

SEQ ID NO: 73175 - DNA, 270 bp, Zea mays
gcggctttctttgccaactccgacgaaggctagctacaccacctggtgcgggctcgactgcatcgcccgccacccgctccgtcgtcgtcggccccgccgcgccgatcccgaatcgaatggggagcctggcgtccgagaggaaggtggtcgggtgggccgccagggacgccaccggacacctctccccctactcctacaccctcaggaacacaggccctgaagatgtggtggtgaaggtgctctactgcgggatctgccacacggacatcc

SEQ ID NO: 73176 - DNA, 270 bp, Zea mays
ggaggccatggagatgagccgccagcgttcgacgaggcggcgctcgtgccgccgctcaacttcgccgtggtcgacgacggcatcttccgctccggattcccagggaccgccaacttccggctcctcaagtccctcaacctccgctccatcgtgtacctgtgcccggagccgtacccggtgacgaacacggagttcctagaaaagaatgggatcaggctccaccagttcggaatcgaggggcgcaaggaaccatttgtcaacatacccgac

SEQ ID NO: 73177 - DNA, 242 bp, Zea mays
ctactgcgacgccacatccacacgttcagggaagcgagagctcatcgtcgacatcggtgacgatggtatcgctgaagctgcagaagctcgtcgcagttagcgttctcaagtgtgcgagaggcttagtctggcttgaccccaatgaagtcagcgagatcttcatggctaactaccgccagaacatccggaagttggttaaggatggatttatcatcaggaagcctcagagggtcactctaggt

SEQ ID NO: 73178 - DNA, 258 bp, Zea mays
ccaccctactcgccgcctcactccctctgaggtcgcagatccgtccggttagacgaagccgcccgcacccatggcctccggagagctcgcctgcacctacgccgccctcatcctcagcgacgacggcatcgccatcaccgcgagttctctcgcgctgcaggtatcttttaatcgaggtttctctttttgagcggacgagttgatatgtggggggtgtttcttgattgcaggccgagaagatcgccaccatcgtgaagg

SEQ ID NO: 73179 - DNA, 297 bp, Zea mays
tgggatcgctttgagatgaggattcacaagagggtgatcgatctcgtcagtacaccagacgttgtcaagcagatcacctcaatcaccattgaaccaggtgtcgaggttgaggtgactatcagtgacgcttaatatgggagccttatcatttcaaaaggcttctagtgaacaggatattttcaattcctagtgagaacttgtgtaacagaggaatccaagtatttcatatcaaagtttaaaagtcttatcgagggttcgcggtatggatgtatcctgtttcaaatgatttctcctaat

SEQ ID NO: 73180 - DNA, 256 bp, Zea mays
ggaaggaccccgagtccgcgtgcggcggcgtcgtgctccgccgccgcctccagctgatgatgtacaacgacatgttccgcatcatgttcgatcgccggttcgacagcgagcacgacccgctcttcaacaagctcaaggcgctcaacgcggagcgcagccgcctgtcgcagagcttcgagtacaactacggcgacttcatccccgtgctccgccccttcctccgcggctacctcaaccgctgccacgacctcaagac

SEQ ID NO: 73181 - DNA, 274 bp, Zea mays
cgccaagagcgcccagacgaccgtcgttatgccggcgcatcggtgggactgccacctcttcacccccaagattctgagggagatcgagggcgacctggccgggttcaagtgcgagctcgcgcatatcttccttcagcacacaagcgcatcgctgaccatcaacgagaactatgactctgatgtgcaggctgacactgagacttttcttaacagaattgttccagagggccacaatgctccttgtaaacacactatggaaggacctgatgacatg

SEQ ID NO: 73182 - DNA, 279 bp, Zea mays
cgacaacacgtactacgtcaacctgatgaaccgtgagcggctcttcacctccgaccaggacctctacagcaaccccggcaccaggcccctcgtcgagaagttcgcgcgcagccagagagacttcttcgaccagttcgccttctccgtggtgaagatggagcagatcaaggtgctcacgggcgcgcagcggcagatccgcaggaactgctccgcccgcaacgcaggcatgacgtggtccgtcgtcgacgaggctgcacagcagagcttcgtgttctagac

SEQ ID NO: 73183 - DNA, 283 bp, Zea mays
ggtgaatggaaaatcgttcaaggcctcccgatcgacgagctctcaaggtagaagatggttgccactgccctagagctgtcgcaagagaagtcgcttgcttactcatgcctcgagtaaattataccacacacccagagagcaattgctaccccctgtgttttgaataaaagaaactccagctccgtccatagattctcactcagaactgctgcacgtcgctgtgcaggcgtgttgctggcttcgcccagcgtgtacgagactacgagggcttgtagccgctttt

SEQ ID NO: 73184 - DNA, 271 bp, Zea mays
ccggaacccagggatcgagactgaacagcagtccgagacgccatgaacgtggaggaggtgttcgggaggctcaaggaggagatccataggctcggccagcagcagcccgatggctcttacaaggtcaagtttggcgttctcttcaacgacgatcggtgtgcaaatatctttgaagcactagttggcaccttgagggccgccaagaagaggaagatcttgacctacgaaggcgagctgcttctgcaaggtgtccatgacaacgtggagataa

SEQ ID NO: 73185 - DNA, 289 bp, Zea mays
gacaagatcaccggcgagcacggcgacaagtccggcgaccacaaggagaagaaggacatgaagaagaaggataagaagaagcacggcgagggccacgaccacgacggcggccacagtagcagcagcagcgacagcgactgagatctggtgtcgcagcacaggtgcaacacaagtatgcttgctggatggaggattcataccagctgatgctgatgtagtgtttcactggtgtcatgcatgcatgtatcgtgctattataatcaaaaagaaaaaagaaataacagtcagg

SEQ ID NO: 73186 - DNA, 198 bp, Zea mays
gaagaaagcttgatgttggaggtgttgcaagcggtgggctacgagaactaataccgtgcattgcaaggacttcggctgctgttggtgttgatggtattttcatggaggtacatgatgaccccttgaatgcaccatgcgatggcccaactcaatggccattgcgcaatctggaagagctgttggaggaattaattgcaa

SEQ ID NO: 73187 - DNA, 260 bp, Zea mays
gcgccggatccgggcggcggtcgaggaggtcaagcccatccgcaccgagctccgtaactaggagcacgacctgcggaggcagatcgacctcgaggaccaggagcgtcaagttcccaagagcatcgttgacaacgagtacgctactgccaccattcgggagcccaagatactattgaccacttctcgcaatcctagcgcgcccctaactcagtttgttaaggagctcaaggttgtcttcccaaactcacaaagaatgaacc

SEQ ID NO: 73188 - DNA, 265 bp, Zea mays
caaaggactatgtgcacgtgcgtattcagcagcgcaacggaaggaagagtctgacaactgttcagggcttgaagaaagagtacagctacaacaagatcctcaaggatctcaaaaaagagttctgctgcaatggtactgtagtccaggatccagagctaggccaggtcattcaactgcaaggtgatcagcgtaaaaatgtcgctacttttctagtccaggccggaatcgtgaaaaaagatagcatcaagattcacggattttagac

SEQ ID NO: 73189 - DNA, 272 bp, Zea mays
gctacaggtactgcaaaagagcataggccgtgtttaaggagcttgagttgaagaaagagccatatgttgtggagcttgatcagcgagaggatggctcagagattcaggatgccttacttgagatagttggcaggcgtactgtccctcaaggttgtggccatggaaagcacctgcgtggatctgacgatactgctgactcctacgaaagtggaaaactggctagacttctaaacatcggagtcaaggacgacctttgagtgacatgctacatc

SEQ ID NO: 73190 - DNA, 238 bp, Zea mays
cagggaagcaagcagaggtatgaaaagctttctatgttgcagccactgacaggcacaataacgaagttgcgacccaaataggaaaaggggcttgaaccagattgtgtacgagcttccatcagaacatccactagctgaaacaagaccgctgcgagagctgctagggcacacacctccacaggtatttgctggcggagtgcttggatttgcagtagccacatttacagcgatgatcgct

SEQ ID NO: 73191 - DNA, 243 bp, Zea mays
caccaccttcctctcctcgctctccctattctggacggccgactcgcttctgtgagctaccggccttagatccagccatgagggagattctccacatccagggcggccagtgcggcaaccagatcggttcaaaattctgggaggtcgtctgcgacgagcatggtatcgatcccaccggacgctatgtcggcacctccgacctccagctcgagcgcgtcaatgtctactacaacgaggcctcat

SEQ ID NO: 73192 - DNA, 275 bp, Zea mays
  unsure (1)..(275): unsure at all n locations
gccaccaggtgcagagtctttcgtcatctcttcttcggcgaagaacccccagtcgcccaccagatcacttgttaaactttggtgaagggtgatggcgggttctttcgcaaacctcaactccgaggcagggcttanaaagcttgatgagtaccttctcactcgcagctacatcactggctaccaagcttccaaggatgacttggctgtctacacttcgttttcggctgctccctcgtccaagtatatcaacgtagcaaggtggtttaaccacattg

SEQ ID NO: 73193 - DNA, 123 bp, Zea mays
atacgattgcaaaaatcagaatgcgtgaacagtaacggaatacaacctttgtcaaggcataggtatcattgtattttatgattcaatacattaagtgaatattatattatgcatctgtgaatc

SEQ ID NO: 73194 - DNA, 265 bp, Zea mays
cacaaactcgttgagagcgcctcaaaaccaccagaaaaattccccagatcgtccccagcacgaaaaagcgcagatggagcattccggcgccaagaagtcgaacaagatcaccgaggtcgtgcggatgcagcagatgctgaagaagtggcgcaagctctcggtcacccccaaggagccaagctcgcccacctccggcggcggcggaggcaatgccggcgagagcaagaccaggaagttcctgaagcgtacgctctccttcacggac

SEQ ID NO: 73195 - DNA, 246 bp, Zea mays
cacacttgtagcttccattgtgaaggctgactctttgagagagttcagaaccccagaatttcatccaactgcaagtgatgaacatttctatttgaaagttcaggtcagagatacaggctgtggagatagtcctcaggatctaccccatgtattcacaaagtttgctcatcctcaaagtgcaggaaaccgagggtataatggcagtggccttggccttgccatatgcaagaggatcgtcagtcttat

SEQ ID NO: 73196 - DNA, 266 bp, Zea mays
tcctattgtccagtcgacgtccggtaagaagctggtcttctttgggtcatcggccgccgaggcgtctttcaagctggaggacctgctgcgcgcgtcggctgaggtgctcggaaaaggaacgttcgggacgacgtacaaggcagtgctcgagtctggtgcaactttggccgtgaagcgcctcaaggacgtgactctgtctgaacctgagttccgtgaacgcatttctgagattggcgagcttcagcacgagttcattgtgccactcc

SEQ ID NO: 73197 - DNA, 276 bp, Zea mays
ggaccatattccttgtttgccgcgagtgatgcaacccgggccctggcattgatgtcatttgacccaaacgacctcaccgtggatctgtacggcctaagcgccgatgagctggaggtgttgcaagattgggaggaaaaattcaaggagaggtatccgagggtgggccaccttgcctgtcaagacgcgacagacagtggtcagaccaccgctgggcttcatcacgaggaaggggacgcctaaaactccactggtttgcctcgtcgtcctctcctctgt

SEQ ID NO: 73198 - DNA, 264 bp, Zea mays
cagcaggaagagagtcagaaatgctcttcatacagaattgccttacctaatctcgacagaattttcatctaaccaagagaacgaatcatccattgcaaatacgtgtgatgctggatgtactgaaaaagcagtttcagaagcgcatgtggcacgatggaggtctctgtttgtccagatggaccgagcacttcaggaggaagggaaacagctggtgagtttaccggttggattagtttgtgttgtagaaaaggactatgtcatccg

SEQ ID NO: 73199 - DNA, 232 bp, Zea mays
gatcaaaccaatttctagtggaattgaagggatcagtatagattctagtggcattggagagattaactttaaattgaactaacgacgttagcttcgaactaatagtaatgtcattcaagggattaaaatttaaatttgatagcattgaagggaagctataaattctgatggcattgaaaggattagtataaatttgaatggcattgaagagattttctctttgctcaattgg

SEQ ID NO: 73200 - DNA, 278 bp, Zea mays
gtccactatccccgtgcttctccgccgtcgaggccgcgtcccagcgcgaagagaccacgactcagatggccagccgctgggtccggcccgaggtgtacccgctgttcgcggcaacgggcgtggtcgtcggcatctgcggatttcagctcttccggaacatcaccggcaacccggaagtcagggtaaacaaggcagggagggcagctggtgtgcttgagaaccatgaggaggggaggcgttacgccatgcatggcctaagacgctatgtgcacgacaag

SEQ ID NO: 73201 - DNA, 272 bp, Zea mays
ctcacaacccagtcgctcaaaaccctagagctctcgcctgctcgcctccgccgccggagcgagctccccatcttcatccgtcaaccatggcgacccagatcagcaagaagaagaagttcgtcagcgacggtgttttctacgccgagctcaatgagatgctgacgcgggagctggcggaggatggctactctggcgtggaggtgcgcgtcacgccgatgcgcacggagatcatcatccgcgccacgcgcacgcagaacgtgctcggcgagaag

SEQ ID NO: 73202 - DNA, 305 bp, Zea mays
tggtggatgtgtgggacagtcactccacgtgttaacatcgcatcagctgcgggacgagaggtctgcgctcgtgtgcagcagctgttcccagtgctgagaggccttgaagactcatatgaatgctgcttcgctgacacaagaggcagtgggtcacgtttggaacattagtcgacacatcatgggcttattgaaggtggatacattaatgagctggtcgaagacctcgttaagacattgcttctacgctagactatcgacgaactcctgtacgtggtctgtttggatgcgcatagaatgccaacact

SEQ ID NO: 73203 - DNA, 275 bp, Zea mays
gaccgtgatagcagtcgtgactgctggagaatgtctgatggaaataatttcagagttcgaagcaagaattttgtatatgataaaagcaagattcctgcaggaaagcctcttatggagcttgtcgctgttgactggtttaaagatgcaaagcgaatggatcatgttgctagaagaaaaggctgtgcagttcaagtagcggctgagaaggggctctttgcattggctataaatctacaagttcctggcactacagtatgggtttctactttgttacg

SEQ ID NO: 73204 - DNA, 277 bp, Zea mays
ctatactatactctaggaagcaaggacaccaccgccatggcagccaagatgcttgcattgttcgctctcctagctctttgtgcaagcgccactagtgcgacccatattccagggcacttgccaccagtcatgccattgggtaccatgaacccatgcatgcagtactgcatgatgcaacaggggcttgccagcttgatggcgtgtccgtccctgatgctgcagcaactgttggccttaccgcttcagacgatgccagtgatgatgccacagatgatga

SEQ ID NO: 73205 - DNA, 241 bp, Zea mays
gttccagatggcatagtttgcttttttgtcagttattcctatatggatggcattgtcaacagctggcacgaaatgggaattctgcaggacatcatgcaacataaattagtgtttatcgaaacaccagatgtcgttgagacaacattggctcttgataactacagaaaggcatgtgattgtggaagaggtgccattttcttctctgttggcaggggcaaagttgctgaaggatttgattttg

SEQ ID NO: 73206 - DNA, 254 bp, Zea mays
cggcggtgttgacgacgaccacgacgagctgtagatggttgtagatggtggtggtgacgtggagtgccgggagccgagccaaattttgtaacggtgtttagcggcggacaatacttattactaatcttggtgctgctctgccaatagccgtgctgagcgtagtaactgtttgtttgtaattttttctcttctacttccttggttgttcaggattcgcattcgaattttatgtgaaaaaaagaaggcgcgctttt

SEQ ID NO: 73207 - DNA, 290 bp, Zea mays
cgaatcgagcctgaggatgctgcccgagcgagggcgccacctgctgcaaggatcacgccagctgctgcacgccgggctaccctgtctgcaacgtcagagctggaacttgctcggagagcaagaacagcccactgagcgtcaaggccttgaagcgcaccctcgccaagctgagcaccgcatgaggacctcgatctgggactgcccagtgcttttctgactcaccaagagcaagatttcatagattatctatatgtttgtataagtactgttaccgtcccatgaatccgctg

SEQ ID NO: 73208 - DNA, 270 bp, Zea mays
gacgcgctctccgacccccgcctcacccacgagatcaggaccatctggctctccaactggtctcaggccgacaggtctctgggccagaagctcgcgagccgcctcagcgccaagccgagcatgtaagatctaccagacaagggcgccgcgcgggggaggacggagctctctgtctgctttcgctcatgcatcatatgcatggaaccaagacaaattactctagcagactagcacgcaaactgaagcgcgtttattcagtttttttggccc

SEQ ID NO: 73209 - DNA, 263 bp, Zea mays
gggcaccacgcttcgattacatcttgacccaacaggcgtttgtgactgttgacaagaaagcaccgatcaaccaagacctcatcagcaacttcatgtctgaccctgttcacggtgccatcgaagtctgcgctcagctgaggcccactgttgacatctcagtgaccgctgatgcagatttcgtgcgtccagagcttcgacagtcttcataagcttgtatggatccgcagtgtgactgcaatggctagtttgtaagaacttaaatg

SEQ ID NO: 73210 - DNA, 278 bp, Zea mays
gtgggatcccagtcgccgccgcatgaagatgagctcgcggacttccaggtctcgcgagaagatgccgaagcagatccacgagatcaaggatttccttctcaccgcgaggaggaaggatgcccggtcagtgaagatcaagaggagcaaggatgttgtcaagttcaaggtccgctgctccaagtacttgtacaccctctgcgtattcgatgctgagaaggcaaacaagttgaagcaatctctccccccaggcttgagcgtccaggaggtttgattggata

SEQ ID NO: 73211 - DNA, 260 bp, Zea mays
tgcggcctcgactgcctgcaggcccacatgtggcttcccctggtcccttcgcgcggactatgacctccattcgggcctcagccgtgtccgcagccctcgccgttcgtggcctgccgcaacacgcttccgtggccgggcaaagcactggaagttatagggttggtgatgttatgaccaaaagggaagagctccatgttgtgaaaccaacaacttcagttgatgacgcccttgagatgctggtgaagcataggatctctggc

SEQ ID NO: 73212 - DNA, 276 bp, Zea mays
ctgctatgcttgctgctcaagatgttgcacagcgttgcaaggagctcggtatcaccgcgctgcacattaagcttcgtgcaactggaggcaacaagaccaagacccctggacctggtgctcagtctgctctcagggctcttgctcgttctgggatgaaaattggacgcattgaggatgttaccccggttcccactgacagcactcgcagaaagggtggtaggaggggaaggaggctgtaggcgtgtatccttgctatttgccatcactttgcactgg

SEQ ID NO: 73213 - DNA, 273 bp, Zea mays
cgtcgaactggcgcaaccgaccgccgccgcggctgcggtgaccaccgctgagcaggctcaggatctcatcgacgccgctaggtatgacgacttggaggacgtcgtcgccctgttctccgctggtgtctcgctggactccacagattcgcaaggccgcacagctcttcacatggcttctgccaatggtcaccttgctatggtggaatacttgattcaaaatggagcgaatgttaatgccaccaacatggagaagaacacaccactccactgggc

SEQ ID NO: 73214 - DNA, 274 bp, Zea mays
gcgccggcaaccgccgccatcgatcgatcgcccggaaactgacctctaccgatgtctgtagccggcgaggaggataagaagcccgcggagggcggcgcctacatcaaccttaaggtcaagggacaggatggcaatgaggtgttctttcgcataaagaggtccacccagctgaagaagctgatgaacgcctattgcgaccgccagtctgtggacatgaatgccattgcattcctgtttgatggccgcaggcttcgcggcgagcagacccctgatg

SEQ ID NO: 73215 - DNA, 271 bp, Zea mays
ggctagtctacaccaacgatcagggggagattgtcaaaggagtctgctcaaacttcctgtgtgacttgaaacctggcgccgatgtgaagatcacagggccagtgggcaaggagatgctcatgcccaaagaccccaatgcaacagtcatcatgctcgcaacggggaccggtattgctccgttccgctccttcttgtggaagatgttcctggaggagcacgaggactacaagttcagcggccttgcgtggctgttctagggagtcccgacgag

SEQ ID NO: 73216 - DNA, 273 bp, Zea mays
  unsure (1)..(273): unsure at all n locations
cgggttggttcaggcgagatggtcgttcgtaaacaaggatgagaacttgctgaccaggcttcagaacataaatctttgcttccacttcgaggtggagcagcaggtgaacggggcgtttctcaacttcttcgggttcaatggcaccgcgggagtctggagaatcaaggcgcttgaggagtctggaggatggatggagaggacgacggtggaggacatggacatagctgttcgagcgcacctcanagggtggaagtttctctttctaaacgatgt

SEQ ID NO: 73217 - DNA, 275 bp, Zea mays
ccctcctcaaggaagaaaagaagctgaaccatggggaagagaaagtcagctgctaagccacctcctaagaagcggatggacaagcttgacactgtcttttcctgcccattctgcaaccacgggagtagtgttgagtgccgaattgacatgaagaatctgattggcgaagcatcttgtagaatctgtcaggaaaacttcagcacaactgttaatgcactcactgagcctattgatatatatagtgaatggattgatgagtgtgagcgtgtcaacac

SEQ ID NO: 73218 - DNA, 272 bp, Zea mays
gcgacgtcctcctcttctgaatgctgcctgggttgcatagactggaccctcaagtcagtaaatcgaaatgcctacattatgattgccatcaccgggaaaggtttcttcaaagcttcagtgctcgcaactggattaataatgaagaacattctgcgcatcggaaaagtcaacgtcattggagatgtcatcctcttcctgggaaaactctgtgtgagcctattctgtgcgcttttcgcctttctgatgttagacacccacaagtacaagtccgc

SEQ ID NO: 73219 - DNA, 271 bp, Zea mays
gcagcctgttggccatgccgccctgggtcaacccgcggctgctcgtcgccatgtcgagctcgttcggcctccacttcctcatcctctacgtgccgctgctcgccacggtgttcggcatcgtcccgctcagcctcaacgagtggctgctggtcctgctggtggctctcccggtggtgctcatcgacgaggctctcaagctcgcgggcaggtgtacgagcccttcttcgggccccaccaggcggtccaggaagaagaagcagaagggctagta

SEQ ID NO: 73220 - DNA, 269 bp, Zea mays
gcaatgttgattgcagaggggatgtggcaacaaatggccatggacagcggtgccactatgcaacctgggtcatatcctgagcgaccaggtgaacccgactgcacttactatctcaggactggattgtgtcgatttggcatgagctgccgattcaatcatcctccggataggaatctggctattgcctctgccagaatgaagggagaatatcctgagagagcgggacagccagagtgtcagtattatctgaagactggaacatgcaagtt

SEQ ID NO: 73221 - DNA, 271 bp, Zea mays
  unsure (1)..(271): unsure at all n locations
tctggggctgctgcccggtcgagggcgccacctgctgcaaggatcacgccagctgctgcacgccgggctaccctgtctgcaacgtcagagctggaacatgctcgcagagcaagaacagcccactgagcgtcaaggccttgaagcgcaccctcgccaagctgagcaccgcatgaggacctcgatctgngactgcccagtgcttttctgactcaccaagagcaagatttcatagattatctatatgtttgataagtactgtaccgcccatgat

SEQ ID NO: 73222 - DNA, 277 bp, Zea mays
ccaagggctaccgctacaagatgaggtttgtctacgcccatttccccatcaacgcgaccatcaccaactccaacaccgccatcgagataaggaacttcctcggcgagaagaaggtcagaaaggtggacatgcttgacggcgtgaccatcctccgctccgagaaggtcaaggacgagcttattctcgatggcaacgacgtcgagttagtctctcgctccgccgccctcatcaaccagaaatgccatgtcaagaagaaggatatcaggaagtttttgga

SEQ ID NO: 73223 - DNA, 279 bp, Zea mays
cacaaagcaaaagaaaatggatttcttcgatccatcaaggaaagatgatttcctcttcatctctggcacaaagatgcgcactcttgccaagaaccgtgagagtcccccggatggttttatgtgcccgggtggctggaaagtgctcgttgaatactatgacagcttggtgccatccgagggcagcagcaagctgcgcgagccagttgcagcctgaaatatgggaagcgcttcagataacgaaccctactatatcagcacaagcggttctttgcgacatag

SEQ ID NO: 73224 - DNA, 282 bp, Zea mays
gacaggatcagggcctcggagctcgagaagtgcctgcagaaagtaggtgaggacgccctcaccaagaagatgaggagagccatcgaggagctgagcaccggcatcgttaacaagctcctccatggcccgctgcagcacctgaggtgcgacggcagcgacagccgcacccttgacgagacgctcgagaacatgcacgctctcaaccggatgttcagcctcgacatggagaaggcgatcatcgagcagaagatcaaggccaaggtggagaagacacaaaactga

SEQ ID NO: 73225 - DNA, 262 bp, Zea mays
gcgtgtgggacgcgtacgaggccaccaagggcgcccacggggtgtgcatcctgaccgagtgggacgagttcaagaccctggactaccagaagatcttcgacaacatgcagaagcccgccttcgtcttcgacggccgcaacatcatcgacccggagaagttgagggagatcggcttcatcggctactccatcggcaagccgctcgacgcctggcttaaggacatgcccgcggtcgcttaattcgtctgaggtgctccattgga

SEQ ID NO: 73226 - DNA, 256 bp, Zea mays
  unsure (1)..(256): unsure at all n locations
gtcgcttccagccgccgccgcgtccgcctcgccaagcgcagcagccgccgcagcacatcgctctcttgatctcagccatggcggaggtggagcagcaacaggacacgccgaagctcttcaaccgctggaccttcgatgatgtccaggtgaacgacatctcgctgaacgactacctcgctgtgaacgcgacgaagcacgcgatgtacctgccgcacaccgcggngcgctactccaagaagcggttccgcaaggcgca

SEQ ID NO: 73227 - DNA, 276 bp, Zea mays
gtggacatgacgaacttctacaatcagtataagagtatcgagccctggctgaagaggaagaacccaccggtgccgtgaaaagagattctgcagagcaagaaggagagggagaagctcgacgggatgtacgagtgcattctctgcgcctgctgtagcacctcttgccccagctactggtggaaccccgagtcctatctcggtcccgctgcgttgctccacgctaataggtggataagcgacagccgtgatgagtacactaaggaggattggatgcca

SEQ ID NO: 73228 - DNA, 262 bp, Zea mays
ctcatctatcaaaatttaccataagatattgcaaataggcatgttcttctgttggaccccatattgggaacaggaaattcagcagttcaggccatctcccttctattgaagaagggagtacaagaagcaaatattatattccttaatcttatttcagcgccccaaggagtgcatgtggtgagcaagagattccctagagtgaagatcgttacttcggagattgagtttggctaaatgatgatttccgtgttgtgcctgggat

SEQ ID NO: 73229 - DNA, 275 bp, Zea mays
gctgaagctgcaggcaatgataattgtcctgtgaagattaaactagttgctcctccactttatgttctgaccacacagacccttgacaaggaccaagggatttcagttctcactgatgcagtcaaggcttgtacagcagagattgaaaaatacaaaggaaagttagtagtgaaggaaccaccaagagctgttagcgagcgggaagacaagctattcctcgaccagattgattccctaatggaacaaaacgcagaggtcgatggtgacgtggacag

SEQ ID NO: 73230 - DNA, 276 bp, Zea mays
ctctgctgctgagcttcgacatgtcatgaccaacctaggtgagaagctgacggacgaggaggtggatgagatgattcgtgaagccgacgtggacggtgatggccagatcaactacgaggagttcgtgaaggtgatgatggccaagtgagatgatgtgcctgttttgaagctagttcctctcttgatggtagtagctagtctagtgttggagactgactgcatttggtccggcttgttcctctcgctgcatcaatggacatatccggttgttttctc

SEQ ID NO: 73231 - DNA, 272 bp, Zea mays
gacaaagcattggacgctactggacagcgtatgcagacggggactgcaaagggtgcagctacaccgggaccttccgggcacccaagtgccaagcaggctgcggccagccgacccagcgttgagaccatgtgccaaggtcctggctgcagcccagcagatacctactggtagtcttggaggaactgggtggtggcgactcgtcgaagatcgccctagccaagaagactgactcgagcgtatgtgccgacgtgtccgaggaccatccgaacatt

SEQ ID NO: 73232 - DNA, 267 bp, Zea mays
ctgatggagcaccggtatggggcaagagatttcgagacgaggcaagatacaagtctgctatccgcaggcacatactatctcacgcacgttgactccaagtacagaaggttctacgacgtgaaatgtgacggtgtcgccactgcaatgtccaacggccactgatctttcttctgcccgaagctgcaacaagtcaaataacagaggcaagtgtcctaagcatccttagataatattatatctattaagaggggaagctcgagttataga

SEQ ID NO: 73233 - DNA, 270 bp, Zea mays
gaggagacgtaacgacgagctcgctttcacacagatgatcagtatggtcaaggtgcggtacaacaatgtgggtccaaccatgggcttgggagtgcagcagctgaagaaggagctgggacgatcaaggaaggttccattcgagttcgatgagatccacgagttccttgaccggttctacatgtcaaggattggcatccacatgctgatagggcagcatgtggctttgcatgaccctaaaccggagcctggtgtcataggcatcatcaatac

SEQ ID NO: 73234 - DNA, 267 bp, Zea mays
ctaggttaggctagggtgtcgaccagctcgcggaaatggtggccttcaggttccatcagtaccaggtggcggggcgcgcgctgccgacgcccggcgacgagcaccccaagatctaccgcatgaagctctgggccaccaacgaagtccgcgccaagagcaagttctggtacttcctgaggaagttgaagaaggttaagaagagcaacggtcaggtcctggccatcaacgagatcttcgagcgtaacccgacgacgatcaagaactacg

SEQ ID NO: 73235 - DNA, 125 bp, Zea mays
gtattattactttcgttgaaaccgtgatgctattaagacttaatttttttatggaacatcgaatgtaaggcatacatggctatgagtttaaaacacaaaaaaaaggctggccccgactagagact

SEQ ID NO: 73236 - DNA, 266 bp, Zea mays
ggaggtgagggccgcgctggagaacggcgtgctcacggtcaccgtgcccaaggccgaggtcaagaagcccgaggttaagagcatccagatctccggctgaagaagacatggacgcgaggtgaatggtcgcgtcgcgttcgcgtcgcggcgtcgggtcttgggtttcagcgacgcgactcgtgtgtgtggtactggtggtgctctgctttggtatgtctggtgtgtacgtgtgctgttcagtgtttcgtggtcatcgtctgtacatt

SEQ ID NO: 73237 - DNA, 255 bp, Zea mays
caagaacgcgcagccatggagaagaagcgtttgaaatggaaggcgcaaggttctgcggcgtacgagaaggtggttcgcggtggccctgtggatccttcgaagctcgtcgatgagctggggccaatggagatccgcacattcatcgtcagctttgatcacatcagtgacaagcaacagctctaatcgtctccgactagacgactaggtctggatgaagttgtcgtgctgcttcgaaataaaaaataataatgtggc

SEQ ID NO: 73238 - DNA, 280 bp, Zea mays
ggaggatctcattaaatgccttgcaccaacttacagaggcgatttttctttacctggagcactgctgcggtcaaaaggactgaaccggataggaaatctgttggtgcccaatgacaactattgcaagtttgagaactggatcatgccactcttcgaccagatgctacaggagcaatctactgagaatgtttggacaccgtcgaaggtgatagcgcgccttggcaaagaaataaatgatgaaagctcctatctttattgggcatacaagaataacatccct

SEQ ID NO: 73239 - DNA, 280 bp, Zea mays
  unsure (1)..(280): unsure at all n locations
gatgaggttgccattcagaacttgcagacctacaaagagaagaaatttgtggatatcagctaagaggatctggcattgggtgatgaagatgaagagactaaagaaaccaaacaggagttcactctcctatgtgattgggttaaacagcagcttggcgacaaggttgcgaaggtccaaatatcaaagcgtttaagttcatctccatgtgttctcgtatctggcaagttcggttggtccgnaatatggaaaggctcatgaaggctcanacacttgggacaca

SEQ ID NO: 73240 - DNA, 292 bp, Zea mays
cgccgccaacgctgcagccgcagttgccgcaggcgggaacttggacgtgctactcgcgactgctctcatctgttcccgcgtaggattcgttcacaatggcccgtgtgtatgtcggcaacttggatgcacgcgtgacttccggggaactcgaagatgagttccgtgtgtttggagttctgcgaagtgtttgggtcgcacgcaaaccacctggttttgcatttattgattttgacgacaggagggatgcagaggatgctattcgtgatctagatggtaagaatggatggaaagt

SEQ ID NO: 73241 - DNA, 279 bp, Zea mays
attgaggaccctgatgagcgtcttggcgctgatattattcaaaaggcattggtagcacctgcttcattgattgcacacaatgctggagtagagggtgaagtagttgtcgagaagatcaaggacagcgattgggaggtgggctacaatgcaatgactgacaagtacgagaacctgatggaggctggtgtgatcgaccctgccaaggtgaccaggtgtgcgctccagaatgcggcctcagtagctggaatggtcctaaccacacaggccattgttgttgag

SEQ ID NO: 73242 - DNA, 245 bp, Zea mays
  unsure (1)..(245): unsure at all n locations
catcgcgaagatgtaccagggcgatgacgcgggcatgggcgctgctgctggcatggatgatgatgccccgtctggcgcgagcggtgctggtcccaagatcgaggaggtggattaagttggctagagttcgaggtttggcttggtgaggtgtgaagtgcctgaactctgatggttgtttgtgaggtgtggtcgcaatagctgcggcctgtggtgaacttctcaganataaataagttttcgttcct

SEQ ID NO: 73243 - DNA, 282 bp, Zea mays
ggaaagtgttcgtcctcatggcgccgccgcatccgaagtcgggcctcttcgtgggcatcaacaagggccatgtcgtcaccaagcgcgagctgcctctgcgcccgtcccaccgcaaggggaaagcaacgaagagggtgtccatggtcaggggcctgatcagagaggttgctggctttgctccttatgagaagcgtatcaccgagcttctgaaggttggcaaggacaagcgcgctctgaagcttgccaagagaaagcttggaactcacaagagggcaaagaaga

SEQ ID NO: 73244 - DNA, 275 bp, Zea mays
ccgcgatctgaagcgactagtcgaaggcgtcggcggcggcgatggggagcgacctggagacggagaagaagaagaccccggaggcgctgatgcccatcgcgaagcctctcgctgggaagaagctctgcaagcggaccctcaagctcgtgcgacgagcctctgaggccaagtgcctgaagcgcggagtcaaagaggtagtcaagagcattcgccgcgggaacaaagggttgtgtgtgattgcatggaatatttctcctattgatgtgattacacac

SEQ ID NO: 73245 - DNA, 274 bp, Zea mays
cggctcgagatgcagcaccttttgcgaaggactgcaagctggctaatcttgtctgcttggaggaagttggatgctatcgaggagaaggatggagtgcttgatgagtaagacgggtttctggtgtcgatttgcttctgagtttttttctttttatatcgttgcgatctcgtggttgtcgtttggttagcagccaagccaggctattagtacgaagaatgtcgtctataaacatgtgttcctacgttgccacatgctgagtcaatctgtatacagc

SEQ ID NO: 73246 - DNA, 282 bp, Zea mays
cgctacgccaactactacaactacaagaacgacaccatgatgcgcaaggaggacttcgtatccccctccgtgctacgcgagccaggaggatcatgcaggagtccgatatcatgaaggaggacgacagcaactggcctgagctcgaccgcatcggccgacaggagctcgagatcgtcatgggcaacgaacacatttcattcaccacttccaagatcggctccctcgtcgatgtccagtccagcaaggacccggaggactccggatcttctactacctcgtcca

SEQ ID NO: 73247 - DNA, 241 bp, Zea mays
attttctgagctctaaaccgtaggttggtggaccatactgggacgtgccacttggccggagagactcgctcggtgcaagcatccagggctccaacaatgacatcccagcccccaacaacacactccccactatcatcaccaagttcaagcgccagggcctcaatgttgttgatgttgtcgccctctcaggtgatttttcttgtatttattagtaacatctgtccttcggtattcaccaact

SEQ ID NO: 73248 - DNA, 280 bp, Zea mays
cagacttctgctgcagcgcctccgccgccgccgccgcatctaacgcagttccctccgccgcagcccgaggcaagatgggtctccagaacgacattgatctgctcaacccgccggcagaactcgagaagctcaagcacaagaaaaagagactcgtccagtcgcccaactccttcttcatggatgttaagtgccaggggtgcttcagcataaccactgttttcagccactcccagactgttgttgtgtgccctggctgccaaactgtcctctgccaacccac

SEQ ID NO: 73249 - DNA, 271 bp, Zea mays
cgagaagatcttcaagaccaagtgcgcgcagtgccacacagtcgagaagggcgccggctacaagcaaggtccaaacttgaatgggctttttgggaggcagtcgggtaccaccacaggctactcctattccgcgggaaacaaaaacaaggctgtgatctgggaggagaacactctgtatgactacctgcttaaccctgagaagtacattcctggaaccaagatggtcttccctgggctgaagaagccgcaggaacgtgctgatctcattgcg

SEQ ID NO: 73250 - DNA, 253 bp, Zea mays
gaagattcaaactatttgaaagtcatgcgattttgaggtatcttgcatcgggtttccctgtagtagctgaccactggtatccttctgacttgctcaccagagccaaaattgagtcaatcttggattggcatcactcaaatttgcggcgtggtgcagcaacccttgtaatgcacactgcattggctcccttccttgggcttacgacaagtcatgaggctgtgaaacaagcagagaagcttgtgatgcagtcact

SEQ ID NO: 73251 - DNA, 170 bp, Zea mays
  unsure (1)..(170): unsure at all n locations
gcgtcgatacgtcggagnctttgangcatgngatnagcgctcgcgtacgtcagcttgtcgctcgcctcgaggtagtatgactttcgttgagaccgtgatgctattaagacttaatttttttatggaacatcgaatgtaaggcatacatggttatgagtttgaaaaataaa

SEQ ID NO: 73252 - DNA, 257 bp, Zea mays
ccgccgcaaggactcgcgacggacggagcaacggaggaagcaactacgcggcagccatggtgaacgttccgaaaaccaagaagacctactgtaagaacaaggaatgcaggaagcacaccctgcacaaggttacccagtacaagaaaggtaaggatagcctttcagctcaagggaagcgacgttatgaccgcaaacagtctggatatggtggtcagacaaagcctgttttccacaagaaggcaaaaacaacaaagaag

SEQ ID NO: 73253 - DNA, 256 bp, Zea mays
  unsure (1)..(256): unsure at all n locations
gctaaacaatggccagcatcccttcagtctatcaaacataggttcagttcttggtgtcaccgagaagcttcagtcaagacatgagaccttgcctgagaaattcgttgagacgctgaagctgatggaacaccgatacggcgcaaaagacttcgagacgagcagcgacacgagtctcctgcagccgggcacattctacctcaccaaggtggactccatgtaccgnaggntctattcccagaaagccggccgagaaaca

SEQ ID NO: 73254 - DNA, 259 bp, Zea mays
gtgattggaggccgccaaagtagcggttaagtgcagcaacttcctcagagaagctcctgtggggggctggctgtgcaccaggaaagatgaacgtcccacgggagtacttcacagcagcaagtggcatagacagctcttcagcaagctcaaggattcttggaatggtgagcaggagcttggtagtgccacaggtcttgatgacaatcttcagaggatagattaacaagcttgactcatagaggcatatgagtcgaaatcc

SEQ ID NO: 73255 - DNA, 264 bp, Zea mays
cgacaagttcctggctgagcagcagttgctacctcacaagttcgaggaggcgtgcaaggccgcaggggctgctctgaccttgcgcatgcagcctggatatgaccactcgtactatttcatcgctacgttcgtggacgatcacattgcgcaccatgctcagtttctcaagagcgcctgactgtaaatgtgtagcgtgaggaagacaaggaggcagcctagcatgggtgttttatctatgccgacagtgttgtctcgtgtggcagc

SEQ ID NO: 73256 - DNA, 267 bp, Zea mays
ggcgttttctcccactgctcgaaccgcgccgacgagcgacgacaagagctgctctattcttcaaaacaaatggcgaccgttccagttaacccaaaaccttttctgaacaacctgacaggaaagcctgttattgtcaaactcaagtggggtatggagtacaagggttatcttgcttctgtggactcatatatgaatctccagcttgccaacactgaggagtacattgatggtcaattctctggaaacctgggagagattctgatcagg

SEQ ID NO: 73257 - DNA, 137 bp, Zea mays
tactactatgacagagccatatgctctgtgaagagtattagtagcagcgctcataaaagctacagttccatctattttctcagctatgtaaaacttccaaactgttcatgcttaaaactgagggttttcgtggtgtg

SEQ ID NO: 73258 - DNA, 263 bp, Zea mays
cgttcctgtcttctggcctatactcctctgctactgggttgttctctttgtccttacaatgaagcgccagattgtgcatatgatcaaatacaaatatgtgcctttcagtatcgggaaacagaaatacggtgtgaagaagagtgtcgcaagcaccagttcctcgaaagactgattatgagtctacctcagtaggaacttggcaggggaacaagatacggtggatgatgatgtgctaaatacctaagtgtaatactccattcata

SEQ ID NO: 73259 - DNA, 266 bp, Zea mays
cggctcgagctccgctcgggcaccagctttgaccgcctcccgtccccttcgctcctgttcctgcataccctacccccccgcaggagcggcggcgcggcatgacaaaggcggctaaggcaagatgttcgggcgcgcgccgaagaagagcgacaacaccaagtactacgagatcctcggggtgcccaagtcggcgtcccaggacgacctcaagaaggcctaccgcaaggtcgctatcaagaaccacctcgacaaggccggagaccccg

SEQ ID NO: 73260 - DNA, 261 bp, Zea mays
gtgatcaagcacaatgccaatcaacgatatgctacaaatgctgtgacagcatttatttttcgagaaattgctgagagacaccagctacctatacaggattttgttgttcgcaatgacatggcttgtggttcaacaattggcccaatacttgctagtggtgttggtattcgcactgttgatattggagcaccccaattatcaatgcacagcatcagagaaatgtgtgccgctgacgatattagctactcatatgagcatttc

SEQ ID NO: 73261 - DNA, 266 bp, Zea mays
tccgtctccaaatcctcctagcgaattcaccacagcttctcaccaccgctaccttcgatggcacccaaggcggacaagaagccggcggcgaagaagcctgcagaggagcccgcgacagagaaggcggagaaggctccggcggggaagaagcccaaggccgagaagcgcctcccggcgggcaagtccgccggtaaggagggcggcgagggcaagaaggggaaaaagaaagcgaagaagtccgtggagacctacaagatctacatctt

SEQ ID NO: 73262 - DNA, 272 bp, Zea mays
cgctacgccaacaactccaactacaagaacgacaccatgatccgcaaggaggtcttcgtctccccctccgtcctccgcgaggccaggaggatcatccaggagtccgatatcatgaaggaggacgacagcaactggcctgagcccgaccgcatcggccgacaggagctcgagatcgtcatgggcaacgaacacatttcattcaccacttccaagatcggctccctcgtcgatgtccagtccagcaaggacccggagtgactccggatcttcta

SEQ ID NO: 73263 - DNA, 264 bp, Zea mays
gcgcagcactgaagcaccacttcctgcactcactgtgctagctgctcaaaccgtagtagtaacagtccatcaccaccaatggctctcaaggttgcgctcttccttgccctgagcctcctgtatgctgccaccgcgcatggctgcgaacccaactgttctggcccagtcgtcccaacgccgccagtcgtgccgactccgtcgtcgcacagccacgggcgctgcccgatcgacgcgctcaagctcaaggtgtgcgccaacgtgcta

SEQ ID NO: 73264 - DNA, 265 bp, Zea mays
gttgagtatagacaggagcatggcgagcttggatgggaagcggccgatccatttggtaggcaccccggtggcgagcgacccagcagatgcgcaccgtgcgcccaaacggcgatgcacgggtagaggggaggatggaagaggcaagtgtgccaccactggcagatgccattgctcaaagagaaggaaactgcggattaagaggtcgattagagtgccagccattagcaacaaaatcgctgatatccctcctgatgagtactcgtgg

SEQ ID NO: 73265 - DNA, 324 bp, Zea mays
  unsure (1)..(324): unsure at all n locations
atgattcgtncgtgagtcacgcatacgtacgctagctagtagttcggctcgagaaccggcttctggtgtatgaatttatgcccaagggaagtttggagaaccatctgtttagaagaggcgctgatcctttgtcatgggcaataaggctcaaagttgccattggagctgctaggggcttgtcatttttacatgatgctgaaaaccaagtcatatatcgtgatttcaaggcatcaaacattcttctcgattcggaattcaacgcaaaactttcagattttggcttgcaaaagccgtccaactggngataaacccatgatccacaca

SEQ ID NO: 73266 - DNA, 256 bp, Zea mays
  unsure (1)..(256): unsure at all n locations
cacgcaccctaccaacccatacccataccagaggctctctgagtttacttctcagcggtagatcggctgatcgagcgagctgagcgaggcacacggagctagctaaacagagcacacggatagaaaagcaagatgtcggacggcacggcgacctgcatcgacatcatcctcgccattatcctgccgccgctcgaggtcttcttcaagttcggctgcggngttgagttctggatctgccttatcctcaccttcttcg

SEQ ID NO: 73267 - DNA, 268 bp, Zea mays
cttgtgttgttcggagcgggcagcagcacacagccccatcccaatcctagtcgatcttcttcccctcctcaaggaagaaaagaagctgaaccatggggaagagaaagtcagctgctaagccacctcctaagaagcggatggacaagcttgacactgtcttttcctgcccattctgcaaccacgggagtagtgttgagtgccgaattgacatgaagaatctgattggcgaagcatcttgtagaatctgtcagggaaacttcagcacaac

SEQ ID NO: 73268 - DNA, 109 bp, Zea mays
cagcactaaagcaccagatcccatcagaactccgaagttaagcgtgcttgggcgagagtagtactaggatgggtgacctcctgggaagtcctcgtgttgcattcctttt

SEQ ID NO: 73269 - DNA, 259 bp, Zea mays
cccggaacaaatcagatgttgttctggttgacactgctggacgtatgcaggacaatgagccactcatgagggcactctccaagctaatcaatctcaatagcccagacctggttttatttgttgtagaagcattggttggaaacgatgctgtggatcagctcactaaatttaaccagaaattagcagacctatctgctgttcccactgctagattgatcgatggtatcctgctcaccaagtttgacaccatcgacgacaa

SEQ ID NO: 73270 - DNA, 253 bp, Zea mays
cgatctcaatctccctagcagcagatcctcgtgcaacgcaaagcgctagccttcctactgtcccgatggcccgcacgaagcagacggcgaggaagtccactggcggcaaggcgccaaggaagcagctggccaccaaggcggcgcgcaagtctgccccggcgaccggcggagtgaagaagccccaccgtttccgccccggcaccgtcgcgctccgggagatccgcaagtaccagaagagcacggagctgctgat

SEQ ID NO: 73271 - DNA, 273 bp, Zea mays
  unsure (1)..(273): unsure at all n locations
ctaggctgatggctcaagggagaactggggacgccaagtacaaaggcatggtccatgcgatacgaacaatatatgccgaagaggggctgcgagccctgtggaaaggcttgcttccccggctcatgaggatcccacctggacaggctataatgtgggctgtagctgatcaggtgatgggcctctatgagcgaactcatctgcagccagttcatatttgaccattctattgcagtgctggtgctgactgaattttnttttgttgggtctcaatcg

SEQ ID NO: 73272 - DNA, 260 bp, Zea mays
aggttgtgtatgttgctgagcagtgtaagaggccatttgagcatggcttccagtgcggtagctacaaggctccagcaaactgatgatatcgcaaggaggtaagcgcttgacggagtctttagatttcaattggtgcagccgatcaaccttcttagggttgtataatatgaagtcaatgttgagactaatgtgaggtgggagaggcctattgatgcatcagaagtattatgagctaataataaagccttctccacagattt

SEQ ID NO: 73273 - DNA, 278 bp, Zea mays
cttctcgtagaagataagcaaagcaaggctaccgatgtcgttgtctctggcctgcgcttcctgctctcttggcttgctggttgccctcggaccaggcctttcggccggctgcgctgcctcttttgcgaaaggcagaggctgggcttggatgagatgaacggtgaccagttcatcaagggcgtcacggtggttgacggccccgtgggcaagacctgcatgctcatctgctacaccagcaacaaggtccccacggattacatccccacgggttcgacaac

SEQ ID NO: 73274 - DNA, 255 bp, Zea mays
gagataatatgagaccatgcagctggctcaattgacgtgacagaagctggaggcatagtgacagatgctgctgtaaacgacttgggacttgtccaaaagttagatttcttcgatctcgaacacagccattatggcacccaacatgagttgatgccgtcggctccttgaaagctgtccaagaggctattaaagagacgaaccaggctgcctccctcttatagctggtgtagtggtcgacaaaaaagtagttgcaaa

SEQ ID NO: 73275 - DNA, 332 bp, Zea mays
tgtcactcgcgcgtacgatagctcgcatttcgcatcgagagatgagcagtttttgtgtgtgatgaccagctaacagcatctctcacgggaccaggcgtggttttcattcaaagtctgccattccatcgactctcacagagaatcgccagcagtagatcgagtgcaggctcaagctggagggacaacccacagttcttcatccagattgtcatgttcttcttcctggcctatgttatgattgtatcatccataattctgacagatgtttaggcgattcagtgagcttttggtgtattcctagacaagttatcgaagagttaaagctacctccc

SEQ ID NO: 73276 - DNA, 302 bp, Zea mays
  unsure (1)..(302): unsure at all n locations
cgattttcctcagtcctggacagccactgcgactcctcccagatcctctcacacggactagccggctccgctgccagcgtcgcgactccacctctgtcgtcaccatggtcaagtccaaggtcattcagcgtccacgagctgtgcggcccccgaggtgctgcggtgggaggaggtggaggtcggggagcccggtgaaggggagatccgcatcaggaccaccgccgtcggcgtcaacttcatcgacatctactttcggaaggnggtctacgccgcgcncaccatgcccttcaccccaggaatgg

SEQ ID NO: 73277 - DNA, 226 bp, Zea mays
tgctgaaaacctttacagatctatttgattacttgcccttgtacgctgtcaaagactctgatgagtctagggcctcatcagttgccgatcatcaatcatgcacgcagaagattactgacttgaccaatgcaggcaattggaagtaatcaaatagatctgtaaaggttttccagacatttgcatttccatacttgcttaagcattcgtcatagaaccgatacacttg

SEQ ID NO: 73278 - DNA, 262 bp, Zea mays
acttgcgtacatatgctgtgaacgacccatagacgcctactgtgatgatatcgaccaccattaatatagaggaaggagaggcccctgatatgccacttggcattactgacattgctagaatgaaacagttcagggcattgaacaagctcaagaaagttgcattgaaggttgtggctgagaacttatcagatgaagagattatgggcctaaaagaaatgttgagattcctggatacagatgacagtgggacgattactcttga

SEQ ID NO: 73279 - DNA, 294 bp, Zea mays
  unsure (1)..(294): unsure at all n locations
ttagtatcccgtctactgatcgctcgagcgttctgaccagctccgacgcactggacgtgtacttcgtcggctggtaggattcacgatcagacgtcgcggctgtccaacactctgccgatgtcgaaacaggtggacctcttcgaggactacctgctccggctcagaggcatcgttggggacaaggaggcttccaggatcgttgccagatctctgatctttatcagctcggggaccaacgatttctcacattactaccgttcgccanagaagaagatggacattggtgactaccag

SEQ ID NO: 73280 - DNA, 194 bp, Zea mays
caccatggcacccggcctctacaccgacatcggcacgaagaccagagatttgctgtactagtgactacaacacggcaccagaggttctccctaaccacctgctagccccatggcatcgcattcacagctgcaggaacagggaaaaatgagtccaccttgggcggatcttcacactcaaattaagaacaataaat

SEQ ID NO: 73281 - DNA, 311 bp, Zea mays
tgtacctaggccagtcacgctacgaagctcgaattcgctcgagatttggtaagaagatgctgcgacaagacccataagaacgcctgactgctgcttgaatattggaccacccatggaatatagaggatggagaggccccagataagccacttgacattactggcattgcgagaatgaaacagttcagggcaatgaacaagctcaagacagttgcattgaaggttgtggctgagaacttatcagatgacgagattatgggcctaaaggaattgtcagatccgtgcatacagataacagtgggacaattactc

SEQ ID NO: 73282 - DNA, 228 bp, Zea mays
caaatatccacgaagaggaagtttgacgctgatggcatcttcaaagctgaactgaatgagtttcttactcggaactcgctgaagacgctactcttgagagacgcgcgagttacaccaacctagacagagatcataatcttagccactagaacacagaatgttcttgcagataagggctcgcgtattcgcgaactgactgctgtaggtcagaagagtgttggctttcca

SEQ ID NO: 73283 - DNA, 203 bp, Zea mays
tgacgagaagagattgtgtggagttaccacccttgatgtcgttagggctaaaactgactatgctgtgaaagcctatgttccaggtgctgggggtaacgtacctgatgtgggcggccatgcaggcattactattctgcgactatattctcaagccgcaccaaaagccaatcttgatgatgacgtcattaaggctcttacaaaga

SEQ ID NO: 73284 - DNA, 285 bp, Zea mays
gggaaagaaaggtatcagtgggcacatcaatgtagattataagaatgaagctctgtctgttgagctgacaatgcctcaagatgcgtctcgtgataccattagagacactagaggactttcaggtggagaacgatctttctcaaccctttgcttcaccttgtctcttcatggaatggccgaagcaccatttagggccatggatgagtttgatgtattcatggatgcggtgagccgcaaaataagcttagacacctagtagattttgctgtcgcacaaggtctcaat

SEQ ID NO: 73285 - DNA, 294 bp, Zea mays
ccctcctgctcaccgcggcgtgccccagatcacggttaccttcgacatcgatgccaactgcatgctcaacgtctctgccgaggacaagaccaccggccagaagatcaagatcacgatcaccaacgacaagggccggcttagcaaggaggagatcgagaagatggtgcaggaggctgagaagtacaaggcagaggacgaggaggtcaagaagaaggtgtacgccaagaacgcgctcgagaattatgcctacaacatgaggaacaccatcaaggacgacaagatcgtcttcaagct

SEQ ID NO: 73286 - DNA, 279 bp, Zea mays
ggcatctggctggatggcacacgttcaacgcattgcccttctctgggaagaccgtcaccgtggttggtgaggcggcccctgttctccccaagggtttggagtgggctggctttgtgttgaactcgagaatgctgtggaaggaggctgaaggcaagcccgactgggtgaaggatcttgatgctgttggcgagaatggagaggagattgagaatccacttactctgttgaatgatccatcctctgttgagccacttgggaactgtgggaagaaggcctact

SEQ ID NO: 73287 - DNA, 253 bp, Zea mays
gcggcggcctcttcgtcccgcaaggacgccccacctagatccgtccacgtccgacgttccccttttccgccgcagcgatggcgtacgtggattcctggtacgagttcgtggagcggtccgtgcatgctcttccgcgccgaccccaacaccacccgctacgtgatgaagtatcggcactgcgaggggaagctcgtgctcaaggtcactgatgaccgcgagtgcttgaaattcatgacagatcaagctcaagacg

SEQ ID NO: 73288 - DNA, 265 bp, Zea mays
ggcactatccacagcattgcggcctcggccatggccttaacgacgaggatgtcgtccagatagtaaagaagaaggaaaaggaggagggtgggcgaggccggttcaagtcgcacacgaacgcacctgaccggatatctgatagggtgaagaaagccccactgaagacataataataactggttccctgagcgcgtcgtgatcagcttctccaaaccagatggacaacacaagctcggtgggagatcataaaatctggaactagctg

SEQ ID NO: 73289 - DNA, 254 bp, Zea mays
ggatgtcgatgatctttcctctaaaggcgtcaagctggtccgcttcaagctgaactacactgtggaatcaggccagtccatcctgaacataacgatggacactgatatgcttgcgcacttcgataactggcagcgggaaggacatgatgatgactatgaggcgcaagaccagtggccggtagagcttcgtcgtgcacggttaatcccagcggtagattatatacaggttaataacgaacgaatctaagctctac

SEQ ID NO: 73290 - DNA, 276 bp, Zea mays
gaccgcctcgcacccgtcgttcccctccttccggcacaaccagcacgcgagcggcacgagaagactagggttacggcgaggcgacggcgagagccatggcagggattcggtggccgccagaggacccggagatcttcccttccaggatggtcagcggcggggcttgggtccccgtcgcgcccccaggagagatggcgtcggacgacgacaggtcggtggccgcggactcgtggtcgatcaagagcgactacggcagcaccctcgacgacgatcagc

SEQ ID NO: 73291 - DNA, 284 bp, Zea mays
aacagagctcctcaccgagcagcctgccgcgccagactatggcgctccaaaccgagccttgtggcaagcgtcgttcaatgccttctttgggctgctcactaagtactgcatgagtaagcttgacagcatggttcacacgatgcacaagctcggtgctgctgctgcaacagcgatacgcaaggaacttccggttgagcttctgcgcgccagccttcctcacacggatgatcagcagcgcagactactgctcgagttcgcccagcggaccgtgcccgtctctggca

SEQ ID NO: 73292 - DNA, 289 bp, Zea mays
cacttatgttgatctatatcactaagttctttaggcgcgaatctgaatattggagtactatggacattgctcatgatagagctggtttctatatctgctgggtatgcttggtatgggctccatccatatatactgcccctggaatgtaccttgtaaaccaccctttgaatttgggcccccagctagcactctcaatgcttctagctggaatgtagcgcatatacataaactatgattgtgaccgtcagcgccaagaatttcgacggacgaatgggaaaggctcggctgg

SEQ ID NO: 73293 - DNA, 234 bp, Zea mays
ctttgtttgacctgcaagctatttgctaagagtgatccttcagagaaagggaggcagatgtacaagcagaacgagaacgactgaagaagcagtggtcgcatgagcaggaattgattaaaaatgaacctctttcaattacttacagttactgggatgggactgggcacagaagagcaatccaggtccgtaaaggtgacaccattggagaatttctaagggctgttcaacagcagc

SEQ ID NO: 73294 - DNA, 233 bp, Zea mays
ggggtcgacgcgggatcaagaagcctcatggcctaggccagtggctcgcattgcacatggtgggtgcgctggcttaccatctccccaagtgggagagtggacgtcataatttgtggtagagggtgtacgcgttcgcgcggtccctgccaaatcttataaattttatttaagtcccctttagagatagagaagggcttgaaatgtaatctttggtattagtccccttcagtgaa

SEQ ID NO: 73295 - DNA, 271 bp, Zea mays
ggggtcgacgggggatcaagaagcctcatggcctaggccagtggctcgcattgcacatggtgggtgcgctggcttaccatctccccaagtgggagagtgtacgtcataatttgtggtagagggggtacgcgttcgcgcggtccctgccaaatcttataaattttatttaagtcccctttagagatagagaagggcttgaaatgtaatctttgttattagtccccttcagtgaaaggcttgaaatggtaactttgtttcgcccggatttata

SEQ ID NO: 73296 - DNA, 263 bp, Zea mays
  unsure (1)..(263): unsure at all n locations
gccgttgctgctgccgcgtccacagaatgtggggattcgtgaagactcataagaccaatgcgtatttcaaacgtttccaagtgaaattcaagagaaggcgggctggcaagacagactacagggccaggataaggctgattaaccaagacaaaaacaagtacaacacacccaaatacagatttgttgtgcgatttaccaacaaggacatcactgcccaaatcatatctgctagtatagcgngtgatatgggtcttgcttctgct

SEQ ID NO: 73297 - DNA, 201 bp, Zea mays
caggcggtgagcgtcttcatcatggcggcgggcaacctggcgtgggacgtgttcaccacggagcacgaggtggaggccatcctcaagggcagcctcaacctcctggcggggctagggggcttcgccgtggaggccgtcgtcggcgcggctgtcaccaaggcggtcgcaaacgtcggcgccggcgactttgcttgctctctc

SEQ ID NO: 73298 - DNA, 270 bp, Zea mays
tgtctggaaaacctttacagatctatttgagaacttgccctggtacgcggtcaaagatgctgatgttgacgagtgtctcaatggatgtcgataatccaccatgcaagcaaaatatttctgactcgaccaatgcaggcaatgggaagtaatcaaatagatctgtaaaggttttccagacatttgcatttatatacttccttaagcattcggcatagaacccatacacttgagtaatctgtgggctttcatggtttcctctgagaatggtga

SEQ ID NO: 73299 - DNA, 268 bp, Zea mays
  unsure (1)..(268): unsure at all n locations
tgctcactcccctcattgttggaaccctcttcggagttgagactctctctggagttcttgctggtgccctgggttctggagtgcagattgccatctctgcttccaacaccggtggtgcatgggacaatgctaagaagtacattgaggctggtgccagcgagcatgccaggaccctcggccccaagggatctgactgccacaaggctgctgtgataggtgacaccattggtgaccccctgaaggaacctcgngcccgtccctcaacatc

SEQ ID NO: 73300 - DNA, 263 bp, Zea mays
  unsure (1)..(263): unsure at all n locations
gggacatgcatacaattcattcccgaagatgggtgacagttggattcctgaagatgtatntagtatggagcctttcgttcgcaacttttttgagaacacatctacagtacagctcaatcatcgaattcttgccgcaacaacattactctctgtgggtggattatggttggctgcaaggaaaatagacatgcacccagcagtcaagtcactgatcggaagcacgcttgggatggctgctctccaggttacattgngcatatcta

SEQ ID NO: 73301 - DNA, 270 bp, Zea mays
atctttccttgatctatcaaataactcattatctggtctaccatctgaactaggtaaaatgactaccctaagaaagcttctgcttactggaaatcctatgaggacacttaggagttcattggtttctggaccaacaacaacattgctgaagtatctgcgcagccggctttcatccgatgaggaagcatcaggatccagaagcaccccaactaaagatgaccaaattgctgcagcaaggcgcttgtccttatcttcaaaggaactggactt

SEQ ID NO: 73302 - DNA, 245 bp, Zea mays
gtggctaggggacgaaaaagggctggagagattaggcagccgctggccgctgctgtactgtggcgtcgcggtcggctacggcgccgagaacgggaaggactactggatcgtccgcaactcgtggggcccgaagtggggcgaggctggatacatccgtatggagaggaacgttaacgccagcactgggaagtgcgggatcgcgatgatggcgtcctacccgacgaagaatggcgcgaaccctccca

SEQ ID NO: 73303 - DNA, 215 bp, Zea mays
ctcagcagctaaatatagaagcctgcgaagcttcaccagacaattctagcactttggctaggatggacacgtttttcagaaatgcatgccagtcttcttgtgagggtataatgttaaagactttggatgtcgatgctggatactctgcttccaaacgctgtgattcatggttaaaggtcaagcgtgactatgtgcaaggcttaggtgatagcctt

SEQ ID NO: 73304 - DNA, 262 bp, Zea mays
caagcatcaaatattggagactctgggtttatagtgattagaaatggagaagtgttcataaagtctaaacctacgctttatgggttcaatttcccactacaaattcagaagggagatgacccctcaaagtttgtacagaattatgctattgatctagaggacggcgatgcaattgtgacagcaaccgatggcctttttgataatgtatacgagcatgaaatagctggaattgtctccagatcgtacaggcagatctagacca

SEQ ID NO: 73305 - DNA, 276 bp, Zea mays
ggcaccggcaatgtcaacgacgacggaggcggcaaagagcggctcagccgcaccggtgcggagccagcggatcggctgcgacgccgtattcaccgacgatgacaaccgcgagggctcctgccaataccacccctccgcacctatgtttcatgacggcatgaaagaatggagctgctgcaagcaaagaagccatgatttcagcttatttttgcagatacctggatgcacaacaggaaagcatacaaccgaaaaaccaatcacaagagctgtttcatc

SEQ ID NO: 73306 - DNA, 256 bp, Zea mays
cggctcgagctcctctggaggtattcgcagtcgaccgcgtcctcggagcacgatgaaggatgttgctgcctacctgcttgctgtcctcgctgggaatgccagcccctccgctgaggatttgactggcattctggagtcagttggctgtgaagttgacaatgaaaggatggaactgctgctgtcccaactgagcggtaaggacatcaccgagctcattgccgcgggcagagagaagtttgcttcagtcccatgtggc

SEQ ID NO: 73307 - DNA, 262 bp, Zea mays
  unsure (1)..(262): unsure at all n locations
gtactattctactattgattagttaactttctgtcgtagaggtgtttcaatgtgtttccttttcaggttgagagtggtgatctaatagcttatggacttatcccagaatttattggacgtttccctatccttgtgagcctcaccgctctaaatgaggaccagcttgttcatggatcacctgtatctacntggatttatctttcctaacatcatgggctgtcgagtaatgcacgcttatgctggtacattgtgtagagaaaca

SEQ ID NO: 73308 - DNA, 273 bp, Zea mays
  unsure (1)..(273): unsure at all n locations
gcaaccgaagcaattgtagtttcttctcgtgtttgcactcccctgcccggctgcccggcagggttaggaggcaaggagggaagagagggtggaggaagtgggggaggatgagcgaggagaggccggtgccgcggcgggagagcccgtggggtctgcctgagggcgacacgcgccagcccaaggctcaccgctgtaacgaccgcgccgaggacgtcgtccaggcttgctntgaagggaacccattcaagacagttccaggcccatttaagctct

SEQ ID NO: 73309 - DNA, 266 bp, Zea mays
ggccgcattgactatggagagtttgttgccatgatgaccaagggcaatatgggagtcggtcgacggacaatgagaaacagcttgaatatcagcatgagggacgcacctggtgcattctgaaacttaacacgatgtacagcttgtggcctagtcacttcggccctgtttgtttcggcttctggcagcttctggccaccaaaagctgctgcggactgccaaacgctcagcttgtcagccagcttctataaaattcgttgcggcaaaaa

SEQ ID NO: 73310 - DNA, 398 bp, Zea mays
  unsure (1)..(398): unsure at all n locations
cactcgtgcacagtgactgtagtangatatgtattgctgttctattcttaactctagtggagtatgtaggttccagcaggatgttgacctgtngcatagtcacgcgtactgcagctaaagattcgtctcgagctgtaatccggaatcatagttggttcctgaagaaccttcctgctgatctgatggatgatgatagcatgagcaaccaatatgaggagcctgaccagccaatgcagaccatggatcagatcatgcagattttaacagaggccaccataccacctgcctgttctcgcagtataaatgtcctagctgatggactggacatggacgacgacatggatgatcttgattccgactcagatcttgatgttgacagcagctgtgagattgtgtac

SEQ ID NO: 73311 - DNA, 262 bp, Zea mays
gcgagtgatgatttctaggatgtcggtcacagcaacactgcccgcgcgatgatggatgagtacttggaggtggaaatcgacgcgttgacgatcccttccaggacgaaggatgtccccgcgaaacaaccgcactacaaccaggacaagactcccgagtttgtcatcaagatcctccagtttttggttcccctggcaatcctgggcttggctgatgccgttaggatgtacaccaagtcggagtctgcttagcttttgtgcccac

SEQ ID NO: 73312 - DNA, 266 bp, Zea mays
tgccaaggaggctgctagcttcacctcccaagtcatcatcatgaaccaccctgggcagattggcaatggctatgccccagtgctggactgccacacctcccacattgctgtcaagtttgctgagctcataaccaagatcgataggcggtctggcaaggagcttgagaaggagcccaagttcctgaagaatggtgatgccggtatggtgaagatgattcccactaagcccatggtggttgagaccttctctcagtatcctcctctgg

SEQ ID NO: 73313 - DNA, 218 bp, Zea mays
ccccaccttccctacaccgccgccgccgtcgcacgcagccgcatccgccatgggggcgtacaagtatgtctcggagttatggaggaggaagcaatccgacgtgatgcggttcgtgcagcgcgtgcgctgctgggagtacaggcagcagccggccatcgtccgcctcacaaggcccacccgccccgacaaggcccgccgcctcggctacaaggccaagc

SEQ ID NO: 73314 - DNA, 238 bp, Zea mays
atggaatcaacgacgaccaggaggcacgagtcctggaagagaagaaggtgggcgtgaaaggcgtcgggaggaagacgaccgacgagtcggagcacttcagctggagggacggcgtcaaggtcccctgcggcaagctggtgccgtcggcgaacaaggacggcccgctcgagtacaacgagtacgccgtgaacgaccccaagcaggtgagcatctgcttcctgggcggggtgaagtacga

SEQ ID NO: 73315 - DNA, 264 bp, Zea mays
ggtacgtacgtgcagtgcattgcatggctcttctgatccatccatcggtcaatacgaattaaaccgcctctgtggtcttccattccatctgatcgatgctgcagcccgccgaggttgctggtcgacgggccctacggcgccccggcgcaggacttcaggaactacgacgtgctgctcctcgtcggcctcgggatcggcgccacgcccttcatcagcatcctcagagacctcctcaacaacatcaagctggccgacgagctcatg

SEQ ID NO: 73316 - DNA, 265 bp, Zea mays
gcggcggtggcgtgcccgctggccgcgctcctcggctggacccggaccgccttcaggtccgaggccaacaggctccacaagctcaagctcgagacgtgggtcgttccaagatacacctctcagtacctgtccaagcaaggcctgtacgcagtggggcgtgtggtggagaaggcggtggcggacgcggaggcgagtggcgcgagagtactcacgctgggtctactgaaccaggcaaacgagctgaacaaaaacggcgagctgtacg

SEQ ID NO: 73317 - DNA, 233 bp, Zea mays
atcgtgaacccgccgtcgacgcagcagcaggagacgcgccaaggagagcccgcaaggagtcgactatgagggccaagtggaagaagaagcgcatgaggaggctgaagaggaagcgccgaaagatgaggcagagatccaagtaggctgatggggattgtggatggtggtgtcggcatagttgtgttacgtttcttcgatgcgtgagttcatggagagatgtcacatcctagttc

SEQ ID NO: 73318 - DNA, 261 bp, Zea mays
ctgcgtcattacagcaggaggagaagaaactcgtagctgaaactaaaaggacagccaatactggcaatgaggcagcaacgaaaattctagcccgtcagctgatcaggttaaggcagcagatttctaatttgcaaggtagccgagctcagattcgggggattgcgacacatactcaggcaatgcatgccaacacttcagtggctactggtttacaaagtgcgagcaaagcaatgggagctttgaataagcaaatggaaccta

SEQ ID NO: 73319 - DNA, 263 bp, Zea mays
ccccaccttccctacaccgccgccgccgtcgcacgcagccgcatccgccatgggggcgtacaagtatgtctcggagttatggaggaggaagcaatccgacgtgatgcggatcgtgcagcgcgtgcgctgctgggagaacaggcagcagccggccatcgtccgcctcacaaggcccacccgccccgacaaggcccgccgcctcggctacaaggccaagcaggggtatgttggttaccgtgtccgtgtcaaagcgtggcagcagg

SEQ ID NO: 73320 - DNA, 183 bp, Zea mays
ggaagaaccttggcccgacaccatgctcccaatggccgtccaccccaccaccacgccggccttgtccccgcgcgcccgcgtctcgccgcacaggcctcccatctcctccctggcggacccctcgtcctccccctgccatcgcatcgtcagtttcaaaagcaggagcttccacttcggtttttt

SEQ ID NO: 73321 - DNA, 254 bp, Zea mays
cgtcacccttggacccactgtccgtgaaggagagtatgtctttggtgttgctcacatctttgcatccttcaatgacaccttcattcatatcactgatttgtctgggagggaaactctggttcggatcaccggtggcatgaaggtgaaggctgccggaaaagagtggccccttacgcgtgtaacgctggcggctaaagatgccgcacagctctacaaggagcttgccattcctgcactgcacattaagcttcgcg

SEQ ID NO: 73322 - DNA, 259 bp, Zea mays
  unsure (1)..(259): unsure at all n locations
attttcgggataccagagacccagcttaaggtcataatcgaagcttggtcacagattatagaatgcaggcgagtgttgaaatggacatatgcttatggctactatctggatgataagatcaagagtgaattttttgagtatctgcaaggtgaggctgagtctggtttggaacgcctgcatcagtgcgctgagaaagacttgaaaatttnttgccgtctgtgaaatctgacagcactgaaacaacgacacctacagtggc

SEQ ID NO: 73323 - DNA, 258 bp, Zea mays
cggaaatttattgaatattgtattgatggtatggataatctgccaagaactctgctgatgtactacactaacatgcccttgccacacaggaagtattttcagacagttctttgcaactccgctgaattcaacaagactgtagttaaccatgacctacactattcaacatgggatgctcgttccaaaaacgagccacgcctactgactatagatgatgtagaaaatatgaccgaaagtggtgcagcctttgggactaga

SEQ ID NO: 73324 - DNA, 254 bp, Zea mays
ggcagaccgacctcccgttcttactcgctgttgaagatgtcttctccatcaccggtcgtggtacagttgccactggccgtatcgagcgtggcaccgtcaagattggtgacacagttgatatcgttggaatccgggacacccggaactgcaccgtgactggcgttgagatgttccagaagaccatggacgatgccatggctggagacaatgtcggactgctgctccgtggtatgcagaaggatgacattgagaga

SEQ ID NO: 73325 - DNA, 256 bp, Zea mays
accgggacgtgacagttggtgcctactgcctgctgcgctcttgcaccatcgagcccgagtgcatcattggccagcactctatcctcatggaaggttcgctggttgagaccaactcaatcctggaggctggctctgtattgcccccaggaaggcgaattccgactggtgaactctgggctggaagcccggctaggtttgctcggaagctgaccaacgaggagatcatggacattccaaagcttgcaactgccatcaa

SEQ ID NO: 73326 - DNA, 302 bp, Zea mays
gctcaggatgtcattgagcttccatacgcactagctcaggatatcctttacggtgtcatagtggactctatgattagggttcgagtggacgggtgctaagttcttctggtacctcttcgttgtgtacttcacgctgctctacttcacattctacggcatgatggccgtggggcgtgacacctaactaccacatcgccgcgatcggctcctgggcattctacgccatctggaacctcttctccaggatcatcatccgccgaccgatagtgccgatctggtagagatggtactgctgaatatgc

SEQ ID NO: 73327 - DNA, 287 bp, Zea mays
gactattccgcgatctctatattcggtaaggataccagtttgactatgtgttcgactggaccattctgaagtatcctcagataggctccaacctgcggatgatggcaggtgaaaggactagtggagctgctggaccctcgatggacaagattgataaggccacaggagaagcaggcggtataaggaatcttagtggtcctgtgaaccagactgacagttatgcacaacgaccgcgtgagaccgtatctatgtcattaaaggaaattatgcatagcactgaccggtct

SEQ ID NO: 73328 - DNA, 294 bp, Zea mays
gaagccgccgtcgcagcaatcacagcagcccggagaacggccaggtccgacaagatgcagatcttcgtgaagacgctgacagggaagaccatcaccctcgaggtcgagagcagcgacaccatcgacaatgtcaaggccaagatccaggacaaggaagggatcccgccggaccagcagcggctgatctttgccgggaagcagctggaggatggccgcacccttgcggactataacatccaaaaggagtctacgctccacctcgtgctcaggctccgcggtggcatcattgagccc

SEQ ID NO: 73329 - DNA, 323 bp, Zea mays
  unsure (1)..(323): unsure at all n locations
ggagtggcccatgctcgtgcgtangcccttacgtagctcgtaggcgctcgaggatttgagcggacatgaggtgagccattgcccgtggtctgattgctgctagaggtcgatggatgggaggggtgcttgcgaatcgcgtggatcgggacgacctcaaggccgtggatcacatctacacttggcgggccgcctacatctacgcccaccacggaatatatgctggagatggcatgggtatccattgtacaagggcagctggacatgagattggaacaggaacattcttggactggtcctttatagctcctctccggcagcaactg

SEQ ID NO: 73330 - DNA, 296 bp, Zea mays
accggtacgtgacagtgggtgcctactgcctgctgcgctcttgcaccatcgagcccgagtgcatcattggccagcactctatcctcatggaaggttcgctggttgagaccaactcaatcctggaggctggctctgtattgcccccaggaaggcgaattccgactggtgaactctgggctggaagcccggctaggtttgttcggaagctgaccaacgaggagatcatggacattccaaagcttgcaactgccatcaacgatctgatgcaagccattctcggagtcctgcctactcta

SEQ ID NO: 73331 - DNA, 302 bp, Zea mays
gactattccgcgatctctttattcgggaaggataccagtttgactatgtgttcgactgtatcattctgaaggatcctcagataggctccaacccgcggatgagggcaggtgaaaggactagtggagctgctggaccctcgatggacaagattgataaggccacagtgagaagcaggcggtagaaggaatcttagtggtcctgtgaaccagactgacagttatgcacaacgaccgcgtgagaccgtatctatgtcattaaaggaaagtatgcatagcactgaccggtctggggaaaggaccat

SEQ ID NO: 73332 - DNA, 286 bp, Zea mays
gttgccgagatggggatcgtgtccttcgacgggagggtgctcttcgtcgccgctttcctcctctccgcctaccaggagtttaatgaattcggtgctgatggtggaccagcagctaaggcccttcggccaaattcaacgtgtttggcaaaaatgtatctgctcatctgggagtagctgtgccacacattgagttgaagcatgtgattgctgctacgaatggtcttaagggtcttggaagcctcctatttattttgagcagctctctcggagcttatctcctgctgct

SEQ ID NO: 73333 - DNA, 171 bp, Zea mays
ggatgagaagcaagatgctgatgaaggaaaggttgaggatgaactcagagtgcttcttgaccagatccttgaggcgacgcttcctcaagggactccagctgatcgtccttgaggaacagtgtgatcttagtgcccctgccaagctgctcccctgacgtgtctagatcgcga

SEQ ID NO: 73334 - DNA, 294 bp, Zea mays
aaatatatatcgaagaacttttaacgacttttagtagtttccaccaaacgatgtttagctttgtaacggctcacagcctacagcagctcatttcatagctcataacaactttgttcacagaccaaacagacccatagatttgttcgtcacatcacgttcgtgtatggctggccctggccgtttcatgaccgctcgtttcctccgccagcgcagtagcgccgctattgttttttttaaaaaaaacgtgctgcctcgcccactgccagtttcgcaccatgtttgttgtgactttta

SEQ ID NO: 73335 - DNA, 286 bp, Zea mays
ggcaccacggcgcagtaggatggcggcggcggccccgacgagagcagaggtgctgtcgctcttccgttccttactccgcacggcgaagaagttctcggactacaacatccgcgagtacacgcgccgacgcgccgcggactccttccgcgaaaaccgcgccctcgccgatgcgtcggccgccgccgcggcgttctcggaggggaagaagcagctagaggttgcgaagcggcaagcggtggtttactctctctacgcccccaaggccaagagcgtgatggagttgaag

SEQ ID NO: 73336 - DNA, 295 bp, Zea mays
caaatctggagtgtacaagcacatcaccggtggcattatgggtggtcatgccgtcaagttgattggatggggaaccagtgatgctggagaggattactggcttctggcaaatcagtggaatagaggctggggcgatgatggatacttcaagatcataaggggcaaaaatgaatgtggcatcgaggagggcgttgttgctggaatgccatcgacaaagaatatggttccaaacttcggcggtgccgttggaagagctatagtttaattgggtacgtttgccatggctcaaatgctg

SEQ ID NO: 73337 - DNA, 175 bp, Zea mays
ctcggctccagcagacccatgcatcaaccagcatggactgtggatcgatggatgctgttactcctgtcaggatttgtactaagttaatcctaaggaaaaaatggagcttcttggtgctgcaaaaaaaaaaaaaacgtggtcgcaaatcttaataagctactaacccggataataa

SEQ ID NO: 73338 - DNA, 295 bp, Zea mays
tgataatggcaaggtcatcgtcgtcgagtgcgtgctgccggtcaacacggaggccacccttaaggctcatggcgtcttccacgtcgacatgatcatgctcgcgcacaaccccggcggcaaggagcggtacgagcgcgagttccgcgagctcgcaaagggcgccggcttctccgtgttcaaggccacctacatctacgccaacgcctggccatcgagttcatcaagtgaaccaccgtcgccgctatgagatggcatggctgccacatgctttgcttgcttgatcctcgtatcgtac

SEQ ID NO: 73339 - DNA, 296 bp, Zea mays
ctcacatttaattacgaacaaagatccttccttttatatatatatacctgtctgtcagtcttgacttgatcagggaaaagcacgctcgcgtgcgcgctgagccgcgagctgcacggcagaggccacctcacgtacgtcctcgacggcgacaacctcaggcacgggctgaacagggacctcagcttcggagcagaggaccgcgccgagaacatccgcagagtaggtaggccggccgccgtacgctccagcgccagcgccatgcatgtgcagttctgctgatccgttctcgctcgcaa

SEQ ID NO: 73340 - DNA, 294 bp, Zea mays
gtgaatggcgcccattcactttctccctatatctactctctcaacagtaaattcgggcatctgccagacaaagaccgtggtgcaatcaaagaaaaacttgatccttcagctagtggaggaatgaatggttacattgcactctgtggtggggacccgtcccctcctgtcttcagatctcctgtagatgggcttgaggacatcatggataatcaagtgatatgctcaatctacaagcttccagatccacacaagcacatcgctcgtccaccagctggtgtgatcatacccaagaag

SEQ ID NO: 73341 - DNA, 293 bp, Zea mays
tggaaaggttgctgatgtgtggtcatgcggagtgatgccatacgtgatgctgacgatcaccatccctgagataagaaaccatccatggttcttgaaaaacctcctagctgaccaaatggatgacaatacgatgagtaagcagtacgaggagcctgaacaaccgatgcagagcatgaatgagttcatgcagatcctggttgaggcgaccattccagcagttggttcacgtggactcaatcagtttctgaatgatgacattgacctcgacgatgacatggaggacctagactcag

SEQ ID NO: 73342 - DNA, 281 bp, Zea mays
atgatgcttgctcagatattatcttctgaagcaagagaaaggctttcccgcatagctctggtcaaacctgacatagcaagaggggtggaggatgttttgctgagagctgctcaaactggtggaatatctgagaaggtgtctgaagaaagactcatctcccttctagagcaaattaacagccacacaagcaagcaaaccaaagttacgattcagaggcgtcggaatgtccttgacgacgatgattagatgcaacctgcaagtctctgcttcgagtgtactat

SEQ ID NO: 73343 - DNA, 212 bp, Zea mays
ggggtgcccaaagataccaaagatagagatgacatcttagaaagcgagttctttgacaccaggcaggcattccttagcctttgccaaggaaatcattatcagtacgacacgcttcgccgcgcaaagcattcgtcaattatggtgctataccacctgcacaatccaactgcgccagcatttgtcactacgtgcaatgcctgctgccatgatat

SEQ ID NO: 73344 - DNA, 279 bp, Zea mays
  unsure (1)..(279): unsure at all n locations
gcggcgcgngcggacaaggagcaggcggaggaggagctgtgccaagccacaatgtgtatctcacgcgactcgatgcacaagcgccgagccaccggtggaaagcagaaggcctggaggaagaagcgaaagtatgagcttggtcgccagccggccaacaccaagttgtcaagcaataagacagtgaggagggtccgtgttcgtggaggtaacgtgaagtggagggctcttcgccttgatactggtaactactcatggggaagtgaagctgttacccgcaag

SEQ ID NO: 73345 - DNA, 228 bp, Zea mays
gttcagttcagttcatccgtgttcttgtttgcgaggtcgagagagactgagagaggatgtcgtgctgcggagcaactgcgggtgcggctccggctgcaagtgcggcaacggctgcggagggtgcagcaagatgtacccggacatggccgagcaggtgaccactaccaccacccaggctctcatcatgggtgtcgcaccatccaaggggcacgccgagggcgggttcga

SEQ ID NO: 73346 - DNA, 150 bp, Zea mays
ggatgctctggctgacatggtgaggatgaagatctcaatgcctgcccacctgatgtttgacgggcaggacgacaagctgttcgagcacttctccatggtcgcgcagaggcttggcgattacactgccagggactacgccgacatcctcga

SEQ ID NO: 73347 - DNA, 136 bp, Zea mays
  unsure (1)..(136): unsure at all n locations
caaagcggcgcatgggattacgcctacctatcaagcattcacctgttggntactcgatttgaatatcatttagatctgtttgaggttggaacataaatgcagcagtagtttctgtcttattatattggtacctcaa

SEQ ID NO: 73348 - DNA, 254 bp, Zea mays
gcgcctcttcatgagcaagaccaaccgcccgccgctctcgatgcgccgtctcgtcaggttcatggaggggaagggtgatcagatcgccgtgattgtgggcaccgtgaccgacgacaagaggatcagcgaggtgccggcgatgaaggtctgcgcgctcaggttcactgagacagcgagggccaggatcatcaatgctggcggagagtgcctcaccttcgaccagctcgcgctccgtgccccacttgggcaaaaca

SEQ ID NO: 73349 - DNA, 280 bp, Zea mays
aagggcagctttgagaccattcacgtggaggactccctgggccaccagttcgccacccgtatgggcaacgtgttcaccatcggcaagggtaataagccgtgggtgagcctgcccaagggcaagggaatcaagctgagcatcatagaagagcaaaggaagcgggatgccgctgcccaggctgctgccaacgcataaatcctctgaatgtgctgtgttgagagttttttctagttgctctgcaaggatatagaacaatgttctaagactaccatgtttttaa

SEQ ID NO: 73350 - DNA, 270 bp, Zea mays
gagatatatcgtgtgttgaagcctggccagtgctttgccgtgtacgagtggtgcattacggatcactatgatcctaacaatgcaacccacataaggatcaaggatgaaattgagcttggcaatggcctgccagatatcagaagcactcggcaatgtctccaggcagtaaaagacgccgggtttgaggttgtttgggataaggatcttgctgaagattctcccttgccttggtacttgcccttggatccaagccgattctccctgagtagc

SEQ ID NO: 73351 - DNA, 309 bp, Zea mays
  unsure (1)..(309): unsure at all n locations
ggttgacatagngatcaccgacgtagctgaatcgctcaggcgccgcagcgcgcatcgatcgacgccgaaaactaacccctaacgatgtctgtagccggcgaggaggacaagaagcccgcggagtgcggcgcctacatcaaccttaaggtcaagggacaggatggcaatgaggtgttctttcgcataaagaggtccacccagctgaagaagctgatgaacgcttattgtgaccgccagtctgtggacatgaatgccattgcgttcctgtttgatggccgcaggcttcgcggcgagcagacccctgatgag

SEQ ID NO: 73352 - DNA, 292 bp, Zea mays
atgaaattcatcgattctgttaagataccctatcatgcgccttctttcggaggctgtgagagcataattgatcagcctgctatcatgtcctactgggattcaaaggagcagagggacatctatgggatcaaggacaacctgatcaggttcagcattggagtggaggattttgaggaccttaagaatgatcttgttcaggccctcgagaagatataagctccaatccatttgcattaataaagttatgaggtgatgggtgcctggatcttggagagatttgtgatgatacatg

SEQ ID NO: 73353 - DNA, 298 bp, Zea mays
  unsure (1)..(298): unsure at all n locations
gctagcgaggcggatcatcgcgttgaagtcagcgctaccaaaaagattgctgatgcaaagctagctaaagatttccaagcagacctaaaagaattccaganagctcaacgattagcagtagagagagaagctgcatatgcaccttttattactcaagcgggcctgccacagagctacaactcaagtgaagtgaacaatggngctgataagttggcagagcagcgcacgcagcttcttgaatctagaaggcaggagttgatcttcttggacaatgaaataagtgtcaatggagccatca

SEQ ID NO: 73354 - DNA, 306 bp, Zea mays
ctcgactcgaccgccgccgtcccagatcgcttcgcgtcaccgagagctcgtcggcctccgtccccgcgagaagcgagagcgtggacacccaggtgaagcttgctgttgtggtgaaggttatggtcaggaccgggtccaggggtcaggtgacccaggtcagagtgaagttcttggatgaccagaaccgtctcatcatgaggaacgtcaagggccctgttcgtgagggtgacatcctcaccctgctcgagtctgagcgggaggccaggaggctgcgctgaagccctggtggccttggatgtaattctg

SEQ ID NO: 73355 - DNA, 298 bp, Zea mays
  unsure (1)..(298): unsure at all n locations
cagcttccttccacattcgtctcgagatctcgccccgtcgccatggacgcgatcgacagcgaggcggatcccctccgcgacttcgccaaggacagcgtccgcctcgtcaagcgctgccacaagcccgaccgcaaggagttcaccaaggtggcggcgcgaacggcgatcgggttcgtcggcatgggcttcgtcggcttcttcgttaagctcatcttcatccccatcaacaacatcatcgtcggntccggctaggcttacaggagtacagggcgactagcatgtgagtagtgcaatactt

SEQ ID NO: 73356 - DNA, 290 bp, Zea mays
caaaggcacatctcatatacttggtactacaattagtgaggatggatatgtaagcttgtgaggccaggtatttgggatcgatgctacaaagagacggtgatattgatcaagatgctagtcataggatcaaagcagggtggataaaatggcgtcaagcatcgggagtcctatgcgacaagagagtgccacagaagttgaaagacaagttctataggacaacaattagggctgctatgttatatggtgctgagtgttggcctactaagagacgacatatccaacaactaagt

SEQ ID NO: 73357 - DNA, 293 bp, Zea mays
gtccttttctgatgggagttcttctacaggtggggaaagttggcgtttcatgcactcagattcctttgcttgctctagaatatgaaccaccaaggaccaattcatttaaaactgtagaatcatcgctcagggttgatgcccttgccagtgcaggatttaaaatctcacgcacgaagcttgctagcttgataagttctggtgatgttcgtgtgaattggacaccaacaacaaaaaatggagtaccctcaaatctggagatgttgtttctgttagtgggatgtgaaggttaaaga

SEQ ID NO: 73358 - DNA, 270 bp, Zea mays
ccgaggcaccgccccgtgcgaaccggatcgcggacagccggtcgttcccgctgtaccgcttcgtgcgcgaggagctcggctgcgtgatcctgaccggcgagaggctcaagtcccccggcgaggagtgcaacaaggtgttcgtcggcatcaggccaggcaagctcgtggaccccatgctcgagtgcctcaaggagtgggacggcaagccgctgcccatcaacgtcaagtaaagaacgccaaggagaagatgtaggagggtaggaaatacgt

SEQ ID NO: 73359 - DNA, 341 bp, Zea mays
  unsure (1)..(341): unsure at all n locations
ggggttattggcgttgacctaggnatgccgcgtcgaagccgaatcgctcgagatggcatgatgtctatattggcacaggaacaggggaccttgcttctttcgacatgagaatcaggaaattgctgggatgctatattggcaaatgcagtggaagtattagatctattgctaggcatccagagctacctttgatagcatcttgcggactggatagctacttacgtatctgggacacaaacacaagacagttgctatctgctgtctttctgaagcagcaccttacaacggtgggccttgattcacatttttctgttgaagagcctggagagatgaaattcaag

SEQ ID NO: 73360 - DNA, 291 bp, Zea mays
attaaattacgtgtgagaagcatcttccgtgaagcatgtgacggtgttagacttaatccagaagacgagaagtttatcctggagaaagttcttgagcaccacccggaaaagcaatccaaggtgtctggtgaaatcgactacctaacggtcaacaagcaccagactttccaggacactcggtgctttttcgtggtctccacagatggatcccaggcagatttctcctacctgaagtgcctggagaactttgtgaggaagagctacacggaggacgcggacacattctgcatg

SEQ ID NO: 73361 - DNA, 286 bp, Zea mays
ggaacagagccaagaaacaagcccggaagatggcaggcggcggggtggtgaagcacatcctgctggcaagcttcaaggaggaggtgacgcaggagcgcctggacgagctcatccgcggatacgccgcgctcgtcggcgtggtcccctccatgaaggccttccactggggaactgatgtgagcatagaaaacatgcatcaagggttcacgcacgtcttcgagtccacgtttgaaagcacggaaggaatcaaggagtacattgagcaccctgcacacgtcgaattcgc

SEQ ID NO: 73362 - DNA, 246 bp, Zea mays
acctttaactagggactgctagcaagatttgcgaatgatgaagcacattgtgtaagtctatggggacacgatgtccgtccagattaccgtggtctaggttgcctcaagcagaacttccctaggtgcccgatcatggctttaactgcgacagcaactgaatctggccgtaaggacgtcctcggtgccttgaggatccccaacgctgtgggactgaagatgacttcgacagactgaacctcaactacg

SEQ ID NO: 73363 - DNA, 282 bp, Zea mays
cgaggacctggtatctctccgcttatttctctgatgtaagaccaagtgctacagcttacaatgtacaacatcctagcttgcttgcttggatcagcacatgcagaaaatgttctaacagacattaaattaggtaaataccggattgtatacgtaactccagaatactgcacaggtaacatgtgcctgctatagcaacttgaggctgatattggtatcacgctcattgctgtgtatgaggctcactgtatttctgagtggcgcatgattttagtgattcattca

SEQ ID NO: 73364 - DNA, 183 bp, Zea mays
atactatgtactgtagtaataatgtaatggagccgctgactagctacctagctcgctagattactcatgtagcggcgatgagtaacgcagtgtcacccatcaccatgggtggcagtgtgagcaatgacctgaatgaaccattgaaatggaaaggaataatatataaggaaaaaagatgattgg

SEQ ID NO: 73365 - DNA, 334 bp, Zea mays
gttggaacttggtcattcatgcgtacgtgagctagtctttcgcatcgagctcggacatggacgcatcgctgagcaccctgatggctttgagcagcttggcagggtccaataatgatgggcactaccgttgagattccaactggattatgaagaaagcgcaggagcataagagggaattcacagagagccagctgcaggagggatagcatgtcattggccttcagatgggcagcaacagaggggcctcccaggccggcatgacaggctacggacgacctcggcagatcatcagttagagcggagagggctagccctgagcccggcctcccccagc

SEQ ID NO: 73366 - DNA, 338 bp, Zea mays
  unsure (1)..(338): unsure at all n locations
ttggtgttcgatcttganncatcgcgcatgccgcgacgaagctcggacgcggctcgagcgagaatggtcagatacagatcatggtgataacaagctctggcgatgctcttgactccaaagacggtctccagcttcgtaggcttgccctcgcctacaaggtgccaattatcacaaccgtcgacggcgcacgtgcctccatagatgccatcaagagcttgaaggacaagtcgattgagatcctcgccttgcaagattacttccagactgccgatgcttcggcagatttacaagcagcggcacagaccaccccttagtgctgtcttccttttccatgtact

SEQ ID NO: 73367 - DNA, 335 bp, Zea mays
  unsure (1)..(335): unsure at all n locations
tagctgatcttgttcatccncagtctgagctcgaagtagctcgtaggatgaccataacccacgaggatgagaactcggacaccatcgacaatgtgaagtcgaagatccaggacatggggggcatgcagccggagcagcagcgtctgatctaagccgggagacagctgtaggatggccgcaccctagcagactacaacatccaaaaggagagcaccctccaccttgtgctccgtctccgtggtggtcagtaagtcatgggtcgtttaagctgccgatgtgcctgcgtcgtctggtgccatctccatatggagagtgtcgaagtatctgctgctcga

SEQ ID NO: 73368 - DNA, 280 bp, Zea mays
tgttgaacttgttattcctcaacgacgccgaattcgctcgagaccttactctactctctcgcactattctggacgggcgactcgcttctgtgagctaccgtgcttagatccagccatgaggtacagtctccacattcaggttgtgcagtgcggcaaccagatcggtacaaaattctgggatggcgtctgctactagcatggcatcgatcccaccggactctatgtcggcacctgcgacctccagctcgagcgcgtcaatatctactacatcgatgactat

SEQ ID NO: 73369 - DNA, 263 bp, Zea mays
  unsure (1)..(263): unsure at all n locations
gaggtgtacgaggcacgcctgaccaagtgcaagtaccttgctggagacttcctcagcctcgccgacctgaaccatgtgtctgtcactctctgcctgttcgctacgccctacgcatctgtgctcgacgcctacccgcatgtgaaggcctgatggtctggtctgatggagaggccgtctgtccagaaggtcgctgccctgatgaagccatctgcttgaaacggntgccctgtcaatcggtgaatggaataagccaagtctgttct

SEQ ID NO: 73370 - DNA, 278 bp, Zea mays
ctgcgcgacaaggtggagaaggttgaggtctctgaccgcgtggtggactccccctgctgcctggtgacgggcgagtacggctggacggccaacatggagaggatcatgaaggcacaggcgctcagggactcgagcatgtctgggtacatgtcctccaagaagaccatggagatcaacccggacaacgccatcatggaggagctgcgcaagcgcgcggaggccgacaagaacgacaagtctgtcaaggaccttgtcatgcttctgttcgagacggcgct

SEQ ID NO: 73371 - DNA, 331 bp, Zea mays
  unsure (1)..(331): unsure at all n locations
tggcgtttgtactgggnatcacgctacgaagctcggattcggtcgaggattatctttctagagtttctagatgcttgattttgtactctgcttgaatacatcagttcttaacagtttccatggaaagaactagctattatgcctgtgcagtggcatgctttagccctaggattatttgcatcaataatagcaccatttggaggattttttgcgagtggcttcaagagggcttttaaaattaaggattttggtgacagcatacctgggcatggtggaattactgacagaatggattgtcaagtaagtatctcaagaaacgttatagggaaat

SEQ ID NO: 73372 - DNA, 317 bp, Zea mays
  unsure (1)..(317): unsure at all n locations
atggtcgtcggnactcctcatcacgcgtcgaagctcgaattcggtcgagcttcttgcttgctgctgcagtgctgcccagacctcgccatacccctctcccagcagcaggcagcagccatgccaggggaccacgggtccaaggccgacattttcttcgacggacgctactaggacagcgccatcggagcatgcttcgcagacatatggaccatcccgctcgacacgtccaaggtcaggctccagctgcagaagaacgacgtcgccgacgccagctccggagacgctgcgccagcgctccccaagtactcgcgggctgc

SEQ ID NO: 73373 - DNA, 271 bp, Zea mays
cggcggcgaaggtagcggcggtctcaacctcaggcgagctcggcttcggacacccgtcgatccacgcaaccatgtcgaggaggaataccaggtagcccaaggagtagaacgttacccttggacccactgtccgcgaaggagagtttgtctttggcgttgctcacatctttgcatccttcaatgacaccttcattcatgtcactgatttgtctgggagggaaactttggatcggatcactggtggcatgaaggttaaggctgatcgtgatga

SEQ ID NO: 73374 - DNA, 271 bp, Zea mays
aacaaaagcccttgcccacgccatgacgctcagcaagaagcaaggcgcaggcactgatcagcaggccttgctggatgctcagctgcagctctggcaccacaccatcgcttttgtcaagtccatggcgctcaaggccgccgtagacctccgcatagcggacgccatccacctgcacggcggctcagccaccctctcgcagatagtcaccaaggtcacactccacccgtccaagataccatgcctgcgacgcctcatgcgcgtgctcactctc

SEQ ID NO: 73375 - DNA, 242 bp, Zea mays
  unsure (1)..(242): unsure at all n locations
cttgntatcaccgtactagctgaatcgctcagcatatggcaccttgctgacataaggctacaaagaggctaatcacgcatggctggagatctagcataaaaaaggaactacatcccgttcttcaagaaaatgggaagtaccatctcccagcagcaagctacaatctcaatgtagatgagaaacatgcgatgtgtgtttggctcaagaatttgaaagtcccatccggattctgctctagcata

SEQ ID NO: 73376 - DNA, 304 bp, Zea mays
  unsure (1)..(304): unsure at all n locations
caggcatcgactcggtggaggacgatgttgtcatgaagctgtggcggcctaccatgaagctgctcctagtgactcttggagatcaagggtgcaagtactatgccagggatttccatggcgctgtgccttccttcaaagtacaacaagttgatacaactggcgcaggtgacgcgttcgttggtgctctgctccaaaggatcgttaaagatccatcctcgctacaagatgagaagaagcttgtggagtcgattaaattcgtaaccgtgcggagcntcaccaccacgaagaaggggncgatccgtcg

SEQ ID NO: 73377 - DNA, 180 bp, Zea mays
gcagcaggacacatacacatacaagcacattcgtcccatctgcagcctacgcatcaccgcatactggtaacaaggtactgctaaacatcagatgggacgaatgtgcttgtatgtgtatgtgtcctgctgcaagttgtcctttgctatttagaatggaagaagaaatgccttgtttctctg

SEQ ID NO: 73378 - DNA, 270 bp, Zea mays
ctcgactcgaccgccgtcgtcccagttcgcttcgcgtcaccgagagctcgtcggcctccgtccccgcgagacgcgagagcatggacacccaggtgaagcttgctgttgtggtgaaggttatgggcaggaccgggtccaggggtcaggtgacctaggtcagagtgaagttcttggatgaccagaaccgtctcatcatgaggaacgtcaagggccctgttcgtgagggtgacatcctcaccctgctcgagtctgagcgggaggcaggaggct

SEQ ID NO: 73379 - DNA, 180 bp, Zea mays
gaagcaggacacatacacatacaagcacattctgtccatctgcagcctacgcatcaccgcatactggtaacaaggtactgctaaacatcagatgggacgaatgtgcttgtatgtgtatgtgtcctgctgcaagttgtcctttgctatttagaatggaagaagaaatgccttgtttctctg

SEQ ID NO: 73380 - DNA, 303 bp, Zea mays
catcaaatgaatttgttggagacaagactgcgtatgccctgtctcagggactaaaggtcattgcatgtgttggtgagacccttgagcagagtgaggctgggtctaccatggatgttgttgctgcacaaacaaaagcaattgctgagaagatcaaggactggagcaacgtagttgttgcctatgaaccagtttgggctattggaactggtaaagttgccaccccagctcagctcaggaagtgcacgcctacctgagggattggctaaagaccaatgccagccctgaggatgctgaatctactag

SEQ ID NO: 73381 - DNA, 290 bp, Zea mays
  unsure (1)..(290): unsure at all n locations
gaagactacagttacgcaacgaacttctatattctactacgtgctgttgatcgattggctgccaattatagcagattgcctggaatcttcgacagtgagattgatgaggatatccctaggctgaagactgttgcggcttcagtggcaagtgagatgggtttgaatggagcatccttatccgaagacctgataaccgagatgtgccggttcggaggtgcggagattcatccagtggctgcttttgtcggtggagttgcttcccaagaagtaattaagctgntcaccaagca

SEQ ID NO: 73382 - DNA, 249 bp, Zea mays
  unsure (1)..(249): unsure at all n locations
cgtgaacccgccgccgacgcancatgcaggaagacgcgcctaaggagatgcctgcaaggtagtctgactaatgatgtctcaagctgaatgaagaagcgcatgaggaggctgaagaggaagcgccgaaagatgaggcagagatccaagtaggctgatggggattgtggatggtggtgtcggcatagttgtgttacgtttcttcgatgcgtgagttcatggagagatgtcacatcctagttcgtctgcacc

SEQ ID NO: 73383 - DNA, 258 bp, Zea mays
atcgtccacgtcccagtctgccaggactctagggtcagaagctgcagcgtcgagatggtgaaggggcgcacggtgcagctcgtgaggctctacgtccggtcaccgtccttggatacaagcggtccaagtcgaaccagttcgagactacgtcgctggtgcagatcgagggggtgaacaccaaggaggacgtcgcgtggtactgcgtgaagcggatggcctacatctacaaggccaagaccaagagcagcggcacccact

SEQ ID NO: 73384 - DNA, 307 bp, Zea mays
cagaaggccggcctgtttgtacatatctgcatcggtccctacatttgtggcgagtggaacttcggatggccatgcagggtttcactcagaaaattgtgggaatgatgaagagcgacaacctcctatgcatcccaaggtgtcccaattatcctctctcagattgagaatgaatacgggccagaaggcagggagtttcgtcccgcaggtcaggcatatatcaacaaggcagcaaagatggcagtcggattgtgactgccgtccgtgggtgatgtgaacgaggcggatcacctgaccagtgggcacggat

SEQ ID NO: 73385 - DNA, 294 bp, Zea mays
ggaagttcagttcaattgccccttgtgtggaatattcaagtgagcacatggctacgatactatgtctatgagaggctaattcagaaaggaaagaaaccaggtttccttcaattgttgggtacacagacagtcagtgccatctggcatggactatatcctggatatatcatattctttgttcaatcagcattgatgataaatggttcacgagttatatacagatggcagcaagcagcgagcagttcattactaagcggtatcctggcctttctaaatgttgcttatacattgctg

SEQ ID NO: 73386 - DNA, 290 bp, Zea mays
cgcgaccagactggacaccattatgaaaaccatagcaggggaccccaatggggaggctgtaacgccggttgactatggctcgggcttcatggctcccatcaaagctctcagcccagggatcatgtttgatacacatcctgaagactacaagccattcttatgtgccataagccgcgatgaccactccgtgcatctaattagcggagacaatagtagctgcacccacagagcgtcctcttctgccactgctctgaactacccatcgatcaccattcgcgatctgaagcaga

SEQ ID NO: 73387 - DNA, 280 bp, Zea mays
tgaagagcttcatgctagctgggaccagccaacaaagtgcatcgtattccatagtgtggaccaaactaggcttcaggggctactcttccagatggcagataagctctcggtcctggaggagatcaatgagagggcatacgaggcaagaactggtggtactctcgaggggggacctcccatgcgcaggggcgagggtcaggataatatgggaaagtggcaggataactttggctcggcacaagggcggcagggtggtggcaacaggttggtactccggaga

SEQ ID NO: 73388 - DNA, 282 bp, Zea mays
ccgacgcccatctgcttcaccctgcacccagccgccgccgccgcctaagggagaagagggtccggccgtctccttgccccgatggcgtccgagatgaagcagtccaacccgatgcgggagatcaaggtgcagaagctgggcctcaacatatccgtaggggagagcggcgaccgcctcacccgcgccgccaaggtgctggagcagctcagcggccagacccccgtcttctccaaggcgaggtacacggtgcgctcgttcggcatccggcgtaacgagaagatc

SEQ ID NO: 73389 - DNA, 226 bp, Zea mays
  unsure (1)..(226): unsure at all n locations
gagcttcgttcgttcagttcatccgtgttcttgtntgcgaggtcgaaagagagaggatgtcgtgctgcggaggcaactgtgggtgcggctccggctgcaagtgcggcaacggctgcggagggtgcagcaagatgtacctcgacatggctgagcaggtgaccaccaccacccaggctctcatcatgggtgtcgcaccatccaaggggcacgccgagggcgggttcga

SEQ ID NO: 73390 - DNA, 145 bp, Zea mays
cttactctagagtaagtcgactaatctctagagtacgcagatccatctctaaagacttatctacttactctagactacagactacgtagatttttcataaacatctaccccaatccatctcacaatatcacgatcaatctctatt

SEQ ID NO: 73391 - DNA, 320 bp, Zea mays
tatcgtagttatcaagcgacgtaagctagtcgtgcgcttctaggaagaacgtatacgtgcagtggaaactggaggctgccctcatgcggctattcgctaagacatcagcataaatcttggtcctctggagtagctatcgaacttgtacaaagctgatttgctactctgtgaatctggagtagataacttggcagctaacttcagcagagaattagcagactacataatctacattatcgatgtctctggtggggacaagataccaagaaaaggtggccctgggataacccaggccgatctgttggaaataaacaggacag

SEQ ID NO: 73392 - DNA, 107 bp, Zea mays
  unsure (1)..(107): unsure at all n locations
cgaggtcgtggactgcctgagtgctgaagcngagaggaggatcgacgctagcagtcgcttatcttaattgccttgatgttcaatgatgaatcgatcgaattcccttg

SEQ ID NO: 73393 - DNA, 232 bp, Zea mays
aagtttggcattaaaagaagcatttcagcattgatgcgtacagaataaattcagatccacatgacataatggcagaggtctacaaaaatgttcctgtagaagttgctttcacagcttacgaggatttcgcacactacaaatctggagtgtacaagcacattaccggtggcattatgggtggccatgccgtcaagatgataggatgaggaaccagtgatgctgtagaggatta

SEQ ID NO: 73394 - DNA, 281 bp, Zea mays
ctggtattgtactcgactctggtgatggtgtgagccacactgtgcccatttacgaaggatatgcccttcctcatgccattcttcgtatggatcttgctggtcgggacctcacagactctctcatgaaaattctcactgataggggttactccttcacaacctcagccgagcgagagattgtaagggacatcaaggagaagctagcatatatagcccttgactatgagcaagagttggaaactgccaagaacagctcttcagttgaaaagagctatgagcta

SEQ ID NO: 73395 - DNA, 320 bp, Zea mays
tatcgcgcgtggatatctcgcgtacgtagctcggattcgctcggctgtgtactaggatgtcaatcgcactgggagctgctaaagggcttgcttgccttcacaatgctcaaaggcctgtcatttacagagatttcaagacatcaaatattctactggactctgacaatactgctaagctgtctgactttggcctggcaaaagctggccctgaaggtgatcagacccatgtatcaacacgggtgatgggaacctacggatatgctgcccctgaatatgtgatgaccggccacttgactgctataagtgatgtctacagcttc

SEQ ID NO: 73396 - DNA, 273 bp, Zea mays
gtctccattgtagaaaataacatttagacagcaaattgtaatatggtgggccggactgatgagaggtgccgtgtccattgctctcgcttacaacaagttcactagatctgtacacactgagctgcactggaacgcgataatgatcaccagcacgatcactgtggtcctgtttagcactatggtgtttggtatgatgactaagccattgatccggctgctgctccctgcctgcagcaacacggccaccttcgagccgtcctcacccaagtccct

SEQ ID NO: 73397 - DNA, 329 bp, Zea mays
gtgtcgttgctctttcacgtaggcacgacgacggctgcttaaacttcgcatccagcgcgtatgccagtcaagagacgaatggacctgacgggaatcccattggtccttggatgggcaatccgaggatctacctatatcctgaaggcctaaaggatctgcttatgatcatgaagaacaaatacggaaacccaccgatctacatcactgagaacgggatgcgtgacgctgaccatggcgatctacccatggaagttgccttggatgaccacaaaagagtacattaccttcagcgccacatcgcaactcttaaggagtcaagagacttggga

SEQ ID NO: 73398 - DNA, 264 bp, Zea mays
ggcggtctctccaccaagcttttcgtggacctcctcctgctcgtttgttacaccgggacgcaaggcgggccggtgactatggtgtcggcgaggaagtgcgagtcgcagagcttccgcttcaagggaccttgctcgagggacgccaactgcgcaaacgtctgcctgaccgaaggtttcaccggcggcgtgtgcaagggcctacgccaccgctgcttctgcaccagggactgctagtactgcctcgtctcgcctcgcctcggctcg

SEQ ID NO: 73399 - DNA, 266 bp, Zea mays
caggaagagagacgacggcggccatggcgacctccttccaggggacgaccaccaagtgcaccgactgcgacaagactgtgtaccttgtggacaagctcaccgccgacaaccgcatctaccacaaggcctgcttccgctgccaccactgcaagggcaccctcaagctcgccaactacaactccttcgaaggagtgctctactgcaggcctcacttcgaccagctgttcaagaggacagggagcttggacaagagcttcgaaggaact

SEQ ID NO: 73400 - DNA, 180 bp, Zea mays
gcagaagcgacatgacgaagggtacgtcatcgtttggaaagcgtctcaataagacgcacacgttgagccgccgctgtggctctaaggcctaccagcttcagaagtcgacctgtggcaaatgtggctaccctgccaagcgcaagagaaagtataactggagcgccaaggctgagcgtgcag

SEQ ID NO: 73401 - DNA, 277 bp, Zea mays
gaaagagtctgactacagtccagggtctgaagaaagagttcagctataacaagatcctcaaggatctgaagaaggaattctgctgcaatggtactgtagttcaggacccagagctaggccaggtcattcagctccaaggtgaccagcgcaagaatgttgctactttcctagttcaggctgggattgcgaagaaagagaacatcaagattcacgggttctaagggacctgtaaatgcttgtgccctatattgtgtgcctccacatattggggagcttg

SEQ ID NO: 73402 - DNA, 252 bp, Zea mays
cctgaaccagaagcgacttatcagctccttacgaatccagctcgcgtgatccctgcccagtagaagttcatcaagctccttgaaaacagccgatatgtacctgtgaaaccagcgccttctggattcatcctcctccgagacctgcagccgactgaggctgaggatcttgcgctgaccgatgcccccacaacagtcgcaggaagcaccggcaacactgcccctgctgcaggccaacaggggtcaggatcatca

SEQ ID NO: 73403 - DNA, 241 bp, Zea mays
tattgatggccactgcaaggagggtaatgtggagagggctctttctctgcacgataaaatggtaaaggcaggagttcttcctgatgttgtgacttacagtgtgcttattaatgggcttagtaaatcagcacgtgctatggaagcacaacagttgctcttcaaattgtaccatgaagagccaattccaacaaatactaaatatgatgccctgatgcattgttgtagaaaagctgacttaaga

SEQ ID NO: 73404 - DNA, 275 bp, Zea mays
ctgtgtatccatcctgacaaggtgcagcaaaagggtgcaaatctccaacagaaatatatcgctgagaaggtttttgatctccttaaggaggcgtggaacaaactcaactctgaagagctcttctaaacagcctcacgactgaacatagcgtcgcccctcagggtctgcacaaggtactctcggaagaaactcacaagctggagtggcttgaggttggtcggggggaaaccgtgaagcgaccaagcgaaacctggactatggttggaatcaccgat

SEQ ID NO: 73405 - DNA, 244 bp, Zea mays
catccagagctaacactgggtggtccatgctggcgctgattgatgcatgacaggcgcagagagattccgcgcctctacaccgagcagcaagggttatgatcaacttgcagtcagaggacggagaatttccccagcaagagatcataggagtgttcaacaagaactgcatgatcagttactcccagtacaggaacaccttcccgatctgggctctgggagagtaccggtgccgagtcctggcggc

SEQ ID NO: 73406 - DNA, 262 bp, Zea mays
aaacaaaaaccactcatcaggcgagacgcgagaagatcaatgcgaggatggagctgctcaaggagctggtccccggctgcagtaaggcatcaggaacagcgttggcgctagatgagatcatcaatcatgttcagtctctccaaagtacttgtcaatgaggcttgcaactgtaaacccgaggggcgattttggtgggctagatagctttctgaccacggagataaatgtatcattagagtatcatggctggcccacatattac

SEQ ID NO: 73407 - DNA, 261 bp, Zea mays
agaacattagcttcacggtctgagatgtcgggggtcaggacaagatcagacctctctgtaggcattacttccagaacacacagggtcttatctttgtcgtggatagcactgaccgtgaccgcgttgttgaagccagagatgagctgcacaggatgctgaacgaggatgagctacgtgatgctgtgctgcttgttttcgccaacaagcaagatcttcctaatgccatgaatgctgctgagatcactgacaagcttggattac

SEQ ID NO: 73408 - DNA, 225 bp, Zea mays
tgaacttttccttaacttagtcatggagtttgtttcagaacgcgataaagtgactctggaacaaactccatgactcacttgaggaaaagttcatccctacttgtggtagagaagaaacaatgcttcagggaaatgacattgcaatggtcaattgatcgcattatgtgtaactccctatcctggatctttgccctgtagaaccttcttaatgaacagttcaccagt

SEQ ID NO: 73409 - DNA, 184 bp, Zea mays
tgacactgcaccagaccacccggctccagcgagatccagacccaaaacctcacctcgcagccaacctctgctcggaggggaagggaagggaagggaagcaatggcggccaacggaggcgggtaccgggcggaggacgactacgactacctcttcaaggtggtgctcatcggcgactccggcgtc

SEQ ID NO: 73410 - DNA, 223 bp, Zea mays
agcgccacctacaccgagcagccaagcgaggaagcgaagacccatttccccgagcgcctgagtaccatggcggcggcggcagattatggcggcctcaaggggaagcttggcgtcgaggatgcccccgagctgcagctgaatcgcatccgcatcaccctctcatccaagaacgtcaagaacctggagaaagtttgtgcggatttggaaaagggagccaaggata

SEQ ID NO: 73411 - DNA, 140 bp, Zea mays
ggaggaccagatccagcgggacctagccatgaacaagttcgactgggaccacccgatgcacctgcagccgacgagcccgacggtcgtgaagcaggtgagctgcgtgtgggacgcgtacgaggccaccaagggcgcccacg

SEQ ID NO: 73412 - DNA, 250 bp, Zea mays
atcaactcggcggccctcaagttgctactccgaagcagatcagggaggtgatgaaggcggacgggcttacaaacgatgaagtgaaaagccatctccagaagtaccggctgcacaacagaagatcccccggcgtcgtggctccggtgagccagtcggtcatgctggcgggcggcctctgggctcctcctcatcaggagcaaagcagctcgcagtccgggtctccccagggcccgcttcagttctctggatc

SEQ ID NO: 73413 - DNA, 235 bp, Zea mays
gaaggcggcgcagctggcgctgaaggcactgggcaggcccaacgccgtggacggtaccatccccgaggtgtcgccggcgctgcgcgaggagttcgtgattgcgtccaaggacgacgaggtcgtggacgcctgagcgagcattcacgcgccagcatgcaagcagcgtcttatctgggccggcgccatcacggtgtctcttcttttaatctgggactttgttgttgtgggacgaatg

SEQ ID NO: 73414 - DNA, 241 bp, Zea mays
gcgcgagatcatggatcggaatcctgatcttgcccatgtgctcaatgacccaagtgaccttcgccaaaccctcgaagctgctaggaaccctgaaatcatgagagagatgatgcggaacacagacagagctatgagcaacattgagtcctctcctgaaggttttaatatgctccgtcgcatgtatgaaactgtccaggagccatttctaaatgcaacaacaatgagcggggaagggaacaca

SEQ ID NO: 73415 - DNA, 259 bp, Zea mays
  unsure (1)..(259): unsure at all n locations
gatttagctgaggaagtctanaactgccaagaatggactggaaagaagagggtacaaggaggttggtttccttagagaggtcgacgaagtagtgagaacaggagtgacgcctgcagagaggctgctgaacctgtacgagaccaagtggcaacgcaacgtcgaccatgttttcgagcatttggtatactgattactgaggatgacgccgccgaacgacgttggactgagcttgtagatgtaccccgtaccctaatacaga

SEQ ID NO: 73416 - DNA, 227 bp, Zea mays
caggtgtatcaactattcactgattaccaaattaaagatgggcatgttattctgcaactgaatgcgaatccctccagtgatttgctctgtgtacgaatccggatatttgaactctttgaagattggtttctcagtcctgccactttcacagtgtacgaataccgcagaccagataaacagtgtaccatgctttatagcacttccaatatcaacaatcagaaagtctg

SEQ ID NO: 73417 - DNA, 177 bp, Zea mays
atagttagcctcgagctccaccgacgcccagatctgttccttctctcttccacgccgccgctcgcgccgtcgctctcgaattttcgaatcctcagcaacaatcggccggccgccatgagggagatcctccacatccagtgcggccagtgtggcaaccagatcggtccaagttctggg

SEQ ID NO: 73418 - DNA, 276 bp, Zea mays
aagaaaagcacgaatatgctatatgtcatctcgaagccagatgtgttcaagagctcacactcggacacctatgtcatattcggcgaggcgaagatcgacgacctcagctcccagctgcagacctaagctgcagagcagttcaaggctcctgacctgagccaaatgatcccgaagcctgagacatctggcctgggcctggaggacaacgaggaggaggagggtgacgaaactggtgtcgaggccaaggatgtcgagctggtgatgactcaggcatct

SEQ ID NO: 73419 - DNA, 285 bp, Zea mays
  unsure (1)..(285): unsure at all n locations
gttgtcagggtattgatatcaaggaaatgctagctggtgcagctttaatggatgaagaaacccggaacactgtggttaaagaaaatccagcagcattgcttgcattatgttggtattgggcatcagaagggataggcaataaggatatggntgtacttccttacaaggatagtttgttgcttttgagtagatatttgcaacaacttgtcatggaatctcttgggaagaattgatctggatgcaaccggtaaatcaaggctatctgatatgaaacaaagaagactg

SEQ ID NO: 73420 - DNA, 316 bp, Zea mays
  unsure (1)..(316): unsure at all n locations
gtcgttggcatgccgcgtcgaagctcgaattcgctcgagttccttgaaccacagatacatgccggcataaatcgcttccaaatcgatatggnacgtaacgtttcatctgctattccatgtagaacaaaatggatattggattgagagtgggccacggtcacccaatttattcagaaactagcttcaataagttcttgctttcttgcagtcgatgtacccaatcttggagaggctccatgatgcatacatgcaaattcccgcattccaagccgcgcttcctaaaaatcaaccagacgcaccttcatcataatcatca

SEQ ID NO: 73421 - DNA, 217 bp, Zea mays
ccagttcgcttcgcgtcaccgagagctcgtcggcctccgtacccgcgagaagcgagagcatggacacccaagtgaagcttgctgttgtggtaaaggtgatgggcaggaccggctccaggggtcaggtgacccaggtcagagtgaagttcttggatgaccagaaccgtctcatcatgaggaacgtcaagggccctgttcgtgagggtgacatcctgac

SEQ ID NO: 73422 - DNA, 214 bp, Zea mays
gtgaagggacgcacgggacagcgcgacaggctctacgtccggtcaccatcctcggatactagaggtccaagtcgaaccatgacgagaccacgtcgctcgttcagatcgagggggtgaacaccaaggaggacgtcgcgtggtacgctggcaagcgcatggcgtacatctacaaggctaagaccaagagcagcgagacccgctacaggtgcatctg

SEQ ID NO: 73423 - DNA, 231 bp, Zea mays
ctatttacaccggtcacgcttttgacgcgcgcgtatcttactctattatattgcacgatggtacaacactacatatgtacacagctcgatcgcctgatgtcgagttacacacactgacacgttctgagccgtcacattgacacgacggtacttcgcaggctacctacatggacgtaggtaaagcgtgcgctgaggtacagagctagctagcgaactaaaaacaaatgacga

SEQ ID NO: 73424 - DNA, 267 bp, Zea mays
tttggcttcaaggtgtgctgagtactataagcagggggcccgcttcgcaaagtggaggactgttgttagcatcccttggggtccatctgcattagctgtgaaggaagcagcatggggacttgctcgatatgctgctatcgctcaggataatgtcttagtgccaattgtggagccagagatccttcttgatggagaccatgggatcgaaaggactctcgagtggcagagaagtgtggctgaggtgtcttctactgcccagacaatgtc

SEQ ID NO: 73425 - DNA, 281 bp, Zea mays
  unsure (1)..(281): unsure at all n locations
cgatccttcaagcgcaagctgcctcctcctcgtcgtccggtcgtgagaagcgatggcggtccgtggcaaggctatcggcgctggcgccgcgaagaaggcaacgtcgaggagctccaaggccggactccagttccccgtcggcaggattgctaggttcctcaaggcgggcaagtacgctgagcgcgtcggcgccggcgcccccgtgtacctcgccgccgtcctcgagtacctcgcggctgangttctcgaacttgccgggaacgccgcgagggacaacaaga

SEQ ID NO: 73426 - DNA, 287 bp, Zea mays
aaaatccccattcgatccccttctcgcctccacgagccttcacaaattgccctctcagatcttctcctaatcttactcaagccctagccaaatcccagacccatcccagccctagcgacaccaaccagctcgccagcgaccatggggaacccggagaagctgatgaatcagatcttcgacctcaagttcacctccaagtcgctgcagcggcaggcgcgcaagtgcgagaaggaggagaaggagcagaagctcaaggtcaagaaggcgatcgagaagggcaacatgga

SEQ ID NO: 73427 - DNA, 321 bp, Zea mays
tggaccttggaatgccgcgtcgaagctcgaattcgctcgaaggcatccccccggaccagcagcgtctgatcttcgccggcaaacagctggaggatggccgcaccctagcagactacaacatccaaaaggagagcaccctccaccttgtgctccgtctccgtggtggtcagtaagtcatgggtcgtttaagctgccgatgtgcctgcgtcgtctggtgccctctccatatggaggttgtcgaagtatctgctgttcgtgtcagtgttgggttaataatggaccggttgtgttgtgtgtgcgtactacccagaactatgacaa

SEQ ID NO: 73428 - DNA, 224 bp, Zea mays
gaaacagaaggtcatcaatgagtgctctgaagtagagaactggttgagagagacgaagcagcagcaggacgccctacctaagcacaccgatcctgtgctgctcgtatcagatctgaagaagactgctgaagcacttgacaggttctgcaaaccgatcatgactaaaccaaagccagctccgaagccacagactccgccaccacatactccacctccacagcctg

SEQ ID NO: 73429 - DNA, 194 bp, Zea mays
cactcttacaactacaacaattgttgccctttgtccaacttgctgtgacagacccagcggtctgctaccaacaacacatcattggtggtgccctcttttagattgcttattagttgtaattcaataataaagttttttggatgatgtatgtggccaaccagaaataagaagttacatttccagattctaatgtg

SEQ ID NO: 73430 - DNA, 305 bp, Zea mays
gatgatgtgcttcatgccgcgtcgtagctcggattcgtctcgagagaaaggcaacctttgagaccatgtggcttgaaacgttgatggctcttattgaggagcagctcgatgaaacagaggacatttgtggaattgttgctagtgtccgtgcaagaggagataagctggcattatggactaggactgccagcaatgaagctgtccaggtaaacattggcaagaagtggaaggatgtcatcgactacaacgacaagatcacgtacactttccatgacgactctaagagagacaagcccagcagaggt

SEQ ID NO: 73431 - DNA, 228 bp, Zea mays
ggccaccaccagcgggcgggctccagtcgcaactcgcaacacagacgctgccgccgaccatagaaagacgtcaactccaggagactagatagtgagaactgaagagaaggatgggcttcgagaagcagatcctgagatccggcaccggctcccaagccgataaagggccagaaggtcaccgttcactgcaccggctacgggaaggatcgtgatctgtccaagaaattt

SEQ ID NO: 73432 - DNA, 262 bp, Zea mays
cgatcctcgctccacggccatggtgaggatgaagcaggtaaagatctcggtaaagaaggacgtggattcgtacacaatccgcggcaccaacaaggtcgttcatgtgggcgactgcgtgctgatgcgggcgtcggactcggacaagcagccgtatgtggcgcggatggagaagatggagtccgacggacgcggcagcgtgcgagtgcaggtgcgctggtactaccgccccgaggaatccaaggggggtcgtcggcagttccac

SEQ ID NO: 73433 - DNA, 140 bp, Zea mays
acaagatatccaagggtttgcttgacaagtatggccccgatagggttctcgatactccgatcactgaggcgggcttcactggcattggtgttggtgccgcttaccatggtcttcgacctattgtagagttcatgacattt

SEQ ID NO: 73434 - DNA, 161 bp, Zea mays
gtggcatagggacctgtgcagggtctgtgaaaacatccccattgtcctctgcggtaataaggttgatgtgaagaacaggcaggtcaaagccaagcaggttactttccacaggaagaagaatctgcagtactatgaaatttctgccaagagcaactacaact

SEQ ID NO: 73435 - DNA, 224 bp, Zea mays
gaagtttctgcaggacctagtgccaggatgcaacaaggtggttggcaaggcactcatgctcgatgagatcataaactacgtccagtcgctgcagcagcaagtcgagttcctgtccatgaagctcgccactgtgaccccacagcttgacttcagcaacctgtcgacactcctacacagagacatgtaccaccatgtggcctcttcgcaaattcggtctttccact

SEQ ID NO: 73436 - DNA, 214 bp, Zea mays
tttctcttatggtgacctggctaagagggtgctgaggcgctttggtccaactgagctctctgttgccgtgaccatcttcggtgatcgggacaatgcgatgacctggcggacgaaactggatgctgaggcctatgcttgcagcaacatggctgagcaggagctgccgattggtggcttgctcatctatcagagcttcactgttacggccgaaacg

SEQ ID NO: 73437 - DNA, 127 bp, Zea mays
tagagataatccccaagctaacaaacagggtatagggagaggagactagaggagaggagagtttgggtctgggacaccatggctccgatgaagctgtacggttcgttgatgtcgtgaaacgtgacga

SEQ ID NO: 73438 - DNA, 312 bp, Zea mays
  unsure (1)..(312): unsure at all n locations
ttgctcatgantcntttgctcgcagtccgcatctagatgttcggctctagcgtgtagggcacagttaatccattctgatgtgtgttcgtctcgactgtggaaaacctcggatgattcagaatggcttcattaaaggtgaaaactttgaagtagggtccatggttcagtttttctgtaatgagggctatgagcttgttggtgacagttcttggacatgtcagaaatctggcaaatggaataagatggcaaatccaaagtgcatgcctgccaagtgcccagaggcgcctttttaggaaaccagctagtattaaa

SEQ ID NO: 73439 - DNA, 258 bp, Zea mays
gccgaggatctcggcatggcccagaggccggtggcgccagcgaagaagaccaggcgcgtgcctaggtcgcggagctcgcagtacaggggcgtcaccttctacaggaggacgggccgctgggaatcgcacatctgggattgcgggaagcaagtctacctaggtggttttgacactgcgcacgcagccgcgagggcatacgatcgagctgcgatcaagttccgcggcctcgacgctgacattaacttcagtctgagcgac

SEQ ID NO: 73440 - DNA, 160 bp, Zea mays
  unsure (1)..(160): unsure at all n locations
gacaactgttcatgccatcactgccacccagaagactgttgatggaccctcagccaaggactggagaggtggcagggctgccagctttaacatcattcccagcagcaccgntgctgccaaggctgtcggtaaggntcttcctgaattgaatggcaagctc

SEQ ID NO: 73441 - DNA, 260 bp, Zea mays
cgccatcgctgggtcatccacgtcgagcggatcacccgcgagaaggtgaacggctccaccgtgaacgtgcgcatacacccttccaaggtgatggttacaaagctgaagcttgacaaggaccgcaaggctctcctcgaccgcaaggcccggtgccgcgccgccgacaaggctaagggcaagtttactgccgacgacgtcgccgccgctgctggtggcgccgccgccactggcgcgtctctccaggagatcgactaggcgct

SEQ ID NO: 73442 - DNA, 131 bp, Zea mays
aagcaccacaagcacatggagcagctcggtcagctcggcgccatcgacgccggcgcgtactctctgcacgagaagcacatggccaagaaggacccggataactagcacggccaccgggtcaaggaggaggt

SEQ ID NO: 73443 - DNA, 263 bp, Zea mays
ggacttcgagctagagatggccacggctgcttccagctcctccctggagaagagctacgagctgcctgacggccaggccatcaccattggcaatgagcggatccgctgccctgaggcactcttccagccttccttcctgggcatggagtcctgtggcatccacgaaactaccttcaactccatcatgaagtgtgacgtggacatccgcaaagacctgtacgccaacacagtgctgtctggcggcaccaccatgtaccctggca

SEQ ID NO: 73444 - DNA, 258 bp, Zea mays
ggttctccctcgctccagatctcccttcgcagccggccagggaccccttcacagcgcgtgtgatggctgatcaggaggccccagttgcagttgaggcaccaaccccagttcttggagagccaatggacttgatgactgcgctgcagctggtgatgaagaagtcaagtgctcatgatggacttgtgaagggtcttcgcgaggctgccaaggccattgagaagcatgctgctcagctttgcgttcttgctgaggactgtg

SEQ ID NO: 73445 - DNA, 261 bp, Zea mays
agaggcctgacttctggcagatcgtgaaagtgctggaacaggtccactccgatctcttggagggtggctgcctcgacacaccgaagagcggccccggcacctgccaggatcccaagaagcggctcatgcggtggattcagaaactgaagccgaagcatagcacctgagttaccaaactcttataggtgtagcatcgttgcagccgcagtttttgtcaggttgggtatgctcagtagtttaatctcgattcaaggaaccagc

SEQ ID NO: 73446 - DNA, 272 bp, Zea mays
catcttccgtaacaagcccatcgccgtcataggcggcggcgactccgctatggaggagtccaatttcctcaccaagtacggctcccacgtctacatcatccaccgccgcaataccttccgtgcttccaagatcatgcaggccagggcgcttgagaaccccaaaattaaggtcctctgggactcggaagttgtcgaggcctatggcggcgcaaacggcggcccattggctggcgtaaaggttaagaacctactgaatggtgaggtctcggatc

SEQ ID NO: 73447 - DNA, 312 bp, Zea mays
  unsure (1)..(312): unsure at all n locations
tgtacgtgantcgatggcacgcagtacggagctaggtgttaggctcgagattttccggcccgaaaccgaatgcacccgcaccaatctctgcgtctcttcgtattcggctgcgcgacggctgcagcgccggaggatgccgaggagatgctgtccggcgacatgcccacgagcctgaccatctacctcaacaacctcaacgagaaggtcaagaaagaagaattgaagagatcgctttatgccttgtgctcacagtatggaaggatactggatgtggtggccctgaaaacacaataactgagagggcaagcatgg

SEQ ID NO: 73448 - DNA, 251 bp, Zea mays
gactaaaccagaccaccaaacaagtgccagcgccctgtcgcagtcgccgcaatggagagcaccttcatcatgatcaagcctgacggcgtccagaggggcctcattggtgagatcatcagccgttttgagaagaagggcttctacctcaaggccttgaagcttgtcaacgtggagaggtcgtttgccgagaagcactacgccgatctcgcctccaagcccttcttccagggcctcgttgactacatcatctc

SEQ ID NO: 73449 - DNA, 192 bp, Zea mays
aaggaatcaaacctgttacctttgaacttggaggacgatctgcactcatcatcttcacagactgtgatatgaacaatgctgtaaagtgggcgctgatggccatacttcctgacacaaggccaggtttgctggaatggcacaagagtatttgtgcagaacgaaattcttgatagattacagaggaagtggtga

SEQ ID NO: 73450 - DNA, 260 bp, Zea mays
gttggcaagcagccagcttttcatcaattgcgatcagctgagcaacttggctacatagcgcttcttaggctaagaaatgattcaggtgtccgtgggttgcaatttataatccagtcaacggtgtaggatcctgctaatctggatgccagagttgaaaattttctcaacatgtttgaaagcaatgtctacaatatgtctgatgcagagttcaagagtaatgtaagtgctcttattgatatgaaactggagaaatacaaaaa

SEQ ID NO: 73451 - DNA, 249 bp, Zea mays
tgcatctgttgatgatgctgctgtcattgaagagcttattgcaaagctggaagcaatttctaaaacattgccaccaggattccatatgaaccctatacagtttgagaaggatgatgataccaatttccacatggacttgatcgctggctttgccaacatgcgggctaggaattacagcattcctgaagttgacaaattgaaggcaaagttatagctgggagatcatcccaccatcgcacctaactgaat

SEQ ID NO: 73452 - DNA, 236 bp, Zea mays
gtgcttcggtatcatcactcagctggagttctttcatggccaggcgcctgactccatgaagagcattttaacggcatttgcattgctcaccactgctcttgggaattacttgagctcagctatcatcaccctcgtcgcaggggtgaccagggtatggcatagccctggttggataccagatgatctgaacaaaggacaccttgactactactactggtgtcttactaccctctcat

SEQ ID NO: 73453 - DNA, 247 bp, Zea mays
ggttgctgctggggactctggcgctgcagctgctcccaaggaagatgagaaggctgcgtatcctgaagaggagtcggacgaggaaatgggcttcagcctcttcgacgactagagctgctgttttcgtcaaactgctgcaagttttggcttttttgtttatcatctacaagtactgtttcctatattttttagcagacaaattatcgtgtgtaatcgacaatgatatctccttaaatgttaagtacct

SEQ ID NO: 73454 - DNA, 257 bp, Zea mays
ctcctcctcctactccaccctcgtccgtcctcttacggcgcgcgagctcgcccgagatggcgaacgcgagatcggctgtcgctgtgaacgatgagtgcatgctgaaggttggcgagctgcagccgaagaggctgcaccgcttcataactttcaagatggacgacaagttcaaggagatagttgtggaccatggtcgagatcgcgctaccagctacgatgacttcacaaacagcctccctgagaatgactgccgatac

SEQ ID NO: 73455 - DNA, 247 bp, Zea mays
gagccatcctctactaagtgagcttctgactgatgaggatcagaagatattcaagtacttggactccattgatgtcgatgattctgatgttaaggcaggatattccatttaccttaacttctctgagaacccgtactttgaagacacaaagcttacaaagacctattcctttgttgatgatggaacaaccacaataaaagcttctcaaattaagtggaaggatggaatgggacctgcaaatggaaat

SEQ ID NO: 73456 - DNA, 293 bp, Zea mays
tctcaacaatgttcgtcagttggcaatgtatcacaaggaacgattgcaggagcttctggagcctgtagttcctcttatcgtgaaatctgtgaagaacccaagaagtgctgtatgcaaaactgcactaatgacttgtgctgacatctttaaggcctatggtgacttaatggttcactcaatcgatccactgctagtacaactgtttctgaaggcttcacaagataagcgttttgtctgtgaagctgcagaggcagctcttatatcgatgacaagttggatctccgctttactac

SEQ ID NO: 73457 - DNA, 297 bp, Zea mays
ggactaccggcaggatgagtcctacaattttgagggggacatcgccctgctggatctggaaaatagcgtcaccctgagcccaacctcctctccatctgcctcgctgacaacgataccttctacgacctggacttgatgggctatgtcactggcttcggggtcatggaggagaagattgctcatgacctcaggtttggccgtctgcccgtagctaatccacaggcctgtgagaactgctccgggggaagaataggatggatgtgttctctcataacatgttctgtctggacacccatc

SEQ ID NO: 73458 - DNA, 302 bp, Zea mays
ggggacgcacaggcctctcgccctccgcgcggctccacaggagagcaaaaatggcgaccctctgcatggtctccgtccccatcgcaccctcctccttggccctttccacccggggccgcagctcctccgcatccttccccgctaagaagggaggaatcggtcacggtggcttgcggatcgagtgcatccgtattggtggtgttgagattcaaaccacaagagggtgagtactcgtgcagtacatacatggcattggacgctcacgctcacgccagatcctccttgacctcaatttcgataac

SEQ ID NO: 73459 - DNA, 136 bp, Zea mays
atttggaaatctcctctatccatccctctctatctatatatgtaataatgcagtaagacgacacacattatcatgtgtggcatgaccaataatatatgcatcataataaagttttgggtttaaaaaaaaaaacaag

SEQ ID NO: 73460 - DNA, 279 bp, Zea mays
gccgtcacgctcgctgtcgtgcggatgtacctcgggtgggcctacgtcggcaaccgactgctcagcgccacagtgcagtatgaggaaacgggatggtatgatggccagatatgggttacaacttcagaagttttagctcgtgatcggcttctaggctcattttctgtcaagcctgtgctaaacagggtgaagttcaccttggtgggtctggcaggctccctgatcctttgcattcttctgtacgtgaacacggaaaccccaaaggaaccttatggaata

SEQ ID NO: 73461 - DNA, 284 bp, Zea mays
atgccgagtacgtagctcgaattcgctcgaggtgaatattttgcttgggttccggtgctacaattgcgcatggagttcaaaatttatggaattctcatcctccagagaatattcactgggctgcattagtgattggtgggtccttcctaattgaaggtgcttcactgcttgttgctataaaggctgttaggaaaggtgcagaagcagagggaatgagtatctgggactatatctggcgtggtcatgatccaacttccgttgctgttatgactgaagatggtgct

SEQ ID NO: 73462 - DNA, 309 bp, Zea mays
  unsure (1)..(309): unsure at all n locations
tagggaggtcgcggatcttgaggctgctgcgattcaggcgatccggattgatgaggcagatctaagggagcggttgccactgcgcaagtcatagcatgcattctacctgcactgcgctgtcctctctttcagaatcacctactgcagattccaatacactaaccagatccacacacatagtngctagtgaaactataacgacattatattggtaatcatcgacatggacgcagatgtgatcaccatcgagaactcccggtccgacgagaagctacttcccttgtccgcgaaggtgtgaagtacgagctg

SEQ ID NO: 73463 - DNA, 306 bp, Zea mays
caagaacgacaccatgatccgcaaggtggtcttcagctccccctccgtcctacgcgaggccaggaggatcatccaggagtccgatatcatgaaggaggacgacagcaactggcctgagcccgaccgcatcggccgacaggagctcgagatcgtcatgggcaacgaacacatttcattcaccacttccaagatcggctccctcgtcgatgtccagtccagcaaggacccggagggactccggatcttctactacctcgtccaggtacagcctaacgatcgacttggatgtcaaagcatgatttcttt

SEQ ID NO: 73464 - DNA, 305 bp, Zea mays
gccaatgttaaccccagaaaaactctggtgttattcagaggctactcagcatctcatttcagtggcggacaatggaattcaggcggtggctgtgacaaggagagtaaaccaataaccaacgattagtacctttcaacctacccaccaaagatgagcatcctggaggacgtgatccacaagatgaaaactccggtcggttacttgaacataacgagaatggctgactacagaaaggatgcacacccttccatctaccgcaagcagaacctgactgacgaggagaggagatcgcccgaaagatttca

SEQ ID NO: 73465 - DNA, 263 bp, Zea mays
caaagatgaagaaaggtgtgattgttgcgaataatgctcgaggagcaatcatggatgctctagcagtcgcagatgcatgttctagcggtcacattgctggatacggcggtgatgtgtggttcccacagccagcaccaaaggatcacccctggcgctacatgccaaaccatgccatgacccctcacatctctgggactacaattgatgcgcagctgcggtatgcggatggtgtgagggacatgctgaataggtatttcaagggc

SEQ ID NO: 73466 - DNA, 282 bp, Zea mays
ctagggttttgctgctctccgaccccgagctccgaaggccgcagcatcaggcgcggactctctcgcgtgtgaccgagatggcgctgccgaatcaggggaccgttgattaccccagcttcaagctcgtcatcgtcggcgatggtggaactgggacctgtgcagggtctgtgaaaacatccccattgtcctctgcggtaataaggttgatgtgaagaacaggcaggtcaaagccaagcaggttactttccacaggaagaagaatctgcagtactatgaaatttc

SEQ ID NO: 73467 - DNA, 284 bp, Zea mays
ctcatcagccagattgagttctactacaaggagatcccggagcacatgcggagcgtggtgtgggcgctcgcattctgcaacctggcactcggcaactacctcagtggcttcctggtgaccatcgtgcaccggaccacggggtccgggcagaactggctggcgcaggacctcaacaagggccgcctcgacctcttctactggaccatcgcaggcatcggcgtctataatctcatctacttcgtcatctgcgccaggtggtacaggttcaagggaaccagcaactg

SEQ ID NO: 73468 - DNA, 274 bp, Zea mays
cggctcgagacgagacgaccgtcgccgcatcggaccgcgcccgaaccctccttctccttgctgactcggctcccctgcttcgccgtcgccggaggcaattcatgtggggaccacagaagcattagctgggtgaacccactcgaagggggcagggaattgtgtgctagtttgaatggctgctacaaagcttcaggccctttggaaccacccagcttgccccaaaaccattcatttctgggcgccaacattcaaatgggcatcagcattgcaacat

SEQ ID NO: 73469 - DNA, 153 bp, Zea mays
atgcgacatcatagctctcctatagtgccaccaaacgctatagcactaccataagttaccaactgtgatgcgctcccttggccagaaccccactgaagcagatctgcagacatgatcaacgagtgtgatgctgatggcaatggtaccattgac

SEQ ID NO: 73470 - DNA, 264 bp, Zea mays
gctcaccatccgcgggatgattccgcacaagaccaagaggggggaggcggctctggcgaggctcaagacgtacgagagcgtcccgccgccgtacgacaagaccaagcgtatggtcatccctgacgctcttaaggttctgaggctacagcctggacacaagtactgcctcctcggcgagctctctaaggaggtcgggtggaactaccatgacaccatcagggaacttgaggagaagaggaaggagaaggccaaggttgcctacga

SEQ ID NO: 73471 - DNA, 277 bp, Zea mays
acgaatgtgaggtgattgaagacgacaccccaattcctaagcatgttcctcagcaccggcctgttgctcttcctgaggagttcttcaaggcactagatgctgtcaaatctgatcctgctcttcaaggcgatgctcctcctcaagtgaaggcgtaaggatggctgttcctggctaacgtcatttcacattttgccgcggtgggtagggactggtttcttgtgtcatttgccagcaatgcgcttgctctgagcagaataaatttctggtgagaccatca

SEQ ID NO: 73472 - DNA, 269 bp, Zea mays
tgaacttcgtcaagctaagatagctgctgcgtattctcgaacttggagaggtcatcttcagaatctacttggatatgctttatcagactattgtgtttataagatgctcaagtccttgcagagtgtagtctttaaggagtcaggctctgttgatcctgtaacaatgtcaataacgattttcctgagacattttgacattggcattgatgttgcactgttatctcagtacatatctttgatgttcatcgggatgttggttgtcatatctg

SEQ ID NO: 73473 - DNA, 305 bp, Zea mays
ccgccatcagtgatcgtgcgattcacgcatgcgtacgctagcagttcgtgtctagccttgacacacgcattgactatctaccactctatgcagtttactagttcccggctctctgatgccataacaggagatggcattgttaacagagtccagtcattgaatgatgctgacgatgaagagtgcaaggacatgcctttgatccttcgcaacaaggccccaaggtggcacgagcagcttcagtgctggtgcctcaacttccggggccgggtgactgtcgcctcggtcaagaacttccagctagtcgc

SEQ ID NO: 73474 - DNA, 277 bp, Zea mays
cactcctaccccacacagaagcggcggcggcggagcacaagcaggcgaaggcgatggtgcgagggaaggtgcaccagccatggtgcacgtcaacttctaccgcaactatggtaagacgttcaagaaaccaaggcgtccttatgagaaggagcgtcttgatgctgaactgaagctggtcggtgagtatgggctgaggtgcaagcgtgagctttggagggtccagtatgcactgagcaggatccgtaatgctgcaaggcacttgctcacccttgacgag

SEQ ID NO: 73475 - DNA, 278 bp, Zea mays
ggaaggcaccccaaatcacaagaagcacggaaaatggctgatgaagtgatcgatcaactaaagcttgatgggtatatccctgatacctcacatgtgattcatgtcgaaatgggtgaagaggagaaggcggtaagcctaaaataccatagtgagaagctggcaattgcttttgggcttctaaatactgctccaggggctacactgcgtgttgtcaagaatctccgcgtatgcccagattgccactcgatggcaaagtttgtctcaatggtcttcaatag

SEQ ID NO: 73476 - DNA, 175 bp, Zea mays
cggatatctcggctctcgcatcgatgaagaacgtagcaaaatgcgatacctggtgtgaattgcagaatcctgcgaaccatcgagtttttgaacgcaagttgcgcccgaagccttctggcggagggcacgtctgcctgggcgtcacgccaaaagacataaaaaaaaaaaagggggg

SEQ ID NO: 73477 - DNA, 270 bp, Zea mays
cacatgtagattggtgcgtttgctgctcctgacaagatccattgggcacctgggctccctaagacacgaagtgcgaagatcatgcgaagaatcttaagaaaaatcgcatccaggcaactagatgagctcggcgacacgagcacgcttgctgaccctggtgttgtggaccagctgattgcactcagtgacagctaatctatcggctatgtgggagggggtgagacatgatcactgcctgcactatacttatgcaaaattcagctttatgat

SEQ ID NO: 73478 - DNA, 269 bp, Zea mays
tagcacccgcctacactctccccttctaggtgctgcctaggtaagtcggcggcggcgatgacaacgcgcttcaagaagaaccgcaagaagcgcggtccgtgttcgccgggcacggacgatctgctgcacaggaagcacccggaggtcgcgtaacgccggtgcatgcaccaccaccgtatcctcttcgacaagtaccatccgtctacttcggcaaggatgcatgcgtacttcataagctccgaacaagtctactgcccgcgacaacatcg

SEQ ID NO: 73479 - DNA, 257 bp, Zea mays
atatcttgtgagcagaccggttcagcatcaggcaagtggctggatggaattcgaaaattgtattacaatgctgcaggattcaataaactggggttaatgcgatatgatacaatatacgaggatgaagatgttaaagaagccataagaagacttcctgagaacctttataatgacaggatgtttcgcattaagagggcactggacctgaacttgaagcatcagatcttgcctaaagagtagtggaccaaatatgaaga

SEQ ID NO: 73480 - DNA, 301 bp, Zea mays
  unsure (1)..(301): unsure at all n locations
ccgcctcatgatcantgancatgccgcgtcgaagctcggaatcggctgaggaaacataatgtttatggaataacaccaacgagtggctctgctctgtagcatgtcgcagtagataatgagcagaaccaatccgttggtgttattccataaacattatgtgtccataaagcctttaacccatagtcaatggcacctacacgagcacaagcctcaggtactttactgcagagatgctcattgaagtttgcactgatgcgaagatttgatatgctaaatactctgaggttctagatcgcgagct

SEQ ID NO: 73481 - DNA, 282 bp, Zea mays
gatccatccaagacagggatcgccatgtcggactcggaggagcaccacttcgaatcgaaggccgacgctctggcgtccaagacctacccgcagcaggctggcaccgtccgtaagaacggcttcatcgtcatcaagaaccgtccctgcaaggttgtggaggtttctacctccaagactggtaagcatggccacgccaaatgccactttgtcgccatagacatattcgatgggaaaaagcttgaagatattggtccttcatcacacaactgtgacattccgcat

SEQ ID NO: 73482 - DNA, 242 bp, Zea mays
tcttcatcggcgctgccgtacaagaggactcctccgatctggctcaagacagctaccaccgaggtggaggagatgattaccaaggctgcgaagaagggccagatgccgtcgcagattggtgttctgctccgtgaccagcacggcatcccgcttgtcaagagcgtgactggtagcaagatcctccgcatcctcaaggcccatgggttggcgccggagatcccggaggatctctacttcctcat

SEQ ID NO: 73483 - DNA, 285 bp, Zea mays
catcccgtttccaatcataaccatatcctttggagccataaccgccagactgatgaacttgctttactttctcaagatagtcgtcaggcaactgttttgtagttgctggagctttcaggaaaaatgtatcatgtgaatcccgagcaggatgctgttgaggctgaaacagtgcatcgaaattccagaagctgctttcgacgaaattgttggctggcatctcagtgaatcccatcataataaagatgttctcgattgcctgacgaacctccatcaaaggctgaacat

SEQ ID NO: 73484 - DNA, 286 bp, Zea mays
  unsure (1)..(286): unsure at all n locations
cgctgatctcggaagcccagcggctcagagtccagggggagggagctcgcggcggctgaggaaggcggtcaccatcgtctcggatttcattgaggaagagatggggctctcctttgggaagctgctcagccgcctcttcgccaagaaggatatgaggattctcatgggcgggctcgatgccgccggtaagaccaccatcctctataagctcaagctcggcgagatcgtcaccaccatccccaccattggattcaatgttgaaactgttgagtacangaacattagc

SEQ ID NO: 73485 - DNA, 276 bp, Zea mays
gactctgatgctgctgtcgagaaggctgggctggccgacaagatgagccacatttcgaccggcggcggtgcgagcttggaactcttggaaggcaagactctacctggtgtccttgccctcgatgacgcctagatccgctgctgctgctgctactcaggttctgccagctttgcgtgtcatcttgtttcggaccttggtgtagcactgcaaggctaaggtttactcctccgcacatggacttttggggataggcttgcaccgtgttttgctagatga

SEQ ID NO: 73486 - DNA, 286 bp, Zea mays
  unsure (1)..(286): unsure at all n locations
ccgtcgtccatgccgccctctccgacaagtcctacaccgccgtcgcctccctctgcgacgagctcctcctacaggccgcgtccaagggaaccaataccgacgaatggccctactctgtccacctcctggcccacctctacatcaatgacctgaacagcgcgcggntcttctggaaatcgctgccgcaggaggtgaaggacacgcggccggagctcgccgcggtctggaggattgagagctacagacaaaggatattcaaactgttgacttctgcatattcgacaat

SEQ ID NO: 73487 - DNA, 283 bp, Zea mays
cccagttcgtgcgcttcgacaacgacgcctcgagtccgaagatggtgctgcgggtgacgaggatggagcaggatgcgccagagtattgggaccgggagacacggagcgccagggacaccgcacagattttccgagtgaacctgcggacgctgcgcggctactacaatcagagcgaggccgggtctcacaccctgcagtggatgcatggctgcgagctgtggcccgacaggcgctttctgcgcgggtatgaacaggtcgcctacgacgggcaggattatctcac

SEQ ID NO: 73488 - DNA, 262 bp, Zea mays
gatgtcggcgaaaaccgccaaacttatgatctagaaggtgatagcggaagccttatgatcctgactggccaggataatgagaagccgtgtcccattgggataatatggggtggcacagcaaaccgtgggaggctaaagcttaggtgtgaccatggccctgaaaattggaccagtggagttgatcttggccgccttctggatcgtcttgaacttgaccttatcataaccaatgaatcactcaaagatgccgtgcagcagcaaa

SEQ ID NO: 73489 - DNA, 279 bp, Zea mays
gacaaaaccagaccaccaaacaagtgccagcgccctgtcgcagtcgccgcaatggagagcaccttcatcatgatcaagcctgacggcgtccagaggggcctcattggtgagatcatcagccgttttgagaagaagggcttctacctcaaggccttgaagcttgtcaacgtggagaggtcgtttgccgagaagcactacgccgatctcgcctccaagcccttcttccagggcctcgttgactacatcatctctggccctgtggtggccatggtctgggag

SEQ ID NO: 73490 - DNA, 273 bp, Zea mays
ctccagcgcctccaccttcctcgccgcctcactccctctgaggtcgcagatccgtccggttagacgaagccgcccgcacccatggcctccggtgagctcgcctgcacctacgccgccctcatcctcagcgacgacggcatcgccatcaccgccgagaagatcgccaccatcgtgaaggcggccaacatcaaggtcgagtcctactggccggcgctcttcgctaagctcctggagaagcgcagcgttgaggatctaatcctctccgtggatctg

SEQ ID NO: 73491 - DNA, 282 bp, Zea mays
agcctgaggactgggacgatgaggaagatggagaatggactgcccctaccattcccaacctagaatacaagggaccatgggaacaaaagaaaatcaagaacccgaactaccagggtaaatggaaggcacctatgattgacaacccagattttaaggatgatccatacatttacgccttcgacagcttgaagtacattggcattgagctgtggcaggttaaatcgtgcactctgtttgacaacatcatcatcactgatgacccttgcgttgccaagacttttg

SEQ ID NO: 73492 - DNA, 273 bp, Zea mays
gtggtgatgtcgttcccaaggacgtgaacgctgctgtggccacaatcaagacccagcgcaccatccagttcgtggactgttgcccgactggcttcaagtgcggaatcaactaccagccttccatcgtcgtccccggcggtgacctggccaaggtgcagcgtgccgtgtgcatgatctccaactccaccagtgttgtggaggtcttctttcgcattgaccacaagttcgacctcatgtacgccaagcgcgccttcgtgcactggtacgtcggtg

SEQ ID NO: 73493 - DNA, 276 bp, Zea mays
ggaccagccagtaataattggattgatcattttccagcacaccataataccgatgcaacaccttctgagcttttgcctgaaccttgtcagcagagcatttgaatttcaggctgatgcctttgccaagaaccttggatatgcccctcagctccgagcagcccttgttaaactacaggaggagaacttgtctgcgatgaacaccgatccttggtattcggcatatcactactcccacccaccactcgtcgagaggctgcaagctcttgaagattcaga

SEQ ID NO: 73494 - DNA, 274 bp, Zea mays
ccgccatctaccacgtccagaacctcatcgcaggcgtcaccaagggtttccgctacaagatgcggctcgtctacgctcactttcgcatcaacgcctccatcagcaacgccaactccgcgcattgagatcagaaacttcctcggggagaagaaggtcaggaaggttgacatgcttgaaggtgtgaccatcttgcgttcagagaaggtcaaggatgagcttgttcttgaaggcaatgatgttgagcttgtctctcgctccgctgctctcataaacc

SEQ ID NO: 73495 - DNA, 269 bp, Zea mays
tcatcgcagagaggacagcagcacctgagattgacggcggggcagcgcgcgggcccttcccttcggagcactcagcgtgagagatggggaggcagccgtgctgcgacaaggttggcgtgaagaagggcccgtggacggcggaggaggaccagaagctcgtcggcttcctcctcacccacggtcactgctgctggcgcgtcgtccccaagctcgcagggttgctgaggtgcgggaagagctgcaggctgcggtggaccaactacctgagg

SEQ ID NO: 73496 - DNA, 241 bp, Zea mays
atgcaactgccggggaaggaaggtggaatatcatcatctcaagaagtgcagtgctggctgtgagccacgtttgcataacacgcttcatcaaagctttgtcaatcaactccttctcatcagccttcatggtaacattaagcttttgcaacatgggccacaatttctccttttggtcattcatgcaggttttgatgatttgcttgattggctcgtagcagaactgaacaaatcctctcttgca

SEQ ID NO: 73497 - DNA, 264 bp, Zea mays
aagagcccatcgtccctcagttcattctgaaactaaaggaaatgtactacaaatcaaggattgacaggggagtaatcaagcagggcgatgtgcgcctgtacgtgttcgcatccaagccgtcgagcggcgcggccatactgaggttgtaggcaggcaggaaggcagaggcagccgctattcttttcacgagtgtggtggccctgtaaaacatggaataaagttgccatgaacaccgaacccttgtagtagtgttgaattatctca

SEQ ID NO: 73498 - DNA, 239 bp, Zea mays
gagaagcacgcccaaaaattccaaggtttttcacctcttggagcgcaccaacaccacccggagaccggagcgactcgccaccggcgcggaaaaggagggcggagctcgatggcggatgagaatcaggctggaaagaaagaggaggaggaatttagcacaggccctctgtcagtcctaatgatgagtgttaagaacaacacccaggtcctcatcaattgccgcacaacaagaagctactt

SEQ ID NO: 73499 - DNA, 219 bp, Zea mays
cggctcgagctgcaacctcattcatcacccctttgaaccattcaaaggatccggcttctctagtgacccagtagaaatgtgcacggcttgttctgtatgctctcttccggttgctactcgccgttgagacgctaaagctgttggcgctgtcttcagacctgcttggctccattgccaagttcatcagctcgtcagctatcttaatgttattaagcagat

SEQ ID NO: 73500 - DNA, 275 bp, Zea mays
tcgacctcggcgcctcgttcgtcctgctccacctatgcttacgccgggttaacatttgaggcatggcgaaacaccacccggacctgatcatgtgccggaagcagcccggcatcgccatcgggcggctgtgcgagaagtgcgacggcaagtgcgtcgtctgcgactcgtacgtgcggccgtgcacgctggaccgcgtctgcgacgagtgcaactacgggtcgttccaggggcggtgcgtcatctgcagcggcgtgggcatctctgacgcctactac

SEQ ID NO: 73501 - DNA, 255 bp, Zea mays
catggaatcaacgacgaccaggaggcacgagtcctggaagagaagaaggtgggcgtgaaaggcgtcgggaggaagacgaccgacgagtcggagcacttcagctggagggacggcgtcaaggtcccctgcggcaagctggtgccgtcggcgaacaaggacggcccgctcgagtacaacgagtacgccgtgtacgaccccaagcaggtgagcatctgcttcctggtcggggtgaagtacgaggagcagaacatggag

SEQ ID NO: 73502 - DNA, 261 bp, Zea mays
ggcgaagtcaagaagctctacgaagctaaggtctgggagaagccatgggagaacctcaaggggctgcaggaattcaagcctgttgaagagggtgctagcgcctaaggatgtctccttctccatgtgcgagcctgaagctcaaagcaaagttgcagaataaggagccatgctcccttgtgtaatttcataagactacaaccctattagggcttgtttggttgtgtctgtatcgaagggaattgaaggtgattaattttcctt

SEQ ID NO: 73503 - DNA, 254 bp, Zea mays
caggtggacagtgagagtaacatgtatgatggaaatgaggggtcagatggaatgggatttggcccattaatgttgactgagggtgagaggatcttagttgagcgcgtccggcaggagctaaagcatgagcttaagcaggggtacagagacaaacttgtggatattcgggaagagatattgcggaagcgaagagctgggaaactccctggcgacactgcttctaccttaaaagcatggtggcaggctcattctaa

SEQ ID NO: 73504 - DNA, 272 bp, Zea mays
ggcatttccaatgcgaccaagcatcaggccgccttctttccatttggatggggtcccaggatctgcataggccagaacttcgcgttgcttgaagcaaagatggcactgagcaccatcctccaacgcttctcctttgagctctcaccatcctacactcatgcgccatacaccgtgataactttgcatcctcagcatggtgctcaaatcaggttgaagaagctttgaccatgatggtcatactgaatgctaaaacatgtactcctagtaacata

SEQ ID NO: 73505 - DNA, 321 bp, Zea mays
  unsure (1)..(321): unsure at all n locations
cgtggngncatcacgctgacgtaagctcttgaagcgtctcgagcacgtcttctctccggttgcgagcacggtcggaggagctaggcgttcgtcgcggcgagatgtcggcgtacgacgaggtgtagatcgaggacatggagtggaacgcggagctgaaggcgtacacgtacccgtgcccctgcggcgacctcttccagatcacgctcgacgacctccgcctcgcggaggagattgcgcgctgcccctcgtgctccctcttcctcaccgtcgtctacaacgccgaggatttcgccgactccaaggagccgacccacaagccgg

SEQ ID NO: 73506 - DNA, 259 bp, Zea mays
gcatcttctacagatatcgaaactcagcaagctcatgaattctctatttatcttgtcttgccattcctaaccatttcattagctttgctagcttttaactggtatccctcgattgtttttgttggtgatacctacacctattttgctggaatggctttggctgtgataggaattttgggacatttcagcgagacattattgctcttctttttacctcaagttcttaatttcctatgttcagtcccacagctctttcact

SEQ ID NO: 73507 - DNA, 276 bp, Zea mays
gggagagtgagagtggggattcaagtttcaaactcactatcgaggggggataggaaggtggtcactcatcggtccacagctagctcgtcgccccccatggctgactggggccccgtggtgatcgcgacggtgctgttcgtgctgctcacgccgggcctgctgttccagctgccggcgcacggccgaatcgtcggcttcggcaccatgcacaccagcggcctcgccatcctcgtccacgccggcctctacttcgcgctcatcaccatcttcctcatc

SEQ ID NO: 73508 - DNA, 172 bp, Zea mays
atccgcggttatgattttggaacaatgacattctcgattcttaacagactcaggaggcaatggtagctaataaagtgactacaacaaggcacatgtctactacaggtgatgaggaaatgtgcgaatctgaatatgcattctgaaacctcgagccgctagttctcgatcgcga

SEQ ID NO: 73509 - DNA, 256 bp, Zea mays
gattgggctcatgtccttgtccggccacaagatttatggccccaagggcgtgggggccctctaccttcgtcgccgccctcgcatcagggtggaaccacagatgaatggtggtgggcaggagcgtggcatccgcagtgggactgttcctacacctcttgttgttggatttggggctgcctgtgagattgccgctcaagagatggattatgaccacaggcgtgtcagtgctctgagcagaggctgcttgatgcatacg

SEQ ID NO: 73510 - DNA, 267 bp, Zea mays
tagtcgtgctggatatggtcgtgccattccatatttctcggggatcgctgtactgatacgtctatatacacgcctttccattggctttttttgcagcgagattgcgaagcacctggctcttccaccagtgaagctccactgcagcatgctcgctgaggacgcaatcaaggccgccgtgaaggattacgaggcaaagaaagggaagaagatgccaaggcagaggagcaggacacctcatgcccgtaagagcgacagttagatactgaa

SEQ ID NO: 73511 - DNA, 259 bp, Zea mays
aagcgatgtcctttaggttcccatgcaaatgcaatgatcttgtcgttcttgttctcgagttcaaggacctcaattgggatatccctctccttaattctaaacagctcaaacccagtgtaggtgctcttttttgtttttgtgtatctatcaacttgaacagcaagatattctccactgttttgccaatacatcttacaatcactgacactgaaaaggtttttctgtcgcagctcctctttgcagggatttgactagactc

SEQ ID NO: 73512 - DNA, 268 bp, Zea mays
gtccctgccatggccgccgttccctggtcggagtttcttctagctcggatctcctccctacggcgcccgagctccatggctgctgcgttcttcagccgacgcgtcctgccgagtccctctccatccccacggcgtcctgcttgcccagctttcatccatggccggagccctcccatgtcacgtcccagccaagcccctgcctcgatccctgttcggcctggcggatgcgctgctctggtgccaggtctagccgctcgtatcagctcgc

SEQ ID NO: 73513 - DNA, 262 bp, Zea mays
gcatctacagcgttgtcaagctgggctcgtcgctcaacctcaccacaaatctcaagaccgttcagaaggagctctgattatccatcaaactttgtagcctccctcgaattggcggcgaggaactagctagctagctggcaagatgtagtctgtgtcatcactgtcatgttactgcccggacgtcatgctgatgatagaaatgacggaataaaaatgaaatgccaaatatgcgtgtatggcgcacgcatattcttgctaagcc

SEQ ID NO: 73514 - DNA, 308 bp, Zea mays
  unsure (1)..(308): unsure at all n locations
gggtgggtgagcgtgaancatgccgcttcgcatctcggaacccgctcgaggtgagaagctgaagattgtgctagaggtgtacgagggacgcctgaccaagtgcaagtaccttgctggagacttcctcagcctcgccgacctgaaccatgtgtctgtcactctctgcctgttcgctacgccctacgcatctgtgctcgacgcctacccgcatgtgaaggcctggtggtctggtctgatggagaggccgtctgtccagaaggtcgctgccctgatgaagcttctgcttgaaacggttgccctgtcaatcg

SEQ ID NO: 73515 - DNA, 259 bp, Zea mays
ggctatgcaagatgttgttggcttctacaaggagaacactgaaataatcgttgagacatttacatcactcggattcaacggttatggcgccaagaacgctccatacgtatgggtgcacttccctggccgcaattcgtgggatgtgttcgctgagatcctggagaaggccaatgtggtcactactcctggcactggatttggaccgtgtggcgaaggctttgtgagggtcagcgcgttcgggcacagagagaacatcatt

SEQ ID NO: 73516 - DNA, 261 bp, Zea mays
tggtagcctcaggagatacccaaccctgagtactttgagcttgacaggcctgattttgatccaattgctgctattgggattgagatctggacaatgcaggatggcatcctgttcgacaatatcttgattactgatgatgagaaagttgccacctccattctcgagaagacctggaagcccaagtatgatgttgagaaggaaaaggagaaggctgaggaggctgctgctggtgcagatggtctttctgacttccagaagaag

SEQ ID NO: 73517 - DNA, 217 bp, Zea mays
gcagccagaagggcttcaacacgctcagcagcagcgagattttcgggaggagttcgaagctcgcacagtcaatagcactgtacccgagtccaagcacatttactaaagaatatcctacactggctcatctttgttttttccaccattttactttcttgtaagaaaaacaattcacgaaggattaaattccaatttgatgtaataatattgtcgtctt

SEQ ID NO: 73518 - DNA, 253 bp, Zea mays
gtttctcgcgagccatcgcttctgtaattctcaggcatccggaagaaatggccaagtcgatgaaccacacggcgcacaaccagtcgttcaaggcgcacaagaacggcattaagaaacccaagcgccaccgccagacctccaccaaggggatggaccccaagttcctgaggaacctgaggtattctaggaagggcaacaaaaagagtggtgaggctgaagctgaggagtaggaaggaaagcatgtctttgtttc

SEQ ID NO: 73519 - DNA, 252 bp, Zea mays
cctgctcctccgaacaacatcctcttcatccagaacttgccagaccagaccacgagcatgatgctccagatcctgttccagcagtatcccggcttccgggaagtccggatgatcgaagccaaaccaggcattgcctttgtggagttcgaggacgacggccagtccatggtggcgatgcaggctctccagggcttcaagatcaccccggagaaccccatggctatatcctatgccaaaaaatgagaaccctcg

SEQ ID NO: 73520 - DNA, 246 bp, Zea mays
  unsure (1)..(246): unsure at all n locations
aagatggggacctagattcttatgagattgaaggcggcgagacaaaatcagagattttgcagaatctagctgagttccagttntcttgtgtcctgtacaatggtgccctagagaatgcgtgcagtgagcttggagcccgtatgtctgccatggacagctctagcagaaatgctggcgatatgcttgatcgtctcactctcacttacacagggacacgccaagcatccatcaccacagagcttactg

SEQ ID NO: 73521 - DNA, 250 bp, Zea mays
ccggatcccgctagttcgccccagcatggccgcctcgtcgaccgccacctccgtccacgacttcatcgtcaaggatgcgagcggcaaagacgttgacctcagcacctacaaggggaaggttcttctcattgttaacgtcgcatcccagtggtatgaatcatatggaaggggttaaaagtaaaatatgtactatgttttaggtggaaggggttacatataaaataacagtcatcattagatctagatcgga

SEQ ID NO: 73522 - DNA, 244 bp, Zea mays
ccagagaacaacatgatcctggggccagcccaacgcaggccctcatgatgttctccaacatcgccctctgctttgccagagcgttcaccaccggtgtgccagggggaaccaggggtgccttggtgaggtagctcaggatggtggccaccgggtggaaggagtggaatttgtcctctccctcagctttcagctggatcctggtgctgagctcagccaggagcaccaggtcaaggatgataggtgc

SEQ ID NO: 73523 - DNA, 235 bp, Zea mays
gctttgagaaggtagcgagcgctgaggatgatggcgctcgcgttcaggtaagctcttcagctcgggtctttcgccaacgacggagatgcgcattcttatggtcggtctcgacgccgccgagctaaccaccatcctctacaagctcaagctcggcgagatcgtcacaaccatccccaccatcggcttcaatgttgaaactgttgagtacaagaacattagcttcacggtctgggat

SEQ ID NO: 73524 - DNA, 176 bp, Zea mays
gctaacttcattcaatatcgcacctgacaatttgagcaagaaatttacaagtggttgcgtgattgaaagaattatagtcctcggtttacgatccggagtgaataaggctattattgagcctggaaaccaagaagtagaaattgaatcagggccatttagtttaaggagtggtccag

SEQ ID NO: 73525 - DNA, 281 bp, Zea mays
actgcttctaggcacgcttctgaattcggagttgccagcattcgctcgaggtgccggaccagatctcaccatcatgcaggctagcgatagattcaacataaactctcagcttgagcatcttcaagccaaatatgttggtacagggcatgctgatttgtctagatttgaatgggctgtaaacatccagagagacagctatgcctcttatattgggcactatccaatgctagcatattttgccatggctggagatgaatcgatcggaagagaactgtacaatt

SEQ ID NO: 73526 - DNA, 204 bp, Zea mays
aaaacttaaagagcacatgcagtattgtgtggatcaccctgaagaggttagcaagctgtccaaagtgaaggcacacgtttctgaagtcaagggtgttatgatggaaaacattgaaaaggtccttgatcgtggagagaagatcgagctgcttgttgacaagactgagaatctgcgctcacaggcacaagatttcagaccgcgggg

SEQ ID NO: 73527 - DNA, 310 bp, Zea mays
tatcatgccgcgacgtagctcggattcgcctcgagcttgcaagttgatcttgtggtagttcccccaactgtcaccatgcagaacgaggagcgtaagactgtggacctctatgtccccaggaagtgctcggccacaaacaggatcatcactgccaaggaccatgcctttgtccagatcaacattggccacttggacgcaaatgccctgtatgatggtcacttcacaacgttggctctctctgggtttgtccgtgctcagggcgacgcagacagctccttggacaggctgtggcagaagaagaaggctgata

SEQ ID NO: 73528 - DNA, 215 bp, Zea mays
gctgtcggaagagaagtcgcttgcttactcatgcctcgagtaaattataccacacaccagagagcaattgctaccccctgtgttttgaataaaagaaactccagctccgtccatagattctcactcagaactgctgcacgtcgctgtgcaggcgtgttgctggcttcgcccagcgtgtacgagactacgagggcttgtagcccctttttggcctg

SEQ ID NO: 73529 - DNA, 131 bp, Zea mays
cctgatcaggctgtccaccggaaccaccctaggtaccagcagagcgcttgtggccggcagagtcgacgtaggagaatgagatggagttgacggccacgctgctgctgacggtgatgctctccagacgcatg

SEQ ID NO: 73530 - DNA, 303 bp, Zea mays
gtgcatcatgccgcgacgtagctcgatattggctcgagttaaactatggtattaaattcatggagtatgtcacatgtataatcgtttatcagggacctcactctgactttgctgggccaacatgtgggagtacagcgtgtgtagcactaataagaaacacccaacttgttgtggcaaatgctgttgattcccgatgtgttatttcaagtggtgggaaggcatacaatttatcgagggaccacataccagagcttgagctgagagagaaaggatatgaaacagggggctcatcatatggacgag

SEQ ID NO: 73531 - DNA, 243 bp, Zea mays
  unsure (1)..(243): unsure at all n locations
ggacgcctgggagggtgagagccccgtccggcccggaccctgtcgcaccacgaggcgccgtcaacgagtcgggttgtttgggaatgcagccctcccatgtcacgtcccagccaagcccctgcctcgatccctgtccgggcctggcggntgcgctgctctggtgcccaggttctagcgcgctcgtcatcagctcgacatctcctcgagctcgcccctgtcttcctgctcggcgcctaaattcct

SEQ ID NO: 73532 - DNA, 265 bp, Zea mays
gggaagcccgccgccgccccggcccccagcaaccagcagatcgggacctctgttctgcgcaatccatccatggcggaggaatcaggccgtcccttgccaaagtttggcgaatgggatgtcaacgatccggcttccgcagacggatttactgtcatattcaacaaagccagagatgagaagaagggtgggaatggtcaagacacagactcaccttccaagtacccaggactgataggtggagtcttatgctgcaaaccagcccgag

SEQ ID NO: 73533 - DNA, 97 bp, Zea mays
aaacgtaacatgcatatgttttgaagcctagggtgagcttttacttcaccatcacttattattgttgcttgttcaaaaataaaggtaccgaaccgga

SEQ ID NO: 73534 - DNA, 240 bp, Zea mays
tagatacccgagtgaatgggcgtgacattcaaagtgttctcctggacctagttgggcgtcgtactgtgccacaggtgtttgtcaatggacagcatattggtggctcagacgatacagtaaatgcgctttcaaatggacagctccagaaacttctcgggaagagtcagtcacaatgatgggtcgctggacaagcttgcactgtcaggaacacgtgagtatatgtttgggaggggtgtcttt

SEQ ID NO: 73535 - DNA, 268 bp, Zea mays
gtacattgggttatccgaagcatctgcatcaacaatccgaagagctcacgcagtccatcctatcactgcagtacagcttgaatggtcattatggtctagagatgtggaagaagatataattcccacttgcagagaacttggaattggaattgtagcttacagtccactaggcagagggtttttttgtagtggagcaaaactagttgactcactgtcagagcaggacttccgcaagcatatgcctagacttcaaccagagaatattggc

SEQ ID NO: 73536 - DNA, 279 bp, Zea mays
cgtttacccttcatccataatcaatgttactgttggagccgatcaccgaagcgaggaagcttttgaatccgcccaagggcaatgatggcaacttcaggtaggttcagaagtggagagccaaacttgccaccaatggcacctatgttactaagtgttatagtgccaccttcaatatctgcagcgcttagcctgttttgtgatgccatctcatgcaatcgcgccaattccttcgtgatctccaatattgatagcgactgcactttcttgatgtttggcacg

SEQ ID NO: 73537 - DNA, 330 bp, Zea mays
  unsure (1)..(330): unsure at all n locations
ggtcgancttgncatgccgatactaagctcgaattcgctcgaggacttaccgctggatggccccagaggtcattgagcacaaaccctatgatcacaaggctgatgttattagttttggaattttgatgtgcgaactactcacagggaagattccttatgagtacctgactccactacaagccgctgttggtgtggtgcagaagggattacggcctacaattccaaagcatactcacgcaaagctttccgagcttcttcagaaatgctggcagcaggaccctacccatagaccagacttctccgagatattagaaactcttcagagaatag

SEQ ID NO: 73538 - DNA, 272 bp, Zea mays
ccgtcgtgcgctcgctacccctcttcctcgaggcctttgccggcgaagagcgcccagtcgcccaccaggatgaagattgatgctgcctatctgcttgctggcctcgctgggaactccagcccctctgccgaggacttgacatccattctggagtcagttggctgtgaagttgacaatgaaaagatggaactccttctgtcccagctgagcggtaaggacattaccgagctcattgccgccgcagcgagaagtttgcttcagtcccatgtggc

SEQ ID NO: 73539 - DNA, 275 bp, Zea mays
gtgtgctggttgagaagctggtgcagcccaagaagaccgccggcggatcctcctcccggaaacatccaagcagctgaatgctgctaaagtggtggctgttggccctggtgagcgcgacaaggcaggcaatctgatcccagttgctctgaaggaaggtgacactgttctcctgccagagtatggtggaactgaagttaagcttgcagctgataaagagtacctcctcttcagagagcacgacattttgggcacacttgtggactgattcagacatc

SEQ ID NO: 73540 - DNA, 272 bp, Zea mays
gaggaactttgagttcgagctggtatcgccattcccagagaacgactggaacgccatggtggttggcatcaagggcgaggtgatggctaactacaagaggcggaagcttgccgtggacaactaagattgtggccgcagtctctagatgcttgcttcttgttgattcaattgttttcacatgtttgtcagcatttgttcagtgcaagttctgctgtacgcaagccagccttgttaggggtgtttctgttgtttaggattttgaaatttgcttc

SEQ ID NO: 73541 - DNA, 268 bp, Zea mays
atcgcgctcggggcccggcgtccggcgcgggttcgagcgagggcagatgccgctctactggcgtctccgcaagctacggggcattgccggcgggatgcacattggcctgccgaagtatgtgccattcaatttaaaagacatagtgcgcggtggattcaaagatggtgacgaaatatcactggaaaccctgaaatcacggggactgatcaatccatcaggcagggaaaggaagctgccgctgaagatcttaggagatggggatgtatcg

SEQ ID NO: 73542 - DNA, 274 bp, Zea mays
ggcagcatggcattgaaatccggattgccaggattttcaacacctatgggcctaggatgaacattgatgatggccgtgttgctagcaacttcattgctcaggctgtgcgcggtgagaccctgactgtccagaggccaggaacacagactaggagtttctgctatgttgccgatatggttgatggtcttattaagctgatgaatggaaacaagactggaccgattaacttggggaacccaggtgaattcaccatgctggaacttgctgagaatgt

SEQ ID NO: 73543 - DNA, 276 bp, Zea mays
  unsure (1)..(276): unsure at all n locations
ctatctctcctttggcaaataaaatacgagtgaagattataccaaaaatggagagatgcttggagcgatggcgaaggatgagttatggagtggagtggaagcctttgttttcgtcgaagactccaattccctttcaatacacctatgactcgggttgaaattcacttgaatacacattagtcatagcatataaaagagatatgatcaaaggtatatttatgagctatgtatgcaagacatcaaaaganattcctagaatcaagaatatttagctca

SEQ ID NO: 73544 - DNA, 267 bp, Zea mays
agaaggtgtacaagatcggcaaggctggacaagagacccacgatgcctccacagagtttgacaggactgagaaggacatcactcccatgggtggcttcccccattatggtatcgtgaagggtgactacctgatgatcaagggctgctgtgtgggaccaaagaagagggtggtgaccctccgccagtccctcctgaagcagacttcccggctggcgctggaggagatcaagctcaagttcatcgacacatcgtccaaatttgggcacg

SEQ ID NO: 73545 - DNA, 265 bp, Zea mays
gcctcgtggtgttcgcgtggcacaggctcgacggcaagaaggccgcgctgctggtgccggccggcgcttcggggctcatctgcggcgacgggatctggacgttcccgtcgtcgctgctcgcgctggccaaggtcaagccgcccatctgcatgaagttcacggcagggagctagagggcgcgctgacgatgcgtacagaacagagggcatcgttcggcgtttgtggggtggaatccgtgtagtagaattacataccaatcaggcct

SEQ ID NO: 73546 - DNA, 267 bp, Zea mays
ccctgagtcgccgacacaatatacgagagcaattagcagatcgtgacctctgttctgcgcaatccattcatggcggaggaatcaggcctgctcttgccatagtttgtggaatggtatgtcaacgatccggcttccgcagacggatttactgtcatattcaacaaagccagagatgagaagaagggtgggaatggtcaagacacagactcaccttccaaggaccccatgactgagagggtggagtcttatgctgcaaaaccaagcacg

SEQ ID NO: 73547 - DNA, 276 bp, Zea mays
  unsure (1)..(276): unsure at all n locations
aaatctgacgtgctccagttgagagctgtctctgacgacgagggcaaagcgttggctgtgaaggcagcactggtcttccttgagacgtcagctatggaggccatcaccgggcgggaagccttccagactattatcacggaggagtatggcatcgcgaacaggaaagcgctggccgacgaggaagcagctgccacagctgccccattgctntcacagggcaaaaccatcagcattgacagcaatgcaggaaatacaaagaaggctgctgctctacat

SEQ ID NO: 73548 - DNA, 267 bp, Zea mays
cggctcgagtcccttgtcctcgagcacaagagaaccatggcggcggcggcagtatacggcggcttcaagcggaagcttggcgtcgaggatgcccccgagctgcagctcaaccgcatccgcatcacactctcatccaagaacgtcaagaacttggagaaagtttgtgcggatttggtaaagggagccaaggacaagcatttgagggttaagggacctgtcaggatccctactaaggttctccacatcaccactcgcaagtccccttgc

SEQ ID NO: 73549 - DNA, 261 bp, Zea mays
ggtgcgtgctctcggccgccgccagcaacaagctgaacgagacggcggtggggaacgcgctgtcgtacgcgtgcgggcagggaaacgggacctgcgacgccattcagcccgggaaaacgtgctacacgcccaacacaacggcggcgcacgccagctatgctttcaattcgtactggcagcagttcgagaagactggagcgacgtgctacttcaacaacctcgcagagcagactatcaaagacccaagtcatggatcctgca

SEQ ID NO: 73550 - DNA, 265 bp, Zea mays
ctcagaagggatactggcagtttaatatgggtgatgtcctggatgatggaaagtccactgtgttttgtgctggtggttgtgcagcaatagcagattctggaacttccttgcttgctggccccacagccattattactgaaatcaacgaaaagatcggtgctgctggtgtagtcagccaggagtgcaagactgttgtttctcaatacggacaacagatcctagatcttctgctagctgagacgcaaccagcgaagatctgttctca

SEQ ID NO: 73551 - DNA, 231 bp, Zea mays
accaatttgcggtcgggctgtcagatgggtccgtcaaagggctggagccattggagtccgaagggaaatggggagcgcccgctccggcagacaatggcatcattcccaatggcaagacgccagcttcgtcggctactagcaaccctgctgcggatcaaatccaaagatagattgtattccctaagcttttctttttctgcaaagcttctaattacactgacttatttgtat

SEQ ID NO: 73552 - DNA, 171 bp, Zea mays
cgctgctctgcacgcaggcgtcgcccgaggaccgcccgtccatgtccgaggtggtccggatgctggagggcgagggcctcgccgagaggtgggaggagtggcagcaggtggaggtgacgaggaggcaggactacgagcggatgcagcagcgcttcgactggggcgaggact

SEQ ID NO: 73553 - DNA, 216 bp, Zea mays
  unsure (1)..(216): unsure at all n locations
gtaacttgtttcgacaagattgagcgtgtccgcactcatacaaatttatagtagtatgagtgcggacacgctcatactactataaatttgtattctaaaacaaatattttatcatcggtagcaagattatctactatataccataatcctctgtattcatatgtactctatatctcaccactataccaaatatcatatattatatatngttttttc

SEQ ID NO: 73554 - DNA, 263 bp, Zea mays
aaacacctcaaggcgattgatgtcaacatgaacaagatgcctgatgtcgccatgactcttgctgtggttgccctctttgccgatggcccgacagccatcagagacgtggcttcctggagagtaaaggagaccgagaggatggttgcgatccggacggagctaaccaagctgggagcatctgttgaggaagggccggactactgcatcatcacgccgccggagaagctgaacgtgacggcgatcgacacgtacgacgaccacag

SEQ ID NO: 73555 - DNA, 229 bp, Zea mays
ttgagatctcttgggtcaggagaggctgcattcacttttattcttgatgatcctgcaggatacagctttattgagaatccgcatgctccgttattagatcctttactatctgtgagattctacgaaagaactcgtgaacaacaagcagcacttgggtttcttgctgaaccaccaaaagaacaacctggagaggctgtattgcctgcttcagcagtggaatccaattctg

SEQ ID NO: 73556 - DNA, 265 bp, Zea mays
gtttgttgagacgcatagagctagctgctagcgacgacaatgtcgctcgtgaggcgcagcaacgtgttcgaccccttctcgatggacctctgggaccccttcgacaccatgttccgctccatcgtcccgtcggcgacctccacacactatgggagtgccgccttcgccagcgcccgcatcgatgggaaggagacgcccgctgcgcacgtggtcaaggccgaccccccggcgtcaagaaggaggaggtcaaggtcgaggtcgaaga

SEQ ID NO: 73557 - DNA, 256 bp, Zea mays
cgagaagagaccaggccgaaggaaaacaatcctgaaaccaagccatgggtctgcaggaggaatttgaggagcatgctgagaaggcaaagaccttgcctgagaacacgagcaatgagaacaagctgatcctatacgggctctacaagcaagccacggttggagatgtgaataccgatcgtccgggcatattctaccaaaaggacagggccaagtgggatgcctggaaggctgttgaaggcaatcgaaggatgaggcg

SEQ ID NO: 73558 - DNA, 267 bp, Zea mays
gtcaatgcactgggagctgccattgccatccttggcacattcctgtactctcaggcaatgtcgtgaggcgtgccatgatgacgaacgtctgcagaatcagtagcaagcactaaatccaattttgcttgttccagtggcatgtagatatcgggttagttttccgtatgagagtttgtaataatggatgaatggctctgctgtttcgttcttgtttgttggccagactcaaatccataggccatgaactgcggtcgagtgtacctgaat

SEQ ID NO: 73559 - DNA, 198 bp, Zea mays
cagattcgggctctacttcgtggactacaaggataacctcaagaggtaccccaagaactcggtccagtggttcaagaccctgctgagctccagctgaaggcgtcacacgggctgtgattggactgaccatttacccgacacccatacccttatcctgttgtgtcaagcactcaagctccaatcaatgtaaaataatat

SEQ ID NO: 73560 - DNA, 204 bp, Zea mays
gagaaggagaagctgggcacgattgacccctactttgtcaagctcggtgacgccatggtcacctggatcgaggcctgggatgagctgaacccgtcgacccctgccgccgcaaatggcaaggcctagtagatgtgccatcacttcggcactggagtgaaaaagaaagtatgattgggtcctgcctaggccccatagatatagctc

SEQ ID NO: 73561 - DNA, 214 bp, Zea mays
aagaaactaaagttgacaatatgggatactgctggccaggagaggtttaggacaattactagttcttactacagaggtgctcagggaattattctagtatatgatgtcacaaagagagaaagtttctcaaatttggctgatgtttggactaaggaaatagaagcattctcaacaaacaaagactgcataaaaatgcttgttggaaacaaagttg

SEQ ID NO: 73562 - DNA, 159 bp, Zea mays
cactgatcaagatcacagtactggaccttccgcagtagattcgcaagataccggctgatggtgttgttaactatgttggaggtgacatgttcaaatccatcccacgtgctcaaatggtgttacttaagatggggctgcaccactggagtgatgaggact

SEQ ID NO: 73563 - DNA, 255 bp, Zea mays
ccatgctcaccctagagggggaagagggcgaccgaagccggtgatgggcttcatcatggacttcgcggaggatctgatcctccgtctgatggaggacccggacaagcgcgaccaggttcggcgggagcatgtctacaagatgaaggagcggtgcgagcgcactaaggcggcgtggagccttcctctgcgcccctacggcttctggaccttcgaccgcttcaactcgcagctctcctgggatccccagatcagcca

SEQ ID NO: 73564 - DNA, 238 bp, Zea mays
cgctgctctgcacgcaggcgtcgcccgaggaccgcccgtccatgtccgaggtggtccggatgctggagggcgagggcctcgccgagaggtgggaggagtggcagcaggtggaggtgacgaggaggcaggactacgagcggatgcagcagcgcttcgactggggcgaggactccatctacaaccaggacgcgatcgaactgtccgccggcagtgacgacgtcgggtcgtcacacggagc

SEQ ID NO: 73565 - DNA, 264 bp, Zea mays
  unsure (1)..(264): unsure at all n locations
aagattcttcaaaggttgagcaacgtaaaacagcttaccgctgcaggaaatgcaggagagttattgctgtagagggcaatgttataagtcatgttcctggtgagggtgaatcttgctttgattggaaccgaagaaagagtggtcatccatacaacatcanagaacatggttgctcatctttgtttgtcgaacctctgaaatggatgactccagtagaagacggcgctttggagggaaagctatcatgcatccactgtggagctc

SEQ ID NO: 73566 - DNA, 272 bp, Zea mays
  unsure (1)..(272): unsure at all n locations
gcggacacagatgggtcagatgaccgaggagatctgggtacaacaaatgaaggtagtcctagacaggatgtagctaagaagcgggtgacacgagataggcgcggtaccaaaggggccaagaagatgatggcaatgaaggctgatctaaaatgcaagctggttgactttggaaacgcatgttggacatacaagcagttcacaaacgacattcaaacaaggcagtacagatgtcctgaggttatacttggntccaagtattctacatctgctgg

SEQ ID NO: 73567 - DNA, 280 bp, Zea mays
  unsure (1)..(280): unsure at all n locations
gtgagcctcgagtcacagcattgttatctgctgttgctgcaggttccctcccatgcttggaggtcctaattgaggctggtgcaaacccaaatgtcaaggctggtggagcaaccccattgcatattgctgcagatagtggaaatatagaagtcatcaaatgtttgcttaaagctggagctgacccaaatacctgtgatgatgatgaattgaagccagttcaggttgctgcttggagaaataaccgtgaagctgttgaacttctnttaccgttaacatcccc

SEQ ID NO: 73568 - DNA, 255 bp, Zea mays
cacaattcgcaccacattattgtcttgtgttgcccgcaacccaaagcggatcaaaccctagatgtcgtccccgttcctccgatcctcatggattcctcctcctcctcgtccagcctgagccagcagcccgagttcgattacctcttcaagctgctgcttatcggcgactccggcgtcggcaagagcagcctcctcctccgtttcaccgccgactcctttgaggacctttcccccaccataggtgttgacttcaag

SEQ ID NO: 73569 - DNA, 260 bp, Zea mays
caggatccgaggttcatgactcatgcggacaaggatcggggattaggatctgtggggaaacgtgacgatcaaaggcttaatcagctgagggaccaagatgcacgggagagagatccaaattttatttcagatagtgactcagagtgttatcctgcgtaccaggagtataataatgagattgcagcaagcgatgatgaagatgacttatcgaagatggatatgggaggacgggcaaagtggccgcttcacaggtgggactt

SEQ ID NO: 73570 - DNA, 225 bp, Zea mays
gctttgcttgccctgttctcgttcgaccttgacaacccggaaatgctacagccctctaggtgggaacgactcatgaagcaggatctagccgaatcctccggaactcgcgcgcggggccaaccgacctcacactattgatcgaggatgacgtacgcctacctcttcaagtacatcatcatcggcgacacaggcgcggggaagtcatgcctgctgctgcagtcacgg

SEQ ID NO: 73571 - DNA, 270 bp, Zea mays
attgagtaatggaagccaacggggtaaaaaggatgcggcaacagcactatttaacttgtgtatttaccagggcaacaaggggaaagctgtaagagctggattggtacctatactactagaactgctcatggagactgaaagtgggatggtagatgaggcccttgcaatattggcaatcctctcaggccatcctgaggggaagacagctatcggcgctgcttctgcaatacctgtacttgttgggagtatcagaaatgggatctcaaggac

SEQ ID NO: 73572 - DNA, 165 bp, Zea mays
aatggcgttcgagcaggaagtcgtgatcgcattccacagcaagactgaggttgacgctcacatgaccaaggcccaggaagccgacaagctggtggtcatcgacttcactgccgtctggtgcggtccatgccgcgccatcgcctcactgttcgtcgaacacgccaa

SEQ ID NO: 73573 - DNA, 244 bp, Zea mays
acggaggctctgtaactgccgcgaactgcaaagagctagcagcacagcctgatgtcgatgggtttcttgtcggtggagcttctttgaagcctgagttcatcgacatcatcaacgcggccaccgtgaagtccgcttaagatggtacgcgtgagacgaacatactttttttttgctcaactgtgctatgtaagctagtagcttttggcgcaggacagagactttgtttacctcccccaacttttag

SEQ ID NO: 73574 - DNA, 195 bp, Zea mays
ctcggggaagactacctaagcaaggatcggtgtgggtcgctttcagaagatctacggtagccgccagaggaatggctcccggccaccacacttctgcaagagcagtggtgctgttgcacgcaacatcctgcagcagctgcagattatgggcatcatcgatgtcgatcccaagggtggacgcctcatcaccaacca

SEQ ID NO: 73575 - DNA, 271 bp, Zea mays
cggaatcgacgaggtccctggatctggatttcgtcaagttcctgggacatggcacatcagatgcacgatcctgccgcaggaagacaagatccccgcggtgatcagccgcttcagggctttccatgaggcgttcttggccgaataccgcgactaaactgttacgctgtgtgtgagttaagttggaggttcagtagaactgtagaagagctcagtgacagcgcagaaagaggcagtgttagaaaggcttaggtccttcttcacaggagcaaca

SEQ ID NO: 73576 - DNA, 266 bp, Zea mays
cttttggaatggaatatctccatgggaagaatatagggcatgtcgacttgaacagtgacaatctgcttgacaacctaagggcggcgatttgggactatcaaaggtcaaatgccagacacttatctctggtggagtgagaggaacactaccttggatggtccctgagttgttgaatggcagcagcagcctcgtctctgaaaaggttggcttccggcgcacccttttgcctaacctgtgctgtgcacctccttattctatgacctgcg

SEQ ID NO: 73577 - DNA, 272 bp, Zea mays
aaacgtcctctacctgaaactgaaagaggatcacgatcccggagataaagcatcacccgtgggtcttgaagaacctcccgagggagatctcggagagggagaaggccaactacaaggacgcggatgccgccgagccggcgcaggccgtggacgagatcatgcggattgttgaggaggccaagacccccggtgacatgtccaaggtggttgacccggcgctgctggccgagatggcagagctggagagcgacgaggaagaagcagacgccgat

SEQ ID NO: 73578 - DNA, 266 bp, Zea mays
catggggatcgggcccgtccccaacatcctctgcgcagagatcttccccaccacggaccgcggtgtctgcatcgccatctgcgccctggccttctgggtcggcgacatcatcgagacgtacactctccccgtgatgctgaacgtcgtcgggctcgccggcgtctttggggtgtacgccgtcgtgtgcgtcctagccctcgcgttcgtgttcatcaaggtgcccgagacgaagggcatgcctctcgaggtcatcaccgagttcttct

SEQ ID NO: 73579 - DNA, 276 bp, Zea mays
ctccggggtcacgcagacgcgaacatcgtcgttatgatggccggcaacaagtcggacctgaaccacctcagatcggtccccgaggaagacggccgtgcgttttcggagaaggaaggcctgtccttcctggagacctctgccctggaggcgataaacgtggagaaggcgttccacaccatcctgagcgagatccatcagacggtgagcaagaaggcgctcgccgcgcaagcgtccgcgtccaccaacgggcgctcgatgcaagggaccaccattaac

SEQ ID NO: 73580 - DNA, 281 bp, Zea mays
ctaggatgtttcatccaaacatatatgctgatggaagcatctgcttggatatcctacagaaccagtggagtcctatatatgatgttgctgcaatcttgacttctattcagtccctgctgtgtgatccaaacccaaactcccctgcaaactcagaagccgcgagactgttcagcgagaacaagcgggagtacaaccgcaaagtccgcgagattgtggagcagaactggacagccgactagtgcaggaggaggatgctcatcgtgcccgaaaggcacaataat

SEQ ID NO: 73581 - DNA, 100 bp, Zea mays
  unsure (1)..(100): unsure at all n locations
attgagngcttgntgacaactgatnatgcnancantgccacccagaagactgntgntgnaccctcagcnaaggactgcagangnggcagggctgccagct

SEQ ID NO: 73582 - DNA, 284 bp, Zea mays
gagcactcgccgccactcaccagcaaattcccaagccgccccttcccccatctctttcgcgacccatttgatcgattcctgatggcgctcaaggccgagaagaagcccgcggagaagaagccggcggaggagaaggccgagaagaagccaagggcggagaagcgcgtgccgagtaaggagggcggcgagaagaagggaaagaagaaggcgaagaagagcgttgagacgtacaagatctacatcttcaaggtgctcaagcaggtgcacccggacattggcatctc

SEQ ID NO: 73583 - DNA, 243 bp, Zea mays
attgtccttcgccctctggagccagcacctatgcaggaccttgcccgtgagttcatggtatagaccaggcgaaggaagggcatgagtgaagatgtgagcatcaataaattcttcgacgaggccatgatgaatgagctggcccaacaggctgctgatatccacttgcaaatgatgtagtcaaaaagcgagatgaagtgcacacgtggaagatgcaaatgccctcagcttcttcataccatacat

SEQ ID NO: 73584 - DNA, 221 bp, Zea mays
caagaaaggccaccacgtcatatggttcccaggatgagaagggatcaaggaaggtcataatgtcatatgggtctaatggtgaggatgatccaagaaaggccaccacatcatatggaatacaagataaagagtatcccaggaaggccaccacatcttatggagttcaaggggacatccatcaccatgaccatgctgccgttgcacagccacatcgcggcaac

SEQ ID NO: 73585 - DNA, 217 bp, Zea mays
ttgacatccaaaggtgtggagaataccatgctgctcaagaacctgatggagtcgcagaaggttgactacgattttgagtactacaagctggaaatggcagctgatgtgcagctactcactctctctgaggggaaatcaaacatccttccttcagatttggtagtgcctttccggccatcctctgttcccacaattaatgcaggtgctgaggaaactg

SEQ ID NO: 73586 - DNA, 277 bp, Zea mays
gaaaataagcttgctggatggtgatatagtgctggaggacttctggtggcctaggcaattaattgtcggccagatttgcttcgtgctgctgtcttaaaggtccctttcttggatgactgcaacacccttctccatcctattgtacctcttacagccattgattatgaagagttcggggatcccgtggattatgaggaattccttgcaatcaggaagtattctccttatgataacatccagaaggatgttccttacccagctctgattgtgacatcat

SEQ ID NO: 73587 - DNA, 186 bp, Zea mays
cgagactgttgaaaacatactcagaaatatggtggatgttcgtgatgttgctgacgctcttcttctggcttacgacaagccagaagcgtctggacgatacatctgcagttcacatgcaataaaaggtgctgatatgataaacatactgaagaccttgtatccatcttacccttatcccaaaaattt

SEQ ID NO: 73588 - DNA, 279 bp, Zea mays
gtcgccggcaagaagatcgccgtcctcggcttcgctttcaagaaggacaccggcgacaccagggagaccccggccatcgatgtctgcaagggcctgctgggtgataaggcccagatcagcatctacgacccccaggtgacggaggaccagatccagcgggacctggccatgaacaagttcgactgggaccacccgatgcacctgcagccgacgagcccgacggctgtgaagcaggtgagctgcgtgtgggacgcgtacgaggccaccaagggcgcccac

SEQ ID NO: 73589 - DNA, 277 bp, Zea mays
gtgccactctcgccatctctccactcccagtgcgcgactgtcttttcatgtatggaatagccgggttcaagcttacccatgacgaggcatgtggccagataaagggtcctagatcagcaggccaacaatcggtacggtccttaaacgactcagacggagacactacaccgagactcctttctcgtgcaagccactcgcccggtctcagctttattatttagccccaaagtttggtacctggcagaggtacatctttatcaatgttgaatccatcaag

SEQ ID NO: 73590 - DNA, 192 bp, Zea mays
tgttgacatccttgcagctgtcgcgtgaacaagtaatctatgatggcaatgtttgcctggtcatgaagtattattactttcgttgaaaccgtgatgctattaagacttaatttttttatggaacatcgaatgtaaggcatacatggttatgagttttgtactaccctttgcagtgtgttcctgttttaaaaa

SEQ ID NO: 73591 - DNA, 282 bp, Zea mays
gaacactcctagctgaagatctcgagtgcaacgcaacgttggcgcttggcggccagtagcagcagcaaacttagcgtcgctccttcctactagacgagagatcgagaaaccatggccaagctccaagtcactcctggcgccgcgttcaccgagtgcaatgaactcaacttccagggcctgtacatgtaccacacgcccctgggtcccaaggccaaccaagctgcgatcctagagagcaaggccaagatcggcatcggtgccaccgtggttaacaactgggca

SEQ ID NO: 73592 - DNA, 289 bp, Zea mays
ccactttccccgtgcttctccgccgtcgatgccgcgtcccagtgcgaagagaccacgactcagatggccagccgctgggtccggcccgaggtgtacccgctgttcgcggcaacgggcgtggacgtcggcatctgcggatttcagctcttccggaacatcaccggcaacccggaagtcagggtaaacaaggcagggagggcagctggtgtgcttgagaaccatgaggaggggaggcgttacgccatgcatggcctaagaagctttgtgcacgacaagactcctgagatca

SEQ ID NO: 73593 - DNA, 269 bp, Zea mays
gcggcaagtactacagggtgtgctgcctcagtatcatcgacccaggtgactcggacatcatcaggaccacccctggcacccagtgagccagccccggcacccattgcagctgcttcgcctttctcaagatgagatgagatgtagcgctccggccctatgtccggttcctttttttatcttttagctatgtaattttgctaccatgtgtccatctaccatactgatagtacctcttattatggctgctatgcaaggcatatccatggttt

SEQ ID NO: 73594 - DNA, 289 bp, Zea mays
cgcgtctcctctcgccatggacgccggtgtagagaagcgcggcgacgcggcggcggagggcggcggcgacctgtacgctgtcctcgggctcaagaaggagtgctccgacgccgacctcaaggtcgcttaccggaagctcgccaagaaatggcacccggacaaatgctcctcctcctccatcagcgtgaagcacatggaggaagccaaggagaagttccaagagatccagggcgcctattcggtactctccgacgccaataaacggctcctctacgatgtgggagtatat

SEQ ID NO: 73595 - DNA, 288 bp, Zea mays
actagcggtccctcaccagggcgtgcatcccagcagccatggcgatggcgtacaagattgcgaccgaggggatgaacttcaagtaggtgtgccagcgctggttcatggagatgaagtggaagaaggtgcaccgcttcgtggtgtacaatatctacgagcggtcgcgcgccgtgctggtggacaaggtgggcggccccggggaagggtacgaggagctcgtggccgcgctgcccggcgacgactgccgctacgccgtcttcgacttcgacttcgtcaccgtcgacaact

SEQ ID NO: 73596 - DNA, 287 bp, Zea mays
ataaatcttggtcctctggaggagctatcgaacttgtacaaagctgatttgctactctgtgaatctggaggagataacttggcagctaacttcagcagagaattagcagactacataatctacattatcgatgtctctggtggggacaagataccaagaaaaggtggccctgggataacccaggccgatctgttggtgcgtcgtgctgtattcaccagcatcatctataaccttgtgcacttaacttcatttgtagctctgcaaacttattttgacttttgcacact

SEQ ID NO: 73597 - DNA, 292 bp, Zea mays
  unsure (1)..(292): unsure at all n locations
cgaccattgagatcgactccttgttcgagggcatcgacttctactctacaatcacgagggctcgctttgaggagctcaacatggacttgttccgcaagtgcatggaacctgtggagaagtgcctgcgcgacgccaagatggacaagagcagcgtgcacgacgtcgtgctcgtcggtggctccacccgcattcccaaggtgcagcagctgctgcaggatttcttcaacggcaaagaactctgcaagagcatcaaccncgacgaggctgtggcgtacggcgcggctgtacaggc

SEQ ID NO: 73598 - DNA, 290 bp, Zea mays
gccttctgcaaacaaaagaagatacataaagcaatggaatttgtggaactaatggtgtccaggggttgttacccagacatcgtttcatacaacactctacttacagcactctgccgcaatggggaagttgatgttgctattgaattgcttcatcaactcaaggacaaaggctgtagcccggtcttgattagttataacacggtcattgatggccttactaaggctggcaaaacaaaggaagcgttagaactgttggatgagatgaccagtaaagggctccaaccagatat

SEQ ID NO: 73599 - DNA, 230 bp, Zea mays
gttttatgatattcctaacccattccaggctggaaggcatcacagccttgtaatcgagaaggatagattcccgcatgataccctggaaattgttgcgtgtacagatgatgggttgatcatggctgctcgccacaggatatacaaacatattcagggcgtgcagttccatccggagagcatcataactactgaagggaggctcatggtcaacaattttatcaggattattg

SEQ ID NO: 73600 - DNA, 287 bp, Zea mays
gcagtgttgaagcattttgattggcctgagagaaaggcggacactctacgagaggcagcttttggctaccaggacctgaagaagctggagtcggaagtttcaaactacaaagatgatccacgcctgccctgtgaaatcgcactgaagaaaatggttgcattatctgaaaagaccgagagaggtgtctacagccttctaaggacaagagatgctatgatgaggcagtgcaaggagttcaatatccctacagactggatgcttgataacaatcttattagcaagataaa

SEQ ID NO: 73601 - DNA, 271 bp, Zea mays
  unsure (1)..(271): unsure at all n locations
gggatgcctgctggtggcttccctagagggatgcccggtggaggttccccggtgtgcatgcctggcggttcctgtgggtggcatgcctggaggtttccctggtggtgttcccggtaatgttgatatgagtaaaatcctgaatgaccctgacctgatggcagcattcagtgacccagaggtcatggcggctttacaagatgtgatgaacaatcctgccaactttgctaagcaccaagcgaatcctaaggtggccctatcatcgcanagatga

SEQ ID NO: 73602 - DNA, 180 bp, Zea mays
  unsure (1)..(180): unsure at all n locations
aatccttcaagcgcaagctgcctcctcctcgtcgtccggtcgtgagaagggatggcgggccgtggcaaggctatcggcgctggcgccgcgaagaaggcaacgtcgaggagctccaaggccggactccagttccccgtcggcaggattgctaggntcctcaaggcgggcaagtccgctgag

SEQ ID NO: 73603 - DNA, 275 bp, Zea mays
caccccgctcgtctatatccgcctctaaaccctagctcttccattcttccccctccggcgccgcctcccccagacacttcgccgccggcaagatgggccgcgtgattcgcgctcagcgcaagggtgcggggtccgtgttcaagtcccatacccatcaccgcaagggccctgcccggttccggtccctcgacttcggcgagcgcaacgggtacctgaagggcgtggcaccgacgtcatccacgacccgtgccgcgcgcgccgctggcaaggcacct

SEQ ID NO: 73604 - DNA, 285 bp, Zea mays
  unsure (1)..(285): unsure at all n locations
cgtgaacccgccgacgacgcagcagcaggagacgcgccaaggagagcccgcaaggaggcgactatgagggccaagtggaagaagaagcgcatgaggaggctgaagaggaagcgccgaaagatgaggcagagatccaagtaggctgatggggattgtggatggtggtgtcggcatagttgtgttacgtttcttcgatgcgtgagttcatggagagatgtcacatcctagttcgtcgtcaccgtttgccatgngtccaatggctcgtcttggaaacctgcacttcag

SEQ ID NO: 73605 - DNA, 289 bp, Zea mays
atcactatgcacataaggatggtccatatagcggcagggcaaaggaattgtatgacaagctaagatcaaaccttatccggaatatagtgcagaattacgatgcaacaggtttcttctgggaaaactatgaccagaaggacaaaggaaagggaaagggtgcacggtcatttactggatggacttcactcattgttctgatcatggcggagtcctacccaacattgcacaggtgagatatagatcgcgaacaaccacagcagaagatagctatggcaattggaatggaggg

SEQ ID NO: 73606 - DNA, 271 bp, Zea mays
ccgatccccaattcctccttcggatctcgcattcagcgcagcgcaggtgtgaaggaagggggacgcggaggaagatggggctcgcgttcgggaagctcttcagccggctcttcgccaagaaggagatgcggatcctcatggtcggcctcgacgccgccggtaaaaccaccatcctctacaagctcaagctcggcgagatcgtcaccaccatccccaccatcggtttcaatgttgaaactgttgagtacaagaacattagcttcactggtct

SEQ ID NO: 73607 - DNA, 283 bp, Zea mays
ctccaggtaaggaaagggttcgtactcatggcgccgccgcagccaaagtcgggccttttcgttggcatcaacaagggtcatgtcgtcaccaagcgcgagctgcctccccgcccgtgccaccgcaaggcgaaatcaacgaagagggtgtctatggtcaggggcctgatcagagaggttgctgggtttgctccttatgagaagcgtatcactgagcttctgaaggttggcaaggacaagcgtgccctgaagcttgctaagagaaagcttggaactcacaagaggg

SEQ ID NO: 73608 - DNA, 276 bp, Zea mays
gaagcaagatttccaattcctgatataatcctaagaacagttactggaagtatgtttcctgttattgatccagggcaagtaatctccattcaggaacatgagtatgtttattgcctggcaatcgtcaagagcatgaagctcaacattattggacaaaatttcatgactggtcttcgtgttgtgttcgatcgggaaaggaaaattcttggatggaagaaatttaattgttatgatactgatagttccaatcctctctccatcaactcccggaattca

SEQ ID NO: 73609 - DNA, 304 bp, Zea mays
  unsure (1)..(304): unsure at all n locations
ttgggctggaaggcccgtcgaagctgaatcgctcaggacgtagacccttactcgcgagcgctgacgagcactacagcgcctgatgcacaggcccgctcatctacctcaagagggaggacctcaaccacacaggcgcccacacgatcaacaatgctgtggcgcaggccctgctcgccaagcgacttgggaagcagcgcatcattgccgagacaggggcttggccagcacggtgtcgccaccgccactgtgtgcgcncgtttcgggctgcagtgcatcatctacatgggcgcgcaagacatggaga

SEQ ID NO: 73610 - DNA, 293 bp, Zea mays
cggctcgaggtaatgatcgcggcccatgggaattcacttcgttcgatcataatgcatttggacaagctgacttctcaagaggttatcagccttgagttgtctactggcattcctatgctgtatatatttaaggaaggtaaattcatcaggcgaggaagccccgctggaccttctgaagcaggtgtctatgcttataccaagaatttggctcagtacagacagaagcttgatggcatagttcagtagccatctgcaggcttttcgtttgctactcatccgtcgaacatgcattt

SEQ ID NO: 73611 - DNA, 281 bp, Zea mays
gcccgcatcgccgcagggttcgcaaagatggcagtgccgctgctgacgcagaagatcgtgaagaagcgggtcaagcagttcaagaggccacacctcgaccgctacaagtgcctcaagccaagctggcgtaggcccaagggtatcgactcccgcgtcaggcggaagttcaagggatgcaccttgatgcccaacattggatacggctctgacaagaagacgaggcactaccttcccaacaagttcaagaagtttgtcgttcacaacgtctctgagctggagct

SEQ ID NO: 73612 - DNA, 205 bp, Zea mays
atgactttgcagaagataaccttttgggagaaggtggatttgggtgtgtgttcaagggcattttgccggatggtcgccctgtcgccgtcaagaagctcaagattgggaatgggcaaggcgagcgtgagttcaaggctgaggtcgatactatcagcagagtacatcataggcatttggtttctctagtaggctattgcactgcgga

SEQ ID NO: 73613 - DNA, 249 bp, Zea mays
ctcagcgctcagccggactttcactttcgaaagggatgggccttcccacgccgagtttacttcaatggcgataattgtgtcatgccatctcctgaaaattatccacggctgccgaatgcaagccctctaacaaaaccattggcactcccattcttggtattctgggttgccttggctgctctgctggcttatgcatgattagtgggatcaagaaggttagcaagtttcaagttgatggcagattccatg

SEQ ID NO: 73614 - DNA, 277 bp, Zea mays
cggctcgaggtcttgtttgcgcatttgattggaaatgtgcagacctacctgcaatctattactgtgagggttgaggaatggagattaaagcaaagagatactgaggaatggatgagacatcgtcagcttccttgtgaactgcgggaaagggtgagacgatttatccagtacaagtggcttgcaacaagaggagtgaacgaagagtcaatattgcatgctctgcctgcagaccttcgacgtgacattaagcgccacctttgcctgggtcttgttcgac

SEQ ID NO: 73615 - DNA, 247 bp, Zea mays
cgcaggaagacaagatccccgcggtgatcagccgcttcagggctttccatgaggcgatcttggccgaataccgcgactaaactgttacgctgtgtgtgagttaagttggagggtcagtagaactgttgaagagctcagtgacagcgcagaatgaggcagtgttagaaaggcttaggtccttcttcacaggagcaacagttgtcttgtctcatcaaggagaaataaaaattttagttttacaacttct

SEQ ID NO: 73616 - DNA, 275 bp, Zea mays
gcagagaactttatagtggataactgcaagagcatatattttgcaggacatgagagcacagctgttacagctgcgtggtgtctaatgctccttggactgcacccagaatggcagaatcgagtacgagaagaggtgcatgaagtctgcagaggccagccagtagactcacggtcacttcagaagatgaaaaatttgacaatggtgatccaggaaaccttgaggttgtacccagcaggtgcctttgtttcaaggcaggccctccaggaactgaagct

SEQ ID NO: 73617 - DNA, 288 bp, Zea mays
ctccctgctcagactcgtctgctgcagctcctcctccgccgccgtatcaaacgcactctcctccgtcgtcgcccgaggcatgatggatctccagaacgacatcgaccttctgaacccgccggcagagctcgagaaactcaagcacaagaagaagcgcctcgtccaatcccccaactccttcttcatggatgtcaagtgccagggatgcttcagcataaccacgggtttcagccactcccagactgttgttgtgtgcccaggctgccaaactgttctctgccagcccac

SEQ ID NO: 73618 - DNA, 260 bp, Zea mays
gacgcctagaaccacagccaccgtgatgacgcatgatgatcgatggcaaggccatcgacgccgacgtccgccgcgaggccgccgccgatgtggccgcgctctcgtcagccgacggactcgtgccgaggctggccgcggtcatcgtggggagcaggaaggactcgcagacgtacgtgaacatgaagcgcaaggcgtgcgccgaggtcggatactgctccatcgacgtcgacctcccggaggacatctccgagaccgcgctc

SEQ ID NO: 73619 - DNA, 258 bp, Zea mays
  unsure (1)..(258): unsure at all n locations
gaagaaatgggtggaagttggtaattcaggcatgttcaggccagagatgttgcttcccatgngactgccagaaggcgctaatgttattgcatggggactttcacttgaaaggccaacgatgatcctttatggtatcgacaacataagggacctgtttggaccaaaggttgatttcaacctcatcaagagcaacccactatgccgatgggactgtagtgactagtgaggtacagggactctgaagcttgatcacaatgt

SEQ ID NO: 73620 - DNA, 261 bp, Zea mays
  unsure (1)..(261): unsure at all n locations
atcgcttatctgttgtaaaagaaggaggttgcaggaccacacttaataattgctccaaaagcagtattaccaaattggtctaatgaattcaaaacttgggctcccagcattgggacaattctttatgatggccgtccagaggaaaggaggctgttaagggataagaattttgacggagagcaatttaatgttttgctcacacattatgacctgatactgaaaganaagaagttcctaaagaaggttcactggcattatttg

SEQ ID NO: 73621 - DNA, 271 bp, Zea mays
tcctgtcaaaaggaagatcgagaagaagagggagaaggttctttatcatgagagtgtactgaagcggaatccgtttgtgcagccaatcccatcttctgtgccgggcaagaaggataagaagattaagaagaagaaattgcaggagacacagggagagaaaagtgttcctatggaaaatgattctgtagttaagaactttgacatctgggctgtggatggtaaaggtgattccaaggccaaaaagagatctactatatcagttattcctgct

SEQ ID NO: 73622 - DNA, 273 bp, Zea mays
  unsure (1)..(273): unsure at all n locations
gatgaccattggcattgcgctcatgttggctnnggtctnccatacaccttcaccatttataactttggagcccagaagacagtgcaaagctggtacatgcnaacaaaatttgattgaccattgaagattttagcataaagttaacattacaatctttctttgcgttaaattcatcaagcaactgttcttatgngttgcagntgatatttatgctgggctaatgganggtttggtataangnacttatattncaatctcccctaattaaaatna

SEQ ID NO: 73623 - DNA, 274 bp, Zea mays
acggcggcgacatgaagtacatcttccatggggccgccgctggacatacggctggtggaagccggcgccttcgacgcgctcatggacctgttggtcagccagggcggctccatcaaccagtacgagacgccacggtgcatcgagccgggcggcgccgcgctggagctgctcgactccaaggccaccgcctcgttcatcagcccgtgccccgtgtaagctttcgggcttctggtgactgaggttgttccgagctcgatctgctactctaaagcta

SEQ ID NO: 73624 - DNA, 265 bp, Zea mays
cggcggcgtacgtagcggcggtctcaacctcaggcgagctcggctccggtcacccgtcgatccacgcaaccatgtcgagtaggaagaccagggagcccaaggaggagaacgttacccttggacccactgtccgtgaaggagagtttgtctttggtgttgctcacatctttgcatccttcaatgacaccttcattcatgtcactgatttgtctgggagggaaactttgtttcggatcactggtggcatgaaggttaaggctgatcg

SEQ ID NO: 73625 - DNA, 275 bp, Zea mays
  unsure (1)..(275): unsure at all n locations
ctgtatcctagtgacatgcatccagttcaaccctgttgatgatagatacttcattagtggttcactggatgaaaaagtccgcatatggagcattcaaaaccgtgaaattgttgattggaaagatttgcatgaaatggtcactgctgcttgctataccccagatggacaggttttaatcatctatacataattctttgatttaatatcttcttcatgttacgatctgacacatctctntctttctttctcgaagagtgcactaattggttcccata

SEQ ID NO: 73626 - DNA, 271 bp, Zea mays
ccttgccaccagcacggttcagtgcctgatccatgtcttcacaggttagaacaccaaatacacaaggaacaccagcagataatccagcattgagtacacctgatgcagctgagtttgcaacggcatcatagtgggttgtgtcacctctaatcacagctccaatgcacagaattgcatcaaattttccagatttcccaagcttttgtgccgttataggaacttcaaagcttccaggaacactaacaactgttatattttctgctttaacaga

SEQ ID NO: 73627 - DNA, 222 bp, Zea mays
ctgagttcctgattgttgtattccagtttcttctgcgagtttcgcgggatcgcgaggaagaactagaaggatgtcggctgcggagcaactgtgggtcgacgccggctgcaagtgcggcagtggctgccgagggtgcaagatgtacccggacatggctgagcaggtgaccaccactacccagactctcatcatgggtgttgcaccgtccaagggcggattcga

SEQ ID NO: 73628 - DNA, 262 bp, Zea mays
ctaatatccaagaagaggaagtttgacgctgatggcatcttcaaagctgaagtgaaagagtctcttactcgggagctggctgaagatggctactctggagatgaggcgcgagttacaccaacctggacagagatcattatcttagcctccagaacacagaatgttcttggtgagaagggtcggcggattcggggaactgactgctgtagttcagaagagggttggctttccagagggcagtgtagagctttatgctgaaaag

SEQ ID NO: 73629 - DNA, 244 bp, Zea mays
  unsure (1)..(244): unsure at all n locations
agaaccttgtggagcagaagaaagcaaaccctgtcgcgctgcttctgtcatctgctatgatgttgaggcatttgcagttcccgtcatttgcggaccggctcgagacggcagtgaagcgtgtcgttgctgaaggcacgtacagaacaaaggatctgggcggtagcagcaccacccaggaagttaccgatgctgtggttgccaatctggattagattccaggtgtacacggctaanaaaggctaat

SEQ ID NO: 73630 - DNA, 275 bp, Zea mays
cggctcgaggggaggaggtcattgtcgaccttgttgcccagtgccgatcctatcaatgtcgtgtcatggatcttgttaacagtactggcgacgagagcctttcatttcaggctctaggactaaatgatgagttacagcgtgctgttcagcgtcatgatgacatagcacatgggatccctcctggtactggagcacctttacctgcttctggaaatgtcaaccaagggactgcgccacctagacccactgcggattcattttctgcacttctaaat

SEQ ID NO: 73631 - DNA, 274 bp, Zea mays
ttcggctcgagattaatcttgctaaacatatatcaaacacgaggagttatggagttaatgttgtagttgcaatcaacaaatttgcatcagatactgaggcagaaatgaaggcagtgcacagtgcagctatggctgctggtgcttttgacgctgttgtctgcacacaccatgcccatggtggtaaaggagcggttgagcttggacttgctgttcaacgagcatgcgaaagccaggcagaacctctgaagtttttgtatccttggaatctagcata

SEQ ID NO: 73632 - DNA, 191 bp, Zea mays
cttcctcaggcgtgtcttgtacgcttctctgctctggagcaactatgcctaaccctaaggtcttcttcgacatgaccatcggcggtcaatctgctggccgcatcgcgatggagctctacgccgacgtcactccccgcaccgccgagaacttccgcgcgctttgcaccggcgagaagggcgtagggcggagc

SEQ ID NO: 73633 - DNA, 265 bp, Zea mays
gagatttaggatttgttcggtttgaattggattgatggggattttaggggatttaatccccttctatacaaatttgtataggaggggatttaatcctccccaatcccaaatcccctcctaaccgaataagacctgagagggaaatgaactcaatctccctcaatccacccctaaccgaataggcctgagaggaaaatgaactaagttctccttcaattctctccaatccccggagaggggatttgagtttccaaactagccattg

SEQ ID NO: 73634 - DNA, 260 bp, Zea mays
  unsure (1)..(260): unsure at all n locations
acaatgacttgaggttcatggtgcaagatgattccgctcagaaaaagtcccttttcacgagcagggaacattatggtcacatggtggatagtgcggcacccttcgcaaggccgtttcaggagaatgatcctctgctggaccagatcgacggcaatatactcaagcgttggagccatggaccagttcctggtgcttggtgcacaggaaggaagaagtgtntcagtgatccatgntcccagtgggcgatgtgaatgttttga

SEQ ID NO: 73635 - DNA, 264 bp, Zea mays
  unsure (1)..(264): unsure at all n locations
cattatgtcatgtcacccacaagggtctctatctgatccaactcttattgtcccaaatatatnntntgtccctcagttatccatggatctactatcagttggtcaaattaccgatcacaattgttttgttggatttgatgactcatcttgttttgtacaggatcgcaaaacaggagatgtgattgggactggccgtcgccgtaaatcttcgcctcgcctctacatcttngacactttgcgtcttccttcatccnctactactac

SEQ ID NO: 73636 - DNA, 284 bp, Zea mays
cgcagcgatcgtagctgtctgcgtagtgtaccttggccgtagctagtgctactctttactttggagtagcttaataataataatgtagctagcagcatgcatgtaggcgatcatacgtacgtacgtacatgcaggtacgtgtgtgtgtgatcatgtatgcttccagaagggtatcctagcttaatcagtcacgtcgtcaagtcgtcaatatggcaggttcgcgtcagggctttgtagtttgatagcctgtttcacgactcctcaataatcaaatagtgtaatga

SEQ ID NO: 73637 - DNA, 289 bp, Zea mays
gatgcccatctccgccgaactggattggctcgagaaagagggaaacggacagattacactccatatcatgtcaaagatcatttctgaacacctggcgttggagatcaccatggatgtccgtttcgacattttggtgaagaagatttgcgggctgcactcaacaaaatgtgcgttggtgggcatgcattggaagaggtaatggataaagtgaagaacaggcattaccaggtagcttgcacattaacctttgaggcacacacggtgtctcctgtgattctggaatcaacca

SEQ ID NO: 73638 - DNA, 294 bp, Zea mays
ctcggcctctacaccttcgccgacatcgacgccgacggagcaccccgcctcgaggttgccgatggcgaggagttcgtccgtgtcgatcgcgttgtcgagcttgccctcggtccccgggtgctgaaggcccctggaaccctttacctcaccaccaggagggtgatttgggtcagcgatggcggcgagggctacgctgtggacttcgttgccatctcgctccacgccgtgtcgcgtgatcccgaggcgtatccatacccctgcatctacacacagatcgagacggaagctatttct

SEQ ID NO: 73639 - DNA, 317 bp, Zea mays
  unsure (1)..(317): unsure at all n locations
tgggcttgaccatgccgcgtcgtagctcgaattcggtcgagccaccttggaaggtgccacaagagcggtctgagttcgagggggcctggactacaaaccctctggtctttgacaactcttacttcaaggaacttctgagtggtgataaggagggccttcttcagctcgcaagcgacatagccctgctgagtgaccctgtcttccgccctcttgtcgagaaatatgctgcggatgagaaggctttctttgatgactacaaagaggctcacctcaagctctccgactgncgttgctgatgcttaatagacctatctgga

SEQ ID NO: 73640 - DNA, 210 bp, Zea mays
ctccccactccctctcgtcgccgtcctctcccgttcgcaacgccacgctccccaccgccgaaatggccccgaagcgaggtggcagggcaccggtgccggccatgaagaagacggataaagtgacgaaccctctgttcgagaaaaggccgaagcagttcggcatcggcggcgcgttgcctcccaagaaggacctgcaccgattcgtcaagt

SEQ ID NO: 73641 - DNA, 263 bp, Zea mays
  unsure (1)..(263): unsure at all n locations
ctgaattaaggcactatgctcctggcgtgcccataatccttgttggacaaaacttgatctgcgtgatgataagcagcttntttgttgatcaccctgaggctgttccaatttccactgcccagggcgaagagctgaggaagctaattggtgctgccgcctacatcgaatgcagttcaaaaatccagcagaacataaaagcagtgtttgacgcagcaattaaggtgggtctccagccaccanagcaaaagaagaggaagaagaag

SEQ ID NO: 73642 - DNA, 107 bp, Zea mays
ttgtgttggggctgccgatcacgcgacgaagctcgcattcgctcgagtgtgatccaaacccgccactgcacagatgcgcgagatcgtcagcgacaaggacgcctctg

SEQ ID NO: 73643 - DNA, 253 bp, Zea mays
caaaggacggggacaaggggagagtgaggtatcaggcttccataactggattcagttttacctggaagaagccaagggaaatgtggattaccaaggttatatatttccaaggcgccgtggtgaatcgcctgattcagagatacagctgctgactgttcagtttgagtggcatggcgtgctgaaatcggtatccagcacgttgattggcgtcagtcctgagtttgaggttgcactctacacgttgtgctttttt

SEQ ID NO: 73644 - DNA, 252 bp, Zea mays
cgccgtggagggacgagacctgaccttgcagtacaacatctacaatgttggctcaagtgctgcattagacgtggaactatctgatgattccttccctccagaagactttggcattgtgtctggaatgctcaatgtcaaatgggaccggattgcccctgctagcaatgtctcccacactgtggtcctgcgccctctcaaggctggttatttcaacttcacctcggcaacaattacttacctggcccaggagga

SEQ ID NO: 73645 - DNA, 257 bp, Zea mays
caccaccgctcacctcggtttggctttctcccctcttccgcacccgcttctcgctccggattccggattccctctgctctttccctaacgaaggtagccatggcggggagaggtaaggcgatcggctcaggcgccgccaagatggccacgtccaggagctccaaggctggcctccagttccctgtggaaaggatcgccaggttcctcaaggccggcaagtatgccgagagagtcggcgccggcgcccctgtctacct

SEQ ID NO: 73646 - DNA, 255 bp, Zea mays
cctccctctacgccaacaagcccgcgtccatctcctcctcgctcaccgcgctgccccccatcctgccccgcctcctccgcaccttcctctgggtctcccttctcatgctcgcctaccacctcgtcttcgcgctcaccgtcctcctgctcatcgtcgtcttcatccccaacgcgtccgagtccgagtccgcgccgccctccctcgccttcgtactcttcctcgtcgtcgtcgtcttcgtcttcctcgggatccacg

SEQ ID NO: 73647 - DNA, 258 bp, Zea mays
tttcgaagaagtgggcagcaaacagcagcagcagcagttcatcttccttctccttggggatccgtccggtgccccggtgtccagggacaaggaagcctcggtgcagataagcaggctgccgcactggaacaaccaggcggacggctacctggcgtgcctgcgcgcggacaagaagccggctgcggaccacacgcccttcagcccgctggacagcaagctgaacacggttgtgaaggacgcgcacctagccggtgcaat

SEQ ID NO: 73648 - DNA, 254 bp, Zea mays
tttgaggataatccgacatttaaacaacaacccaccaaagatcaccataacaatgtcggacggagaagagactatttccaacccccctgtcgctgaggccgaggatgtcgaggtccccgccgagtccagcggtggacagatgtcggtcaacgatgcgctcaagggcgtcctcaagatcgccttgatctacgacggtcttgcccgtggtctccgcgaggcctccaaggctctcgaccgtcgtcaggctcacatgt

SEQ ID NO: 73649 - DNA, 250 bp, Zea mays
gtggacttgaacacagggcaaagctggataaaaatgatagtctgctggatttcacacacaaacttgaatctgcatgtgttgaaacggtggaatctgggaaaatgactaaggaccttgcgcttcttatccatggccccaaggtaacaagggagttctacctgagcaccgaggagttcatcgattcagtcgcgcagaactgcgaggaaagattcaactaccaactactgtgtaatcctgaacctgaagcctg

SEQ ID NO: 73650 - DNA, 250 bp, Zea mays
gaatttgagtggtcaaaaagggccgtccatgtgagtgtcacaaagcaaaccaaatggtggtatgccaaacgatttctacatcctgacattgttgcccgctacgactacatatttatctgggatgaagatcttggtgtcgaacattttaatgcagaggcgtacattaagcttgttaggaagcatggccttgagatctctcagcctggtttggagcccgataaaggtttgacatggcaaatgactaaacgaa

SEQ ID NO: 73651 - DNA, 249 bp, Zea mays
ccaggtcgaatgtgcgctatcaatgcggaaactaaaaaacccacgtgtatttgtgtaacggaatgttctaaaaataacgatctgcgacgtaaagtatgctcaaactacaacactacctggcagtcggattgtcatttacacaagcatcgatgcttatgcgaagaaaatttgtcagaagattgcactgaacagcacaagcacatgcatattgattactatggagaatgtacagaagacatcaaatgcaaa

SEQ ID NO: 73652 - DNA, 250 bp, Zea mays
aaccaatcctaacactttatttttactggaacattcattattttttcgaaaactacaaattttaaaataaaataaaaaatgggtttgttagatggcaaagtgatattgattactggatcgacatctggaattggtgcttctactgctattgaggctgcgaaagaaggtgcttctgtagtcgtcagtggaagacgtcaagacaaaggagacgaggttgtcaagaagattaccgatgctggaggcaaagcaa

SEQ ID NO: 73653 - DNA, 250 bp, Zea mays
ctcaacaccgctcgccgaatgggtagacaccgtcgtttgggtcagcgtaagggtaccaaggacgctcgtatgccaagccaagttctctggatgcgtcgtcagcgtgttctccgccgtctcctcgtcaagtaccgtgcctccggcaagatcgacaagcacctctaccacgagctctaccacttgagcaagggtaacaccttcaagcacaagcgtgctctcgttgaacacatccacaaggccaaggccgaga

SEQ ID NO: 73654 - DNA, 265 bp, Zea mays
ccggccggccgtcactaccgtcgaaggttaccgtgtcagactggatggacaccgtcacggatgcagagcacgttccagcctcggtgttcctggggcctgaatttctgcgcccaagctctaccagctgagcccaccggaggactacacgctgtcccagagcctggcccgggtgagctcctactacgtgcccgacctgcagagtcagacgccgttcagcgaggccaggtacggcgcggtgagcaaggtgtacgtggtctgcaagcag

SEQ ID NO: 73655 - DNA, 265 bp, Zea mays
gtgctcaagacagttctatcctctacaaagaccgactcgccaaaacaggccgcttcacagttggcattgacccggacaaattcaacgagacactcaagcaagatgaagtccagcacgcatcaaagaattgaacgaacgatacaaagatatgaaagtgattgttggcgttgatcgattggactacatcaaaggcctgacacagaaattgcatgggttcgagcagtttttgacggatcatccgaaatggcagggaaaggttgttttg

SEQ ID NO: 73656 - DNA, 264 bp, Zea mays
cccgtttcgccgacataatcgccatctgcgtccagtcggagccggagttccggccgccgatgtccgaagtcgtgcagcagctggtgcgcctgatgcagcgggcgagcatcggaggcgacaatcggacgaccagctgggctactcgtacagggttcccgagcgcgacggcggcggcacggcaggcggcgacgtcgtcgtcgcctgagctagctagctagctagaggccgcgacgagaccaaagctggcgtacactcctactccta

SEQ ID NO: 73657 - DNA, 263 bp, Zea mays
cccgtttcgccgacataatcgccatctgcgtccagtcggagccggagttccggccgccgatgtccgaagtcgtgcagcagctggtgcgcctgatgcagcgggcgagcatcggaggcgacaatcggacgaccagctgggctactcgtacagggttcccgagcgcgacggcggcggcacggcaggcggcgacgttactctcgcctgagctagctagctagctagaggccgcgacgagaccaaagctggcgtacactcctactcct

SEQ ID NO: 73658 - DNA, 267 bp, Zea mays
ccgcgacaacaaagagggctgtacagacatttggcaagaagaaaacggcaatcgcggttgcctacgtaactgatggcaaaggaatgattagagtaaatggccaaccactcaactcgtcaaacctgagatcctacaattaaagctttgggaaccagttttgcttctcggtaaagacgctttttccaacatcgatattagagtacgcgtgaagggaggaggttacacttctcaagtgtatgctatcagacaatccattgcaaaggcatt

SEQ ID NO: 73659 - DNA, 265 bp, Zea mays
accaccgttgtgacctcttggctcgatggcaagcacgtcgtctttggcgaggttgctgacgaggcctcaatgcaggttgtcaaggagctcgaggctctcggctcctcctccgctccgtccgctccgctaccaagcccaccatcgtcaactgcggtggtgattaaatgagttgagttttggcggcagagtccctctttgaagcgtgggttcttcctctgcaaaaatagtgggttgcacggcggattggccgttctaggtggcgttg

SEQ ID NO: 73660 - DNA, 265 bp, Zea mays
ctccaacgtgggcggctgcgggtccatccagtcggcgtccatcaaggggtcgcgcaccgggtggatggccatgtcccggaactggggcgtcaactggcagtccaacgcgtactcaatggccagagcctgtcgttccaggtcaccagcagcgacggccagaccaaaaccttccccgacgtcgcgcccgccagctgggggttcggtcagacgtttgcgacctcgcagcagttctcttagtatagacacatctttgttttctgcctcg

SEQ ID NO: 73661 - DNA, 266 bp, Zea mays
gccgagagcccagttgtttcaggcggggaaccaggcagccacaagatccagggaatagggccgggattcataccggaagtgctggacacctcggtcatcgacgaggccgtcacggtgaccaccgaggaggcgatggcgggcgcccggaggctggccagggaggagggcctgctcgtcggcatctgctccggggccaacctggcggcctgcttgaaggtcgcggcgcgagaagagagcaaggggaagatgattgtcaccgtgtttcc

SEQ ID NO: 73662 - DNA, 263 bp, Zea mays
catcaataaccaatttgaaaatatcagatcgatggagttagcttgaagcactaggtcctgggatgtcacatcagcacacataaaggatgcattcttgtagtgaccattatgctttcattctttttaattgcactttcaataaaatccagagcaagaacattcccagctgttttagcgagttctccagtgaaacgccctattccagcaccaagctctagtacagattttccttcatatgaaggaagcaaagacaggacctcagg

SEQ ID NO: 73663 - DNA, 263 bp, Zea mays
gcggcaagcccaagatcctgaagaagtgcaacctgccgctcaccgcccagggctgcgtgaaccgcatcatcaccgagatggccgtgttcgatgtggacaagagcgggctacgctgatcgaggtggccgagggcgtcaccgtggacgacgtcaagaagtacaccgaacccgagttcaaggtgtcccccaacctcaagaagatcgcctacgcctaaggcaaaaaagccagcgagggccctcgctgcaaatcatgatttgcgtctg

SEQ ID NO: 73664 - DNA, 262 bp, Zea mays
gagaactgaagcgggccctggggagacccggactgggggctggcgtgctcctgatgaggaggagcccagaggccgcccgccagcatgaccgactggctcaccggagccagacgccgggggatcttctgttgtgcagccggtacttctggagatggcttttcacttcatcgtttgtaagcccgtccaccttcatcacctccctgatctgcttcggagtagcaacttgagggccgccgagttgatgcaaggcggcaacaaacag

SEQ ID NO: 73665 - DNA, 261 bp, Zea mays
caaaagcgagatcgactcgattcttcggggcctgatcgtaaaagaatgcaagctatgaaacaaggtgagagcgacaaagatgacctgctgggcttactgctggagtcaacgcgagagagacaggcgatcagagcggccagcccggccaaggattgacgatggaagaagtcatggaggagtgcaagcttcactacttcgcgggaatggagacgacgtcggtgctgctcacgtggacgatggtcctgctaagcatgcacccgg

SEQ ID NO: 73666 - DNA, 261 bp, Zea mays
ggctgacggaggccaaggccaacttcccgccgtacgggcaggacttccccggcggcgtcgccacggggaggttctccaacggcttggtccccggggacctcctagcttcaagctgggcatcaaggagctgctgccgccgttcatcggcaccgacctgcagctcgaggaaccgctcaccggcggcgccttcgcctgcggcggcagtggctacgatccgctcacgtccaagctcgcgacgaccctgtcgagcgccgaccagct

SEQ ID NO: 73667 - DNA, 260 bp, Zea mays
cactgttacagctgccggttcaatcgtcaattggttttactgtaaatgcagtgtgtgctgctgtgctgacagtctgatgctctattttaatactccctccgtttcgtttagttgtcgctggatagtgcaaaattgaaccatccagcgacaactaaaaagaaacggagtgagtatttgttaagctatctccaacatcttattcatctcacccgtccatcccaccccctatcttaaacttcatgctgtaaacaatataatct

SEQ ID NO: 73668 - DNA, 258 bp, Zea mays
ggacggtgccagggactccgagatcgccatgggcgcgtaccagccgtaccacttggcgactaggcagcctgcccggggccagatccatggcttccggatgtctcttggtacgagcacctgggaatgctggaagacgtcttccagcggcccgagagcgtagagtgtgtgcagaaggtgaacgaggtcgccgagaagtactgggacctgtactcgagcgacgacctggagcaggacctcccgggccacctcctcagctac

SEQ ID NO: 73669 - DNA, 260 bp, Zea mays
ggacgggcggtggacgtcggcagcgtggcgttcaccacgtccctgaatcttctctcgcgcacaattttctcctgcgacctgacgaacctcgacgaccacaccggatcgcgaaagaattccaagaggtggtgacagagatcatggaggttgccgcgagtcccaacctgtcggatttgttcccagcgctggcttgcgccgatctgcaaggattgcgacggagactggcaaagctctttgcacggctgcaccaggtgttcgac

SEQ ID NO: 73670 - DNA, 289 bp, Zea mays
cgaggtggttctcctacgacgagctgaagaggagcaccaacaacttcgccgaggcgaacgagctcggctacggagggtacggcaaggtttacaggggcatgctgccgacggggcagttcatcgccatcaagagggcgcacaggggtccatgcagggcgggcacgagttcaagacggagatcgagcctctctcgcgcgtgcaccacaagaacctcgtcggcctcctcggcttctgcttcgagcagggggagcagatgctcgtctacgagttcatgtcagcgggcacgctg

SEQ ID NO: 73671 - DNA, 288 bp, Zea mays
cgcgacacccggcgccgcgccggacttccgctgccccatcgctctcgatgtcatgcgcgatcccgtcgtcgtcgccagcggccagacatacgaccgcgagtccatcttccggtggttcgactccggcaagtcaacgtgccccaagacagggcaggtccttaccattctggagctcgtgcccaacacggcgctcaagaacctaatctctaagtggtgccgggacaacggcgtcgccatggaaatcggcgaggcgagcaagagcgagccagcccaggcggtggccgcgaa

SEQ ID NO: 73672 - DNA, 283 bp, Zea mays
ggagaagtcagctggagagcatggacgatgccaggagagaaggaggccggcttcaggagcttcttggctgcgaggagagagactatgtcatcactgcagatgacataaagattcctatagctgaccttgctggcaagacagtcggcctgtacttcggagcacactggtgcccaccttgccatgtcttcaccaaacagctcaaggaggtgtataacgagctgaaaatcttgagaccgggaagcttcgaggtcatcttcgtttcgatagaccgcagcaaggggga

SEQ ID NO: 73673 - DNA, 290 bp, Zea mays
atcattttaaatcttgagaagatataggtcaacaacagccgctacattacgacagccaccaccatgagcaaccggtgctctggatcagactaaaaccatgacaacgacagacttgaactagagttcttcaatgtttcgacaggtctggcgaaccacaaacacaaggatgttttttcatggttccttcattgtgccctttcgggcacgatgagcatcctcctgcactagtcggctgtccagctctgctccacaatctcgcggactttgcggttgtactcccgcttgttctc

SEQ ID NO: 73674 - DNA, 287 bp, Zea mays
cacgtcgtgtcctgcgccgccgtctgccgcgcgtggagggagatgtgccgggagatcgtgctcagcccggaggtctgcgggaagcttaccttcccggtctctctcaagcagcctgggcctcgagacgggatgattcagtgtttcataaagcgcgataaatccaagtccacgtatcgtctctacttgtggctgagtactgctgtgctcatggagaacggcaagttcctcttatcagctaaaaggagccgcagaacaacctgcacgcagtatatcatctcgatggacgc

SEQ ID NO: 73675 - DNA, 273 bp, Zea mays
gaggaacctaacgcaaagtttattttcaagaagagcacaggaatgctcatttccgaacaattcaatgtctcgttacaagcaagcatgctcacacataggcactcaactttcgtcatagaagacacatcactgaacaagcaaacaacccagaacagacttggcttattccatccaccgattgacagggcaaccgtttcaagcagatggcttcatcagggcagcgaccttctggacagacggcctctccatcagaccagaccaccaggccttcac

SEQ ID NO: 73676 - DNA, 282 bp, Zea mays
atgaaatgttccccaaacacttacacatatagtattcttataaatggactttgccgcgtacagaagtacaataaggcttttgtgttctggcaagaaatgcagaaacagggattggtccctaatgttgtgacttacacaaccatgatttctgggctcgcaaaggtagggaacataaccgatgcttgcagtctctttgagaggtttaaagccaacggtggaatccctgacgctgcaagtttcaatgctcttatagaggggatgagccatgcaaatagagctatt

SEQ ID NO: 73677 - DNA, 286 bp, Zea mays
caagctctacgaggagatgatggtgaaagccaaagccaccactgacgcttctgctggcgtgctcccgttctcggaggatgacttgcccaagataccctacctgagagcggtggtgctggagggtctccggcgccatccgccggggcaccagatgccgccacgcagggtgagggaggacgtggaggtgggtgactacgtggtgcccaagggctcagcgatcaacttcatgctgtacgacctgggcatggacgacgccacgtgggaccgcccagcagtgttcatgccg

SEQ ID NO: 73678 - DNA, 284 bp, Zea mays
agcaggcgtacatgcgcggcaagagggtgctcgagatcaaccccaggcaccccatcatcaaggagctccgcgacaaggtcgcccaggacaacgagagcgaggagctgaagcacacggcgaggctggtgtaccagacggccctgatggagagcgggttcaacctccccgaccccaaggagttcgcgtccagcatctacaagtcggtgcagaagggcctggacctgagccccgacgcgaccgtggaggaggacgaggccgaggagcagccggaggtggaggagaag

SEQ ID NO: 73679 - DNA, 268 bp, Zea mays
gtgctcaagacagttctatcctctacaaagaccgactcgccaaaacaggccgcttcacagttggcattgacccggacaaattcaacgagacactcaagcaagatgaagtccaagcacgcatcaaagaattgaacgaacgatacaaagatatgaaagtgattgttggcgttgatcgattggactacatcaaacacctgacacagaaattgcatgggttcgagcagtttttgacggatcatccgaaatggcagggaaaggttgttttgat

SEQ ID NO: 73680 - DNA, 267 bp, Zea mays
accaaagatacctgcatatttcacgggaactggagatttgacaactgctctcctactaggatggagtaataaatatcctgatagcctcgagaaagcggcagaactggcagtttccagtttgcaggcacttctgaaaagaactgtggaagactataaaatggccggcttcgacccatcgaccagcagcttagagatccggttgatccaaagccaggacgagatccgaaacccaactgttacatgcaaggctgtgaagtatggaagctg

SEQ ID NO: 73681 - DNA, 268 bp, Zea mays
aatcctccaaaaataatccagattatataatctattggggtaaacaaacaggcccttagccattttttctgttagactgcagatagttcttagccttttgattgccattattttttaatagctttgtgccccgtaaattacaggctttacatacttggcgtgccacataatataatatccatttacattttcatgataagacattaatatatgatagtatgatgtatcttaggttcctggaagtaccatgagagactcttttttggtg

SEQ ID NO: 73682 - DNA, 264 bp, Zea mays
  unsure (1)..(264): unsure at all n locations
gccacctccccgaagctgccgcgaccgatcgagcgaactncgctccccgccccgccgccaaaaccctagcttctcctactccatggccactgtctcgctcaccccgcaggctgtcttctccacggagtccggtggcgccctggcctctgctaccatcctccgctttccgccaaactttgtccgccagcttagcaccaaggcacgccgcaactgcagcaacatcggcgtcgcgcagatcgtcgccgccgcgtggtccgactgccc

SEQ ID NO: 73683 - DNA, 267 bp, Zea mays
  unsure (1)..(267): unsure at all n locations
cactcattcactcacacagcaaatacccacagtccacagcaagaaccgaagctgttcggaaacatcggaaagatcccgatcatcggcgacctgacgggcagcaacaagaatgcgcacctcaagggcaacctggtgctcatgcgcaagaccgtgctcggcttcgacgtcaccagcatcgccgacacactcatgganggcctcggcgagttcctcggccgcggcgtcacctgccaactcgtcagctccaccgtcgtcgaccccaacaac

SEQ ID NO: 73684 - DNA, 264 bp, Zea mays
ccctttgctaatctccgccgaattgctcttggccgggacattaagaagttcctaatggttattgctgggctttggtctgtttctgtccttggaagttgctgcaacttattgaccttagtctacattgtgtttgtggtgctgcacacagtacctgtcctgtatgagaagtatgaggatcagattgacacctatggcgagaaggggtgggttgagattaagaagcagtacgccgtgttcgatgagaaggttctgagcaaagtacca

SEQ ID NO: 73685 - DNA, 272 bp, Zea mays
ccccgcaactgctctaggtttcaatccgcctgacaaggacatcatgaagaagccacctaggaggagcgacgactctctgatcactccctggatcttgttccgctacctggtgattggcctttacgttgggatggcgaccgttggcatcttcgtcatatggtacacacatgggtctttcatgggcattgacctgaccggagacggccacactctggtcacctactcgcagctttcgaactggggccagtgctcttcctgggacaacttcacgg

SEQ ID NO: 73686 - DNA, 275 bp, Zea mays
gcgggggactcgtgccaaccaccaatggccgtcatggcattcgcgggggatcaggcccagaacttccactactccccaatgggcaatgccaccagccaggctgcgaatgtgacgttcactgcacgcgctgagagaacacgtgtggcgttctatagcgtgtactacaacacgaggagtgacgaccacagcttcctgtgtggcccggtgattgacgatgtccgggtatgggcattgaacgccgcggctgggttgaaggcaagtattggactggttct

SEQ ID NO: 73687 - DNA, 280 bp, Zea mays
  unsure (1)..(280): unsure at all n locations
ctanaaactccaaaaatggctacagaaagagatcaatgtgaacaacttcgaagatcagacaacagatgaaactgatgcaagtagcgaaaaggcgctgttgaaaacgcttaaatcctatttcaaactgtgctctcaagcggaggataagcgaatcttcttgaaagacccgatgtttggcacgatgctcttgaccttcatctcggattcccgtcctttggtggtccactatgttgcaaagatcctaatcatattgacggagaaaagcgaaaacgcaaagctt

SEQ ID NO: 73688 - DNA, 270 bp, Zea mays
cgtgattccgcatcccgttcgcgatcgcgacacacgctgacagctcacggctgaccttcccgacggcctccagctccatcttgattcttgaggcgaaccccggtgcgtaagagtctgccatggccagcgagaataaggtctttgggttcgaggaagtcgccaagcacaacgtcaccaaggactgctggatcatcatcgccggcaaggtgtatgacgtcactccgtttatggatgagcatcctggtggagacgaggttttgctagctgtaa

SEQ ID NO: 73689 - DNA, 272 bp, Zea mays
cgaacaactgcagagaaggcgagctgaacttgatgccggtgatgtgaaaatcatggaactcatatcggttttagaccaaacgaaggatgaatccattgagcgcacatttaaaggggttgcaaggcacttccgtgaagtgttttctgagctggtgcaaggtggtcatggatatttggttatgatgtcagaaaaaggatgtggatgcagttgatgatgatgaggaggaggatggacctcgtgatccaggccctgatgggagaatagaaaagtat

SEQ ID NO: 73690 - DNA, 271 bp, Zea mays
gcattgcaggtcccaaataaaactgaggttgtaacaacaaaggagaaaaggagtatgccctcagctttcaaaatttttgtaggttcgtcttgggtgatgcttagtagatcattcctggagttttgcttactgggatgggataaccttcctcgcacactactcatgtatttcaccaacttccttctgtcctcagaaggctacttccacacagtgatctgcaactcagagtactaccagaacaccactgtgaacagtgatctgcgcttcatgg

SEQ ID NO: 73691 - DNA, 271 bp, Zea mays
ctcttctcgtgcagacttgacatcttcccatatccgcacagacaaatctcacacaatgtctaccgccgagctcgcttcttcctacgcggccctgatccttgccgacgatggcattgagatcaccgccgacaagctccagaccctgatctccgccgccaaggtcgaggttgagcccatctggacctccatcttcgccaaggctctggagggcaaggacatcaaggacctcctggtcaacgtcggctctggtggcggtgctgctgccgctcct

SEQ ID NO: 73692 - DNA, 269 bp, Zea mays
tgtgaaggttactggggttgttacttgtggaaatttgccccttgagtcctcgttccaacgggtgccgcgatgtgtgtacacttcaacttgcttgtatgagtacaggggttgggattcgaaagctgctaactccacacatcaccgatttacctggggtctcaggtcaatggagcgtcatgcagttgacttctacatctctcatttccagtctgggctgagagcgttggtcaggacagggtccggtgcacgagtatccccatatgtggacg

SEQ ID NO: 73693 - DNA, 270 bp, Zea mays
gcagaagcgaccgactgcactgatggtgattatttcgaagaagtgtatcagtattatgcgcatggagatgcttggcgattgcctactggagcagacgcagcactgcgtgagctgaaggatgctggagttaagctcgctgttgtatctaacttcgataccaggctacggaaattgcttaaagaccttaatgtctccgagatgtttgatcgcattgtggtgtcatccgaggtcggatatgagaaaccttccccagagatcttcaatatagca

SEQ ID NO: 73694 - DNA, 272 bp, Zea mays
cggaaacctgagccacgagcaatggcggtccttccataacgacaagaagacggcggaggctcggaacttccttgacggtgacctgatcgagtctttccttgaccttagccggagcaagatggaggaggtgtccaaggcgatgggcgtccccgtggaggagctgtccaagagggtggaagagctaacgaggcttcactagtgtagatggaacatggaagcgttgcttgtaagcaagtagtaacttgttccctgagctgtagcctccgcggctc

SEQ ID NO: 73695 - DNA, 259 bp, Zea mays
ccccgcaactgctctaggtttcaatccgcctgacaaggacatcatgcagaagccacctaggaggagcgacgactcactgatcactccctggatcttgttccgctacctggtgattggcctttacgttgggatggcgaccgttggcatcttcgtcatatggtacacacatgggtctttcatgggcattgacctgaccggagacggccacactctggtcacctactcgcagctttcgaactggggccagtgctcttcctgg

SEQ ID NO: 73696 - DNA, 266 bp, Zea mays
gcgccccgaggatgggcccgacgttcggcgccatgatgctcctccggccagaaggcggcgcacctggcgctgaaggcactgggcaggcccaacgccgtggacgggaccatcccagaggtgtcgccggcgctgcgcgaggagttcgtgattgcgtccaaggacgacgaggtcgtggacgcctgagcgagtctccacgtgccagcatgcaagcagtgtcttatctgggccggggcgccatcacggggtttcttttaatctgggacttt

SEQ ID NO: 73697 - DNA, 261 bp, Zea mays
gtttggtttgtggctaaatgtgccacactttgactaaggttagtcgttcgaattgaataactaaccttaggcagaaaagttaggcaaagtgtggtcactgaggtagtgaaccaaacaggcccagcaactgaggttaggagtgagtacggcgcaatggccagtggagtacataaattaaatacgtgctcccgctcaatggggtatcgccaatatatagggttttttttgctgtgtactatgcttgatcataataaatagtaa

SEQ ID NO: 73698 - DNA, 261 bp, Zea mays
cgcttttactctggccgccctataattgttgagtattctcctgtgaccgacttccgtgaagcaacctgtaggcagtttgaggagaacagctgcaaccgtggtggctactgtaatttcatgcatgtgaagcaaattggcagggatctcaggaggaagctgtatgggcgttctgcttccaggaggctccatgggagaagccgaagccgaagcccgccaccacaaaggaggggccaccgtgaccgtgatgactaccgtggtggc

SEQ ID NO: 73699 - DNA, 267 bp, Zea mays
atcgataaaagtggatcgattagtatcgaggaaatgcgtcatgtaggttctgttagtgtttgctgatgaaaatgccttagatcctgaactactctgcggtgctgattaatctgtgcatgtttcggtaggcccttgcaaaggatcttccctggagattgaagggtccccgtgtgctggagattattcaagtcattgacagcaacactgatgggctcgtggacttcaaggagtttgttgcggcaactctccatatccaccagatggcgg

SEQ ID NO: 73700 - DNA, 154 bp, Zea mays
ccgtctccaactcactagtactcagccgccgcaatcagggggacaggtagctcgagcgcgcgctccacctgctccgacgcgatgcgggccaagtggaagaagaagaggatgcgtaggctcacgaggaagcgccggaaaatgaggcagagatcta

SEQ ID NO: 73701 - DNA, 258 bp, Zea mays
cggctcgagaacaaatttataaaaatgcccaagctactactgtcttgctagtgtcacttcgcaaggattagtacaataaagtgagtggcttggacaatgcaaagcaaatctgggataccgtcaagatatcacatgagggtaacaacgccaccatgatcaccaagatggaactggtggaaggctcactggggaggttcgcgatgataaggggagaggagccaacacagacctacaacaggctcaaaaccctggtcaaca

SEQ ID NO: 73702 - DNA, 254 bp, Zea mays
gtcgaaacaagtcagcgttcagattctgttttggtgctgcgacaccgtctgttgggccgttgggccgtgtatcgcgtcggaggccattaggggcgagtccaggggtcacgcacgccctaatacactatttattcagccgccgccgccacatttaggcttgggttttgcttagattaattctatcctcgaacagtatcgccgacatcggtttgtgagaccccatctcgtaatcaatacaattttggttgtgtttc

SEQ ID NO: 73703 - DNA, 253 bp, Zea mays
tcgagctgatcttgctcttggattacaatctcattctgatatgggcgcaataacacttcagatacaagatgatgttggtgggcttgaagtattaaaggatggaatgtggatacctgtgcctgctttgcgtgatggcatccttgtgattctcgctgatcagacagagatcatcaccaatggaagatacaagagttcagttcatcgagctgttgtcaatgctgagcatgcccgcttatcagtagcaacattttat

SEQ ID NO: 73704 - DNA, 255 bp, Zea mays
cggctcgagcatcaggccgccttctttccatttggatggggtcccaggatctgcataggccagaacttcgcgttgctggaagcaaagatggtcctgagtaccatcctccaacgcttctcctttgagctctcatcatcctacactcatgcgccatacaccgtgataactttgcatcctcagcatggtgctcaaatcaggttcaagaagctttgaccatgatggtcatactgaatgccaaaacatgcactcctagta

SEQ ID NO: 73705 - DNA, 269 bp, Zea mays
ggcagccccgcagcttcacgacatcgatctcctcgccaggatggtcgacccggcgctggacgggctgtacccttccaagtccctctcccgtttcgccgacatcatcgccatctgcgtccagccggagccggagttccgcccgccgatgtccgaggtcgtgcagcagctggtgcgcctgatgcagagggcgagcatcatcaggcggcaatcggacgatctgggctactcgtacagggtcccccaccgcgacggcggcgcacaggcgacgt

SEQ ID NO: 73706 - DNA, 251 bp, Zea mays
cgagtctgatgaagagggtgacgacgagtgaagaggccacgctgctctactgctaatggccgaacttgataatattatttcaataagtttgttttgcttgcctggtgtcggtgtttaaaactgttaattgtcgtgtggcgcagcatactcttctgttgctgcatgtgtcgtcgtcagtttggttgtctgttggatgtcacagtttattatggattgctactatacaagtatttgtttcggatgtgttgtat

SEQ ID NO: 73707 - DNA, 262 bp, Zea mays
gcgacctctcgctcaagtttgccatgccccccgttgctcagccctcatcatggcttcgcgctgccaccgatgaccgatcaaaccccaactgccccattaagatcgcccacggaaccaccacgctcgctttccgtttccagggcggcatcatcgttgcgaccgattcccgagccaccgctggcaactgcgatcgcctcgcaaaccgtaaagaaggtcattgagatcaacagcgtcctgctaggaaccatggccggtggtgctg

SEQ ID NO: 73708 - DNA, 263 bp, Zea mays
cgccagaacagctccttaatctggaggagatacgtgaaagacggcttactgatccacgcttcccatcccaatataggaacttggcagctaaaaaaaagtttattccttggcccatagaaatgagattttgtgaaggttcagcgtctcaacataaaccaagcttaaactactggtttagagctcgaggggaactctcagacgatcaggctctacacagatgtgttgtagcatatgcttcggatctactattttctggggtgagc

SEQ ID NO: 73709 - DNA, 260 bp, Zea mays
gcggtggctgggagtgtaccgggaggtgctgctcgtcggcgtgctgctctcctggttccccaacatcccctgggaccgccagcccttctcggccctgcgcgacctctgcgaccccttcctcgccctgtgccgtgaggtcatgccccccgtgttcgggcgcaagctcgacctcagcccgcttgtacaattcatggctattgacatcatcatcatgatcctgcgcccgcagccacgcatgtgatgactccctgcagcagtgg

SEQ ID NO: 73710 - DNA, 260 bp, Zea mays
ccagtttagagaagagtgaatcatatgaagtctaaaaatgaagttacatacttcaagataatagttcttggagatattgatgtgggcaaaacgtcgttattagttcgttatgttgataaaacttttgatagtaaaacgattagtactgtatcatttgattataaagaacctgatgtgcaaattaataatgctcccgtgaaagttcgcctttgggatacagctggacaagaaagatttcgaacaattactacaagttttta

SEQ ID NO: 73711 - DNA, 256 bp, Zea mays
catgacggagctccaggccgtgctgcagccccagatcatcgacgcgaacctgggggccatcgtcgaggactgcatgcggcactacgacgagctgttccacctgagggccatgctcgcaagatccgacgtgttccacctgatgaccggcctgtgggcgaccacggccgagcgatgcgtcctctggatgggcgggttccgtccttctgaaatcctcaagatgctgataccgcagctcgaccctctcgcggagccgcag

SEQ ID NO: 73712 - DNA, 282 bp, Zea mays
ataagataatggtccacaacacatcctaaccgattacaaagttcaccttgagaaaattgcaaaccaaacaataattccaactcaaacgataacaactaattgtccctcactgctcctcttcgatcacacccttgtcgctcacatagataccatccaaaaacttcctgatatccttcttcttgacatggcatttctggttgatgagggcggcggagcgagagactaactcgacgtcgttgccatcgagaataagctcgtccttgaccttctcggagcggagga

SEQ ID NO: 73713 - DNA, 276 bp, Zea mays
ggctatagacctgtactacaatctgatgagtgaaggcttctccccaacaccatgtacatatggtcctcttcttgatggcttattaaaatctggaaagatggtggatgctgaaaatctttttaatgagatgctagagtatggatgcgaacctaattgcaccatctacaatattctactgaatggacaccgaatagctggcaacattgaaaacgtttgtcagctttttgaaaagatggttgagcagggaataaacccagatataaaatcctatacaat

SEQ ID NO: 73714 - DNA, 267 bp, Zea mays
gttaaattcaacagcaaggatagttttgttgaaagatacaaaaatttgagttccttcaatgaaaccgagcttgcgaatctgcataaggaattgaggcctcatattctaaggcgggttataaaagatgtcgagaagtctttacctcctaaaattgaacggattctacgtgtcgagatgtcaccccttcagaaacaatactacaagtggattttagagcggaatttccagaatctaaataaaggagtccgtgggaatcaggtatcactt

SEQ ID NO: 73715 - DNA, 266 bp, Zea mays
tccctgcaatggaaatgaggccaaatccacaatgctcgaatccagcatgtgttctcagacagaaagaatatatggaatccaaacctgctagagatgcagcagcgaagactaagatggaagctgaagcatccacagaaaatgaatgtcctgtccacctagacaatgagtggaatattagtgttgttgatgatgaaactgagacatcaagcattcgaaacactccagatatcctaccagaaggtcttgtccgtgagcttccagacgct

SEQ ID NO: 73716 - DNA, 267 bp, Zea mays
cggacgcgcgccgcccgtccccgccgtcttcatcggcggcaacctcgtcggctccaccgacaagatcatgtccctgcacctcgccggcaagctcgtgcccatgctcaagggcgccggcgccatatggctctgaattcgcgattattcgctggatcgaacgtaaacccccggaattttgcacctatatctatatattcccatgcatgcaactaattaaatactcctaatggggggtcttaatataacttattaagagctatatgtacg

SEQ ID NO: 73717 - DNA, 268 bp, Zea mays
cgcctacggcggtgcggaaggcggcccgctagccggcgtcaaggtcaaggacgtcgtcaccggtgaggtctctgatctccaggtggccggtctcttctttgccatcggtcacgagccggcgacaaaatttcttggagggcagctcgagctcgactctgatgggtatgtggtgaccaagcccggttccacgcacaccagtgtgaagggggtctttgcagctggggatgtccaggacaagaagtaccgccaggccattactgcagctgga

SEQ ID NO: 73718 - DNA, 263 bp, Zea mays
ataaatttctcgagtcctgcaacaattcacatggattccttcttatcggtcttcaatatcgctggcttacatgatgagctgtaccacaattctgcattgacctcagtagtagaaaccgactttgtggacggagcagtcgtagcagcagccagagcattgccgacatggtcagatggtgatgttcttgcaatccctagtgtggagagaaaatctgctcaggcactgcaagaggagtgccgccaaatgttggattcattcccaac

SEQ ID NO: 73719 - DNA, 261 bp, Zea mays
ctcggcgcggcagcgatggcggcggcgggcctgaggaaggggaatgcgcgcctcccgccgcgaggtgaaccgggtgctctacgtgcggaacctgccgttcaacatctcgagcgaggagatgtacgacatcttcggcaagtacggcgcgatccggcagatccgtctgggcaacgccaaggacacgcgcgggaccgcttacgttgtctacgaggacatctacgacgccaagaacgccgtcgaccacctctccggcttcaacgt

SEQ ID NO: 73720 - DNA, 256 bp, Zea mays
aacttatataatagtcttctacttgcttcgctataacatatatgtagtatataactatatctctcatatgatttaggataatatacaaatatattacatatatagttatattagttgagttagttttgtctcaattataattattaaaatggaattcaattccaacgaaataaatgtggcctaagcgttttcctgtagtgtgtagttatggccgacgttctttaaacgttttcgtggatagttgtttagatcactg

SEQ ID NO: 73721 - DNA, 170 bp, Zea mays
ccggcgctgttcttattcatcccttcaatagtaaatacactatcagtggtcagggtacagtatcccttgaacttttggagcaagtccctgaaattgacacaataattgttcccattagtggtggtggtttaatttctggtgtggcccttgctgcaaaggccataaaccct

SEQ ID NO: 73722 - DNA, 261 bp, Zea mays
atggaagactgttgatggaacactgaattgtggatattcaagttttagaggaagaagggcaagcatggaagatttctatgatataaaagcatctaaaattgatgataaacaaataaatctcttcggaatttttgatggtcatggtggttcacgtgctgctgagtatttgaaggagcacttgtcttagaacctcatgaaacatccggagttcatgacaaatacaaaattagcattaagtgaaacatatagaaagaccgattc

SEQ ID NO: 73723 - DNA, 270 bp, Zea mays
gcgttgcaggcgctgagcaacgggcagtaccggagcgtgtggcaccgcgcggtggtgaactcggaccgggagcgcatgtccgtggcgtcgttcctgtgcccgtgcaaccacgtcgtactcggccccgcgcggaagctcgtcaccgaggacaccccggcagtgtacaggaactacacgtacgacgagtactacgccaagttctggagcaggaacctggaccaggagcactgcctcgagctcttcagaacctagcgaaccggatacggatgg

SEQ ID NO: 73724 - DNA, 185 bp, Zea mays
ggcgattctcctgctattatgttcaaagggatggaaggttccaccttaggtgtttggagtgctcatggtgagggaagagcttttttcccagatgaaaatgttctagctactgttgtgaagtcaaatctggctcctgtgcggtattgtgatgattctaacaatattactgagacctatcccttcaa

SEQ ID NO: 73725 - DNA, 184 bp, Zea mays
gttcatccaggaggaggtcgcgttcgcgcagaacgacgcggagaacgaggacgacgcggcgccgccgcggccgcccaggcggtccacgggctccgtcgtgcacagcgaggaggcgatccagtcgagggggagcacgcactcgggccggatcaccttccacgccagccagacggcggaggaggag

SEQ ID NO: 73726 - DNA, 186 bp, Zea mays
cggctcgcccacacccgaggggttactacaaatgcagcagcgtcaggggctgcccagcaaggaagcacgtcgagcgatgtgtagacgacccggcgatgctaatcgtgacatacgaaggcgagcacagccacacccagctgccagcacagcctgctcagctctcgaagatcagtaaatcgtcgctcc

SEQ ID NO: 73727 - DNA, 183 bp, Zea mays
ggcagactgcgtcatccacacccacaaggaggaggacctgtactagagattgggttgctttatgcatatgcagtggctgctccaaaggtgttggtgcgttcgttgctgttccgtgccaccagcggaaggggggtttcgttgttgagatgggctagttcttgtcatcaatttcggtcgttcgat

SEQ ID NO: 73728 - DNA, 184 bp, Zea mays
ggcaacgccgcgccgggcaacctgctcaccggcttcggcttctacgagccgtactggctcatcgacttcgccaacgcctgcatcgtgctccacctgcttggtggctaccagatgttcagccagcagatcttcaccttcgcggaccggtccttggcggccaggttcccgaacagcgcgttcgtga

SEQ ID NO: 73729 - DNA, 198 bp, Zea mays
agcactcagttcgacactagggcgagtactggattgatctccctgatgatgacaggaaggagctcgtcagagctggcaatctgaagagcgctgagctatacgctcatgtgaagccagctcatggagggaccttcactgacattgcaatgtgggtgttctgcccgttcaacgggcctgccaccatcaaggttgggtttg

SEQ ID NO: 73730 - DNA, 265 bp, Zea mays
gtccactctcggctggcagaagtacgtcggagcccagggcaaggccattggcatcgacaagttcggcgcgagtgctcctgccgggacgatctacaaggagtacggcatcaccgtggagagcatcattgcagctgccaagagcctttaagagctaacaacggtctggagtttttcttattgtcgtcgttgatgccaaaggaacactgtacctagaggacatcctatgcctcggagcttggaataatgatgatggagggagcggaag

SEQ ID NO: 73731 - DNA, 281 bp, Zea mays
cccgagctctgcgggacgctgcccgcgctcgaactctgctactccatgacccggaggttcctcgacgagcagaaggcgccggggcaggatgaggagttggagcctgcgtcgccgccgctccccaattggaggatctctggcccgggtgacgatccagaagaagtgaaggcgaggttgaagtattgggtacaagctgacgcatgcactgtcaagctctgcagctaaactaaaggtcggatagaggctgaagaatctggttatatggttttgggatacaggga

SEQ ID NO: 73732 - DNA, 273 bp, Zea mays
agacagactccccacttgccgcagatatgtcgaccgccatccttcagctttcagagagtggacagcttcagagcatccatgacgagtggttcacacagccaagctgcgccaccaatgatgagagcaatgtgggtgcaaccaggcttggcctcggaagcttctgggggcttttcctcatctgtgccctgatctgtctcttcgctgtggtggtgttcttcatacgagtctgctggcagtacaagcagtactccaattctgaagatgctgacgagt

SEQ ID NO: 73733 - DNA, 279 bp, Zea mays
gtcccatatgtcgtggacaacggtgccggcgtgttctccaaggacccaggggaggccgcgagacaggtcgcccgctggttcagcagcagcagcacagacggggacgagctcaggagatactcgcgtaacgcgctgaggctagcgcacccgaggcggtgttccacatcgtcagggacatccacaagcagctccaccgacagcctgccgcggtcacccggatcccctcctgctcgctgacctcgtccttcccgtaccatatgtgaaatcaagaatgctact

SEQ ID NO: 73734 - DNA, 272 bp, Zea mays
tggacagctacgggaacggcgactgccgcgcgcgctacgacaggttcttcgccgagcgcaccaacatcacgatcgagcactggcgcaagggcgcgcagtggttcgagatggaccgggccctggcgctcgaggtcgtcgccgacgagccatacatccagatgttccgcgacttctgcgtcgggcggtggcgctgcctcaccgacgagcactacctgccgacgctgctcaacctgctggggtgggcgcgcaacgccaaccggagcctcacgtac

SEQ ID NO: 73735 - DNA, 270 bp, Zea mays
ctcaaggagctcatccggaacgctgacgctggcgaggatggggtgaagatctccccctggttcaggctggtggtggacaacttcctcatgggctggtgggaccatgtcgagaaaggcaccctcggcgaggccgtggacatggagaccatccataagctgaaggagtgaggggacgcccatcggccgtctccgatgacctcaccgcctgctgctgctgctgcactgcatgtttatcaaaagttatcgctcctgctcgcggaaagtgagctt

SEQ ID NO: 73736 - DNA, 264 bp, Zea mays
ggttttggtgctgtctataagggtatccttcgtgatggtcaagaaattgcagtgaagaggctgtcacagagttcagggcaagggatacaagagctgaaaaacgagcttgttttggttgccaagctccaacaaaagaaccttgttaggcttgttggtgtttgcttgcaagaacatgagaaactgcttgtttatgaatatctgcccaatagaagcatcgacaccatccttttcgatcctgagagaaacaaggagctagattgggga

SEQ ID NO: 73737 - DNA, 268 bp, Zea mays
gtcgtgcgcccgctgctgcacttcttgaacgggaccaactcgtactacttcgtcgacgcgtacccctacttcgtctgggccgacaacaacctcaccgtctcgctcgactacgcgctcttccagggcggacgcacacgctacgtcgacccgggcaccgggctcacgtacaccaacctgctcgtcgaaatgctcgacgcggtggtcatcgcgatggcgaagcttgggtacgggcacgtgaagctggccatcgcggagaccgggtggccca

SEQ ID NO: 73738 - DNA, 266 bp, Zea mays
tgaagaggctgtgcttatgctagcagctattggtttcaagcgcatcacaaatatatacgttgcaggtgctgaaatttatggagggaaggataggatggctgccataagtcgtctttatcctgctttagtaactaaagaaacccttctgtctccatcagagctcgaaccatttaggaacttctcatctcagttggcagccctggacttcattgcatgcgcagtgccgatgcatttgctatgactgacccaggaagtcaattctcttc

SEQ ID NO: 73739 - DNA, 263 bp, Zea mays
gaccggctctctcttcgtctcagtaatagtgacagcattcaccctccaggatggttcgtcacactacctcaaggggatccttctgctgctgtgctacattgtgatcggtgcatgcttctttgttacgaggcaacctgcaagtaacaacaatggcgctgggctgtcgctgccaactggcactttgaccgcacaagctgcatgatggttcaagggtcctgcctgagcctgaacaaatgagcatccaaggcagcaacgcagttgtg

SEQ ID NO: 73740 - DNA, 265 bp, Zea mays
agactaggttagggtttacctgtgaggcctgctcccctgccgccgccgccatgggacactccaacgtgtggaactcgcaccccaagaactacggccctggatctagggtttgccgtgtgtgcgctaacccccacggcttgatccgaaagtacgggctcatgtgctgcagacagtgcttccgcagcaacgtcaaggacattggcttcatcaagtaccgctgaaacttggggagctccaagcatggcaataatggaggcatggatgg

SEQ ID NO: 73741 - DNA, 265 bp, Zea mays
cccggctggtttggacgccgcagctgcacaagcggttcgtggacgtggtggcgcacctggggatcaagaaggcggtgcccaagaccatcatggagctgatgaacgtggaaggtctgacgcgggagaacgtggccagccacctgcagaagtaccggttgtacgtgaagcggatgcgggggcagggtctgtccccgtccgaccacatcttcgcacccacaccggtgcacggcgtcgccgtcggcatggtgcccatggtcagcggcca

SEQ ID NO: 73742 - DNA, 260 bp, Zea mays
gctgatatcaacatggatgggatggacttctcgaatttcggtggcatgggtggtatgggcggcatgggtggcatgggtgatatggctggtatgggtggtcttggtggcatgggtggtatgggtggtcttggtggcatgggcggtatgggaatggatgatttcgaagatgagagtgatgatgaagaacgagtgtcgaaacctcaagctgcggacaaggctgttgaggctgaggagacggagtcagcggaaaccaagattga

SEQ ID NO: 73743 - DNA, 260 bp, Zea mays
taaatttggatggtttttcctattctacttggttcacatcgccttctgcgtgtacgcagctgtttctccttcgattctcttcgtggggaaatcgttgaccgggattttcccagcaatcagtttgataggcgacagcgtgattgtcgggatcttctacttcattggctttgcactgttctgcctagagtcttcgctaagcatgtgggtcattcagcgtgtttacctctacttccgaggaagtgggaaggaagcggagatga

SEQ ID NO: 73744 - DNA, 268 bp, Zea mays
cttccagcaggccatcaccatcatcgtggtggccatccccgagggcctcccgctcgcggtgacgctcacgctggccttctcaatgaagcggatggtcaaggaccacgcgctggtgcgcacgctctcggcgtgcgagaccatgggctcggtaaccgccatctgcaccgataagacgggcactctcacgcttaatcagatgaaggtgacggagttctgggtcggcaccgaccgacccaaggcggcggccacggtcgccgccgccgtcgtt

SEQ ID NO: 73745 - DNA, 264 bp, Zea mays
gtcgcacagcacagaccggaagcacagcgcccagtcgcccacccacccgctgcgtcccgctcaccaagtcaccagccttgctgcgcgcgtcctcccacccgccgcccgtagccatgtcggtgacgctgcacacgaacctgggcgacatcaagtgcgaggtgttctgcgaccaggtgccccgcacggcggagaacttactggccctctgcgccacggctactacgacggcaccgtgttccaccgaaacatcaagggcttcatgat

SEQ ID NO: 73746 - DNA, 305 bp, Zea mays
atagtgtgaacgcgcacagtctgctcgagactacggctcggccttatctggccccacttgctggcaataaggaagctctactgaagaccttgaaggaaacattggtgacactaattcatcccaatgaagatgtagtcatgaatgcattgtcattgccagtacttgccagttctgtccaggttgcaatgagcagaaggcttggtattgaagagcctcagttaatgaagatagtcagaacaacaatccatacacacactgaatggtttaagcttcagatgtgcaaggaccgttttgagcacttattg

SEQ ID NO: 73747 - DNA, 261 bp, Zea mays
atcgggaacgccgccgacgccgcaggaggagacgcatcgaggttagcacgcgaagaagcgaccatgagggccaagtggaagaagaagcgcatgaggaggctcaagaggaagcgcagaaagatgaggcagagatccaagtaggcagatcgagatggattgtggacctgatgacatgcgtgggtacatacatttcttcggatgcgttggtgtgcctgtggagagatgtcaacctgccatggtgtcacggtccgccatcagttg

SEQ ID NO: 73748 - DNA, 257 bp, Zea mays
cgacatcgtcccttcgtccccacgagcaaccgataatccgccggcgttgagatgttggtttatcaggatctcctatctggcgacgagctcctgtcggattcattcacctacaaggagctcgagaacggcgtcctgtgggaggtcgagggaaagtgggtcacccaaggtcctgttgatgtggacattggtgccaatccatccgccgagggtggtgaggacgaaagcgttgatgacacagctgtgaaggtggttgatat

SEQ ID NO: 73749 - DNA, 255 bp, Zea mays
gtggacatgtccgatcagttcgggatgacgcttcgccggacgcagaaactttaccttgttcctagaattcccaaatgagtgtcgtcgtcgtcgtacaaatggcatgcatcttattgtaagttttggagtttgttgttgcacacgcaacgatggaccgcctgtgatatctttaataaatgtactcgcagataataatgaaataaaaagaacgcatggctattgtattattaaaaaaaaaaaaaaagggcggccgcc

SEQ ID NO: 73750 - DNA, 275 bp, Zea mays
cggcgaggttaataagctgctgccagttgtggccctcctgctcctcctcgcagcatgtagctcaccggtggtggtggctcagctggtcgccggctactacagcaaaacatgcccggacgtcgaggagatcgtccgcgacgagatggagaagatcatctcggctgcacccagccttgctggcccgctcctcaggctgcatttccacgactgcttcgtagccggctgtgacgcctctgtgctgctcaactctacggagggcaacctggcggagaggg

SEQ ID NO: 73751 - DNA, 266 bp, Zea mays
cgtgggtctcttgtccagccttgccgatcttgtaaaccttcttgttcatctcagtgcggtggtggtacccattctgaccagcacgagcaaccgtataggagaccctagccggatgccatgcaccgatacaagcaactttgcggagacccctgtgggtcttgcggggaagccgggtgacaccccaacgagtgaccacaccctcataacctttccccttggtcacaccaatgatgtcaatcatctcatccttctggaagacagcatca

SEQ ID NO: 73752 - DNA, 269 bp, Zea mays
gccggatgactctgaacgaatggttcttaccatgtgagagccttggactagcagctgaacacggctgcttcctcaggctgagaagagacgcagaatgggagacatgcgttccggtgatagactgcagctggaagcagatcgcagagcctgtgatgaagacctataccgagactacggacgggtcgactattgaggacaaggagactgccatcgtgtggtgctacgaggacgccgatccagatttcggatcctgccaggccaaggagctc

SEQ ID NO: 73753 - DNA, 267 bp, Zea mays
cccagttgcaacttttcaggttcatgaatacttacgtcctaagctttgtgatttatacgagaacgattcaatttttgacaaatttgaatgctgtctcagcggcgatggactccatgttgcaactggttcttatagtaatttgtttcgtgtttttggttgttctcctgaaagcgtggaggcatcaacgttggaagccagcagaaatcccatgaggcgacaggttgttgatccagcaaggcctgcacggactctgaccggtgctgtgag

SEQ ID NO: 73754 - DNA, 272 bp, Zea mays
ctatacgatacctctaccggaacagccctcagatggacctggagctgagctatcggttcatggattggttttcccaccatctcagtaactttggcttcacctggaaatgggccgaatgggtcgatgatgcgcaactgccaaatgcccatcccagcaagtggttcttgaagggcgccctggatacgaatcagagattgagttttgcccagagaattcagaagaccctccctgaaccctacctacccttggtaggccccgagaaagagaaagat

SEQ ID NO: 73755 - DNA, 264 bp, Zea mays
ttgcgttatgatcatcaggagaggcttactgcgcttgaagctatgacgcacccgtacttccaacaagtgagagccgctgagaacagcaggacgcgagcctgacaggcaaagagcggagaccatctgctcctttatcagtcagtcaggttgtatgagctgattagccgttgggtcacttggcagagcagcaacaacagcggtagagcctgtactgtactgtacgtaacgtaacctcctctcctcgagaaggggttgtgaagtttg

SEQ ID NO: 73756 - DNA, 265 bp, Zea mays
cggtgttgatttagaaatgaatataaacggagcaaagtctacatttgaagatgatgagtttgacgatgtgggtttcactgaggttcagatgtcaaaacttaagaaaagcgaagcttcactagagaaagggatagagaaattgagcaggttgttgaatcagtcaacgaacttgcacagatcatgaaggatctttcagttctcgtgattgatcagggatacatcatcgatcggatagactacaacatacagaaggttgcagcttcag

SEQ ID NO: 73757 - DNA, 267 bp, Zea mays
cccaaacgaagaggaggatagcggccgtgaggacgcagaggaggaccaggcgtacctgtgtgggtcctgtggggaaagctatgcgaatggggagttctggatctgctgcgatatctgcgagaagtggttccatggcaagtgtgtccgcatcacccctgcaaaggcagagcacatcaagcagtacaagtgtcccagctgcagcaccaagcggagctcgggaatgacaggcgccctggggcaggactcgctcccacttgacgagcattt

SEQ ID NO: 73758 - DNA, 272 bp, Zea mays
aacagaaggtggtaaacaatgtggagcatgtcatcagtcgtatcaagtcaatatcgccacattgtctggctgaggaggaggagaatgcaaccgagccacctcagtcggtacaaagaggcgttaccgagctggtggaagcggcattgtcgtccaggaacctgtgcatgatggatccgacgtggcacccatggttctgaaggcatccagcacctctgtagcctgaccaaactgacggcgtgtacagattttcatgtccggcaacgctggttgag

SEQ ID NO: 73759 - DNA, 274 bp, Zea mays
cagggaccccgctgctcagttccttgttactttcaaaaacaaggatactatggggctccgatcctttgttgctggcggtaagctactacagattaataggaagatggagtttgtgtttgcaagccattcttttgatgtttgggagagctggatgctggacggttccttgctggagggtagcaagcttatcaattgcagaaatccttcggctgtattggacatctgcattgagatcctcgcagcaccaagtgaagaagatggagtcactaggtgg

SEQ ID NO: 73760 - DNA, 271 bp, Zea mays
tggcgcacaggcgcacacggcacggacgacaccgaggagctgcttgcagcccaccggcagctgtggtgccatgccctgggctacgtcaagtccatggcgctcaagtgcgccctggacctgcgcatccccgacaccatcgaccgctgcggcgggagcgccaccctgggcgagctgctcgccgcaagcgagatcccggcgtccaaccacgactacctccgacgggtcatgcgcacgctgacagccatgcgcatctacgcggtcagccacgacg

SEQ ID NO: 73761 - DNA, 266 bp, Zea mays
atcttcatacacataaacaacacaaacacatactatatatatacaccttgctctcctctcgaacttctcatcaaccacttacaccccatctcatctctcaacatgtccctctcctccaaagtcatcctcgtcaccggctccgccagcggtctcggccgctgcatcgccgaaaccctcctctcccgcggcgcctccgtcaccatcagcgacatcaacccggaccgcctcgccgcaacagcctccgagctctcggcaaccttctctcc

SEQ ID NO: 73762 - DNA, 263 bp, Zea mays
cggctcgaggcatattcgaggaggttctgcacgggaggctggacttcgagtcggagccgtggcccagcatctccgacggcgccaaggatctcgtgaggaggatgcttgtcagggacccgaggaagagactgacagctcacgaagttctacgtgatcgccgagaacctgtcggaggacgagatcgccgggctgagggagatgttcaagatgatcgacgcggacaacagcgggcagatcacgttcgaggagctcaaggttgggct

SEQ ID NO: 73763 - DNA, 231 bp, Zea mays
gccaatttctgtcgtcgtgccgctgtctatctcgtattggtatatctattcataaatcatccttgtcatggtttgctcttcttgtcagtgttataaatttgcttcttgttagtgttataaatttggccatcggaaaggatgtgtttgtagttgtaatatcttgtttggagtcttaatatcttatcttgcttatgaaatcgaatatgcctatatatatatatgttatgctgt

SEQ ID NO: 73764 - DNA, 260 bp, Zea mays
aaaagcttcgggagcgcgctgtgcatgatgtccatgtcgctcggcaactacttcagtgacatcatcgtgagcgcggtgaccaggctcaccacgacgcgagggccgtccgggtggatcccggctgacctcaacgatgggcacctcgacaagttctacttcctgctcgccgtgctggcctccgcggacttcgcggtgtacctcgtatgcgcgagccgctacgggagcggcaaagtggacgggaggagcagcgacgacgagga

SEQ ID NO: 73765 - DNA, 265 bp, Zea mays
cctgatggcaagagtttggcgagcggttcaggtgacaccactgttcgcttttgggacctgagtacacagactccactgttcacatgcaacggagactcagcttcggttctctgtattgcatggtcacctgatggaaaacatcttgttagtggtagcaagtcgggagaacttatattatgggacccaaaaactgtgcctcaattgggcactccacttatgggacacaggaaatggattactgctgtatcatgggagccagttcatt

SEQ ID NO: 73766 - DNA, 261 bp, Zea mays
gttttctgaagtcaagaccgaatggcctgcaactatccttgtttttgatattgaaactactggcttctcacgtcgtgatgacagaattattgagtttgctgtccgtgatcttatggggggaaagaatagcacttttcagacactcataaatcctgagaaagatgtgaaaaatacatatgttcatggtattaacaacagtatgctctgcaggcctgatgttccaagatttggagagattattcccattctgctacaatatgt

SEQ ID NO: 73767 - DNA, 253 bp, Zea mays
tacaacgtggtgctcgagatccaggccaccatcccgtccactcccgagaagccgcccaagaagcccatgtggaagggcgtcgtcgtcgcctacctcgttgtcgcgctctgctacttccccgtctcgttcgtcggctactgggccttcggcgacagcgtcgacggcgacatcctcgtcacccttaacagacccaggtggctcatcgccctcgccaacatgatggtcgtcatccatgtcattggcagctaccaga

SEQ ID NO: 73768 - DNA, 270 bp, Zea mays
ggggagctccttgagatccttggaagcatcattaatggctttgccttgccaatgacggaggagcacaagctattccttgctcgtgctctcatccccctgcataagcccaaatctgttgcgatctaccatcagcagctgtcctattgtattgttcagttcgttgagaaggactacaaattagcagatcctgtgattaggggtctgctcaaatactggccagtcacaaactgccagaaagaggtgttgtttctgggggagcttgaagaagtg

SEQ ID NO: 73769 - DNA, 265 bp, Zea mays
cgtgggtctcttgtccagccttgccgatcttgtaaaccttcttgttcatctcagtgcggtggtggtacccattctgaccagcacgagcaaccgtataggagaccctagccggatgccatgcaccgatacaagcaactttgcggagacccctgtgggtcttgcggggaagccgggtgacaccccaacgaaccaacacaccctcataacctttccccttggtcacaccaatgatgtcaatcatctcatccttctggaagacagcatc

SEQ ID NO: 73770 - DNA, 263 bp, Zea mays
gatatcttgttcacattctcaaagaatatttgtcattgttagatgttgaatttatttcatgattatcaaagcaagaaatacttttaatcaacggatagaaaactagatggtatcctgctcctggaggtcaatagattacttagagctggaggctactttgcttgggcagcacaacctgtttataagcatgaacaggcccaacaagaggcatggaaagagatggaggacctcactacccgactttgttgggagcttgtgaagaa

SEQ ID NO: 73771 - DNA, 187 bp, Zea mays
cggctcgagggggacaatggctggaggtgctgctgattgccaattttggcataggaacctaggaaccaagtgtcgtctccatgagctttcaaacaagcgaaggatctctattgctggtgcttccaaactgttggctaacatcctttattcatatcgtgggatgggactgtcgattggtacaatgatc

SEQ ID NO: 73772 - DNA, 263 bp, Zea mays
  unsure (1)..(263): unsure at all n locations
gttgtggaagcgtgatgacgcaaaggtcttgaacgctgagataaatacccttgggaagatacgccatcggaacattttgaaactcaatgcatttctgaccggagcatcaaattttctggtttatgagtatgtggtgaacggcaatctgtatgacgctattcgccgtgagttcaaagctggacacccgtgaaatgcactangacaanangtgccggattncggttnnggttgcaaaggccatcatgtaccttcaccacgactgg

SEQ ID NO: 73773 - DNA, 172 bp, Zea mays
ctctactgacctggagaaggctgaggcccagatcggagtcgatgttcacagtgccctcaatgctgcattgaccggttaattggtggcattttaaattgtcttgtctttttcatctacagttttagagtgagtttaagtttgcaaactcatgggcatgggatggagggaatga

SEQ ID NO: 73774 - DNA, 251 bp, Zea mays
ctttcaagaaaccaaggcgtccttatgagaaggagcgtcttgatgctgagctgaaattggtgggtgagtatggcctgagatgcaagcgtgaactgtgccgtgtgcagtatgccctcagccgcatccgaaatgctgcaagggagctgctcacccttgatgagaagaaccccgccgtatccttgagggtgagtgcatcctgcgccgcatgaaccgatatggtcttctcagtgagggccagaacaagcttgatt

SEQ ID NO: 73775 - DNA, 248 bp, Zea mays
gccttcacggcgtcgctcggcacgccgccgcagccgctccccgtgctgctcgacaccggcagccacctcacgtgggtgccatgcacctcgaactacgagtgccgcaactgctcctccccatccgcctccgccgtcccggtcttccaccccaagaactcctcctcctcccgcctcgtgggctgccgcatcccctcctgtttgcttcaaaaaaaaacaaaaaaacaaaaaaaaagggggggcgccccact

SEQ ID NO: 73776 - DNA, 254 bp, Zea mays
acggctcgaggccggaagaaccagtacaggggaatcaggcagcggccttggggcaaatgggcagctgagatcagggaccctaacaagggcgtccgcgtctggctcggaacctacaacaccgccgaggaggcagctagggcatacgacgccgaagctcgcaagatccgcggcaagaaagcgaaggtgaattttcgagatgacgcgacaggcactcgtcacaggccaacgaccgatgagatctttaacaacctgaa

SEQ ID NO: 73777 - DNA, 255 bp, Zea mays
aggaccttgagggagacgggcaacgccgcgtcgtgcgggaggacgacgaggtcgccgtcggcatgccggtacatggcgcagtcgccgtcccattcggtgtccgtcgcggcctcggagatgaggtggacgtcgccgcccttgacgccgcaggtcagggcctcggtgccggtctggtggaaggtgttctccttctccacggagttccacgccgcgccctggcagttgtacacgcccagcacgccggtgaacttgttc

SEQ ID NO: 73778 - DNA, 254 bp, Zea mays
gctgacaccatggccaacggctcgctgatcgacgacaccagcatgagcttcatgggtcaaatggcccttgcccttggcaagctgtccagccttgaagtttttgtgatacaggctgataacttgaggcagcagactcttcatcagatgcgccggattctgacagttcggcaggcagctcgctgtttccttgccatcgccgggtaccagaaccgcctgcgcgccctaagctccctctgggtttctcggcctcgaga

SEQ ID NO: 73779 - DNA, 248 bp, Zea mays
ggggccaacaatgccacagaaggcgagggaaatcaagcactcagtaagaaaaatgcccaggaaatacctacaccacaatttgatggtgttgacacatatgaaagggactatactcgtacctttgcacaaccgacatcttatatacgtggaagaggagccagggctgagatcagtgaatttgtcgagttcgaccttgacaatgaagacgaggactggcttgaagaattcaatagcgagcggaagaatat

SEQ ID NO: 73780 - DNA, 252 bp, Zea mays
gtcttccgcctctacaaccagtctggatccggccgccccgacccgcacatggacaccgcctaccgccgctcgctcgacgcactctgccccaagggcggcgacgaggaggtcacgggaggcctggacgccaccccacgcgtcttcgacaaccagtacttcgaggacctcgtcgcgctccggaatcttctcaactccgaccagacgctcttctctgacaacaccaggacccgtcgcgtcgtcgagcggctcagc

SEQ ID NO: 73781 - DNA, 257 bp, Zea mays
cgcagatccaatccagcgatggcgtccacggcggcgaggcggttgcgggagctgcaggcccagacggggaacaagacctgcgtggactgcgcgcagcggaacccgcagtgggcgagcgtctcctacggcgtgttcatgtgcctcgagtgctccggcaagcaccggggcctcggcgtgctacatcagtttcgtgcgctcggtcaccatggactcctggaccgaggcgcagtccgcaagatggaggccggcggcaacga

SEQ ID NO: 73782 - DNA, 148 bp, Zea mays
gtttgttctcctcaggattcatctgcgcccaagaagaggaaatctggtaacacatcggctgaaggtgagccgtctctagctactgttgtgcgatatgctgcggttgagtcaccatatcccgctaaaggaaggtctgcctcaaagcttc

SEQ ID NO: 73783 - DNA, 256 bp, Zea mays
aactccctccgcttgtattacttaccggaggaagcgtacattgcggcggagccgttgccgaggccgctgtcgaaagtgaagattcttatggagcattcattcaggcgaacgagggtgagccagtgtacgatttctgctggtacccgtgtatgtccttgtctgacccagccacttgtctatatgacagctccagtcgtgatcatccgatacacctttgggatgccaccagtggggaactccggtgcacataccgagc

SEQ ID NO: 73784 - DNA, 255 bp, Zea mays
ctcaaggagctcatccggaaggctgacgctggcgaggatggggtgaagatctccccctggttcaggctggtggtggacaacttcctcatgggctggtgggaccatgtcgagaaaggcaccctcggcgaggccgtggacatggagaccatccataagctgaaggagtgaggggacgccggccggccgtctccgatgacctcaccgcctgctgctgctgctgcactgcatgtttatcaaaagttatcgctcctgctc

SEQ ID NO: 73785 - DNA, 255 bp, Zea mays
cggctcgaggttctacaaacaaccaccaagggcatgttgtggcgcgcctgggaggggcccttacaacttcaacctgacagcgaagtgcggtgagcctggtgcctcggcttgcgctgatcctaagacgcactggagctgggatggtattcacttgacagaagccgcgtatctgcacattgcctaaggctggcttcatggaccgttcgcagaccagcctgttgtccaagcatcttgagttgagtacagtacacccca

SEQ ID NO: 73786 - DNA, 249 bp, Zea mays
gtggacacatcatcttcttccaaagccttagtcttcttggttattgcctgtttccactggacgttggtgctctactttgcatgctgaaggacaacgtgatacttaagattgtcgtggtgacaatcacattggcatggagctcctgggctgcctatccattcatgagtgctgctgttaacccaattagaaaagctctggccctatatcctgtcttcctcatgtatatctcagttggtttcctcataattg

SEQ ID NO: 73787 - DNA, 257 bp, Zea mays
accagacataccgctcgcagcaagatggaagaggctatgccccacagcagaattatgcacaaggtggtcaggatggtagaggttttggaaggaatgattacacagaccgttcaggctacaatggaccacctgattttcgaagtcaaactcagtaccaagggcatgtaaatccagctgggcaaggtcaaggttacaacaacccccaagagcgtacaacttctcgcaagggcagggaggaggttttaggcctggtggtc

SEQ ID NO: 73788 - DNA, 245 bp, Zea mays
tgatcatcataatcccaattcgaatatgaaattatttattggtcttgtacttttattttttgtatgttcatctttcgcaggagatgttctcgaattaactcctgaaaactttgataccgtccttgatggatccagaccagcattggttgaactctctgctccatggtgtggacattgctatgttgttgttcctgaatatgaaaaattggtaactgcattcaaaaaagcaggagataaagtggtca

SEQ ID NO: 73789 - DNA, 253 bp, Zea mays
cgctgctgctagtgctgaccctgacagcgattccgtatgctacaaaattggcaggtggcatgcgcatgccttcgtggttcgacatccacgacgcgcccattacttcaagatccgtgaggggtgaggaggatgtgctgagagctgtccagatcgtgcacaccatgatcgacaggcaaatcgcgtccgggacaggcccggaggacgtgttcgtgtttgggctcagccaaggaggtgccctgagcatagcaagcgt

SEQ ID NO: 73790 - DNA, 213 bp, Zea mays
ctgcgcccattgggggatcgtctaacggtaggaccccagactctgactctggttgtctaggttcgaatcctagtcccccagccacttaagggtgactagatataaaacaacaaaaggtggcacagaaaaaaaataaaaggagaaaaaaaaagttgtcggacaaataaaaaaaaaacagagaaagtaaatcgaggcaaaagaaaaaggtaagag

SEQ ID NO: 73791 - DNA, 264 bp, Zea mays
gcgagccaccgagagagagggcgagagtgagtgagtgagagggagagtgagagtgggggattcaagtttcaaactcactatcgagggggataggaaggtggtcatcggtccatagctagctcgtcgtcgaccatggctgactggggccccgtggtgatcgcgacggtgctgttcgtgctgctcacgccgggcctgctgttccagctgccggcgcacggccgcatcgtcggcttcggcaccatgcacaccagcggcatcgccatc

SEQ ID NO: 73792 - DNA, 260 bp, Zea mays
tgaattctgacctccggaagcttgcagtgaacctgatccccttcccacgtctgcacttcttcatggttggatttgctccactgacctcgcggggctcccagcagtaccgcgctctcaccgtgccagagctgacccagcagatgtgggactccaagaacatgatgtgtgctgctgaccctcgtcatggcaggtacctcacggcatctgctatgttccgtgggaagatgagcaccaaggaagtgtgatgaacagatgctgaa

SEQ ID NO: 73793 - DNA, 260 bp, Zea mays
gtgggatcccagccaccgccgctagaagaagagctcggcgattcccaggtcccgcgagaagatgccgaagcagatctatgagattaaggacttcctcctcaccgcgaggaggaaggatgcccgctcagtgaagatcaagaggagcaaggatgttgtcaagttcaaggtgcgctgctccaagtacttgtacacgctctgcgtcttcgatgctgagaaggcaaacaagttgaagcaatctcttcccccaggagtgaccgtcg

SEQ ID NO: 73794 - DNA, 260 bp, Zea mays
gaccatttctatttgaaagttcaggtccaagatacaggctgtggaattggtccacaggatctacctcatgtatttacaaagtttgctcatcctcaaagcggaggaaaccgagggtttaatggtagtggtcttggccttgccatatgcaagaggtttgttagtctcatgggagggcacatctggattgacagcgaaggaaccggaagaggttgcaccgcaacattcgtcgtcaagctcggcgtgtgtgacaacacaaacac

SEQ ID NO: 73795 - DNA, 257 bp, Zea mays
gatgcatcaagactcttagcatgaactccaagtatctggtctcaggagggactgatgaggccttgcgtttttacaatcttgaaaccaagaaggaggaaggaatgttattacatcacgaaggttctattacttgcagtgctttgcacgagaacaagtacattttttctggtggtgatgatgggacagttgcaatttggcgcacctatgatatggaacttgtgggtacgctgggtggacacagtttagcaattaacagc

SEQ ID NO: 73796 - DNA, 257 bp, Zea mays
catggggcaccaggcgcacacggcacggacgacaccgaggagctgcttgcagcccaccggcagctgtggtgccatgccctgggctacgtcaagtccatggcgctcaagtgcgccctggacctgcgcatccccgacaccatcgaccgctgcggcgggagcgccaccctgggcgagctgctcgccgcaagcgagatcccggcgtccaaccacgactacctccgacgggtcatgcgcacgctgacagccatgcgcatctt

SEQ ID NO: 73797 - DNA, 255 bp, Zea mays
tctatatgtatgttgctggcttttacacatactcgatatttgcccttttgttttgggaaataaggcgctcagacttcggtatttcaatgactcatcatgtagcaaccgtctgtctgatagcactgtcttacatattcagatttgctcgggtgggttcagttgtccttgccattcatgatgctactgatgtgttcctggagcttggaaaaatttccaagtatagtggccatgagttgtttgcagatgtttcatttc

SEQ ID NO: 73798 - DNA, 255 bp, Zea mays
atgagaggttaattcagaaaggaaagaaaccaggtttccttcaattgttgggtacacagacagtcagtgccatctggcatggactatatcctggatatatcatattctttgttcaatcagcattgatgataaatggttcacgagttatatacagatggcagcaagcagcgagcagttcattactaagcggtatcctggcctttctaaattttgcttatacattgctggtgcttaactactcctgcatcgggttcc

SEQ ID NO: 73799 - DNA, 253 bp, Zea mays
attcgttggaggttgcagttctgaaggataggctggttaaattggagtcagaaaaagctcgtccatatggtactcttcaagcgacagatccaggaggttctccatgagtctggtgtaagaggattttggaaagggcttattccaacattaatcatggtatgtaatccatcgattcagttcatgatctatgaaacattggcaaagcgtctgcagtcaaagcgttctggaaagcagctaccaaaaaggcacctca

SEQ ID NO: 73800 - DNA, 266 bp, Zea mays
cgtcaatcctcgaacgaaaaatcgacggcaattaaggcgcgatgggtcactcttacggaaagcgagcgggcactcgatatgccttcagcagggactttcgccagaagggcatgatcgccctgaacacctacctgaaggtgtaccacgtcggtgatatcgtcgacatcaaggtcaacggtgctctccagaagggcatgcccttcaaggtctaccacggcaagactggtgtcatctacaacgtcaccaagagctctgtcggcgtcatt

SEQ ID NO: 73801 - DNA, 266 bp, Zea mays
gcgagtgaagcgtcgggggtgcaaatggctactgcccataccgccgaagatagcaaccatgtcccctggagtggcacacgttagcctgacaaaaaggcggggaaaaaaaaaggagaggaactacggtgtgtttcggttgtgggcttgttcgctgcggctttaatccgactgcggctgcggcttctacatcattttctctctcgggattgcagctgcaacagtattttgcagctgcaacagtggtttttgtagtgcagccgaacgcg

SEQ ID NO: 73802 - DNA, 260 bp, Zea mays
ccgctcatatgcatctgctgctgtgttggatggacacatatttgcttttggcggtggcgatggcatgtcatggtataacacagtggaatgctatagctcaagaaataatgagtggacggaatgcccctccatgaaccagaagaaaggaagtcttgctgggatctgtcttaatgagaaaatatacgctattggtggaggagatggaaatgaattttattcagaagttgagatctttgacccctaccttgggaagtggatat

SEQ ID NO: 73803 - DNA, 242 bp, Zea mays
cgattactggcttctggcaaatcagtggaatagcggctggggcgatgatggatacttcaagatcataaggggcaaaaatgaatgtggcatcgaggagggcgttgttgctggaatgccatcgacaaagaatatggttccaaacttcggcggtgccgttggaagagctatagtttaattggttacgtttgcatggcctcaaatgctgttggaattaactaaagtaattttaaaatgcaattgtt

SEQ ID NO: 73804 - DNA, 254 bp, Zea mays
gccgcgctgtacttacagctgttcgagttcgccgacaagtaccggggcaagtacgacagcagcatcgcggaggtgaagagctactacgcctccgtcagcggctaccacgacgagctcctctgggccgcgctctggctccaccgcgccaccggacgcgccgagtacctggactacgtcgtcgacaacgccgacgacttcggcggcaccggctgggccatcaccgagttcagctgggacgtcaagtacgccggcgt

SEQ ID NO: 73805 - DNA, 256 bp, Zea mays
cctgaggttgtcaatccaaagaagacgtatggacctgcagctgacatatggagtcttggttgcactgtcctagagatgttgacgcgccaaataccctatcctggcctcgaatggacacaagctctatacaggattggtaagggggaatcgccagcaattccaagttctctttcgaatcaaactcgtgattttataagtcagtgcgtaaaacccaatccagaagacagaccatcagcaatcaaactgttggagcatc

SEQ ID NO: 73806 - DNA, 255 bp, Zea mays
cggctcgagtgaccttttagtccataaaggtctgagtcaatgttgtaagcttttacaaggggcatacttgtaattcctcacaggctgcgccctgtgcctataaatagtgaacagtattcctttactgttcacggattctagcaattgtaatcgcatctttcgggaatctatctttgccaatccagaggtataattgtatttaataattcaatatattaaagtaaatataatttaactcgtttatgattcatttat

SEQ ID NO: 73807 - DNA, 248 bp, Zea mays
attcgttggaggttgcagttctgaaggataggctggttaaattggagtcagaaaaagctcgtccatatggtactcttcaagcgacagatccaggaggtttaccatgagtctggtgtaagaggattttggaaagggcttattccaacattaatcatggtatgtaatccatcgattcagttcatgatctatgaaacattggcaaagcgtctgcagtcaaagcgttctggaaagcagctaccaaaaaggca

SEQ ID NO: 73808 - DNA, 258 bp, Zea mays
ggggcccccgttggaagttttgatggagttgagaaaggagggcagcaagtttatgaataatgtagggtctgttgctgcactgaatgagctggagatattattcaaagctctggataaagcaaatgcaataagcaagataacttttgatttaagtttggccaggggccttgattactacactggtgtcatatatgcagccgttttcaagggtgcagctcaggttggctccatagcggctggtggtcggtacgacaacct

SEQ ID NO: 73809 - DNA, 259 bp, Zea mays
aaaatctattggagagattgtcatgatgataagtcagcaagcattagggggcgtttggttttagacactaatttttagtccctccaatttattccactttagtcactaaattgtcaaatatagaaactaaaatagagttatagtttccatattttgtaatttatagactaaaatggaataaaatggagggactaaaaattagtccctagtaaccaaacactaccttagtctaaagtaaaatggaggagtttccattgtg

SEQ ID NO: 73810 - DNA, 259 bp, Zea mays
tacgcgccatgttggtatcattactttttacaatgaggtatttgttccagcagcgaacctttcctggtgtcactaatatcatctggtactcatccagaagacaagaagaatgctagtggccaaattcttggatcacccaagccatctcctttcccaaatttaccagatatgtccccgaagaaagtttcagcatctcataatgtatatgtgtctcctctgctgcaaaccaagttggatctactgctgtcaccaagttcca

SEQ ID NO: 73811 - DNA, 258 bp, Zea mays
ctcaaaacaacttggttgtcactaatatcgatatccaatctgttgaacctgttgactctcgtacccgagatgcccttcaaaagtctgtgcaattagccattgagattaccactaagtcgcaggaggcttctgccagacacgaagctgagcgaagagaacaagtcgccagaggtaagctcgaacgccaaaagatcatgcacgaagctgctgctgaagaacaaagaaaggagctccttcaattacaagctgcttcggcag

SEQ ID NO: 73812 - DNA, 266 bp, Zea mays
atcacagccttgtaatcgagaaggatagtttcccgcatgataccctggaaattgttgcgtggacagatgatgggttgatcatggctgctcgccacaggatatacaaacatattcagggcgtgcagttccatccggagagcatcataactactgaagggaggctcatggtcaacaattttatcaagattatcacaggctacgaagcctcgaattgctctccgtgatttatctagttggaagcagcagcagccctgcgtggggcgggt

SEQ ID NO: 73813 - DNA, 255 bp, Zea mays
tactgttcagaatttcttcaattcatcagttcctgtttctgtgcaagcaaccttcccctacaagttcgttgtgagcaagttcttgcagcctggagcatatgatctggttggttacatagtgtatgagatcgaccagcacccttaccagaatgtattctacaatggcactatcgaggttgttgaggctggaggcttactcagtgttgagtctgtgttcctcatcacccttggatttgcacttcttggtctgtttgg

SEQ ID NO: 73814 - DNA, 254 bp, Zea mays
gtgcaagtcctgcagacagaggctacgacactctcagcacagttgacaatgctgcagagggactcagctggactggctactcagaacaacgagttgaaaattaggctgcaagccatggagcaacaagcacagctgagagatgccctgaatgaagcgttaacgggcgaggtccagcgtctgaaactcgcaactggggagatgaccgatgggcctatgccgaagggcctgcagcagcagatgaactcccagatgct

SEQ ID NO: 73815 - DNA, 250 bp, Zea mays
gcatattcaatcaatctgccgtaccttcgatggaagagatttgctgttgttgcagcactgtgcatattagcagttcgtgcagtgattgttcagctggccttttttctccacattcagacttttgttttcaggagaccggcagtgttttctaggccattattatttgcaactggatttatgacgttcttctctgttgtaatagcactattcaaggatatacctgacatcgaaggggaccgcatattcggga

SEQ ID NO: 73816 - DNA, 247 bp, Zea mays
tggagatcgccaagagcccccgcgtgggcgccgccgacctcgcctccatccgcatggtcatgtccggcgccgcgcccatggggaaggacctccaggacgcgttcatggccaagatccccaacgccgtgctcggccaggggtacgggatgaccgaggcggggcccgtgctggccatctgcctggctctcgccaaggagccgttcgaggtcaagtccggctcctgtggcaccgtcgtcaggaacgcgga

SEQ ID NO: 73817 - DNA, 246 bp, Zea mays
cggctcgagggcaacccgatggagacatgggcgttgaaacaagagttatcggcacattcggctatctggctcctgaatatgcacagagtgggcaaataacagagaaggctgatgtatactctttcggggttgtgttagtggaacttgtcactgggcggaaggctgttgacattaaccgaccaaagggtcagcagttactaactgaatgggcacgcccattcttggaggagtatgcaattgacgagc

SEQ ID NO: 73818 - DNA, 256 bp, Zea mays
gcaggagtcgttcttaaacagcaactgctccttcgttcagcgcttctcatttctgattgtattgaccgagagcatccacctttccttctggtatcaactgaatgagttgccgacaccgacccatctgcgcataatggcaggttaggtgttgctgtagaatgagatggttaccatctttacaagctcaggctatatgattccagcagcactgtaacctggggtgcaaatgtgaaggccctgcaagcactttccaggc

SEQ ID NO: 73819 - DNA, 275 bp, Zea mays
cacttcgctacctcggaaccctagccgccgcccatggatatcgccggagaccgggccggtagcgatacgcaaaaggagtggtacgttctttgaccttgtttattgctgcgcccgaggcgtgtggcgcggggggagcaggaaggagaggggaagaacagatggggaaagcgggcggggccgcgatgtcgctgcggatcaaggcggttgtagagcggttcgtgaaggagctgcaggaggcgctggacgcggacatccaagaccgcgtcatgaaggag

SEQ ID NO: 73820 - DNA, 269 bp, Zea mays
atatcaacagaatgtctgtttgaaaatcaattggatgacctagaacccgaagaagctgtggctattatgtctgcattcgtcttccaacaacgcaatgcttcagaaccatctcttactccaaaactggctgaagcgaagaagaggctctatgatacagccataaaattagggaagctccaatccacccttcaggtgcctgtggaccctgaagagtatgcacgtgataatctcaagtttggccttgttgaggtcgtctacgagtgggcaaa

SEQ ID NO: 73821 - DNA, 273 bp, Zea mays
ggtctgtcgggtgaagggaacaaggcgcaggactacctttgcacccttgcttcaaggatcaggaggctggaggagagggcccagagcagagccaagaaagcaggcacgctgcctttcagctgggtatacggtagggacgtccaactgtgagatcggaaacctgctgcggactgcttagacaccggctgctgtgtctgcgttacatagttctccaggttttgaccagatggtcccgtgtcgtcttatagagcgataggagaacgtgttggtctg

SEQ ID NO: 73822 - DNA, 247 bp, Zea mays
cggctcgagctcatcggctactgcttggaggacgagcagcggcttcttgtgtacgagtatatgccgagagggagcctggagcatcatctcttcaggaggggctcgaacttccagccgctcccatggaacttacgcatgaaggttgctctcgaggctgccagaggtcttgctttcctgcacggcgaccccagcaaagttatctaccgcgatttcaagacctccaatatccttctcgactcggagtaca

SEQ ID NO: 73823 - DNA, 275 bp, Zea mays
accatcatctggcagcctgagggctaaggcggccgttccgtcgcgctgcgttgcgttgcagggtccccgaagcgattgcaaagccattgttccttctgttccgtttgcttattattatcattattatcatctagctagatcatccgggggtcaggtcgtcgtggtgtgccaaaacagaacacagaaagaagaagaaaaaaaaacaagacgtgtggcgttaatgttatgtcatccaataatggccgtaccacacttgtggtacctttcagtaaaaa

SEQ ID NO: 73824 - DNA, 263 bp, Zea mays
aacgacgacccggtgctgactgacccggataccgtgaacgctaagggatggcaggtaaccaagcaggtttatctggacggccagaacggccgcctggacatggcacggttccgccgccggttgcgccaggcgtatgaccactgggcgcacgccaccgtgcgggattgggcgtggaacagctgatataccactgaagcgtgggcgtcacatagtgatttttttttcattttttcacggtggaggatattttcaattggtttttt

SEQ ID NO: 73825 - DNA, 262 bp, Zea mays
caagagcaagtcgacggaaggcttccagtcggttccctacgtggttgcgctgttcagcgccatgctgtggatcttctacgcactgatcaagtccaacgagaccttcctcatcaccatcaacgccgccggctgcgtcatcgagaccatctacgtcgtcatgtacttcgtctacgcgcccaagaaagcctcgctgttcacggccaagatcatggtcctcctcaatggcggcgtctttggggtcatcctcctgctcacccttctc

SEQ ID NO: 73826 - DNA, 263 bp, Zea mays
cggcgtgttcaccaacagcctggacacggccaacaccctgacgcgcgcgctcagggccgggaccgtctgggtgaactgcttcgacgtcttcgatgctgcgattccgtttggcgggtacaagatgagcggcatggggagggagaagggcgttgacagcctgacgaactacctgcaggtgaaggcggtcgtccccccaatcaagaacgccgcgtggttgtagacgctgcaagtgtggccttgtgcacgagaaccacgtatattca

SEQ ID NO: 73827 - DNA, 266 bp, Zea mays
cgataagtttgtaccaaaagaaagattcacatggcctgaatgctcacgcgaggaaatttcttgagatcatcgtggatatcgatacgttactagctgctgatgataactttctgctgggcccctggctggaaagtgcaaaaagccttgctataactgaaaaggaacgccagcagtacgagtggaacgccagaacacaggtgacgatgtggtatgacaacacggagaccgagcagagtaaactgcatgactacgccaataagttttgg

SEQ ID NO: 73828 - DNA, 268 bp, Zea mays
  unsure (1)..(268): unsure at all n locations
ctggatcggtcagcaaaacataggagtattctctattatcattatcaagcagcttcgccgagccctcttcctgaaagaatgttgtacatattagcatttnaactctggccagtatcgcggaagaagttgggtgctgtttggttcacgaaatgtaacgtaaagggtaatggtaacggtttacactcgattacggancgtaacaagtttgaatagtccggtatcaaattttagtatggtatctgattacgattggactaaaacaaacatg

SEQ ID NO: 73829 - DNA, 264 bp, Zea mays
gacagcgagcaaattcttctggttcttcccataccaggtgatgagcttcatgtactacactctatacgggatgatgacggtggccctgacccccaacatcgagatcgccatggggctgtcgttcctcatctttatcttttggaacgtcttctctggcttcataatcgtgagagagatgatgcctgtgacctggcggtgggtgtactgggcggatccggcggcatggacggtttatgggctaatgttctcacagctcgcagacag

SEQ ID NO: 73830 - DNA, 260 bp, Zea mays
gtgaacgggaacgagatcaccaagacgatacgccacctggcggtcaggttcgcatctcacggcctcaccgtggaattcttccggtccgtgttcctcgtgcaggagcgccctgccccgcggcatgcccccaagagggtcaaatccacattgaggcttgacaggatggataatttcagccggaaataacgaattcggacgtactgattttcaacactgggcattggtggacaccgaccaaattgtttgatacgggttgctat

SEQ ID NO: 73831 - DNA, 267 bp, Zea mays
gcaccatagtgtcacacctctccaacgagagcttcgactcatatgttctgtccgaatccagcctctttgtgtatccccacaaggttgttctcaagacctgtgggacgacgaagctgctgctcgccattcctcgcatccttgagcttgctgcagggctgtcactgcctcttctttcagcgaagtactctcgtgggaccttcatcttccccggcgcgcacccgcgccacaccgcagcttctcggaggaggtatctgtgctgaacgcttt

SEQ ID NO: 73832 - DNA, 272 bp, Zea mays
gtttatgttgattctgaatggtttttgcccccaaagaattttatagaagctgactgaaaaactgagcgtttggcagttcacaacaacttttggtggccagaaactgacggaagctgaaacaaacaggccctgtcaatcctagctaggcgcctccacaagagggggtgcgctttgtttctcctcctgcctgcaagggtaagtgcacaagaggatagtgctccacaagtagtagtagtatgtgtgtgcattttcaacatgctgtatgcaaccat

SEQ ID NO: 73833 - DNA, 265 bp, Zea mays
  unsure (1)..(265): unsure at all n locations
ccaaattccagtcgctcaaattcttcttaccagaagtgatattgcagatcgcacatcatacataaacgcccaaaataacttttccgagctgctagacatgggagtactacccgttgtcaatgagaacgacactctggctgttgcggaaatcaaatttggagacaacgataccctatcagctataacagcagctatggtaaaagcggactatctctatctatcgnatgacgtggattgtttatacactgcgaatccgagacacgat

SEQ ID NO: 73834 - DNA, 258 bp, Zea mays
gtttccatagccaaggctctttcttctgcatatatgccaattggagcaattctcgttagcccagaaataacggatgtaatctattctcagagcaataaacttggttcttttgctcatggctttacatactcgggacatcctgtttcttgtgccgttgctgtagaaaccttgaagatatatacggaaatgaatattgtagaacacgttaacaaaattgctccaaggttccaggagggaatcaaggccttctcaggcagc

SEQ ID NO: 73835 - DNA, 259 bp, Zea mays
gcagcaccgtacgacgccatcgcggcggggagcttcccggagtggacgctgtacgtgcaggtgatggagccggacacggaggagcagtacgacttcgccccgctggacgacaccaagacgtggccggacgacctgctgccgctccgccccgtggggaggctggtgctggacaggaacgtggacaacttcttcaacgagaacgagcagctggcgttcggcccggggctggtggtgccagggatctactactcggacgaca

SEQ ID NO: 73836 - DNA, 260 bp, Zea mays
cacccatatcgtgaacccgccgccgacgcagcagcaggagacgcgccaaggagagcccgcaaggaggcgactatgagggccaagtggaagaagaagcgcatgaggaggctgaagaggaagcgccgaaagatgaggcagagatccaagtaggctgatggggattgtggatggtggtgtcggcatagtactgttacgtttctccgatgcgtgagttcatggagagatgtcacatcctagttcgtcgtcaccgtttgccatgg

SEQ ID NO: 73837 - DNA, 267 bp, Zea mays
ggcggggaccggagaagccctgacgagataaccggaccctacaaagatgacccagccccaacctcttttgttccggcagcagggtaccataagatgatggaggcttttggagggaaaggctatcttgtggagacaccagacgagctcaaatctgccctttcagaatcgttccgcgccaggaaactagcggtgattaatgttatcattgatccttacgctggcgcagagagcggtcgaatgcagcacaagaactgaaggcgcttgctt

SEQ ID NO: 73838 - DNA, 155 bp, Zea mays
gttttcgcgccgccgccgccgccgcttcgtcgtctccgccgcagcgatgccgtcgcacaagaccttccggatcaagaagaagctggcgaagaagatgcgccagaaccgccccatcccctactggatccgcatgcgcacggacaacaccatcaggt

SEQ ID NO: 73839 - DNA, 161 bp, Zea mays
gctcgccatgctcgaaccggtgctggaccagaacctctactacatgggggcgaacctgacctcggccggcttcgcgtcggcgctcataaacatcctcccggccgtcacgttcgtcatggccctggtcctgcgcatggagaaggtgcggctgcggagcgtgc

SEQ ID NO: 73840 - DNA, 163 bp, Zea mays
ccggaattccgtcaagctcgttggatggtgccaccaggacggcgtgctgctgctggtgtacgactacatgccacacggcagcctggacaggcacctcttcggcggcaaggatgcgccggcgctggactggaggcagcgctacaacgtggtagccgacgtggcg

SEQ ID NO: 73841 - DNA, 161 bp, Zea mays
aatttttgacattgatatatctgattatgatgatgttcgctactgctgctctggagctgatgtctgcagagactgctggcccttgatgacaattgctatcaaaattttggatacttctcttagagatgattttggtttcagtcacatactatgggtataca

SEQ ID NO: 73842 - DNA, 158 bp, Zea mays
ggtaagactacttcacttgggcttgatttgcagtctgtcggcagggatatggcatacacaatccgtggcgaatcgagatttaagaacttcaggcgcaacaatacatctgctgggatatctgctacgcttcttggggattcagtatcagctggtatgaa

SEQ ID NO: 73843 - DNA, 134 bp, Zea mays
tttggatacggaacctgtttctcaaacaagtttcaacgagttaagaagatatgagttggtttcagttggatcttagtcctggttgctcgtaatacagcaatctagatagctcaattgaatatgaaatttgatgg

SEQ ID NO: 73844 - DNA, 161 bp, Zea mays
catggctgtgaaatttggtaaagcatttggtcttaaggtcacagttttcagtacaagtgaatcaaagagagatgaagccatcaacctccttggagcagataattttgttatatcatcagacacacagcaaatggagtccctgaagaactccctgcacttca

SEQ ID NO: 73845 - DNA, 157 bp, Zea mays
tgctggataacgatatatcgggcgggattcttgagcagactttctcgaccgaagacgagagatttggagtgatgactactgaggatctcatccctgatggccgcaatattgatgtcaccaatgaaaacaagaaggagtacgttgatctcatggtcaa

SEQ ID NO: 73846 - DNA, 156 bp, Zea mays
gaagcaggtcggtggctcagtgcacgagctggcggcgaaggtggacgagtacgcccgcgtcatgatcagcgggcccggctcctcgctcttcgaggagctcggtctctactacatcggccccgtcgacggccacaacatcgacgacctcatcaccat

SEQ ID NO: 73847 - DNA, 159 bp, Zea mays
cgcagatcaacacgctggtgatgggcatctcgctgctcaagggcatgtacggcgacttctccggcagcctcatggtgcagatcgtggtgctccagtgcatcaactggtacacgctgatgctgttcatgttcgagtaccgcggcgccaggatcctcatca

SEQ ID NO: 73848 - DNA, 151 bp, Zea mays
ggctgaagtgcttattcctggtagctgattgtcacagcatattagtactgctggtatggaagcaagtggaacaagcaacatgaaattctctctgaatggttgtgttatcattggcacccttgatggagctaatgttgaaataagagaggag

SEQ ID NO: 73849 - DNA, 158 bp, Zea mays
cggctcgagatcgcctcctcggccattccttactccagaactcctccagcatggctcaagaccactcccgaccaggtcactgaccagatctgcaagctcgccaagaagggtgccacccccagtcagattggtgttgtcctccgtgacagccacggtat

SEQ ID NO: 73850 - DNA, 157 bp, Zea mays
cacaaaagtaattaaacgaaagagaataaaattgaaaaacaaaaataaaaaagaacaaaaaaagggaaacaaaaaaaacaaaacataacgcaatcaaaaaataaaaataaacaaaaaaacaactaaaaagaaccaaaagcacacatcacaacaaaat

SEQ ID NO: 73851 - DNA, 154 bp, Zea mays
ctcagatgagcatgcttgccatcaagcatggagcaataaaccttggccagggctttccgaattttgatggcccagactttgtgaaagaggccgcaattcaagctatcaatgctgggaagaatcagtacgcaagaggatttggtgtgcctgaact

SEQ ID NO: 73852 - DNA, 153 bp, Zea mays
cgcagtgactgacagaacgaaactccccaacatagttgacccagtgatcagggacacgatggacccaaagcatctgtaccaagtggcagcagtggcggttctctgtgtgcaaccagaaccaagttacaggccgctgattactgatgttctcca

SEQ ID NO: 73853 - DNA, 150 bp, Zea mays
ctgcgatcgatacgcgagggtagatatcagacacttgatgagtgtcttgtccgtgagtaccgcatgtccatgaatggaatctcaaagcaattttctcatgaattctgcgagggagtcagagcacgactagtcgacaaggacttcactcct

SEQ ID NO: 73854 - DNA, 150 bp, Zea mays
gtagaacggcatcagttacactagtagtgctcatctcgctggtactgctgagctgaccaccgccgatccttccaagatggcgaggcagggtgtcgtcgcttccatgcatgcgctggcattgcttctcggagcattcgcagccattcctac

SEQ ID NO: 73855 - DNA, 275 bp, Zea mays
gaatttgcaaccatgcattccacttccactgtatcagccgttggctaaagacccgtcaagtgtgccctcttgacaacagtgagtgggagttccagaagtatggtcactagagagaatggcttcggcgtggagttgcttcatcgtttctcgtcgtttagcagtagtggttactgaatagattctggtgaacatgctatggatctgtaacgtttctgaagctctgccttacttgaagctgtaggcgaatactctggttatgccatattcgtccttca

SEQ ID NO: 73856 - DNA, 185 bp, Zea mays
ctgtcggacgcgcgggacgccggcatggcgttcatcctgggccgacagcacgtgaaggcgaagagcgggtccggcttcctccgccggctcgtgatcaacttctgctacgacttcctgcggaggaacagccggggacccgttacgccgtcaccgtcccgcacgactccacgctggaggtcggtatg

SEQ ID NO: 73857 - DNA, 274 bp, Zea mays
  unsure (1)..(274): unsure at all n locations
aagaaggaatccaacgcccccaagcgcggtctctctgcttacatgttcttcgccaatgagaatcgtgagcgcgtcgtttacgantacccaggcattgccttggtgcccttggtcgtaagctcggtgagctgtggaagggattgagcgacgccgagcgcaagccatacgaagacaaggccgccgccgagaagaagcgttacgaggaccagaaggccacttacttggctggtggagatgacgatgaagaatcttcctaaatatctttttcaatatt

SEQ ID NO: 73858 - DNA, 269 bp, Zea mays
aagatctcctccgcctcctcggcgaccaccgtctcgccgctgccccacatgttcgtcatcaaggacctggtggtcgacatgaccagattctacaaccagtacgagaccgtcgagccgtggctcaagcgcaaggacccgccgccgcagctaggcaaggaggtcccgcagaccaaggccgaccgcgccaagcttcgaagcatgtacgagtgcatcctctgcgcctgctgctccacctcctgcccatcctactggtggaaccccgaggagta

SEQ ID NO: 73859 - DNA, 273 bp, Zea mays
tgagaaagatggctggaaatggatggtgcctccgccagtcagcaagaggcctgttctctctggtgatcctgagaccgacaagctaatccggaaagcaacaaagcgtgctcatttatctgttgctgaaaggctgcttaaagagtttggttgttctatctgccgggcggtgattaaagagccacttacaacaccatgtgctcacaacttctgcaagacttgtttgcttggtgcatatgatagccagtcctctatgagggaaagaagccgtggtgg

SEQ ID NO: 73860 - DNA, 276 bp, Zea mays
gcatcggcggcgactacccgctgtcggccaccatcatgtccgagtacgccaacaagaggacccgcggcgccttcatcgccgccgtcttcgccatgcagggcttcggcatcctcgccggcggcatcgtcacgctcgtcatctccgccgccttccgcgcggcgtacccgtccccggcgtatccggacgaccacttcacctccaccgtgccgcaggccgacatcgtgtggcgggtcatcgtcatgctcggcgccgcgccggcgctgctcacctactact

SEQ ID NO: 73861 - DNA, 271 bp, Zea mays
agctcgtgctctctgctctgcactatctactaccaaagaaagatgaaggacttggcggggctggggcactgttcgtggtgtccttcctgttccacttcgcctccttcatggtgatcccggcggtcacttccgtcaccatggaggccgcctgccccggccgcgacgagtgctccgtcgccatctacctcagcggcttccagaacgcagtcaccgggatgggggcgctcgtcgtcacccccatcgtcgggaacctgtcggacaggtacggccg

SEQ ID NO: 73862 - DNA, 268 bp, Zea mays
ctttttctgaatacctcacagatccaaaaatgtcttccgaacagagtttcattgccatcaagcccgatggtgtccagcgtggcctcgttggacccatcatctctcgcttcgagtcccgtggcttcaagctcgccgctttgaagttggtctctccgcctcgtgagctcctcgagaagcaatatgccgacctctccgagaagcctttcttccccggtctcgttacatacatgttgagcggccccatcgttgccatggtctgggagggccg

SEQ ID NO: 73863 - DNA, 272 bp, Zea mays
gccgccgccaccgccacctgccccagcgcgccgccgccgcagccaccatgggtcgcgtccgcaccaagaccgtgaagaagacctccaggcaggtgatcgagaagtactactcccgcatgaccctcgacttccacaccaacaagaaggtgctcgaggaggtctcgattctgccctcgaagcgcctccgcaacaaggtggctggcttcagtacccacctgatgcgccgcatccagcgcggcccagtccgcggcatctcgctcaagctgcaggag

SEQ ID NO: 73864 - DNA, 275 bp, Zea mays
gttaatgagacaaaggctacagttaagttccagctgaagaaggtgctttgcatgggtgttgctgttggcaactgcggcatggatgagaagcagatcttccagaatgtgcaaatgagtgtcaacttcctcgtgtcgctcttgaaaaagaattggcagaatgtgagatgcttgtacctgaagagctctatgggaaaggtgtaccggctgttctaaattttccaattaggcttagaatttccaggagactcgagtgcttggacacttgccattttccc

SEQ ID NO: 73865 - DNA, 266 bp, Zea mays
cggctcgagccgcgctgccttcaacctctacacctctaccctcgggtaccagatccaggacatccaggccaagtactatgccgatggggaggacgcgttcgacatgcgcaagctgctccggcagccacagcccaagaagcaccaccaccaccaccatcacggccccggtgggtgctgctcccacgacgcaccagttgcggcgactggttcttctccccagtcttctggttcacccgataagaaggctatcacttgatgtaggacaa

SEQ ID NO: 73866 - DNA, 270 bp, Zea mays
ggcaattttacggactattttcctcatctttaacctcaactaaacttcgactttcggtcaacaatttaccgttcaacaggtgtaattgatattttgttttagacatttcaaaacaaacatttaaacatgggaaacgtgttttccaacttattcaaaggccttttcggcaaaaaagaaatgagaatcttgatggttggtttggatgctgccggtaaaactactatcttgtataaattgaaattaggagaaattgttaccactattccaact

SEQ ID NO: 73867 - DNA, 264 bp, Zea mays
aatacttcatgtggtgcacctatgatgtacacttctatgcctcctttgctcttttggatctgtttcctaagattgaattgagcattcaacgtgattttgctagagctgttttgcgggaagataacagaagagtcagatttcttgctgatggtacctggggtattcgtaaagtaatcggtgctgtcgcccatgatcttggagcacatgatccttggcatgaattgaatgcttacaacatacatgacacaagtagatggaaagatc

SEQ ID NO: 73868 - DNA, 256 bp, Zea mays
ggtggtctgtttttactttcaagaagggcacagggtggcctcggtggacccaatggtcctggctttcctcttggttttggtcaatctagggccaagtttcagatggaacccaacactggtgttacatttgatgatgttgctggtgtcgatgaagcgaacacagacttcatggaagtggttgagttcttgaagaaacccgaaaggttcactgctgttggtgctcgcattcctaagggtgttctgcttgtcggtcctc

SEQ ID NO: 73869 - DNA, 258 bp, Zea mays
gaaaagcttgtccgcatgcttggcaacattcaggctatgcttctcgttggatggcgactgtgcaagctgtatgagtcaggcaaaatgacaccaggccggtctagtttaggcaaggcatggacgtccaagaaggccagggaggtggtttctcttgggcgagagctactgggtggcaatggcactttggttgattttcttgtcgccaaggcattttgtgacgtggaacccattttctcgtacgagggcacctatgacatt

SEQ ID NO: 73870 - DNA, 259 bp, Zea mays
gccgccgccaccgccacctgccccagcgcgccgccgccgcagccaccatgggtcgcgtccgcaccaagaccgtgaagaagacctccaggcaggtgatcgagaagtactactcccgcatgaccctcgacttccacaccaacaagaaggtgctcgaggaggtctcgattctgccctcgaagcgcctccgcaacaaggtggctggcttcagtacccacctgatgcgccgcatccagcgcggcccagtccgcggcatctcgct

SEQ ID NO: 73871 - DNA, 259 bp, Zea mays
tcgagcaatatttagatcacactgttgtcccaattttattatctggcttggcaaccgtagcaaaagttcgtccggagcaacctatcgaatatcttgcccaatatttacttgacaacaaatacaaatatgataataaccaagaaaactcttcaattaatggtaatcaataaaatttgattactatttaaatcatttagaactattattcaatttttacttgtgtttttatacatttcatttaaattcgcatataatttag

SEQ ID NO: 73872 - DNA, 192 bp, Zea mays
catgtgcaaccggaggaacgatttctggtgggtcgcattggtccaaaagagtataggctatacagggtcattgtcagatatggttatcgcgatgtgcagaaggatgacctggagttcgagaaggagctagtcagcaacattgcagagttcatccgcagcagtggggaatatgacaagaatggcttcttggag

SEQ ID NO: 73873 - DNA, 261 bp, Zea mays
gagtgaacaaagaaaggaccgttctgccaagaagtacaccttcagaggtctctccctcgaagatctcgttgccctcaacactgaccaactcaagggccacctcagagccagaatcagaagaagattcaacagaggtcttaagcataaatacaccagactcgtccaaaagctcagaaaggccaagatcggtgtccaacccggtgaaaagcccggtgccgtcaagactcacctcagaaacgccatcgtccttcccgaaatggt

SEQ ID NO: 73874 - DNA, 219 bp, Zea mays
actcttgactgttttaccaagacattaaagaatgatggacctggtgctttctacaagggattcattgcaaacttttgtcggattgggtcatggaatgtgataatgttcttaactctggaacaggtcaaaagattctttctatgaagagatgtctgtactgcaagtagggattctgtgggacaagtgtatgctgatatatatgggcggcataattgcatg

SEQ ID NO: 73875 - DNA, 258 bp, Zea mays
cccgaccaagaaggagcaggtcttctccacgtactccgacaaccagccgggcgtcctgatccaggtgtacgagggtgagcgcgcgaggaccaaggacaacaacctcctcggcaagttcgaactctccggcatccctcctgctccccgcggcgtgccccagatcacggttaccttcgacatcggtggtcacggcatcctcaacgtctctgccgaggacaagaccaccggccagaagaacaagatcacgatcaccaacga

SEQ ID NO: 73876 - DNA, 226 bp, Zea mays
catgtgcaaccggagggacgatttctggtgggtcgcattggtccaaaagagtataggctatacagggtcattgtcagatatggttatcgcgatgtgcagaaggatgacctggagttcgagaaggacctagtcagcaacattgcagagttcatccgcagcagtggggaatatgctcagaatgtcgtcgtggcggacatagataagcccttcgagaatctgtccacca

SEQ ID NO: 73877 - DNA, 253 bp, Zea mays
aatccacctcaatacatcttaatacacccaaaatgccgcgccaattcttcgtcggaggcaacttcaagatgaatggagtcactgactctatcaagtccatcgtctctaacatcaacaactccaagcgtgacccgtccaccgaagtcgtcatcgcccctcccgccatctatctcgcgctcacccgcgcacttgccgacccctcagtcggtgtctcggcccagaacgtctatgacaagcctagcggtgcttatac

SEQ ID NO: 73878 - DNA, 255 bp, Zea mays
acaggatcatcacagtccgggaatgtgctcggtcacagggctttcctgacagctatgaatttgcgggcaacatccagaacaagcaccggcagattggcaatgccgtgcccccgcctcttgcctatgcacttgggaggaagctgaaggaagctgttgacaagcgtcaggaagccagcgcaggcgtgcctacaccatgagaagttttccttccatcaaaccatgacccatgaagctaagcgctgaggtcgtccttga

SEQ ID NO: 73879 - DNA, 216 bp, Zea mays
gaaaatcgtccgagagatgactaggatgaaggatgagaggcataggctgaggatgatcatggcacagtacttggtgtggcttcattcttcatgcaagatctgagcaaccttgagtagcaaatcgaggggaagggtacgagcagcttcggcaagcgccggaacaagacgcacacgctctgcatccgctgcagcagccgtagcttccacctccagaag

SEQ ID NO: 73880 - DNA, 253 bp, Zea mays
  unsure (1)..(253): unsure at all n locations
gactgctgggagcaccacttctgaaactagctgtgaagcagttcggcaatcgtgtgttgcacttgttgagaggctgaagcctatcaaggagagtctcgaagctaagtccaacacagtggaatggagtgccttgattgctcaggcaagcatggcgagtgtgaacctatcagcacaggcgtactgggcntctgatccatctttcaagagctacttgaactacggagctggcaccagtgaggtggaagttgatatc

SEQ ID NO: 73881 - DNA, 255 bp, Zea mays
gtccccgcatatttatcgcaacaaccccggcctgccaagtgccacaaccgtagcctgtagcttcatccgttgcgctgctcccggttccatcgcgcggtgcggaatttaacatggccgtgccggaggtggtggtcgacggcgtcgtcttcccgccggtggcccgcccgccgggctccgccggctcgcacttcctcggcggcgcaggcgtgcgatgcctcgagatcggaggcaacttcatcaagttcacggccatcg

SEQ ID NO: 73882 - DNA, 252 bp, Zea mays
atgagatcgttgtatctcctggatgcccattttaatgaactatgcggtctaccatctctcttcgggaaacttagcggccttgaaattctcaaccttagcagcaacttcagtgatttgaaagagcttcctccctcgtttggtgacttgctaaatctgcgtgagcttgacctaagcaacaaccagattcatgctctccctgacacttttggtcggctggataaactggagaagcttaacctagagcagaaccct

SEQ ID NO: 73883 - DNA, 259 bp, Zea mays
cccaaaatcgcctctgcactcaatacgcttctgtacgtcttcgtgactacgtcaacaccacaaattactttcccccaagttcacctcccagaaatcaatcaaaatgcccaaggctgctgctggtaagcgcggtaaggccgagaagaccaagcgcggcaagaaggaccccaacgcccccaagcgtggcctctccgtcgacatgttcttcgccaacgagcagcgtgagaacgtccgtgaggagaaccctggtatctctttc

SEQ ID NO: 73884 - DNA, 256 bp, Zea mays
cggctcgagtacagctacatcaacccgcggttgctgacggcgatgaaggttctgggccggggtggcatcgaggacatcaagtacgtcggcagggccccgtcggctgctaccgcgacgggcttctactcggtgcacgtgcaggagcagacggagctggtgcagaaggcgctgcagcgcgaccccctcaactaccctttctgaaagaaacgaggcccctgtagattcttggaattggggaccttttgaatttgatata

SEQ ID NO: 73885 - DNA, 258 bp, Zea mays
gtagcctttgtgctgctttgcatggtaacaaagctgctggaagaaccccattggactgggagaccagggtgaagatagctctgggcactgcacgcggaatggcttatcttcactccgtgggtagcggcgggaagttcattcacgggaacatcaagtcaagcaacatccttctctcacaggaactcggcgcctgcgtcaccgagttcggccttgcccagctcatgtccacgccccacgtccacccgcggctcgtcgggt

SEQ ID NO: 73886 - DNA, 252 bp, Zea mays
cggctcgagagcaagtgcatgccgtaagacacatgcatgatgaataaacgatggctgtcgtccgcacccgcgcgcagcacacggttcgtacgctttcctcgtcaggtggttccagaggttcccccagcacaaggccaaggagttctacatagctggagagagctacgcaggacactacgttccccagctcgcagacgtcattgtggaggggaacaagaaggcctccgaagaaaaccacatcaacttcaaagg

SEQ ID NO: 73887 - DNA, 260 bp, Zea mays
cgcgcattcaaaacaggccttgctcacaggttgttccgctggtggtctggccacgctgctgcactgcgacgattttcgcgcacggtttccacctgaggttcctgtgaaatgcctctccgatgccgggttctttgttgacgcgaaggatttgtcagggcagcgctccatgcgcgctgtgtacagacgagttgttcatcttcagaacgttactaaagttttgcccaaggactgcctcctcgcaaacaaggacgatcccacgc

SEQ ID NO: 73888 - DNA, 252 bp, Zea mays
ggcgaatcggacaacgggctgatccggttcgcgatggggtgcgccaacctgcggaagctggagctgaggggctgctgcttcagcgagcgggccctggcggtggccgtgctccagatgcccccgccgaggtacgtatgggtgcaggggtacagggcctctcagacgggccgggacctcatgctcatggccaggccgtactggaacatcgagttcgtgcctccccgtcccgagagcgcgtgtcgggtgatggcg

SEQ ID NO: 73889 - DNA, 251 bp, Zea mays
cttcgttgcctctcttcctccctctcctctcttccttcctctcgatcgatcgtcatagcaatccaagctagcaagcccgtccgtcgtctctcgtccaagaagcatacaactactaatggggaggtcaccgtgctgcgaccaggacgcgggcaccaagaaaggcccgtggacgccggaggaggacaagctgctggtggactacatcaacggcaacggccacgggagctggcgccgcctgcccaagcacgccg

SEQ ID NO: 73890 - DNA, 248 bp, Zea mays
cgacctcaccggccacgagacggtgcggataccgtcggtggcgctggtgttcgccgacggcgccaccgtgcacctacaccccagcggcgtgctgtatacctggagcaatgtctaccagacgtgcctcgcgttcctgcccaaccccgacgacacgtccttgaccgtacttgggaacacgcagcagaggacgctcgccgtcatctacgacgtggacaaccagaaggtcgggttcggcgccaatggctgcg

SEQ ID NO: 73891 - DNA, 190 bp, Zea mays
cctggagaagaggccaccaaggatttctcctggaatggctgatttggttaagaagctaaaatccaataatattgatgtgttccttgtgtcaggaggcttccgacacatgatcaaaccagtggcatttgagcttggcattcctcctgaaaacatcactgcaaaccaattgtaatttggcacattgggggag

SEQ ID NO: 73892 - DNA, 309 bp, Zea mays
cccatcggctccacacaaccagaaggtagttcgcttcactctgccctgcaccgccgccaacgctgcagtcgcagttgccgcaggcgggaacttggacgtgctactcgcgactgctctcatctgttcccgcgtaggattcgttcacaatggcccgtgtgtatgtcggcaacttggatgcacgcgtgacttccggggaactcgaagatgagttccgtgtgtttggagttctgcgaagtgtttgggtcgcacgcaaaccacctggttttgcatttattgattttgacgacaggagggatgcagaggatgcta

SEQ ID NO: 73893 - DNA, 198 bp, Zea mays
aacaagtgccaaatgctgcccagctccctcagagttcattcggaaagcaacggtggttcgcggagaatgggaaatgctgcagcctgtaggatcaccgaatgcataagaaataagattgacttgtatggttgtttgttaggcggggaagttgtgcaggcattgttggactccatacttctgctcttttctgcctgtaaa

SEQ ID NO: 73894 - DNA, 257 bp, Zea mays
tcacaggctgcgaacctcctagaagctcgaggagatgctctccaagctgtcggcgtggttcgtgaacccgcggcggaatccgctcgcgcgcctccaccggaacgccgtcgcctcccgcctccgcaaatacgggctcaggtatgacgacctctacgacccgtaccacgacctagacatcaaggaggcgctggcgcggctgccgcgggaggtggtgacgcccgtaaccagcgcctcaagcgggccatggacctctccat

SEQ ID NO: 73895 - DNA, 255 bp, Zea mays
ccaagagctccgccttctacggcagacagatccccagcgaggaggtgtcctggggatcaattaccttggtggacgctgagaagcgcctgctggccaatgccttgctggatttctcgaatgagcgcttcgtgctgctctcagagagctcgcattcccgtgttcaacttcccgacggtctacgagtacctcatcaattcggcgcacagtttcgtgagtcctacaacatcgacacccctcagtgtgctggccggtaca

SEQ ID NO: 73896 - DNA, 252 bp, Zea mays
gctgatcaaaccttttgcatttgggatttagatggtaaggaagtagattgctggaaagggcagagatcggcaacaacatctgattttgctgtagcaaaagatggaaatcttataataagcttgagtagggacaatgcaattcttctatttgatagggagacaaaacatgagagaataattgaagagggtagtacaattacttcattttctcatcagaagatggtgatttcctgcttgtaaatcttgtaagtg

SEQ ID NO: 73897 - DNA, 266 bp, Zea mays
gttcggcgacgcgtgcccgacggtgggcaagtccggcaacttcaagcagttcaactgccccaccggctactacaacgacctggcgtcgctgatccacgccaccaacgtggacgccacgcgcaacatcttctccacgggcaccgccggcgaattcaggctcgactcgctgctcatcttcttcggcatctactgcgtgctggggctcttcaccttcggcatcgctgtgccgtcggggctcttcctgcccatcatcctcatgggctccg

SEQ ID NO: 73898 - DNA, 269 bp, Zea mays
tgagcatggaaggaagtcttgcgagcttggatggaagccgggccagcaggccgttccagctagttagtggctctcagacatctagcacaccggagctgggcctggtgcaaaggagaaggtgtgctgggaaggaggagggagtggtcagtgcgcaaccgggagccggtgccattgttcaaagaaaaggaagctaaggataaggaggtccatcaaagtccctgcagtaagcaacaaggttgcagacatcccagctgatgagttctcgtgga

SEQ ID NO: 73899 - DNA, 276 bp, Zea mays
caactgaaaccaccactgcatctgcacctaaagagactacccagagttctctttccaacagctttattatctataccccctttttcaaggaagttctcagcaaaggcagagtttatgtccatcgaaaacctcaagacctcgaccccttcgccgaagccgacgaagataccggtgagactaaacagtctcagaattacattcatatacgaattcaacagcgcaatggtcgtaagacattgatcaccgttcagggtcttcctaagaagtttgatcaga

SEQ ID NO: 73900 - DNA, 141 bp, Zea mays
gttcaatatagaaatagcaagttaacacaagtgctgcaggatgccttaggtggtcaagcaaaaacattgatgtttgtgcatgtgaaccctgaaacagactcttttagtgaaacaatgagcactctcaaattcgtgagcgtg

SEQ ID NO: 73901 - DNA, 268 bp, Zea mays
ccatccgtcctccgcctgggtctccgccctccgccgctccgccttgcgtccttaccctgcacggcccgccgccggccggtcgcccgtccggagccactgacccgagtttccgtccagcactccagcgaccagcgctgttcgtccagagtaccaacagatctcgtcaagaggtctgaaggatgaggaaaggactgcatcctcagatgcaatggatttcatatgtgacgcagagtggtaggctgatcaatatcatgatgaccaaggtgaa

SEQ ID NO: 73902 - DNA, 268 bp, Zea mays
ggctcttggaattgatgacatcataggttttgattttatggagaaaccatcaaggactgctattttgaaatcactggagcagttaatcttactaggggctctgactgatgattataagctctcagatccagttggcatcagatggctaggctacctttggatccaatgtactctaagtcattaatagtctcaagcaaattcaagtgcttggacgaaatgctcattgttgtatctatgctttcggtggaatcaattttctctccgtgcg

SEQ ID NO: 73903 - DNA, 270 bp, Zea mays
gcaagcttcagacctgtatgacccagaagatgtgctcgatgtgatagcagaatcagagctatggctggaaaaggcaatattgtataggaagatgggccaagagaatattgtacttcagatactagcattgaagctgaggatagtgaagctgctgagcagtattgcgcagagattggtcgagatgatgcttatattcagcttttgggcttgtatttggaccctcaaaacgggaaggagcctatgtttacagcagctgtacgacttcttcat

SEQ ID NO: 73904 - DNA, 263 bp, Zea mays
cagttttgttgactgctttgatgatcctggtccacatggagcaggtagatattctgagcatatgctacctgaaatcgtgaagaaagattggagaaagggtgcgcagtggtttacagtgaaacggcagcatgcgatcttatactcgcggacaccctttactatgggaagttcaagcgttactgtaagccattaaacgaatggcataactgctattcagacgagcactacttgccaaccctctttaacatggttgatccgactgg

SEQ ID NO: 73905 - DNA, 266 bp, Zea mays
ggactgggaacaggtggtcatccaccgagacatcaaggccagcaacgtcttgctcgacagcgacatgaacggacggctgggggactttggtctcgcgaggctgtacgaccatggagccgacccgcaaacaaccatgtcgttggcaccatggggtacctcgcgccagagctggcgcggtcagggcaagcgtcccctctcaccgacgtgttcgccttcggggcattcatcctcgaagtcgtctgtggccggagacccgtggagcagag

SEQ ID NO: 73906 - DNA, 274 bp, Zea mays
gctccagcgacgaccctaccgtcgtgcaggacgtcgtgacgccggacaggctagacaaccagtattacaagaacgtgctggcgcacagagtcctcttccacgtcggacgccacactcctcacgtcgccggcgacggcaagctcggtggatgacaacgccaacgtccccgggtggtgggaggacagcttcaaggtggccatggtgaagatggccagtgtcgaggtgaagaccggcaatagcggcgagatcaggaggaactgccgtctcgtcaact

SEQ ID NO: 73907 - DNA, 265 bp, Zea mays
gcggcggcgaagggtggcgagctacaaggcctactcggtggagggcaaggtgaaggcgtcgctgcggcgcgggctccggtggttcaagggcaagtgctccgagatcttccaccatggatggtaacctccgaggctggctggctggctggctggccggctctccttcttggacggtggcagggcccccccaagaaaggaaccaaacttctgaatatgttcgcgatttacttttcctttttgaaaataatgatgctcatgctccaga

SEQ ID NO: 73908 - DNA, 269 bp, Zea mays
cgacgatccacgacgtggtcgcccactacgccagcaagttccctcacctcgacatcttgaaagagacgacggaggcggtggcgacggtgcggcctgcccgggacaggttgggcgagctgggcttcaagtacaatacggcatggaagagattctggatagcagcgttgcctgtgcggcgagatccggttcccttgacgcatccaagctcggcctacagaaaggataaaagctcgaagcttactcataagcaccatggggaacttggattg

SEQ ID NO: 73909 - DNA, 265 bp, Zea mays
gatccctcgacaatggcactccaggcagcctacgagtccctgcagcaggccgtcggccatggcgcgtggtcgtccacgcagacgctgacgctgctgctcatcgccgtacccaccgtactactcctgctagcgtcctcgccaagagcacgtcgtcgtccggtaggggcaagccgccgctccctccctcgccgccgggcaccctccccatcgtggggcacctacaccacatcgggccccagacccacatctcgctccaggagctggt

SEQ ID NO: 73910 - DNA, 258 bp, Zea mays
tgccttgcttcctctcctccgtctacggcctcaacgacaaggtccccttctccgagcgcgaccgcaccgaccagccggtctcgctctacgcggccaccaagaaggccggcgaggagatcacgcacacgtacaaccatatctacggcctatccatcaccggcctccgcttcttcaccgtgtacgggccctggggccgccccgacatggcctacttctccttcacccgcaacatcctgcaggggaaacccatacggtgta

SEQ ID NO: 73911 - DNA, 268 bp, Zea mays
gtaagcttgaacccggctattccatacatgaaaagacaatcgcgcactgggagtggagagatggcgagagtggcacgtaccctcctggcaaaggatcgcctaaaaggggtggtgtgctctcgggtggcgtggacctgttcatgtagtggaggatccgtgggaacggttgacatatgcaagggaacatgttacatatgtcgtgtggttagagatcctcagctgagtaaatcgattcggatcgccgttatatccccggagagtggagact

SEQ ID NO: 73912 - DNA, 270 bp, Zea mays
tgcagtcctgataccacgagaaacggcatggtttggttactaccctgatggagcctttgatccagttctaccacctcagaagacgaaactgtatgaggaagactggattggtttgaagacactggatgaagcagggcgggtgaagtttgtgtctgtgccgggaggtcatcttggtatctccaaatgtgacatgaagaagtacattgtgccttacctgacaaacaaaaaggcatcggtgacggtttctgatttgctagttgccatttggca

SEQ ID NO: 73913 - DNA, 178 bp, Zea mays
aatggagttgcccctgaagaagatgacttggtgaggctgcaactggaggctctgcttgcagagaagtcgcgtctggcgcaagagaacgccaacctgacgagagagaaccagggcctgatgcagctggttgagtatcaccagttggcatcccaggatctggatgagtcctatgaggatg

SEQ ID NO: 73914 - DNA, 224 bp, Zea mays
cttcccgcccgccgtcgaggcgttccgcgccaaggtccgccatgccgactgcttcctcttcgcctcgcccgaatacaactactccatcaccagcccactgaagaacgcgcttgactgggcttctagaggagtgaactgctgggcagacaagccggccgccatcgtcagcgcgggaggcaacttcggcggcggcaggtccagctaccatctgcgccaggtcgggg

SEQ ID NO: 73915 - DNA, 146 bp, Zea mays
gtctcttgactgaggaggacctgaagaaaccacaacttccagttgttggggactgtgaggtgggggcagcaaagaaagcatgcaagaactgtacttgtggcagggctgaggccgaggagaaggttgggaagctggagctcactgcg

SEQ ID NO: 73916 - DNA, 222 bp, Zea mays
tcgccgccgaaatcccgttgcgtctctcgcgcgttaccaagctctcaagttttctcgcgccgacggcaatggatgaggtcaccgaggccgtgaacaacctcaacatctcgggcgtaggggccgcgggcgttgccggggcggaagggcacaagaagaatcgcatccaggtctccaacactaagaagcccctcttcttctatatcaacctcgccaagaggtaca

SEQ ID NO: 73917 - DNA, 262 bp, Zea mays
ttgttattatgttggccatccttggagttgcctacgggtttcttgcggcgactgtggccatccagaggatctggcagcggcactatcacatacttaccaagaaggagctcacgaaggcatatgtggtggaggacctccctgggggttacacgccgccgaagatggatccagaccatgagcagcggtttaaggtgttgcagctcatgtagcttgcactttcgcaggtgatggacatgaaatatcgcatcttttttgttgcatt

SEQ ID NO: 73918 - DNA, 260 bp, Zea mays
caacatgcgagatctgcttatgaacattttgagaaggaaggcaaccgagctattgtaatagatgaattagcttctgaattgggcctcagcccttcagtgccactgcatgtcgttctgcaagattggatcaggcatacggatgggaaattgagctttctcggatttgtcaagttaccgcatggcatgtccagcaggtccctgtcaaagatgagatagctgttgataatctctaacgacagcgcatgcttacaccgccttag

SEQ ID NO: 73919 - DNA, 211 bp, Zea mays
gggatttcgatgagcttgcttctaatgtgaaggaaggcctcgaagttcattttgttgacacatacagtgaaatatatgatttagctttccagagtgacgccgggacagaaacaagctgagatgatttagctttatgggattgagattttttccccctagacccacgacagaaacaagtccgtcaagaggcaggcataccagaccattgtaa

SEQ ID NO: 73920 - DNA, 262 bp, Zea mays
gcggcgcagaaccaggacaagagcaaggcggacgccgggtaccccgcgggcatcggcgtgcgcaattcgctcttcgtcctcgctgcctccaacttgcttggctttatcctcaccttcctcgtgccggagtccaagggtaagtcgctacgaggagatgtccggggaggctgacgacgccgaggacgacgccgtcggcacccgcgcggtgcggccgtcggggacccagatggtgtagaatcgaacatggcgacgcgtgcacacg

SEQ ID NO: 73921 - DNA, 254 bp, Zea mays
gctgaaaatgatggttggtactagaagagccgaggaggtggtggatcctgacatggagttgaaaccagcgattcgtgctctgaagcgtgctcttctagtggcactgcgatgtgtagacccagatgctgagaaaaggcccactatgggtcaggttgttcggatgctcgaggcagaagacgtgccctcacgggaggaccgccggagccggagaggccacagcagccacgcagacaacgagtccaaggcaagttcaa

SEQ ID NO: 73922 - DNA, 258 bp, Zea mays
gcacatggtacaacgccacctctatgcaaaagtggcgatgatccagattcagtatggggagtgccaatggaagcttgcattactccgtatcctgaacaaatgcacagagctgggggaagtgggctagctccctggcctgctcgattaacaaccccgcctccccgtcttgctgatttgtatgttactggtgacacatttgaaaaggacactgaaatgtggcagcaacgagtagaaaaatattggagtttgttgggccca

SEQ ID NO: 73923 - DNA, 258 bp, Zea mays
ctagcgttccctcaccagggcgtccatcccagcagccatggcgatggcgtacaagatggcgacggaggggatgaacgtgaaggaggagtgccagcgctggttcatggagatgaagtggaagaaggtgcaccgcttcgtggtgtacaagatcgacgagcggtcgcgcgccgtgctggtggacaaggtgggcggccccggggaagggtacgaggagctcgtggccgcgctgcccggcgacgactgccgctacgccgtctt

SEQ ID NO: 73924 - DNA, 249 bp, Zea mays
gaaaaactctccgtcagaggataaagaagtaagttgctaaagttttggactgtcttctttcatttttcgtctcacctattctatttctttcaggaatcagaaaagcatatggaggaactatgctccaaaatcaaggtgggtgatagatgtgaagttgagcctggtgccaagaggggcactgtaatatttgttggtagagctgaagcccttggacgtggattctgggttggagtgcaatatgatgagcca

SEQ ID NO: 73925 - DNA, 251 bp, Zea mays
gcgaggacgacgccttcgattctgatctgcggtcggcgcgacctagagagaaccggagatgcagcagggcgacggcacggaggcgcaggtgacgtgggaggaccagcagaacatcaaccgcttcggtcgcctcaacaaccgcctccacgagctccaggacgagatcaagctcgcgaaggagacgaatgagaaccttgatgatgctgggaatgaactcatcttgtcggatgaagacgttgtacgcttccaaa

SEQ ID NO: 73926 - DNA, 249 bp, Zea mays
gaaaacatttgcatgcagagtgcgaaaacgaaccgaaatgtggagcaggtattcttcgccatggcaagggacgtgaagcaaaggctcaccgagaccgttgccgctgcggctgagcccccgaccattcagattagcaggccagaccccgaccaggctgacgcagcctcctcgcggcggtactcgtcgtcctgctgtaacacctgatctggcgactgccgtggcgaaatcaagcagcgtgaatcttgatgc

SEQ ID NO: 73927 - DNA, 254 bp, Zea mays
ctcgaccgccgccgtcccagttcgcttcgcgtcaccgagagctcatcggcctccgtccccgcgagaagcgagagcatggacacccaagtgaagcttgctgttgtggtaaaggtgatgggcaggaccggctccaggggtcaggtgacccaggtcagagtgaagttcttggatgaccagaaccgtctcatcatgaggaacgtcaagggccctgttcgtgagggtgacatcctgaccctgctcgagtctgagaggga

SEQ ID NO: 73928 - DNA, 246 bp, Zea mays
  unsure (1)..(246): unsure at all n locations
agaaggtccagatgcttctgagcgaccgcttccttggattctacatggttccggataacgctccttggaacttcaacttcatgggagtgaagcacgacccacagatgaagtacaacatgaagctgggcatgccccgggacttctatcacgaggaccacaggccaacacacttcctcgagtntcgcaacattgaggatggtgaggccgctgaaggcgatagggaggacacattcacgtaggcgcctg

SEQ ID NO: 73929 - DNA, 252 bp, Zea mays
cagtgaccatagtttctacactatccctgtccggtgctgttccaactgaaccattgacatggaatttaatcaaagtttggttgcctgtaaatatcatctttgttggaatgctgatcacaagcatgtttagtttgaagtacattaatgttgccatgctgactatattgaagaatgtcgccaatgtcctgactgcttctggggaaacttattttttcaagaagcagcatggtactcaagtttgggttgctctta

SEQ ID NO: 73930 - DNA, 269 bp, Zea mays
ggtttacctgtgaggcctgctcccctgccgccgccgccatgggacactccaacgtgtggtactcggaccccaagaactacggccctggatctagggtttgccgtgtgtgcgctaacccccacggcttgatccgaaagtacgggctcatgtgctgcagacagtgcttccgcagcaacgccaaggacattggcttcatcaagtaccgctgaaacttggggagctccaaatcatggcaataatggaagcatggatggggacctaaaagatag

SEQ ID NO: 73931 - DNA, 142 bp, Zea mays
ggcatgggtcaggtccctcaacttccccgtcgtcgacgactggagggcgtggcatctcggtggccaagccgccgggttcacgataaattactcaaacaacatgacgttcgcgacgatcaaaggtggcgggcacacggcgccg

SEQ ID NO: 73932 - DNA, 266 bp, Zea mays
tctggtttctgggggtgtccgcggcactcttccatggatggcaccagagctcctgaatggcagcagcagcaaagtctctgagaaagtggatgtgttctcttttgggatagttttatgggagatcttgactggtgaggaaccgtatgcaaatatgcattgtggtgctatcatagggggtatcgtcaataacatcctccggcctccaatacctgagaagtgtgacccggactggcaaaagctgatggagcaatgttggtcggcgaacc

SEQ ID NO: 73933 - DNA, 269 bp, Zea mays
ggggggaaagatttgatttttcctcatcatgagaatgagcttgcacaaagccgcgcagttatcctgagagcgaggtcaagtgctggatgcacaatggctttgttaacaaggatgataaaaaaatggcaaaatcagataataactttttcacgattagagatatcactgctctttaccatccaatggctttaagatttttcttgatgcgcacacattatagatcagatgttaaccattctgatcaagcgcttgagattgcatctgatcgg

SEQ ID NO: 73934 - DNA, 265 bp, Zea mays
cggctcgaggcggccctagagttgtatatatatagtactgcgataacaccatgagtgcatcagcaaacaataacgctaacaagacagcaaagcgcaatccgatcgtgttttttgatgtgaagatcggcagtcaagacattggtcgaattaaaatagaattatttgctaatgtagtgccaaagactaccgataatttcagacagttctgcacgggcgagcacaaagtgaataacaagcccgtgggctacaaagagagtcagttcca

SEQ ID NO: 73935 - DNA, 261 bp, Zea mays
ggacgagctactcgataggctgatcgaggatcgtgagagcaagtatgaggcggcagcggcgggggcgagtgatctcaaggacgatgatgacgataacttcatacatgtcttgctctccgttcgacaggagtacgaccatattaccagggagcaaatgaaagctctcctgcaggacgtgtttatcggggggatagactccacatcttcgctgctcgagttcaccatggctgagctcatgcggaaaccacgagtgatgaacaa

SEQ ID NO: 73936 - DNA, 264 bp, Zea mays
aagaatttccagcttgtggctgctgccgaccccagtgagcctactaccaacgtggatgatgaaacggttctgctgcagtttggtaaggtcgatagcgatatgttcacaatggattaccggcaaccactctccgcgtttcaagcatttgccatcagcctcagcagctttgggaccaagctagtctgtgaatatcgatgcagtttgatgctcttcgtgtggctatatggtttgtgttggtggttgcttgcttgtttcttgttgtta

SEQ ID NO: 73937 - DNA, 266 bp, Zea mays
cgacaacatcacaatcatccctcaataatggctaagagagttctcatcactggtgcggccgggcagatcgcctactccctcgtcttcgctattgcccgtggtgacttgttggggcccaaccagccagtcatcctccacctcctcgatatcccccagatgattgagggccttaacggagtggtgttggagttggaggattgtgctttccccctcatcgcaggaattgttgccaccactgatgtgaaggaggcattcactggcgtgga

SEQ ID NO: 73938 - DNA, 259 bp, Zea mays
gggaagcatgttttggtcggaaaccgttctttgatgactgaaaacggtgtgaccattcccccagaagcagaaactttcttgatagacctggaatcgaatgcaaaaacaggcatacttgtggcatatgatggcgattttgtgggtttgatgggcataaccgaccccctgaaacgggaggctgttgttatagtggaaggactaaaaaagttgggtgtccatccagtgatgctcacaggagataattggaggaccgcgcaac

SEQ ID NO: 73939 - DNA, 259 bp, Zea mays
caggcactgtcacacagacacagctgacctgccactgccaggaaagtaggtcgaggatgccccgcagcggcttctcggggtccttcaggtcgcccaagatcgacgtcgtcatcgacatgggaaaccccttcctcaaccgcaccgtcgacggcttcctcaagatcggcgccgtcggcgctgcaaggtggctgccgaggagaccttcgagtgcctccacaggggggatgtttcgaagcacaaggttgagcatgccctgagg

SEQ ID NO: 73940 - DNA, 257 bp, Zea mays
agcagagccatgaaagttgtgcttccgtgaataacaagttcaactctggagagtaccaagtcattttgcgcaaggagttgacaaagagtgatgtcgcaaattccggacgaattgtgcttcccaagaaggatgctgaggctggtcttccaccattggtgcaaggggatcctctgatactgcatctggatgacatggtgcttccaattatatggaaatttaagtatagattttggccaaacaacaaaagcagaatgtat

SEQ ID NO: 73941 - DNA, 266 bp, Zea mays
cgacaatgtgtcttttggttacaaccggcgcaggctctctgtggaatggtctacgcaagttgaaccggtgccaaagagccgtgataggcctactggggatgtaaagccaacgagaaccctctttgttatcaattttgaccccatacgcactaaggttcaagatattgagaagcatttcgaaccgtatggcaagattgccagcattcgcattcgaaggaactttgcgtttgtacaatatgagacgcaagaggaagctagtgccgctg

SEQ ID NO: 73942 - DNA, 264 bp, Zea mays
gccgggccgggccgggcagcagggagataaccgaggagggcaggtgcgacctggacaagagatacgtgagtgacttccccgtctacgacggccgcggccccgacgccagccttgtggcccgcgtgcaggggatcaccagcgaaatcgggaacgcgcaccaactgttcgtcgttgttttcgacaccgacaggctcaagggctccacgctcgtcaccaatggcgtgataacggccgggtctgacgagtgggcgatctacggcggaa

SEQ ID NO: 73943 - DNA, 258 bp, Zea mays
caaacatcgggacgtggaggagaaccgtgagggacaggctggaggaagctgtacccagatgcctcaagaagctgttcgagctgccgccggaggaagacgacgaggacatgaggtggaaactggagaagaggcgcaagctcctgctcctgcttgccatcctcgcagccagcctcacctaccaggcaggcttgaacccaccgggcggcttctggcaagagaacagcacaggccacgtcgtcggcaaccctgtgctcaacg

SEQ ID NO: 73944 - DNA, 257 bp, Zea mays
cacaacacagaggaagcaggcggcggcgatcgggcgatggcatggcgggcgagcctgtctcggagcctaaaggagatccgcgtcctcttctgtcagtcctccccggccagcgccgccgcccgtgagttcgtgaagaagaactatggtgacatcaaggctcgcaacccctccctccccttccttgtccgcgagtgctccggtgtccagccccagctctgggcgcgctacggttcatcagataagtgttgtggaaatgc

SEQ ID NO: 73945 - DNA, 259 bp, Zea mays
cctgagggtgataaaacacatgtgtcaactagggtcatgggaacatatggatatgctgcacctgaatatgtaatgacaggtcacctgacatcgaagagtgacgtatatagctttggagttgtactactagagatgatgactggtagaaggtcaatggacaagaacaggccaaacggagaacacaacctggttgaatgggcacgcccttatctgggagaaagacgcagattctataagcttgtagaccctcgtttggatg

SEQ ID NO: 73946 - DNA, 272 bp, Zea mays
cggctcgaggccgcagacccctccccttcgcttccttccctagcgccgacgcccaccagacgagatggccccgaagaaggacaaggccccgccgccgtcgtcgaagccggccaagtccggtggtggcaagcaaaagaagaagaagtggagcaagggaaagctaaaggagaaggtaaacaacgcggtgctgttcgaccaggctacctacgacaagctgctctcggaggtgcccaagtacaagcaaatcaccccttccatcctctccgagcgtc

SEQ ID NO: 73947 - DNA, 268 bp, Zea mays
tgcctcggagagcctccacgacgtcctggacccgcgggtcgccgtgcttcccagggagagggacgacatgctcaaggtgctcaagatcgccgtgctttgcaccgcaaagctgccggcgggcaggccgaccatgagggacgtggtgaagatgctcaccgacgccggcacggggccctgcagcccgcgcggacagccgccgtcaagggtctgcagcaacaagagctgctgctgaatttgtggagcaggctctgcgtctagccaccgacac

SEQ ID NO: 73948 - DNA, 252 bp, Zea mays
ggctgatggcgagaacgaccgcactgtcaagtccattactcagctccttttcgagacatctctcttggtctctggattcaccatcgaggagcctgctagcttcgctgagcgcatccacaagcttgtttctctcggcctgaacgtcgatgaggacgctgagaccgctgaggagaaggcggccgaagaagctcccgctgccgaagccaccggcgagagcgctatggaggaggtcgactaaatttctgtagcaaa

SEQ ID NO: 73949 - DNA, 262 bp, Zea mays
ggcggccatcagggacgtccaggaagcatgcgtctatgatggctacgtcctcccgaagctgtacgccaaggtgcaccactgcgtctcgtgcgcgatccacgcacacatcgtccgcgtccgatcccgtgagtagcgcagggaccgcaagccgccggagcgcttcaagcgcagggaggatacgcctgctggtggacaaggaggcccccgccctggtcctggtgctgctgctccagctccagctccagcacctgttgctgctcgc

SEQ ID NO: 73950 - DNA, 261 bp, Zea mays
tctccatcttgtttccatttcgcgtaacttttcgcggaattttacatcaactttaaaccaacccactttctatcatcatgactggacgcggcaagggcggcaagggcctcggcaagggcggtgccaagcgtcaccgtaagattcttcgtgacaacatccagggtattaccaagcccgctatccgacgtctcgctcgtcgcggtggtgtcaagcgtatttctgccatgatctacgaggagacccgtggtgttctcaagtcct

SEQ ID NO: 73951 - DNA, 272 bp, Zea mays
ctcgagcaacaggtatgcacagcaaactgatgcggggcaagaaaccaagtgccttatcctatcaccaaaggcacttgttaatgtcaagccgaaccttcagattattgctgatgatgtgaagtgtactcatggtgccgccatcagtggtgagcttgatccaaacgagctcttctacttccagtgttgctgcatcaacacggaaactgcaacagatgccctgttatacttctttggagcccatgtgataaagcgcataccgtttaagcaaataa

SEQ ID NO: 73952 - DNA, 260 bp, Zea mays
gcgccgagatcatccctttcctcaagacctgggttaacctgcccatggccatcggattcatgctcctctacaccaagctttcaaacgttctctcgcgggaggcgctcttctacaccgtcatcttcccgttcatcgccttcttcggcgccttcgcctttgtgctctacccgctcaggaacgtcttccatcccaccgcgctcgcggacaagctgctcgccgcgctcggcccgagcttccttgggcccgtggcgatactgagg

SEQ ID NO: 73953 - DNA, 260 bp, Zea mays
gcctattgctcaagaatatgtttgatccagctttggtgatagatcctgatttcgatttggacatcagagatgatgttcaggaggaatgttccaagtttggtcaattaaaacatatttttgtagacaaaagtactgccggttttgtgtacctgcggtttgatagtataacagccgctatgagcgcacagtttagcatccatggaagatggttcgcagggaagatgatcacagcaacttttatgaccccacaacagtatgaa

SEQ ID NO: 73954 - DNA, 265 bp, Zea mays
agaagatcaaggaggacaagccgggcgccgacgtgcaggtggtcccagccgacgccttcgtcaccatggactacagcaccggccgagtcagggtcttcgtcgactccaacgacaaggtcgccaaagctccccggatcggctagctggataggagggacatgcatacatgcagcaggtgccagctgccaacgtgcatggaattatttatagttttgtatgaacaattgataaataaaaggcaaggtgtatccgtgtatatatatgt

SEQ ID NO: 73955 - DNA, 269 bp, Zea mays
cactgctgagcatttgatgcttctggaagctgataatcatgtggtaaactgcctgcagccacatccgtttgacccaattttagcctcatctggcatagattatgacataaagatctggtcaccattagaagagtcaaggatttttaaccgaaaacttgctgatgaagttataacacataacgaactcatgctggaagaaactagaaacaccattacagttccagcctctttcatgttgaggatgttggcttcacttaatcatatccgag

SEQ ID NO: 73956 - DNA, 266 bp, Zea mays
gccgaggagggcgcggcgaagccggtgcctccctgcagcaggacgcgccgctgtacaagcgagtccgagtgcagcttcctcacggagcaggtcacctgcacgcgcaacggccgccgcgacgacgactaccagaagtggcgctggcagcccgacggctgcgacctccccagatttgaggctaagttgcttctggagaagctaaggaacaaaaggctgatgtttgtgggcgattctctgaatcggaaccagtgggagtccatggtgtg

SEQ ID NO: 73957 - DNA, 270 bp, Zea mays
gcgcgatccacgctcacatcgtccgcgtccgatcccgtgagaagcgcagggaccgcaagccgccggagcgcttcaggcgcagggaggataggcctgctggtggacaaggaggcccccgccctggtcctggtgctgctgctccagctccagctccagcacctgttgctgctcgcccataggctttagcttttcgaccgtgttaagtcttctgcccactcagtttcggaattgtcgcctatgggtgtgtgaagctgctatattagagttact

SEQ ID NO: 73958 - DNA, 266 bp, Zea mays
gtgctccaagaggcaacaaacaatttcgacgagaactgggtcattggagttggaggctttggaaaggtctacaagggggtgatgagggatgagagcaaggttgcagtgaagcgtggaaacccaaagtctcagcaaggtctcaacgagttccgtacagagattgagctcctctcacgtctgcgccaccgccatttggtgtctctgattgggtactgtgatgaaaggaacgaaatgatcctggtctacgagtacatggagaaaggcac

SEQ ID NO: 73959 - DNA, 260 bp, Zea mays
ctgaatttctgggtgagtttatggccgcagttaggcagaactatggacaaaaggtacttgtccagttcttgcagggattattgctgctctgaagtctgttggtgggactctagctgatcatacattcttgttcttcagtgcgagttatacgatcaagtgactagtgatgtgatttgccatggtgagaaaacttcttacaagatgggcgcaagagctttcctagtggccattcgtgcttacacagacctgttttgataaga

SEQ ID NO: 73960 - DNA, 264 bp, Zea mays
gactctccgaagatggaggaggctgctcctgttgctgagaaacaaggtgagcagaatgatgccccagcagcagatgagaacaaagataacaaggatgctactgcaaatgaggaggaagaaaaggaagaggacaaggagatgactctggaggaatttgagaaaataagagaggagaagaggaaagcactacttgcattgaaggctgaggagaggaaagttgaagttgacaaggatttgcagtctctgcagccactttcaaacaag

SEQ ID NO: 73961 - DNA, 254 bp, Zea mays
cgaggcccgtgaggacttggctgctcttgagaaggactatgaggaagtcggcgcagagggtgcagatgacgagggtgacgagggcgatgactattgagtagccggttaataattagttcgctggtgcttaatggttgagttattttgagtatactctgtatgggtccactccattgcgtgctggcgctgtgtgtttccattttgtattttgtgataaattgttcgtagccccctattggccatgattgttgttc

SEQ ID NO: 73962 - DNA, 262 bp, Zea mays
attttatctcatcctgaaacaaaagaacgagtgcagtcatgttctgatgcttctgatgttcttagatatgcttttactttgacagaagatgcaatcgatcatcagtacgagggatgtacaggcacagcacttcttatttggtttgatcaaaataaagattgttttgcccagtgtgctaatcttggtgattctgcttgcgtaatgagtgtcaatgggaagacgatcgatatgactgaagatcaccgggtagctagcgcaactg

SEQ ID NO: 73963 - DNA, 259 bp, Zea mays
tgatactactgcaatttctattgggaggagatacgcgaggaccgatgagattggtgttccatttgccgtgacagtggattcggcaacaaacgtgactatccgagagagggacagcaaggagcagatccgtgtggacataaacgaggtggcgtccgtggtgaagcagctgacagaaggacaaagcacctgggcagatgtttctgcaaagtatcctgcccatgttggaccccaaggtgaccaggagtgaaaaatcctgcca

SEQ ID NO: 73964 - DNA, 263 bp, Zea mays
ctggaatttcccctgcctggggaagatgagcgattcaagctcctgaagctatatctggacaagtacataatcaaagctggtgacaaacatgagaagagctggctccagttcttccgtcgccagccccagaagattgaggtgaaaggcatcactgatgacctgatccgggaggcggcatccaggacaaacggactctctggaagagagatagcgaagatgatggcaagcgtccaggccgctgtctatgggagcaaggactgcga

SEQ ID NO: 73965 - DNA, 268 bp, Zea mays
caccccatcatcaaggagctccgcgacaaggtcgcccaggacaacgagagcgaggagctgaagcacacggcgaggctggtgtaccagacggccctgatggagagcgggttcaacctccccgaccccaaggagttcgcgtccagcatctacaagtcggtgcagaagggcctggacctgagccccgacgctaccgtggaggaggacgaggccgaggagcagccggaggtggaggagaaggagccggagccggagccgtcgtcctacgaca

SEQ ID NO: 73966 - DNA, 261 bp, Zea mays
ggaaaggggaagatgagccggagcctggggatcccggtgaagttgctccatgaggcagcgggtcacgtggtgacggtggagctcaagaccggcgaagtgtaccgggggtcattggtcgagtgcgaggataactggaattgccagctcgagaacataaccttcactgccaaggatgggaaggtttcgcagctggagcacgtcttcatcagaggaagcagagtgagatttatgattatacctgatatgctcaagaacgctccc

SEQ ID NO: 73967 - DNA, 260 bp, Zea mays
atgtgctcgtatggggaaccagcgcaaggcactatccacagcattgcggcctcggccatggccttaacgacgaggatgtcgtccagatagtaaagaagaaggaaaaggaggagggtgggcgaggccggtacaagtcgcacacgaacgcacctgaccggatatctgatagggtgaagaaagccccactgaagacataataacgggttccctgagcgcgtcgtgatcagcttctccaaaccagatggacaacacaagctcgg

SEQ ID NO: 73968 - DNA, 263 bp, Zea mays
gtgaaaaatccaaagacagttccatatcgagctactacttatggagtgttggttgagagcacgtccttgtggaagatgcatgatctgcacagcaatgaagcaaatgctgaagatggtgtgaggcttattcccagtggaacacaaattgttctttctgtgaagtcacagcaacatgcgatgcaatgtgatgcgctggcagatgaaataagattgctgtcagaacccttcaaagtttttgaatttgacttttcggaacgtccaga

SEQ ID NO: 73969 - DNA, 258 bp, Zea mays
cggctcgagcaaaaaggggctacaagccctcgtagtctcgtacacgctgggcgaagcagcaacacgcctgcacagcgacgtgcagcagttctgagtgagaatctatggacggagctggagtttctattattcaaaacacagggggtagcaattgctctctgggtgtgtggtataatttactcgaggcatgagtaagcaagcgacttctcttccgacagctcttgggcagtggcatccatcttcttccttgatagctcg

SEQ ID NO: 73970 - DNA, 288 bp, Zea mays
tggcagggttcgtttacaatccgttgagtggagaatggtccctgtcagatgatatcagtgtgaactacattgcttttggcgtcaagaagggtgaagcatcatcgacaaatggcagagatgcaagtttatcatagctgaagaaaaacacgtgaccttgaattgtcgggcatcattttcagaggaccaattcatgtcactgaaatcttactgctaaggatgcaaccaagtagcagaagagaattctcttgccctttgttagtcttggaaactggagcttgtggagtgatg

SEQ ID NO: 73971 - DNA, 284 bp, Zea mays
gcctattgctcaagaatatgtttgatccagctttggagacagatcctgatttcgatttggacatcagagatgatgttcaggaggaatgttccaagtttggtcaattaaaacatatttttgtagacaaaagtactgccggttttgtgtacctgcggtttgatagtataacagccgctatgagcgctcataaagcactccatggaagatggttcgcagggaagatgatcacagcaacttttatgaccccacaacagtatgaaatgaagttcccgagctagtgaaca

SEQ ID NO: 73972 - DNA, 183 bp, Zea mays
ctcctccagccgagaacaagacgatgaagaaggcgacgctgatgggcgtgacgaccaccacggcgttctacatgcttgctggctgcctcgggtactcggcattcgggaacgcggcgccagggaacatcctgaccgggttcggcttctacgagccctactggctgatcgacttcgccaacgtct

SEQ ID NO: 73973 - DNA, 283 bp, Zea mays
ggcaggactgagaagccgatgctcaaggctggtaacgcgtaccacaagtaccgtgtgaagaggaacagctggcccaaggtgcgtggtgtggccatgaaccctgtggagcatccccacggaggaggtaaccaccaacacatcggtcacgcctccacggtccgccgagacgctcccctctggccagaaggttggtctcattgctgctaggaggactggaaggctcaggggtcaagctgctgccacagcctccaaggctgacaaggccactagagttattgtcgtg

SEQ ID NO: 73974 - DNA, 275 bp, Zea mays
gtcgagctccgcctccgccgcagccatcgcgcactgcgtgcagaccttcatcaccgccatggacgcggtcaagctcaacatgcttgccaacgaccaggtccgccccctgctgcaggacgtcgctacatccatggccaggctcggctccctactgccgcccgactttgaggggaaggtcaaggtttccgagtggcttggcaagctgcataagatgggggccgcggatgagctcaccgagcagcaggccaggcagctcaacttcgacctcgattcgg

SEQ ID NO: 73975 - DNA, 273 bp, Zea mays
ctcgcagcggctgcaattccgagcccgaagagcggatcaggcgaggacgacgccttcgattctgatctgcggtcggcgcgacctagagagaaccggagatgcagcagggcgacggcacggaggcgcaggtgacgtgggaggaccagcagaacatcaaccgcttcggtcgcctcaacaaccgcctccacgagctccaggacgagatcaagctcgcgaaggagacgaatgagaaccttgatgatgctgggaatgaactcatcttgtcggatgaag

SEQ ID NO: 73976 - DNA, 282 bp, Zea mays
aaaaaaacaaaaagggtaccggaagcggcgaaagctcgcccccccgccgctctcgcatcgtctccggagcgcacgtcagatcaggtgcgccgcgcccccctcgcctaagctgcgacgaccatccatcgaacaggaaggatgacgggctccatggatctcccggccaagggcgggttcagcatttcactgtgccgccggaacaacatgctggagaagaacgggctcaaggtcccgggattcaggaagaccgggacaaccatcgtcggcctcgtctttcaggat

SEQ ID NO: 73977 - DNA, 274 bp, Zea mays
cctgaggcgaataccgaaccaatggaagatgctcaccattcttcttcttcaactccaccaaagagaggttgcaactgcaagaaatcaagttgcctaaagaaatactgtgattgctaccaggatgggactggatgttccttgttttgccgctgtgacgattgccagaacccttttggaatcaatgaaggcataatggctgacgacagtaagcggtatttatacaccggtgctgatttggaccacagcgagggcgaacatgacttcgttgtggagc

SEQ ID NO: 73978 - DNA, 284 bp, Zea mays
gcctattgctcaagaatatgtttgatccagctttggagacagatcctgatttcgatttggacatcagagatgatgttcaggaggaatgttccaagtttggtcaattaaaacatatttttgtagacaaaagtactgccggttttgtgtacctgcggtttgatagtataacagccgctatgagcgcacagaaagcactccatggaagatggttcgcagggaagatgatcacagcaacttttatgaccccacaacagtatgaaatgaagttcccgagctagtgaaca

SEQ ID NO: 73979 - DNA, 274 bp, Zea mays
gcgacacagacgttgcatcaaatgcaacgtatcctaacgatccgacaggcttctcgtgctcttcttgcaatccacgactatttttcacgattgcgcgcgttaagttctctgtggcttgctaggccacgtgaataacgaagggccgtcagtattttgagttccctctgccttacggtgctgctgcgtcgttcgcagcgatggcgcacagatctttggtggtactgtttttgttgtacaattacttttggccgctgcttggtccaaattgtactca

SEQ ID NO: 73980 - DNA, 278 bp, Zea mays
aaaaaaaatggtgaagcacggtggtctcggacgagctggaaaagtaaagcgtcaaactcccaaagtacaaaaggaagagaaattgaagcaggctaccggtcgtgccaagaagagagcgcaattcaatcgacgcatgaatctcggaaagaagaagggacttaactctcaagccgcgtagggatgaattcgattactggtcccctgttttgtttgtgcttcaataacgaggaataaaactacgtttatgtcgtaaaaaaaaaaaaaaaaccaaaaaagaa

SEQ ID NO: 73981 - DNA, 275 bp, Zea mays
cggctcgagcaaaaaggggctacaagccttcgtagtctcgtacacgctgggcgaagcagcaacacgcctgcacagcgacgtgcagcagttctgagtgagaatctatggacggagctggagtttcttttattcaaaacacagggggtagcaattgctctctgggtgtgtggtataatttactcgaggcttgagtaagcaagcgacttctcttccgacagctcttgggcagtggcatccatcttcttccttgagagctcgtcgatcgggaggccttg

SEQ ID NO: 73982 - DNA, 142 bp, Zea mays
gccgattttattcgtcctgcttgcatgctactctgtctctgctcctagtttttggcatcatgtttatgttgagcaaggtgatgcccaagggaagccattcccactcttgtctccattaataaaatcagctgagcttccgatg

SEQ ID NO: 73983 - DNA, 267 bp, Zea mays
gtcgggaggtggaaaattaattttttgtcaacccaaaagtgggagaacccgttgatgggatggacatctactggggatccatatgctaatgtcggtgaagcaggacttacgtttgacagtgcagagtcagcaaaggcgtttgccgaaaaacatggatggaattatgtggttcggaaacgccatgcacctcttctgaggcctaaggcctacgctgagaacttcaagtggagaggccctccaaaagcggagcaagcatgagctcgagac

SEQ ID NO: 73984 - DNA, 264 bp, Zea mays
gcggcggcgacgcgacgacaggccgcgcgactccgtgaccctgtccggcctgctcaacttcatcgacgggctctggtcggcgtgcacgggcgagcggatcgtcgtcttcaccaccaaccacgtcgagaggctggacccggcgctgatccggcgcggcaggatggacatgcacatcgagatgtcctactacaggttcgaggcgttccagacgctcgccaagaactacctggacatcgacgaccacgacctgttcgccgccgtcgg

SEQ ID NO: 73985 - DNA, 262 bp, Zea mays
cggctcgaggaaacctccaaacacctacctctctacgaactacctgccgccggaaaaccctagagcgctcgaccatggatccgcagcagccggagcctgtcagttacctctgcggagattgcggagctgagaacaccctgaagcccggagatgtcatccagtgccgtgaatgtggctaccgcatcctctacaagaagcggacccgccggattgtccaatatgaagcgcgctgaagagtgaagacaagggaaaacactgaaga

SEQ ID NO: 73986 - DNA, 222 bp, Zea mays
gcgcagagaccggaataaattcatccatttttttcccctaaaggcttgttcgtttgtaccggatttatgggttggaacgattcctaatcggattgcttctctaatttatataaactttgattagctggaacaattccgggtgcaatccgacgcaaacgaacaaagcctaaaaaatactccatttcacatggtttgttgtatcagtgtgttatttcttttttt

SEQ ID NO: 73987 - DNA, 273 bp, Zea mays
tctgaccccagtgacgttgtgatccaccgtgcacggtacctcctggacaatgggtttggcatgtactccttgttcaagaacaactgcgaggacttcgccatatactgcaagactgggctgcttgtggagaccgctttcagtgttggccgtagcgggcaacttgcgtctctgactgctgccttcagcgccgtggcctcgtcgcccttgcgtttcctgacaaccagtgctagtggcctggcaattgtgaccagcggcatgtactgtgtcgggcgg

SEQ ID NO: 73988 - DNA, 263 bp, Zea mays
cctgaagctgttcgtcggcaacctaccgttcagcgtcgacagcgcgcagtcgcagggctcttcgagcaggccggctccgtcgagatggtcgaggttgtatatgacagaatgactggacggagccgaggatttggattcgtgacaatgtcttcggccgaagaagccgaagctgctgtcgagcagttcaacggttatgcatttcaaggaagacagctgagggtgaactgcgggccacgccacctagagatgaatccacaccaaga

SEQ ID NO: 73989 - DNA, 264 bp, Zea mays
agaaggtgaagaagaccgagggcgaactttttgagacagaaaaggaggcatccaagtcactgcctgaacttcaagaaggatgaccagaaggctgtggattctgctctgatcaaggctattgaggctgttccggagctgaaaacctatcttggcgcccggttctctctcagggatggtgacaagccccatgagatggtcttctaagctcttagttttggagttcggaggaagctgttttgtctgtgttcttgtacttctgagttt

SEQ ID NO: 73990 - DNA, 261 bp, Zea mays
gtgaacccgccgccgacgcagcagcaggagacgcgccaaggagtgcccgcaaggaggcgactatgagggccaagtggaagaagaagcgcatgaggaggctgaagaggaagcgccgaaagatgaggcagagatccaagtaggctgatggggattgtggatggtggtgtcggcatagttgtgttacgtttcttcgatgcgtgagttcatggagagatgtcacatcctagttcgtcgtcaccgtttgccatgggtccaatggct

SEQ ID NO: 73991 - DNA, 257 bp, Zea mays
gctttccaagtgagatcaagatgcaccctgcgagcctcaatcgtggtgggcggaccttgtctggtagtattgtcggaggtacaaaagacatccaggagatggttaacttttgcgcggagaacaaaatctatccagagatcgagatcatcaagatggattatatcaacgaggctctcgccaggcttgttaaccgagacgtgaaataccgctttgtcatcgacatcaagaactctttcgagtagcatgctcattcacat

SEQ ID NO: 73992 - DNA, 268 bp, Zea mays
gcccggcatggacgactacctgcagctgcagcaggactccgtcgcctgcagagtgcgtgcgaacgtggctgcgcgactcacccgcggagattgccgagagggaaagaaggacgaggatcagcaagaggctgaagaagctgcaagacctcgtgcccaacatggacaagcaaacgaatacgtcggacatgttggaccttgctgtggattacatcaaagagctcaaggaccaagtcgagaagctaaaacacgaccaagcaaactgttgttg

SEQ ID NO: 73993 - DNA, 276 bp, Zea mays
ccaagacgctgtacgccggcgacctgatggtgctcccgcaggccagctccacttccagtacagccacggcaacaccacggcggtgacgctgtcctcgttcagcagcgacaaccccggcctgcagatcctcgacttcgcgctcttcgccaacgacctgcccacggaggtcgtgaacaaggtgaccaacctggacgaactgcagatcgtcaagctcaaggcgctgttcggagggaggggctagacgcatatgtactccgtatataggaacagtcaacg

SEQ ID NO: 73994 - DNA, 273 bp, Zea mays
gaggtatcttgcatcggttttccctggagtagctgaccactggtatccttctgacttgttcaccagagccaaaattgagtcaatcttggattggcatcactcaaatttgcggcgtggtgcagcaacccttgtaatgcacactgcattggctcccttccttggtcttacgacaagtcatgaggctgtgaaacaagcagagaagcttgtgatgcagtcactgggggtgatcgaatccgtatggctgaaaggcgatgccaagttcttgctaggtag

SEQ ID NO: 73995 - DNA, 272 bp, Zea mays
cgacccgctcccagctagggtttcctcttcccatccacagccgccggggcgccgccgacgaggacagcgccgccacgatgttggagttgcgtctggtgcaggggagcctcctcaagaaggtcttggaggcgatccgcgagctggtcacggacgccaacttcgactgctccgggaccgggttctcgctgcaggccatggactcgagccacgtcgcgctcgtcgcgctgctccttcgcgccgagggcttcgagcactaccgctgcgaccgcaac

SEQ ID NO: 73996 - DNA, 270 bp, Zea mays
cttacggcaagcctgtccatcatggtgttaaccagctaaagttacctcgaagccttcagtccgttgcagaggagcgagctggacgccactgtggggctctgagagtcctgaattcttactgggttggtgaagattccacatacaaattttttcaggttatcctcattgatccattccataaagctatcagaagaaatcctcacacccagtggatcaccaaaccagtccacaagcacagggagatgcgtgggctgacatctgcaggccgaa

SEQ ID NO: 73997 - DNA, 268 bp, Zea mays
ccaggagacaattccacagcacacggttcgtacgctttcctcgtcaggtggttccagaggttcccccagcacaaggccaaggagttctacatagctggagagagctacgcaggacactacgttccccagctcgcagacgtcattgtggaggggaacaagaaggcctccgaagaaaaccacatcaactttcaaggcatcttgatcggaaacgcgtacatggacggcgacaccgatctggtgggcatcttcgactcggcgtggcaccacg

SEQ ID NO: 73998 - DNA, 172 bp, Zea mays
cagctcgaggctgttggtgtggtgcagaagggattacggcctacaattccaaagcatagtcagacaaagctttccgagcttcttcagaaatgctggcagcaggagcctagccaaagaccagacttctccgaaatattagaaactcttcagagaatagcagaggaggtcggag

SEQ ID NO: 73999 - DNA, 271 bp, Zea mays
gttcgcttcgcgtcaccgagagctcgtcggcctccgtccccgcgagacgcgagagcatggacacccaagtgaagcttgctgttgtggtaaaggtgatgggcaggaccggctccaggggtcaggtgacccaggtcagagtgaagttcttggatgaccagaaccgtctcatcatgaggaacgtcaagggccctgttcgtgagggtgacatcctgaccctgctcgagtctgagagggaggccaggaggctgcgctgaagcccttgttgtcttgg

SEQ ID NO: 74000 - DNA, 268 bp, Zea mays
aacagacccatttctttccggacacgttcttcgtcatacaacgggcaaatatgtcggacgctcagacgaagaagtttggaaagggcgagcggacgatccctcaccacagccagaaggctcagaagtggtatcccgtggacgatgagtcgcaacccaagacactccgcaagaccgtccgccccgccaagcctcgtgagagcctccagcctggtaccatcctgatcctcctcgctggtcgtttccgtggcaagcgcgttgttctcctcaa

SEQ ID NO: 74001 - DNA, 267 bp, Zea mays
ctgggatgcaaaccctgataaacgccctgatatggatgaagtggtgcagcttttagaggctctggacacgagcacaggcggtggcatgatacctgatggccaatcatcaggatgcttatgcttcacaaaggctcgtggtccatagatacttttcatggtactcccttcccttggcaacactttccccgtgtaaatgactgggccacagcatgcttctctttgcacgacctgtgcagtcgtcgcttacagttctccatagctgccttg

SEQ ID NO: 74002 - DNA, 271 bp, Zea mays
cggctcgagaacagattgaggtcatcaacccactcttcctgctgacggccaagcctgtcgtctaccttgtcaacttgtctgagaaggattatatcagaaagaagaacaagtacctccccaaggttgccgagtggatcaaggagcacgccgagggcgaccccatcattcccatctcagtctcgttccaggagcgtctgacccgctacgagaccgaggaggaggccaaggaagagcagaagaacgttggcgccgagtccgccctgcccaagct

SEQ ID NO: 74003 - DNA, 265 bp, Zea mays
agagaagaagctgaaagaacgagaagagagggaaaaacaggcaagattagaagaatacaggaaaaactgcgaccagactgtcatgggcccaactgggactgtgattacattccctgagagcatggggcttccgagtatatttaactccaaacctgtcagctatccgcctccgagggagaagtgtgtaggcccatcgtgcacaaacccgtacaagtaccgccactccaagactctggtccctctctgcagccttgcttgctataag

SEQ ID NO: 74004 - DNA, 261 bp, Zea mays
ctctgagatggataaccaacttctcgatgccatctgtgagcggctggtgtctttcctgtgccctgagaacacgtacatctctcgcgagggtgatcctgtgaacgagatgctcttcattatacgcgggaaactagagagctcaacgacaaatggtggccgcagcaacttcttcaactccatcatcctgcgccccggcgatttcgcaggcgaggagctgctcacgtgggccctgctccccaagaccaacgtccacttcccgct

SEQ ID NO: 74005 - DNA, 228 bp, Zea mays
atttggccatggtcattcaacaggagattgttcgaactacttgtactatctggtgcattagctgagcttacgtggcctgaaattctcaagaagaggcaacttttcagggaaatcttcatggagtttgaccctgctgctgtctctaaaataaatgagaagaagcttgtggcacctggatgcgttgcccattctcttttatcagagcaaaagctccgagctgtacttgag

SEQ ID NO: 74006 - DNA, 258 bp, Zea mays
gtcagcgcagtcaagttgatcaagcatttgaactgttctagagaatgcggaagcaggatattgctgcagatacagttgtgtacaatattttgatctctggtctctgcacggacgaaagagtgaccgaggcattcgacctgttcaagtcaatgacttctgaaccgtgctgtcctaattcagggacatatcaggtacttcttgatggtctaatcagtttaggacaactttttgaagccaaaagccttgtatgcactatga

SEQ ID NO: 74007 - DNA, 259 bp, Zea mays
tggcgtttacactgccaggcactacgccgacattcttgagttccttgttgacaggtggaaggtggcggacctgactggtctgtcgggtgaggggaacaaggcgcaggactacctctgcacccttgcttcaaggatccggaggctagacgagagggcccagagcagagccaagaaagcaggcacgctgcctttcagctgggtatatggtagggaagtccaactgtgaaatcggaaacccattgcgactgcttgagttggg

SEQ ID NO: 74008 - DNA, 232 bp, Zea mays
cggcgtcaatctcgggctaaagctgaatcagaacgaaagcttatcaaggggcgtaagcctgatctccatgagtcacgtcatcagcatgccttgaaaagggccaggggagctggaggtcggtttctcaactcaaagtcagatgacaaggaagagaactccgactcgagtcacaaagagaatcagaacgtgattgcgccccacaggagcggccaacggtcaacccttcggtttc

SEQ ID NO: 74009 - DNA, 256 bp, Zea mays
aaatgttgtttctcagggtgcttgtgaacgagtgattgtgggggaacaatattgtgatgttcctcttgggctgtacgtaatccggggagagaacgttgttttaatcggagaattggatcgcgaaaaggatgaactccctgctcacatgacctgtgtttcagaagcagaaataagaaaggcttgataggcagaacgggaagccagagatctgaaagggacgatgaggaaacggatggagttcctggacttcgattaa

SEQ ID NO: 74010 - DNA, 259 bp, Zea mays
gcgccttggagaagcttggcattgactggggcgaggtcggaaagcagcttgagctggaaggtgtggactccttcaagaagacgcggtgacagcctactcgtgagcctacaggagaagggcaacagcctcaagacggcaactgtgtaaaactgagaagattgggtaccggcgggtgaacaacattactaaataaaatgctagcttgctggctctcttagtttttacgatgtacctttgctctccattttctgaatcggga

SEQ ID NO: 74011 - DNA, 257 bp, Zea mays
ggacggcaaggaaagatctttcgacgcacatctttggcaaactcaatccattaaaggtctgcgcaccggttatcgtcgaggagtttgccaagctggcacatcgactcaactttatgtatgcttatccgttgattgaaagcaataagcgcatccgattgacccaattcttgtcatcgacttactccactggaggcgccctccgagactctggtttcgacactcaggaggagagctttcatcaactggacccgtacttc

SEQ ID NO: 74012 - DNA, 268 bp, Zea mays
  unsure (1)..(268): unsure at all n locations
atcggctacgtcgacatcgtgctcggctccttcttgttctggttcgaggcggtgcgcanggttttcgacctggagatcattaacgctagcaagactccgctgttggctgcgtgggcggagcggtttgtagggactgtagaagcgaaggaggtgctgccgttgcccacggcggacatggcggtccagttcatcaataagcttcatgcccccctgccgccgccatgagtcacaatgagtcgtgtaagtgtaaccaagcagggaaaaaggt

SEQ ID NO: 74013 - DNA, 270 bp, Zea mays
ttcatgatctacaactactgcaccgacgccaagcggttcccgcagggccggggcgtgcccgctgaatgcaggctccggcgataaaggtggctggatgagcgaacgcgaagccacctgcgtgcgtgcacgacgatcgatcccctcgtcgtcgttcacttcagaccagagatcggtggtctggcgacgaatgtttgggttttttttttgccatgggcgatggcaagtaaatgtagcacgtgacgcacgtcgcagtgatattctttcatctgt

SEQ ID NO: 74014 - DNA, 250 bp, Zea mays
  unsure (1)..(250): unsure at all n locations
tagctcggcgggatggggtgcagcgccggcctcatcgccgtcgacctcgccaaggacatgctccaggcgaaccccggatcgtacgccgtggtgctcagcaccgagaacatcaccctcaactggtacttcggcaacgaccgctccatgctcctctccaactgcatctcccgcatgggcgtgngcgagccgctgctgtccaacaggcgcgcggacgccgggcgcgccaagtacggctgctccacacaacata

SEQ ID NO: 74015 - DNA, 271 bp, Zea mays
cagaaaggcaacctttgagaccatgtggcttgaaacgttgatggctcttattggggagcagttcgatgaaacagaggacatttgtggaattgttgctagtgtccgtgcaagaggagataagctggcattatggactaggactgccagcaatgaagctgtccaggtaaacattggcaagaagtgggcggatgtcatcgactacaacgacaagatcacgtacacttccatgacgactctaagagagacaagcccagcagaggtgggcggtaca

SEQ ID NO: 74016 - DNA, 277 bp, Zea mays
acgacaagatcaagagcctgacgcacgacgtcagggtggcggacacggtgaccaacgtcatcgtgccggcgttcgacgtcaagtacctgcagcccatcatcttctcgacgtacgcggccaagaccgacgccctcaagaacgcgcacctctccgacatctgcatcagcacgtcggcggcgcccacctgattcccggcgcacttcttcaagaccgaggccaccgacggccgcccccccgcgagtaccacctcgtggacggcggcgtcgcggccaacaac

SEQ ID NO: 74017 - DNA, 174 bp, Zea mays
  unsure (1)..(174): unsure at all n locations
ctcgagccgctcgagccgtttcggctcgagcgctgcggactcttcgtccatcaaggttttctcactcagatcccgccangtcacttgatcctcttctccgtaccaccgatggtgtacgcggattcctggtacgagttcgtgtgagctgtccgtgcagctcttccgtggagaccc

SEQ ID NO: 74018 - DNA, 267 bp, Zea mays
agaattcccggttcggaccaatcagatccccagagagatcccagcaaggaagtatccatcgtggcttcttgtccttggtgcaggaacactgccatttggtaccctgtttattgagctcttcttcattctatcgttcatatggcttggaaggttctactatgtgtttggtttcctgctgattgtcgtgctgctgcttgttgctgtctgtgccgaggtgtccgtgtacttgcatacatgaacctctgtgtggaggactggaggtggtgg

SEQ ID NO: 74019 - DNA, 252 bp, Zea mays
ctgacacgcaacttgcaagctttcttctcgaattttggtgttgaaggtctcattgtgtctgccatgtgctctgctgcccagtcagtggtttctcctaaacaaagccagcacatttggcatcatttggctatgtttttccggatgaactgttatcttggtcgtggaggcggcctctgggcattccatcagtccctgtcgctgctggaatgatcaacccatcagatttccaacagaaggtggtaaacaatgtgg

SEQ ID NO: 74020 - DNA, 263 bp, Zea mays
gcggtctttcactacggatcaataagcttgattgctgagccttgccggacagcacatctccgtgccatggaaattgccaaagaggctggtgcactgctctcttacgacccaaacctgagggaggcactttggccatcccggaggaggcccgcacccagatcttgagcatctgggaccaggcagatatcgtcaaggtcagcgaagtcgagcttgagttcttgacaggcatcaactcagtggaggacgatgttgtcatgaagctg

SEQ ID NO: 74021 - DNA, 255 bp, Zea mays
aagaagatagtggtcaactacatctacacgttcctgaggacgaacctgaccgagggccacaaggcgctggccattcccaaagaccagctgctcaaggttggcatcacgtatgaaatataggccaagctttttcttgagtgcaaagcgcaaagtgccgctgttggggtttaataagtgggcttcgttttctattttgtccgccaaacagggaaaaaaagagagagagagtgggcttctttggtttgggctggaagg

SEQ ID NO: 74022 - DNA, 242 bp, Zea mays
caggaatgcatcgatccgcaacttggtgatcagtatcctcccgctggagctgtcaagctcgggcgaatcgcggtgcagtgcctgcagtacgaccccaccttccggccgtccatgggcaccgtcgcccgcgtcataactacgccgtcttgcgagaccagcagggcgtcgtctgatttgatggcgtgccgaattttggtactatagctgtgaatatcatgcatgtcttgctgtgctatgttaag

SEQ ID NO: 74023 - DNA, 256 bp, Zea mays
cttgtcaggtgaacttctcacctgatgggaggtttgtgatgtctactgatggcgagggtagctgctggttctgggactggaaaagctgcaggagattcaagactttgaagtgtcacaacggggtttgcattggtgtgagtggcatccgttggaaactagcaaggttgcaacctgtggatgggatggtgtaattaaatactgggactgaactttggcagagatattgcttgagctcctgggaaaggttttgtaacaa

SEQ ID NO: 74024 - DNA, 257 bp, Zea mays
gcccaacgtgctggacaacaactactacaagctcctgcctcgcggcatggggctcttcttctccgacaaccagctgcgcgtgaacccgcagatggccgcgctggtgagcagcttcgcgtccaacgagacgctgtgaaggagaaattcgcggcggccatggtaaagatgggacgcatccagctgcagacagggacgtgcggagaggtccgtctcaactgcggcgtcgtcaacccgagttcgtactcgtcgtcgtcggc

SEQ ID NO: 74025 - DNA, 257 bp, Zea mays
cttcgccatcctcacagaaatccgtcaagatgaccaagcgcaccaagaaggtcggcgtgaccggtaaatatggtacccgttacggtgcctccctgcgaaagcaggtgaagaagatggaaatcacccagcacgcaagtacacctgcactttctgcggtaaggttaccgtccgaagaaagtccaccggtatctggaactgccgctcctgcaagcgaaccattgctggcggtgactacactgttgccacccccgctgccg

SEQ ID NO: 74026 - DNA, 269 bp, Zea mays
gaggaagcaggcggcggcgatcgggcgatggcatggcgggcgagcctgtctcggagcctaaaggagatccgcgtcctcttctgtcagtcctccccggccagcgccgccgcccgtgagttcgtgaagaagaactatggtgacatcaaggctcgcaacccctccctccccttccttgtccgcgagtgctccggtgtccagccccagctctgggcgcgctacgatatgggtgtggagagatgcgtgaacttggatggcctgacggaagcaca

SEQ ID NO: 74027 - DNA, 152 bp, Zea mays
ccgcgcgttcgcgtgcgccatgctttgctcggcgcaggcaacggaggacgtcctcgccgcacagcgacgggtaccagtggaggaagtacggccagaagaggatcactaagtcgccgtttccgaggtgctactacaagtgcagcttccacaca

SEQ ID NO: 74028 - DNA, 271 bp, Zea mays
ccccattcagtcaccatggccttcactgctagcgatatctgcaagatcatcttcgccgtccttctcccccctcttggtgtcttcctcgagcgcgggtgcggcggtgacctctgcatcaacatcctcctgaccatcctgggttacattcccggcatcatccacgccctctacatcattctcaaatactaagtcagtcgtcatgagggaccaaccatcccgctgagcggaatggaggtgggacgacgaactggtgacgaagggaccgattcat

SEQ ID NO: 74029 - DNA, 274 bp, Zea mays
gcggacggcgtcttcatgcagggccacgcgctgcaggtggacgagtccagcatgaccggcgagccgcaccctgtcgacatcgacgccgagaagaacccgttcctcgcctccggcgtcaaggtcatcgacggatgcggccacatgctcgtcaccgccgtcggcacggacaccgcctggggcgagatgatgggtcgcatcaccagggagaagaccgaacccacgccgctccaggagcgcctcgaggccctcacctccagcatcggcaaggtcggga

SEQ ID NO: 74030 - DNA, 278 bp, Zea mays
ctgatactcttggacacggtacccatgttgctggcactattgcaggctcaacctacggtgttgcgaagaaggcaaacattgtttctgtcaaggtcttccagggagcagagggaactgattccggtgttctcgccggtttcaactgggctgtcaacgatatcacctccaagggtcgcgccggcaaggccgttattaacctttctcttggtggtgacgcatcccaggcttgggtaactgctattgacgctgcgtacaactcaggtgtgctctctgttgtc

SEQ ID NO: 74031 - DNA, 265 bp, Zea mays
cggctcgagcaagtacaagggcctccaggtggcccccgccgagctggaggcgctgctcatcacccacccaggcatcgccgacgccgccgtcgtcgggaaacaagtggagccggagatcggggagatcccggtggccttcgtagccagggccaaagggtgcgacgacgggctcaccgaggacgacgtgaagcagtttgtggccaaggaggtggtctactacaagaaggtccgcgaggtggtcttcgtcgacaggatccccaaggcc

SEQ ID NO: 74032 - DNA, 266 bp, Zea mays
tgaaaaatggagggggcatcatgttcaatttcaacggtgcgatcgtcgaggccaggcctctcatatatgagcgtggtccatcatgcaggtgcccgccaacatgccacaacagggtgagtcagcatggtgtcaaaattccactagaaatattcaagacaggcaagacaggttggggtgtaagatccctcagttctatatcatcaggcagtttcatatgtgagtataccggtgagctattggaagatgaagaagctgaaaagagagag

SEQ ID NO: 74033 - DNA, 260 bp, Zea mays
ggggcggacagggagggtcggcacaggacatcacggcagagcagccaccacggcgtctgcacagcatcaccgtccgcgctggcgttgccgtcgactccatcgagttcacctacaccgacgacgctgggcagaggcgcactgctgggcggtggggtggacttggcggcaatgttcgaacgatcgatcttggcgacgcagaggatgtcagggaagtctcgggaacatacggcgcatttgaaggtgccattacgctgacctcg

SEQ ID NO: 74034 - DNA, 265 bp, Zea mays
tgtgaatctctcgactcatttgttacggccattgaagatgccaaagctgtttttgagatgggaaaaaatttaggctttgacatgcatatacttgatttaggcggtggatatcctggcacatctgatgcgaaaataccatttgaaccgattgcagaaattattcaagaaacacttgatccttgcttcctacctgttgatgggctagaaataattgcagaaccaggtcgatattttgctgcttctgcgttcactttggtgactcagg

SEQ ID NO: 74035 - DNA, 287 bp, Zea mays
gagcagcatggcacaagaaaaggcccacgttcctacccaatgctccgcacttcgcaaaggaggcttcgtaatgctcaaagaacacccctgcaagatcgtcgacatgtccacttccaaaaccggaaaacacggcggtgctaaagtacatcttgtaggcgtagatatctttaccgagaaaaaagttgaagatatttgcgtctccactcacaacatggacgtacctgttgtagagcgcaaggactatcaattaattgatatcgatggtgatgacgtaacttatttggatg

SEQ ID NO: 74036 - DNA, 293 bp, Zea mays
cttgggatggcatctaagtacaacacaaaagtgttctgcagacagactctcatcggtggcaactatggactgctcgacacgcaaacttttctgccaaatcctgattactacagcgctctactatggcatcggcttatgggcaatggagttctttcagttgatataaacgcaccgcgtcaaatacgcgcttatgctcattgtaggaaacaacagcaaggcatcacgattctgttgatcaacctgagcaacactactggatacaacgtcactctccagaacgacatcaacgtcag

SEQ ID NO: 74037 - DNA, 282 bp, Zea mays
gttcttcggtatgctactagtaagtcggagtttgcaggagggcggaatacgtctccatgaacaagcttccatcctgtctcctcttgggcttcttcttcagtttcaagctgattgtacctagagatatctctataaagggtgcggagcataatcattgccaccatcccagataagaagagtacgatcatgagagagttcacaatagaaaaccagtgaatttgatcatctatcattaacaagtaggtgtcccagcgagaagcccacttgatatcactctcctcg

SEQ ID NO: 74038 - DNA, 287 bp, Zea mays
cgcgaacatcaaggcgtccagcggcaagtgtggtatcgccgttgagccgtcgtaccctctgaagaagggcgccaaccccccgaaccctgggccgaccccgccttcccccaccccgccgcccaccgtctgcgacaactactactcgtgccccgacagcaccacctgctgctgcatctttgagtacggcaagtactgcttcgcctggggctgctgcacgctcgagggcgccacctgctgcgacgaccactacagctgctgcccccatgactaccccgtctgcaacgtca

SEQ ID NO: 74039 - DNA, 280 bp, Zea mays
gttcgacggtactggaaagcccatgaacgttctggtcaccgcggcatcaggtggcgtcggcctctacgccgtgcagctcgcgaaacgggctggtctccacgtcactgccacctgcggcgcgcgtaacgtagagctggtgaagagcctgggcgccgacgaggtgcttgactacaggacgccggagggtgccaccctgcagagcccctcgggcaagaagtacgatggcgtcgtccactgcactgtcgggaccagctggtcgacgttcgagcctgtgctggcc

SEQ ID NO: 74040 - DNA, 280 bp, Zea mays
gtctcgccgctgcccacccagattgacggctccaattggcgcccatggcggaagaaaccaacataaaaaaggaggaagaggagttcagcaccggtcctctctcggtgctcatgatgagcgtcaagaataatacccaggttcttatcaactgccggaacaacaagaagttgcttggtcgcgtgctagccttcgatcggcactgcaacatggttcttgagaacgttcgtgagatgtggaccgaggtaccaaagaccggtaaaggcaagaagaaggctctccc

SEQ ID NO: 74041 - DNA, 280 bp, Zea mays
caggtagctcgagcgcgcgctccacctgcgccgacgcgatgcgggccaagtggaagaagaagaggataccggaggctcaagaggaagcgccggaaaatgaggcagagatctaagtaggcgcatcttgtgaccgaggatggcgagcttctcctgcaccatggctgtgacgcgttgggatgattgtctccctttgtagacgtgctttgctgtagacgtaggcgatgtaaaccgtcctttttgattaattctagtatgttctgagactgggtttatattgtaa

SEQ ID NO: 74042 - DNA, 285 bp, Zea mays
cttctcctcgacccatcgcactttctattctcatccagctcaccagttcttcaggtcgcaacaatggacgcctccaagcagcccgtcaagctcgtcaaggtcacccgagttctcggccgaaccggttctcgtggtggtgtcacccaggtccgcgtcgagttcatggacgaccagacccgatcgatcatccgaaacgtcaagggcccagtccgtgaggacgacatcctctgccttctcgaatccgagcgtgaggcccgaagactacgataaatgtgcattctgggg

SEQ ID NO: 74043 - DNA, 275 bp, Zea mays
gagatcgcgaacttggcgtccggcaggggatgtggggctgcgtcaagaggatagagcctggccttcgggcgtaccaggtcgggaggaccgccggagaggctgtttccaagtgtgctgccatggcacaggtcaccaccaggttcagtgccgacgagctcgtcatcgcagggccgggcaacacggtggccagttcttcttcgtccggcgacggcgcagaggttggcaaggtgacgaagcactgggcgaacagcatacccaaggttctcatggtcggt

SEQ ID NO: 74044 - DNA, 275 bp, Zea mays
cgaaccactggccaacggcattcccatcggcgttgtcctggtgaaggagaaggtcgccgcagccataaactacggcgaccacgccacgacgttcggcggcgggcctctcgcctgccagaccgcgataacggtgttcgacacgatcacgagacccggtttcctggccgaggtgtccaggaaagggcactcgcttcaagcagctgctccgcgccaagctgagcgggaacccgcacgtgagggaggtccgcggggtcggccttctcgtcggcgtcgag

SEQ ID NO: 74045 - DNA, 277 bp, Zea mays
ggacgttggctttgatgaaaatcacttttctcgctatttgcttgtttctcttaatttccatcgatgtgttggctgtccacagacaatactatgaccttttgggtgttgagccaagcgcctcacaaaacgacattaagaaggcctatagaaaactttctatgcaataccatcctgacgttaatccatctgctgaggcccacgaaaaattcacaaagatcaacaacgcttatgaggtcctttctgatcctgaaaccagaagaaaatacgatcaattagg

SEQ ID NO: 74046 - DNA, 278 bp, Zea mays
cagccatcgagacctcatatctggtgctggagtccgccatggccgagctcatgaaccacaggcccgtcatgaagaagctgcaagcggaggtacgggcgtacggagcggagaagaagctggacatgatcagggaggacgacctgagcagcctgccttacctaaaggcgtccatgaaggaggcgctgcggctgcacccaccggggcccctgctgctgccgcactactccaccgccgactgccagatcgacgggtaccacatccccgccaacacgcgcgtc

SEQ ID NO: 74047 - DNA, 275 bp, Zea mays
ccaatctgctgtattactatggcatgtgtgggttagtgaaggagtgcctacttcagcggtacttcagcaaggaagtgcgaggactctctgaactacccgaatcagacatagtgcaggcttgtaaaagcctgctagagcagcggcagagcatgaacgtgtggcgcttcgtacagacaatgaatgagagatacgacttgtctgagcatataaagcggctgcagtgcagaaccctgatttttgtgggcgacaattcccagttccacacggaggccgtt

SEQ ID NO: 74048 - DNA, 272 bp, Zea mays
ccaggttgcaaatgttgttcttcagggtgcttgtgaacgagtgattgtgggggaacaatattgtgatgttcctcttgggctgtacgtaatccggggagagaacgttgttttaatcggagaattggatcgcgaaaaggatgaactccctgctcacatgacctgtgtttcagaagcagaaataagaaaggctgaaaaggcagaacgggaagccagagatctgaaagggacgatgaggaaacggatggagttcctggacttcgattaacaccgtc

SEQ ID NO: 74049 - DNA, 269 bp, Zea mays
aagacctccagctggccgtcgaggaggcagcgaactcctggacgcggagaagctggagatcgtcgatttcaccagcttcgtggagaagtcaagcgaccccggccactacgtcatcttctgggagctgagctccgacgcgagcgaggacgtcctgcgaggctgcgcgaactgcctggacctagcctatcgtcgatgctgggtatgtgggctcgaggaagatcagagccatcggcccgctggagctgcggattctgaagaggggaacttca

SEQ ID NO: 74050 - DNA, 197 bp, Zea mays
gggcgctcctcacccaccgcaactcttgatgggtgacacatggagcaagccgtattccagggagtacgctgcgttccccgcggcatggctccggggcgccaagttctcggccaacaactggtcgtgtggacaacgtctacggggaccgcaacctcatctgcacgctgcagcaggcgacccaggtggccgaggaagcc

SEQ ID NO: 74051 - DNA, 270 bp, Zea mays
gtaactttactcaaggaacaattaaagatagcaaacctggagaaggaagaaatttcgttgaagtttgataagttgtctgccatttgctcctctcagaggcgagagatacaagagcttaagcaagctttggctgcagcttatgttacgccaccagctaaacagttcagagaaaattcaagtgttgatgtcaccccacccagcaaaagcctcgacactccgccgagggagaagattgaaggaacccctccagagctccggcaaggcctgttt

SEQ ID NO: 74052 - DNA, 265 bp, Zea mays
  unsure (1)..(265): unsure at all n locations
gacatttgtggacttcccgattcatgatcttgacctgtcgaagtatattggtcacagatgccaagacgttcctcacaattatcgactgtatgctactagcaaccactatggaagcttgggaggtggtcactatacggcttatgtttatcatgaagggaaaaagggttggtatgatttcgatgacacatatgtgggccccataaccgagganagtataaagacatcggnagcttatgttcttttttaccggcggatacaggaggat

SEQ ID NO: 74053 - DNA, 278 bp, Zea mays
atcccgtcgccatggccgaaaaaacattcacctacgccgaagtctcggcccacaccaccaagaaggacctgcacatggtcattcacgacaaggtctacgatgtcacttccttcgtcgacgagcacccaggtggtgaggaagtcctcctcgatgtcggcggtcaggatgccaccgaggcattctaggatgtcggccacagcgacgaggcccgcgaaattctcgagggattgaagatcggtgtcctcaagcgccacccggcgacccggcccccaagacca

SEQ ID NO: 74054 - DNA, 265 bp, Zea mays
cacagcttttcaagatcagtgaggaagtggttgttgatgccacagacaaaggaaacatggcacgactgatcaatcattcttgcacaccaaactgctatgcgaggattatgagtgttggacatgatgaaagtcgtattgttctaatagccaagaaaaatgtttgtgctggtgatgagctaacgtatgactacctgtttgatccagatgagggtgatgaacgcgaagtgccatgcctttgccagactgctaactgccggaaattcat

SEQ ID NO: 74055 - DNA, 262 bp, Zea mays
gcagcgggcctacagactcatcgcaaacgccgtggacgaagcgtaccgggcggtggagtgcgacggcggcgggtaccccttcggcgcggtcgtcgtccacggcggcggcgacgacgaggtggtcagcagcagccacaactcggtccggaaggacgccgacccgtcggcgcacgccgaagtgaccgccatcaggcaggcgtgcaagaagctggggaaaaccagcctcgccggctgcgagatctacacgtcctgcgagccgtgc

SEQ ID NO: 74056 - DNA, 305 bp, Zea mays
cgtcgcatgcatgtctgacatcggctcgagcgcgcgctcgtgctcgccgcgcagggcgtctacttcaacgcctacttcgtcgcctacctcgcctcgcccaagttcgcccaccgcttcgtcggctacctcgaggaggaggccgtgcactcctacacggagtacctcaaggacctcgaggccggcatcatcgacaacacgccggcgccggccatcgctatcgactattggcgcctccccgccgatgccaggctcaaggacgtcgtcgccgtcgtgcgcgccgacgagggcaccaccgcgatgtcaat

SEQ ID NO: 74057 - DNA, 273 bp, Zea mays
cagagggtgggcgtgggctccaagatacactcaaagtgcactccaagaaatttgttggaatacttaatggcattgacacagatacttggaatccgtctacggataggtttctcaaggttcaatacagtgctaatgatctatatggaaagtcagcaaacaaagcagctcttaggaagcagttgaagcttgcttccacaccagcttctcaaccattagtatgctttctatcctcacaaccttgtacttgtttgaacatcttcctctctccaagat

SEQ ID NO: 74058 - DNA, 266 bp, Zea mays
cacagcttcttcacagatacagtgagcgaatggttgttgatgccacagacaatacgtaacatggcacgactgatcaatcattcttgcacaccaaactgctatgcgaggattatgagtgttggacatgatgaaagtcgtattgttctaatagccaagaaaaatgtttgtgctggtgacgagctaatctatgactacctgtttgatccagatgagggtgatgaacgcgaagtgccatgcctttgccagactgctaactgccggaaatt

SEQ ID NO: 74059 - DNA, 257 bp, Zea mays
cggctcgagctcctcgccgcggacttcagcaacccgaggctgcagacgaacgccaagctccagcacggcggcgtacgtcgccctgttcctcggcgcgcggctcatgtcgttgctcgccaaatgggcgtagaacagaacagattcgctacccgtcagttttttctttctgccgaatcaccgtcagcgagaatttcggtgcgcagaggaagcgaggaaagaaggcccggatgtgatgtatgtaagagcactcccaactc

SEQ ID NO: 74060 - DNA, 252 bp, Zea mays
aggaaggctaacacttgctgatgctttggtctatgcttgcatccaaggtgttgaaaagattattgatttggcaacgctgaccggcgcttgcgttgtcgcactcgggcctagcattgccggaattttcacgccgagcgacgagcttgccaaggaggttgccgctgcttccgaggtatccggcgatgagttctggagactcccgctggaagagagctactgggagtctatgaagtctggcgtggctgatatggt

SEQ ID NO: 74061 - DNA, 182 bp, Zea mays
cacgcacgcgcacgcggacgtaggcacgcggctcgaatcgagcacaaggtgggcgtgggctccaagatagactcaaagtgcactccaagaaatttgttggaatacttaacggcattgacacagatacttggaatccgtctacggataggtttcgcaaagctcaataccgcgctaatgatcta

SEQ ID NO: 74062 - DNA, 254 bp, Zea mays
ctcgtgacaacgataacgacaactcttatggctctggcaacaacaacaacagcagcagctacggctcatctggccgcgacaacagcgattcgtatggctctagcaacaacgattcatacggatccagcaacaatgactcttatggctcaagccgtcgtgacaatgataacgacaactcttgcggctcgtccggtaactctggtctgagcggcggcaatgacagctacggctccagccgtcgtgacaatgacaac

SEQ ID NO: 74063 - DNA, 254 bp, Zea mays
ggacgatctggcgaaagaggcagagggggtcggaagaaggccaaggtacccacggagcagtcagtgccagtgccagtgccactgccacctattgacttagagttgcctgtggatcctaacgaaccgacatactgcctctgcaaccaagtcagctatggtgagatggtggcatgcgacaatcctacttgcaaaatcgagtggtatcactatggctgtgtgggcgtcaaggagcaacccaagggaaagtggtattg

SEQ ID NO: 74064 - DNA, 271 bp, Zea mays
ggacacgccagggaagaaggcgccggtggccaagaagtccgctgctgccgcgaagaaggcccctgccaagatggccgctccctcgaagaaggcggcgaccccggtgcggaaagcgccgtcccgtaaggccaagaagtaaagcggccaagaaggggggcgcgatgctgtaaatttgatatcggagaggctcgggtacacttctcattcagtatccgagaccgatagctgaggctagtggcgatggaggactgtgttattactactataaact

SEQ ID NO: 74065 - DNA, 266 bp, Zea mays
atccaccaccgccataccagcgtgtccgcgattccgtcgagtagactgggcgagagagtagtctcggacgagaagaggcgaatatgagttccggcggcggcaggggcaagcccaaggggtccaaggctttgtcgcggtcgaccaaggccgggctgcagttccccgtcggccgcatcgcgcgctacctcaaggccggcaagtacgccgagcgcgtcggcggtggtgcgcccgtctacctctccgccgtcctcgagtatctcgcggca

SEQ ID NO: 74066 - DNA, 161 bp, Zea mays
cggaggagctccacggcgtcaggcccttcgaccccgagcggactccgctgctggcggcgtggtcggagcgcttcggcgcgctggatgccgtccagacggtgatgcccgacgtcggcaggctgctcgagttcggcaaggcgttgatggcacgtctggcggct

SEQ ID NO: 74067 - DNA, 263 bp, Zea mays
cggctcgagattccactccgccattcaccacaaagctgtcgggagcaggcaatggcgccggatctacgcgaactcgccgccgccgctccagccagtggcgcctacctcgccggcgtcggtgtcgcggtcctcctcgctgcctccttcctcccagtagccgagtcgtcctgcgtgcgagataactacattggtgagagacataacccaaatgccgcaaaccgctattggaattgacggattgtcacatatgacagttgctggtg

SEQ ID NO: 74068 - DNA, 256 bp, Zea mays
cttattgtgatcaacgatatatttgcttatttatttgggttcttacttgggagaacaccattaatcaagttgtccccaaagaaaacatgggaaggttttattggtgcatccgtgacaactatcatctctgcatttctgttagcaaatgtaatgggccgtttccaatggttgacatgcccaagaaaggatctctcaactgggtggctttattgtgatcctggtccaatgtttaagccagagccttactcattgggag

SEQ ID NO: 74069 - DNA, 290 bp, Zea mays
gtgcgcagatggtctcggaggcgatcgcgtcgctcaaggagaggacggggtccagcagctttgctattgccaagttcttggaggacaagcacaaggacaagctcccgcccaacttccgcaagcttctgaacgttcagctcaagaagctcgtcgccggcggcaagctgaccaaggtgaagaactcgtacaagctgtcgtccgccaccaagccaaaggccgccccgaagaagaccaagaccggcgtgaagaagcccaaggccgctgccaaaccgaaggccaagtcccccgcg

SEQ ID NO: 74070 - DNA, 263 bp, Zea mays
aattatttggcctccgtcagagaggggagaaagacccgttcgaggcggcggcgatgtcggggcgcggcaagggcggcaagggtctgggcaagggtggagccaagcgccaccggaaggtgctccgcgacaacatccagggcatcaccaagccggcgatccggaggctggctcggaggggcggcgacaagcgcatctcggggctcatctacgaggagacccgcggcgtgctcaagatcttcttcgagaacgtcatacgcgacgcc

SEQ ID NO: 74071 - DNA, 130 bp, Zea mays
cttccagcagcagcgttggctgttgcctgttggcctgtaaattcgcgtggctgaaactgggaaagccgggaactgaaaggcttaccgcttccgctttgttagtgatgctggtgatgttctaagagctttt

SEQ ID NO: 74072 - DNA, 282 bp, Zea mays
atttcgctcatcatcaggtggtgtgagggtggtggtgacgagagaagactcagaagcaacggaaggatcgggttcagaacgaggtcagaggtggagatcttggacgacggattcaagtggaggaagtacgggaagaaggccgtcaagaacagcccaaatccaaggaactactaccgctgctcatacgagggctgcggcgtgaagaagcgggtggagagggaccgcgacgacccccgctacgtcatcaccacctacgacggcgtccacaaccacgccagcccc

SEQ ID NO: 74073 - DNA, 293 bp, Zea mays
gtgagcttcaccaactccatcattatcatgacgtccaacgttgggtcacagtatatactaaacatggatgaagaagatggatcatctgattcagactatgagaacataaagaggagggtgatggatgctgcaagatcggtgttccgtccagagttcatgaatcgtgtagatgagtacattgttttcaagcctctcgatttagaacagatcaacagcattgtcaaattacagcttgcaagagtacagaagaggattgcagatcgcaaaataaagctcgatgtctcgcctggagc

SEQ ID NO: 74074 - DNA, 296 bp, Zea mays
gcagtacacgctgaacctcacctacgacatgggcaccgtccgcgtgaagtccatgtggtccgaccccaagatcagcagcagcgtgtactccacccgccccgtcgcggtgtacgaggtcggcaaggttctcctgccgatgcagatcttcaagagcgaccccccgctggcgcctgcccccgctccggcaccggatgccaaggcatccgacgtcgctcccagcccggcgtcggggaaatcgtcagcgagtgcgaaggcgaaggagaaggcgggagagaagagctcgtcgtgccgagccg

SEQ ID NO: 74075 - DNA, 297 bp, Zea mays
aatcgacaagggcgtctcgaatggtaggagcccatccaacccaacgaagaagtaaaatccccaatctctgcgccgacgccgttctgtgtcgttcttcgcccgccgtcgttccgtgtcgttcttagcccgccgccgtttgtagtcgcggcttcatcgtcgcgtaccgatccccaccgcccccactgccaccagaggtgtcgacatgtctcagaacaacccctcccagcttctcccctcagagctgatcgaccggtgcatcgggtccaagatctgggtgatcatgaagggggacaagga

SEQ ID NO: 74076 - DNA, 292 bp, Zea mays
ggggttcgcgctgcttgagacgatcaaggaggcgctccccgctgacatgtggagcctcgagatgaagaaagcctgggccgaggcctacagccagctggtggcggccatcaagcgggagatgaagcccgatgcctagtagtggcgattgcgaccagtgtttaacccatgacgcagcgccgtcacagatgtcccgtgtggtcttgcgctttagcaatttctctctggagggagcgtgtattgttatcttgtgatcgagagcctgtgtgctgcctttgcttcttgtgattatata

SEQ ID NO: 74077 - DNA, 291 bp, Zea mays
ggcggacgacagccgtcggcactctagttgccggcatcgcatcagagggcaacgggagtggagatggcacgagcgacagcggaaaagggaacgccgccaacggcgagaacggcggtggtggcagcctgcaggtgacggcgcagcaggtggccaggttgatggaggaggacatgggcaccgccatgcagtacctgcagggcaaggggctctgcctgatgcccatctctctcgcctccgccatctcctccgccacgtggccgtccctcctatcccgcccctccatgggcgcaa

SEQ ID NO: 74078 - DNA, 285 bp, Zea mays
ggcaaagctgaacgagaagaagttcttggcgccaagcagccccgctagctccctgctgtcgcaacacaggctgcgcataatcattgaaaacgcacgtgagttgctgaaggtcatcgacgagttcggatcgttcgacagctactgctggagcttcctgagcaacaagccaacggtcggcagatcccggcacacgcgggaggtgccgctgcggacggccaaggccgacgccatcagccaggacctgatgcggcgggggttcctcggcgtcgggccgacggtggtcta

SEQ ID NO: 74079 - DNA, 276 bp, Zea mays
ggcgcatcacagcaaccaattagcaagcagcaggactccaactcctccgtcaccaagatcggactatggggcggacagggagggtcggcacaggacatcacggcagagcagccaccacggcgtctgcacagcatcaccgtccgcgctggcgttgccgtcgactccatcgagttcacctaccccgacgacgctgggcagaggcgcactgctgggcggtggggtggacttggcggcaacgttcacacgatcgatattggcagcaccgagtatgtcagg

SEQ ID NO: 74080 - DNA, 309 bp, Zea mays
agtcgcacgcacgcgtgagcatgctcggcgttagtatcctgctcaaactgcactgactttcagtcaaggagacttggaattgggtatggccagaaaaagaatgatgagcagtccaagcagtttgttcatatgctgaactctaccttgactgccactgagaggaccctctgttgtattctggagaatttccaaaaggaggacggcgtcgaggtgccaaaggcactgcaaccttatatgggtggaatagagtttcttcctttcaagcaacctttggatgtcaaacaagcttctgactccaaatcaaacaag

SEQ ID NO: 74081 - DNA, 293 bp, Zea mays
gcttctttaccttcagtaacatacaagatgcaaagtgttcaggatggcaacacagagcaatgtgtaatttgccgtgtggaattggaggagggtgaatctttgattgcacttccctgcaagcacttataccatcctgaatgcataaaccagtggctgcaaataaataaggtatgccctatgtgcagtgcagaagtatcaacctccagcaacaaggagccatgattgctctcggatggccatcttgggcatttgatgggattaactagcggcaccactgcagcatctttatgctt

SEQ ID NO: 74082 - DNA, 286 bp, Zea mays
tccacggcatcttcgaggccgcgagcttcggcgggaccaacatcgacccgacggcgtgggaggacaagaagtgccccggcgagtcaccgttccctgcgcaggtgcgggtggcaacgcggaagatctacgacccgctggaggaggacgccttccgccccatcctgcaccactacgacgggcccaagttcctgctcgagctctccgtcaccgaggccctcgcgctcctcgacatcttcgccgacaaggacgacgcctgatcgatccccatcggatctgtcgtcgggcc

SEQ ID NO: 74083 - DNA, 265 bp, Zea mays
cagcaactcggagcatctgcacctggggtccgggtcccacgagcagcagcgcggcggtcgcagcgacgtcaaccatccggaggaggaagaagacgacgacgacgacgacgagccggtgtccgactccagcccagaagagtaacgcaccaccgtacgcccagaaagtccaaccccaaagcttaggttccttttgctctaatttaatcgctccccctcgttttcccccctttcgcaatcctccttatgatgaactacatgatgcttt

SEQ ID NO: 74084 - DNA, 286 bp, Zea mays
tggcgcgcggcatgttccgggaccccgcggccgggatgcaggtgcactacctcgagtacgtggtgcgggcgggcgagacgacgctgagcgaggagtacggcgaggacgacccggtcatcagggaccccgccgccgtccacaggaaagggtgggacgcgctcaaggccgtgtacctggacaatcaggacgcgcggccgcacctgggcaggctcaggaacaccttgctccaggcgctcaagctgctgccccatggacggcagagcaccgactgatcatccttggcttg

SEQ ID NO: 74085 - DNA, 277 bp, Zea mays
ctcaaaggagcaggtgtatctcttactatcatgctgtccctgtgagggtaggatctctggaatagttgactctcctaatgcagtggcaactcttgccatccctacagcaatatttgatcaggatataaagccaaaacacctgagaggaagactgggaccaaagttgataaggcttccagatctcctgagctgttcaaacaatgggcatattcctgtcacccaagaccaaagtggtacaagggcgtcctaggggcgtatatgatctggaagctgatgc

SEQ ID NO: 74086 - DNA, 283 bp, Zea mays
cgggcctacttgggacagcgacgacgaatacgacaacttcatacgcaagatgaacccgccaaggatcgtcatcgacaacgagtcctcggcggaggccacaattgtaagggtagatagcgcgaatgaatacgggatactgctggaagtgatccaggtcatgattgatctcaaccttgtcataggcaaggcgtatataacctcggatggtggatggttcatggatgtcttcaatgtgaccgataaggaagggaagaagatcaaagatgaggcaaccctcagacag

SEQ ID NO: 74087 - DNA, 280 bp, Zea mays
cgtctccggagtctcctacgccggcatccggggcacctacgacccgcgcaccccgcccatccacttcgggtgcagcgacgccgtgccgtacaccaacatcacgctctccgacgtcgagctgctccccgcgtccggcgagaccatcgacgaccccttctgctggaacgtgtacggcagcaccgccacgcctacggtgccgccggtgccgtgcctcatagaaggcgtgcccaggaacctcgacgataacagcagcctcaaatgctactagcagcctcaaatg

SEQ ID NO: 74088 - DNA, 274 bp, Zea mays
cgcagttcggcctgtccaactcgtccctggagctgcccggcatggacgactacctgcagctgcagcaggactccgtcgcctgcagagtgcgtgcgaggcgtggctgcgcgactcacccacggagcattgccgagagggaaagaaggacgaggatcagcaagaggctgaagaagcttcaagacctcgtgcccaacatggacaagcaaacgaatacgtcggacatgttggaccttgctgtggagtacatcaaagagctcaaggaccaagttgagaa

SEQ ID NO: 74089 - DNA, 277 bp, Zea mays
aggccgggtggcctcatcggctacgacaacatgctgtggaacggctccatcgtgctcctggacgacgcgcccatgcgcaagtacatccgcttctaccgcgacttcgtgctcgccctcaacatcgcgctcgccgccgacgagcgcgccgagatctgccagctccctcgttcatgtggtgctgtgtatcggaagaaaatgcgacgagaggcgcgcgcgcggcgagctcggccgtggcactgggcttcagcggggaggcggagaagccccgcgaggaggg

SEQ ID NO: 74090 - DNA, 263 bp, Zea mays
tagtgagccactagagggagacgaagagaatgaaatgatgctggatcagatggagatgcaactgagaccattgcagtcactccagaggagaatgaagctatacttcgtcttgaagggatgggctttgaccgggcactcgtcctggaagtgttcttcgcctgcaacaagaacgagcagctggccgccaactacctcttggatcacatgcacgagttcgacaacgatgacgggctcggagggcctccattgtgatgcgatgcgaa

SEQ ID NO: 74091 - DNA, 273 bp, Zea mays
ctcaaatggtgctgcaagtgtgccgcctcccccggcgcctaccgttgagatcgatttctctctcaaccaggctagatccatccggtggaacctgacagcgagtggaccaaggccaaaccctcagggttcctaccactacggtctcgtcaacaccacaagaaccatcaggctcgccaactcgcgggcaaccatcaacggcaagctgagatacgcagtgaacggcatctccttcgtcccggccgacactcctctcaaggttgctgatttctacag

SEQ ID NO: 74092 - DNA, 266 bp, Zea mays
ctagctacgtaccatctctttcgaatcgcgatcaagtttatttggcgcggagtcggaacaggaagatgggtaaaacatgggcgctcatcacccacctccacgctctcgcagggccgagtctcactctgatataccctctgtacgcgtcgatctgcgcgatggagagcgcgaccagggtggacgacgagcagtgcctggcctactggataatctactccttcatcaccctcttcgaaatggcggccgagaatgtcctctactggata

SEQ ID NO: 74093 - DNA, 225 bp, Zea mays
cagggagacatttaaagattttcctacatcggctctgccattggttgaaactctgcttgcaattgatccagctgagcgacaaactgcctcagctgcattacacagtgattttttttcaaccgagccttatgcttgtaacccttcaagtctgccaacatatccaccaagcaaggagatggatgccaagttaagagacgaggcggctagaagactacgagcggctgc

SEQ ID NO: 74094 - DNA, 267 bp, Zea mays
aggagaatgaccggctgcagaagcaggtttcccgtctcgtcttggacaacgggtatatgaagaatcgactccacagtccttctgtagccaccaccgacacaacctgtgagtccgtggtgacaagtggtcagcacaaccaacaacccagcagttctgcatcctccacaaagggatgcgaacaacacagcaggtctactcgctattgctgaggagacattggcagagttcatgtccaaggcgactggaactgctgtcaactgggtgcaa

SEQ ID NO: 74095 - DNA, 263 bp, Zea mays
gtacgccaagtgcgtcctgttcagcgccacgccccggccttcggattccatgccggaccccgaggtcgacgaagaaggggagcccccggcgccgccgccggacttccgctgcaccatcaccctcgacatcatgcgcgaccccgttgtcgtcgccagcggccagacatacgaccgggactccatctcccggtggttcgactccggcaagtcaacgtgccccaagacagggcaggttcttaccgttttggagcttgtgcccaaca

SEQ ID NO: 74096 - DNA, 254 bp, Zea mays
gaggtatcttgcatcggttttccctggagtagctgaccactggtatccttctgacttgttcaccagagccaaaattgagtcaatcttggattggcatcactcaaatttgcggcgtggtgcagcaacccttgtaatgcacactgcattggctcccttccttggtcttacgacaagtcatgagtctgtgaaacaagcagagaagcttgtgatgcagtcactgggggtgatcgaatccgtatggctgaacagcgatg

SEQ ID NO: 74097 - DNA, 249 bp, Zea mays
cgccggcggcggcgatgaggaagggcccgtggacagaggaggaagacgctcagctggtatggttcgtccgcttgtttggtgaacgccggtgggatttcttagcaaaggtctcaggtttgcgcggtggcgggtgcatccgatcgccaagcatgcatgcatgcatgcatatgtagatgcatgcgtgcatggggatagattgatgtaggatgggctatggcgatgggtgttgattaaccatttcatttctct

SEQ ID NO: 74098 - DNA, 191 bp, Zea mays
ccgccggcaaggccggcgccatcatcggcgcgttcgggttcctgtacgcggcgcaggaccccaagaagcccgaccatggctactcgccgggcatcggcatccgcaacacgctcttcgtgctcgccggaaccaacttcctgggcatgctcatgtcggtgttcgtgccggagtccaagggcatgtcgcttgag

SEQ ID NO: 74099 - DNA, 248 bp, Zea mays
aaaagcttcgggagcgcgctgtgcatgatgtccatgtcgctcggcaactacttcagtgacatcatcgtgagcgcggtgaccaggctcaccacgacgcgagggcggtccgggtggatcccggctgacctcaacgaggggcacctcgacaagttctacttcctgctcgccgtgctggccgtcgcggacttcgccgtgtacctcgtatgcgcgacccgctacgggagcggcaaagtggacgggaggagcag

SEQ ID NO: 74100 - DNA, 243 bp, Zea mays
ccagaagaccgggccggtgttcgcgtcggcgttcagccccctcatgatgatcatcgtcgccgtcatgggctcgttcatcctctccgagaagatctacctcggggccgtcctcggcgccgtgatcatcgtggctgggctctactccgtcctctggggcaaggagaaggagacgcgggagaaggaggcggacgccaagacggcgctgccgatggcagtggtggcgtcgtcgtcgtcttccgacga

SEQ ID NO: 74101 - DNA, 245 bp, Zea mays
gcgccgtgggcgtcaccaagacgctcttcatcctggtggccacgttcctgttggaccgcgtggggcgtcggcctctgctactgaccagcacgggtggaatggtcatctcgctcatcagcctcgggacggcgctcaccgtcgtggggcatcacccggacgccaagatcccgtcggtcgtcgctctgtgcatcgcgtccaccctggccttcgtcgccttcttctctatcggcctcgggcccatcacg

SEQ ID NO: 74102 - DNA, 131 bp, Zea mays
gtgctgctgtgggggttcattagtatgaagaggaagacgctgctggcgctgagtctttctctttattagtattttgtttaaaactatgtatgaccgaatggtggtatttatttgtgtcatccttgactctt

SEQ ID NO: 74103 - DNA, 246 bp, Zea mays
gcttaacatggcatgtcacatgtgttagcatgggaaaccctcactgtgtcacatttggtgcaaatgagttaaaggtattgcaggtcgacgatttaaaacttagcgaaattgggcctaaatttgagcatcatgaaatgtttcctgctcgcacaaacacagaattcgtacaggttttgtctcgctcacacctcaaaatgcgggtctgggaacgtggtgctggagcaactcttgcctgtggtactggtg

SEQ ID NO: 74104 - DNA, 246 bp, Zea mays
aggagaatgaccggctgcagaagcaggtttcccgtctcgtcttggacaacgggtatatgaagaatcgactccacagtccttctgtagacaccaccgacacaacctgtgagtccgtggtgacaagtggtcagcacaaccaacaacccagcagttctgcatcctccacaaagggatgcgaaaaacccagcaggtctactcgctattgctgaggagacattggcagagttcatgtccaaggcgactgga

SEQ ID NO: 74105 - DNA, 274 bp, Zea mays
gtttttctccctgctatctgaaagttgactcatttctcagatgagtacgtcatctgcaatggatgcaagagccctgataccattctgtccaaggaaaatcgtctgttcttccttcgctgcgaacagtgtggatcttcaaggtccgttgctccaatcaaagctggattcgttgctcaagtcggtcgtcggaaggcatgagcatctatatgtggatggtgttggggtcaataccaactcaacaatagttgattatttgttgactagagattctgcg

SEQ ID NO: 74106 - DNA, 271 bp, Zea mays
aaacagtcccctttcccttctccacgatgtcttctgatttgatctggcaagtaattcgtaataataactcctttctcgttaaacgtgatggagttcaactttcagctgaaaagaataatttaactaataaacattcatttaaatattctggtttagctaatacaaagacagttggagttaacttatcataagataagaaaattactcttgctatcaaacgtaccaagacatctgcctgacgaactacatttacatgggcgacttcgtcgat

SEQ ID NO: 74107 - DNA, 269 bp, Zea mays
caggaatgaatctttcagatgatattattgaaggcattattgataaaacatttgaggaagcagatacaaagcacgacggcaaaattgataaggaggaatggcgcagccttgtcttgaggcatccatctctgttataaaatatgactctcccatatctccgggatatcaccacaacatctccaagcttctgtgttcaactctcaagtagaggatgcgtgaggtcccagcgtctacggcaccattgaagcccctggggcacagcagatcag

SEQ ID NO: 74108 - DNA, 270 bp, Zea mays
ggcgacaacatgaacgccaaggggaccctcaaccttctaaccggcgccactcccgccgccagcggagggggcagcatcatcaggaagaaaaatactcatgggatcctgaatgcggtgagctgggggcttctgctgcccatgggagccatcttcgcgagatacctcaagacgttcaggtcggctgacccggcgtggttctacctgcacgtcgcttgccagctgctcgggtacggcgtcggggtgtccggctgggcgaccggcatccatctc

SEQ ID NO: 74109 - DNA, 265 bp, Zea mays
ggcaaagacagcctttcctgggttgggttcgcccattacccatgtcgacgtgacatatgatgggaagtggattcttgggacaacagatgcgtacctgattcttgtatgcaccatcttcatcgacaaagatggaaaggagaagactgggtttagtggtagaatggggaaccgtattgctgctccaaggctgctgaagctcaacccactggactctcatctagcaggagcaaacaacaggttcagggagggaagatctcttgggtga

SEQ ID NO: 74110 - DNA, 266 bp, Zea mays
atcaagccgcaaaaatcaacatgggaaatcctgaagagtgggttgagatcctcaagcagtgcaagtacctgcctgagcaggacctcaaggagctgtgcgagatggtgaaggagctccttctcgaggagtccaacgtccagcctgttgcggctcccgtcaccatctgcggtgacatccacggtcatatctacgacttgctggagctcttcaggattggtggtgagatccccctgaccaactacattttcatgggcgacttcgtcgat

SEQ ID NO: 74111 - DNA, 267 bp, Zea mays
cacgaaccaacaacacccagttattgctctattactactgttctgaaggggacactgttgggtggccgtgaagtcgccgtcaagaggctgagcagggactccgagcaagggacggaggagttcaagaacgaggctaccttgatctccaagctgcagcaccggaacctggtccggcttctcggctgctgcacggagggagccgagaggctgctggtgtacgagtacctggccaacaaaggcctagacgctatcctcttcgacagcgag

SEQ ID NO: 74112 - DNA, 264 bp, Zea mays
gttctattgcttttttcatttatggctgaacattgtagctgcactcctctgtttcggtgaccgtgacttctataaggactggtggaatgccaaaactgttgaagagtactggaggatgtggaacatgcctgttcataagtggatcatcagacacatatattttccatgtataaggaaaggctctcccaggggtgtagctattctaatctcgtttctggtttcagctgtattccatgagatatgtattgcggtgccgtgccacat

SEQ ID NO: 74113 - DNA, 227 bp, Zea mays
atcgtcctgttcctcacagcagcagccatggcggccgagccggagaagcaggcggcccccgcggcacaggagacggccgtgcacatcgtgtacgttgaccgccccgaggacgccgaccctgaggagtcccacatccgcaccctcacccccgtcctcggcagcgaacagaaggccagggacgcagtgctctaccactacaagaacgccgccagcggcttctccgcgaa

SEQ ID NO: 74114 - DNA, 223 bp, Zea mays
ctcatttctccccctttttggcatgaatcgccaaaaacggaatcattagagcccttgaagtaatttcttcccctttggtcataaggcagaactgccagatcccggtacaccattcaatgtaaatagctgggggacgtgtcattgccatgacgatacagcggcgtgatgttagaaacctcgcactcccattttttcagaaagtaaaaaactttttgtggtttaa

SEQ ID NO: 74115 - DNA, 230 bp, Zea mays
cggctcgagatacaacaacacatccatcacttttttatttgttttttcttttcattttaaaaaacttcaaaacaaacaactcaaaatgtcagctggaaagtgtgctgcttgtggcaagactgcctacccattggaaagtgtcaccgctttggaacaaaccttccacaagatttgcttcaagtgtgatgtctgcaagggaacactcaacttgaagaactacaagggtgtta

SEQ ID NO: 74116 - DNA, 230 bp, Zea mays
gacctgctgaccaacgctaccacgcgccccatcgtcacgcgcttcgccgtcgaccaggacgccttcttccaccagttcgtctactcctacgtcaagatggggcaggtcaacgtgctcacgggctcccagggacaggtccgcgccaactgctccgcgcgcaacggcgccgctgctggtgacagtgactcctcgtggtcgtccgtcgtcatcgagaccgtcgcggacgccgc

SEQ ID NO: 74117 - DNA, 221 bp, Zea mays
cacgaaccaacaacacccagttattgctctattactactgttctgaaggggacactgttgggtggccgtgaagtcgccgtcaagaggctgagcagggactccgagcaagggacggaggagttcaagaacgaggctaccttgatctccaagctgcagcaccggaacctggtccggcttcttagctgctgcacggagggagccgagaggctgctggtgtacga

SEQ ID NO: 74118 - DNA, 276 bp, Zea mays
agaaaatgctcgactactcaatcaaatagaagtaaatattttaacatctcaggctcatgacaacattaatcttttccatcacataagaaggaatattaatggtcttctacaaagcatgtgccagattcccggaataatgagcaagatgcccccattgcctgtttctgtggatgaaaggctagctagctaaatactccctcgtgctcatacggcacaagttcttggcagcagtcatttgaaagaagaaccaagagtgtggtaggccactgtagacag

SEQ ID NO: 74119 - DNA, 249 bp, Zea mays
gtctcggttccctcttcccggcgcaccgcctacctcgccgacgccaggccgccacgccgccggagacatgaaccagcccgtgcagaagaacaccctctacgtcggtgggctggcggaggaggtggacgagaagatcctgcacgccgcgttcgtgccctttggtgaggtcaaggacgtcaagacgccgcccgatcagtctacgcagaagcaccgctccttcggcttcgtcaccttcctggagcgcgagga

SEQ ID NO: 74120 - DNA, 273 bp, Zea mays
ggaacacagctctctggaggacaaaaaaacgggttgctattgcaagggccatcttgaaggacccaaaaatacttctactcgacgaggcaacaagtgctctggatgctgaaggagagcacattgttcaagatgcactggaccaagtgatggttagcaggaccaccattgttgtggcgcaccgactgtccacaattaaaggggcagatatgatcgtagtcatgaaagatggtgaagttgctgagaaggggaagcatgaataccttgtggaaaggg

SEQ ID NO: 74121 - DNA, 275 bp, Zea mays
  unsure (1)..(275): unsure at all n locations
cggctcgagatcgcgcggtacctcaaggccgggaagtccgcggagcgcgtcggcgccggggancccgtgtacctctccgccgttctcgagtctctcgccgccgaggtgctggagctggccgggaacgctgctcgggacaacaagaagaaccgtatcgtgccgcgccacatccagctggcggtgcgtaacgacgaggagctgagcaagctgctgggcactgtgacgatcgcggccggcggcgtgatgccgaacatccatcagaccctgtgcccaag

SEQ ID NO: 74122 - DNA, 243 bp, Zea mays
gcgatattaggcagtacgccattgaggatcccgcaaagcctttcttggctggacaagtatgggttggtggtcttcttcagaagggcagtgatgtcgtctatgtgactgatgatggtcaggaacagcagtacaatgtgcctcaagtcaagggtcatcgacttagaggtgggccacagatgattcagctgagcttgactggcaagaggatatacgtgacaaactcacttttcagccgatgggatg

SEQ ID NO: 74123 - DNA, 275 bp, Zea mays
ctccaggaaggtctccccgaaggtgccgaccccggccggtgccggtggtggcagctacagcatagcccaggtgacgtacgagctgaacgtgctgagcacgagaggccccaggcggatgcactgcgtcatgcgctccataccggcgtccgcggtggagccgggcggcacggtccccggacagctcgagcggatcctgccccgggcgctgctggaggagtaggacgaccccgaggattcgtcgtcgttccgccgcaccggcaccggcacacctcctt

SEQ ID NO: 74124 - DNA, 258 bp, Zea mays
cctgaacacaccggcgaagaggaggcgaagaagcgatgggcgtgaccaaggaggacgtcgaggcggccatcacctctgctctcagcccttccaatctcgtggtgacggacacgtccggagggtgtggcgcgagctacgagatcgaggtggtgtcggagaagttcgaagggaagcggctgctggagccgcacctcatggtgaacaccgcgctggcgtctcacatggcggagatccacgccgtctccatcaagaaggcgc

SEQ ID NO: 74125 - DNA, 265 bp, Zea mays
acaggttgtagcgtttccagacactccgacacttaggcgatggggcctctggggactagggttttggggcaaggtactagcgttagtctttcctgcgaccccttagtccaatatatagcgtcgtgtgtctgggggctccaaccgaggttagcgtgagccctcccgatcaagggtccgatcacagctccgatagttgggttaagcccaatccagactctattgaccggctgtagaggacacacccaacacgaggagctggcgaggg

SEQ ID NO: 74126 - DNA, 257 bp, Zea mays
caggatcctaatctacaaggtttatgtagatgggagtaccaccatgtcgacgcacgagaggcaagcgagcctcagggagttttatgctgttatctttccctccctgatgcaactgcccaaggggatcagcgacgtggacgaccggaggcagaaggcggcgtgcacggagaggtaccggaggagggacgaggacgagggcaagaggccggtttcggaggccgacatcgaaagggaggcagagtgcggcatctgcatgg

SEQ ID NO: 74127 - DNA, 257 bp, Zea mays
ccagatttctatttggtgatgccaagcttcagtggaatattcgagcccagcttgctcttggggtggcaagggggctgctatacttacatgaggcatgcagcacacagattatccactgtgacataaagtcccagaacatccttctcgatggcaacttcacagcaaagatctctgacttcggaataactaaactgctccgaaccaaccagacacaaacaaatacaggtattcggggtacacgaggatatgttgctcct

SEQ ID NO: 74128 - DNA, 252 bp, Zea mays
gcagacctttatccacagagacttgaagccatcaaacatacttcttggtgatgacatgaaggccaaggtggcagactttggattggtcaggcttgcaccagatgatgggaagtgcgtctccatagagacaagacttgctggcacttttgggtaccttgcaccagagtatgcagttactggacgagtgcccacaaaagctgatgtcttcccctttggtgtcatcttgatggaactgattacagggcgcaaggc

SEQ ID NO: 74129 - DNA, 249 bp, Zea mays
ccacattccagcagcagagacacctaaacaagattatatccatgtcagggcaaggaggggtcaagcaactgatagtcatagtcttgcagagagggcacgtcgtgagacaataagtgaacgaatgacagttctccaagatcttgtgcctggatgccacaaggttattggcaaagcatcagtacttgatgagataattaattacatccagtcgttgcaatgtcaagttgagttcctgtccatgaaactaga

SEQ ID NO: 74130 - DNA, 249 bp, Zea mays
ggcaggccaacattggactggccgaggcggtggaagatcgcggtccgctcggccaagggcctcgcctatctgcacgaagactgtcatcctaagatcatccatcgtgacattaaggcggcgaacatccttctggattataactacgagccaaaggttgcagattttgggttggccaaataccaagccgctgaagtaacctactgtttctacgcgtgtaatggggactttcggatacttggcgccagagta

SEQ ID NO: 74131 - DNA, 249 bp, Zea mays
tacctggggactacagtgatctggaactgaagcctgttggtaccttggaggtcaagcttgtgcaggcaagagatttgacaaacaaagatctgataggaaaatcggatccttttgccattgtatatgtgcgaccattaccagacaaaatgaagagcagtaaaacaattaacaacgatctgaaccctatctggaatgaacactttgagtttactgttgaagatgctgatactcagagtgtaaccgtgaaga

SEQ ID NO: 74132 - DNA, 253 bp, Zea mays
cgaatccgccgaccgccggcgagcccctcctcctccacgacacgcgcttccccggctatcatggattcagatccatcatcacagaacccacacagatatgactgcatttgtccagaacctccttggacagatgcaaacaaggttcgagtccatgtcgcagaacattgtgtcaaagatagatgaactgggaaccaagattgatgagctcgagcagagcatcaacgatctcaaagctgagatgggcactgagacg

SEQ ID NO: 74133 - DNA, 246 bp, Zea mays
cgcttccgtgggtgcaggcttggtatatcgtaccctgaattgacagacatgcaagcccgggccatttttgaagctgctatagcaatgaccaaccagggtgttcaagtgttcccagagataatggttcctcttgttggaccaccacaggaactggggcatcaagtgactcttatccgccaagtcgctgagaaagtgttcgccaatgtgggcaagactatcgggtacaaagttggaacaatgattgag

SEQ ID NO: 74134 - DNA, 244 bp, Zea mays
gttgtcgttcaggctgttgacctcgatcaggaacggcatgtagtggtcgtggtggtccaggatgtagagccggttgctgtccagcgcctgctgcacggtgaggccctccaggctccccgcgatgtgcgcctccgtgatggtgctcgtctggtcgccgtacttgctcggatcaagggtgcttttcggagggaactccgtgagacgcctgatgatcaaggggttcacgccggcgagggtctccctt

SEQ ID NO: 74135 - DNA, 251 bp, Zea mays
caagactggtgtggcagtataggctcggtagaagaaatgaaagctaagacattaaaaaggcaagaggctgccgctaagcgggaaagggcgatggcatatgctttaacccatcagtggcaggcaagttcaaggaaacagaaagcagcaagcctccaaggccaaggactcgccggggatgagaaccactggggacgaaactggctcgagaggtggatggccgcgcgcccatgggagaacaggttaattgacag

SEQ ID NO: 74136 - DNA, 259 bp, Zea mays
ctgacctggttcatgagttttctccaacactcaggaaggctcatgagttcataaaaagtttgcagatccctgaaaaccaacccgaccatgaaaattattaccgccatagatcaaagggttcatgggctcattcaacattagacaatggatggtctgtatctgattctacagcagaagcaattcaggcattgtcgttgttatcaaagttctcttccaatcttgtgggggatccataaaagaagacagattatttgatgca

SEQ ID NO: 74137 - DNA, 260 bp, Zea mays
tgaagcgtaaaggatcgcaatcaggaaataagacaaacttcaagaagcccaaaccaactcaatctgaacaattgaaagagaagaagcttattgttgttttagatcgtgcttttctggaaactgtatacacgaaggaaaaatatgaactactgaattgtgacgaccaccaaaggattataaaacaaaattacagagacatatcggatgttaggcctgacattctacaccagtgtctcctaatgttaatggacagtccgctg

SEQ ID NO: 74138 - DNA, 258 bp, Zea mays
ccctcccaaagctcgccccgctcccagctagggtttcctcgtcccatccacagccgccggggcgccgccgacgaggacagcgccgccacgatgttggagttgcgtctggtgcaggggagcctcctcaagaaggtcttggaggcgatccgcgagctggtcacggaggcaaacttcgactgctccgggaccgggttctcgtcgcaggccatggactcgagccacgtcgcgctcgtcgcgctgctccttcgcgccgagggt

SEQ ID NO: 74139 - DNA, 256 bp, Zea mays
  unsure (1)..(256): unsure at all n locations
tagcggagatgattgaattgccgattgaccatgttgagaagaagctgtcgcagatgatccttgacaagaaatttgctgggacactagatcaaggtgctggctgcctcattatctttgaggattctaagacggagganatctttccctgcactctcgaaaaccatttcgaatgtcgggaaggttgtggacagccttaatgtgaggtcggccaagatcatggcttgaaagcagctaagtcttacctgtttgctctgat

SEQ ID NO: 74140 - DNA, 265 bp, Zea mays
cgttctttcagcgtcgccaattttcattccatcaacgtccaatcacccagacaatagtcatcgctgattgcattgaaaattcgtcaagatggttctcgcggtcgatctcctcaaccctactcctcagtctgaggctcgcaagcacaagctcaagacccttgtgcctgctcctcgctccttcttcatggacgtcaagtgcccaggctgcttcacaatcaccaccgtcttttcacacgcccagaccgtcgtcatttgcgccggctgc

SEQ ID NO: 74141 - DNA, 259 bp, Zea mays
gttgattagtgagccactagagggagacgaagagaatgaaatgatgctggatcagatggcagatgcaactgagaccattgcagtcactccagaggagaatgaagctatacttcgtcttgaagggatgggctttgaccgggcactcgtcctggaagtgttcttcgcctgcaacaagaacgagcagctggccgccaactacctcttggatcacatgcacgagttcgacaacgatgacgggctcggagggcctccattgtga

SEQ ID NO: 74142 - DNA, 238 bp, Zea mays
gtcgaaccagtacgagaccacgtctctcgtgcagatcgagggggtgaacaccaaggaggatgtcgcgtggtacgctggcaagcgcatggcgtacatctacaaggccaagaccaagagcaatgagacccgctacaggtgcatctggggcaaagtccaccgtccggcaggaaaactcgggcgtcgtccgtgcaaagttcaagtcaaacttccggcctgaatccatggggcgcaaggtcag

SEQ ID NO: 74143 - DNA, 178 bp, Zea mays
gcgccgtgggcgtcaccaagacgctcttcatcctggtggccacgttcctgttggaccgcgtggggcgtcggcctctgctactgaccagcacgggtggaatggtcatctcgctcatcagcctccggacggcgttcaccgtcgtggggcatcacccggacgccaagttcccgtcggtcgt

SEQ ID NO: 74144 - DNA, 182 bp, Zea mays
gtaatcttctcaagcctctccgcaatctccacgacgcatcttccctgtgcaagtacctcgaatcattctatacgctgcggaagccggttgcctccaccataaacacgttggccggtgctctgtacaaggtcttcagcgcttcggctgatccagctagaacgagatgcgccaggcctgttttg

SEQ ID NO: 74145 - DNA, 255 bp, Zea mays
ggatgaagcggttccaccttcctgaagccgagaagctaaacggtcgcgccgccatggttggcttcttcatggcctacttcgtgcacagcttgacgggcgtgggcctcgtcgaccagatgggcaacttcttctgcaagacgctgctgttcgtcgccgtcgccggcgtgctgctggtcaggaagaacgaggacgtggagtcgctcaagaagctcatcgacgagactacgttttacgataggcagtggcaggctacct

SEQ ID NO: 74146 - DNA, 255 bp, Zea mays
ctttaccagatggtgtatggcaagacaccatttgcagactacaagactttctgggacaaatataaaggagtgactgataggaaccacaagatcatgtatgaaccagttgacaacccatggctcattgatttgatgcaaaggtgtctcgcctgggaccgaaatgaacgatggagaacacctcagtatcttaagcacccttttctcaatcctccagttccaagggatttacctccctctgacgatgatccatatagg

SEQ ID NO: 74147 - DNA, 248 bp, Zea mays
gtccacacttcgcaacaacagaaaaaaatcctttttttaattgaattttttatcaatcaaaatgactgaaacaagagagatcaacgttttcacggccaagctcgctgagcaggctgaacgttacgatgagatggttgaagccatgaagaacgttgctgatttgggacaagaactcacccttgaagagcgtaaccttctctccgttgcctacaagaacgtcattggtgcccgtagagcttcatggagaa

SEQ ID NO: 74148 - DNA, 252 bp, Zea mays
  unsure (1)..(252): unsure at all n locations
aaccatgtggattgaggggtattggggtgtattaaggccttgttcggttatttccaatacatatggattggatgagattgaaaaaaattgagaagaagtttgacttgtttaggattcaaactcatctaatctcactcaatccacatggattgagagctaaccgatcaaggcgtaaggtaaattttgactagttgtggatttatntcctctcaatccacatggatttggaaaaaaatgaacatcataatattt

SEQ ID NO: 74149 - DNA, 254 bp, Zea mays
gttttgggcacgagggcctgataacgctggctattataattcaagaccacatgaaactggctttttttgtgatggaggcgactatgacagctactatggacgttttttccttaactggtactctggagtcctcatggatcatgtcgatcaggtgctgtcgcttgctactcttgcatttgatggtgcagaaatagttgtgaaggttccatctatctactggtggtacaggactgcgagccacgccgcagagctca

SEQ ID NO: 74150 - DNA, 253 bp, Zea mays
atggaaggtcttctcgaacccgctgaggaggaagtaccaattggttcggcaaaagttcgagctgtctttagtagtggcagtggaaaggtggccggatgcatgattacaacaggaaaagttgttcaagattgtaatgtgcgggttattcgtaaagggaaagaagtatacgtgggttcgcttgatttcttgagaagggtgaaagaaactgtgaaggaggttggtgctgggctagagtgtggtattggggtagatg

SEQ ID NO: 74151 - DNA, 109 bp, Zea mays
cagcttttgagattgtcaactgcaatggcgttgaggtccaatgtcagggtacgtcaccgacaatatcaatcgacaacacatctggatgtcaattatacttaagcaaaga

SEQ ID NO: 74152 - DNA, 252 bp, Zea mays
gctggtggcaatgagaagatgaggctgcaggtgccagggataaaggtatttggaggatccctagacaatgtgaaaggctgcactgatcaggtggagaatggaatgaagttgtcacttgggaaggacattgagatactatgcctaaacacgccttgcaacataaaaggtcatatcagctactacattactagtatggagggtgaagatccagcggtcttcaccggagataccttgtccattgctgggtgtggg

SEQ ID NO: 74153 - DNA, 251 bp, Zea mays
acttgaagcttccattcggtgagatggatgttctccgggagaacttggagctgatcaagaggcagctgggccttgagcaagtcgaggtgctctccgcttccgacgaagctgctcgcgctaaggctggtgaacatgcttcgctgctagagaagacccacaatcacccggcgaccccctcgcaatctccttcagcaaccaagctgaaaatggaacttgcatatggcccttttgtaatttacttcgcggcacat

SEQ ID NO: 74154 - DNA, 169 bp, Zea mays
cttcgttgtggatcgtctgaaggagttgatcaaatacaaagggtaccaggtgcctccggcagagttggaagctcttttgctaacacatccagaaatcgaagatgtcaccgttataccgtttcccgaccgtgaggtcggccagttcccaatggcctacgtagtgaggaag

SEQ ID NO: 74155 - DNA, 268 bp, Zea mays
cttctcccctggctgcggcggctgccgtgctcttcacccgaagatttgccaatttgcggacggaaccctgatgtgctgttcttgcaagtgaactacgaggagcacaagtctatgtgctacagccttcgtgtccatgtgctacccttcttcagattctacagaggagcacagggacgactctgcagcttacagctgtacaaacgcaactattaagaagttcaaggatgcacttgcgaacacaagccagatagatgtacctttggcccaa

SEQ ID NO: 74156 - DNA, 269 bp, Zea mays
cttcggcacaccgcagcattcaaaatgggtcgtcttcactccaagggaaagggtatcgcctcctcggccattccttactccagaactcctccagcatggctcaagaccactcccgaccaggtcactgaccagatctgcaagctcgccaagaagggtgccacccccagtcagattggtgttgtcctccgtgacagccacggtatcgcccaggtccggaacgtcactgagtacaagatcctccgtatcttgaagtctaagggctcgccctg

SEQ ID NO: 74157 - DNA, 266 bp, Zea mays
gcaaaattcttgccgcaaaatatgcacgcgagaacaatgttccttatcttggcatttgcttgggaatgcaaattgcagtgattgagtttgcccgttcggtgatgaaactacgaggtgccaatagcacggaattcgatccagctacaacatcaccctgtgtcatcttcatgccagagggctcaaaaacccagatgggagctacaatgaggcttggatcgaggagaacctatttccatgtcagtggctgcaaatctgcaaagctgtat

SEQ ID NO: 74158 - DNA, 267 bp, Zea mays
atttgtggacagattggggtatgataatgtaccaacagagattaaccggctgagatgcagagttaactatcatgcattaaagttcctacctgatattgaggaaatggctgttaagcttgctgcaagaatgaggaacaaaactggcagcataaatccatacatggctcttcacctgagatttgaaaaagggatggtggggctttctttctgtgattttgccggcacacgggaggagaaggcaatgatggcggcttataggcagaaaga

SEQ ID NO: 74159 - DNA, 227 bp, Zea mays
aaaggagcagtttattcgctgaatgcattcaatgggaaattgttggctgctatcaaccagaagattcaattgtataagtggatgtcacgcgaggatggttcacatgagctgcagtctgagtgtggccaccatgggcacatacttgccttgtatactcaaacacgtggtgacttcattgtggttcgcgatctgatgaaatcaatatccttgctggtgtataggcatga

SEQ ID NO: 74160 - DNA, 181 bp, Zea mays
cgacaatcgacaacccttttctcgcccaacctccgttctccacgagaaaaccaatatttcagaaaaatggcgaaggaacgttccggtctcgttgtcggcttgaataagggtcacaaaaccacccctatcgagaccaaggctcgcatcagccgcaccaagggccgtctctcccgccgcaccg

SEQ ID NO: 74161 - DNA, 265 bp, Zea mays
attcgctacttcctgcacgctgttgggcaatgttagaacaacgcaggcctcccagacagcggtgaagagcccttcgtctctaagcttcttcagccaagttacgaaggttccaagcctgaagacctccaagaaactggatgtctccgccatggctgtatacaaggtgaagcttgtcgggcctgaagatgaagagcacgagtttgatgctccagacgacgcctacatccttgacgcagccgagactgccggtgtggagttgccatac

SEQ ID NO: 74162 - DNA, 264 bp, Zea mays
  unsure (1)..(264): unsure at all n locations
gcttctcaattcggacgaggttctgtggacaggaagagaccccgaaattgcaggcctagtcaagagttatgccgaagacgaggcgctgttctttgagcactacgtgagttcagtaaccaaaatggggaacataaatcccctcacgggtcacgacggagaaatccgcaagaactgccgtaaggtcaatcaagagatctagtcgtcgaaaggcttcagtttcagtcnaggttcttttgcttatgacgggaaattgattcacacgat

SEQ ID NO: 74163 - DNA, 199 bp, Zea mays
cctccgcgctgtacctcttcctgtacgctgctttctacttcttcacgaaactgcagatcactaagctggtgtctggcatcttgtacttcggctacatgtttctcgcctcctatgccttctttgtgctgactggcacaattggcttctgcgcctgcttctggttcactaggttgatttactaatcagtcaagatcgatta

SEQ ID NO: 74164 - DNA, 258 bp, Zea mays
gggatgtctgtcctgcatgaattcagccccaaaaagtatgtccatggtgacttgaggccaaacaatgtcctccttgggacaaatatggagccgttcatttcagatttcggccttgggcgacttgcaaacattgctggcgcatcaccatttttgcaatcagaccaagttgaattagaaaatcagcagattcagcaaatagatgcctcagtgagccctctcatgagcaaagggtcatgctaccaagctccggaagcgctg

SEQ ID NO: 74165 - DNA, 249 bp, Zea mays
ctgaaattgctgtcagctttggtgcagggatgattggatcattggtgtatctccgcatgcttggaaccagtatagattccctagcaggtggaactggagaaactgtcaagagtgctgctgcacaaccaaggttgcttattccagtggtacttgtgatgatgtataacagatggaatcagataatagtctcggattatggtttcatgcagcttgagttaataccaatgcttgttgggttttttacctata

SEQ ID NO: 74166 - DNA, 262 bp, Zea mays
gcgcctctacatttcttctctctctactcctccgcctccgcctgatccatccaagacagggatcgccatgtcggactcggaggagcaccacttcgaatcgaaggccgacgctggggcgtccaagacctacccgcagcaggctggcaccgtccgtaagaacggcttcatcgtcatctagaaccgtcccctgcaagttgtggaggtttctacctccaagactggtaagcatggccacgccaaatgccactttgtcgccatagac

SEQ ID NO: 74167 - DNA, 254 bp, Zea mays
ccgacttcggcctctcccgcctcttccccctcgacgtcacgcacgtctccaccgctccgcagggcacgccagggtatgttgatccagagtaccaccagtgctaccagctgacggacaagagcgacgtgtacagcttcggggtggtcctggtggagctcatctcgtccaagccggccgtcgacatcactcggcaccgcagcgagatcaacctggccagcatggccatcagcaagatccagaagtgccagctggag

SEQ ID NO: 74168 - DNA, 247 bp, Zea mays
cgcggcacgcatgtccagcacgccgcggccaagacgagcagcaaagcaaaccgtatttgtcccgcggcggcctcttcgtcccgcaaggtcgccccacctagatccggccacgccgcacgttccccttttccgccgcagcgatggtgtacgtggattcctgggacgagttcgtggaccggtccgagcagctcttccgcgccgaccccaacaccacccgctacgtgatgaagtatcggcactgcgaggg

SEQ ID NO: 74169 - DNA, 265 bp, Zea mays
gagtcgttggggaatcgaagaacagcagcaagaaatggaatatgaagtgtcagtcatccacgtcatgcaatggcttcttgaagggaaagctgtccaatggctcggaatatgtacaacctatgatcgaggtttatgtcgctgggacctcctctggcacacctatcatattaacaaagacaattcagcttatatcacgaaggaagtctgaaatgaaactaaagcttgattccatccctgagaatgaaacaactgaacagcagaaaga

SEQ ID NO: 74170 - DNA, 261 bp, Zea mays
ctgacctggttcatgagttttctccaacactcaggaaggctcatgagttcataaaacgtttgcagatccctgaaaaccaacccgaccatgaaaattattaccgccatagatcaaagggttcatgggctcattcaacattagacaatggatggtctgtatctgattctacagcagaagcaattcatacattgttgttgttatcaaagttctcttccaatcttgtgggggatcccataaaagaagaaagattatttgatgcag

SEQ ID NO: 74171 - DNA, 260 bp, Zea mays
gcataccataccatagaagctgaagagaccaaggacaaggacgacctgccttgcatggcgcaatcggtgaaaatattgtgtaaggatggcttcaacttgtacgtcaccattcgtggcaataaggtcgttcttgcccctgaagatcccgacgacgaaatgcaggaatggttcaaggactactccagggtaagcagtgtgacggatgacaacggtcaaagggtgttcgcgctggtaaacaaggagacgcaacaagccatggt

SEQ ID NO: 74172 - DNA, 260 bp, Zea mays
aacagcttcagtgatgccgtctcacaggactacaagtccgagagcttgaactgcttcagtgtgatcaaggcagcctgggacgtgctcgatgagaggggatccactgacacagggctcctggagctcagtaaactgttcagagcctgcaagagcgtcaagcacgctgattcgattgcaggctggctacagacggcattcacctacactgccatggtggactatccaacaccggccaacttcctgatggatttgcctgccta

SEQ ID NO: 74173 - DNA, 256 bp, Zea mays
ggaagctttacaaaatctcagaagacacatcatccagccaaaacgctaaagtggagatgtatgcatcgttcggcgggcttcttatgctgctcaggggtgacccttccactgccgctagctttgagcttgatcagaggctctttctgctcatccgcaaggtgtaaaactgtggttgctgaccacttaggagtttgccttgctcgccacttatttaatttccatccgtgggtgaagctgttatatactgttgtaagta

SEQ ID NO: 74174 - DNA, 173 bp, Zea mays
ctcaaccggaagcttggcataagcgacgaatggttctccattggggattctttgattatcacagtcctcggccaggcttcctttatgcctgtcctggtgttggctgcaaagttgtgccctgtgggagcggaagcaactttatttgccactttgatgtccatctctaacgccgg

SEQ ID NO: 74175 - DNA, 251 bp, Zea mays
  unsure (1)..(251): unsure at all n locations
aaccatgtggattgaggggtattggggtgtattaaggccttgttcngttatttccaatacatatggattggatgagattgaaaaaaattgagaagaagtttgacttgtttaggattcaaactcatctaatctcactcaatccacatggattgagagctaaccgatcaaggcgtaaggtaaattttgactagttatggatttatttcctctcaatcnacatggatttggaaaaaatgaacatcataatattt

SEQ ID NO: 74176 - DNA, 254 bp, Zea mays
gtcgccatggttcaggcagtgaaactgaaggtcaggaaggagggatattggctgcaggaactgacaaggagcgatcactctctgctgaagacgcagtttgctgcatctgtcttgcaaaatatgcgcacaatgatgagctccgtgaacttccatgtgcacactgtttccacaaggactgtgttgataaatggctcaagataaatgcactttgccctctgtgcaaatctgagatagtgagctcgtctggtacttct

SEQ ID NO: 74177 - DNA, 248 bp, Zea mays
accggctgttctggtcgacgacggcggagaaggcggcggaggcgctcggcgtcgtcgtccccgtggtggagacgctggagcaggcgttcagggagtgctccaaagggaaacccttctccggcggcgacgccgtcgggctcgtggacatcgcgctcgggagcttcgtggtgtggatcagcctggtggacgaggcggccggcgtaaagcttctggacgaggccaagttcccggccttgacggcgtgggcg

SEQ ID NO: 74178 - DNA, 285 bp, Zea mays
atcggatttacggcattcggctcgaggtgatggagaacatcttgtttggacacaatgtgtcgcggacatatgatctgaaaggcgccatcttttcacgttatgtctccgacccaaatgaccatgctggcactgtctacttggaccagaactttgtggatgacatgcgtgtttctccaatctatattggtggaagagcaaagcatctcttggagcgggcaatctggaacgacacgtcttttctcacgtccatcaatgtcatggactactctttgctggttggagtgg

SEQ ID NO: 74179 - DNA, 254 bp, Zea mays
ctggaacgtgctacgtcacaatgtgctgttcaaatccgacgcggccctgctgacgtcgacggagacggcgaggatggtgctcgagaacgccggcatccgaggaaggtttgagaggaagttcgccagcgcgatgctcaagatgtcgctcatcgaggtcaagaccgctgccaccggcgagatcaggaagaactgccacgtcgtcaattagttttgtttgatttgattcttcgttgttggattaatggattaacgcg

SEQ ID NO: 74180 - DNA, 254 bp, Zea mays
gtgatggagaacatcttgtttggacacaatgtgtcgcggacatatgatctgaaaggcgccatcttttcacgttatgtctccgacccaaatgaccatgctggcactgtctacttggaccagaactttgtggatgacatgcgtgtttctccaatctatattggtggaagagcaaagcatctcttggagcgactcatctggaacgacacgtcttttctcacgtccatcaatgtcatggactactctttgctggttgg

SEQ ID NO: 74181 - DNA, 289 bp, Zea mays
gctacatggccttgggcaggaattcaagtgtgagatatgtggaaaccatagctattgggggcgaagggcttatgagcgtcatttcaaggaatggcgtcatcagcatgggatgcgatgccttggcattcccaatactaagaatttcaatgaaattacatccatcgaggaggcgaaagcgctctggtagaaaattcaagcacgacaaggggtgaataagtggcggccagacctagaggaagagtatgaagatcaggaaggcaacatctacaacaagaagacctacactgac

SEQ ID NO: 74182 - DNA, 277 bp, Zea mays
cgtatagctggattggtcacactagaaacagaagacagcagtactcttcttgattctgtcaaaagtgttgggtcatctattgcgatgcatattgttgcggcaaagccaatattcttatcaaaagaactggtttctgcttcggctttagaaaatgagcgtgaaatacttcgaactcaggcccaaagttcagggacatcccaaatggctatggataagatggtggaaggacgattgaggaagtactttgaggaagttgtgctcatggagcaaaaatatg

SEQ ID NO: 74183 - DNA, 283 bp, Zea mays
agagagatgcagaacagcgaaaaatggtcgatgccggcgacataacggccggagggccgccgcgcgctcacgaggaggagcaagcgggaactccggcatacggttcggtggtcctcggcggcacttttgaccgcctccacgacggccaccgccgccttctcaaggcctccgcggatttggggagagaccggatactggtgggcgtctgcacgggacctatgctcgccaagaaggagtatgcggagcttattgagcccgttgacaagcgcatcaagggtgtgga

SEQ ID NO: 74184 - DNA, 289 bp, Zea mays
ctagaagaacgcccaacaagccaagctcgaagtcgaagcaatggaggcactgtagggtcacgaaaatgttgtcaagcttattgaagccgtgaagctcgaagagtcttatattatcatcatggagtactgctcgaagggcgacttattgcaccacgctcaaaccaagctgagactctctgaagcagaagctttgcctttcttccaccaaatggtcaacgcactcgaccacacgcacgaaaagggatacattcacagagatatcaagctggaaaatatgttccttgacgac

SEQ ID NO: 74185 - DNA, 280 bp, Zea mays
gtttccgtgttccgtcgtctccgccgccgaaaccatgccgtcccacaagaccttccggatcaagaagaagctggccaagaagatgcgccagaaccgccccatcccctactggatccgcatgcgcaccgacaataccatcaggtacaacgccaagcgcaggcactggcgacgcacgaagctcggcttctgagcggtgcaagagatgatggccaacgatgcttgtggaggatagagctctgcaaaagctaggaagctcttgtttaagattttgttgtgttaa

SEQ ID NO: 74186 - DNA, 266 bp, Zea mays
cggctcgagcgcactgcgggtggaactcggtgatggaggcggtcacggccggagtgcctatgctttgctggcctatgtacgcggagcagaagatgaactcggtggtcatggtggaggaggccgggatcggtgtggatctggttggatggcagcagggactggtcaacgccgaggaggtcacacgaaggtaaagatggtaatggagttcaaggacggggagcagctcagagcacgtgtgacggcgcacagggatgccgcggccgtgg

SEQ ID NO: 74187 - DNA, 272 bp, Zea mays
gacaattcctaatgaacggaccatgcaagtgctgggacagctgcaggtggaggtggagaattttgtcctccgagtggcagctgagttctcctcaaggaaggagcagcttgtgtttctgatcaacaactatgacatgatgctgggtgtgctgctggagcgggctgcagatgacagcaaacccgttgagagcttccagcagctgctcaatgctcggacacaggaattcattgaagagttgctgtctcacacttttgggggtttagtggcatttg

SEQ ID NO: 74188 - DNA, 271 bp, Zea mays
gtaccttcgctttggttcataccaaattgaggaatcggttgagttatgataagttgcataaactggtttatgttcactacaacttgaagttgcgcattcaacattttgaaactgatatagaaagttttgaacaaatgaaaaactctaaagatagaaacatagatccatgtagcatcatgatagcagttgctatgtatgatgaaggcaacccccctatggaatggttgtgcagttctaggagtgaatcagtgccgacacttgatgaaaatga

SEQ ID NO: 74189 - DNA, 270 bp, Zea mays
  unsure (1)..(270): unsure at all n locations
gtagattgtctctcagattatcaagcgcaaagattcgcacctgtataggcatctgcagaagttgcaggccgaggactgtttcttcgtgtacagaatggtggtggttctgttcaggcgagagctcacctttgagcaaaccgtgtgcctgtgggaggttatgtgggctgaccaggcagccatacgacncgggatcgggaggtccacctggggaaggataaggctgcgtgctccgccaactgacgacctgttgctctacgccatcgccgcctg

SEQ ID NO: 74190 - DNA, 266 bp, Zea mays
  unsure (1)..(266): unsure at all n locations
gcaaagagncttttctatctcatcatccccactggcacacccaaatcaaatccatttgaccgttagcgtcgtagcatgggttactccattcaagagaccccggcgtggactctgctctacatggctggccgggctcaatccaaataaagacaatcttatcccgtgttggatacaccaagggaccatgnctcctccacgtccattggttcctctcgtgttgattggaccaggaacagggtgtgcaccattccgtgcatttgtggagg

SEQ ID NO: 74191 - DNA, 261 bp, Zea mays
cacagttctaactgcgccaactgataagcctggcgtcgcgttgcttgattttgtaatattcccacccagatggctggttgctgagaatacattccgcccaccctactaccaccgcaactgcatgagcgaattcatgggcctcatctatgggatgtacgaggctaaggccgatggttttcttcctggtacagccactcctcacagctgcatgacaccgcatgggccagacaccaagacgtacgaggcaacgatcagccgtgc

SEQ ID NO: 74192 - DNA, 261 bp, Zea mays
gacgtccaggccaacacttacgcgtttggcgtgatcctgctggagctggtcagtggcagagcctcggtttccaaagatacaggaggcttggtggattgggcacgaaagcacctggagcagcccgaggaattcggcaagctggtggacccgaggctgcagagcgtgaaccaggagagcctgggcatcgtctcaaacgtggcgaacctgtgcgccgacctggagccgtcgcggcggccgtccatgagcatgatcgcggccatc

SEQ ID NO: 74193 - DNA, 119 bp, Zea mays
ctcgctgtgctcaagggcttcaagaacttgcccacggggatgccgtccgtgctcctcgtaactggactcacctggctctcttggttcccgagatccactacgagaacgactggctggaa

SEQ ID NO: 74194 - DNA, 258 bp, Zea mays
ttctattacaattaatctggaattttcttcattcgtcttttcgcttccatttttgccactggtatattggagctacagatggagtggtgttggcattgaagattggtggagaaatgagcagttttgggttattggtggcacctctgcccatctcttcgcagtgttccagggtctgctgaaagtgtaggctgaggattgataccaacttcacagttacctcaaaggcatctgatgaggatggcgactttgctgagctat

SEQ ID NO: 74195 - DNA, 148 bp, Zea mays
actcgctgtgctcaagggcttcaataacttgcccacggggatgccgtccgtgctcctcgtaactggactcacctggctctcttggttcccgttgcatcctctacgacaccgactggatgggccgtgagctcaaccacggcgacaccca

SEQ ID NO: 74196 - DNA, 255 bp, Zea mays
cggctcgaggccggccagctgcgacagctacgtcggccactacatgctcggcggccactaccgccgggactcccgcgtcgtcatcgacgaggccatcgcctacgccgagggcctcaagctgggccgcaacggcaaggaggtctgggtcttcgatatcgacgagacgtccctctccaatctcccctactatgccacccacggcttcggcactaagctatacaacgcgacgagcttcaacgagtacgtgctggaggg

SEQ ID NO: 74197 - DNA, 257 bp, Zea mays
  unsure (1)..(257): unsure at all n locations
atttcataatgcgagtacacgattctctgatggggctcgttttggattgggtgccgaggttggcataagcacagggcgtatacatgctcgcgggcctgtgggtgttgaaggtctcttaacaacacgctggatcatgcgaggaagtgggcaagtggtgaatggtgacaagaatgttgcatacacccacgaaaancttcccttacaatgaggcaagctgtttttgtgcttgatcaggattcgtgtctatccagtgatgt

SEQ ID NO: 74198 - DNA, 259 bp, Zea mays
gtttggaatggagctggactacagcgacgccctcactggtggcggcttcttgttccagaatccaaacgcaacaaaaacctgtgggtgcggcaaatctttcgcgactggaaaggagaccgaggccgcggcaaccacttgcaacaactagagtagagaaatattgttagctaaacgtgatgtggcaaatcgtatagcttgctcacccttgaagccctgtggctacaccacagatacataaagaggcatagttcaaaggaat

SEQ ID NO: 74199 - DNA, 252 bp, Zea mays
gcgcgccaaggcgatggagaaggcgcagaacgaggtggccagggcgcggcacaaggcggaggcgaacgcgcgtcggcggaggcgaacggggcaccaaggtcgcgcggctgctggagctcgccaacttcatgagggccgtggggagggcgccctccgccaagcgctccttcttctgaaccctcacccaccgcccaccgggcctctcccccttcaccagttcctctgccctgctctgctcgtcgtcgccgcccg

SEQ ID NO: 74200 - DNA, 261 bp, Zea mays
gagcagaccgggcggtgctggcgcggttgcgcagctggttggtgatattccactctcagttaagggcgaggcaggcgacggcgggggggcgccgcagcagcagcagcagcagcacgacgaaggagaagtggtcgacggacggcacggagaagcaggtggcgaactgatggaggaggacatcgggcaggaaatgcagttcctccagtccaaggcgctgtgcatgatgccggtctcgctcgcgatggcgatctacgacaccca

SEQ ID NO: 74201 - DNA, 255 bp, Zea mays
gcaaccttgatgctacgctgatcttgcaaaaaccaaaaattagcccattcaaggagacaatccgatcgaatttgtgcgacctacttggggcagatccatctgtggtcaatctcaaggccaagacgcacgagaaagttgacagtctaggggagaacaggagcatagctgctcatactgtagttctcctgatgcgaaagtagaaagaacaaatggcagctaattgtatcatgctacacggaaaaggttgttatctta

SEQ ID NO: 74202 - DNA, 254 bp, Zea mays
  unsure (1)..(254): unsure at all n locations
ttccggccgaacgcgaccacgttcatcgcgcccgcggatatcttcccggccaggctgcggtcgacgtgccacggaatctcggcggcgtcggggaagctgggcgccatcatcggctccttcgggttcctgtacctggcgcagaaccgggacccggccaagacggaccacgggtaggccgcgggcgccangcctgcgcaactcgctgttcctcctcgccggctgcaacctgctgggcctggcattcacgttcctgg

SEQ ID NO: 74203 - DNA, 248 bp, Zea mays
tacaccccctcttgcccacaccacctcgctgaaccggaagactcgcacacacacgccacttgtagaccatggcgccccgggtggcggacaagtcgcctctaccgccggccaccggcctggggctgggcgttggcggaggagtcggaggcgtgggcatgggcccgcactacagaggcgtcaggaagagtccatggggacgctacgccgccgagatccgcgaccctgccaagaaaagccgcgtgtggctc

SEQ ID NO: 74204 - DNA, 253 bp, Zea mays
cggctcgaggcctggccatctgcacgctcaacacggcctccttcctggtcaacgcgctctcgccgtcgccgcacctgcacctccccggcgtcacggccgaatacgtcgccgacgtcatggagaggggcttcctgctcagcctcgccggcaaccggctcttcttcgccggcgcgcccctcctgctctggatctccgggcccgtgttcccctgcgtatgctccatggccatgatctctgtactctacaacatgga

SEQ ID NO: 74205 - DNA, 303 bp, Zea mays
agaatatgaacggtcattttttttcaggcataaatataaatccgttctcttgccatggtatttagcacgcacaagcaacgcttgaataagtcttgcaaattcaacacaggttctacgaaagtggctttggctaaggaacgactgcaatgtcgagaaacgacactaagttctttcagcgcttcccatcactcccgcccaacttggggcccttggaacccttctggaccgcaccctttgtctgcgtcttctgggacttgctcacctccgccttcttcgctttcttctcatccttggtcttcttga

SEQ ID NO: 74206 - DNA, 295 bp, Zea mays
agatggaatacgtggacctgtacatggtgcactggcccgtgaccatgaaggccgggaggttcacggcccccttcacgcccgaggacttcgagccgttcgacatgcgggccgtgtgggaggccatggaggagtgccaccgcctgggcctggccaaggccatcggcgtgtgcaacttctcctgcaagaatctcgagaccctgctctccttcgccaccatccctcccgtggtcaatcaggttgagatcaacccggtgtggcagcagcggaagctgagggagttctgcagggcgaaggg

SEQ ID NO: 74207 - DNA, 289 bp, Zea mays
cgcatacgtttctccccccttcctctccccactccgaaccctagccaccgtgctcacttcccagctcgaacccgccgcggcgcgagtccacggcagtgcaggacctgatcctgcggtctaggccgcggcgttgagatggtgatggtgtcaggcggcggggggaacgcgtgggcgaaggagatgaccctccgccgcaggatagccagcatattcaacaagacgcaggaacacttccctactctgaaagactacaacgattatctggcagaagttgaggatatgactttca

SEQ ID NO: 74208 - DNA, 294 bp, Zea mays
tgtcgatgtggacggacggcgaggcgcaggcgcggttcgtcagggagacgaaggagagcctgggggtgctggacgcgcaactccaggggaagaggttcttcgccggcgacgcgctcggcttcgtcgacctcgccgcctgcacgctggctcactggctaggcgtgctggaggaagtggccggagtgcacctgatagcggcggacggcgagtaccccgctctgcgccgctgggccaaggagtacgtctccgatgaggtcgtgagccggtcgctgccggacagggacgagctcgtcg

SEQ ID NO: 74209 - DNA, 276 bp, Zea mays
gaatcgaagagctcggtctaagctgctgcgatatggtgacagacagaggacttggtttccttgcggcgggatgccctaatctcaagaaactcgacttattgcaatgcacccggctgaccgatcaaggtctcatcaatcttgcaagtggctgtcacaaactcgaagaggtcattctttacgagtgcgaagaagtcggtgatgagggtttaatggctctctgtgagaactgcccaaatctcaaagctcttatgctttcaaacacttcgattagggaca

SEQ ID NO: 74210 - DNA, 288 bp, Zea mays
ggtggttgatgtggccagggaggtggccaagttggaggtgccttcctaccgccgccatctggacgttgttgtggcctgtgaggacgacgacgacaatgacgtcgacatcccgctcgtgtcaatttacttccggtaaagagggacacactgcccgtttacatacatgaatcttgtgcgatgtttgtcagaaggatcgtgtctataagttgcgcatgcaacctccaggactaggctttgcttaaacgcatgctgatggatttcccgagctgggtagagctggctgggaat

SEQ ID NO: 74211 - DNA, 279 bp, Zea mays
ggggaacgcctctgaaattctcgcgctcgcttcccgctcaaccgccgcctcttccaatttcaagggtgtggacagttcacattgctctgttgatgctattgaagctgcaaaagcgttggcactgtccagcagtgctgttgtcgcggtatctggagctgttgatttcgtcactgatgggaagcaggttttcagcgtgagcaacggtgtgcccatgatgcagaagatcaccgcaacagggtgcgctgtgactgctcttattgctgcatttgttgccatgga

SEQ ID NO: 74212 - DNA, 279 bp, Zea mays
atcggtgcagagggtggccatggcaatagctccttcccgtcttggtggacagcttgagatgaagcaaactcctggttcccctgaggcgcacacgcttgcgaggtggatcggcaggagctacaggtttcacactggagcagaactgcttcgcacagacacccaatgcacggatgcttccttgaaagcaccagtgcagcactcggactcgatcatgtgctgttccctgaaggctgctccggtgttcaccttcgccaaccaagccggcctcgacatgctcga

SEQ ID NO: 74213 - DNA, 274 bp, Zea mays
ctcaagaccgaccgataggcagtgccgtttgacactgtaagcaacagctgcttcctccggctgcaggtgtctatcctccgaccataacctttgtggtttggtctgggatggagcacccatctgtggttcttggattctggctgtggtgtgtgatttaaatcgggtctctgagggattagagcaactattcaatacctttcagtttgtgaactgtaatgaaatggaatttgggcctgatgccacgtctctgttaaccacggcattgaccagagat

SEQ ID NO: 74214 - DNA, 279 bp, Zea mays
gcggccgtctcctccacctcaaccgccgcctcctacttctccccgcagcctgcgctgccgatctccaccgccgaccctgccgccagcaaaagtaggttgatgcggcagccacggcggagcagcagcttcgtgatggtggaggcgtcctctgccagtgcgcacgacggcggggtggccaggacgaagagcctcacggatgacgacctggaggagctcaagggctgcctcgacctcggcttcggattcgcgtacagcgagatacccgagctctgcgggacg

SEQ ID NO: 74215 - DNA, 280 bp, Zea mays
gcgcgtcgaaccccaatgtgtcgtctgtgatcactggagccaccaaagaaagccagattgtggagaacatgaaggccctagatgtcatcccactgctgacgccggaggtcgtcgacaggatcgaggcggtggtccaaagcaagcccaaacgcaacgtcgagtcatacaggtgtaaattcggtgttcatccgacggagttcaggcctcctccacgaaacttcatccatgatccgtgtgtattctgggcgtggtgctgtgtccacaaacacaagtctgtcat

SEQ ID NO: 74216 - DNA, 279 bp, Zea mays
gcgagatcctcgaagctgtcgtcaccatggtgaacaagatgggcttctttgcggaggctgggccggtgcagatcttcgtgtccaaccatttgattccagacgatatggagttccaatcaggagatgtgccgaactacacaacttctgatggatcggtgaaaattcaaaaagagagtgaggtgcggctgaagattattggtactcgtgtcgatgctacagaaattttttgcattggcacaataaaggatgattttctgggtgttatcagcgatcctggtg

SEQ ID NO: 74217 - DNA, 275 bp, Zea mays
gagaaaaaaaagatgagaataaggcgggcagttaactaggttggaaggcatgtatccattactagactgaatagctttgttggcataattgcagctgttagggctagtttgcaaccccgtgtttccaaagaattttcattttcccaaagaaaattagtttattttccctttggaaaatgagaatctcttgggaaaattgagttgccaaacgcccttaaaaatatgtttctaggactcagtttatttttcacaggaacaataaaggaaacggaaaa

SEQ ID NO: 74218 - DNA, 276 bp, Zea mays
ggattgtgtgagattgaactttagccacggaactcaagaagaccaccgcaagttgttccatcttgtgaagtccctttccgttaagtaccaacatcaagtctctatcatgtgtgatattcaaggccctaagatcagaactggtcgcatggagaaacctttcgaaattcgcgctggcgagaaatgtcctgttacgcccaattatgtactcggaacacctcaactcatccaaatcaagtacgccacgatgttgaaagatctcgacgcaggcgacgttat

SEQ ID NO: 74219 - DNA, 265 bp, Zea mays
ggtggattggatctccaagttcccagagtgcaacacctctctggagtcgcttgtcttcgactgtgtcagcgtcccgttcaactttgaggccctggaggcacttgtcgcacgctcaccggctctgcgccagttgcgtgtgaaccaccatgtgtcagtagagcagctgcgccgtctcatggcaagagcaccccagctcacgcactttggaaccggtgcattccgatctgagggcgcccctggtgggggtttggccgtgactgaagct

SEQ ID NO: 74220 - DNA, 273 bp, Zea mays
caggctcgtcgcctacacgggtgcctggacatggaagaagttcagatcaccgagagagtcatcggcggaattgagcttcggcgaatacaacgtcccagacggaggaggaggggagaatctgctcggatccctcaagtacagaaacgaggagctttactcggccggcaagcccatggaagaggtcttctggctgcctgtgcattcggcatggttcagaactgcagaacagctcacggtggaacttgaaagatgcaacgacactttctgcttacc

SEQ ID NO: 74221 - DNA, 274 bp, Zea mays
gcgagcggcggctgcggcgcgatgggagagcaggtcgtgacggagcgtatccacgcggagctggagcgaggccaacgctaccgtccaacagcacctcgccggcatccaggaccacgtcaacttcaccatgcagcaagcatacttcaagtgcgcatatgattgcttcgatcggcgccgtactcaggaagcgatcaacaattgtgtggagaattgtggtatgcctgtccttgctgtcaacaatgtttttgagagtgagatggccaagtttcaggaa

SEQ ID NO: 74222 - DNA, 274 bp, Zea mays
ctgacatcgaaggggaccgcatattcgggatccgatccttcagcgaccggttagggcaaaagaaggtcttttggatctgcgttggcttgcttgagatggcctacagcgttgcgatactgatgggagctacctcttcctgtttgtggagcaaaacagcaaccatcgctggccattccatacttgccgcgatcctatggagctgcgcgcgatcggtggacttgacgagcaaagccgcaataacgtccttctacatgttcatctggaagctgttcta

SEQ ID NO: 74223 - DNA, 214 bp, Zea mays
cttattttcggacatccaaaaaacatgcttcctatgtgggatgatgcgttatctttatatttgtatgttaattagtctctttgctgttaaatttcgtgtaagttggtcctgccgatggagaatcgagcagctccctttttttgttctatcaactatgctgtaattctggctatgtatcggcaaaaacaattctatatgctgagttggagtcggc

SEQ ID NO: 74224 - DNA, 261 bp, Zea mays
cgttcccacccaccctagactcgccgccgtcgcaactcccacccgatccccaaattctccggcggtgatggccagcctgtggcgcgccgtgatggatagcgtcagcggctcctccccctcggcgctggacgcggccccaggtagcggcgtcgagttctggcacggcgcagagcgcgctgggtggctaaataagcagggcgagtacatcaagacgtggaggcggcggtggttcgtgctgaagcaggggaggcttttctggtt

SEQ ID NO: 74225 - DNA, 265 bp, Zea mays
ggagaatagtgcctcctccattcactacttagaatcagaaccagttggcctgactgaagttgatgttggcaaaacctacgaagtcgtgataactaccttcggaggtctataccgctaccggctaggagatatcgttaaggtaacgggcttccacaacgcaacaccggagctccggttcatctgccgcagatccctagtcctgagcatcaacatcgacaagaacaccgagcaagacctccagctggccgtcgaggaggcagcgaac

SEQ ID NO: 74226 - DNA, 261 bp, Zea mays
gcttgtgctctctataacaactggtggccaatgctaacagttctcatgtatcttatcctaccaatgcccctcatatttttcctgggttctgatacttcctccatgatgtccaatgggggagacggctgggtgaacttcacgaaattcttgacgggcgcatcaatagtagggagcatcgcctctccgtcgatactgaagcatgcgggcgtcattggatggggagccctgacgatggagctgtcatcctttgtggtctttggc

SEQ ID NO: 74227 - DNA, 260 bp, Zea mays
gcgaggcgtggctgcgcgactcacccacggagcattgccgagagggtcagttcatctactcgatccttcggtccttcccaaacgattcgctaaaaaaaagcacggcgcaatatatggtgccacactctgccagctttgatgctagctggatgtcagcacagaaaccaatttcgttttccttgttcgctggcgtacgttcaggaaagaaggacgaggatcagcaagaggctgaagaagctgcaagacctcgtgcccaacat

SEQ ID NO: 74228 - DNA, 263 bp, Zea mays
cccacttaccatttgctgctagagagttaatgatcataaaggtcgcggcaaatgctacagctcgaagggatgtcttagatattgctcagatttttgaggcacagaaagttgacatatcagaccacacaattacactaccgctcaccggagacattgacagaatggttagattgcaaaagatgctctcagcagtatggcatctgtgaggttgcacggacaggccggattgctctgctccgagagtctggagttgactccaagta

SEQ ID NO: 74229 - DNA, 264 bp, Zea mays
cacaccacagcaccgctgccgaaggtgggaaagaaggcggcggcggaggcaccggcaccggcaccgcctaggaaaggaaaccgaggaaactacagccatggtggtacggatccgtctggcgcggttcgggtgccggaatcggcccttctaccgggtgatggccgccgatagccgctcccctcgagacggcaagcacctcgaggtcctcggctactataacccgctcccagggaaggatggaggcaagaggatgggcctgaaatt

SEQ ID NO: 74230 - DNA, 258 bp, Zea mays
ccgggcagcccagaaccagaggagggagccgccattgctgcagatccccaggagcttcttgagggttagagaggggaggatgacagttagagtagtgatgaggtaccttgttaacaagctgggccttgacgacgattcacagttagagattacctgtcgagggcaacaccttcaaccgacaatgacgctgcagcaggtccgtgacaccatttggcggccagtgccggctgaggctgcagcggttttgccggcccccgg

SEQ ID NO: 74231 - DNA, 259 bp, Zea mays
ctggtcccgcagtccgtcgaggtcatcatggtgatggtcagtgtgctcaacgatgcactcaagtccatgtacaatgcagagaataggggcaatatgcacgtcatgatcaagccgtcgtccaatgtgatcatcaagttcctgacggtcatgcagcgtcatggatacattggcgagttcgagtacgtcggatgaccagagatctgggaagattgtggtggaactgaacggcagactaaacaaatgtggtgtaattagcccc

SEQ ID NO: 74232 - DNA, 261 bp, Zea mays
cggctcgaccacagctctcctcatcggcgcacccgcgctcgccctctccttcctcatcgacgcccgagccctgctctgatggcgaccgacgtggctgagactcccgcgccgttggtggatgcggcccctgacgcgcccgcggacaccccggcggcgcctgctgttgacgcgaaccggccaaggcctcgaaggccacagcgccgaagaagcgcgccagcccgacccatccgccgtacgccgagatggtctcggaggcgatcg

SEQ ID NO: 74233 - DNA, 263 bp, Zea mays
cttcggaaccacagtcttcgcttccactggcctcaaggacagctacgtcactcagctcattcttggctcagtcaactgtgcttgcacattcggcggtctctatgtcgtccagaagtgtggtcgcagaaagtctctgatgatcggtgccgtctggatgatgatgtgtttcttcgtctacgccttcattggacacttcgctcttgaccgaaaggaccctctatccactcccgctgccggtgccgtccttgtcaccttctcttgct

SEQ ID NO: 74234 - DNA, 258 bp, Zea mays
gcgcgcaggggcacaaggagtggctggctgaggtgttcttcctcgggcaactgaggcacaagaacctggtgaagctcatcggctactgctacgaggccgagcaccggatgctggtgtacgagttcatgagcttcgggagcctggagaaccacctgttcaaaagtaccaacggcgccctcccatggatgacgaggatgaagatcgccgtcggcgcggccaagggcctcgccttcctccacgacgctgacccgcaggtga

SEQ ID NO: 74235 - DNA, 260 bp, Zea mays
agaatatgaacggtcattttttttcaggcataaatataaatccgttctcttgccatggtatttagcacgcacaagcaacgcttgaataagtcttgcaaattcaacacaggttctacgaaagtggctttggctaaggaacgactgcaatgtcgagaaacgacactaagttctttcagcgcttcccaccaccgccgcccaacttggggcccttggaacccttctggaccgcaccctttgtctgcgtcttctgggacttgctc

SEQ ID NO: 74236 - DNA, 263 bp, Zea mays
accaactacagcacggagtccatgaggaaggacggcgggtacgaggtgatcaaggcggccatcgagaagctgaagctgcggcacagggagcacatcgcggcctacggcgagggcaacgagcgccggctcaccggcaggcacgagaccgccgacatcaacacgttcagctggggcgtggccaaccgcggcgcgtcggtccgcgtgggccgggagacggagcagaacggcaagggctacttcgaggaccgccgcccggcgtccaa

SEQ ID NO: 74237 - DNA, 262 bp, Zea mays
cgaggatgctgggaaagagggtacatgctggccaagagaatggcttgcggcagattttcctcaagcacgtttttttacggtcaaatacaagacaaatttgacccaatggactggagccagcttgcctcttcaggaggtgagctctatgctgctgaggaagttggtggctgctgggattggtagtcggcctgtcattttcgtgacacataggttttctatagttgtccgcattttggcagtaaacttgcagacatgccatggc

SEQ ID NO: 74238 - DNA, 261 bp, Zea mays
ttggtcccgccgtccgtcgaggtcatcatggtgagggtcagtgtgctcaacgatgcactcaagtccatgtacaatgcagagaagaggggcaagaggcaggtcatgatcaggccgtcgtccaaggtgatcatcaagttcctgacggtcatgcagcgtcatggatacattggcgagttcgagtacgtggatgaccacagagctgggaagattgtggtggaactgaacggcagactaaacaaatgtggtgtaattagcccccgg

SEQ ID NO: 74239 - DNA, 254 bp, Zea mays
ggaatgactcgtgatgatttattcaacacaaatgctagcatcgtagctgctttagctgatgcttgtgctcaatattgtccaaaagcttttttggctataatttcaaatccagttaactcaacagttccaattgcaagtgaagtgtttaagaagcgcggtgtgtacgatccaaaacgtatttttacagtaactacacatgatgtggttcgtgctaatacttttgttgcagaacttaaaaagttggatgttgcatc

SEQ ID NO: 74240 - DNA, 255 bp, Zea mays
cggctcgagtctgtatctaatccgatggcatattgcttggctgttatgaagagcgaaggtgttaacttaataggggagaattttatgtctgggctgaaggtcgtgtttgatcgagagaggaaggtcttgggctggaaaaactttgattgttacagtgtgggcaactcaagaagcaaccttccagtgaacccaaatccttctggtgttccccctaaacctgccttgggacctaacagctacactcctgaagctacc

SEQ ID NO: 74241 - DNA, 261 bp, Zea mays
caccgccaaaatggtcaagaagagaaagaacaacggccgcaacaagaagggccgcggccacaccaagcccatccgctgcagcaactgctcacgatgcactcccaaggataaggcgatcaagagattcaccatccgcaacatggttgagtctgctgccatccgtgatatctccgatgcctctgtcttcgccgagtacaccgtccccaagatgtacctgaagctgcagtactgcgtctcttgtgccattcacggcaagattgt

SEQ ID NO: 74242 - DNA, 264 bp, Zea mays
caccgccaaaatggtcaagaagagaaagaacaacggccgcaacaagaagggccgcggccacaccaagcccatccgctgcagcaactgctcacgatgcactcccaaggataaggcgatcaagagattcaccatccgcaacatggttgagtctgctgccatccgtgatatctccgatgcctctgtcttcgccgagtacaccgtccccaagatgtacctgaagctgcagtactgcgtctcttgtgccattcacggcaagattgtccg

SEQ ID NO: 74243 - DNA, 247 bp, Zea mays
attcttggagataaaatagcggaaggagagttataataagtctgtaactgtaacccatagctgagatgctgtctgcaagcagcaatgccaatgccaatgccatctggttttcgtgcaaaaaaaaaaaaaaaaaaaaaaaaaaaaaaaaaaaaaaaaaaaaaaaaaaaaaaaataaaaaaaaacaaaaataaaaaaaaaaaaaaaacaagctcaaaaaaaaaaaaaaaaacagggggcccccacgtcc

SEQ ID NO: 74244 - DNA, 257 bp, Zea mays
ccgagcccaagatcctagagctctccaacggcaagatcaccgcgaggatctccaactggggcgccaccatcacctccctcctcgtccccgacgcccaggggagtgtcgctgatgtggtgctcggattcgatggcttggatccgtacgtgaaaggcatgtcaccttattttggctgcatagttggctctgtcgcgaataggatcaaggatgggaagtttacactaaacggacttgagtattcattacctgtcaacaat

SEQ ID NO: 74245 - DNA, 257 bp, Zea mays
ggaatgactcgtgatgatttattcaacacaaatgctagcatcgtagctgctttagctgatgcttgtgctcaatattgtccaaaagcttttttggctataatttcaaatccagttaactcaacagttccaattgcaagtgaagtgtttaagaagcgcggtgtgtacgatccaaaacgtattcttggtgtaactacacttgatgtggttcgtgctaatacttttgttgcagaacttaaaaagttggatgttgcatccac

SEQ ID NO: 74246 - DNA, 259 bp, Zea mays
gttggaattgctgataggtctgcctatgacttacgtgcccactcggataaaagcggcgagaaacttgaagcacatgagaagtttgctgaacccagagaagtggagaaattagttataacgccatcaaagaaggaacttggtcttgcattcaaagggaaccagaagttggttgttgagtcattggaagccatgaccgagaccgaggcactggacatgaaagccgcgttggaatccagaggggaagtcgagttcaaggtgt

SEQ ID NO: 74247 - DNA, 259 bp, Zea mays
gcaagaagtggtggctgccacctcctgtcgtgcacatcgtttgttggaatgggagatgtggcggatcaagaagctttcgaatgggtacgtggtgtgcctaaaatagtgaaggccctctgcattatcctcaggctttctgacgatctcaagtcatatgagcgagagaaaatgaactcgcatgtcgcttcgacgatggaaagctgcatgaaagagcaccaagtcccactcgaagtggcacgcgtgaagatccaagaaacga

SEQ ID NO: 74248 - DNA, 283 bp, Zea mays
gcaagaagtggtggctgccacctcctgtcgtgcacatcgtctgttggaatgggagatgtggcggatcaagaagctttcgaatgggtacgtggtgtgcctaaaatagtgaaggccctctgcattatcctcaggctttctgacgatctcaagtcatatgagcgagagacaatgaactcgcatgttgcttcgacgatgcaaagctgcatgaaagagcaccaagtcccactcgaagtggcacgcgtgaagatccaagaaacgatagatgaaacctggaaggatttca

SEQ ID NO: 74249 - DNA, 278 bp, Zea mays
actctgccctcctcttgtagttgcaggcagacgcgccatgcggatgcgggtgcttcccgcgtcctggtcatcttcctccgccaagcatagcagcggcagctccgagtcgcaggagcacccttcttcctcctctgctacggccgcggtgtacctcaacatctacgacatctcccccctcaaccactacctctactggctcggactcggcatcttccactccgggatccaagtccatggcatggagtatggctttggagctcatgaataccccaccagcg

SEQ ID NO: 74250 - DNA, 274 bp, Zea mays
gagaaaaaaaagatgagaataaggcgggcagttaactaggttggaaggcatgtatccattactagactgaatagctttgttggcataattgcagctgttagggctagtttgcaaccccgtgtttccaaagaattttcattttcccaaagaaaattagtttattttccctttggaaaatgagaatctcttgggaaaattgagttgccaaacgcccttaaaaatatgtttctaggaatcagtttatttttcacaggaacaataaaggaaacggaaa

SEQ ID NO: 74251 - DNA, 272 bp, Zea mays
ggtggttgatgtggccagggaggtggccaagttggaggtgccttcctaccgccgccatctggacgttgttgtggcctgtgaggacgacgacgacaatgacgtcgacatcccgctcgtgtcaatttacttccggtaaagagggacacactgcccgtttatatacatgaatcttgtgcgatgtttgtcagaaggatcgtgtctataagttgcgcatgcaacctccaggactaggctttgcttaaacgcatgctgatggatttcccgagctgggt

SEQ ID NO: 74252 - DNA, 267 bp, Zea mays
gagccaagaaacaagcccggaagatggcaggcggcggagtggtgaagcacatcctgctggcaagcttcaaggaggaggtgacgcaggagcgcctggacgagctcatccgaggatacgccgcgctcgtcggcgtggtcccctccatgaaggcgttccactggggaactgatgtgagcatagaaaacatgcatcaagggttcacgcacgtcttcgagtccacgtttgaaagcacggaaggaatcaaggagtacattgagcaccctgcac

SEQ ID NO: 74253 - DNA, 267 bp, Zea mays
ctattttacaagctgctcaagaaagtggataagtttcagtggacttcagaagcacaggaagccctagaggcactgaaaaaattcttggcgacaccactagtgctgaagccgccgcagcgagccacgtcaactcaaccagctgaagacttgttgttgtatatctcttgcacgactcacgtggtcagcaccgcgttggtagtcgagcgagccgaagaaggacatgcctacccagtgcaacatcatgtttatttcatcagtgaagttctg

SEQ ID NO: 74254 - DNA, 222 bp, Zea mays
  unsure (1)..(222): unsure at all n locations
gaggccgagctggctgccatacataggtattgtgtggtgtgtgtgagagagagagtaacagagttcttcagtttgctatctctctctgcatgtttggcgtcagtctttgtgctcatgtacgtacgtgtgtctacctgcatgttggttgatccgattgcatctgctgtaaccatatattctttggtccacgatgatctgatttgatactatatatatactant

SEQ ID NO: 74255 - DNA, 264 bp, Zea mays
caggctcgtcgcctacacgggtgcctggacatggaagaagttcagatcaccgagagagtcatcggcggaattgagcttcggcgaatacaacgtcccagacggaggaggaggggagaatctgctcggatccctcaagtacagaaacgaggagctttactcggccggcaagcccatcaaagaggtcgtctggctgcctgtgcattcggcatggttcagaactgcagaacagctcacggtggaacttgaaagatgcaacgacacttt

SEQ ID NO: 74256 - DNA, 267 bp, Zea mays
caggctcgtcgcctacacgggtgcctggacatggaagaagttcagatcaccgagagagtcatcggcggaattgagcttcggcgaatacaacgtcccagacggaggaggaggggagaatctgctcggatccctcaagtacagaaacgaggagctttactcggccggcaagcccatggaagaggtcttctggctgcctgtgcattcggcatggttcagaactgcagaacagctcacggtggaacttgaaagatgcaacgacactttctg

SEQ ID NO: 74257 - DNA, 278 bp, Zea mays
tcggtggccatcccccctctcctggcaagaaagttctgacagctgaattacttgttagatcatactgtatgatctgagcaacttagggggtgtttggtttgagaaatcattccatctaagatgagatggtgcatcacgaatcaattcctcaaatttggtggaatgacctcattcctcatgttattactaactaatcaactattaagaatgaggtggtgattgatcaaaaaaaaaaaaaaaaaaaaaaaaaaaaaaaaaaaaaaaaaagggggggggcc

SEQ ID NO: 74258 - DNA, 277 bp, Zea mays
ggtcaatcccttccacgacttgatccctaacccacaatgtctcctcccgctgctatctacgagcctactgttgcccctaccggcatcaagggcaaggtggtcgtccccgagacggtctccactaccttgaccggccagggccagagcaagctcctggagcagttcggcggcaagtgggatgagttcaagttcgtccctatccgcgagagccaggtctctcgcgccatgacccggcgctacttccaggatctggacaactatgccgagagcgatgttg

SEQ ID NO: 74259 - DNA, 276 bp, Zea mays
gcgcaccctctgaggatcttcatggtggtgagggacttcctgtccatgctggaccatgtatgcaaggaggtcggccagcaggacaggacggttgttgttggatccgcaaggtccttccgcatgtcagcgaccacggcaatggcgaacctcaaagtgtacggccagcacgcaagagacaacgacgacgacgaagatcgttggtcgctgtaggaaatcggggtcagggaccacggagccaaacgaacagaaccaaccacaagaaccctatatagatga

SEQ ID NO: 74260 - DNA, 307 bp, Zea mays
gctgacagacgctcggaagctcggcacgaggctgctcaagatcctgataccgcagctggacccgctgacggagcagcagctgctggggatctgcaatctgcagcagtcgtcggagcaagcggaggaagctctcgcccagggcctgcaccagctgcaccagtccacggccgacacagtcgccgcgggcacgctcaacgacggcgccgccgcccccaagcgcatgaacatcatggccgtcgcacttgagaagctcgccagcctcgaaaatttctatcaacaggccgacaatctaaggcaccagacgttg

SEQ ID NO: 74261 - DNA, 276 bp, Zea mays
cgcctccgcctcagacgcagcagtacgcgacaccaccgcagcattacgcccctctgccgcagcagcagtacgctcctccaccgcagcagcagtacgctccttcgccatatggtaccacgccgggaagcggtgaagtcaggacgctgtggatcggagatcttcagcactggatggacgagaactacctccactacaacgcctttgcggccgtggcccagcagattgcttctgtgaaaattatacggaacaagcaaactgggcactcagaaggctatg

SEQ ID NO: 74262 - DNA, 270 bp, Zea mays
atcagagtcacttgccgcgctggtatcccaggtgagctgcatgatgccgttccgcttgctctcggtggtcagtagctgccggctgctggtggcaacagatagatccgatccgtgcgtgcgtaaacaaaacggaagcttagggcaagacgtacgatggtgtggtggtgcagggactgctcgagcaggattcggtggacgcctacgacgccccgttctacgcgccgagcgcacgggagatcgaggaggaggtgagcaaggagggctccttca

SEQ ID NO: 74263 - DNA, 269 bp, Zea mays
gcaacatcatctttagacagctactcagaacaagacggccatttgttgcagaaataactgatgctatgggtaacgagatatttaaggttcgccggccattttggtggatcaacagctcaatttatgtagaagtgaatgataaggagataggtgtagtccacaggcgttggcaccttaggcggagaatttatgacttgtacttagggaatatgcaatttgcagttgttgagaatccaggattctggaactggacctttaacctggtggat

SEQ ID NO: 74264 - DNA, 269 bp, Zea mays
cggctcgaggcgccaccccgtgccatcgggctgcgtccgctaacgaccgcccgttcgcgcagggaccagggtgtgggagggagcaatggtcgctgggatggaggcggaggaaggggtgatggcgacggacttcttctggtcgtacacggacgagccgcacgcgtcgcgccgccgggagatcctggccaagtacttgcagatcaaggagctcttcggcccggatccgtgggccttcctcaagattggtttggtcgtgtcgcttcagctat

SEQ ID NO: 74265 - DNA, 266 bp, Zea mays
cgaaacacatataagtcagccaccatgggtcgtatgcacagcagcggaaagggtatttcgggatcagctctcccataccgtcgtaccccaccttcatggttgaaggtcacttcatctgatgtctcagagctcatttgcaagctcgccaagaagggtcttaccccatcccaaattggtgtgattctcagagattctcacggtgttgcccaggtcaagaacgtcactggtaacaagctcctccgtatcctcaaggccaacggacttgc

SEQ ID NO: 74266 - DNA, 266 bp, Zea mays
caagcacacacacaatgggaaaggtccacggaggtctcgctcgcgccggtaaggtgcgcaacaacacgcccaaggtcgccaaggccgagaacaagccgaagcctaaggtcggccgctcgcagaagcgcctcctgtacagccgccgcttcctcagcaaggtcgagaccaccggccgcggtggccccaacagccagaagcgcaagagcgaggaggccaaggcctaagcagctcgcctactttgagcactattcaggcatgcctgcacg

SEQ ID NO: 74267 - DNA, 264 bp, Zea mays
atggatttggggatgatcaaaatccttatactgaatctgtggatctattggaagatttagtgattcaatatattactgaaataacatataaggcaatggaagttggtaaaacaggtcgagtgacagttgaagatatcatgtatttaatgaaaaatgaccctcgcaaatatactcatgtcaaagaattgcttctaatgaatgaggaactgaaaaaagcaagaaaagcttttgatgaagtgaaatatgctgcgctttaattttgtt

SEQ ID NO: 74268 - DNA, 112 bp, Zea mays
cgaaagttgagtgcctatgtgtgagcatgcttgcttgtaacgagaccttgaattgttcggaaatgagcattcctgtgctcttctttaaaataaaccttgccttaggttcctc

SEQ ID NO: 74269 - DNA, 282 bp, Zea mays
caaggaattagtgtatatatgttatctggggacaaggaaagtgctgctatgaatgtggcttcagttgtcggtatccaggcagataaggttcttgctgaagttaaaccacatgagaaaaagaagttcatatctgaactccagaaagagcacaagttagttgccatggttggtgacggcattaatgatgccgcagcactagcttcagctgatgttggaatcgcaatgggtggatgtgttggggcagctagtgatgtatcttcagttgtacttatgggcaacagg

SEQ ID NO: 74270 - DNA, 280 bp, Zea mays
ctgacctccaatccacgataaggcaagataagctagctaggaaggcaagggatccgatggacaagtacgagcccgttcgcgagatcggggcgggcaacttcggggtggccaagctgatgaggaacaaggacacgagggagctggtggccatgaagttcatagagcgaggaaacaggatcgacgataacgtgttccgcgagatcgtgaaccaccgctccctccgccaccccaacatcatccggttcaaggaggtggtgctgactctcacgcaccttgcgat

SEQ ID NO: 74271 - DNA, 267 bp, Zea mays
gtacaagtttgatccgcacggggagtacgtccggcgatggctaccggagctggcaaggctgccaacggaatggatacaccatccctgggatgcacctgagtctgtgcttcaggctgcaggggttgagctaggatctaactacccacgccccattgtcgagttagatgcagccaattccaggttgcaggatgccctgtcagacctgtgggagcttgaggcagcctctcgtgctgccatggagaacggaatggacaaaggcctcggcga

SEQ ID NO: 74272 - DNA, 275 bp, Zea mays
gcacgccaggctcctcctccagctcctgttcgagatggtggtggctccatgtttggaggaattgggtccaccattgctcaaggtatggcgtttggcacgggtagtgccatggcacacagggctgttgatgctgtattaggtccccggaccattcagcatgagactgttgcctcagaagctgctgctgctgcccctgcccctccagtgatgaatgctgatgcttgcagcatccattctaaggctttccaagattgtctcaacaactatggcagcga

SEQ ID NO: 74273 - DNA, 281 bp, Zea mays
ctcaaatcttctctctcttttttctttcttcagaaactgcctgtctggcggaggtggtacagctggatctgcccagtcgcatggacactctacggattggttgcctcccagttcggcgacatcacgcatccgctggaggactcaccgacaggccagacggtggcgcagttcatcacggattacttcggcttccatcacgacttcctgtgggttgtcgcaggggtgcacgttgggctgaccgtgctcttcgcgttcctgttcagtcttgccatcatgaagtt

SEQ ID NO: 74274 - DNA, 268 bp, Zea mays
gatatattgaaggattccgttccacaacttatttttgccccaaatgcgggtgtggctgcatatcctagttggatgccaactattgaaatgataaggcagactgggattcctgcaatctttacggacttctgtgaagaagctgcacatctagcatcctgctgcataagctccataactggtcaaccccttaaaattccaatccaggtaaatcctttcaggcagccagttgcagcggaaaacaatgcattatacgtaccatgttattcaa

SEQ ID NO: 74275 - DNA, 172 bp, Zea mays
aacgccaagaagatgaggagaatggtgtcaaaccgggaatcggctaggcgatcaagaaagaggaagcaagcacacttgaccgatcttgaatcacaggtttccaggttaacgtctgagaatgcatctttgctgaagcgactggctgatatgactcagaaatacaaggatgctt

SEQ ID NO: 74276 - DNA, 276 bp, Zea mays
agaatttgtagcgatgatgaagactggaacagattggaggaaggcgtcgcggcattattcaagagggcgcttcaatagccttagcataaagcttataaaagatgggtctgtaaaactgggtagcgagtgaggttgtagcttgctgccgatgctcttctccacgcattgtagtctgcctctcgggcccgctaagcagaaacccccttccgtttgctaatgattattttgtctgggatttaggtagttggagcctccctgattggtttactcgtgtaa

SEQ ID NO: 74277 - DNA, 273 bp, Zea mays
caccgccaaaatggtcaagaagagaaagaacaacggccgcaacaagaagggccgcggccacaccaagcccatccgctgcagcaactgctcacgatgcactcccaaggataaggcgatcaagagattcaccatccgcaacatggttgagtctgctgccatccgtgatatctccgatgcctctgtcttcgctgagtacaccgtccccaagatgtacctgaagctgcagtactgcgtctcttgtgccattcacggcaagattgtccgtgttcgttc

SEQ ID NO: 74278 - DNA, 264 bp, Zea mays
gtcattcttcctgttggccccggtaaccttacttacagaaggtgttaaagttagtccagcagttttgcagtctgctggtttgaacttgaaacagatatacacaaggtcattgaccgctgcatgctgcttccatgcataccaacaggtgtcatacatgatcctcgccagggtatccccagtcatccatccagtgggcaattgcgtcaagcgtgtggtggtcattgtgacctcggttctgttcttcaggacccctgtttctcccat

SEQ ID NO: 74279 - DNA, 273 bp, Zea mays
gccaaactaaactgccagacgcacagccgcggagcgccagagacagacgctgccgccgtcggccgtcctccgccctccagttgagcggttcaagcagagctgatggctacatcagagccagtacaagagagtttggtggtgcactactcacaacctagtaggccccgggtcctccttgctgcttcaggaagtgtagccgctataaaatttgagagcctttgccgtagcttctctgagtgggcggatgtccgagctgtggccaccacgtcatcc

SEQ ID NO: 74280 - DNA, 271 bp, Zea mays
ctgctaagttcttctggtacctcttctttgggtacttcacgctgctctacttcacattctacggcatgatggccgtggggctgacacctaactaccacatcgccgcgatcgtctcctcggcattctacgccatctggaacctcttctccgggttcatcatcccccgaccgaaagtgccgatctcgttccggtggtactgctggatatgccccgtggcgtggacgctgtacgggctggtggtgtcacagttcggtgacgtcatgactccgat

SEQ ID NO: 74281 - DNA, 288 bp, Zea mays
caatcacgacctcctagatctctggtatattcaccccagtactgtgtgacccttagctcaaaatttgcggtccgaaagctatatccaagaagacattatgaccggtcgcggaaacccaggaggccgaaagacactccttgcgcccatccactttattttcaagctgttgcaacaacgctccacggtgtcgatttggctatatgagcagctctctttccgcatagagggaaagattcgaggattcgacgagtttatgaatcttgttgtggatgatgctgtcgaggtccg

SEQ ID NO: 74282 - DNA, 276 bp, Zea mays
agaatttgtagcgatgatgaagactggaacagattggaggaaggcgtcgcggcattattcaagagggcgcttcaatagccttagcataaagcttataaaagatgggtctgtaaaactgggtagcgagtgaggttgtagcttgctgccgatgctcttctccacgcattgtagtctgcctctcgggcccgctaagcagaaatacccttccgtttgctaatgattattttgtctgggatttaggtagttggagcctccctgattggtttactcgtgtaa

SEQ ID NO: 74283 - DNA, 273 bp, Zea mays
cgtgaatgcgcgcgtgtggacaggtgacgaaccacggcatcccggcggcggtcgtggagggcatgctgcgcgtggcgcgggagttcttccacctgccggagtcggagcggctcaagtgctactccgacgaccccaacaaggcgatccggctgtccaccagcttcaacgtgcgcacggagaaggtcagtcactggcgcgacttcctgcgcctgcattgctaccccctccagagcttcgtcgaccagtggccgtcaaacccgccgtccttcaggt

SEQ ID NO: 74284 - DNA, 274 bp, Zea mays
ccaagtaccgccccagggttcccatcctctctgttgtggtacccgtgctaacgacggattctttcgactggaccatcagctccgagggcccagctaggcacagcctgatctatagaggcctcattcccctcctcgctgagggctccgcgaaggctacggattcagagtcaaccgaggtgatcctggaggctgcgctcaagtcggccgtgcagaagcaactttgcaagcctggtgatgccattgtggctctccatcgtatcggcgtcgcctccgt

SEQ ID NO: 74285 - DNA, 273 bp, Zea mays
gaacgagatacccatcgcctctctaccttcagtataatagcaaccatgcgatccaagttcaaagacgagcaccccttcgagaagcgcaaggccgaagccgagcgtatccgccagaaatatgctgaccgcatcccggttatttgcgaaaaggtcgagaaatccgacatcgcaaccatcgataagaacaaatacctcgtccccgcagacctcactgtcggccagttcgtgtacgtaatccgcaagcgcatcaagctgtcgcccgaaaaggcgatc

SEQ ID NO: 74286 - DNA, 231 bp, Zea mays
gacgaggagaagctcatcatccacctccactccctcctcggcaacaagtggtccgccatcgccaccaagctgcccggccggaccgacaacgagatcaagaactactggaacacgcacctccgcaagaagctgctcgccatggggatcgaccccgtcacgcaccagcgccgcaccgacctcaaccttctcgcggccggcggcttcaccaacctcctcgccgccgccaacctc

SEQ ID NO: 74287 - DNA, 271 bp, Zea mays
cgacgacggaaacagtagtgctgccagtagagctctcagaactcgggaaaaaaatgtcagatgccgccgtgcgtgtgatcggcctatggcgagcccgttcgtgatccgcgtcctgatcgccctgaagctgaagggcgtcgagttcgagttcgtggaggaggtggtgggcaggaagagcgagctgctactcaggtcgaacccggtgcacaagaagatccccgtcctgctccaccacggcaagcccatctccgagtctctgatcatcgtccag

SEQ ID NO: 74288 - DNA, 269 bp, Zea mays
gatatattgaaggattccgttccacaacttatttttgccccaaatgcgggtgtggctgcatatcctagttggatgccaactattgaaatgataaggcagactgggattcctgcaatctttacggacttctgtgaagaagctgcacatctagcatcctgctgcataagctccataactggtcaaccccttaaaattccaatccaggtaaatcctttcaggcagccagttgcagcggaaaacaatgcattatacgtaccatgttattcaaa

SEQ ID NO: 74289 - DNA, 269 bp, Zea mays
atatttagctagctctctctataaaacactcttcactgtaatagtatacatctagtccaaagaatcgcatgcagctacattggaagcagcatccgcattggaccattggaaagaattacatttaaccctctccatacatacatggtactacttcgccagcttacgttcttcagtcgacgtactcactcacgctaatcagaggtggaggctggtcaggtcttcaggcacagcccctccccgagaacactgaagaacacgctacgctctat

SEQ ID NO: 74290 - DNA, 263 bp, Zea mays
  unsure (1)..(263): unsure at all n locations
cggctcgagattctgaagaaggcgaccaagttggcgagcgaaggcnaggcccgtcgctttaaagcaaggctagttgcaaaaggttttagtcagattccatgaattgattactctgatgtctattctcctgttgtcaagcatagttcaattcgtacctttcttagtcttgttgctgtacatgactatgagcttgaacagttagatgtgaaaactgctttcttacatggtgatttggaggaggacatttatatggaccagccaga

SEQ ID NO: 74291 - DNA, 260 bp, Zea mays
agagtttgcaatgtctggcatttatactgtaaagagcgatgtatacagttttggagtggtaatgttagagctattgacagggcggaagccactagacagttccagagagaggtcagaacagtctcttgttagatgggctacccctcaacttcatgatattgatgcacttgctaggatggttgatccagcattaaacggaatgtacccagctaaatcactctctcgttttgcagacgtaattgcactctgcgttcagcctg

SEQ ID NO: 74292 - DNA, 256 bp, Zea mays
accggcgaagagcggtgttggatcgcgatggtaggcgagctcgaggtagccgtgatgtgactgttgtggaatcccggagtcagccttctagctcgaagggaagggaggagtcctcgagttcgtcgagaggcgggtcaaggagaagcggcagatggtcatcgtggtgggcgagggtgctggggcaggagctgatcgggagaagtaggaatttcgtggagagccaagacgcttgtggaaacaagtggttctggatgtc

SEQ ID NO: 74293 - DNA, 262 bp, Zea mays
  unsure (1)..(262): unsure at all n locations
aagcatgtgggattggagggngtattgggggtgtattaagnggccttgttcggttatttccaatacatatgggattgggatgagattnaaaaaaattggagaagaagtttgacttgtttaggattcaaactcatctaatctcantcaatccacatggattgagagctaaccgatcaagggcgtaagtaaattttgactagttgtgggatttatttcctctcaanccanatggatttggaaaaaaatgannatcataatattt

SEQ ID NO: 74294 - DNA, 313 bp, Zea mays
  unsure (1)..(313): unsure at all n locations
acgtcgcgatgcgaggcgtgaggtgaagctgcgggaatgtcgngctgcggagcattggatgaggacgccatggagtgcaggtgcaaggagtttgaggagaagaaggtcgtggagatcagcaaggacttcgagctcgaggagagcgagcgaggaggaaggaaggcccgtgaggaggaggagaaggagtaggagaaggttgggcaaggctctcaagaacgtcgtcggcgagaaggtcgagaaggttgttgtcagctagaagctcggcctctccccctgggccatccgtagcggcaattcggttggtctggcaaga

SEQ ID NO: 74295 - DNA, 201 bp, Zea mays
tcttcagataatcgttcttggcacgggaaagaagaagatggaggaggaattaatggagctggaagtgaaatatccaaagattgctagaggcatagcgaaattgcaatgtgtccattgggcacatatgatgtttgctaggtctgacttcagtattgtcccaagtaggtttgaggcatgtggtctcattcagttgcaagggat

SEQ ID NO: 74296 - DNA, 265 bp, Zea mays
  unsure (1)..(265): unsure at all n locations
catgcttcatggggtatttgaagctgccagttttggctcgtgtccactatccctcctactgcatnggangattacaagtgtaaacgtgaatctagattcccagcgcaggtgaggatctgcattacggagctgtgcaagccgttggaagacgattccttcaggccagttttgcaccattatgatgggccaaagttccgcattgagctctccatcgcggagacattgtcactgctagacctatgcgggaacgaagcatctgagctgt

SEQ ID NO: 74297 - DNA, 178 bp, Zea mays
aatcgataattgatgatgtattgaagaacagagttttgaactatggagcagtttggaagttttacatgactggaaaaaaaaagggagatgggattgtagcttttatgagcactgctactagtaatgttcacatagcatggctctgtaataatactgttgatcaccacatccacaagca

SEQ ID NO: 74298 - DNA, 274 bp, Zea mays
ggagaagtatgaaccacactatgattacttcactgacaatgttaacactgtccgtggtggtcatcgctacgctactgttcttttgtacttaactgatgtaccagaaggaggggaaacggttttccccttggctgaggagcccgatgatgctaaagatgcaaccttgtcagaatgtgctcagaaaggctttgcagtgagaccacggaaaggtgacgccctccttttcttcaaccttaacccagacggcaccaccgactcggtgagcctccatggt

SEQ ID NO: 74299 - DNA, 265 bp, Zea mays
gtttatctcagcaactaattacgtgtgaattgactgcattcatcatggctaccaaagaagaagctagcgctgtccccgccgccagtaaaacttcatggagtagcttcctgaagtccatcgcatccttcaacggcgacctctgctctctcaccgcaccgccgttcatcctctcaacaacctctcgcaccgagtattctgcgtactggtgcgaacatcctgcactcttcgttgcccccgcacgtgagcccgatcctgcgaagagagc

SEQ ID NO: 74300 - DNA, 261 bp, Zea mays
taagaagttaaagaacggagaaacagtcgatgccagcgcttacattgatgccgtcgtggagacaattgagaccactaacattgttgcccagaccgcagaaggggatcccaacaactgcgtcatgctgggtggtcatagtgacagtgttgcagagggccctggcatcaacgatgatggatctggttctctgactctccttgaagtcgctactcaactcacacactaccacgtcaacaattgcgttcgttttgcttggtgggc

SEQ ID NO: 74301 - DNA, 263 bp, Zea mays
  unsure (1)..(263): unsure at all n locations
ctccagttccgctggtgcctccaagacttgtccatgagagtaccaacttggctggctacgaagttccagccgggacacagatgatccataaatctgtacggatgcaacatgaacaagagcgactgggacgcgcccgaggaatggaggccagagaggtncctggacgggagcttcgaagttcgctctangtacaagaccatggcattcggcggaggaaggacggctgtgcgggaagcatccaggcagtgaacatcgcgtgcaca

SEQ ID NO: 74302 - DNA, 253 bp, Zea mays
caagcatgatcccaaaaattatcaagactggttttgcagcaattcatctgatatactttttcactgctggtcctgatgaggtaaaatgttggcagatcagacgccagactaaagctcctcaagctgctggtgcaattcacactgattttgaaaggggtttcatatgcgctgaggtaatgaagtttgaagacctgaaagaactgggcagtgaatctgctgtaaaggctgctggaaaaataaagcaaggagggaa

SEQ ID NO: 74303 - DNA, 254 bp, Zea mays
ccggcggggccatctcggccatgtccagcctgtggatggtgccctgcctcatgatcctgggcctatcggaggcattcaacctcatcagccagattgagttctactacaaggagatcccggagcacatgcggagcgtggcgggggcgctcgcattctgcaacctggcactcggcaactacctcagtggcttcctggtgaccatcgtgcaccggaccacggggtccgggcagaactggctggcgcaggacctcaac

SEQ ID NO: 74304 - DNA, 176 bp, Zea mays
aaaagatggaaggaagcgagaacagtgaagagcaatttatgaagagttttgaggagaaaaaagatgccatgcttagctcgctatggaaaattaatgtggttgatattgagtcaacactttcacgtgtctgccaagcagttctgagagataacacggtctccaaagatgtcctgaag

SEQ ID NO: 74305 - DNA, 258 bp, Zea mays
acgggctcggcggtgcccaagttcggcgactgggacgccaacccggcgtcggcggacggctacacgcacatcttcaacaaggtgagggaggagaagcagacgacccacgcggggaagccagcggcgtacggcaaggacggcatgcgtaccaacggccccaagcagcacgacgacgacggctacgtttcatcgaatctctcgtgcttagggtggtgcaagtagagagcgattgcctgatgaatggtgacgatggatgga

SEQ ID NO: 74306 - DNA, 254 bp, Zea mays
acacagtcatcagggcccgcagagattcagggttcatcaagaagattgctatcaattacttgtatgctttccttaggaagatctgcagggagaacagcgccatcttcaatgttccccatgagagcctactgaatgttgggcaggtgttctatgtgtaagcactaaaaccaaacacatgtagtagatgtcagttcagcttcggaacttctggagagaatctagctgtgttttgttcataggtaataggagtataa

SEQ ID NO: 74307 - DNA, 250 bp, Zea mays
acaagcatttccgaacgggtggaagggtgagaagggcctgtactcggttgggttcacccggcgtggactgatgggcacctcggtcgatgccaggagggttgcccacgacgtcgagcagcaatggcggaaggccaaagggacgcatcgggacggcgttcctctacctctggtcgctgttgtttaccatggtgatgggttgtgattgtgagttgccaaagggtgtatgtacgtacgcatgcattctgctgct

SEQ ID NO: 74308 - DNA, 247 bp, Zea mays
tcgagcttcgataaagatgactgggagcactcaaaaaaattgaccactctagatctgtgccaggttgcaggggatgacttgttgatgtctgatcctgaacgcattaagcgggcagttaatgagtacacttgcaacgctcttgttctcaaggcaaatcaagtgggcactgtcactgaggacctagaggttgtcaagcaggcaaaggatgctcattggggtgtgatggtgtcacataggtcgggagaca

SEQ ID NO: 74309 - DNA, 251 bp, Zea mays
gatcagacggtatgggctttggccccctgatactaacagagggtgaacggtccttagttgagcgtgtacggaaggagctgaagaacgagcttaagcagggttacaaggaaaagcttgtcgatatcagggaagagatcatgcgcaaacgcagggctgggaagcttcctggagataccgcatctgtacttaaagcttggtggcaagctcattccaagtggccgtacccaactgaagacgacaaggccagactg

SEQ ID NO: 74310 - DNA, 254 bp, Zea mays
ggcgcccatactgaagaaggctatcgcgaaggaaccacgggtagctgcctcccttctcaggctcctgttccatgactgctttgtccagggctgcgatgcgtcggttcttttggatgacgatgaggaagtcgtgagcgagaaaaacgctatccccaacaaggattccattagggggtttgaggtcatagacgcgatcaaagctgcactcgaggaagcatgtccgcagacagtgtcctgtgctgacactgtcgccc

SEQ ID NO: 74311 - DNA, 247 bp, Zea mays
ccggcggggccatctcggccatgtccagcctgtggatggtgccgcagctcatgatcctgggcctatcggaggcattcaacctcatcagccagattgagttctactacaaggagatcccggagcacatgcggagcgtggcgggggcgctcgcattctgcaacctggcactcggcaactacctcagtggcttcctggtgaccatcgtgcaccggaccacggggtccgggcagaactggctggcgcagga

SEQ ID NO: 74312 - DNA, 247 bp, Zea mays
tcgagcggtcctcgtctccgccgtcatcctgctgtgccgggactacatcagctacatcttcaccgagggtgaggacgtgtcgcaggcggtctcccggctcaccccgctgctggcgttcacgctcatcctcaacggcatccagctccagcccgtcctctctggggtcgctgtggggtgtggatgccaggcgttcgtcgcgtacgtcaacgtcggctgctactacatcgtcggcatcccgctcgggtgc

SEQ ID NO: 74313 - DNA, 247 bp, Zea mays
gcgcgctgtccaacctccggacgctggacgtgagcttcaaccagatctccggcgccatcccgccgtccgtcgccgcgctgccgtcgatcaccaacctcatcctctgccacaaccagctcaccggcggcgtcccgtcgttcccggactcgtccccgctgctccggctggacctcaagcacaatgcgctcttcggcggcgtgcccgccctgccggccgggctgcagtacctgtcgctgtccgcgaacaa

SEQ ID NO: 74314 - DNA, 248 bp, Zea mays
cgtcaccgtcgaccgcctcggccgccgcaagctgttcctgcagggcggcacccagatgctcgcgtgccagatcgtcgtgggcagcctcatcggcgccaagttcggcttctccggcgtcgcggagatccccaaggggtacgccgccatcgtcgtgctcttcatctgcgcctacgtggccggcttcgcctgttcctggggccccctcggctggctggtgcccagcgagatcttcccgctggagatccgct

SEQ ID NO: 74315 - DNA, 270 bp, Zea mays
ggcctgctcaggaacttgtagagaagcctttttttgatacgattgctagagctttgacgcctggaggcgttctttgtaatcaagctgagagtatgtggttacatacacatttgattcaggatatgctttcaatttgccgtgaaactttcaagggttctgtacgctatgcatggacaagtgttccaacatacccgagtggggtgattggatttttactatgtgccaaagaaggtccattggtgaactttctgactcctataaatccaattg

SEQ ID NO: 74316 - DNA, 267 bp, Zea mays
gtgccgttctcggaggatgacttgcccaagataccctacctgagagcggtggtgctggagggtctccggcgccacccgccggcgcacagatgccgccacgcagggtgagggaggacgtggaggtgggtgactacgtggtgcccaagggctcagcgatcaacttcatgctgtacgacctcgtcatggacgacgccacgtgggaccgcccagcgctcttcatgccagagaggttcctgcccggcggggaagccgaggagttggacatca

SEQ ID NO: 74317 - DNA, 274 bp, Zea mays
gaggatacagaactgtgcgtcaaacatggtgaacaacagagagagggagaagatttttgtagccagccaggagaaattccacgccggcgcagacaagcagtactggaaatcgatttcagatctcatcccacatgaaatagccaccatcgagaagcgggggaagaaagacaaggacaagaagtcatccatcacagttgtccagggccccaagcctggcaagcccaccgacctgtcccggatgcgccatatcttggtgaagctgaagcatgctccg

SEQ ID NO: 74318 - DNA, 275 bp, Zea mays
agcaggtctctctgattgacgtgaggcaggagataaacttctgcaagaaggtcggcgttcctgtcctaggtgttgtggagaacatgagtggcctgaggcagccgctttcagacctcagattcattaagtcagatgaggcgggcgagacagatgcgacagaatgggccctgaactacatcaaggacaaagcccctgagcttctgtcggtcgtggcctgcagtgaggtatttgatagcagcaagggaggcgccgagaagatgtgccatgaaatgggg

SEQ ID NO: 74319 - DNA, 270 bp, Zea mays
aatgcttctaatggacaagctaggtagaaaagtgcttctttcagggagttttcttgggatggcttttgcaatggggcttcaggctgttggagcaaaccgtcagtatcttggttctgcatgtgtatatctttcagttggtggcattctgttgtttgtcttgtcattttcactaggagcaggccctatcccaggacttcttttgcctgagattttccctaataaaatccgagctaaggctatagctctctgcatgtctgtactggatcgtga

SEQ ID NO: 74320 - DNA, 269 bp, Zea mays
caaaaagctgagaactctgtctggattttgggatgcttctcctatttgtgttccgtatatctatcccctctgtcatcaactaacaggcctaaacttgagttatactcccacactggattattctgatctagctaaaatggtcagccgctgtgtgaaactccagcgtctctgggtactggattgcctttcagataagggtttgcaagtggtggcctccagttgcaaggacctacaagaactcagggtgtttccatcagaattttatgttc

SEQ ID NO: 74321 - DNA, 273 bp, Zea mays
  unsure (1)..(273): unsure at all n locations
gaactggcgcaaccgaccgccgccgcggctgcggtgaccaccgctgagcaggctcaggatctcatcgacgccgctaggtacgacgacttggaggacgtagtcgccctgttctccgctggtgtctcgctggactccacagattcgcaaggccgcacagctcttcacatggcttctgccaatggtcagcttgctgtggtggaatacttgattcagcatngagcgaatgttaatgccaccaacatggagaagaacacaccactccactgggcatgc

SEQ ID NO: 74322 - DNA, 266 bp, Zea mays
caagactccaaacacaacgaacagtctatgtggttacaagattgttactgggcaaccatcagatagacttggagaggacttctcagagcattacaaagatttcacagagaggttaactggaacagaagagacggtacgagcagcctcaaagcgactaactcaggggatggcagatttcaacaaggcaatatctacagcaaaaactgacgaggaaaagactaaaattaaaggcgatcagcaaacgtcaacaaggacaatgaggtcat

SEQ ID NO: 74323 - DNA, 253 bp, Zea mays
ttttcttaagcggtaattgatgatgtattgaagaacagagttttgaaccatggagcagtttggaagttttacatgactggaaaaaaaaagggagatgggattatagcttttatgagcactgctactagtaatgttcacatagcatggctctgtaataatactgttgatcaccacatccaccagcagcgggggatccggttgccaacgaggaggcagcctcagacaagcacctgagctgcagctagcctagcaa

SEQ ID NO: 74324 - DNA, 250 bp, Zea mays
agaaaaaccaaaggcatactatagatttggcgacacaatgaaccccgatgtgtggtttgagccatcagaggtctgggaggtcaaagctgccgatctaagcataagccctgtacatcgtgctgccaatggtatagtcgatccaaataagggtatctctctaagattccctcgcctattgagattatctgccgctaaaagcccagaacaagccaccacgtctgaccaagtcgctgacatgtaccggtctcaa

SEQ ID NO: 74325 - DNA, 249 bp, Zea mays
aaaacacaccagatcaattaaaaatggcagacgaatcagctaagacatttaccttgagggtacgaaaatttatgactaatcgcttactcaatcgtaaacagatggtcattgatgtatatcatccaggccgtcctacaatcccaaaaaaagatttaagtcaagttttggcaaagaagtttaaaactactcatgacgctgtgttttgctttggattgaaaacacatttcggtggtggtaagactactggat

SEQ ID NO: 74326 - DNA, 251 bp, Zea mays
acgaggtgttcccggacgggacggtgctgaagaagggcaccaaggtgatctacgccatgtactccatggggcggatggagagcatctggggcgacgactgccgcgagtacaagccggagcggtggctccgggacggacgcttcgtgggcgagtccgcctacaagttcacggccttcaacggcggcccgcgcctgtgcctcggcaaggacttcgcctactaccagatgaagttcaccgccgcctccatcctc

SEQ ID NO: 74327 - DNA, 250 bp, Zea mays
cggctcgaggtttttcatcgtcctgtcatgcttgatatctgtttcagtgaacttcagcactttccttgtgatcggaaagacatctcctgttacttaccaagtcctgggccatcttaaaacatgccttgttcttgcttttggttatgttttgcttcacgatccgtttagctggagaaacatacttggaatcctaattgctgtagttggaatggtcttgtattcatacttctgcacagtggagacccagcaa

SEQ ID NO: 74328 - DNA, 247 bp, Zea mays
gagacttccgtcctgtcaatatgcgtcaacaccgctattctgctgtacatggtaccgctgggccttggcacatctgcaaggtgttcgaccatcagggctgaacagaagattggatgtggcaaacagaagattggagcacgcgtaaacctcggcgccttttacatggttggcattccaacagggctgttgcttgcgtttgtgttcaacctaaatggaatgggtctttggcttggcattgtgtgcggga

SEQ ID NO: 74329 - DNA, 248 bp, Zea mays
cgcggctgcagctcagcagctccagacctcaccagaggcacctaccacaccgcccgccgccgatcccgtcacccgtctcctccccgctgcggagcgtctccagccctgcccggtgcccgcccagatggcaaacgcggcgccagggatggccgtggacgacgactgcaagcgccggttcctggagctcaaggccaagaggacgcaccgcttcatcatctacaggatcgacgagaagaagaagatggtgg

SEQ ID NO: 74330 - DNA, 245 bp, Zea mays
cgtggatgtcgcgcgtgtggttcctcatgttcccagcgcgggagtacaagctcgtcgttgtggggctcgacaacgcggggaagaccaccacgctctacaagctccacctcggcgaggccgtcaccgccgcgcccaccatcggcagcaacgttgaggacgtcgtcttcaagaacctgcgcttcgaggtctgcgatctaggagggcaagaaagcctgcgcacttcgtgggcgacgtactaccgggga

SEQ ID NO: 74331 - DNA, 259 bp, Zea mays
acgatacagagaagattagcatggcccctgcgcaaggatgacacgcacaaatcgagaaatggtccaaatttttttgcggattcgcacatatgccctcggagatcgcattttgatccttctgcgccagttttcattaacaattcagtcctcgccaattcttgccggctctgtaccagaaccttttgttcgctgtttgccgattggcccttgcccttgcaaacatgggatttcgcgcactgtccctcttattatcattttc

SEQ ID NO: 74332 - DNA, 250 bp, Zea mays
aggggctcggcggtgcccaagttcggcgactgggacgccaacccggcgtcggcggacggctacacgcacatcttcaacaaggtgagggaggagaagcagacgacccacgcggggaagccagcggcgtacggcaaggacggcatgcgtaccaacggccccaagcagcacgacgacgacggctacgtctgatcgaaattctcgtgctttgggtggtgcaagtagagagcgattgcctgatgaatggtgacga

SEQ ID NO: 74333 - DNA, 255 bp, Zea mays
gcagaattggagcagggggaagcattaaggtatctttataggtggcttcagaatcaaccacaatatggtggccttgtccctctgcagtcaactgattcaccttatggtcctgatgttgttagattgttctcgtgaagctgctcagatgtcacctgaagatgcagatgttcatatagttctcggagtcttatataacctatcaagagagtatgataaagctatagcttcatttaagacagcactacaactcaaacc

SEQ ID NO: 74334 - DNA, 252 bp, Zea mays
caggtttcaagagtggaattgttggacgaggttcagataaaggcaataaatatggcaaatggcaaaaattcaccggaactgccgaccttgatgtttgaattcatagggacagaagcatatgctctggagcaaactctcttggttcaaaaaattgccactgaacaccatggatcagatcttcgatcggtcgaggagccagatgctaaagcggaactatggaagatcaggaaggaggcactttgggctggtttt

SEQ ID NO: 74335 - DNA, 249 bp, Zea mays
acacagtcatcagggctcgcagagattcagggttcatcaagaagattgctatcaattacttgtatgctttccttaggaacatctgcagggagaacagcgccatcttcaatgttccccatgagagcctactgaatgttgggcaggtgttctatgtgtaagcactaaaaccaaacaacagtagtagatgagagttcagcttcggaaccactggagagaatctagctgtgttttgttcataggtaataggag

SEQ ID NO: 74336 - DNA, 244 bp, Zea mays
ggttcacggggaagctgccgcggacgtggttcaagtcggtggaccagctgcccatgaacgtgggcgacgcgcactacgacccgctcttcccgttcggcttcggactcaccaccaagggcacgaagtgagtgagtgtgaggcgctctgatgggatgtggcctgtgagtgagctgtgtatgcgtgcgcgggcgtgaggctctttggctttcgaattggttgggggtgacgggcggcgagtcgtgta

SEQ ID NO: 74337 - DNA, 264 bp, Zea mays
tattaagataaccaacaggcgtgtaaatgccattgaacatgtcatcattccccggattgaacgtactcttgcttatatcatcacagagctggatgagagagagcgagaagagttctataggttaaagaaaatacaagagaagagaaagattctaaaggaaaaatctgagaaggacttggagcttttgagagcagctggagaggtgttggagcctgctaatcttactggctgtgagaggacgaggaccttctatttgaataatct

SEQ ID NO: 74338 - DNA, 267 bp, Zea mays
  unsure (1)..(267): unsure at all n locations
ggaaacataatcccccaattttgctctgatacaggccctgaccgattatcctcattgaaaagttcaaagatgtaggtgcttggctgattattcggttggctgggagtaccagaattgttcagtacatgatgtatgaggtttgtattataggccaaagcattatcaacagtagcagccttctcacttggcccaacacgccatggcccatcagaagctgtgactataacaggaatgccgtaaaattcatgcttngattgagttgtagta

SEQ ID NO: 74339 - DNA, 286 bp, Zea mays
  unsure (1)..(286): unsure at all n locations
cacaaatatacttctttactacggcttgcttgattaacgttggtgtcgcaaagctgacccgatacaatacacaaaatgagcgaaatcactcggctaaaaagcaccatctatgtgggcggcctcgatcaagctgtaacaacgcaaactctcacagaagccttcctgccctttggcgaaattgtcgatgtgtcgttaccanagccagacctgccatcgtcaaccgataaccaccgagggttcggatatgtcgaatttgaagtccggcaagacgcaaaggaactatcga

SEQ ID NO: 74340 - DNA, 304 bp, Zea mays
tgtggccagcacaccaagatttgtcggggtgatatagagctcatcgcttcttggagacaccaacggtctttccacgcctgccagtagtcttggtgtgctggccacggacacggaggccccagtagtgacgcagaccacggtggttcctgatcttcttgagcctctcaaggtcgtccctgagcttcatatcaagggcgttggagacgacctgcgagaacctgccgtccttgtaatccttcttcctgttgaggaaccagtccggcaccttgaactgcctagggttggccacgaccgtcatcaggcg

SEQ ID NO: 74341 - DNA, 191 bp, Zea mays
gtatagtcggtctcggtcggcgtcagccctcccttgcttgccgatccctaccgctccaaacacccgccagggctgagagctcgactcgagatatggccgactggggccccgtggtggtggcggtggtgctgttcgtgctgctctctccgggcctgctgctgcagctgccggccaagggcgccggccgcttc

SEQ ID NO: 74342 - DNA, 257 bp, Zea mays
cgcgccgcttcccaagccgccccagcagcagcgcgacggggagaaggcacaggaggaggaggaaccgatgcctttcgtgtatccggaccccgtggaggtgggcgagctcacgctcgagcagctcagtgcgtacgacggcaaggacccagccaagcagatcctcattgccatccggggccaggtctacgacgtctcccgcgggaggctcttttatggccctcagggaccatattccttgtttgccgggagggatgcaa

SEQ ID NO: 74343 - DNA, 297 bp, Zea mays
  unsure (1)..(297): unsure at all n locations
ggcagtcaggcccttcttcggcggcgggcggcgagggtttggaggagggcggtgcgcaacgcaacaccctagctctgcggcggcgtattctcttcaagtggctcgctgccttgccgaccccgcgagcgcaatgagggtgaaagtgatttcgcgccccaccgacgagttcacgcgctacgcagtctgngactgcagttttaggggtgctgatcaccagtgggatggtaatctttttgcaactgttggtgctcaagttgatatatgggatcctgacaggtcggagccagtacatagctt

SEQ ID NO: 74344 - DNA, 299 bp, Zea mays
caaactaaaccaattttccgtaaaaaggccaagaccacaaagaagattgtactcaaattggaatgtagtgaatgcaaataccgcaaacaagtctctttgaaacgtaccaagcatttcgaaattggtggtgataagaaacgcaagggctcaatgattcagttttaaactgtttcacatttttgaccaatcattcttttttttgtcattcaaatttgctccatctctacccactgttaatagggaaaaatgggtaattgggccaggattaccatccacttataacttcaaggattttttta
